United States Patent Application Publication US 2026/0103690 A1 - sequence listing, part 15

SEQ ID NO: 59602 - protein, 315 aa, unidentified
MERHLATPSFVGIDVSKDRLDVHVRPSGQSFAALRDSKGLEQLVGQLRQLPPALIVLEATGGFEVTVAAALASAGLPLAVINPRQIRDFARAMGRLAKTDALDAQVIALFAERIRPEPRPLADADSQSLAELVARRRQVVEMIGMEVNRLHQARSSRVQRMLRTTLKTLTAQLAQLDHDIDEIIKRSSLWRAADNLLTSVPGVGDVTAHTLIADLPELGQLDRRRVAALVGVAPVNRDSGQLRGKRAIAGGRIGVRNALYMATLSAVRWNPVISKHYKGLVDRGRPKKVALVACMRRLLGILNAIMRTNTPWQCA

SEQ ID NO: 59603 - protein, 403 aa, unidentified
MNNVAGIDVSKGKSMVSVLRPFGEVVAKPFSIGHTGSELKELADYLKSLDGETRVVMEHTGRYYEPVARFLHDEGVFVSAVNPKLIKDYGNNTLRKVKTDKADSRKIARYGLDNWAELRQHTPMDTIRMQLKTLNRQQSLYTKTKTMMKNNLIALLDQTYPGVNALFDSPVREDGSQKWVDFAMTFWHVDCVRNMSLTAFAERYRKWCKRHGYNFSQSKAVEVHAGAQDLIAMLPKDALTKTMVRQAIDALNAVSASLERLKAEMCTLAAQLPEYPVVMAMHGVGDSLGPQLMAELGDVTRFTHRNAITAFAGVDPGADQSGTHEAKSTRVSKSGPPELRRALFLVMDCLLKTQPQDDPVYRFMDKKRAEGKPYLVYMTAGANKFLRIYYGRVKEYLASLEGN

SEQ ID NO: 59604 - protein, 364 aa, unidentified
MDVHLRSTTVCALDAETGEAVTRRFRGNPWGEVAEWMSGFPGPSLAAYESGYLGFAPQRELSGLGVDCVVAAVSKVPRSAADLSSKNDRNDAARMAKAILSHDVTPVWVPSPEIEGLRDLAAAHDAATARLAAAKQRLLAFLARRGYVYGGTTPAGNPRKYWTYGFLRWLDGIHPADDGGIRALAALRNEVEAADETREALLAEYRAAVAAGPLSAEVEALQSIKGCGFALAAAFASEVGDFSRFRSGRQVTSYFGLAPKQRSSADSVRLGGISGAGNALVRKLAVEGSWCYAQAGHQPKLMPKGSGVPLEIRMHGRKGSERLLRRREEMIARGMPQAKANAATAAELVRWLWALGTMCREGAE

SEQ ID NO: 59605 - protein, 422 aa, unidentified
MVLKGVPMALKIVYQICCGIDVHKTFVVACIASTNKQGVTTYKRHRFSTFTQGLKELLQWLLDNHCKDVCMESTGKYWIPIYNVLKKDCNIVLAHPKYVKAIRGKKTDKKDAKWIADLFKHDLVAGSFMPPADIRQLRDLMRYRFKLTCFMSSEKNRLQNCLTVSNIQLASVVSDTFGKSSQRILDKILENPDDTSFDIEPLIHGSMKKKLPELELAIDGFITPEQAGKLKVIKKHFEDLESRKAELEKLILALASPYQQELDLILTAPSFKNKFTAIGIISEIGVNMEAFPSAKHLCSWAGLTPTNNESAGKKKSVRVSKAGCYIKPLLVQCANSVVKSEKHPEIRNRYLRLRKRRGHKKAIIAIARMLLTALYNMLKNKEPYNAELYRKSDVLPVNREITIEQAILMAQFQGYKIKSAAE

SEQ ID NO: 59606 - protein, 355 aa, unidentified
MSKFDDLSRSFTPFEPSNTLIAAVEMGLSSWIVGAILPGVTRHPLKKLDANPESLLKTLHRWRNEAISAGREVTRIVLAFEAGRDGFWLARWLRGRGVEAYVIHAASVAVSCEHRRAKTDRIDVELLKRAFLGWLRGESDHCSMAAIPTLAEEDAKRPHRERQNLVSERTRIVNRMKACLVRLGVRGFNPALRKAEERLETLRTPEGEVIPPNTLAEMRHDIARLRFVMGQIREIEAARLQRLEQAPDRGPHAMVLLLAKVMGVGIETADMLVHEILSRNLRDRRAFARYGGLTGSPDESGKRRREKGVARSGNPRVRRSMIQLAWRFLVFQKDSPLAQGIGASPRTGAARHARR

SEQ ID NO: 59607 - protein, 337 aa, unidentified
MADAYMLAIDLAKRSFQVCATDRAGSVLYNRAMSRAKLEVLLKERPACIVAMEACATSHFWGRQAQAAGHEARLIPPIYVKPFVKRQKNDASDAAAIGEAARRPDMHYVAVKSAEHQGRAVAYRTHQCFVAQRTQTINALRGHLAEFGLVFPQGTPHLKEIHAAVQDDTIDLPDNVRDVARLYLDHIDVLTVHIDQLLLKLREAMLVNAEMRRLCTVPGIGPVTAGAIMAFAPDLHTFSNGRNFAAWLGLVPRQRSTGGKAKLGSMTKMGQSDIRKLLVVGAMSRIRWIVRKGVLPDNWLGRLMGRKPRMVVAVALANKMARIVWAIMTREENYQLA

SEQ ID NO: 59608 - protein, 378 aa, unidentified
MYRIIKIGMDVHSTNYTLCAMEPVIGAEDRIFANIKVTPDYKNVLMFIENLKLKLGLNDTYDIECGYEAGCLGYSLYNQLTAAGVRCVILAPTTMLTQQGQRIKTDARDAVMIAQCLSHGGYHPVYIPTEEDDSVKEYLRMRDDHKLALKKVKQQINAFCLRHGHRYEKTKWTIAHLKWLKQLELSALYRETLDEYMASYDEQTAKIERFDKRIEELASQERYQEKVKKLGCFLGIKTHTALSLIVETGDFERFAKGNVYAAYLGLAPGERSSSDSINRLGITKAGNQHLRLLLIEASGGICKGAVGHKSKDLRQRQNGNPADVIAYADKANTRLRSRYYKFIRHGKKRNVAVAAIARELACFIWGMMTDHIQMQKAA

SEQ ID NO: 59609 - protein, 348 aa, unidentified
MLADQLDYVVGVDPHRDSHALAVVQVLTGAVVFETTVAASSQGYVQALEVVDEHASGRRVFAVEGTGSFGAGLTRFLSGRGERVLEVSRLRRERCSGGKTDALDAVRAARSVLGQERPATPRAGGERQALQALVAAREGAVNAKCAGLAQLRDLLVTTPEPLRSELRPPTQAPLLRRLAATRPEGRRDPELRGSMLALRSVARRVLQLQAEQRELGRQIEALTRKLAPQLLDQPGVGPHAAAQLVLSWSHPGRIRSEAAFARLAGAAPIPASSGQTVRHRLDRSGDRKLNRALHLILVTRKRTHPPTRAYIERRIQEGKTRREANRCLKRYLARSLYRLLEHGPPIAT

SEQ ID NO: 59610 - protein, 483 aa, unidentified
MAKSNKKIPQHIGGSKGNLLANRLRSINLEKVMIVPMEIGKSDHKALMADYFGSILKEPFEFHSSQEGILFLHNTISKVSREYQMEEVILGMEATSHYYKKPAASIHELGYNNLFILNPLSTAYCREAGLTWSKTDDIDLRAVGQALLSGYGTIYRPEEPVWENLRQLARFRRFQVKHQTALKNKIHVMLDNLLPGIAELGMFKDSYLWHHASLEFFAKYPDVDLISRLRPPYIVKFFRRRGRRLSPEDGHQLIRWSSQTFNQDSPADSTREMILKSLLSELKQLSENISQLEVKLLGYLVQIPAVLLLSIDYIGPIRASEFAGEITPFDQYPKSRALIKGAGLDPTRFQSTTRESANHHTSGKGSRNLRYISIDIGNALMRHNDYFAFFANRLMERGKSKDCACVAATTRFMRVAFWMIKDQKPFQPPGGLGISKDPLAKIELFLKQRHASDKIEEYVNPVRCLLSNGVNLAKRYFPPKEVH

SEQ ID NO: 59611 - protein, 438 aa, unidentified
MPMTFARLLDPCFEDDDDPFRHYDVRGEPLEDRLYLPCGIDPHKKVCYAAFVHPLPHRQEILTHRRIPNRDLQAALWLVQEGKRLAHQFKATPIYVFETSGPYWRPYRLFLHQLGLPTATVSGRQTKRARGTGTRKTHNDLKAAYLIAKVFKQGESHASRIPPEPIASLREYARLHFFFVKYSVAIQNRMFDIRYQTHPGFDDLLSKPTIPTALALAKEELMHPVRLLQADHDELVQTLRRASRGKLGDQLADALHHSALTAFYAPYAVDALSFNLRMLAEAYDHIHRHILPPLRARMDDCLNRLPFEQYLPEMPYVGPVTTGTFLGELGLPSWFKTVDSVVAWFGFDPSLSESADHETGTSHLTKRGTKYGRRIWWLVARNWSRYVSQGRRMFKKEFYVHGLSYDGAICVIAAKLVRIAFAMVRDGTHFDMSKAFPG

SEQ ID NO: 59612 - protein, 350 aa, unidentified
MVMIGVDAHKRTHTLVAVDEIGRKLAERTVQATSDGHLAALQWAGQWTAVSFAVEDCRHMTRRLEQDLLRAGLPVVRVHTRFMATARRAGRQPGKSDPIDALAAAHAALREPDLPVAMLDGPARQVKLLSDYRHDLVTERTKVINRLRWHLHELDPELTIPPRGLRSYRTMDAVAHRLNSFEGTVARIAGDLLDRCQELTRQVNQLERELRDLVQALAPSLLEVPGCGVLSAAALIGETATASRFRSKDAYARFTGTAPIPVWSGNTTKVRLNRGGNRILNNALHTIAVTQTRSNGPGKDYYDKLTARGKTRKEALRLLRRRLSDVVFRALLTDERARAQPAPAALQAAA

SEQ ID NO: 59613 - protein, 362 aa, unidentified
MRIIGCDLHARQQVLAMLDTTTGEVVNMILKHEGNNVREFYSSLPRPVLVGIEATGSMQWFINLMEELGIECLVGHPAQIRAAEPRKQKHDRRDADLILKLLAENRFPAIWLPSKELQDLRSLLRHRHQWVRMRTRIQNALQSIALANGLRRGTALWSHDGQTQIASLPLAPHTAYRRSELQAMYEKFAAEIEKLNQRVEEQACQRSGARLLMTHPGVGPITALATEVFLGDPARFADSKALASYVGMIPREYSSGGRQRLGGLSKQGNPLLRFLWGEAGAHAARKDPELQRFYRRKLVQKGLGKASVAVARQLGIRLWIMLRDQIEYNEFCRRGQKQQKSSEACAGMPETPYGAKSHWPVD

SEQ ID NO: 59614 - protein, 342 aa, unidentified
MEVDILGIDLAKRVFQLHGADVRGRAVYRNKVSRAALIETVRVLHPRMIAMEACGSAHHWARRFQEAGVEVRLISPHYVSPFVKTNKNDRNDAEAIVEAASRPSMNFVAVKSVEQQDMQAAHRVRELLVQQRTAITNQARGLLGERGIAIAQSPAAFRRAIPEILIQSEGELTSFCQSLIMTLVQHLRALEEEIAVADGWIRSFMNRSALCQKIAAVPGVGPITATAIVAAVGRADGFRNGRHLAAWLGLVPRQHSSGGKSQLYGISKRGDKYLRTLLIHGARSVLIRVSAKLDARSRWLQKLIERRGFNRACVALANKNARIIQVLLSTEATYQPVALVDA

SEQ ID NO: 59615 - protein, 343 aa, unidentified
MKHAKTIGLDVGDKAHAVCVLDAEGNVELRERITNTSAALQKFFSGYTHCVVALEASTHSPWISRELTRLEHRTLVAQPRRVRLISDDEQKCDERDAEHLARLARVDPQLLHPIRHRGEQAQADLASLKARDGLVRARSLLINLARSLVKGLGARLPACSAEAFARKAAEAVPALVKPAVEGLLTTVAQLTQQIQAYDRQVQALLTRYPEAERMDVIPGVGPLTTMGFLLTIEEPQRFRKSRHVGPFLGLVPRRDQSGNTDKRLGIHKRGNAFVRRLLISCAHYILGPHGPDTDLRRFGLRLAERGGRHGQRRAVVAVARKLAVLMHHLWSTGAPYAPLRQAA

SEQ ID NO: 59616 - protein, 340 aa, unidentified
MHPYFVGLDVHKQVIAYCVKTESGEIVKEGQIKATRAELDQWVQTLAGPWCGGMEATMFSHWIYRHLAPHAAKLLMGHAARMKAICAGNKKSDKIDARTIADLLRCNLFPACYVIAPELEALRQQMRFRRLVVEETVLFKNKTAGLLMAAGVEYERRRLHGKRYFGQLLRTSEWIGEQLRPLLEFNRSQIETLQQMDGRLLRMLERHPQLEARIAQLQGIEGVGPVTALTWALEVGTPERFGSIKQAISYCGLASALRESAGQQKRGPLSKQRNRHLQSVLIEAAKIAPLYSEKLRQIHDKACQSGHKNRATLVVARKLVAYLLAADRMFFARQTAGLAA

SEQ ID NO: 59617 - protein, 454 aa, unidentified
MSKKRGKRQKKVRDLDALEQINLNAAGIDIGAEEVYVAVPKGRDDESVRSFLTFTADIQQLADWLAKCDIETIAMESTGVYWIPIYEILESRGFEVYLVNARHIKNVSGRKSDVLDCQWIQQLHTYGLLQPSFRPPEHICAIRSIVRHRDMLIKYRSAHIQHMQKALTLMNVRLTNVLSDITGVTGMKIIRSIVAGEHNPEVLASYRQQGCAKNQAEIAKSLEGNYKREHLFALQQALDLYDFYGQQLHDCDVELEALYQDFDLPDEPCTPPPDPRKTKRRKNQPYFDLGQSLYRMTGVDLTQIDGLDTLTVQDILSEIGTDMNQWPTVKHFASWLRLSPNNKVTGGKVKQRGTLPSKNRANTAFRMAAQSLARSDCALGAFYRRIRARHGGPKAVTATAHKLARIVYFMLKKREPYRDPGAYYYEEQYRIRAIRNLQRRASKLGMRLEPVGLT

SEQ ID NO: 59618 - protein, 382 aa, unidentified
MENPNIVFIGMDTHKESSSISYVLDGFEHSPKHLGKIPSNRKSLEKLVRQMQSKYPNATLHFVYEAGPCGYWMYRLLSKMGQNCYIVAPSLIPKKPGDRVKTDKRDSLQLAQLLKNGDISPIYVPAAEDEAIRDLSRARERSMKDLNDARFQLKALLLRNHVQYKGTANWSIKHMRWLTDIILPYPAQQMVLQEAIQTVVERQDRLDRLDNELSYHVKQWRYYPVIKAIQAMRGVALIVAVGVIAELGDLTRFDHPSKLMSYVGLTPSEHSSGPRRRLGGITKCGNTRARRLLVEGAHGYRYAANISKEMQKRQESLSKEVIGIAWKAQLRLCKRYQYLMKRGKMQNVVKVAIAREMIAYIWEIAREVPLRKEELSIVRIPS

SEQ ID NO: 59619 - protein, 349 aa, unidentified
MTMVGGFDVHRKQITFDYVDDDGLVRWGQIRAATRKRLRCWLGEHCPEGGAEFALEGCTGWRYVSEELAAAAVGVHLGDPAEIAGLRGPKKRAKTDRADARLLRTLLLEGRFPESWVPPAHVLEVRTLGRLYCTLMDERRAWQQRIHAQLFHQGCPPITALLSAAGRDALAHAELSAAGRQYVDTALRRIDELSTEIDPLRTQLVNFARHQRGCQALQACQYGIGWLCAAIIWAEIGDARRFARSDKLVRFAGMDVTVYSSDGKRSPGHLSRQGSPGLRWATFEAAKCAARRSSPDYAYYHKVAARPHSGKNPTLAVERKILRRCYHTLRELGDAAMALPDAPPQEVAA

SEQ ID NO: 59620 - protein, 317 aa, unidentified
MEVSLIFVGIDVSKAQLDVEIRPTGEKESVANNKVGIKAVVNRLAKIKPTLIVLEATGGYERQVTRALASAELPVYVVNPRQVRDFAKATGQLAKTDSIDAGVLAHFAEAVRPQLRPLPDVVTLELRALTARRRQILEMIAAENNRLAMTSKAVRKRIDAHVRWLEQELDRANQELDRAIEQSPIWKENDDLLRSAKGIGPVTSRTLLAELPELGTLDRKQISALVGVAPFNRDSGSLKGRRSIWGGRAPVRCALYMATLVATRRNSVIRDFYKRLLAKGKLFKVALVACMRKLLTILNSMIKHKTSWSETFSRQTT

SEQ ID NO: 59621 - protein, 315 aa, unidentified
MTDNVYKFHVGIDVSKAKLDVALSNNNSLFQFPNSEEGLKDLLALLPAKKQTLVILEATGGYEKAAANYLRKKKFAVAVVNAKRVRDFAKASGKLAKTDGIDAKTIMSFGKAFNPTPQPVVSEKENQRQENISRRDQLVRLIVMEKQHAEHASDAIKKSINKHIGYLEKELAQIEEHLKDLFNQDAELKDKMERLDEIKGVGEITAMNILIHLPELGKLDHKEISALAGVAPFNKDSGQSKGKREISGGRAPVRAALYMAVLAARKFNPALKRFYDRLIEKGKLKKVAIVACMRKLIIIMNAMLRDGTRWEAHYA

SEQ ID NO: 59622 - protein, 344 aa, unidentified
MIYYAGIDVSLRTVNICVIDDEGERVAETKLASDVQDIVAYLDDLELDIESVGLEAGTLTQYLTYGLQAAGFEVICMEARQVKGALSAMRNKTDKHDARGIAQILRSGWYSRVHVKSMESHHIRMLLSSRKAVLSKCVDLENEVRGLFKIFGIKLPPKLGHGAFDAAVRDIIEIDETLSHALLPLLDARLVLYRTFRVLDNRTRKMAHADPVCVRLMSVPGVGFITALTFKAGVDDPTRFKRSRTVGAHFGLTPRRFQSGELDIDGHISKCGDADVRSTLYTAANALLTRSARWSPLKAWGMKLAKTRGHRRAVIAVARKLAVILHRVWIDEAQFRWGTEGARS

SEQ ID NO: 59623 - protein, 462 aa, unidentified
MHKRGNKGRTKSKNPSPQSLPVIRPKVAGIDIGSREHWVCGPALPDGGVNVRVFFTTTSSLNQLADWLIEQGVESVAMESTYVYWIPVYELLESRGLEVVLVNARQLRNVPGRKTDMQDCQWLQLLHSCGLLRGSFRPGESICRLRSLHRQRCNLIEQRSRTVQWIQKSLDQMNVQVHRAVTDITGKTGMLIVRAIVEGERDPLKLAAFRNHRCKKSEEEIAEHLTGTWRDEHLFNLASALRLYDTLQAEVERFDQRILEVLIELQPPQRRHDSVPAHPNAQKRYDMKHRGEQAQRNELWRFAGSDLTLIDGISSSTAAIILTEIGIDLSDFPSEKHFVSWLRLAPRRPISGGKQLSKRPNGTGSNRIAGALRIAALSLSRSKTALGAYYRRLARRKDGKTAVFATARKLAQLVFRLLRYGQSYIDIGERAFEERFRQNHINGLQRAAQALGYTLTPHTSGG

SEQ ID NO: 59624 - protein, 346 aa, unidentified
MEVVNARCAGLDVHKATVVAGVRVPGPQPSARRGETKTFATTTRGLRDLTNWLLTHGVTAVAMESTGVYWRPVYEALEGSVQLVVVNARHVKMVPGRKTDVKDSEWLAQLLECGLLRGSFVPPRAVRDLRDLTRLRKALIRERGHHVNRIAKTLELAHLKLSCVVTDLMGKTGRAILHALSAGIDDPERLAACAQGLLRKKQAALREALVGRLTPHYAFLLQQHLSLIDGLDAHIATLDTRIEAAMAPFAEAAALVQTMPGVAARAAQAILAETGVDMDLFPTPAHFASWARLCPGNHESAGKRQSTTTGKGATWLRATLQETAWAAVRSKKSTAYRVSSERYSMS

SEQ ID NO: 59625 - protein, 476 aa, unidentified
MNSKTKRANNQVNSVMNVQEQREMVEKANRILSEMKSFTWRDLETQGKFSKNDKLSFISDDMLILGCDIGSETHYVRAIDTRGRELSRKALAFDNNAEGFQKAHDWAVQLAAANDKKQIVLGLEPTGHYWFCLAAWMVSNGISVVQVNPYAVKQTKELEDNSQQKDDRKDPKLIANLVKDGNYGMPYLPEKVYAELRRLSMFREQLTEDRNRSMNRLHREMKIYFPEYKDAFGKIDGAFCMAVLKEAPFPEDILKLGGEGIREIWHQAKLRGRGYSRAAEIVKYAETSIGLKDGTAAGREAVRWFAEKIMELDEELAEVENKLNEKCREIPHAENVLEIPGIGGKILSGILAEMGDISRFDDAKELQKLSGLGLVSCSSGKHKGETRISHRGRKRLRYWLFQAARSAVAHGEEYKWIHAHYTTRAGNALQKMQSLIVIACKLLRVIYTMLKTGKPYDPEKLLKDIRYPENVQTAAA

SEQ ID NO: 59626 - protein, 459 aa, unidentified
MARSRRAPEEIPDVENEQVLERVCAIDVAKEFGQVCVRTPRADGKRASKVFAVDAITGDILRLGESLLEQGIEMITLESTSDYWRIFYYLLEGCGLRVQLVNARDVKHVPGRPKSDKHDCVWLAKLTERGMLRPSFVPPAEIRVLRDYTRTRIDLTRDRTRHWQRLEKLLEDALIKVTTVASKTTTVSVRDMIDALIRGERDPEVLADLARGVMRAKRRDLVRALDGRFDEHHAELATILLGQIDSLTAEIDRLTTRIEQLVDQLPTPGHPVDPDRAPTPTPNPGNAQPATAPSQPRPALQRLADIPGIKLAAAEVILAEIGLDISRFPTPEHLCAWARLTPQLIQSGNKRRGGKTSKGNPYLKGVLGAAAASASRTNTFLGERYRRIVERRGKGKALVAVARSILVIVWHLLANPDADYRDLGANFYDSRIDKERRKRQLIRQLEALGLQVTLTPAAA

SEQ ID NO: 59627 - protein, 344 aa, unidentified
MNYYAALDVSLRSVNVCVIDDAGDLHSEAKLDSEVEAIVAYLRGLDCEIASVGLEAGTLTQYLTYGLQAAGYEAVCMEARQVKAALSAMRNKTDKHDARGIAQILRSGWYSRVHVKSLESHQIRALLSSRKAVLNKCIDLENEVRGLFKVFGIKLPPRLGHGAFDKAVRATIEADDALSHALLPLLDARLVLYRTFRELDNRTRKLAQQDHICQRLMTAPGVGFITALTFKAAVDDPTRFKRSRTVAAHFGLTPRRFQSGEMDNPGRISRAGDADVRCTLYTAANAMMTRSSKWSSLKVWGMQLAKTRGHRRAVVAVARKLAVILHRMWLDDTQFRWGTEGATS

SEQ ID NO: 59628 - protein, 378 aa, unidentified
MTTTRSINDTTKLDVLYMALELSNAKWRLAFGAGGRERQVVVDAGDLSGLTAAIDRAQAKLGVGSEAKVISVYEAGRDGFWLHRWLEAQGIDSRVIDAGSLERRPGKRHRKTDRLDARVLLRKLRQYEAGDRGVFSVVRVPPAEIEDLRRLERERARLVKERGAHRSRMKALLNLHGIKPVKLTGDVPGRLAGMRQWDGSPLPGHLVAELAREWARLEQVEAQLAAVEAEQRAQVQEAEVAPMALVWELMRLKSLGLKSALTLVLELFGWREFANRRELAGCVGLVPTPYDSGLQRRELGIGKQGNARVRAVLIELAWRWLRWQPDSELSRWYHRRFGSGGKRQRRIGIVALARKLLIVLWRYLRDGVLPPDVRLKAV

SEQ ID NO: 59629 - protein, 392 aa, unidentified
MIYVGIDVAKDKHDCFITNSDGEVLFKAFTFPNSREGFESLFRKIKSVSDDFNNVKVGLEATGHYSYNLLSFLLDKGLPTYVINPLHTNLFRKCLSLRKTKTDKVDSRTIATMMMSDMNLKSYSDISYRTEELKSLTRYRFNKVKERAKLKSSVSRLVCILFPELEKLVPTLHMASIYALLSEFPSANAVANAHLTRLSNLLSETSKGRYGKDTAVKFREAAKSSIGSHMPAKSLELKHTIKLILELTIEINEIEVAIKRIMDEEIQSPILTIPGISYRMGAMIIAEIGDFSRFDSADKILAYAGMSPSTYQSGHVDNCYSHMEKRGSKYLRYALYNATKYVCHWDDSFAAYLAKKRSEGKHYNVALSHATKKLVRLIYAMEKSGQAYLPTN

SEQ ID NO: 59630 - protein, 391 aa, unidentified
MIYIGIDVAKDKHDCFITNSDSEVLFKAFTIFNNLDGFNDLYQKIESVMDDVTKVKVGLEATGHYSYNLLGYLIDKGLPTYVINPLHTNLYRKSLSLRQTKTDKVDARTIASMLMSDVNLKSYSDTFYHNEELKSLTRYRFDKVKERAKLKTSVSRLVCILFPELEKLVPTLHIASVYALLSEFPSAKHVATAHLTRLTNLLSESSKGRYGKDTAITFRDSARASIGSNMPAKSLELKHPIKLIQELDSEIDEIENEIKIIMDEINSPILSIPGINYRMGAMIIAEIGDFNRFDSPDKILAYAGFSPSTYQSGQLDGAYAHMEKRGSRYLRYALYNATKYVCHWDPTFAAYLAKKRAEGKHYNVAISHAVKKLVRVIYHLEKTKQQYIKAA

SEQ ID NO: 59631 - protein, 353 aa, unidentified
MNSLTDLREVVDVVIGVDTHVHTHSAAVVDAATGGVLDEITVEATAEGYCELVEFANNHPMLRAWAIEGTGGHGAGLSRHLLEMSEIVIELDRPKRAARRNGAKSDPLDAIRAAREAMARPRLGTPRTGGERQALSVLLAARRSAINASTEAQQQVFSLVIAAPEPIRVRFRGQKLAAMLNTAANLRVHASWDTETTSTVVALRTLARRAHAMLKEARELQKAIVAIIRSWRPDLLEEFGVGPIVAATVLCAWSHPGRIHSEAAFAMLAGVAPIPANSGQVTTRYRLNRYGDRQLNNALHTVVQSRIQYQPATRDYVARRTAEGKTSREIKRCLARYVARDLYRLLENTATAA

SEQ ID NO: 59632 - protein, 426 aa, unidentified
MHLLGVGIDWAESFHDVALGRPGEGVFEQFRIDHTAAGVGRLVARCLELETDPADVRIVLETRHGILVETLADAGFTVLPVNPDTVARRRGPAKKKDDAADARICCLLALDQFLELRKLVPHGELTGELRAIARDDERAARDERRLLNRLRADLLATFPAALAIAGDDLDSPVLLRLLARWPAHDQLAAVDPADIAAFARTARHGWPDRFAARVTDALATDRLPVKDYLVRAKTGTIVLTATQLLAIRDQRRAWERRMAELLLGSPRYGRAKQPKEPDPGKAIPGGNIYLSFPGLGDRLAARIAGEIGDDITQFDTPNGLQCYAGTAPVTRRSGRSEFVVARRLAHNHYLGAAVHQWAFCSLTRSVWAREFYDRKITAGKSHHSALRALANRWLEILWHCLVKNTHYDESVHIRNRQRALQPPSAA

SEQ ID NO: 59633 - protein, 430 aa, unidentified
MGLVVQTAAHPEQDEQYMPYEWFVGIDWGSQQHQVCVLDRDRRRMGERAIDHDGASLARLAAWLWSVSAGQPQRVAVAIEVPRGAIVEGLLERGFHVFAINPKQLDRFRDRHSVAGAKDDRRDAFVLADSLRTDQPSFRRLQLDAPPLLVLRELSRAEETLLEAFRRGANQLRDQLHRFYPQMLQLCSAADESWLWDLIDLAPTPAHAALLSAEHIQRVLKAHRIRRITAQEVLTCLQAPALPVAPGATEAAQAHCGLLLPCLRVLAEQLLACSQQVSALLHTLALEPGEGVGPSDVALVQSLPGVGRKITAWLFAEAAQPLAQRDLQVLRTHGGVAPVTRQSGKRRQVVMRRGCNPRLRHALYHMARVAMQRDAHFSQVYAALRAKGHRHGQALRTIGDRLLRILMAMLRDRLCYDASRMHREPVVQLG

SEQ ID NO: 59634 - protein, 337 aa, unidentified
MDYFAGLDISMDETHICVLDREGEAVYESKTASTAQTIADELAKAPSCRRIVFETGRMAPILFHGLRELGFPVVCIESRQAYQALKSLATHKTDRNDARGLAHLARTGFFKPVHVKSLSAHAVRSLIIARKKLVGQRVTLENQIRGLAIVFGVRLPRALTAAFIDQALKASEGVAGLSAAMRGLIAARTAVMTAVAAIDADMRRMTRASEACRRLMTIPGVGQLTALAFVAAIDDPSRIRRSRDVGAYLGLVPKRYQSGEIDYVGGISKCGDRRVRTLLYEAANVMLTRYKGQLKLKNWAFGVAKRSSMRKARVALARRLAIIMHAMLRDGTEFVAA

SEQ ID NO: 59635 - protein, 429 aa, unidentified
MSYRIAAIDVHKKMLAVVVSDVEGDSEYQFERRKFSSNPEQLRLLAAWLLEQEAEEVVMESTAQYWRPVWEALERYWKPICEKRAGARRKSGTLHLAQALSNRGRRGRKRDFPDAERLVKRLVAQELTLSFVPDAEQRLWRTVTRKKYQLRCDRIRLQNQLESLLEEAHIKVSSLVSDLLGLSAQRMLKAIADGETNPATLAALADKRLRAAPEQLCDALGACTQLNPVYRRLVKMALEELRLIDEQIGRLDQEMAGLLRQHQDAVQRLAEIPGLGVDSAQQIIAEVGPTAATFPSQKCLSSWVGACPGDDESAGVNHSHRSPKGNRHMRRLLNQAANAAARTKGSLFEIVYRRSVPRLGHNQAIGALAHRQCRLIWLILHQGVRYEERGPAVTKRSKQLRTWKMIRQLRNLGYRIELPNPQPSQAQAQ

SEQ ID NO: 59636 - protein, 338 aa, unidentified
MKYFVGMDLHSSNTVLGIIDEKGNRVYKAKVANFLPLILNELELFRRGIVGVVVESTFNWYWLVDGLMEAGYKLHLANPSAIKQYEGLKHTADYHDAFHLANLLRLGILAEGHIYPKQERAIRDLLRKRLMLVRHRTAHILSFQSLYNREKGCRIGGSDVKNLEEEDIDELFDQDYVVLSAKANISTIGFLKRKIEEIEKIVLGTMKLLPEFQKLKTVTGIGDVLGLTISLETGDIRRFAKVGNYSSYCRCVGSQRLSNEKKKGEGNRKNGNKYLAWAFIEAANYTKRYCSYARRFYQRKTAKTNKIVAIKALAHKLARASYFVMRDRVDYDPMKAFG

SEQ ID NO: 59637 - protein, 376 aa, unidentified
MEKSSTKGMRFVGLDVHAATIAVAVAEAGGEVRSLGIIPNREESVSKLVKKLNAGGSWEACYEAGPTGYALYWQLTKKGIVCTVVAPTLIPVKAGDRVKTDRRDAERLARCFRAGDLTAVWVPDPAHEALRDLVRAREVAKRDQLRARHRLGKFLLRQGRRPPEKMRAWTKTHLEWIKTKVQFEEKAQQWTLEDYINEVEHCGQRIERLEGLIDEAVKSAPETMREVIAALQALRGIAVMSAVTIAAEVGELSRFATARQLMGYSGAVASEHSSGERTRRGHITKTGNAHLRRIVIEAAWSQRFRPVLSKNLKARQEGLPPEVIEIASKAMHRLHSRYNKLMAKGKNKQQVVTAVARELLGFIWAIGVSVERKNAA

SEQ ID NO: 59638 - protein, 437 aa, unidentified
MEEVTDEPLYRDRVCGIDIGKAGMAATIRVPSDKDPARRAAETRSFGTTRREVLALADWLRCWQVPAVVMEASGDYWKGPFYRLEAEGFECVLADAKQVKNLPGRPKHDPGDSRWLAACLERGAVTSCFVATPEFRIIRLHTRYRRDLTEERTREKQRAEKLLESAAIKLSSVVTDLHGVTGRDIMDHLIAGERSPKVLAQLARARARRKISELEEALEGAEFFTAEHAALLAAMLARIDRVNAEIARLSEVIETLLEPYEEQLQQAESMPGWGRRAAQDALAETGTDMTRFRTGAHLASWAGRTPLDNSSGKRKGKAKSKKGNRYLGGLLGETAIAAGKTQTREGARYRRLSRRRGKAKALVAVGNTQLKVYHALLSSPGTRYEDLGPDYYERRAEVSRQVRHHVGKLGALGFDVTLCRIPEPGPEPGGTGNSQTA

SEQ ID NO: 59639 - protein, 392 aa, unidentified
MHKPKQQKPLNDLSRSLTPFDPNHTLIAVVELSQKNWLVAGVIPGVERQPLKKLNADADELVKVLERWRTEAEKAGHKIDRIAVAFETGRDGFWLARWLKKRGIRAHVIHAASVAVSREHRRAKTDRLDTEQLKRAFLGWLRGEREHCKMAVVPTLAEEDAKRPHRERETLVGEQTTIINRIKAALTRLGIRNFNPKLKKAPERLEHLCTPEGEPIPPNTLAELRRDMERRQLVAEQIRQIEKTRLERLKQAPTTGPNLMVSLLARVIGIGIETADMLVQEILSRNLRDRRAVARYGGLTGSPDESGKKRREKGLARSGNARVRRGMIQLAWRFLEFQKDSALAKWFRVRTENARGSRKKMIVALARKLLIALWRFVHDGVVPQGVVVRPAQ

SEQ ID NO: 59640 - protein, 342 aa, unidentified
MQVTTIGLDIAKNVFQVHGIDTTEKVVVRTQLRRGQVLAFFKALAPCLVGMEACATAHYWARELTKLGHQVRLMPAKDVKAYVKRNKNDAADAAAICEAVRRPTMRFVQVKSVEQQGRLMLHRTRDLLMRQRTQVINALRAHLAELGIVFAQGREGLKELLKIIASEQDARLPVDAHTSLVVLAAELQAMQTMIGSVEKRIMAQHRSSEASQRLESIPGIGVIGATAIAATVPDPKVFRSGRDFAAWIGIVPRQDSTGGKQKLGPISKQGDRYLRRILVVGAHAVLKRARQQPEKYPWLTQLLARKPFRVVAVALANKMARIAWALLAKGGLYRAPSLAAAA

SEQ ID NO: 59641 - protein, 268 aa, unidentified
MSITPSWIGIDISKAWLDIADPALERAARVANGEPAIAAFAATLAGRDVIVVFEATGVYDTCLRHALAAAGVACVRVNPQRARDFARATGRLAKTDAIDAAMLAEMGRALCLAPDPVPDGTREKLNLLNKRRDQLVAMRQQERLRRMEAADPVVCAGLDAHLDWLDRAVGEIEAAIRDLVRASSELTEAETLLRSTPGIGEVGAAVLIGLLPELGCRPARQIAMLAGLAPVNQDSGTRRGQRSIRGGSGASGRHFTWQPSSLCAPAPH

SEQ ID NO: 59642 - protein, 430 aa, unidentified
MSFKTRTSLISYNLESGDFMNGLLLYLFVGIDVSKENNQVYAMNFSQDKLASFSTPNHRSGAQALEAKLLDILDRHHLSKIIIAMESTGIYSTHIATYLSASKYLFPFDARVYVLDPKISRNYRHSFSDMDKTDPKDAFILADLARVGRCDRLTPFKGPQKIALQRLTRHRHHIAELLAKEKVYALNNVFLKFSEFRGVLSNDFSKTAVDLLLNFKSVDEIIDVPLEELVEFVMTSSKNHFADSNQIALTLKAAARNSYRLDKMAYEPINLSLAASFNCIQTYQTQLKSIDAAILKQVKGLNQNHYLSLISIPGIGPVYASGILAEIGQISQFDSEDALAKYAGITWRKSQSGSFDAEDTKMTKTGNVYLRYFISEAANLARIHNPVFKDYYQKKFAEVKTHQHKRALALTARKLIRLIFGLLSTDRLYK

SEQ ID NO: 59643 - protein, 347 aa, unidentified
METIVRIRLDTSKSVFQLHGVDGMEQPVLRRKLRRGQVLAFFGRLPPMLVAMEACGASHYWARELRSLGHEVAMIPPQYVKPYVQRGKSDAADAEAICEAASRPKLQKNFVPIKSAEQQGAQMLTRVRNQFIGRRTQLANSIRGYAAEFGFTAPKGLSRLPQLLIDIRADATVPDLAMELIEALAAEMARVDDQIVTLDKKLMQLHRSSEMSRRLATIPGIGPIGATLLSIKVVDARGFKSARNFAAWLGLTPKNHSTAGMNRLGVITRAGDGMLRTVLVAGATAVIADMRRRGSRPWSWLKDMIARKPPKLVAIALANKLARIAWKLMVSGERYRPASAIPMPTPK

SEQ ID NO: 59644 - protein, 343 aa, unidentified
MESMHYIGLDIHKKMIAFCIKSKEGAIVDHGIVAANRQDLLEWTQTLPWPWMVAMEATLFTGWVYDLLKPYAAATKVAHPQMLKAITAAKKKNDAADAEKIADLLRVDLIPECYMAPLELRELRRILRYRNHIIRMVVKEKNKISGLLMEVGATYAKKRLHGKRYFHRLLETIEDVPESVINMLQLSRSNLELFMVVQKKLMRALKANPLICDRVKRLMTIPGIGEVTALTWVLEVGEPERFTSIGKAVSYCGLCAAQKESAGKSYRGPISKKRNKHLQTMLVEAAKLAPYRNPQLAEIYKKELAKGHRNRATLAVARKLVAYLLCVDKSKQAFELRVEAKAA

SEQ ID NO: 59645 - protein, 329 aa, unidentified
MVFLGIDIAKASMDCAILGGPDGKPLGRRCFPNSAEGVDRAVRWAARVSGAEVAETHVVVEATAAYHELAAHRLAAAGMRVSIVNPARVRSFARALGILGKTDRIDAQLLARYGQLVGPKLWSPPAKALLDLRSLIARLDDLEADSRREENRLEQARTRGCPELVQRSLLASITALEAQAGDLRRGIAAHVAADAALQADLERLMTIPAVGPKTATRMLLMLRSRAFDTARQAAAFLGLVPVERTSGASVRGRPTLSRAGNPRLRAALYMAAVVGIRKNPDLRAQYGRLLARGKCKMAALGAAMRKLVHLCFGVLKSEGGYRPAAAIKA

SEQ ID NO: 59646 - protein, 345 aa, unidentified
MGVAIGVDSHKSTLAVAVLDELGRVIGTEEFSNDGPGHGALLEWIKVHDVERVIGIEGTGNFGAAVARRLIEANEDAREVPAFLPHRERKRNPSRGKSDLRDAVAIARVVARGEPLSSPRRVDVLRDLKLLSDYRDQLVRTRTQLINRTHKDLVVSHPGYERKIPKLTSKKRLRETRGLLRADRSVRAGLIRDRITEISRLMDKVAAVEKQIAQKVIESGTTLTQLHGIGFLVAAKILGEVGDPARLRSKGSFAMLTGTAPIEASSGKTRRHRLNRGGNRQLNYALYMMALARRRGHPDTCAYVERLRHEGKSDKEALRCLKRHLSNVVFRQLVSDLADGTKLAA

SEQ ID NO: 59647 - protein, 387 aa, unidentified
MQKPHDDSKASLTAFIQDNTIVVVLELSLSSWLVAGMIPGLSREPLKKIAPDPELLLRLLYRWRDEAIKAGKEITRISVGYETGRDSFWLARWLRARGIDAHVIHATSVAISREHRRAKTDRIDTAMLRRGFLGWLRGEPGHCSMAIVPTLAEEDAKRPHRERESLVQERTSTINRMKSILIQFGVRDFNPVLRKAAQKLHAVQTPEGVPLPPNAASALRRNVERLRLINEQIKAIERSRVQHPKRDPTDKFNAMVFLLVRIIGLGVETAEQLVREILSRNLRNRKAVARYAGLTGSPDESGARRREKGLSRSGNGRVRSILIQLSWRLLQFQPDSELVLWFNKRTASAKGSRKPMIVALARKLIITLWRYVNTGMVLNGFKLRSAG

SEQ ID NO: 59648 - protein, 348 aa, unidentified
MVHFAGLDVSVKTTSVCVIDDVGKVVLEQRSPTEPADIIAVLTSLGVSFGRIGVEAGPLSQWLVNGLMAVDLPVICVETRHMKALLTAQQISKTDRKDARGIAQMMRVGLFKPVHVKTLVAQEQRMLLTSRKLLQRKLLDVESDLRGTLRNFGLKVGIVGGSRYEARVRELVEGFPRLAAIVEPLLSVRRVMRQQLAVLHKMLLDMVRGDPVCRRLMTAPGVGAVVALTYRATVDQPQRFLHSRAVGAHVGLTPKRYQSGETDYEGGISKCGDALLRTMLYEAAHALLTRGAKWSWLKAWGVRVAQRRGMRRAIVAVARRLAVVLHRMWVDGREFRWSKDDTTVPAVA

SEQ ID NO: 59649 - protein, 342 aa, unidentified
MQITTIGLDIAKNVFQVHGIDAAEKVVVRKQLRRGQVMKFFAALPPCLVGMEACATAHYWARELTKLGHEVRLMPAKDVKAYVKRNKNDAADAEAICEAVRRPTMRFVQAKSAEQQGRLMQHRTRDLLLRQQTQVINALRAHLAELGIVAAQGREGLKQLLAIIADEKDTRLPIDARASLIVLAAQLQAVHTMIGSIERRLTVQHRANEASKRLQSIHGIGIIGASAIAATVTDPKAFRSGRDFAAWIGLVPRQDSTGGKQKLGPISKQGDRYLRRILVVGAHSVLRRAKSNPEKYPWLTQLLARRPFKVVAIALANKMARVAWALLARGGTYRVPALAAAA

SEQ ID NO: 59650 - protein, 381 aa, unidentified
MTMMIGVDPHKGSHTAVVIGPGEEPLGELRVESSPGQAGDLLKWAAQWPERTWAVEGAAGLGRLLAQQLVAAGELVLDVQPKLAARVRLLQAGDTGKNDPHDAQSVAVAALRSRACRPVAAEGHTVVLKIWARRHRDLARARNQVACRLHAVLCELVPGGVRRQITAGQAASVLERVTLSGPIGAARRELAAQFLEDLRRIDGQLREANKKLAAAVRASGTTVTEVFGVGPVNAGTIIGDVTDVNRFPTRDHFAAYNGTAPTEVSSGGRKVYRLSLRGNRRINHAIHMAAVTQIRHSHSDGRAYYEKKIACRARIHGRDGGLRVRGATWACHAAIWYSCMSPPRTGFRRIRYSARLIGSGGRVSAWAGASWPRARCGRPVL

SEQ ID NO: 59651 - protein, 370 aa, unidentified
MEKKILYVGMDVHKKSIDVAITDKRTNGKVRSYGKIDGTLEALDKLVGKLKSSGADLHFVYEAGPCGYPIYRHLTSKGHSCSVVAPSLIPRRSGDRIKTDRRDAVNLVRLFRAGELTSIYVPTVEDEAMRDLLRCRVDIRQIERKTRQRLLAFLLRHGLYYPGKKNWTKGHMNWLADLKLTHRAQQIVLQEYIDAANECTRRIQRITEQIQGLVPQWSRAPLVRAYQALRGVSLIVATTVVSEIGDMNRFKNPKQLMAYLGLVPSEHSSGNRIRRGSITKTGNSHVRRVLIEAAWTYNLRARKTKIILKRQQGLDDRICEISWKAQLRLCNKYRRLFARGKSKPAITTAIARELSAFIWAIDKQVQQLTA

SEQ ID NO: 59652 - protein, 339 aa, unidentified
MKLYVGIDLHSSNSYLAIIDVTGKRVFHRKLPNDAATIIETLSLYEGSIAGIVVESTYNWYWLVDALMTEGYKLHLANPSAIKKYEGLKHANDKHDAFWLAEMLRLGILPEGYIYPKEERPIRDLLRKRSHLVNLRTSLIISLKNIISRNCGLTLKANDVRKMREDMVSPLLAYNEDLALAGQVSKDSIDFFTREIWKIETFIGNKIKLHVPYTDLVTLPGVGKILAFTIMLETGPIDRFQNVGNYASYCRKVSSKWTSNGKSKGSGNKKNGNKYLAWAFSEAAELARRFDPDARAYYNRKLAKTNFMIAHSALAHKLARAAYYIMRDNVPFMPEKLFT

SEQ ID NO: 59653 - protein, 346 aa, unidentified
MKSITVIGVDLGDKSHCWCGLNNGGSVVQRGRVRNTREKLSEFFKPLQRCMVVMEAGTHSPWISELMFELGHEVVVANPRRTRAIWDNVRKSDANDAEMLARLGRADIKLLHPIKHRSSACRADLAMIRSREVLVRHRSSLISHARGQVKSFGYRLPPCTTPAFVNCVKASIPEQLRPVLKPVLETISLLTEQIRYYDQQVKRLGRERYPEAMLLGSVIGVGPLTSLTYVLTIETIDKFDRGRSVAAYLGLVPRRDQSGQVDKKLPISKSGDELLRRLLVNCATYIMGPFARDSALRDWGLDLAERGGGRGKRRATVAVARKLAVILYAMWRDKSLYQRYPEQLAA

SEQ ID NO: 59654 - protein, 438 aa, unidentified
MSNKVFFNLDDLFISVGIDVGADFSWMSIALPNQQFVGKPYKILHNSIDSLTTAVSKIKEAEELYSLESRIFLESTGIYHYPLFCYLRDKGFNCSVINPIITKNSTNINIRKVHNDRFDSKKAALVGLKPDLKVSLMPSDLALNCRNLCREYYDLMDNRSAYVNKLQGELRMVFPQYLGIFSKVTINTSLTLLETYTSPSAFLKADKQEIIDIIKSTARFGLTYAQNKYNAIIQAATDANQFGYIIDSNIKRIRLYISFIRKYDEEINNILESLHELVDANEDADFVKQIHLIETFKGAGFLSAVSIMGEIGDFSAFSKPKQLFAYFGLDPAVKQSGKFEGTKVQMSKRGSAIARRVIHTLTLQSISISRNGEAKNPVLREYYLKKCDSKLKLVAMGAVSHKVCNMIFAILRDNKPFKIIAPQEHIKQYNAAKCDIAA

SEQ ID NO: 59655 - protein, 343 aa, unidentified
MQTVTTIGLDIAKSVFQVHGIDAAGNVIVRRKLKRRYVLPFFQKLPPCVVGIEACASSHHWSRELQALGHTVRLMPPAYVKPYIKRQKNDAADAEAICEAVTRPNMRFVATKTPEQQSCLMLHRTRHLFIRQQTSVINAIRAHLAEFGVVAPVGRNGVEQLLDVVADVSDKRLPEIARACLLALGAQLRTLKAQILNFDRQIMACHRSNTTSKRLDEIPGVGPALATALVASVADPKAFRSGRDFSAWIGLVPKQHSSGGRDKLGNISKRGDRYLRSLFTAGALAVIRYAKIHGTQHRPWLSALLARRPTKVAAIALANKIARMAWAMMARGERYKEPVALAA

SEQ ID NO: 59656 - protein, 321 aa, unidentified
MKIKNLVGVDTHKDSLACFCNGKFKDFKTNKVGFKQAINWAKSSHWAIEGAYCFGQAFSNFLIKNGCEVYEINPLLTKSWRTALKVASPKNDFGDAKVISIFANMDNMNKVSFETIKLKEKLTTRKALIKQKTQITNHLKMLFYTRGEELPFKALDTQKAINWMLEQDDVIVKTNGKILESIMAGIKSLEVEIEKEMPEPAKALTKMEGISTITACTIYAETKGKLTRKEQFASYCGVAPIDCSSGQTTRRRNNKGGNRVLNSIFYSLSIAQKRYNEKAKAYFEKKLSEGKSPRHARKCLARQLTNIVFKTLKDATEKRKP

SEQ ID NO: 59657 - protein, 390 aa, unidentified
MIYVGIDIAKLNHFASAISSDGEILIEPFKFTNDGDGFQMLVSKLDSLDAEPDSIIIGLESTAHYGDNLVRYLVAENFQVCVLNPIKTSTMRKNNIRKTKTDKVDTYIIAKTLMMQDSYRFITFYDLDLMDLKAMGRFYQKTIKQRTRLKIQLTAYVDEVFPELQYFFKSGLHQKSVYALLKEAPTPEAIASMHMTHLASLLSKTSHGHFNKEKAKELRVLARKSVGASDNALSIQITHSIAQIELLDSQLNKIEEEMTEIMNFNDSVIMTIPGIGYINGGMILGEIGDIHRFSNPSKLLAFAGLDPSVYQSGNFQARKTRMSKRGSKVLRYALVNAAHNVVKNNSTFKAYYDAKMAEGRTHYNALGHCAGKLVRVIWKMMTYDLEFNLD

SEQ ID NO: 59658 - protein, 454 aa, unidentified
MGKPRVVPDEDHEVMYQRVAAVDVAKASGVVCLRAPDPARPGRFTSRIWDDVPATRARIAELGAELLVSGVQMVTLESTSDYWRIWYYVLEGAGLAVQLVSASQAKNLKGRPKTDKLDAMWLARLTQAGMLRPSFVPPAEIRRVRDFTRARTDLVAERTRCLQRLEKLLEDAMIKVTAVAADGLKAKSVVAMVQALIAGERDPRTLADLAKGRLRARKDALAAALDGMFDSHHGVIAGMLLDQVAFLDQRITVMEDQAIAALAQVEESWGTDATGETGPAAGTAPGSPVLAAAHRLAEIPGISVWLAIVIIAEIGLNMAVFPTPAHLVSWLGLCRSAAQSGTRRGKGKPKKGNSYARAAAGQAAIGAARTATFLGERHARIARRRGKAIAQVAVARSIMIIVWHLLNDPAARYRDLGPDFHATRTNRDKKIRTYLRGLKALGLTVAITGDEHAA

SEQ ID NO: 59659 - protein, 325 aa, unidentified
MILGIDIAKKKFDVALYEGKSLVSSGQFDNTPAGFKKLSRWLKKKKAGVVWACMEATGRYGDNLALYLHEAGYRVSVVNPARIKKYAESKLRRNKTDKLDAQVIADFCRTQEPALWTPPAPGKRELQEMVRRLNALIKERTRETNRLKSGISSEFVKESIKANLEFLNEQIAKLEEQIPIHVNQYPKLKKERDLLSSIKGIGDKTAAILLGELPEIDNFDNVCQVLAYAGVSPSQHESGSSVHKRTKLTKTGNKNVKTALYFPALSAIRFNPIVNALALRLKEKGKEKMVIVGAAMRKLLQLAYGVLKSNQPFDPHYTAKSQSAI

SEQ ID NO: 59660 - protein, 370 aa, unidentified
MKETITFVGLDVHKKSLSVAIADGGLREEARYYGRIANSEAALSKLAAKLSERGRRLRFCYEAGPCGYGIHRHLTRLGHDCAVVAPSLIPRRAGDRVKTDRRDCLSLAKLDRAGELTAVWVPDAEHEAMRDLVRARAVAVKALRRARQQLTGFLLRHGRVRGGKNWTLAHRRWLATLRFEQPAQQVVLEDYIQAVEDAEARRDRLTAQIEALLASWSMAPLALALQALRGVALVTAVTLLAEVGDLTRFDNPRQLMAHLGLVPREDSSGDKTRRGGLTKAGNAEARRVLVEAAWSYRLPARVSRCLLDRLQGQPKAVRDISWKAQVRLCARYRRLRTQGKDAPVVTAAIAREMLGFAWAIAREVAPARTV

SEQ ID NO: 59661 - protein, 400 aa, unidentified
MRVVFGIDVSKASSEVAILVNGDKVHGYTIPNDSIGFNRLLGDLKTVSNPEIVFEATGVYSRRLQAFLEDNSYAYTRLNPLAAKKQLDSLRVRKTDKIDAEKLAQSQFVLNRQPTYVQEEVYQELRDLSRFYQNLTEDIVRAKNRLHKVLQVTFPELESLLSSPTGEQYWNLVIAFPCKEMVLELSRDDLSTVIRNSTSKRISDKRVTYLTEKLTDLAHKSYCAVKKTSPMLEEVRYYAQELLRLSERRQVVLDEMVSLAQPLPEYEILLSIPGIAETTVTSLIGELGDIRRFQSANQINAFIGIDLRHYESGNFLAKEHITKRGNPYARKILFKCIHNIASASHTNPCHIADFYEKRKRQSQTTSTKPHTIASIHRLIRTMYYLITHNKIYDYNLATSQ

SEQ ID NO: 59662 - protein, 401 aa, unidentified
MKYVLALDVAKGKSMFMLSSDVGEILLEPTEYTHNKFDFEKIDSNINKLNIKDNLTIIMEATSIYHKAPERFFKENNYHVIVFNPLIGKEITNTIRKTKTDKQDCIKLTNLFWKGSIPDRKYTEDEIYTKLNELSRQYYHLDEGLTRHKNRYKELLHLCFPEFELCFKDGKIYDLTALNFIKEFPHAYIIKGKRVNALAYNMANTNNRHLNYYKRKANVIKEYAINSYPGVSQNSKDVDNLKQLADVVVDLTKRKDEVKNQVIQLAKETKNYECINSLFGIGELSASLIIAELKDITRFNNIKQINASCGLDPTIIQSGKSINYHGPISKRGNRYARKLLFNCSRNIITLSAKCNKENSIYVYYLKKKQEGKHFYACLTACSTKLIRIIYALCMNNSTKQN

SEQ ID NO: 59663 - protein, 453 aa, unidentified
MAAGEVQEILDEDHERLVERVCAIDVAKASGMVCTRVPRPSGSRSSRVWQVPATSRAVSDLAAQLVELGVEKVTVESTSDYWRIWFSLLEAAGLDVQLVNAREVKNVPGRPKTDKLDAVWLAKLTERGMLRPSFVPPPPVRRLRDYTRLRVDLTRERTRHYQRLEKLLEDALIKVSSIASRMDLASVRDMVEALIAGERDPRRLAGLARGRLKSRHSELVEALTGRFDDHHAELARMLLDAIDALNGQIDTLTTRIDQLLQTLPDDLPDDLDNGPGPAGPDGPDGPGTGMSIVERLDEIPGIDVRGAQIILAEIGLDMTRFPTAGHLTSWAKLTPRTVQSGATNRGGKTGKGNPYLKGVLGEAATAAAKTQTFLGERYRRIVKRRGKLKAMVAVARSILVIVWHLLADPGARFHDLGVDYHATRIDTDRKIRNHLRQLQALGYTVTLNPITAA

SEQ ID NO: 59664 - protein, 339 aa, unidentified
MKLYGGIDLHANNSYLVLLEERGSVVHRCRLPNEMTAVLEQLEPYRERIVELAVESTYNWYWLVDGLKGVGYSVKLANPNAMQQYQGLKYSDDKSDARWLAEMLRLKLLPTGYIYPAGQRPLRDLLRQRSFLVRQCTSQLLHVNNLLSRHQGRRSPATPIRQMSVAEVRELFPDRERRLAVESSLLVIHALDQQIAAIEKQLKSQAKPQASFELLQSVYGVGPILALTIWLETGDIGRFPQVGDYASYCRCVASTRLSNQKKKGENNRHNGNRYLAWAFVEAATHAARSYGSARRFVERKTAAVNRTLAIKALAHKLARACYYVLRDQVRFEPTRLFSS

SEQ ID NO: 59665 - protein, 335 aa, unidentified
MLKYIGMDAHSSTCTFCVTDAIGREIDNVTLATNGKVIKNYLQSITGTKKLTFEECELSHWLYGIVKPEVDELIICNPVANESYKKAKNDKIDARKLAKMLRGDYLVPVFHDGSDRERFRKLVSSYQDIIDEGTSIKNRYKSLFRKNGQRIKGKTLYNDESLLESFKHNDDQFIGGQLFSLLETLEKSRQAHVKEILRYSKKFKELKYIKSVPGIGDINAAKIVAQVVNPYRFESKYKYYSYCGLVRHSRTSADKSYGSVKIWGNKTLKTVYKMAGHSVLNINTNNAFVAYYNSLCKKGVTDKNAYNAVCRKIAAITLSLWKHSKCFDESLIQAM

SEQ ID NO: 59666 - protein, 438 aa, unidentified
MPNSFFALEPEWAAFLAIDWADQKHAWSLEVPGAAKRERGECAASPEAVDAWIGQLSARFAGHRIAVCVEQSRGLLFSLCKYENLTLYPIHPAAAKDFRKAVYPSGSKDDPLDADVLLDFLLKHRDRLRVWRPDTAETRELQFVVEDRRRLVDQKTCCLQQLTQRLKLYFPQALTWFGSADSLLLWKVLEQWPDLERLRKVDGRRLKSFLESDRRCSVPEWEPFWPALQQAVPATRDEAVIGSSVLFVSALVRQLLALRATIQQYEKRIRELTEAHSEFAIVKSFPGVGEALAPRLIVALGTQRDRFANASDLQSYSGIAPLKEASGKRCWVHMRWGCPKFLRQTFQEWAQHSLGRSAWARAYYQRQKARGKQHHAIIRSLAFKWMRILLRCWQNRTPYDESRYQTALDLRSSASSEPTVEIVWKRVAGFSKISAAQG

SEQ ID NO: 59667 - protein, 394 aa, unidentified
MFIVGIDIAKRSHMVRVINLEGRTVCKPFSIRNSCAGCNALLERLRKLTNHKSEFLFAMESTSHYWLALYTRLRKEGYQVVVLNPIQTSAMRDILMQENKTDEIDTLVIGETIRFGRYKASSVPQEKLLALRELCRNRFYLIDMGSDLKRKITALLDQVFPEFESQFSSIFGKTALAVLRQYPTPEKLSRAQTGKLTEVLQAASNGRFGEWKATQLKELARDSFGIPDCEGAYSALLLMYLDQLQSLQDAAAALEKKIAALFSQFDSTLTSITGIGPVLGAVILSEIRDISSFSSADKLTAYAGLNPKVKQSGDMKSSAVHMSKRGSPYLRRAIWMAGAIAVQFDPMFKAYYEKKSAEGLRYMNIIGHVSKKMTAVIFAIMRDNKIYEPVLPAA

SEQ ID NO: 59668 - protein, 326 aa, unidentified
MVSSSPLPVVGLDVSKATLAVCYQLDHQVRHLEVGNDKAGFAQLLQVCGVQSLFVMEATGTYYLALAYHLHEQGGQVAVLNPLIIRRFIQMHLGKSKTDRKDAHWLLRYGQQQAVKPWQPDESVLVECRQLEQVTEQLLKQKTMVSNSLEALQRQPVISPLAQQRLQQTWQLLDDQVQALEAELLTLLETRFNQEMKLLRSIPGIGRKTAGLLLLFAGGFTRLDNYRQLIAKAGLSPREYTSGTSVRGKVRITKMGGGLIRGKLFMCSFAAIKFNPACKALYDRLLAKGKNGKVALIAVCNKLLKQAFAIVKSGVPYQADFARILA

SEQ ID NO: 59669 - protein, 343 aa, unidentified
MSEYAGRQFVGIDLHRRRSVIVRTTDAGEVLETVQILNDVDRLRSVMANAGVDPEVVLEATYGWYWAVDALQDVGANVHLAHPLGVKMFEYRRVKNDVRDAKDLADLLRMGRLPEAWIAPPQTRELRELVRHRAKLVGLRSHCKAEVHAVLAKCGIQISMTDLFGVSGLELLDRLDLPAPYAARVGSLRRLLDDLDFEIDLFARLARGRLAADPGYRAVQEIPGIGPVLGAVFVAEVGDATRFGTAAQLACWAGLTPKHRESDTHVHRGRITKQGSRLVRWAAVESVQILPKTSKVGQIRERVGSRRGHNIGVVAAARQQVEYVFYALRDHHVRALDHRRAAA

SEQ ID NO: 59670 - protein, 345 aa, unidentified
MMNLNVIAIDLAKNNYQVCKIGQDRQVIYNKEVSRQKLLQLLASEKQSLVAMESCGGTHYWARKAKEAGHMVKPMSARVVKAFRQGQKTDANDALAIGVAAQQPTVKPSRLLNINEQCLQSMSAMREHFVKQKVALGNLQRGCLLELGIPITKSDNKLIDAVESLLEDANFDVPMTFRASLKIMNEQFKSVMNEIRELEKLIEEEIKNDEVCERLQKLEGVGPVGSMMLKVYFSCIEHFKNGREASACAGLTPVQHSSGGKERIGSISKKSANKKLRSTLYQGALAVVTNVVKRASRTEKDEWLKKLIARRGKKVAAIALANKTIRTAFAMLKKSECYQPKLLTA

SEQ ID NO: 59671 - protein, 483 aa, unidentified
MKPKRLEKSKKASCRPTPNNWHKMNRKQRREMTRKIQSEDLSLEVVHPDAAGIDIGNESHYVAVPPTRDSQPVRRFGCTTSELKGMAVWLKQCAIRTVALQSTGVYWIAVYDILEEAGFEVYLVNAKETKNLPGRKSDVQESQWLMKLHTYGLLRNSFRPSQEIRTMRTYWRQRNDLVRAAGRHIQRMQKALTQMNIQLANVLSDVSGMTGQAIVKAILAGERDPYQLAALRNWRVKASEEEIARSLEGNWQEDLLFVLQQEQNGYEFCQKQMAECDQRLQQYLQQLEDRSHGTDLPEEKRKERLRKKKKGNAPQFDRRAELFRMTGTDLTQIDGIDVTTTMTILSEAGWDMSKWKTEHHFVSWLRLCPDNRISGDKIIGKGRLPTNNRVTNALRMAASTLRLSNTYLGAQFRRLRTKLGAPVAIKAMAAKLARLVYRMLRYGITFLDRGAEFYDAQHRKLQINYLKRKAANLGLQIIEAPAA

SEQ ID NO: 59672 - protein, 418 aa, unidentified
MIDDVQWFVGIDWATQSHRACLLDVEGRHVSERDFAHDGAGLTELRDWLLEKTKAAPGQIAVAIETPHGPVVEMLLDHAFLVFAINPKQLDRFRDRFTVAGAKDDSRDARVLGSAVRTDRQAFRRLVVDDPVVIELREWSRMADELQQERTRLANRVRQQLWRYYPQAAELTDDVADDWFLALWQQVPTPATAAKVSEKTIARILKDHRIRRLDATTVLLTLRKTPLFVAPGTTEAACAHIRNLAARLHLVNQQIKEAHRALDGLCARLEAATENPSGQIREQHDVTILRSWPGIGRIVLATLLTEATEPLRRRDYHALRALAGTAPVTRRSGKQCFVIRRLACNKRLQNAVHHWSRVAIQHDTAARRRYDALRRRGHGHARALRTVGDRLLYALCTTLKRQTLYNPDCQAAQMTASL

SEQ ID NO: 59673 - protein, 369 aa, unidentified
MRKNTLWVGLDTDKKHIDVAVAERLPDGEVRYWGRTANTPASVDRLVKKLGRGGRELVVCYEAGPCGYGLYRQLAGKRGVKCLVVAPSMTPRRPGERVKTNRRDALKLARLLRAQELTEVWVPDAAHEALRDLVRARTTAVSSLTRCRQHISSFLLRQGIPYIGKPWTKKHRAWLGRLEFEHPAHRLLFVELLIALDQQQARRDRLTDHIRELVPGWSLVWLVEAVQALRGYQLINAATVVTEIGDPRRFERPRQLMGFVGLNVSEQSSGDTVRRGHLTKTGNKRARKALIEAAWTYSRPAATSKPIAARLPAQVQQIADKARHRLSRRYRQLVARGKLKQVAIAAVARESIGFIWAIAQAAAPPLTQR

SEQ ID NO: 59674 - protein, 331 aa, unidentified
MQGRALKEKKQMDKEKLYVGIDVAKARMDIAVHPSGKHWRVTNDDIGISQAVHQLQELSPALVVLEATGGIEVPLAAALAAANLPVVMVNPRQVRDFAKATGKLAKTDAIDARVIAHFAAIVTPPLRSLPDSQTRELAATLARRRQVVEMITAERNRLATSPKAVRERIKAHIAWLEKELTDINNDLTRSIRECSAWREKDNLLRTVPGVGPVLSVTLVSQLPELGTLNRRQVAALVGVAPLNRDSGTFRGKRTIWGGRASVRATLYMATLAAVRFNPVIRSFYRRLRAAGKESKVALTACMRKLLTILNSMLKHRTLWNYSNPQIIGPCS

SEQ ID NO: 59675 - protein, 411 aa, unidentified
MQETQQHDAIDVFIGVDVGKGQHHAVALDRHGKRLYNKALPNDEAKLRALIAELKTHGRLLFVVDQPSTIGALPVAVARAEGILVAYLPGLAMRRIADLHAGEAKTDARDAAIIAEAARSMPHTLRSLRLADEQLAELTMLCGFDDDLAAQVTQTSNRIRGLLTQIHPALERVLGPRLDHPAVLDLLERYPSPSALAAASEKTLANRLTKLAPRMGKNLATEIVQALSEQAVIVPGTQAATIVMPRLAQQLAALRKQRDEIAAEVERLVLAHPLWPVLTSMPGVGVRTAARLLTEVAHKAFASAAHLAAYAGLAPVTRRSGSSIRGEHPSRRGNKVLKRALFLSAFAALRDPVSRAYYSRKIQQGKRHNQALIALARRRCDVLFAMLRDGTIYQPKSAPNANTVQIEISLR

SEQ ID NO: 59676 - protein, 340 aa, unidentified
MGELTTIGLDLAKHVFQVHGVDAEGAVVLRKQLRRSQVVTFFSRLPRCVVGMEACATAHYWARELGALGHEVQLMPAQYVKAYVKRNKNDAADAEAICEAVTRPTMRFVPVKTADQQSALLLHRGRERLVRQRTGLVNAVRGHLAEFGVIAPLGLRHVGKLISTIRDECDARLPDLARQVLQVLAIQIEQIETAIAALEKQLMAWHKSNPVSQRLATIPGIGPIIATAIAATVVEPSGFRSGREFAAWLGLVPRQSSTGGKVRMGGISKRGNQYLRRLLINGASANLLRSKATNSNPWIIGLRQRRPSLVVAVALANKTARIAWAVMQRKENYQHMAVAA

SEQ ID NO: 59677 - protein, 465 aa, unidentified
MNSNLYLGIDVSKGYADFALLDCKKKVVGKPFQLYDVSKGHQALDEYLGTLVEQHHPELIYAAVESTGTYENHWLDTLTKLRTKYPLKAARLNPLGVLKHRQAGLQEQVTDRQSSIAIASYLINHTDSITFNRIDSFANYRMYLGHISLLTKQLVQLKNDLRQFLYLYFPEVLPYCRQNLSESILELLEQYPTAQDMSKSRQGKRNKIPYFTATDWQVLREKCKSGVGSSSDAMAERIILDLVSEIGSLSHRIEEYYDMLYDLLPKDQLQILISMPGIAKRTAVILLCIIGDISRFESSHQLIGYFGLYPVTKESGDGKKKPHMSKKGSVLMRKHLYLSAMVACNCDPYLRNLYLKSVEKGMAKKSAICKIMSKMLRMLYGMLTHYKPYDTNIDNDYRGRCPKQKELHNTPICSDSLDETNAMIAEAPISKKHAHNRKEQTNAVTRTRSSNRSLTAPSNLSSKTK

SEQ ID NO: 59678 - protein, 356 aa, unidentified
MHVTTPDAVIIGVDTHKDVHVAVAVTGLGARLGAISTPATATGYRQLAQWAHAQGSVLAFGIEGTGSYGAGLSRALTAQGCQVIEVNRPNRQLRRQRGKSDTIDAEAAARAVLAGEAVTPAKSGNGEVEMIRHLKVARDTALKARTQAMVTLKTLLVNAPQPLRERFIAITGPRTLVRALAALRPGPMTSTTASAKAALHALARRWLALDAEIKEHDGTLETLVRRRAPALMAAPGISTLTIAEMLVVLGDNPGRIRSEAAFAKLCGVCPIPASSGKTTRHRLNRGGNRRANAALYRVAVTRMRCHSPTRAYVLRRTAEGKSAREIRRCLKRYIAREIFQHLCAQQGQGHPAVKDP

SEQ ID NO: 59679 - protein, 323 aa, unidentified
MAKRITVCAGIDTGKHKLDVAIDGHSEQLQVENTPQGHQALVDWLRQHRVRRVGIEASGGYEQPVVVELRRRRFVVVVFQPAQVRAYAKFHLQRAKNDKIDAALIAACTAAVRTIHAAPDPRLSPFAEQLTLIDQIGEDIARLKNRIESCRNPRIKALWKQEIRRLTTCKRAELKALVAAIRKHPDLAKRLDLINSVDGVGLPTAVAILVRMPEIGQITREQAAALAGLAPYDDDSGEQTGVRHIAGGRERLRRALYGAALPASFRWNQQIICLYQRLIAKGKQHKRALIACARKLLVFANTVVARGTPWQNIAPPATAQAAT

SEQ ID NO: 59680 - protein, 337 aa, unidentified
MFAVGVDVSNARSTVAVLQSKTKVAIKPFEVQHTAEGFAALTGTLNALGGEARIVMEHTGRYYESFAMSMHQAGFFVSAINPLAIKEYQDGVTVRKVKTDTADALKIARFALDNWEILPQYTPMDTIRYNLKTMHRQFQLSSKTKTALNNNLIALLEQSYPGVDKYFDSPARPDGSQKWVDYADTFWHVDCVAKVSQKAFTERYRKWCKRHGYNFSAQKAVELHADAKQKFPLVPKSDTCKLLVKEAIAQLNAVSRTVETYRVEMNRLASQLPEYDTVMGMYGVGPSMGPQLMAEIGDIRRFAHQKSLIGFAGTDPIKDDSGDKVSDSKPSSKRGSP

SEQ ID NO: 59681 - protein, 374 aa, unidentified
MEEYTRFVGIDQHKNSLSIAVAYAGRDKEEYLGRVPNDPAVIARWIRRQGLVWGGLSKTLWCYEAGPCGFGLHRQLTRMKLDCQVVAPGLTPRKPTERVKTDRRDAEKLARLLRSGDLTPVWVPDEEHEALRDLVRARETARDDLARQRHRLQKFLLRQGVHCPEGINAWTGRYEGWLNTVKFGWVTHQEVWAEQRQAIREAEGRLARLSKALEEAIESSRWRQVVESLQCLRGIKVVTAATLVVELGERAEFCGPEQLMSYSGLVPGEDSSGEKIRRSGITKAGNAHVRRVLVEAAWHYRHRPAVGQVLKRRQQGQPVEVLEISWRAQQRLHTRYRKLLGRGKDKNKVVVAVARELLAFVWEIMQVVPMSTSV

SEQ ID NO: 59682 - protein, 407 aa, unidentified
MRVYLGIDWSQSKHDLCLLNEAGAVVAELTIPHQPEGFEQLDDLRRTAGVAASECWVGLETAHNLAIDFLWARGYHQVFVIPPNAVKSARGRYRQTNAHTDRSDAYVIADMLRTDQARLQPWHPDGDVTQQLRAKVSLVLHLTHTIRRLDNRLQAVLGRYYPAARHVFHDTLTLVGLRFLQAFPTPQAATALTRAAFSDFVRAQHYTRSEQMLLAAYARLTQPYPQAAPVIVAAYQAEAVLLAELLERLLNHKMTQLKTMQLLFHQHPDATVFASLPGVGDFLAPALLAKFGDDRERFPDAASVQCLAGTCPVTEASGKRKVIRFRRACDHEFRWLVQQWALQSLNDSVWAVAYWKQVRARGGSRSHAYRCLANRWLAIAWKCWHMRQPYDEAYHLHQRARRSQPRS

SEQ ID NO: 59683 - protein, 332 aa, unidentified
MGEVSTIGLDIAKSVFQVHGVDVDGAVVMRKRISRAKLLEFFASLPACLVGIEACPSAHYWSRRLQALGHTVRLLPPSYVKAYLKRSKNDANDAAAICEAVTRPSMRFVPTKSEEQQSGLMLHRSRQLLVCQRTMLSNAIRGHMAELGIISAKGRNGTAKLLEMIADEQNDRIPAAARFSLAVLARQYATIRSEIVAIEKRIHAWHRSSEESRRLEEIPGVGPIVATALVAEVGDWKTFSSGRSLAAWIGLVPRQHSSGGKDRLGSISKQGNRHLRWLLVAGAMAVIRYARQHGTKRPWLARLMDRRPIKVAAVALANKIARMAWAMRDRER

SEQ ID NO: 59684 - protein, 347 aa, unidentified
MDVTHSGSRFVGIDVGKAHIDVHVRPSGEAFRLTRDPAGLAELVARLNPLTPALIVLEATGGFERVVTAALCGVGLPVAVVNPRQIRDFARATGRLAKTDRVDPKVIAHFADAVRPDQRPQPDAAARELADLITRRRQVVAMISSETMRSHQARLPAVRRRLAAHLDWMNQELRQLDADLDTAVRANPAWQERATLLVSVPGVGDATTRTLLAELPELGTLGRRQIAALAGLAPVAHDSGQHRGTRHIRGGRGTVRAALYMAAWIGSRWNPTLKDIYQRLRAAGKPRKVALVACMRRLLTILNAMIRDKRHGAPREATRRADPNHAWHGRRRVKAAAAEGGGAKRQP

SEQ ID NO: 59685 - protein, 339 aa, unidentified
MSHYCGIDLHSNNHVVVVIDERDKRVLDKRLGNDLSLTLKVLSPYHDTLKGIAVESTFNWYWLVDGLMDAGYSYAHLANPSAIKQYEGLKHSDDQHDAFFLAQLLILGILPQGYIYPRKDRPVRDLARKRMFLVQHKTAHILSLQSLIQRCCNMKVRASDMRHLTVKELEMWLEEEHLVLSAQANLDSINFLKQKIKQLEKAIIQKVKLNKAFEYLLTVPGIGNILAMTIMLEVGDIKRFPKVGNFTSYCRCVPSRRLSDGKSKGSGNRKNGNRYLSWAFTEAVHLGRRYNERFRRYYNRKVAQANTSLATKALGNKLARICYYIMRDQVPFREELFCR

SEQ ID NO: 59686 - protein, 381 aa, unidentified
MKKTKETLQRKDNTKEEVLHLAFELSNTKWKLASSDRKKVRSKTIDARNLEQLQEEIGRTKQRFKLDDNVRIVSCYEAGRDSFWLHRYLCSCGIENVVVDSSSIEVNRRKRRAKTDRIDAKKLLSMLLRYHGGERLLWSVVNVPSVEDEDGRHLHRDLEVLKKERNMHRNRIKSLLIQQGIAVKNPSNMKFLIILETFRTWDGKELTADLKSRIIREHNRLRIVEEHIYSINKERERRLENGDTESLRKVAQLMTLKGIGMNSSWKFVMEFFGWRRFKNRRELGSLSGLTPTPYDSGGSQWEQGISKAGNKRIRTLSVEMAWVWLRFQPQSKLSQWFNERYAGGGSRMRRIGIVAVARKLLIDLWRYLKYGVIPEGAQLRS

SEQ ID NO: 59687 - protein, 361 aa, unidentified
MSESMALVGLDVHQAQSVAAVLDPSSGELRVERLRGAPAVVVPGFLEALGRPVRAVYEAGPNGFALARAGAERGLDVRVIAPGSIPRAPGDRVKADRRDAKRLVRLFAAGELSFVFVPSEEDERFRDLVRCIDDARKDLMRARHRLSKFLLRQGERFGGCAWTQTHERWLRSLSFDDALTRATFIDYWCAVQALVARRAALIAVLEQVVPDSSHAAVIARLRCFRGIDTLSAAGLCAEVGTFARFAKPNLLSGYLGIVPSEYTSDNKRVQGQITKAGPTHARRLLIEAAHHYRRRPAISQGLATRQAGQDPRAIQIAWRAQRRLHARWTHLGAERGKPAGTVAVACARELAAFCWEAATLD

SEQ ID NO: 59688 - protein, 479 aa, unidentified
MSFRSLRLQARRVNFEGRRQKMAKEKKSAGTPKTFDTTKLPKHLRHINVDAAGIDVGSDRHVVAVPEGRDEVSVATFGAFTSDLYALADWLEKCGITTVAMESTGVYWIPLFEVLEQRGFEVKLVDARQVKNVTGRKSDVLDCQWLQELHTYGLLAGAFRPPDEITVLRSYMRQRQMLTEASSMHIQHMQKALQQMNVLLQNVVTDITGVTGMNIMKAIIAGERDPQRLAEYRNERCKNSVETIAKSLEGNYRDEHVFALTQAVELYDIYQQKIAECEAAIVKHVRTLPHATEDEPPSSENPTPSRDRVRGPADLREELFKITGVDLFAIPGLAADTLLTLAGEIGFDMSPWKTEKHFASWLSLCPGTKKSGKRVLNRKTKRNANRAAQAFRMAAATQARSKTALGAFYRRIRARSGGIQAITATAHKIAVIYYSMLKNGTAYSETGQQAYEQRYQERRLLALNSLAKAFGYQLVPAAQ

SEQ ID NO: 59689 - protein, 370 aa, unidentified
MRKSVLYVGLDVHKMSMDVAIAEAGPGAEVRFYGQIGGDLDSLDRVIRKLRATGAQLQFAYEAGPCGYVVYRHLTAQGWPCLVAAPSLIPRRPGDRIKCDRRDALSLARLFRAGELTAVKVPDADDEAMRDLTRAREDAVSVERRAKQRTGALLLRHGRRYPGKTTWGRGHWRWLLQQVMDHPAQQIVLQEYLDAVREAGARVQRLTGQIQALLPQWRRAPYVAAYQALRGVSLIVAATMVAELGDLSRFNNPKELMAYLGLVPSEHSSGASVRRGHITKTGNGHARRVLVEAAWAYRLRARVTRPVLQRQEGLSTAVKEIAWKAQLRLCARYRRLLARGKAKNTVATAIARELAAYIWAIGQAVGPLTT

SEQ ID NO: 59690 - protein, 417 aa, unidentified
MESARNTLSEEPLNGVTAGLDWARDDHAVAVVDGRGVECERWTVPNTGPQLRRLVERLQKLGVAEVAIERGDGPVVAALLEAGLTVVVISPNQLRNLRGRYGSAGNKDDRFDAFVLADTLRTDRARLRPLTPDSPATITLRQTCRARKDLVEHRVAVANQLRAHLLINFPGAVGLFNRIDAPISLRFLTRFDCQDRADWLTPTRLAAWLRSTGYCGRTSPAVLHTRLTTAPRGTTGPASTANRHITHALVAVLTCLNTQITTLNDQIATQLAHHTDAHIFTSLPRSGTIRAARLLSELGDCRARYPTPQALTCLAGVAPTTRQSGTQRTVHYRFAADKQLRDAICDFAADSRKTNPWAANLYHQARNRGHTHPHAVRILARAWLHIIWHCWQQHTPYQPTHHHALQRLLTPQTNHPR

SEQ ID NO: 59691 - protein, 430 aa, unidentified
MGLIVPTAMHPERDNQPMPYEWFVGIDWGSQRHQVCVLDRDRRRVGERAIDHDGASLAQLAAWLWTVSAGQPQRVAVAIEVPRGAIVEGLLERGFHVFALHPKQLDRFRDRHSVAGAKDDRRDAFVLADAVRTDQPSFRRLQLDAPQLLRLRELSRAEETLLEDFRRSANRLQDQLHRLYPQMLQLCSAADASWLWDLIDLAPTPAHAALLSEEHVQRVLKAHRVRRVTAHEVLACLQAPALPVAPGAAEAAQAHCGFLLPCLRVLAEQLQACSQQVSALLHTLAEEPGDGEGPSDVAIVLSLPGVGRKITAWLFAEAAQPLAERDYQVLRTHGGVAPVTKQSGKRRVVVMRRGCNPRLRHALYHMARVAMQRDAHFRRVYAALRAKGQRHGQALRNVGDRLLRILMAMLHNRTCYDASRIRREPVVQRG

SEQ ID NO: 59692 - protein, 300 aa, unidentified
MTIVEADRTVVGGVDTHLSVHVAAALDGGGALLGVEWFAAAPEGYAGLLGWMASFGTVAKIGVEGAGAYGADLTRFLHRAGIEVLEVDFPSRQTRRKRGKSDPTDAVEAARAAHSGKAQALAKTRDGQVEAIRALLVAKRSARQARIKALNQIRQLAYTAPDVIRQRLKGISSDTLAAAAARLRPRSGGDPVVLATTVSIGLLGRRALALEAELDRIEALVGKLVVATAPGLLAVYGVGVDTAAVLLVTAGDNPERVRSEAAWAHLCGVSPIEASSGKVVRHRLNRGGNRQANSACGGSS

SEQ ID NO: 59693 - protein, 328 aa, unidentified
MLAETIYLGLDVSKKTIDVCVIFPDGTKMRTKISNSRAGFVELIEWLHGVDLANIHACFEPTGNYSNAIGYFLFEQGIRASRVNSYAVLHHGKSQKFRSKTDSIDAYLLADYCKKNQPPLWTPQSVTQQSLREIQHRLDSIDEAIHQEKCRLEAGVECEAVVEDIEESIGKLHVRRMKLEEALDKLVSADEKLSEDYAILKSIIGIGEKSALRLLALIKFEKFESSRKVGCFAGLSPRKYESGTSVKGKDVISKIGSAELRSSLYFPAMVARQHNPQLREFAERLEAKGKAKKVIICAVMRKLLALAHTLLTKREYYNPEYRSPLAAR

SEQ ID NO: 59694 - protein, 338 aa, unidentified
MVVIGIDPHKGSHTAVAIDEDEVKLDEVRVRADRRQLEALTSWASAFPKRSWAIESANGLGALLSQQLVGAGEEVFDVPPTLSSRVRVLASGKSQKNDPNDAFSVAIAALRSSRLRPVVTEDHIAVLRLRWNRHKNLTSLHTQAVCRLHALLAGIVPGGAHRRLSADQAVAVLSGCRAKTAVEKARKAQAHDLIADVRRLDAQLKASKRTIVEALAPVPTCLGELSGVGPVATCIILAHTGDIRRFATQDDYASYNGTAPIEASSGPRKRHRLNTRGNRQLNHAMHIIAFSQLSHAGPGRDYYERKLAEGKTQKEAVRALKRRISDAVYRHLVRDTQR

SEQ ID NO: 59695 - protein, 354 aa, unidentified
MNYVGVDIHKRYSVLVAVDERGRELARGRISGNSVHAFAQFFEALQGPGKVVLEACWNWGRIYDVLSEIEQVEEVVLAHPLKTRLIAEAQIKTDSLDALALATLLRGNLIARAHVPSKATRARKELLRQRLDWARLRTRVRNRVHAVLDRQRELEMPQCSDLFGRKGLNALSKLRLAEPDAILLGEELDLLKLIDSQIKAQEGRIVAFNANEQATQYLQSLPGMGKILAAVAAAEIDAIERFDGAAKLCAYAGLVPTTYGSGGKVHQGHLLKSRNKWLQWAFIEAAWVAVGCSSYFGGIYRYQRARGKKANIAITIVARRMCRIAFTLLKERRNFQEQHRTFPGRSAVRLTAAA

SEQ ID NO: 59696 - protein, 411 aa, unidentified
MRRVIGMDIHRTCAEVVFWEEGRLRPAGRVSMTRSGLEGFGRGLGKEDEVVIEATGNAMAVVRTLSPYVARVIVANPLQVKAIAHAHVKTDKIDAGVLASLRAADFLPEVWLPDPDTERLRRLVARRNQVVRHRTRIKNEVHAILHAHLIPPCPHADLFGRLGRVWLAQQVMPDDECAAIERHLRELDRLGADLGVLDTQVAQAGSDDPAVKRLLTITGVNLIVAAGLVAAIGDVRRFTSPQKLVSYVGLNPRVRQSGLGLAQHGRISKRGRSHARAMLVEAAWAAAKAPGPLRAFFLRIRARRGHQIAAVAVARKLAVLCWHLLTKSADYQWARPALVASKLRAMELQAGQPVRKGNKRGTAYAYNVKALRDAEIELARHAEKAYERFVSQWQRRGTAKQRTGAAIEERR

SEQ ID NO: 59697 - protein, 313 aa, unidentified
MTDIICGVDVSSEWLEACVRGASAEFGRFENSVLGLEALAAFCREQGVGLVVVEATGGYERLAFGQLWAAGLPCAVVNPRAVRQFAQAMGLLEKTDRIDAAAIAWYAQAKRIAPRPPASAVQQQLAAVVTRLRQLTELRTMQTNQRRLVGDPDASRSIDEILALIGRQIRAFEAKIVELIGSDPLWDKLDATFRSVKGVAGRTVARLLAELPEIGTLPNKAAAKLVGLAPIACDSGKRTGRRAVRGGRSSLRAILFVVAGTVRRYDPDFAAFHRKLEQAGKPKKVIRVALARKLLVRLNAKARDARHQFANPA

SEQ ID NO: 59698 - protein, 492 aa, unidentified
MHRKQSLDYFNQSFERVPVRSRSTNEFSFADAYFNASTIRLSQNGSNACLPTNADQLNTKKKPTPMNPNNQNQSFAAFIGLDKSDKKINVSLQRYGTAKIERSIIKGGAEALHAWVATLCTRFAHRQVAICLEQPAAGLIHGLMGYHFIVLFPINPMTLARYREAFTPSRAKDDPTDADFLCELVALHREQLKAWQPDDVCTRKLRHLTQARRRSVNMRTRFSNQLKALLKGYFPQALELCGDDLTTPMACALLQKWPSLQQLKKARAETIRRFYYVQNARRGDVIEKRLALIAQAAPLTNDPALIESSIITVQALTLGLRAAHTAISRYDREIARTFAQHPDASLFAALPGSGTAYSARLLAAFGSRRELFESAEVMLNFSGVAPVLKRSGQATLIHRRYAWPLFVHQSFIEYANESIRHSLWARAFYQMHKAAQKSHWVIIRALAYKWIRILFRCWQERTPYDEIRYLRSLQKSRSPLLQYLAQPAIQTA

SEQ ID NO: 59699 - protein, 377 aa, unidentified
MSKLRFVGLDVHADTIAVAVAEAGGEVRSLGIIPNRLESIRKVIGKLAPIETLKCCYEAGPTGYVLYWQLAQMGVGCEGIAPSLIPTKAGDRVKTDRRDAEKLARCYRAGELTPVWVPDANHEALRDLVRAREAAKKDQLRHRHRLGKFLLRHGKRPTDAGKAWTQKYLNWIRIHVRFEQPALEATLKHYQEEVDHIAERIVKLEQAIDEAVKQAPAEIRVAIEALQALRGVAQTTAATVVAELGSLSRFASPSQLMGYSGLVSREYTSGNRVQRGTITKSGNAHLRRVLVEAAWTYRHRPNVQGRVLRRQKALALSEEAVKIAWKAQQRLHKRFAALTARGKESNVAAIAIARELLGFMWAIAVHTEAQQKQAKAA

SEQ ID NO: 59700 - protein, 312 aa, unidentified
MTQIICGVDVSGETLDARIGRDGRHERFARTVEGIAALAAFCRQHRVELVVMEATGGYEKLPFAQLWEEGLPCAIVNPRAVRDFAKAMGRLEKTDRIDAGIIAWYAEVKGIVGQPPASPAQQQLRALVTRLRQLTELHTSQKNQRRLVGEPAVLALIDETIALFKRQMRQIEQAIAGLLDTDPLWQALDRAFREIKGVADRSVARLMAELPEIGTISNKAIAKLVGIAPIANDTGKRKGRRPVRGGRAAPRALLFTIAEIVRRYVPDFADFHQKLSQAGKAKKVIRVALARKLLVRLNAKARDVRRQLALAA

SEQ ID NO: 59701 - protein, 423 aa, unidentified
MKYALVRVLPEVPPGGVCAGIDWASADHAVCVAVLAGRVRDRFTAVHDRAGIAGLIARLRGSGAAEVAIERGGGVLADALLAAGLTVVVIGSRQVKNLRSRYGSSGAKDDRFDAFVLADTLRTDRARLRPLVPDSPATLALRAAVRARRDLVAHRVSACNQLRAHLAVAFPGATGLFSELDSPLSLAFLAAFPAQLAAARLDEQALAAWLATVPRRGNTAPAGVLAARLAAAPRGAAGADAAQAAVTAQLAAATAGLAGRVRALEAEIAAQLAAHPDQHIFTSLPRAGTLRAARLLAETGDCRARYPDPWSLAGLAGVAPVTRRSGTYISHEFRWNVSRQLRDAICDFADGSRHASPWAATVYAAARDRGKDHPHAVRITARAWVLIIWRCWQDGTSYDPAKHRALQDVLTRQAAAGTPQPHR

SEQ ID NO: 59702 - protein, 340 aa, unidentified
MGWTVAIGIDTHRDSHVAVALDRLAGARGSLAVSADAKGYLLLWRWAQELGEPAFAIEGTGSYGAGLARFLVSAGAEVYECERPRRAERRRGKSDLIDATLAAGRLLQDRSLPRVRGGGEREDLRLLLLERRGAVRARTAALNQLQAVVVTAPEALRSRLRGLSGQQLARVASRLRTAEEGAVIAGVLRRLGRRVRELGRELDELDSELEAIVIRLVPELLEESGVGPVCAAQLVVSSGDPTRMASEASFAALAGTSPVQASSGLKQRHRLNRGGDRQLNRALHVIALNRVRWHAQTAAYNQKLIASGKSPREARRCVKRMLARYFHRRLQMIPALDLTP

SEQ ID NO: 59703 - protein, 382 aa, unidentified
MKCAGLSPRNGLGEDRNHGGADMAQVRTWVGLDVHAAKVVAAVADSQSGELAIQRMGGQTEQVAEFCAALPAPVRVAYEAGPTGFGLARALAARDVDCTVAAPGKIERPAQDRIKTDRRDAERLARLLMIGGLHPVRVPTPAEEAMRDLIRAREDVRGDLMRARHRVAKLLLRHDLRFDGNNWPQRHLDWLGRVELPEPVAQSVLLDGIGAIDALLVRRESLEAQMSALVEGSPWEQSVAHLRCLRGIDTLSALGLCAEVGDFERFERPAQLMSYLGLVPSENSSGEKRRQGSITKSGSRHARRLLVEAAWHYRRAPRKGRELRRRQEGQSQAVCAISWKAQQRLHRSWVRLDSERGKRRTLCAVAVARELTGFCWAVATAD

SEQ ID NO: 59704 - protein, 343 aa, unidentified
MNKLNVIGVDLAKNVIQVSVLSPANRELRNAALTRRKFAEFLGRQRASLVAFEACATAHYWARVAQRHGHEVKIIPAKAVFPFRQGHKTDENDALAVAEAARRPNVKLAPLKTVEQQGMHAIQRSRELLVHERVSLSNHLRGLLMEFGIVIPQGFASLYRLQPEILEDGENELPDLYRPTLNRLYGRLCDLREDLEQLNREIEVLVQSNPVCRRLMALEGIGPIGSVLLYATLGTGEAFVNGRQFSAYLGLTPKQFSSGGKVNMVGISKRVANKRLRAVLIQGARAYVYHMKEPKTAKDQWLWAIVERSGKCKAAVALANKNVRTAWSMLTQNTEYQRYPIAA

SEQ ID NO: 59705 - protein, 411 aa, unidentified
MRVHHKVCCGIDVHKRSVTACLMWGPADQEPQSEIRRFGTMSSELKQLAEWLKQAHCEVAVMESTGSYWKPVWNILEGHVRLILANAKHVRALPGEKTDNKDGKRLASLLRHGLIRSSFIPPREIRELRDLTRYRRKLLGNGAAERNRIQKILEDANIKLGSVLTDVFGVSGQRMLHALVESESINVEQVAELAHWSLKPKMDSLKKALEGRLTHHHRFMIEISLYHMEHIERQILRLDEEIARHLVPYQKEYELLQTIPGIAETGAASVLAEIGPDMSAFDDDDHLSSWVGICPGNNESAGKRFSGKTRKGNLHLTSALVECAWGATHKKNCHFKSKYYGLKQRRGAKRAIVAVAHGLLRTVFVVLKSGQPYQEPVRPPLPEAKRLRKAQRLSRQLRALGYEVTIKTKTA

SEQ ID NO: 59706 - protein, 405 aa, unidentified
MKHVIAFDVSMGKSYMVIYNTLKKCIYEGEIKHSRPEFENLKKRIDRLTEGYGEQPHIVFESTGVYSRQLERFMNVNGFSYCSLNPLEAKLQCDSLRIHKTDKSDAHQLALTHFSTQRTNRNGTEDLFLQLKSLSRFYSELDDELSVTRNRMHKVIQLTFPELEKIFTTKSELFLNIVQLYPHPDLVLQHSKTVIKNKIRTNTDKNISTARAEKKATQLLEAAHLSFPAVSSTDVLCSQLISYARRYQELLSMKERCIEDMAQLAESRAEYHILLSFPGIGSNTAVRLMAEIGDIRRFENNKQLNAYAGIDIRRYQSGKTFYKDKINKRGNKHLRKLLFIIIQNMIKLRRFSQNHIVDYYDKLKTQPYNKCHKVASIACVNKLLKIIFHLITHNMNYDFRLATQS

SEQ ID NO: 59707 - protein, 323 aa, unidentified
MQGKVSFQEDAMPVVYAGVDVSKEWLDVHLHPLGESRRFSNDKTGIRQLKRLLARHQPKSIVMEATGKFHRPAHRSLWLDGFAVAVVDPLRARMFARACGYLAKTDRLDARFLALLAESLRPPADTPPSPHVEALQELVNARSAAKCDITALQNRSKTATTALLRGELNRLLRRLEQHVERLDKEIERCVGEDPQLYRKAEILTSIPGIGRVTALALMAGMDELGSCSGKQAAMLAGLAPIANDSGARTGRRSIRAGRPAPRRALYMAALSARRYNPALARFADTLKAAGKPAKVILVAIMRKLLVLANCLLAHDRIWTPNPP

SEQ ID NO: 59708 - protein, 316 aa, unidentified
MNQIVHWVGIDVSKAQLDGHIRPTAAAFQVSNTEAGIATLVQRLQQLQPVLVVMEATGGLETPAAAALGAAQIPVAVVNPRQARDFAKATGKLAKTDAIDAQVLAHFAEAVQPEVRPIANEESQQLAELVTRRRQIVEMLTAEKNRLGTVRSAMQQEIEAHIAWLEDRLEALEAQLKQSIEQSSLWLARVNLLQSVPGVGAVLSSTLLVNLPELGTLTHKQISSLVGVAPLNRDSGKKRGQRMIWGGRAQVRAALYMATLASTRYSPIIKTFYERLCAKGKLKKVALTACMHKLLIILNAMAKTGVPWRPDVAEKA

SEQ ID NO: 59709 - protein, 390 aa, unidentified
MSQSFDAGRSLTAFEQDSTLVAVIEMSQSKWLVAAVIPGVARQPLKKLDADAGALLKLLQRWREEARKAGREVKRIVCAYEAGRDGFWLARWLQAHAIEAYVIHATSIAVSREHRRAKSDRIDTELLMRSFLGWLRGEKRHCSMVAIPTMAEEDARRPSRERENLVGEQTRIVNRVKAVLALFGIGGFNPRLRKAAQKLETLRTVEGTPLPENAHAELRHDLERLRLVHDQICTIESERLRRLAQAPAAATGPHAMVRLIARVLGIGIETADMLVNEVLTRNLRDRRAVARYAGLTGAPDESGKRRREKGLARAGNGRVRRGMIQLAWRFLIFQKDSRLVQWFRERTADGRSTTRKTMIVALARKLLIALWRLVTTGEMTEGLKLRPAGT

SEQ ID NO: 59710 - protein, 348 aa, unidentified
MVHFVGLDVSVKETSVCVVDDAGKVILEQKVPTEPADIIALLSSLDATFSRIGIEAGPLSQWLANALTAADLPVICVETRHMKALLTAQQINKTDRNDARGIAQMMRVGLFKPVHVKTLVAQEKRMLLTSRKLLQRKLLDLESDLRGTLRNFGLKVGVVSRSRYEARVRELVEGFPRLAAIAEPLLAVRRVMRQQLAVLHKMLLDTVRGDPVCRRLMTAPGVGAVVALTYRATVDQPQRFVHSRAVGAHVGLTPKRYQSGEVDYDGRVSKCGDALLRTVLYEAAHSLLIQSRKWSWLKAWGMRVAQRRGIRRAIVAVARRLAVVLHRMWVDGSEFRWKKDSAAVPTVA

SEQ ID NO: 59711 - protein, 409 aa, unidentified
MRNNLRKVYVGIDVHSKEHKAAVMPVTLLEQPGTYWKETKPLNLRNNISDFQSLHSHIMEYASHPEEVAIAVDHTDGHYSEPLVHYLLGKGYNVYHLEPKAVKAARERLLDVEDKSDSIDSNGAAYLLYLRDRHGLSFRISAIMPQMNASAAALHLLILQRWQYNKLATQATNRLHQLLLAVFPEGETKYFKKLLEIVPYYPTPKEMLASSGLGDIVKLQRKDKENILRLAADSVGVPGDPYRFLIRDLIVQRMEAIRKRDELAEIVRREVCAHPYGSTLTSFPCLGEIAAATIIGVVKDIERWPNKKKFKKALGVYAVSSQSGTSTHKSRQGKEGSKDARRVLFQVCFGCVRANIRDNDFKDYYLRQVARGKPRLKALASTMGKLAKIIYHCLKVKESYEYRGKYRVN

SEQ ID NO: 59712 - protein, 342 aa, unidentified
MKEVSTIGLDLAKNVFQVHGVDGSGKTVIRRQLRRGQVLPFFKKLPPCLVGMEACATSHYWAREIAALGHEVRMMPARYVKPYVKRNKNDLADAEAICEAVTRPTMRFVPIKTPDQQSILVLHRTRELFVRQRIMLVNALRAHLAEFGIVAGVGRNGLEKLLEVIADEQDARVPPEARDCLLALRDQLELAKRQILEADRRILAWHRANELSRRLDDIPGVGPLIATALVASIPDPQAFRSGRDLSAWIGLVPKQSSTGGRERLGHISKAGNRYLRKLLVVGALSVIKRAKQGSARRPWLVALMARRSTKVAAIALANKIARIAWAMMVRGTHYQEPLPQAA

SEQ ID NO: 59713 - protein, 388 aa, unidentified
MYLVGIDIAKYKHQCFIATTHGEVIKEFSFDNNSNGFKVLLEHLQALDHSYEIKIGLEATGHYGNTLKHFLSANSYTFVEFNPYLTKQFFKSTTIRKTKTDKIDARMLARMLPSVDYKTLHTKYYHINELKSLCRTRNSLIESRSNTLVQITNALDIIFPEFKRHFNNRLGLTALFILEKYTSPKKIAKLNKNHFEKLYKLSRGKFTYPNFRKLKELAKDTVGIESKSNELKLKLYTKLYHSYNTKIKILEAEIEEIMSYTTSYIKTIPGVSLMSAANILGEVGDFTLFSNPAKLIAFVGYDIAVYQSGESKSYGKLVKRGSSLLRKTVWNIVLGCIREVPVINDYYYKKKNEGKHRNVIFSSIARKLLRIIYYLETNQVSFDQNIIR

SEQ ID NO: 59714 - protein, 343 aa, unidentified
MDLKDTAATTATVWIGIDVSQDTLDVCLLPTTGKEKHKEFSNDALGHAKLLRWVQHLIGEQGCHYCLESTGSYSTAVAYFLAQAEERVSLVNPARIKYAGMAQGLGNKTDQVDARLIADYCRKQQPALWRAAAPEVRVLVALVRRLHSVQELVVQEQNRLAVPGLPAQVHTSLKKMLRVLEAEVHRLQKQIKEHVENHPGLKADKELLLSIPGIGETTAHELLGEMPDVKQFASAQSMAAYAGLAPREHSSGSSVRKRTRLSKQGNSHLRRALYFPAVSAVQWNPLVKAHYERLREQGKGKMVALGAAMRKLLMLAYGVLKSRQKFDPQWTQQQKRQPMLAVP

SEQ ID NO: 59715 - protein, 340 aa, unidentified
MSVIIGIDPHKRLHAACAIDETEREVAQLQVTAGECQLEELLAWAAPFATRTWAIESAGGLGYLLAQQLIGVGECVVDVPATLSARVRVLGSGRSNKNDPNDARAVAVAALRAPSVAAVRREDHITVLRLLAKSHLDAGRARSKACSRLHALVRELVAGGIRKEVVVSQAETVLAEIATANAVQRQRLELAYEQLDDIRRLDAKLKRSKARVSDAVTTSATTLTDLYGVGPIVAAILIGYTGDVRRFPTAGHFAAYNGTAPIEMSSGGRVVHRLSRRGNRTLNHAIHMAAVTQIRHADSEGRHYYDTKIAAGKTKREALRALKRRISDRVYRQLLADTRR

SEQ ID NO: 59716 - protein, 403 aa, unidentified
MNNVAGIDVSKGKSMVSVLRPFGEVVAKPFSIGHTGSELKELADYLKSLDGETRVVMEHTGRYYEPVARFLHDEGVFVSAVNPKLIKDYGNNTLRKVKTDKADSRKIARYGIDNWAELRQHTPMDTIRMQLKTLNRQQSLYSKTKTMMKNNLIALLDQTYPGVNALFDSPVREDGSQKWVDFATTFWHVDCVRNMSLTAFAERYRKWCKRHGYNFSQSKAVEVHAGAQDLIAMLPRDALTKTMVRQAIDALNAISASLERLKAEMQALAAQLPEYPVVMAMHGVGDSLGPQLMAELGDVTRFTHRNAITAFAGVDPGADQSGTHEAKSTRVSKSGPPELRRALFLVMDCLLKTMPQDDPVYRFMDKKRAEGKPYLVYMTAGANKFLRIYYGRVKEYLASLEGN

SEQ ID NO: 59717 - protein, 410 aa, unidentified
MDIIIERCAGLDVHKQVIVGSVRVPGEQRQRTVDTRTFSTMTEGLLELSDWLSSHGVTHVAMESTGVYWRPVYAILEHEFEVLLVNARHVKNVPGRKTDVRDSEWLAQLLEYGLLKGSFIPPQPIRDLRDLTRYRKTLIRERGHHVNRVAKTLELANIKLGSVVTDIMGKTGRTIIEALIQGHADPLYLASLAQGTLKKKAEELGRAVTGGRMTPHYAFLLEQQLRVIDHLSQRIDEFDARIEECMRPFDEAYRWALSMPGIAERSAQAILAEIGTDMTRFPSAGHLASWARVCPSNNESAGKRRSSKTGKANSWLRATLNEAAWAAVKKKDSYYRALYQRMKPRQGPKKAIGAVQHAMLNALWHMLSRGVPHHDLGADYFAARNVARTTRHYIRRLEQLGCRVTVDQAA

SEQ ID NO: 59718 - protein, 417 aa, unidentified
MEAIVERCCGLDVHQATVVACLLVGRPEQKPRKVIRTFGTMTVDLIALRDWLRDEGCTHVGMESTGVYWMPVYTILEGQFDLIIGNATHIKQVPGRKTDVKDSEWIADLLRHGLIRRSFVPPKPLRDLRDLLRYRRKLVESAMSERNRTLKLLETANIKLATVASDVFGVSGRCMLRALLAGRLTVAEMANLAKGSLRKKLPQLQTALDGRVEEHHRFLLEMQLERLEQVEASIDRLDQRIDEKLVPYAEPHTRLMQIPGVDRVGAAVLIAELGVDMSVFPSVHHAAAWAGVSPGNNESAGKRKGQPGRKGNIHLTTALVQAATSAARTKGTYLKQKYWRLKARRGPMRAALAIAHKILIAAYHMLAEGVGYKDLGDSYLDRASAVATKRTLVKRLEKLGYHVVLEPIAPQPTAAAG

SEQ ID NO: 59719 - protein, 356 aa, unidentified
MSRDLKYIGMDVHKEAVVIAVRNSTGQLVMESIVETKASSLLQFIHGLQGELHVTWEEGTWAAWLYDLLKPHVQEVLVCNARRNALLKEGSKNDKVDARKLSDLLRTGMLRPVYHGEHGLRTLRELARCYQTISQDQSRVMNRVKALYRGWGIGCAGTQVYAPRYRQEWLEKIQHAGVRRRAELLYQQLDSLQALRRTLRSELLAESRKHKASKLLRQIPCIGPIRAARLLALMQTPHRFRSKRQLWTYSGLGIETRDSAQYRFVRGQLQRAKKPQQIRGLNQNHNHEMKEIFKGAATRASCGVGPLRDFYVALLDKGMKPEMARLTLARKIAAIALILWKKEERFDAEQLKTQAA

SEQ ID NO: 59720 - protein, 323 aa, unidentified
MLPSLGIDISKASFHVELSLNKKLRHRKFVNRQEGFAELHAWLSKHKAELVHACMEATGPYSEDLALHLHQHGHTVSIVNPAQIKAFGQSELLRNKDDKPDAGLIRRFCEKQQPAAWVPPPAHLRALQALTRHLENLTQTKQQQVNRLESTKAKHVVKSLRKLIAYLDKEIERTEKQIQDHIDTHPDLKEQFELLDSISGIGTRTAATLLGEINFKQYRTARQLAAFVGLTPKNNRSGTFSGRTRLSKIGNHRVRKALFMPAIVAKQHNPIVHAFCQRLARRGKPKMAIIGAAMRKLIHIVFGVLKTGKSFDPEHQNIRTLVA

SEQ ID NO: 59721 - protein, 434 aa, unidentified
MSSEEDSDGSRKERPDRDPEPVRRFECFTADLYRLADWLKNCGVKTVAMQSTGVYWIPLYDILEERGFEVYLVNARHTKNLPGRKSDVQESQWLLKLHTYGLLNNSFQPSSEIRTLRTYWRQRTEHVAGAATCIQRMQKALTQMNLQLANVISDLSGLTGQRIVRAIIAGERDAQSLAGFRDPRVKASQEEIAKSLEGNWRPELIFLLQQEMAMYDTYQQRIAECDQQLHKHLASFADHAHQVRSQSAQGKAEGKKAKKPAAKNAPRFDLSSELERITGVDLTRIDGIDVMGSQTILSEIGLDMGRWKTEAHFASWLGLCPDNRTSGDKVLRRGTRHVVNRAALALRMAANSLLRSQSYLGAQYRRLRTKLGAPKAITAMAHRLARLVYRMLKYGQQFVDKGMEYYEQRYRNQQVQLLQKKAAKLGLQLVQAQT

SEQ ID NO: 59722 - protein, 444 aa, unidentified
MATSKAKTGRSKLEVMHPDAAGIDVGGSMHFVAVPNEAAEQSVRPFGVYTRDLHEMADWLQACGVKIVAMESTGVYWIPLYELLERRGFEVMLVDARQVKNVSGRKSDVLDCQWIQQLLSYGLLKAAFRPQDQFCELREFNRLRTRLLADQGRSVQHMQKAMTLMNIQLSQAISDVAGVTGQKIVRAIVEGERDAQVLAAYRDSRIKASVEEIAASLQGTWRAEHLLALKQALGRFDFYEQQLQECETEIQRAMAKLEVHTKELSKGKKRSKAKNAPKFNVRERLLKMCGVDVTKMDGIDETTALNIVAEVGTDLSRFPSDKHFASWLGLCPGTRISGGKVLGAKTKHSVNRASQAFRQAAAALRSSKSALGAYYRRLCGRMDKGKAVTAAAHKLARLFYALMTKGEEYVDQGQQYYEERYRQRVIHHLQRRAQSLGMCLVPTA

SEQ ID NO: 59723 - protein, 345 aa, unidentified
MELHTIGIDLGKTVFHLVGLNPRGEVVVRKKYSRAQLLRFTANRQVHLIGMEACGGAHFLGRALREQGHEVRLIPAQFVKPFVKTNKSDFIDAEAIAEAVGRPTMRFVPIKSDDQLDLQSLHRVRERWVMRRTAVINQIRGLLLERGMTVRKGRRHLEAALPAVMEDAAGKLSATLRLLLAQLKLELDQLATRLEEAEALIQLTAQESEACRRLDAIPGIGPVTATALIAAIGNGAAFGKGREFAAWLGLVPREHSTGGRQKLLGISKRGNAYLRRLFVQGARAVLQQRSKQSSGLSAWLKQLTARAHHNVVCVALANKLARIAWAVLATGQAYRPPAITAVAAA

SEQ ID NO: 59724 - protein, 335 aa, unidentified
MLADRVDYIIGVDTHTATHTAAVVTPTGAALAHRTVPADADGYLHVYRFAVEQAPGRRVWAIEGTGSYGAGLTTHLLEQGEWVVEVDRPARPARRNGTKTDDLDAVRAAREALGREHLAQPRQRGDREAIRVLVTTRQSAMQARTCAINHLKALVVNAPERLRQQLRALATDQLLARCARLRSHPTQPIEYRATIAALRRTAQRSLALAAEADDLHAELDTLIRRRAPWLLAEPGIGVICAAQLLNAWSHAGRLRSEAAFAMLGGAAPIEASSGKVVRHRLNRSGDRQLNRALHTIVLSRMAYHAETRAYVARRIAEGKTAREIQRCLIGRVSVL

SEQ ID NO: 59725 - protein, 320 aa, unidentified
MQTPSAVLNIGADVAKDEIVVACSEGSFPVRTLANQRTALRAFLKGLPVGSRLGMESTGTHHELLANAAHQLGFIVFVLNPKDVRHYAKAVGQRGKTDRVDAELIARMIAHEHPKLHAWVPPTPEQREMARLLKRRAKLSSLRQALGMSLKGVPGFAADLKALRARFDQVIAHLDERLKALLEASPERQQQAMHLRTIYGVGPVLGAALVNTLERVPLKSADAFVAFTGLDPRPDDSGQHRGKRRLSKRGPAELRRLLYVAAMSAKKTQAWKPLFEHYRAKGLSSTAALVILARRIARTAWSMYTYKTDFDPARLTKALT

SEQ ID NO: 59726 - protein, 356 aa, unidentified
MEQLTTVGIDLAKDVIAACVLDAHGAIVERKVLRRDAFERWAEQLPASNVVMEACGSAHHWGRWFAARGHTARLIAAEFVVAFRKGGKNDTADAEAVAIAARQPTMRFVPIKSVDQQAILAWHSVREGWKEERTALLNRVRGLLAEYGVVIGRSADRLLAALPKLAEDPRLPDAVRALLLEAREHFAALHARLARCDAQIAAHARNAPAAKRATELLGVGPLTASALAATVPDARVFKSGRQFGAWLGLTPRQHSSGGRTRLGRISLRGNVYLRTLLIQGARSTLQAAINAEPSRASRLQRWIVELYGRKGYSKSLIAIANKHARTLWAMLAKDERYDACAWQRHPMNQLSLAGNA

SEQ ID NO: 59727 - protein, 429 aa, unidentified
MNSTRNKKIEQVKETTMIVGIDVGSEKHYFRAFNWRGIELTRKPVAFSNSMEGFNSFYNTIVELIQKSELEEALVGIEPTGHYWFDLGQFMGEKNIKFVMVNPHHVHKTKELDDNSPSKNDRKDPRVIAGLVRDGRYFYSYMPTGVYAELRNASNRRFVLVEEQTRAKNRLQKWIAVYFPEYKGIYTHIDAKGGLLVLKQAPTPEEIVRLGVEGIIKIWKDAKLRGNGHKKAMLILNAAMKSIGLKAGLTEARMEIQDLIEDYELQTKRLERVNDLIKELCQQVRYADKLLEIKGIGITTIAGFIAEVGDITRFDSAKELQKLAGLELVADSSGKHNGKTKISKRGRKRLRYLLFEAAISVVGKNEEFKEIHKYYTTREKKPLKKMQSLIAVACKLIRVFHVILTKGISYDATKMLKDIRHPGEQLKAA

SEQ ID NO: 59728 - protein, 451 aa, unidentified
MTTMKPQVIDDQEHERVHERVAAVDVAKDTGMVCTRTPHPSRPGARRSTVWTVKARMGAVRALGGQLKHDGIEIVTLESTSDYWRIWFFVLEACGLAVQLVHAAQAKNLPGRPKTDKLDAQWLARLTEMGLLRASFVPPRAIRDLRDYTRARTRLVQERTRCWQRLEKLLEAALVKVSSVVSKLTTVSAQDMIKAMIAGQRDPHQLAALARGSMKAKHDDLVEALNGMFDDHHGELAQLLLDHIAFLDGRIAQLGTRATELAAALPAAWGADADGTTGPGAGTGPDAPVLNAVARLAGIPGISEDLARAIIAETGLDMTRFPTAAHLVSWSGLCPSARQSGPRARAGKKGQGDTWLRGSLGQAAIGAARTATFLGERYARIARRRGKAKAQVAVARSILVIIWHLLADPAARYTDLGYGYYQARTDVDRKLRNHIRQIQALGFAVTLTRAA

SEQ ID NO: 59729 - protein, 353 aa, unidentified
MRTYYVGMDVHRASIVIVVLNGAGKVVMQSVIETGAERVRGFLKQLRGKVYVTFEEGTQANWLHDVVRSLVTEVVVCDPRHNKLLQSGNKNDRVDAQKLAELLRNGSLRAVYHGDNGVRTLKELVRTYDSLVSDTTRVMNRLKAIYRGRAIACGGHDIYRQDRRGRWLEKLREPGAKQRAGYLYRQLAALKPLRHEAKREMVKEAQRQAAYPWLLSVPKLGSVSVAQLLAVVGTPYRFRSKRQFWTYVGLAVVTCTSADHEVVDGVLRRSTKPIATRGLNRNHNHLLKRVFKNAATSACHSGPFKAAYDTRVAQGMAPSLARLTIARQLAATTLAIWKRGERFSPERMKQQAA

SEQ ID NO: 59730 - protein, 347 aa, unidentified
MNFYNNTHPYYCGIDLHARILYVCIIDNDGNTLVHKEISDCPQKLLTILEPYIGNIVVGVECMHCWYWVSDFCDDIGVDFILGHALYMKAIHGGKAKNDKIDSYKIAKLMRGGNFPLAYTYPKEMRATRDLLRRRMKIVRHGADLKAHITNTASQYNLPPPKVVLKNKDAQHLISQHFKDPVVQRTVDLDMTLIKCYQAELSKVEWFIEQQAKKHNPVHLQLLKGINGIGRILALTIIYEIGDINRFPSVQKFASYARLVKCKAESAGKTYGTSGNKIGNAHLKWAFSEAIILHLRGNKEAQNYLLKLQRGMTKAKALSAFAHKLDRCIFYMLKHEKVFDENKFLKS

SEQ ID NO: 59731 - protein, 365 aa, unidentified
MQKISTKQTRGKNIFEGQLTIGLDLGDRSSAYCVLNEAGKIVFEHKLATTPEAMKQVFGSMPRCRIAMETGTHSPWVSRLLTALGHEVIVGHAQKVRLITKSRRKDDRLDARTLARLARIDPELLSPVKHRSAQAQLHLAEIRARAGLVSARTALINAARGLVKSYGERLPKCHTQQVGREMTGALSMGLREALEPLLREVESLNERIKEYDQRITKMAKQTYPETALLKQVKGVGDLIATAYVLTIEDPHRFRKSRDAGCFAGLQPGRRNSGDSEPQMHISKEGDEYLRTLLVQGAHYILGPFGEDSDLRRWGLKLSARGGKNAKKRAVVAVARKLAVLLHRLWVSGEVYEPLRNSQKAMSAAA

SEQ ID NO: 59732 - protein, 389 aa, unidentified
MAEVLRKLTGRAALDAGVVSGNGKKDGRGNTFGPNRDRLTVGVDLGDRWSQYCILGLEGETLAEGQLRTTQEDVGEFFRGLTTARVVVEVGTHSAWVRDVITECGHEVLVANPRLMEGSKRRKRKSDRIDANKLARLGRVDPQSLYPIRHRSREVRQDLVVLRARDALVSVRTELINTTRGLVKSMGTRLPRCSSPSFAEKVKDAIPVEVGEALQPLVQLVETVNECIERYDERIEELGRKKYGHTTLLRQVKGVGPITSLAYVLTLEDPQRFASSREVGPYLGLVPKQEDSGDSQPQLGISKAGDRMLRRLLVGSSQYMLGAFGPDSDLRRYGLRLCEHGGKNAKKRAVVAVARKLAVLLHHLWVTGDVYEPLHQARAGTGTAPAAAA

SEQ ID NO: 59733 - protein, 340 aa, unidentified
MEKRYIGIDLHRNRFTCCIRLENERTYVTEWELEDLGKFVKKLRPSDEVAVEITGNTRLFHDAIAEHVGRVVVVNTSQFRVIRQSVKKTDPNDAQTLALYLSKNMLPEVRMKDKEHGQLASLTQTRDTPVKLRTALKNKINNILSARGLNLPKEALSSEKRLAEVLELPFDEIVRIELRVIVEQIRSLNRSIAELEKTIGEEGSKLDGHKGLLSIKGIGKITGAILLSVIGDVNDFADEGHLASYFGIVPRVSNSNETERSGRIHKRGTKLGRTALVQSALIAANYSPYLKRFYEQVKARRGAGKAIIALAKKFLGIIYRTLKNKWVFEDFPNFVLAEES

SEQ ID NO: 59734 - protein, 412 aa, unidentified
MRNPLLVGIDVHRKTNTVALMDLTGDEVAPQFTVANNRPGAATLAQTLQATAEERGYDAIHIAAEATGWYWWHLFCALDQDPCLAQRPLFLYPFNPRLIATFRKTYSERDKSDLIDAAIIADRLRFGRDLPQPYLGDERYQALRFLTRHRYHLVQQIVREKSYFLAHLYLKASEYTRLKPFGDVFGVTSRALLRDYANIEEIAAIPFEDLVEIIDQLGKRRFADPESNARQMLAVARDSYPLAEGLQAPVNLILRQSLQQITSLQQLVKRTDTAIAEALQAIPNTLQTIPGIGPVIAAGVIAEIGDLARFDYDEAKVAKLAGLTWRQTQSADFEAEETPLSRSGNRHLRYYLCEGANRVRMRDAEYRAYYERKYHEVRLHQHKRAIVLTARKLVRLVVRLLTTNQPYRPRRA

SEQ ID NO: 59735 - protein, 418 aa, unidentified
MKSIKTKKVTKINDKTVIATLDIGKNIQYGYFRAPNGNDVKPFEFYNSKKSYDEFWQKLCQFKDQERLEQIVIGFESTGPYAEPLFHFLRKKPVRLVQVNPVHTKRVKELTGNSPNKTDKKDPRVIADVISLGHALTLVVPEGPAAQLRRLTQARQRAIKTRTSMINQLQHLIFMIFPEFLQVLKIATKTARYLIKHYTTAEKICALGLESVNQIFKKVSRGKLGQNRAKQLYEAAKNSIGISEGQQSIVFEIEHLIDRIEAEDQFIDSLEKQMCAYLQQIPYSQNILSIKGLGQVTVAGLIGEVADFNKFDTISEIMKLAGLDLYEISSGNRRGQRRISKRGRPLMRKLLFFAATNAVKSKGIMHAKYQQMLDRGMPKMKALIAISRKLLGLIFAIVRDKTKYVENYSDDHHYKLAA

SEQ ID NO: 59736 - protein, 415 aa, unidentified
MDTIFAKVAGLDVHQKFITVGIRCRLETGKLFAEVRTFGTMTRDLMALADYLEALGVTHVAMESTGVLWKPVWNILESRRFTLLLVNPRHVKQVPGRKSDVSDAEWIAQLLQCGLLQSSFVPKRELRELRDLTRYRAQLVSEQTRVANRIHKMLEDANIKLGAVASDILGKSGRAMLGALVGGQQDPEKLADLAEGRLRAKIPDLKLALEGHFSEHHEFLVEHLLRHLDDLERQTEQISQRIAERLRPILDDKRLERLDAISGVNRTTIENVVAEIGADMSQFPDEHHLSSWAGISPGNEESAGKRLRNRTTRKNRWLRRAIIEAAWAAGRIKNSYLGAQYRRLAARRGKKRALIAVGHSLLVIFYHMLKYDVEYQDLGVDYFDERDPEHLRHYLVKRLERLGYQVSLTPQTEAA

SEQ ID NO: 59737 - protein, 341 aa, unidentified
MKKFIRTAVDLGKNYFQFHGFAGEDGVFVSRKLKRSKVLEFFAQIEPCRVGMEACGSAHHWARELMAMGHEVVLIPPAYIKPYVKRGKNDAVDAAAICEAMARPDMRFVPVKSADDQAVLMLHKSRELLIKQRTMSVNALRGHLAEFGLVVAKGINRVDELLALAQADARLPQIAKEMVTELARHLEGLDQSIDTVDDEIAKAHKQNQNSCLIDEVPGIGTLIASVMAASVPDPGVFKSGRDFAAWLGLTPRQNSSGGKEKLGAITKQGNRYIRKMLVVGARSVLRAVGKRKGALADWINALRARKPERLVAVALANKLARICWAIMATGESFRADTYVKA

SEQ ID NO: 59738 - protein, 408 aa, unidentified
MNPLFVGIDVSSRSNVAYLMKPDGSKHSSFSVQNNLGGAKLLSERIVSALRSMQLERVVIGLEATSIYGDSLVYALREDSSLGRFQRKIHILNPKQVKKFKEAYPDLPKNDFVDAFVIADHLRFGRITKEIYMDDYRYQALRTLTRARFDVIQNLTREKQRFANYLFLKCSGMAQDKDIPNTSATTIALMERFETVDDLANADLDELTAFITETGRGRFANPGATAKAVRAAAKGSYRLPKTVNNTVNQAMAVSIASMRALEKQVKVLDKAIEQQFEIIPNTLTSIPGIGKVYSAGIIAEIGDIHRFDSQASVAKFAGLVWHKNQSGEFEAEHSQMIKSGNRYLRYYLLEAANSVRRCDSEFRRYYDLKFKEVNKYQHKRALALTARKLVRLIFRLLKDNRLYIPPEG

SEQ ID NO: 59739 - protein, 473 aa, unidentified
MSKGSGGSGMTRGDRRRNARRERLRKLLPRGGAVIGIDLAEDKQALAVIDHDVRVLARKTVRVKAFRLGEALDWAVGQARVKGFEQVTVACEPTGPRWMQVQRLCAERGLPLVCIQPLVSHIAREQQDYTTHKTDESDCVMIARLAVELHCYIPEELDETWAHLRHLGRRRAQLITAATASAQRIQDFLSVAWPTVMQTCAQPLLSNTWLAALQIVTARCGGDPGKLARMGEQAFTALVRGAVAGWGGKKAWGTISARIFAALTDTEGVVVSSRRGLLRRVADELGDLQRTRGQLRAAEADMAGVLAELGLSRLADIPALTAVGAAAILAESGDPRRYDSSSSLVKHAGLAPADNASGAFTGQAHISRRGRPGLRLAVWRAVWPMLQFNPVMAAKYQAMTGGPDAAAAGMGPQHGTAAEGAARARRAKARVACAASLLRWIYCLVVHDTSWDPAVASGAGSCHDAPHNRAEAA

SEQ ID NO: 59740 - protein, 362 aa, unidentified
MSEHIRYWVGIDAHSGGHVVAVASAGSSEVVELGRFAGDGDALVRRLRRYPAGSVSACYEAGPLGYWLQRRLTAAGIACAVIAPSLIPRIAGEQARKTDRRDAVKLARLWRSGDLTAVVSPDPAHEAVRELSRGRAAAVSDVVRARQRLAAFLLRHDKRHEGKAWTAKHRKWLAGLSFEHEASRRWLDLSLTTLDEACARRDEMTAALEAAIADWSLGWQAEALRALRGIGPVVAATLSAELGDLRRFSRPAELMSYVGLIPGERASDQRRVALGITRTGNRRARTALVEAAWSYARPAKAMPPRPEVPAALAQIAAKAQARLQRRYRHLTRHGKRSTVAITAIARELAGFAWHVAHSARPT

SEQ ID NO: 59741 - protein, 409 aa, unidentified
MSQPSWWLGIDLGSQQHELCLLDATGTVVRRGQIRHDPAGVARLVAFVDEATGRRPTAVAAALETPRCLVGEVLQERGVQLYAINPKQLDRFRDRHTVAGAKDDRLDAYVLADSLRTDTHLFRRVAPLPPENYRLRELTRTLAELEQLNRQQANRLWSVLNRYFPILLRWCPGADEPWLWALLRQAATPAQAATLSTADLQQILRRHRIRRLTAVDLQAALAEPGESGDPLTVELGAQRVLFYLDQLELIQRQVRQCSRAIQAIMNAPSADPAPTDREIVRSVVGIGWKTGAILLGEAATALQQADYRTLRGECGVAPVTKGSGLHRVTLMRRACDHRLRLALHHAAGVAIQHVSPWYRIYHRIRLRGGSHARALRQVGDRLLKVLTTMLHNRTLFDLGRLNGVTPTLG

SEQ ID NO: 59742 - protein, 316 aa, unidentified
MNGKQVIGVDIGKSYLDAAIEGRHRVQRYDNDAAGVAALIEHFDPARDIVVFERTGGWERNLEAALADRAITWAVVHSQGVKAFRQAQGIKAKTDRIDARLLRDYGRDRLEAGKLRPGHREDVTLACLMARQRQLKAMRHAESCRLATAALEAVRSSIERMIADLDMALAAIATELVRHETEHVDLAFREEVLCGQIGVAEQTARGLLAELPELGRLGSKAITALGGLAPRVHESGSLRKRRGLAPGRTSIKVILFNPARTAMRFDPQIKEFCGRLRARGKPGKVIMVAVMRKMLVRLNAQMRDAMARASTAAAVH

SEQ ID NO: 59743 - protein, 351 aa, unidentified
MNYIGVDYHKKYSYIVVKNEDGRVEGRGTVNNTKEEIQQFLESYRSGMAVVEATRNWGLIYDWLDEVLDDVTLAHPLKVKAIAEARIKTDKISADILADLLRADLLPRAYAPGKQTREIKNILRQRMFFVRVQTMVKNRIHDILDRHPEVLSQTPEASDLFGAAGMQWLGQKVLPGEDNRLLTSELELFKFLKEKISQSNGTVKKLAKGDARARLLQSIPGIGPFFSVLILYEIDDISRFRDEKKLCAYAGLVPSTHASGGKVFHGRITKTGSKWLRWAAIEAAQTAVRSDSEFHAYYQRIRIRKGTNAAKVATARRLLTIVYRLLRQGRFYERRTTNMRKIVTPAALVTD

SEQ ID NO: 59744 - protein, 339 aa, unidentified
MQVTTIGVDLAKNIFQVHGITEHDEVAFNRPLRRAQVLPFFTRLDPCLIGMEACSTSHYWARELTRLGHEVRLIPPMYVKPYVKRGKSDAIDAEAICEAVTRPTMRFVEIKSVEQQAQLSLHRARNLIVRQRTQLVNALRSMLAEFGVYIAKGLARIISFSQGVLAGTKLALPEIAQDVVHNLCGQLEVLHGQMRWYETRLRLEAKRDPRVKLLQTIPGVGPVTASAIAASIGSGHQFKNGREFAAWLGLTPTNRSSGGKERLGRITKMGDQYLRQLLVVGMTSLVRQTKSHPDRANKWLTALLERKPARLATVAMANKTARIVWAVLTKNEPYMPRTA

SEQ ID NO: 59745 - protein, 390 aa, unidentified
MQALHPRPDEHAAVRTDLKAIFVSLELSRSTWVITSLSPGGGEKMSKHAVPSGDVAALLARLSKLKEKARLRTGQVFPIIVIQEAGLDGFWIHRVLQQEGIESHVVDPASIATSRRRRRAKTDKIDGEALVRALLAYKRGEPRVCAMVQAPTPHEEDRRRISRERETLTAERVQHVNRIKGLLFAQGISDYEPLHRNRRERLAELITGDGRPLPECLKAQISRELDRLELLIEQIKAVEAERDAVLAQAQASPGVPAPAAQLLALRGIGPEAAATLWSEGLFRTFNNRKQVAAYAGLAPTPWQSGSVHRDQGVSKAGNPRLRTIMIQIAWLWLRHQPQSALALWYRARIKRTGGRLGKTMIVALARRLLVALWKYATAGVLIEGAVLKPA

SEQ ID NO: 59746 - protein, 377 aa, unidentified
MKKVRFIGLDVHADTIAAAVAEPSGEVRSMGVIPNRPESIRKLVKKLGPSEQLRVCYEAGPTGYVIYWQLTGLGVHCEVVAPTLVPVKAGDRVKTDRRDATKLARSYRAGDLTPVWVPDAAHEALRDLVRAREAAKKDQLRARHRLGKFLLRHGRRPSTAMTPWTQRYLAWVRQVQFEQPAQEATRLDYLHEVDHVADRIARLERAIDAAVQTAPPRMRAVIDGLQALRGIALISAVTIVAEVGELSRFTRAPQVMGYSGMGAREDSSGTRTRRGGITKTGNAHLRRIAIEAAWAYRHRPALGGTLRKRQARLSEAVKAIGWKAQLRLHARYRKLLGRGKCQQHVVTAVGRELLGFIWAIGVAVEREHRTASSEIAA

SEQ ID NO: 59747 - protein, 411 aa, unidentified
MENVFPCCAGLDIHQKSVEACVRRLEPTGQLHHQTRHWGTMTRDLLAMADWMAAQGVTHVAMESTGVYWKPIYNILESRFTVLLVNARHLKQVPGHKSDVRDCQWIAQLLQHGLLKGSFIPPRTQRELRDLTRHRTQLVEEKTRTVNRLHKVLEDGNIKLASVATDILGVSGRAMLEALMEGQEDPVQLADLAQRQLRGKIPELEKALEGHLTEHHRFLLRLLWKELAQQEELIAELDRKIEEHTRPFANEIERLDAVPGVDRRVAEVVLAEVGSDVKPFPTHFHVASWAGMSPGNEESAGKRRRGRITPGNRWLKRTLVQAAWAASHTKNTYLASQYRRLAGRRGKKRALVAVGHSMLVIFYHMLKERTTYKNLGGDFFDRLEPERLTRYYVKRLKDLGHKVTLEPGVAA

SEQ ID NO: 59748 - protein, 341 aa, unidentified
MQVATIGLDLAKHVFQIHGIDAAEKVVVRKQLRRSQVMGFFEALPPCLIGMEACATAHYWARELTKLGHEVRLMPAKDVKAYVKRNKNDAADAEAICEAVRRPTMRFVRVKSAEQQGQLMQHRTRDLLMRQRTQVINALRAHMAELGIVAAQGREGIKALLAIIADDGDERLPVDARASLIVLAAQLQALQTLIGSMEKRIIALHRSSEASKRLATTPGIGILGASAITTIVTDPKAFRSGRDFAAWVGLVPRQDSTGGKQKLGPISKQGDRYLRRILVIGAHAVLRRARQHPEKYPWLTQLLARRPFKVVAVALANKMARIAWALLAKGESYRVPRLAAA

SEQ ID NO: 59749 - protein, 351 aa, unidentified
MKNATARKRTQITIGLDLGDRRHTYYVLDGAGKMAREGSLGNTREQLATMARSYPGATVVMEAGTHSPWVSRFLQELGLRVIVANPRKTRAIYQNERKSDRRDAMMLARLARMDPTLLHPVEHGSQEAQQDMLQLKLRDSLVRARVALINAVRFTLKSLGYPVSNPSSERFHKLVLSEVPESIGEMIAHNVAAIAELTQRIKALDVSISRLAAERYPETIYLQQVSGVGPITSLYFVLKVGTPGRFQRTRDIGAFLGLCPRRDQSGETDKELRISKCGDQYLRCLLVNAAQYILGPFGTDSALREHGLRLAQEGTARAKKRAVVAVARKLAVLLLTLWKSREPYESFPTMA

SEQ ID NO: 59750 - protein, 425 aa, unidentified
MNYKQNEKINQVKESTLVVGIDIGSTTQYARAFDWRGIELGKVFTFSNSREGFEAFKAWMQHLQDKYRKSDVIVGIEPTGHYWFDLGAYLEDEGILLVMVNPYAVKQTKELDDNSQSKNDRKDPKVIAKLVTEGRYSAPYTPDGVYADLRIMVANRKRLIREMTQIKNRFARWFAIYFPEYTDVFGDYEAQSSMLLLKKVCTPEAIVELGAEKINQIWRDAKLRAVGMKRATTLCETAKRSIGLKKGSSAARYEMKLLLEDYEYKKAQLDAVMEEIEKLCRKIPESEQMLAIKGIGVITVAGFLAEVGDVRRFESPRQIQKLAGLSLRENSSGKHKGQTTISKRGRSKLRAVLFNAAIPLIATNPEFKSLHEYYTTRANNPLKKKQSVIAISCKLIRVFYAILAKGVTYDAQKLISDIHRQPQVA

SEQ ID NO: 59751 - protein, 370 aa, unidentified
MEMTTTYAGMDAHARTIQVAVLAPGAREPEEWQLANEPQAVKRLARRLLRDAEGPVVACYEAGPTGFALQRRLEAEGIECRVIAPALIPRRPGDRVKTDRRDARKLAELLRAGLLTEVHPPTPEQEAVRDLCRAREAAVADRTRARHRLAKLLLRRGLAYDGRSWTQRHRRWLLTLRFEHSAAQATFDDYLRALEAVEERLRALERELEREAAGGEYREAVGLLRCFRGIDTVTALTVLAELGDITRFGSARQLMAYLGLTPSEHSSGGRQRRGPITKTGNAHVRRLLVESAWHYRHPPRVGVGLRKRRQGQPGWAVALADGAQARLHRRQRRLTAHGKPSVVANVAVARELAGHIWAVLSIQAGQRAAA

SEQ ID NO: 59752 - protein, 335 aa, unidentified
MKKYLYFIGIDVSKLKLDVTICKENELHQSHHFIVSNDKKGLKELLQFLKKREIHTSDVLFSFEDTGVYSMPLCCFLSDQQLDYWMIPAIEIKRSKGLVRGKSDKADSKDIAIYSHTHFYKLRLGKIPEKDLLKLRLLFTEREKLLKAIKVLDSTKEGLDYMPKEVYKEIERLNKSTINHLKKAVEKVEKRMQEIVKANEELHQQNKLIQSIPGLGPMTSIYLILVTKGFTTFKNSRQLSCYAGVAPFEYSSGSSIKGRTKVSHFADKKLKSLLNMCAMNAKKCDPELKLYYERKLEEGKSKMLVLNNIRCKLLGRVFAVINRGSAYVNIQKFAA

SEQ ID NO: 59753 - protein, 319 aa, unidentified
MAQNDPVVVGIDVAKDKVDACVRSLSLRLTCPSSTQGRRKLIGWLRKHQVNKAIMEASGGYERDWAKSLREAGIEVRIVDPKRVRSFAQSAGRLAKNDKIDAEMIGWFAETFSAAPGQMHDAMQEELAALVKARIGLVELKTRLQSQNEHAAPGPVQKAQARILKSLAAEIAKLEIAISAKIKATPHLAERAEIIESVPGFAKTTSANLVAGMPELGLVSDEIAAALMGLAPYDDDSGKRRGERHIKGGRRWVRNAIYMPCLGAATQNNPVLKAFYQRLIAKGKPPKVALTACMRKLIIILNTMIARRQKWDPTRYAVV

SEQ ID NO: 59754 - protein, 364 aa, unidentified
MFHFTTLFIGMDVHKESFSLCYYDMMANQFKHSTKVGPNVSYIVNYVNELRRLYGQDAEVLCGYEARCLGFTLYHQLQAYGIPCIVMAPTTVMKEASKRVKTDKKDAAQLAKALAFRSYWPVHIPTVEDEQVKEYIRMRTDHKVALKKIKQQILAFCLRHDFRYTEGSSNWTQKHVRWLHSLNLDGLYAEILTEYLLTYEKLVDQIERYDARIEQLGQSDSYQEKVSQLSCFIGVKTLTALSIVTEIGDFNRFATAQHFASYLGLTPSENSSGDKERRGAITKAGNSHVRRLLIEAAQSLAKGTVGYKSKELKRRQSGNRVEVIAYADKANERLRRRYRTLVLGKNKKQNVAKVAIARELSGFI

SEQ ID NO: 59755 - protein, 424 aa, unidentified
MKVTYQTCCGVDVHKSFLVATIIKTTTGIEPSYQKKRFSTFNNSILDFKSWLLENECHDVCMESTGKYWVPVFNLLEDQINVTIANPKWVKAVKGNKDDTKDSKWIGDLFRLGLVKSSYIPCRLIRILREYTRYRYKLVSCRSSEKNRYQNALTVCNIALDSVVSDIFGKSSSSIIDYLLEQSGTTINHEEIASKLLKSLKSKEDAVIESIEGYQMTDAQKYRMRLIRAHMDYITAEINDIDKQIESLISSDPDYDKAIRLLTTIPGVKRDSAITIISEIGIDMSQFCNSKRLCCWAGLTPSNNESAGKKKSVRITHAGVYLKPALVQCAHATVKSDKSPYYKTKYESLVKRRGKKRAVIAIARMILIAIYRMLSTGEVWNPSDLYKIDMPAPLAEKQKAKAIKQAKKLLQKEGLLPPDEPLAS

SEQ ID NO: 59756 - protein, 334 aa, unidentified
MKNYLFHVGIDISKIKLDVNLLNSKTLESEHFVIDNNPKSIKNFIKLLVKQKIELKDVLFCCENTGVYTNHLSFTLLGLELDLWIVPAIEIKRSKGISRGKNDKTDAKDISFYSIRNIDKLRLFQLAEIDIQKLKMLYTEREKVIKSLLLLETTKENSEFVNKEVFKEVSSINQSLISTIKKSINKIEKRIKEIIKSNQVLNKQYTLIKSVPGIGEQTSLYFIITTKGFSAFKNWRQFACYSGVAPFEYRSGSSVRGRTKVNHLADKKMKSLLQMCAMTTLKYDPQLKKYYIKKKGEGKNSMLVLNNIRCKLISRVFAVVNRETPYINTYKFAS

SEQ ID NO: 59757 - protein, 315 aa, unidentified
MNDVIKQAAGVDVSKQWLDVAATVDGVTERWENNSRGIAGLCEWLIQRSPDRVVLEATGGWETATVAALAQAGLPVVVVNPRQVRAFARACGRLAKTDRMDAQVLCAFALAIQPPLRLLRDDQAQALAALVNRRDQLVQMRIAEKNRLALTASAAVKKNLKAHIKWLDRNLADTDRATGQLIKASPLWCATEELLLQVPSVGCVTAHVLISRLPELGQLNRKQISALSGLAPFNRDSGAQHGKRMIWGGRSEVRRALYMATLSAIRCNPAIRQFYRRLKERGKPSKVALTACMRKLLIILNAVVRDQSHWQPMRS

SEQ ID NO: 59758 - protein, 320 aa, unidentified
MLSFCGIDVSKDRLDVMVLPEGQRSSVPNDVAGWAELVEQLRRCSIAAIGIEASGGYERGARRALLAADLPVRQVNPFKLRQFARASGVLAKNDPLDARMIASFVAIMPTRPAQRQTPAAERLAEMLAIRRQLSAEKVAAENASRLLEDAMLQRLSRRRIVRLAADIDLLDKRMVEIVATDDALVHRYRLLTSMPGVGAVLACTLIALLPELGRMSRKQVAALVGVAPYAFESGTLKGRRCIWGGRAHVRQVLYMAAMSASNWNPVLKAFHDRLTTVGKLPKVVIVAVMRKMITMLNAMVRDDVVWADRLSGRRVLPTAR

SEQ ID NO: 59759 - protein, 369 aa, unidentified
MKTHKYVGLDVHAGEIVIALAEGGRAGEVRVYGKISNDLHAVEKALRKMGGEGIVLHVVYEAGPTGYVIYRRLQQLGIECIVVAPSKTPQETGPRQKTDRRDAVMLARLHRAGELTAIHVPDAVDESIRDLTRARADAVHDLTRAKQRLKAFLLRQGYKYAGKANWSEAHQRYLRELVLPLPALKAVLEECLLAIEQATQRVVRLDELLAVQVPLWRMYPAVQALMGLRGFQLTAAAILVAELGDVRRFQHPRHLMAFLGLVPREITTGNQRRLGAITKAGNPHARWILIEAVQHAYLPPKVSAPLALRQQGQPTAFRELSWKIQTRLYRRAWHLLGRGVMKAKVTVALARELSGFVWDLLRQVPAPKP

SEQ ID NO: 59760 - protein, 358 aa, unidentified
MNQRAKLNFTGEDIYIGIDSHKRNWRTSIQTRDLEHKTFTQNPEPEILAEYLHRNFPGAKYHAVYEAGYSGFWICRELRDYGIDCIVTNPADVPTKDKERKRKNNRVDARKLARSLKNGELEPIYIPDEDALEDRSLLRIRRNAVKDQTRYKNRIKSMLSFYGIKIPERFNEGRWSGAFVNWLESVSFNRHTGKKSMQYYIDELKRARMRVAHLNREIRALSQEDRYRERVKYLRTIPGIGVLTAMILLTELIDMNRFNTLDKLASYVGLVPGEYSSGDDDDQNDTGITPRSNRYLRAMLIESAWVAIRKDPALMMCYNKLTRRMKGQKAIIRIARKLLSRIRYVLKNNKPYVMAVVE

SEQ ID NO: 59761 - protein, 338 aa, unidentified
MDTNVLYVGLDYHQNSVRVCAMNHEAKILVDRDVKSDWYSVRNSVSDWKGPVHALLESCSGAAAMADELALHAGWSVQLAHPGYVSRVKQSHDKTDKTDGRVLADLLRVGYVPEVWLAPEPIRELRRLNGYRNNLTGQRRNVKLRIGALLRDQRVLDCPVKTRWSKPWREWVRAVTQLSANGRWIVAQEMDELERLERRIADVEKRLHEQTRNDPLVQHLLQIPGIGLVTACYLRGSIGRFDRFHSGKQLARFCGLSPRNVSSGARQADAGLIGACDRTLRALLIEAAHRLIRHEKRWGAFAGRLRAQGKHPCVIVAAVANRWMRGLWHELKPLGLGF

SEQ ID NO: 59762 - protein, 425 aa, unidentified
MDFKQNQKINQVTEQTLVVGIDIAKRTHFACFVDDRGRVLRKSFSVSQSREGFELFYQLILNALKEHGKTEVLVGIEPTGHYWLNLAYFLEERGIPLVMANPMHVKRSKELDDNLPTKHDRKDALVIARLLKDGRFSYPLILKDVEAELRVGSTFKSKLTEELGAVKNSIIRWLDRYFPEFTQVFPSFGKMALAVLECTPFPSDLHQKQPDEVLSLYREVEGLKSPQRPKATRLIEVAAHSIGVTEGREMARYEIATLVRRYHQLEQEIEDMTQRLVELVQTSVEYEWLSTVQGLGDPTIVELLAEIGSFSHYEHPRQLIKLAGLTLRENSSGQHKGQKRISKRGRRKLRALLFRTMIPIIRHNKAFRTLHEYYTTRTVNPLRKKQSIVVLCGKLLKVLHGISTKHQAFDAQRMMKDTPSLAEAM

SEQ ID NO: 59763 - protein, 405 aa, unidentified
MYYVGVDIAKEKHYVCILDDTKELACKPFWIYSDILGLRELLKRLAELSLDMDEFIIGIESTGAFSENFYSYITDADYKVILLNSYQTAKYRDFSTLKKIKNDSIDAYVIAELLASAKYKASYISNEAYHDLKVLNRLKKSLDDKIKSIQREISTVVATVNPEIEKVFPNIFTKTAIAIIKAYPTAIDISKATPEKLTKIFRHIKGNSFNLEKAKYLIELAKSSIYTGHANESRALMIKTNIKILELLNQEKDEVEKQILDLIDNQLDDDSSNIENLKSIPGVADKTVTAILGECGDLRRFKSAKAFIGFLGLYPTLYQSGKSSSTGSLAKRGIPIAKHALYMAAVSAVRHNNELHKLFRDKVSSGKSKKEALIIIAKKLASIIYSLFKYDQPYNPNRVLIQHKR

SEQ ID NO: 59764 - protein, 398 aa, unidentified
MTESSDYESVQVFIGVDVGKDTHHAVAINRSGKRLFDKALPNDENKLRSLISDLKQHGQILLVVDQPATIGALPVAVARSEGVLVGYLPGLAMRRIADLHAGEAKTDARDAAIIAEAARTLPHALRTLKLADEQIAELSMLCGFDDDLAAQTTQASNRIRGLLTQIHPALERVLGPRLEHPAVLDLLQRYPSPEKLASLGEKKLAAQLCKLAPRLGKRLAADIAQALAEQTVVVPGTNAAAVVLPRLALQLITLRKQRDEVALEVELRVLAHPLYPVLTSMPGVGVRTAARLLTEVACRAFTSAAHLAAYAGLAPVTRRSGSSIRGEHPSRRGNKALKRALFLSAFAALRDPLSRAYYTRKMSQGKRHNQALIALARRRCDVLFAMMRDGTFYTPQGA

SEQ ID NO: 59765 - protein, 345 aa, unidentified
MDQISRIGMDTSKHVFQLHGVNAAEEVVLRKKLRRKEMVTFFEKLAPTVIAIEACGASHHWARLLQSFGHTVKLIPPQLVKPYVKRGKNDAADAEALCEAMSRPTMRFVPVKSPEQQAALMLVSVRDRLIRNRTQLANAIRGHAAEFGLTAAKGMAHMVPLLDRIQADESLPALARELFAIQAKEYQQLQTQIGEVDAQLMARHRADDCSRRLAKIPGVGPIGAMLLRMKTPAPELFRSGRQYAAWIGLTPKDHSTAGKARLGVITRAGDEGLRSVLVVGATAVIQQARRSGRASPWLAELLKRKSPKLAAVALANKMARVAWKLMLTGKDYIAKPAPAALAGVA

SEQ ID NO: 59766 - protein, 408 aa, unidentified
MVIFVGVDWAESHNDALVMDGQGTVLGRGRFGVGVAGLAQLHALIADHAEGPEQVMIGIEIDRGLLVDSLVGAGYRVYGVNPLAASRYRDRHTTSGAKSDAGDAKLLADVVRTDHHNHRPVAGDSDQASAIRVLARAHQGLVWTRQRQVSGLRSTLRDYFPAALSAFGTDLASSDALAILGLAPTPRRARTLSRATIAAALGRAGRQRNLEHRAAEIHEALRAEHPETSDAVADAFGAASAARVAVLVSLNAQITELEVALAERFDRHPDAEILRSLAGLGSVLGARVLGEFGDDPSRYADARGRKAYAGTAPITKASGRSLVVLARVARNRRLADACERWAFCSLTASPGARRHYDALRARGKTHSQATRQLANRWVGILHACLERREAYREEVAWPAAEQVTRFAA

SEQ ID NO: 59767 - protein, 347 aa, unidentified
MDKITRIFIDTSKSVFQLHGVNGAEAPVLRRQLRRSQMLEFFSKLEPTVIGLEACGASHHWARVLSRLGHEVKLVPAQYVKAYVKRGKNDAADAEAGCEAMSRPTMRFVPVKSTEQQAALMMLNVRERLVRSRTQLSNVIRGHAAEFGLVAVKGLCRIEPLLMRIAGDQALPALAREVFESLGHEWERLATEIKRLDAKLMAWHRAEETSRRLARIPAVGPIGASMLVLKAPDPRAFKSARHFAAWMGLTPKDHSTAGRQRLGAITRAGDEALRSTLVVGATALLQHIRKGRGPSSPWLLKLLAKKEPKEVAVALANKIARIAWRMMISGEDYDPRGLMRELPATTA

SEQ ID NO: 59768 - protein, 452 aa, unidentified
MVRQSRRKGSSPTITHILQPNAAGIDVGATEIYIAVAPDRDSQPVRRFRTFTADLRAAAEWLKQCHVESVAMESTGVYWIPIFQILEASGFEVFLVNARHVKNVPGRKSDVADCQWLQYLHSVGLLRASFRPEQAVCAVRSVLRHRESLIQIASIHVQHMQKALDQMNLQLHHVISDITGVTGIAIIEAMLKGERDPAVLSKMRDQRIKASRETIAAALVGDYRREHLFTLRQSLEAYRQCQELIAACDHEIAQQLAAFDAKVDVAQAPLAKPKDHPQPRRNQMKFDLRTHMYRIYGVDLTEVPGINALTAHVLFAEIGPDFSKFASASAFASWLGLCPDNRISGGKILSVQTRRVKNRAAMALRMAAQSLHRSQSYLGSYYRRMRAKLGAPKAITAAAHKLARVIYHLLTTRQSYREGVFAHCETLHQGRLETRLLRQARELGFELVKSTT

SEQ ID NO: 59769 - protein, 297 aa, unidentified
MAKSHLDIALCGERWRVANTQTGIGGLVERLKAAAPKKLQVICEASGGYEQALLGALAEAAVPVTLVQANRVRQFARACGILAKTERIAAVVLASFGQALKPLPSPAPPLHLLRLRELDRQRCHLSRLLVAEQNRLAQLRCAQLRRLARSLIGKVQKQIASIDQRIASLIERDQTLSAKAKKLTSFTGVGTRTAALLLAQMPELGRLNRRQVAALAGVAPYNRDSGSMRGKRCIFGGRRALRRGLYMAALAAARRNHILAPFYQRLLAAGKPPKLALTAVMRKLLIALNTALSPYPA

SEQ ID NO: 59770 - protein, 353 aa, unidentified
MNNVKYVGMDVHKSITVIVVLNELGQFESRSQIKTKGENICDFFRGISGKVEVVFEEGTHSAWLYKLLKPLVASVTVCDPRHNKLIEDGNKSDDEDAETLAQLLRLGAVKAVYKGDDQQQQLKEICRAYDNLIEDSTRVQNRLKAIYRGRGISCSGHDLYRADQRSDWLAKLGEEAARFRAESLLEQLESISQLRKQAKQRLLAQARTHADYRILIKLPGFGPVRVAQLIATVGTPHRFRTKRQFWPYCGYAVVTRSSADYQFVEGKIVKQRKKVSTCGLNRNHNPQLKQAFKGAALTALRHEAIKAYYQRLIDHGRRPELARVSIARKLASIALTVWQRREEFDVKKAFAQD

SEQ ID NO: 59771 - protein, 345 aa, unidentified
MEFFAGIDLGKRKSHIRVIDSDRRVLEDLKIDNDPKTFARIFRKYGKNVTVGCEASSNAFWVWDTLSPIVRKCFVGHTSKIRWIAEARIKTDKIDAGILAELVRADLFPAICIPPKRIRELRELVRGLVRMRRQTTGFRNQVHGLLGRHGVAYQRAETEGKKLGELVRSATLASPARVAAETFLAVEETVKEQEKLLQAEIRKELRDEPEILEQVKLLESIPGVGFFSAALLVLELWDASRFEDGKHLASYIGFVPGTHQTGETMWHGRMTRTGNKLIRWLIVQDAWVASHTHWFFGRLFERHKKRKGGARAIVPVARALLNTILRVWSERKSYDVLFKEESLVG

SEQ ID NO: 59772 - protein, 388 aa, unidentified
MIYVGIDVAKLNHFASAISSDGEELIKPFKFTNDADGFQLLSSHLDTLPDDSFIIGLESTAHYGDNLVRYLVNNGHKVCVINPIQTATLRKNNIRKTKTDKVDTYIIAKALMLQQSHRFVTVDDINLMDLKALGRFRQKSLKQRTRLKIQLKAYVDETFPELQYFFKSGLHQKTVYALLKEAPSAKDVASMHLTHLAHLLEVASHGHFKKVTASQLRVLARKSVGSPDSALSIQVVHAIEQIELLDSQIDHVEAEMTDIMKYLDSVIMTIPGIGYINGGMILGEIGNIHRFSGPKQLLAFAGLDPSVYQSGNFQAKHTRMSKRGSKVLRYALMNAAHNVVKNNSTFKAYYDAKMAEGRTHYNALGHCAGKLVRVIIKMLIDNVEFNLD

SEQ ID NO: 59773 - protein, 345 aa, unidentified
MAAPGVEYQLYVGVDIAADTFTAAWRTPTGAVAAPFTGEQSPTGHAALQRRLAGTRAAPGATLVVLEATGSYWVALAVALHEAGYRVAVVNPRQAHHFAKAQLRRAKTDALDARDLAELAAALRPAPWTPPPAIYHEVRQRLVARDALLGMRTQARNQRHALLQWPVVVAGVRQHLDELIADLERRVADLDREIAATLKRSEWAEALACLTSAPGIGLVTAAWLLVGTANFALCAGPEALVAYAGLAPVPRESGRSIRGRAAIGHDGNGRLRTALYMATLSAARYNPAIRAFYQRLRAAGKPKKVARCAAARKLLHQAWALGSKLQRFDPEHKQQQHDALSDPAA

SEQ ID NO: 59774 - protein, 327 aa, unidentified
MSLQSTPTIIGCDVSSKDIVIAYANANPVKTIANNRKAILAWLKQLPEDAVIGMEATGRYHDTLADCAALSGRRVYVINPKQLSLYAKGVGQRGKTDPLDASVIARYVAREGDQLHPYTVPTPTQRMIRNLLSQRAGIVKHCGAIRQCLRATESNGSAALKRAHQKAVQGLHALIAEIDTQLKACVKAEVELEHKRTLLQTITGIGLLNSLALTHRLDRTPFANSDAVVAAYGLDPRPRDSGNKVGQRRLTKQGNAEDRRLIYLAAQSAAKTKTFKPMYSALREKGFATTEAIVIIARKLLRIAFAVWNSNKPFDPQKISFQPCAKP

SEQ ID NO: 59775 - protein, 355 aa, unidentified
MNDEKYIGLDVHQATIVVAVMDSTGKLVMESILETEAATILQFFAGLRGTLSVTFEEGTWSVWLYDLLNPHVEKLVVCNPRKNALLKDGNKSDRIDARKLAELLRGHQLKPVYHGENGVRMLRELSRSYLTVVKDLSRVMNRLKAVYRSWAIPCAGRDVYYRRHRAQWLDKIREAGVRRRAERLYEQLDMLQHLRQQARRELLAEGRKHAITAQLRQIPYLGPIRSVLAVALMQTPHRFRSKRQLWAYSGLALETRISAEYRLVEGQVRRSKKLLSIRGLNKDHNHDLKGLFKGAATMASVRPGPFQDFYQAALAKGIKPTMARLTLARKIAAITLTLWKKGENFDAEKLKSQAA

SEQ ID NO: 59776 - protein, 339 aa, unidentified
MKLYAGIDLHSSSSYLAIINEKGVRKYKKKLPNNLGGILQQMKLYKKGIAGVVVESTYNWYWLVDGLEAEGYAVHLANPSAIQKYTGLKHADDKHDAFWLAEMLRLGILPEGYIYPKEERPLRDLLRKRGHLVRLRTSLIISLQNIISRNCGIRLNVDEAKRLKEDRVTPLLAQNEDLHLAGVVSKESIDFLTRQIRSIEKVIEPKIELKEPYRYLLSMPGIGKVLALTIMLETGPIGRFGKVGNYVSYCRKVGSQWTSNGKTKGKGNKKNGNKYLAWAFSEAAVIARRYDAQVRAYYNRKLQKSNLMVAHSALAHKLARAAYYIMRDEVPFMPEKLFS

SEQ ID NO: 59777 - protein, 343 aa, unidentified
MKITTIGIDLAKNVLQIHGADANGKPVLRKQLMRNEVMKYFTKLEPCLIGMEACGSAHYWARQLQSLGHEVRLISPQFVKPYVKTNKHDVADAEAICEAVSRPTMRFVPIKNNEQQAMLSLHRARERFVGDRTATVNRIRGLMAEFGLVIPQGIGYVRSRVPELIEDGTHELLGMFRALINQLLDHLKWLSQQIEAVETQIKVWHKNNADSQRLEEIPGIGPITATALIATIGNARNFKNGRELAAWIGLVPKQHSTGDKQTLLGISKRGDGYLRKLLVHGSRALAYHAARKADPSSWLNKLLNRRHTNVAAVAQANKTARIVWALLAHGREFRPDYALKAAA

SEQ ID NO: 59778 - protein, 375 aa, unidentified
MIYVGIDVAKDKHDCCILGSDGEILFSPFTIQNTLQGFDELYEKIWSLTQDLDEIKVGLEATGHYHLNLLRSLLDNGLASYVINPLHTNLFRKGQSLRKTKTDKVDAASIAMMLLTDRTLKPYSDTSYHNEELKSLTRYRFDKVQERAKLKTSVSRLVSILFPELEKLVPTLHMASVYALLSEFPGASFVASSHLTRLKHLLYEASKGHYGRDEAISIREAAISSVGAVIPAKSMELKHTIHLIEVLSDEINEIETAINSIMNTLESPITTIPGIKNRMGAMILAEIGDFSRFENADQILAYAGLSPSTYQSGQLTSSYAHMEKRGSRTLSCSLPSGGARLCSELSRRPAFRVFPSRKAFYAHHLAIHSCSPGFS

SEQ ID NO: 59779 - protein, 330 aa, unidentified
MYQLGIDLSKKTLDICLMREGVRGRLKTKKVKNDFKAVHIITEWLEHHNCALSDAYIIMEATGVYHELLATGLHLAGVKVSLANPHRTREFARGMDILTKTDKVDAWMLACYGALKQPEAWTPPSEEIRHLSALLKRRDLLVSDATREKNRLEKYRATHTPEAIVISAESMLTRLNDELAKIELMLKQHIEKHIVLKEDYKLLTSIKSVGPQLGLNMLVILRSHDFRTAEQVAAFLGGAPVEKRSGTSVRGRSRMSKIGPPEIRAKLYLAALCGLRFNIAMKSIYERLCLNGKAKMVAIGALMRKLIHWCFGVLKSRQPFDINYINMGRM

SEQ ID NO: 59780 - protein, 438 aa, unidentified
MRKKKNKASKRAHFQSLPLIHPNAAGIDVGAKEHVVAVPCDRDPQPVRTFQAFTPDLHELAAWLKRCGIETVALESTGIYWLSLYEVLEQHGFEVRVVNARHVKNVPGRTKTDVLDCQWIQKLHSFGLLNGSFRPDHQIRELRTYMRLRDNLVVEGTQAIHHMQKALFEMNVQLSNVISDITGESGLRIIEAILAGERNPEQLAALCSTRIKASRQTVAKSLHGNWDEALLFCLKTALETYRFSKNQIQDCDHCIERQLATFEIRIPLPNARQSLRTQLHQVCGVDLTKIPGIKEQGAQIIISEVGLDMSRWNTEKQFSSFLGLCPNNLITGGKILRRATRKVYNRAADTLRLCAQSLTHSKSALGAKYRRLRARLGAPKAIVAMAHHLARLVYRMLRYGENYVEKGIEHYEQKFRLQRIKWLKKEAKSLNLQLVAAQ

SEQ ID NO: 59781 - protein, 340 aa, unidentified
MISSTKFFIGIDVSKPYFDVSLMVVIDHIKQSVETAHFDNNSAGIKGFDKWLKTHRVSYNEQSLVVIENTGIYHRLIWSFCSKNQLPIHIGNAANIKWSFGIARGKNDKIDSVRLCNYAYRESDSLAATAPLNPALLHLKDFISARTKLLKQITSLRVSIKELGNVNEKTHQKLVERSLKSAIDGIAKSIKDIESEIKKIIDGDKEFKSNYKLLISIPGIGHVTAVYLIGCTANFAGNPSGKQLACYAGVAPFEHSSGISIKGKTRVHRMANKELKRLLHLCALSAIQYNPEIKNYYNRKKDEGKHSMAVLNAVRNKIVLRVAAVVKNQTPFKNNYKMAA

SEQ ID NO: 59782 - protein, 340 aa, unidentified
MDYFAGLDVSLDTVNVCILNDAGDVLLERKIEAEPAVIADLLARFGHPFKRVGLEAGPTSSWLHSALREAGYPAICLECRHVKAGLSAMRNKTDRNDARGIAHLLRLGWFRQVHIKSDEAQQVRMALVSRQQLLSKSHDIENAIRGSLKVFGLRIGIVTRRAFEERVLKLVADHPILLSITEPMLRVRQTMIQAFEVLDRMCRQLARRDPVCRRLMTIPGVGVVVALTYRTGIDAPERFSRSRDVSAHFGLTPRRYSSGQTDFDGRISRCGDEMVRTALYQAAHVLFLHGPWSALRSWAMRLAKRGSVKVAKVALARRLAVIMHRMWTDGTEFRWLIQPR

SEQ ID NO: 59783 - protein, 419 aa, unidentified
MSFKILKNNCCGLDVHKTWIYACIGITDSFKRTEYKQARFSSFTKGLQELCLWLAKYNCIDVCMESTGKYWIPVFNVLEKNNIFVTLSHPKYTKPQKGNKTDRKDAKWICDLYMCGMVKPSFIPPADIRQLRDLVRYRFKLTCMITGEKNRAHNCLTVSNLKLDDVFSDIFGKSSRSITEQILQHPGEVFDVAPFVDSRCKTPIEEIQAAVDGAISHEQAVKLRQCLKHIDELEMHKAEIEREIFRLSQKYESVLDLIRTIPGFDKNPLTAIQVLSEIGADMSVFPTAKNLVSWAGCCPRNDQSSRKIKSTRISRAGSYFKPVLVQIANALIKSKKHPEFTTRYRRIKARRGHKKAIIAICRMILTAIWHILTDLKPYTPEGFLESRPVNKEKVLTISQALNLIKQRGYIIKDDVGSVT

SEQ ID NO: 59784 - protein, 347 aa, unidentified
MNYYAGMDVSLEETSICIVDETGRIVKEARAVSEPHALIAALEDIGLPMERIGFEACSLTAWLHDGLRGAGLAAICIETRQANAAMKTMPNKTDRNDARALAQIMRTGWFRQVHVKSRQCRLWRSLLVARRTVMNEMRSIENVVRAILREGGIKLGTPSRADFAGKARQMAAGDPLVMALVEPLLAVLAAMLEQFAQLTKQVLDVAKGEMTCRRLMSVPGVGPITALAFRATIDRPDRFRRSRDVGAHLGLTPSRYQSGETDIQGRISRCGDEIARTALYEAAHCLLVRSKKWSSLRAWGMGIAKRRGMARARVAVARKLAVILHRMWDDGSEFRFGKQVDLAAASR

SEQ ID NO: 59785 - protein, 350 aa, unidentified
MSTVTIAVDLAKHVFELAVGGRAGAIRERKRLSRAQFERFWSTRAPCRVVMEACASSHFWARFLIARGFEVVLLPPHYVKPYRRRNKTDRADCEALLEADRCAGIHPVSVKSEDQQALVALHRVRSQWQQSRTARINAMRGLLHEFGVGAAAGSQRFMNDLPQLLTSKQHVLPARVRRTITVLWEEVRDLEQRIETIETELESVALEQPVIQALLRIPGIGLLTATALFATVADIHAFRSGRHLACWLGLTPREFSSGGRRRLGRISKQGDPYVRMLLIHGARTALNAASRLAAADKPLTQLQAWSLARARESHRNKATVALANKLVRIAWAVWYHERDFNGNHTVRIAA

SEQ ID NO: 59786 - protein, 360 aa, unidentified
MGEEETDMIMIGVDAHKHIHMAVALNERGQVVGQWQGDNSADGWDALARWALTLDEERRWGIEGGGGYGRGLAQHLVAMGDRVYDINPRLTAKERRRSRRMDKNDACDAQAIALVVQREEDKLPCVAAEDETVALALLTAERDDAQAEATRLRNRLHHLLLQLDPEYHLHLPALTSVIGVQAAETYTTTSGSLVQQERAAVVRRLAGRLRLAMEQVAELGRRIEALAQARYAPLTCLCGVSLLTAGSLAGILGPGRRFASEAQLAAYAGVAPLETSSAGRVRHRLNRGGNRRLNAIVYRIALVQARWSPEAKAYLARRVAEGKTKREAFRALKRYLVRAIWRLWQECLSSAGVEPAYHTA

SEQ ID NO: 59787 - protein, 311 aa, unidentified
MTETNIGIDISKDHLDVHRLPGDERRRFDNSKAGHKALIRWIGDTPARVVYEPTGYYHRALERALAAAGMPIAKVNPRQARRFAEATGNLAKTDALDAAMLTRMGAVLSLEARPVPSAIINDLRDLRTARNALIKDQVAAQTRAKAITLPLLKRQNAARLKQIEAQRKAIDAEINTLIQGDPDLAQRFAILCSIPGIAEVSAAMLLIEMPELGSLDEKQVAALAGLAPIARQSGNWKGKSFIRGGRQQVRQGLYMPALVAIRFNADLKAKYEQLIKAGKAPKQAITAVMRKLIILANALLKKGRKWQPRVA

SEQ ID NO: 59788 - protein, 388 aa, unidentified
MEVMIERCCGIDVHQKTIVCCILSGPLETNKPQKHQKTFGTTSAELRAALEWIQSFNVTDIFMESTGQYWVPVFNIFSDSEIQLTLANPAHIKNVPGRKTDVKDAEWIAQLGRCGLIQSSYLPCAQAMELRQLTRRRLSYIQKRTQSKNEIHNILQRANIKLTSYLSDIFGQTGQALLSLFIHGEKITLERVAECMHTHVKATPKQLLEAMDGKMSKTDRRLLDDSLEEYRFYTEKIKRMDGDIEEFILTYFKEEYELLMELPGVKANSAAVILAEIGPDVEAFKTAAHLASWAGLSPGSYESAGVKKSSRTTRGNKYLKTTLIACGGIAGRSMDPAFSNLYQRLSARGAKMKAVVACGHKLLRIIYKVLSCHIHYDKQKALGLRQQN

SEQ ID NO: 59789 - protein, 427 aa, unidentified
MPYQIAGIDVHKKMLAVVVTDVEVEDDYHFERLKVGTSPAQLRALADWLVEREVEEVVMESTAQYWRPVWEALEQYWRPVRRTRVGASPVSGTLHLAQAQSNRGAGGRKRDFPDAERLLKRLVAQELTLSFVPDAEQRLWRTVMRRKYQVTRNRVQLHNRLEALLEEAHIKLSSLVSDLLGTSARRMLQPLADGETDPDTLASLADTRLRATAAQLSDAFGACTTLHPVYRRLLKLTLDELRLIEDHLGQLDQQMADLLTAHHDAVQRLAEVPGLGVDSAQQIIAEVGATAATFPSPKHLASWMGACPGNEESAGVNYSHRCPKGNRQMRRVLNQAANAAVKAKGTIFAIVYRRLVPRLGHGQAIGAIAHRLCRLIWKILHQRIRYEERGPAVSEEAKKVRARKMIRELRSLGYHVERLSAPSGSPA

SEQ ID NO: 59790 - protein, 418 aa, unidentified
MSKKLLSRPLGQCVGLDVHLEFIEIAICEEGRVWSAGRVPATPEGIKTLADSLLPTDRVALEVTGSSREIARLLEPHVSRVIVVSPSDTGISQARAKTDRLDARTLARLLWTGELEAVWMPPEWTCRMRRRLARREQLVRTRSRVKNELHAVLMRCLKGRPPASDLFGVKGRGWLRGLELPEEESETVQAGLRHIEFLDCEIEQVERLIATEALKSPQVKRLMTVPGVNVICAAIFLATVGDIRRFKGQRQVVAYLGLDPRVYQSGSAPARSGRISKQGSPRARWALVEAARSVAQQPGPLHAFSERIRARRGHNLAVVAVARKLAVLFYCMLTREEDYAHQQPSLTARKLRMLEVKAGQPTLKGKPTGVFATRERMRQAEKQLAAQAEASYKRSVADWQAASPSTKKAGASVTAGRA

SEQ ID NO: 59791 - protein, 341 aa, unidentified
MQITTIGLDIAKNVFQVHGIDAAERVVVRKQLRRKQLIPFFEGLAPCLVGVEACATSHHWARELTRLGHQVRLMPAKDVKAYVKRNKNDAADAEAICEAVRRPTMRFVGVKSAAQQGRLMQHRTRDLLMRQRTQTINALRAHMAELGIAAAQGREGLKELLAIIASDEDPRLPVDARASLIVLAAQLEGLQTMIGSIEKRIMAQHRSDQESQRLETIPGIGVIGASAIAATVADPKVFRSGRDFAAWIGLVPRQDSTGGKHKLGPISKQGDRYLRRILVVGAHSVLRRAKLNPEKYPWLTQLLARRPFKVVAVALANKMARIAWALLAKGGTYRTPALAAA

SEQ ID NO: 59792 - protein, 345 aa, unidentified
MKIATIGLDLAKNIFQVHGVDPRGTVVLRKQLKRVQMLPFFATLEPCLVGMEACCGSHFWARKLQAYGHTVKLIAPQFVRPYVKSNKNDAADAEAICEAVARPNMRFVPVKSVEQQAILALHRVRQGFVTARTAHANQIRSLLAEYGLVLPQGINHLLQDAPDLLEDASYELPGLFRQLVMHQLEYLHELDRQVALLDGQIKTWHRENEASLRLAQIPGIGPITATALVASVGDARCFASGRQMAAWIGLVPRQHSSGGKQVLLGISKRGDVYLRSLLIHGARAVISALMKKTVCSTSWLGRLLARRHTNIATVALANRNARIAWALLAHHRMFCSNYEPTPGGV

SEQ ID NO: 59793 - protein, 320 aa, unidentified
MWSGWTLTAQITACAIIEEADGTTRIEQRQFGAFKKDRRALAEWAAALRPDEVVMESTGIYWKSPYVALETVGIRAQVVNARHVKNVPGRKTDVGDAQWLATLARAGLLRGSFIPPAKLRELRLISRQRQKLVGQLASEKNRLHKVLTDGGVRLGVVVSDLHGQSARAMVKAIILGQAPQEVLKFASREELFDALQGDLTDSHRFVLDELMRHVEEIEARIARFDARLLAELKDQHNALALLQTLPGVDLIGAAMLLVEIGGDMTAFGSADRLASWVGICPGSQRQSLRPPTPLRIRSCGQPNKVRLQVEVPIVDRPSRR

SEQ ID NO: 59794 - protein, 362 aa, unidentified
MALKAMSLVGLDVHARQTHAAVLDPATGELGVSRLRMAPIEVVSFLEGLGPGVLGVYEAGPTGFGLARAARERGIEVRVVAPGSIPKGPGDRVKTDRRDAVRLARLLAAGELSFVLVPSVADEAFRDLVRCIEDLRGDLMRARHRLSKFLLRRGYRYQDGQAWSARHARWLRGLAFEELCAQATFADYCAGVELLAGRRATLVSTLEQAVAECSHAATIARLRCFRGIETLTAAGVCAEVGSFERFPRPTMVSGFLGIVPSERTSDTKRRQGSITKAGSGHARRLLVEAAQHYRKPPAISQTLARRQHGQDPRVIEIAWRAQRRLHQRWQHLHLHRRKPAGVVAIAVARELAAFLWEAATLA

SEQ ID NO: 59795 - protein, 353 aa, unidentified
MVYSPNEYDIFIGIDVDQKSFSFTVKNHDTMSNSHKIPASPENLYQHIRNRYNNKRVICAYEVGVTGYYLHDYLTSKSIKCLMVPPPSVPKASNDRTKNNRLDSERISQHLKNGDMSPIRVPDYDCRELRQLLRSREEYVDLRKVSKQRIKSLLLFAHLHTLLKDTTQYWSYSHIKRIKELPCSPATRQRLDLLLKDLEYSRAQTVVILKELKKLSEQNASLKRNIHYLRSIPGIGFITAITILASIGDIEQLRNPRELAAFTGLVPSEYSTGERISRGRITHLGSSVLRSLLVEAAWANIAKDARLRQFYDRIRAKHHPQVGARKAIVAVARKLTLIIYRVLKEQREYITNI

SEQ ID NO: 59796 - protein, 431 aa, unidentified
MNADGKSPSMELLSPPEYEMSQRSKVCGVDVHKQFFVAALLSQSGGSTLKRFQSDKPGLLEFKEWLLNEQCELVALESTGIYWYSLYSTLEDHIEVIVANPYLIKNIPGRKTDIADAQWIAQLALNDLIKPSRIFPKKQREIRNLTRSREHLVNNRTMLKNRVHRVLESASIKLSSVLADIFGKSGLHIVQGLVAGTDLDTILASISNEKVRAKEPELRNAIQHNLESSQILIIDQCLSLIDQITCRINELDVEIGAQMNDREKDLKIAMSVPGIGKISAMTILAEIGNFEEFITPEKLAAWSGLTPSVYQSADHLKTGPITKRGSPHLRRIMVEVAQAAVKTKNSRIRSFFLRLKMKKGYNKAIVAVARKILCILWTILKKREVYCEENVPKKKVLITLKSSRNPPSIQEAIEILARAGYMIQKLNSSGG

SEQ ID NO: 59797 - protein, 345 aa, unidentified
MNHFNVIAIDLAKNSFQVCKTDHRGHVIFNRSMSRQKLKELLIKEKQSLVAMESCGGTHYWAQYAVKHGHKVKAMSARHVKAFRQGQKTDANDALAISIACLQPNIKPCRLLKVEEQCEQGVMRIRELLIEQRIQISNQLQTLMLEFGLPVAKGDKALRETISLALEDAENSFSFYFRFSLNQLYERYKSLDDQVDELQTQLNAMTKNDRICKRLQALEGVGPVCAMLLKIALNQVGHFSKGRDAAACIGVTPVQHSTGGKQKIGSISKYSAHNTLRSALYQGSLSVVSKIEKKEAHTHKDVWLKELVARRGMKRAAIALANKTVRTAFALIAKDENYQPQLLEA

SEQ ID NO: 59798 - protein, 344 aa, unidentified
MNKNWFIGIDVSKKTLDASIFVAGEVVNKFPHVQMRNDRQGFKDLLRWAKEQGVKTKDTLFGLEFTGYYSDALEQFLTKKQICYTMLPTTVVKHYQRGPHDKNDKIDSAKIADYLFRFNGTECIKLRVLPSKAMQELKALKSERKFLVQQRVACENRQKVAKFKSEEKHLQKLIDLYKTEIEQVEQQIADVIVLDEEIYTTYRLLNSIPGIGFVNAVNTIANTQNFTAFETARQYAKYVGVAPSEHSSGTSVRWRRRPSPHADLQAKADLSMAALHAIELSAEIRQLYERKLGNRTKDKDMQKKALNAVKFKLIREMFSVVKQAKNFELRGLDNAQTEAHSTEE

SEQ ID NO: 59799 - protein, 359 aa, unidentified
MKIVGCDFHPRWQQVAIFDAETGEVCEHKLLNGDGEAERFYRGLEAPALVGIEACGNSQWFIDLLERLGHQVWVGDAARIRASYVRKQKTDRRDAGHILKLLMEDRFPRLWVATAEQRDLRQLLIHRHKLVEIRTRVKNGLQHLALNRGMQKQRALWTAGGMAGLKNLPLEGWSLRRREDLLKLLAELDHQVRGLDEAVHLAAEEHAPARLLMTQPGVGPVTALAFVLTIGDVSRFRHSGQVASYVGLIPRERSSGGKQRLGSISKQGNRFMRQLLVEAAQTACRLDEGFRKQYAARCHHKPKGVAKVAAARKLAVRLYWMMRQKVGYPEIAHIESSSGVPLTGTHEVVTLNERSRIRQ

SEQ ID NO: 59800 - protein, 342 aa, unidentified
MEHVAIDLGGRESQVCIRSEKGEVLMERKVATSSLSSLLERRPKSRVIVETCAEAFHVADSALEHGHEVRVVPAMLVRSLGVGARGVKTDERDARALSEVSTRIDLPSVHVPSHESRERKSLCGMRDALVGSRTGLINTVRGWMRGRMIKARTGKTETFPERVRQATSKMELPSYVTRQLQAIEEMTLHILAADKELEALAEKDATCPRLMSVPGVGPVTAIRFVAALDTIGRFPSVAQVQSYLGLTPGENSSSDRKRRTGITKAGPAALRASLVQAAWAARRTRGVHPMLTWVLEVEKRRGKKVAAVALARKLAAILFALWRDGTFYSPKNDHPAEAAMSA

SEQ ID NO: 59801 - protein, 607 aa, unidentified
MSTTASLDRIGVGIDTARYGHRVSFLRPDRKPAAKPLTVMENRAGYQALQDRLNQLHEQHPTAYFHVRIDAAGQYAVNLELFLRGLKLPMTISVGEPKRNKDYQKAHFPKRTTDDTESQAMARFAVIELPNATPAPSTPMILLREVAGRLQSKVKQTTQAINRLHNLLARVFPELATLTEDISVGWVLKLLDKYPTAERIAQAQIASLEKIPYLSVEQAHAVHQAAKQSVASLRGELAEALVRDLVNQLRLCQKAEQHLHQLLLEAFADLPASPHVQVLTITGIGEATAAALVAKIVDINRFATPNHLVSYFGVFPEESSSGVDKHGKPLPPGTLIMSPKGNDLVRFYLWNAARTAIQHNPAIRALYRRLRAKGKRGDVAFGHCMRKLLHLVYAVWKTDRPFDKEHFPWEGSSDTQPSATTPPSADAGTTPSANEEAVGHKRDLPAEEVVTTADSTLEPASPAVKPASQSAAPRPKVDFACVREHVTMEQVLQHLGYFASLRGRGRQRRGPCPVHSQPTAPERTFSVHLGKNAFQCFHAECAVKGNVLDLWAAIHRLPLYEAALDLAETFQVPRNREEEPVKGTSSPRTATAKTSAPAAATATDGAK

SEQ ID NO: 59802 - protein, 472 aa, unidentified
MAAGKMNRKQSKELARRMQSANPGLEVVHPRAAGIDVGNSAHYVAVRPDQDVEPVRRFECFTADLHRLADWLEACGVKTVAMQSTGVYWIPLYEILEERGLEVYLINARHTKNLPGRKSDVQESQWLLKLHTHGLLNNSFQPPAEIRVVRTYWRQRGEHVRGASTCVQRMQKVLTQMNLQLANVISDLSGLTGQAIVRAILAGERDPRKLAELSHPQIRASREEIVKSLEGNWRLELLFVLKQEMEMYDTYQRKIAECDRELQAHLKQFADNVGRSAPGLTSTEQLKAFKAKKAKRVQGNAPEFNLSSELQRISGVDLTGIDGVSVIVAQTILSEVGLDMSRWKTEAHFASWLGLCPDNRVSGDKVLKRGTRRVINRAATALRLAATTLIRSRSYLGAQYRRLRTRLGAPKAITAMAHRLARLVYRMLKYGQEYVDKGTQFYEQRLRDQQLQSLKKKAASLGLRLIEADEVA

SEQ ID NO: 59803 - protein, 343 aa, unidentified
MDHFAGLDVSVKETSICIVDDTGRIVREVKVASEPEALLSVLKNSAYHFKRIGLEAGPLSQWLFSALAEAGLPVICVETRHMRAVLKAQINKTDRNDARGMAQMMRAGLYRPVHVKTLRSQKLRMLLTHRKLLQSKAIAIDNDLRGTLRNFGLKVGMVGKVRFETRIKELVENLPDLAAMVEPLLIVRRTLREQFCVLHRRLLAIVRDDEVCRRLMTTPGVGPVVSLTYRATVDVPARFRRSKSVGAVFGLTCSKYQSGEVEWSGRISRCGDEMMRVMLYEAAQSMLRSNKWSWLKAWAMQIARRRGMKKAIVALARRLAVIMHRIWVDGTEFRWTREQAVAA

SEQ ID NO: 59804 - protein, 410 aa, unidentified
MYGKAGPMIYAGIDIAKNDHVVGATDEHGRDASKPMKFANSAGGFDRCVAYLEGLAESKSDLLVGMEATGHYWLPLFCRLQDAGYAVVVINPMRTDAMRRFKGSSRVKTDTIDCVLVAETMRCGDFEPSRLGDESMMELRQLTRLHQELKESVADLKRQVITALDQVFPEYDSIFSDTFGESSKAFLKRCPTPEECLGIRADSLAGTLAKASHGKLGRKKADEIKSIAKGSCGMRMATSALSFQIKLLIDQIDFIERQAEEVEAKIREGIQEIEPLILTIPGIGHVLGAQIVSEIGDIRRFHSAPAIVKYAGINPSVSQSGKFSSDDNHITKQGSPYLRRALYLAAMGQLKLKTPFYDYYAKKRADGKSHREALIAVSRKLVHVIFAVLSKQQPYDPNVAKSPELASRSE

SEQ ID NO: 59805 - protein, 345 aa, unidentified
MDHIAIDLGGKESQICRRSADGKIVQELRCNTALLTGYLKKQPPSRVVLETCAEAFKIADTVQELGHEVRVVPATLVPALGVGSRGVKTDRRDAQILSEVSTRVDLPSVHIPAQLSRARKSSCTAREALTAARTLLINSVRGWSRTELLKLGSGTPSTFPRRVHDKALSRPEGLPEFIAQVLLSIETLNEQIAQADEGLKRMAKSDPVCERLMSVPGVGPVTAIRFVAAIDDVKRFPSAHAVQCYLGLVPGEHSSSEKKRRTGITKAGPPRVRWALAQAAWSLRLSKKLDPLALWANRVEARRGKKIAVTALARRLAGVLYALWRDGTRYDFTRLRTADNQPGTH

SEQ ID NO: 59806 - protein, 355 aa, unidentified
MIKTTMPTIGIDLGDKHSHFHLLEAHSDETERRGKIRTTSKAFGKLLGSLPRCRVVLEACTHSAWVGRLVEEAGHELIVSNPRKVALIYKDSRKSDPRDAETLARLGRADPKLLWPVRLRRLETRRALSLLKCRDALVRTRTILVNSIRSQAKTMGQRIGSGSTKNFEKKAREDLPEELLDMFGPVLDLLEETSRKIRSYEKRIEELGRKEYPEIALLQQVNGVGPITATAFRLIIEDASYFDKSRDVSAYIGLVPRRDQSGNCDKQLGISKEGDAFLRRLLVQAAQYILGPFGADSDLRRWGLGLVERGGSAAKKRAVVAVARKLAVLLHALWKSGEVYEPLRNSSREEVTGAA

SEQ ID NO: 59807 - protein, 321 aa, unidentified
MTPSFVGIDVSQHHLDVHVRPAHLRRRFDNSAEGIAALLDWLRPLAAERIVCESTGPYQKALVAALLAEGLPAVVANARQVRDFAKGHGPVAKTDTLDAGNIAHFAELVPTIVRPLPSPELQELRDLYDRRGQLVRMLAAEKNHRHAAAQAAARVLKKIDKHIDYLDSQIKTLEQRMNQIVETSAAFKAQNDILQSITGIGPQVARTLLAYLPELGQRTRQSITALVGLAPFNNDSGQSSAPRHIRGGRAKVRLGLYQAAVAAIRFCPTMKAFYASLKARGKASKVALVAVARKILVLANALVRDMRPYQAAGQTPFAKNS

SEQ ID NO: 59808 - protein, 320 aa, unidentified
MNPQPCFIGIDVSKGTLDVHVRPSGAVLHTNNDADDIAALVTRVVEWAPDLVVLEATGGLEHPAAAALASAGVPVAVVNPRQVRDFAKATGQLAKTDAIDAAVLAHFAEAIRPQARPLPDAQTRELAELLGRRRQLIGMRAAESNRLGTTTATRVRRSIEAHLRWLTKQLEDVDTDLSEAIQNSPVWCVNDDLLQSIPGVGRMVSRALLAELPELGTLSREEIAALAGVAPVNRDSGTWSGKRSVCGGRSHVRGALYVAALSAKRWNPALREFAARLKEKGKAAKVILVAVARKLLIIANAILRTQQPWEDRAAKNLVAA

SEQ ID NO: 59809 - protein, 395 aa, unidentified
MFIVGIDVAKRSHEVCMITSDGQTVQRPFSIRNNCTGYNLMLEKIRKHTNIKSQIVFAMESTAHYWLALFTRLRKDGYHVILLNPIQTSAMRDMFIRKIKTDAKDSFIIAELIRFGRYAESNVAQDRLLALKELCRNRFYLVDMAGDLKRKLIALIDRVFPEYEAQFDTIFCKSSVALLKKYPTPQRLSNAHLDKLTELLWNSSNGHFGEWKARELKNLARNSFGVEDCDGAYSTLILLMLDQIQSLSGKADALEKEVSRLFQSFDTTVTTIPGVGPIIGAVILSEVGDISRFSSADKLAAYIGVDPSVNQSGEFQAAHAHMSKRGSPYLRRCIWMASQVAVQRDPMFRAYYEKKAAEGLKYMTIIGHVTRKMTAVVFAILRDHKVYEPVLPTAA

SEQ ID NO: 59810 - protein, 418 aa, unidentified
MNDQTQWYAGVDWGSQSHCVFLADGEGRKIGERTFKHGGEGLAEMAAWLMAASGAAEPGRIHVAIEIPHGPVVEALIERGFSVHAINPKQMDRFRDRFTMAGAKDDSRDAEVMASCLRTDPRCFRRLVATDPIVVELREFSRIAEDLGVERNRLANRLREQLWRYFPALLELEDDMSAEWLLQLWEAAPTPQKASRLREASIAVILKRCRIRRLAAAQVREALKKPPLTLAAGTVEAASAHVASLIPRLRLVNRQIKDAERRIDALIARLAPPDDSGEAEPGQKKQHDAAILASLPGVGRTVLAMLLAEAPDPLQRRDYPALRSLTGVAPVTRRSGKSWVVVRRRACHPRLANAVYHWARVAIQHDPRSRAKYAELRRRGHSHGRALRSVADRLLNVACAMLRTQTTFNPQHIAEAAA

SEQ ID NO: 59811 - protein, 416 aa, unidentified
MEPQRNKVCGIDVHKRFLIATILSRDGEKDTQRFSVTLEDLLKFRDWAFENGCEQVAIESTGIYWHPVHSVLEGKIDLIVANAYKIKHTPGRKTDVSDSEWIAELCLNGMIEPSRIFPKEDRELRRLTRAREGYVKQMTQEKNKIHQSLDSSCIKLATVISDIFGKSGMYLLNCILEGRDIDEIIEGIPSGRLKKKADQIKESIRSRLEISQIILIRGSLSLMRSIQERLDELDGEISSRIQYRKTDLAIAMSMPGTGFVSATAILAEIGNYTDFKNAEQLAAWCGLVPSLYQSAEKTILGGITKQGSKHIRRMLIQVAYAISRTKDSKLKKFFVRIQAKKGSKVAAVALARKVLCILHHLLMNQETYLENRGKKNMRQKALVAPSTIEMPIQEMIECIVRAGYVVTKRDGIGGLG

SEQ ID NO: 59812 - protein, 316 aa, unidentified
MNEDLFARLSRRYLALDIHKHYSVIAGVNFDGQVILEPVRIEHEDLEAWLKKHIQSSDYVVIESTTNAWHIYDLLEPLAEKVLVANPIKVKQIALARVKTDIRDTLILARLLAANIIPAIWVPPLHVRNLRYLLSQRRHLVGMHTQTVNRMHSVAHRHPLNHPKGKRFNEENTGWQQDEELSDSEKFQLELDMSTKKHLDEQAGKITQKLARMSHEKPWAESIMYLMQLPGFGVITGMTILAAIGEINRFESFKKLSSYSGLTPGVEQSGVKNRGKGITKEGRKDLRWAGGRACRDHGGSRSKGGKIRPTLGTALQ

SEQ ID NO: 59813 - protein, 356 aa, unidentified
MSVYLGVDFHARTQTVCWCDTADGVIHQRTLDHQQDNVRGFYAQFAVPAVVGLEATGYARWFHRLVEEQGHRLLVGDAYVIRKCALRRQKNDRRDAELLLDLLLHGDFPAVHVPTVASQEVLRLVRYRQRLVEMQTKLRNGVQAVALNHRLRLGPKLWSRKGQQQLRVLELDRADGLQTQNSLELLEQIRTRIRAIEKELTTRADQNARVRLLRTHPGVGLLTSVTVVHTLEPVTRFDRARRVAAYCGLDPCESSSGDTVRIGHISKQGNRLLRHLLVEAAHRAVHGKTDADLRSFYFRLMERKKNSSVAIVAVARKLVLRLYRMLRDDIDYTEFRRRGRDARRARKPASPSTGGC

SEQ ID NO: 59814 - protein, 387 aa, unidentified
MPQPNDLSRSLVALDQNSTIIAVVEMSQSSWLVGGILPGIERQPRKKLEPSPERLLVLLHRWRDESVRTGRTITRIAVAFEAGRDGFWLARWLEARGVEAHVIHPSSVAVSREHRRAKTDRLDTELLKRGFLGWLRGERGHCSMARVPTIAEEDAKRPNRERECLVKERTRLVNRIKGTLARLGIRNFKPTLRQATERLATMRTPEGTPVPPNALAEVQRDLARLRFVVGQIKQIEEARRQRLEEQPERGPHAMVRLLARVVGIGIETADMLVNEVLSRPMRDRRAVARYAGLTGAPDESGAKRREQGLAKAGNARVRRGMIQLAWRFLRFQKNSALAQWYHARTADRRGATRKTMIVALARKLLIALWRFGTIGEPMDGVTLRPAS

SEQ ID NO: 59815 - protein, 455 aa, unidentified
MGKHDNSFKVIHPNAAGIDVGSRSHMVAVNQSREDVREFGIYTKDHEELITYLYAEGIMTIAMESTGSYWQTLFSSLQAAGFEVVLVPGSQTKNVKGRKTDVLDCMWIQKLHSLGLLSGSLQLTDTFQQLRTYYYHRSHLVEQSARYTSKMQKALRLMNIKLDVAINDITGQSGMAVIEAIISGVRDPESLSALVSSRVKKSREEITNSLHGWWRDELLFELGACLEFYRLYEHKIKECDQVIQELLIKFAPEREITEAEHKNLRANKKRRDKHAPSFDLSHLSFSYFNTDLFAINGISYNAVLCLLTNMGHDLHKFPSAKSFASWLGLVPNNKISGGRIISNRTASGKNYIAKALRHAANSIGNQKDHELTPFFKRIAFRKGRIAAIIATARKLAVIIWNMIIKQEPYKREMVEVTSARQKSLKIRQIEKKISALGLSKEELGKMFTKSSLSAI

SEQ ID NO: 59816 - protein, 315 aa, unidentified
MAMPVATTQSIIGVDVAKDELVIYCAESDQLETISNTKAAIKKWLKTVARPVAIAIEATNIYHQEFADLAHADGCVIYMVGGYELSHYRKGVNVRAKTDALDARLLARYLTNEGDHLRPWTPPSPLYCRLISLFRRRAALVQARVSLKQSWENEPLLKTAFKHQINAMQRLEILLEKTILTQIDEAGLSAQLKRCMKVEGIGTLTGARLLASFQRGDFRNADAFIAFLGLDLRISDSGKKKGRRCLTKRGDPEARRLLHNAAMAASRTSAWKGFYEALRERGLSTTQALVALARKLARVVFALLKNQSEYSPKAV

SEQ ID NO: 59817 - protein, 346 aa, unidentified
MKITTIGIDLAKEVFQLHGVDEHCKVVLCKRLSRGKMTKFFANIDPCLIGMEACGSSHHWARKLEEFGHTIKLMSPQFVKPYVKSNKNDMADAEAICEAVSRPNMRFVSIKTVEQQAILSVHRARQGLVKSRTAQANQIRGLLSEFGIVIPQGIRSIPKRMPGILEDAENGLPGTMRQLLTRLNEHLAVLSLRTEELELEIKLWHKENEASQRLEAIPGIGPITASAIVASVGNAAEFKNGRQFAAWFGLVPRQHSSGGKQVLLGISKRGDTYLRTLLVHGARAVIRFAEKKAEPESWLRQLIARRNKNIAAVALANKNARVIWALLTKDAIFRPDHTSAASAAAA

SEQ ID NO: 59818 - protein, 302 aa, unidentified
MGVDIAKSYLDGALGNEKRRFANERIGHRELIRWVKQVKAPVQVICESSGGYERALVQALVGAQLKVSLVPANRVRQFARAAGILAKTDRIDAKVLCDFAKAMQPGTISASQLEQQHLRELESQRRHLTHLLVMEQNRAARASDRCVQRLNRSLLNQIKKQIQQLDLLIKEHIEASPELSAKAQKLTAINGVGARTAALLLAQMPELGQLNRREVAALVGVAPFNRDSGKMRGKRAIYGGRRPVRHGLYMAALVAARHNPILHAFYLRLRAAGKPAKLALTATMRKLLIVLNSALKPDLNYA

SEQ ID NO: 59819 - protein, 352 aa, unidentified
MIIIGVDFHPEFQQIASVDSETGEFQEKRLAHPEEAEKFYRGLVGQKVRVGMEASGHARWFERLVAELQFELWIGDAAEIRTKRVRKQKTDRQDAQLILRLLLEDRFPKIWVPSLENRDLRQLLWHRHRMVQARTRIMNQLQAVALNEGLRCKKRLWRERGREQLESFRLAPWASRRRRDLLELMDRLSPTIAELTLAIEREVEKCPEAKRLMTHPGVGALTALAYVLIIGKAERFGSGKQVASYLGLVPSEESSGNRRRLGHITKQGSSILRFLLVEAAQVTVRSVPEWRSKYFHLAMRRGRKIAKVAMARKLAVLLYWMMRQGWDYEQVKKFGSHAGQPGNRHGVQSNTE

SEQ ID NO: 59820 - protein, 411 aa, unidentified
MEAAVITAVGIDVSKSKSTVAVRRPGGEIALRPFEVHHTNSDLKKLASTLKKLGGDIRIVMEHTSTYWRPIALTLKEAGFFVSIVNVMLIHDFSDNTIRKLKTDRADALKIANYALTFWDTLPPFNNEEETRLLLKMQSRANERITATATALRNGLIALADQTFPGVNIAFAPNTKNANGHEKWVDFFLRYRHKDCVCQYSMEAFTESYRGWCKRKNYKFRTDTAHKIYLLAQEGVATLPKCESTKMLITQACKSLNAVCEAKQSTQLEMQRLAAMLPEYEVVMQMEGAGPITGPALMAEIGDVRRFKNKKALVAFAGIDAPPFQSGTFESKSRHVSKRGSPHLRRTIFIVSNIILTRSNPENAVYCFMDKKRSEGKHYYVYTVAGSAKFLRVYYARVTEFLRSQPSSDAC

SEQ ID NO: 59821 - protein, 331 aa, unidentified
MTNANATDCIFAGIDVSKLKLDLAQTGIQQVATFSNDSAGISQLVELLLKAPPKLIVVEATGGLERRLLDALLEANLPVHLANPKQVCYYALSLGILAKTDPIDAHVIERYAAQLSPRLLQKRSENQSELEALVTCRRQLLHVRTEESNRLGQTISKSARKSIAAVLKTLEKQIKSLERQIRQLIESDNDLDDIDKLLRSVPGIGKVASSTLLCEMSELGKMDRGQAAALVGVAPFNRDSGRFKGKRVIRGGRRAVRGVLYMSAVCGIRFNPILSAFAHRLQKAGKLPKVIIVAVMRKLVCFINAMVREGLRWDELNIVKKLTVKNVAENT

SEQ ID NO: 59822 - protein, 381 aa, unidentified
MKKELYLGLDVHKDCIITAVAEEGRKGEVRETGALSNDLHAVEKWIGRRLRKTHGKEVILRACYEAGPCGFGLARRLKQLGVECEVVAPSLTPKRSGERVKTDRRDARKLARLLRAGELTAVYIPEATDEAMRDLCRARSDAVDDRRRSRHRLKGFLLRHGYRYQGKSSWSAAHERYLRELVLPHPAMKVILEEYLQGIATAGERIERCEEAMGDLLEQWRLAPAVRALMAMKGFQSVAAMILVSELGEVHRFGHPRQVMAYLGLVPTENSSSDRRRQGHITKCGNAHARWLLVECAQHYASPPKVSKELSRRQQGQSHEVRSISWRAQNRLHHRYTRLLARRLQRNKAMVAVARELCGFIWELLRTQPCYQTQSQIGLKS

SEQ ID NO: 59823 - protein, 349 aa, unidentified
MKNKVRFLGLDVHAETIAVAIAEPDGEVRSLGTIANRAESIRKLVKKLGPIEQLKACYEAGPTGYVLYWQLAELGVACEVIAPTLVPMKAGDRVKTDRRDAERLARSFRSGDLTAVWVPDEGSESLRDLVRAREAAKQDQLRARHRLSKFLLRTGRRPVLGMKAWTQPYMVWIRQIHFTQVARESTLLDYLHEVEHMAERVKRLEQAITEAVKLASPEIQEVVAGLQALRGIAQVSAVTIVAELGEISRFQSARQLMGYSGMVPSENSSGGRTQRGRITKTGNAHLRRIVGEAAWSYRMRPCVEPALRKRQEGVAEEIKEVAWKAQNRLHKRYIRLGAAGKDQKKSSPR

SEQ ID NO: 59824 - protein, 339 aa, unidentified
MELYAGLDLHSRNTYIGIMDNAFNRVFKKRVPNHLEQILQTLDPFRDQIKGFVVESTYNWYWLVDGLMDAGYSSAHLANPSAIKQYEGLKHSDDQHDAFFLAQLLILGILPQGYIYPKKGRPVRDLARKRMFLVQHKTAHILSLQSLIARCCAMKVRANDMRHLTVKELEEWLKEEYLVLSAQANLDSINFLKQKIKQLEKAIIQKVKLNKEFKYLLTVPGIGNILAMTIMLEVGDIKRFPKVGNFTSYCRCVPSRRLSDGKSKGHGNRKNGNRYLSWAFTEAVHLGRRYNERFRRYYNRKVAQANTSLATKALGNKLARICYYIMRDQVPFREELFCH

SEQ ID NO: 59825 - protein, 419 aa, unidentified
MFKIFYKNCCGLDVHKTWIYACIGITDADGKTEYHESRFSSFSKGLRKLAKWLQKYNCKLVCMESTGKYWIPVFNILEKTCDVTLAHPKYTKPQKGNKTDRKDAKWICDLFMCGMIKPSFIPPAAIRQLRDLVRYRSKLTNMLTGEKNRAQNCLTVSNLKLDDVFSDVFGKSSRSITEYILDHPGETFDVTPFVDGRCKAPIEEIQAAVDGSVSKEQAAKLRQCLKHIDELTAHKQKIEEEILQIAEPFSAYLDLLRTVPGCDSDKMTAITILSEIGYDMSVFPSSKNLTSWAGCCPRNDRSAKHTKSTRISRAGAWIKPLLVQISNALIRSKKHPEFSERYRRLKARRGHKKAIIAICRMLLTAIWNILSKLEPYTPDGFINDRPADKKKTMSTAEALKLLKSRGYIITDLPDGSVTT

SEQ ID NO: 59826 - protein, 421 aa, unidentified
MPHLAPEAFAAFVGIDWADAKHDVCLQAVGSTTQECSQLDHTPEAIDAWARALQERFAGRPVAVGLELNKGPLVYALRKYDFFVLFPINPGALAKYRAAFTPSHAKNDPTDAELQLELLLKHRDKLQPLNPQSPAMRALAQLVEHRRRVIGDKVRVTNRLTSTLKNYFPHGLQWFEDKDTLLFCDFLAQWPTLKAAQLARRTTLADFFRTHHVRYSNVIDRCIQAIKRATPLTTDEGVIVPHALLVQALVAQLRVILQAITDFDHAIAPRAQSHPDFSLFAALPGAGAVFAPRLLVAFGEHRERYASAEERQKYAGIAPVTARSGNKTWVHWRWQCPTFLRQTFVEWAAASMRHSFWARVYYQQQREKGKSHQAAVRALAFKWIRILYRCWQERTSYDESVYLQALHHRGSSLIQKLAQAS

SEQ ID NO: 59827 - protein, 332 aa, unidentified
MNYNTVYVGMDVHKESFSLCAYTIEAEKASHYQRTEADYKKVLNYLEFLRTIYGDDANFICGYEAGCFGYTLYHQLTANNVKCIILAPTTMLEQRSKKRIKTDRRDAEIIAKCLAQHNYSPVHIPTAKDEETKEFLRMRDDHKLALKKVKQQILAFCLRHNYRYDGKSHWTAAHLKWLKALTPEALYKEILDEYLLTYQTLSDKIERLDKRIEELATQDEYKEAVKKLCCFIGVKTHTALSVLVEVGDFKRFASAQHFASYLGLVPGEDSSGDDQNRLGITKAGNRHVRLLLTEASQCYARGQVGFKSKELKARQSGNTPAVREYAGSHRLC

SEQ ID NO: 59828 - protein, 343 aa, unidentified
MTKITTVGLDLAKSVFQVHAADREGRPVVRKKLRRRQVLEFFATLSPCLVGLEACASAHYWARELQTLGHEVRLIPPQYVRPFVKTNKNDATDAEAICEALMRPTMRFAAVKSVEQQTVLLLHRSRDLLVRQRTMLINALRGHCGEFGVVAAQGAPKVTDLIEVIEDRDDARIPTLAREALDALIAQLRGVQAEILGLEKKLKAWHRSNEASRRLEAIPGVGVITATALVATIGDASQFHSGRQLAAWLGLVPRQYSSGGKERLGRISKRGDGYLRRLLVHGARADLRWSRRKKEERSTWQEALLSRRPTNVVLVAMANKTARVVWAMLSRSEEFRTETTRAA

SEQ ID NO: 59829 - protein, 445 aa, unidentified
MDVVYTHGAGLDVHKKTVVACCITRGPKGEKRMETRTFGTMTADLLAMSDWLTSLQITHVAMESTGEFWKPIYNLLEGNFELLVANAKHIKAVPGRKTDVKDAEWIAELLRHGLLRGSFIPPQAQRDLRDLTRQRTNLVQDRATVINRLQKVLEWANIKLSSVATDVTGVSARRMLEALVANQVEPSALAELAKGRLRNKRTALEQALNGVVRDHHRFLIAQHLMQIDFLDEQISLFDEQIAQAMQDMPQPPNDQEPAQPSQPQPAAPPPNDSTQPLTWEAAIDLADTVPGVGRRAAEMILAEIGIDMSHFPTEAHLASWAKLSPGNNQSAGKHYSGATGHGNRWLRTILVQVSWAAVKVKKSYLSSFYYRLAARRGAKRAIIAVAHRILIAIYQMLKKREPYKDLGATYLDQRNKSKVISRLQRRIEQLGYRVTVEPLLTVTPT

SEQ ID NO: 59830 - protein, 419 aa, unidentified
MPQIWAGIDAGKGHHHCVVIDADGVKLYSARVANDEAALLELIAAVTDLAAGAECLWAIDLSSGGAALILGLLAAHSLPVVYIPGHAVHHAAKAYRGDGKTDAKDAAIIADQARMRRDLQLLSVADETRIELRALTAHRKDLVCDRTRAINRLRGHLLEYFPALERAFNYSASRASLLLLTGYATPDAIRKMGESRLARWLRAQGCRTAVATASTAVAAAKSQQSVLPGQAIAAELARRLALDVIALESRIAEIDQLIAARVDTSRAAELLRSMPGFGPLLAAEFLASTGADLSIYVSVDRLAGVAGLAPAPRDSGKISSIHHRPRRYDRRLLRACYLAAMVSVQQKTESRVFYDRKRAEGKSHKQAILALARRRLDVIWAIFRDDRPYSPPAPPGKNVSLTMSSTVPQHASSGAALAA

SEQ ID NO: 59831 - protein, 357 aa, unidentified
MSEHYAGRQIVGMDLHRRRSVLVRMTDAGERLETVRISNDPEHLAQVMARAGEAPEVVLEAAYGWYWAADTLAELGATVHLAHPLGVKMFSYRRVKNDQRDAADLADLLRMGRLPEAWIAPPATRELRGWVRHRAKLVGLRSSMKCQVHGVLAHAGIWVPMSDLFGVAGQQLLAELSAGERLSLESRSRLDSALRVITALEFEIDLFAKLVNGRLRTDPGYRTIQQIPGIGPVWAAVFVAEIGDITRFHRPEQLASWAGLTPKHHESDTTVHRGRITKQGSRLVRWAAVEAVQRVSGQTRLGQHRDRVAARRGRNIGVVAAARELLTLVFYGLRDHHIRALNPPLTSTASAASSPAA

SEQ ID NO: 59832 - protein, 337 aa, unidentified
MKLYSAADLHSNNHFLAIIDEQDKRVLEKRLPNDLATTLKTLEPYRAGIVGIAVESTFNWYWLVDGLIEAGYTVKLVNTSKVRQYEGLKYTDDRHDAFWLAHQMRLGILPTGYIYPKEQRAVRDLLRERRRLVRQRTTNVLSTQSTLWRHTAIRLPAKVILGEKEAQWPELSDTNTKLGVQAHRATITVLNKQIEAIERTVLKHLKPVPEYKMLLTVPGIGPVIAWTIALEAGDLSRFANVGHFASYCRCVDSKRTSNDKKKGENNAKNGNPYLAWAFFEAAHFAIQFLPAAKRFYEKKAAQRNPILAMKALSHKMARACYYVMRDKVPFDPMRLFG

SEQ ID NO: 59833 - protein, 315 aa, unidentified
MERAFCAAGIDVSKELLHVAVLPGGQHFTAANNEDGIVGLLTRLQELSTDLVVLEATGGLELAVLTALGAAGTPVVRLNPRQAREWARGTGTLAKTDRVDAKLLALYGERMRPNPRPLPDAAAQQLEALAARRHQVVLMLAAEKNRVQQAIPQVRPRIQEHIAFLQKQLDGITAELDTLVKASDLGPMQENLLRSVPGVGPVTSMTLLVELPELGRLSRQQIAALVGVAPKHRDSGHLHGKRFIWGGRAHVRSVVYMAALAAARFNPVIREFYQRLLQAGKAPKVALVACMRKLLTILNAMLRDRRPWQLSASPA

SEQ ID NO: 59834 - protein, 366 aa, unidentified
MSEVSTIGIDLSKHVFQLHGVDGAGRVVLCRRLRRGQVAAFFAALPPCLVGIEACGSAHFWAREIAAFGHDVRLMPPGYVKPYVKRNKHDAADAEAVCEAVRRPSMRFVPVKTPEQQAALVAHSVRDLLVRQRTMLVNALRGHLAEFGIVAPRGIHKVEELIGVIGNATDGRIPSSARSALGVLATELAALDLRITVVETAIVARSKADAVARRLATIPGIGPIIASRITAMVPDSSIFRSGRDFAAWIGLVPRQNSTGGKARLGGISKRGNGTLRRLLVGGAMAAMFRSKALQNDPWLCRLRARKPVMVAAVAFANKIARTLWAVMRHDENWRPAAASSSRPGEPAAVLAAVKTMPPSAVAFGQS

SEQ ID NO: 59835 - protein, 367 aa, unidentified
MSKTETNRLCVGIDLHKTQFTVCALNEEGEYLLEKLYRTTEEGYGNFIKEMHNREEQGYSIELAVETTGNARFFKNRMEKEGFVVKVVNTNRFKVITTSTKKTDANDAATLAYYLMKEMLPEAHLCSQTSEEIRRLLKTRSVLVQSMVKIKNQIHGMMLGYGIETTAAQFQSKRKRQELINDLADHNYSDYTASSLKVMLKILDDLSAEIKDIEKHLEEMVERNEDVELLMTIPGIGINTATTIAAYTEDLERFEGNYKKFAAYVGIIPSVHNSNESTHYGRITKHGPQELRTAFVQAAMGMIRLTKVTSEWRLLKEYQRRKDEKGSGRAIIALARKITRIVFVMLSKRERFNPDLMRCDEQIQQTA

SEQ ID NO: 59836 - protein, 410 aa, unidentified
MEVLYPRCAGLDVHKESVVACVRLQEGGAVRREVQTFKTTTAGLLALSAWLSEHGCTHVAMEATGVYWRPVWHILSDGEFSLTLANAAHVKNVPGRKTDVKDAVWLADLMAHGLIRGSFVPDRQTQEMRTMLRTRKQLVRERSSHIQRLQKTLEDANIKLDSVITDILGVSGRAMVQALIAGETDPEVLAGLADRRLRASPQELREALRGRVTSHHRFMLQLHLDQVDALDRAVARIDDQVKADLDPFRQAVKILKTLPGLNDLGAQCVISEIGIDMSRYPTDDHLISWACMCPRNDESAGKKRSTRMRKGSPWLKSTLIQCAWAATRVKESYLQAQFYRLRARRGAKKAIGAVAASMLRAAYHMLKNGTVYQDLGADHFAKHNKTASTRRLVRHLQHLGYDVLLTQVAA

SEQ ID NO: 59837 - protein, 446 aa, unidentified
MKQQSQLSCINQNAAGIDIGSKSHFVAVPPDRAEKHVREFSSFTSGLEEIVTWLKECKIETVAMESTSVFWIPLYETLESNGFEVYLVDARKIKNVPGRKTDVKDSEWIQQLHTFGLLHAAFRPNQEICELRSYLRHRANLIEQGAQQINLIQKSLDLMNIKIHNVVSQITGKTGMTILRSIIDGERNPEKLAAHRTAQCKASTELFVESLKGQYRAEHIFSLKQAVSIYDTYQDKILECDQEIEKLLEKHKKKKSDDNDDKQEPYSKKKKSNSKNSFEFNLGELLMDMTGVDLTRIDGISPNNALTIIAEIGLNMNCWKNEKHFSSWLDLSPGNRKSGGKQISGKTRKNANRAAKAFRLAAMTLYKSQSSLGAYFRRMRSKKGSPKAITAAAHKIAKLFYSVLKYGKEYLDKGMEHYEKQFEAKRLKFLEKQARQFGHTLTLVGV

SEQ ID NO: 59838 - protein, 347 aa, unidentified
MNITMIGLDTAKSVFQIHAVDETGKTQIKRKLSRNDLVLFFTKQELCTVVMEACGAAHHWARILTGLGHDVKLIAPEAVKPFVKKGKKNDAADAAALCAAASRPDMRFVPAKSLEQQGILALHSARSLLVKQQTMLANAMRGLATEFGLTVPKGIGKLEELAVLVEEDETFPMKARQAFTGLFDQCKALTESIMTFEAEIVAHARHDETARRLATIPGIGPITASLIAATVGDISMFKSARHFAAWLGLVPRQHSTGGKTRLGRITKTGNREIRKLLVLGATSMVYRAPQWNSAAGLWFRGVLERRPVRLATVALANKMARIAWALMTRKEVYQAKGRVTAVADAIA

SEQ ID NO: 59839 - protein, 413 aa, unidentified
MVKREKIELVKRQRIFVGIDIAGSKHRARFIDNMGEEQIKPLSFFNDREGLEKLERRVNEIPGIGDDIIFGLEPTGDYWKPVAQYLREKGYPVVLINPYHLKRTKEIIDNSQDKTDDKDSYLIADLTKQSKYFFPVIPEGVYAELREVSINWKRTSQQLARLKCHLSNFLAKYFPEYKGIFSDILGKTSLYILKHFPLPEDIERLGINKLYRVMKKVSKGSIKEGKIQLLYEKARTSIGLKGGSQTAKVLLKEVLSDIEILKKRKEKLTKMMDELLYQSGYLKNLLSIPGVGIVTGSLFLGEIGDPDNYERASQIEKMAGLNLVENSSGAMKGEKKISKRGRSTLRYVGHLVTTVAIGKSPEIKALYRYKVEECKKEKMKALTGLSAKMLRIMFAVCKNKTFYKHEEITRYFR

SEQ ID NO: 59840 - protein, 350 aa, unidentified
MGNPVKILLLNYSLMNNEMTTIGIDVSKKTLDISIASEGKKKHEKEINEISGFEKIIASIEQFQLKKDVVIIIEATGGYHYGIVYYLLEQRFTNVKVINPSIAKSFSQMNNIRGTKTDKVDSILLAKLGKIHDLPSYRESKEDIEKKQIVAGLIGLRKSLREHKQRQNHFKHQLKVIQCDAILQSMNAVIVLLEKEIKKLEKLLCKLTEKDTQIISSIPGISEKGAAVISTQIGDISRFKNVKQIIAFSGLDPKIQESGTSLHGNGRISKKGNEILRCSLVQCAWYVYMQAIKRKGGKIFVDFVERLQKKNKHYYQILCAIAHKLLGIIFSLLKKGEKYKENHYFNLISV

SEQ ID NO: 59841 - protein, 220 aa, unidentified
MVSRGIDISKSSFVAAYPSTNGNPTKTFPNTTARMRELIGTLAVAEHHCVMEATSNYGCCCTCYIRTVLPSVLPPPKKQIKHFSRMMMPVTKTDEKDAYMIAMYGEKMNPPIYKMPSQATIRILTTEGFTYFDNAKQLSRFIGICPTYQQSGTSINIRGHINRNGDEYLRSLLYVASWSALRSNAACRESYLRLKANGKPSKVALIAVANKPLRIKFYFF

SEQ ID NO: 59842 - protein, 336 aa, unidentified
MVQIYGIDLGMSSFDVSFLSESGSVRHLSGVKNTVHGISKFLLSLPSSAVLCAEHTGVYGDLLLRLCTLNRTCLCFVPGYQIKHSLGLQRGKSDPLDACRIREYAERFYDLLRPCFYPGEEMSELQELYRTRSLLVESRKRLDTLNIGDNCKSSVSLAADHARRAVLAELNTQISGLDHEIEALIQNSSEFSRNYQILTSIVGVGPVTSCELIIKTENFRKLDTAKKCAAYAGIAPYPKESGKMKCGHKISPMGDKQLKTLLFLCARSAKEHNKEIRLYFLKKHKVEKKHFFVAMNNIANKLLRLIYSLIQKQQTYDRDYIQNEPRYVVISDIYKC

SEQ ID NO: 59843 - protein, 323 aa, unidentified
MRPWRLFGFDGTTGGAPRSPTAFKDPGENEPPPVTAAAFVVARNARGLEELIARLREVSPHIVALEATGGFETVVAAALAGAKLPVVIVNPAQVRAFAKALGKRAKTDPIDAAVIAHFAEATKPQVRPLPDEATRLLADLVARRRQIIEMIGAEHQREQRMTIPRVKKSISRLLKALEKELASLDDDIDNAVRGSPAWREKENLLASVPGVGPVIARTLISELPELGTLGRKEIAALAGLAPFTRQSGKWRGKSFIGGGRTAVRCALFMGAMVAKQHNPILKAFFDRLVAAGKPKMVAIIAVARKLLTMLNAIIRDNRPWQIA

SEQ ID NO: 59844 - protein, 421 aa, unidentified
MPDQSTLPRSIQHVARKIFPQSLRRPRFAQALSDRNRVDADLNQVYGPRRVALSDLDTWVEKALTSQDAVVLEMTTNTWQVYDDLLPYVHSITVVHPPHVALITRAQVMTDRIAAAHLARLHAKGLLAGIWVPPQAVRDWRALVAQRSKMVRLAVQAKNRLHSTLHRLHIDLPAEGKPFSAAQRPWWENLPVAGIEKIRIASDLDTLDFSQRQIERLEEGLIDQAAQDERIPLLIQLPGVRLVAAVTILAAVGEITRFPQAKQLVGYAGLGARVHDSGQTTRTGRITKAGRRDLRFIMVEAAQRAAITHPHWKTELTRLEPRLGRNKAIVVIARKLLIAVWHVLMQQCADRFANTEKVARKMLEHAYSLGQKRRPKGQSAAEYARRQLDRLHLGQELTHISWGVKKPPVPLPPSSLSPDPS

SEQ ID NO: 59845 - protein, 360 aa, unidentified
MDSKKYIGMDVHKESISIAVMNGAGKIVMECVVETKASMILQFINGLRGDLQVTFEEGTSAAWLYDLLKPYVTKLVVCDPRKNASMREGNQSDKIDARRLAELLRLNHLNPVYHGEHGLRSLKELVRSYLTVTKDLARVMSRVKAIYRSWAIPCTGKQVYAPRHRAEWLGKIGEPGVRRRAEFYYQQLDALRTVRQEVRRELLAEGKKHKAWKRLCQIPSIGPIRSAVLLGILQTPHRFRAKRQLWTYSGLGIETQSSADHRSVNGQLKRAKKQISIRGLNRNCNHDLKNLFKGAAIVASSKPGPFQEFYTALLAKGIRPDMARLTLARKIATIVLIVWKRGACFDGACFDAQHLKPQTA

SEQ ID NO: 59846 - protein, 349 aa, unidentified
MDIVGGFDVHRKQITFDYIEMDSGEVHRGKIRPATRESLREWLDEFTERFSGKQIAIAVEATTGWRYVIEEMKRAGIEPHLAEPAETKSLQGRKKRAKTDRLDAGHLRDLMVIDRLPESWIPPHHIQEIRTLMRLRHSLIEERTTHKQRIHAQLFHNGYPQQSNLDSIESRAHLEDMDLPAAARKVVDLSLAMIEHINEELEPIEAELRAYARSQAGCKALLVHYGVGELTSVALLSELGDTRRFSSSRKAVRYAGMDVTVHSSDDKRAAGKLSRQGPPVLRWAAFEVAKRAWRKSSPDHNYYLQNKERIGANRAALSIARKLIRRAHHTLRELGEEAISEPVLATSSA

SEQ ID NO: 59847 - protein, 349 aa, unidentified
MNDVTTYGLDLAKQVFQAHWVDVASGEVHRKTLSRAQVSAFFARAPRGVIAMEACGSAHHWGRLLQTLGHEVKLIAAQFVQPFVKTNKTDAADAQAIWEAAQRPEMRFVAVKSEEQQAVLALHRLRAQWVKIRTQQANQIRGLLYEFGVVVPMGWRTLLKSVPEHLTATGSPVPTLLQEPLLEQLEALRAATARIVALEKQLASWQRSEPECQRIMAIPGVGPLTASAVVASVTDARQFRSARQFAAYLGLVPRQSGTGGRVKLLGISKRGDTYLRTLLIHGARSVLLSQSRRGRSIDPWLGALLQRRPSNVVVVALANKMARTIWALLAQGRTFDAGWVSRRPRPECN

SEQ ID NO: 59848 - protein, 358 aa, unidentified
MKIIGCDFHPSYQQIAMLDTETGELWEGRLEHEQGEARRFYQALQGQTVRVGMEAVGNSQWFEQMLAEMGHELWIGDAAQIRRLVVRQQKTDRRDAQHILDLLLGGRFPRLWVPSPQMRDVRQLLRHRQKFVEIRTQVKNQLQHLALNQGVRRKSRLWTIQGRAVLEQLPLEGWTARRRSDLLAMLDRLQEQVGELDRAVRAEAQQRPEVRLLLTHPGVGPVVGLAYVLTIGPITRFPRGKHVASYLGLIPKEHSSGGRQRLGSISKQGNTMMRTLLVEAAQTAARLDEELRRDYGRLKAKKHSALAKVMVARKLAVRMYWMLRENKSYTQLYAQRPVARMQGSSGHSVVASGDRSFE

SEQ ID NO: 59849 - protein, 402 aa, unidentified
MNAVGIDVSKGKSTVAAMRPFGEVVLSPYEVSHTNEDLHDLAAMIKSLPGETRVVMEYTGCYHAPVTKVLCKAGIYVSVVNPLLVKDYGNNSLRRAKTDKKDAVKLANYALDRWLSLPRYYPDEDARLMLKTAYRQYEQVVGIQTMQKNNLISLLDSVFPAANRLFSSPPREDGHIKWVDFLERFWHCECVCGLSQKRFTECYRTWCRKQGYHFSEDKAHDIYSEACSHVSVMPKCEGTEFIIKQAIAQLQSTSAAVAALRKQMQALASTLPEYSVVIGMYGVGPVLGPQLMAEIGDVRRFHSKGALVAFAGLDAPAFQSGQLNVRSRSISKRGSPSLRRTLFLVMSVILQNSPEGEPVYQFMSRKRAEGKPYKVYMMASAGKFLRRYYAIVKKHLNELEED

SEQ ID NO: 59850 - protein, 443 aa, unidentified
MAMRTRTTLEIACPNAAGIDIGSASHYVAVPADRDDEPVREFKSFTCELEKLATWLTACGIDTVAMESTGVYWIPVYELLESRGFTVHLVNARHVKNVSGRKSDVLDCQWLQQLMSYGLLSGAFRPTDEICALRAVSRQRDMLLRYQARHVQHIQKALSQMNVQLANVISDIMGETGQKIVRAIISGERDAVTLARMKHARIRASEEDIVKSLQGNWRDEHLFTLKQAMSLYDAYSTQLMVCDQQLEAMLAALQKHAGSLDKPQRRSRGKNAPRFDLRTYLIGLCGVDLTRINGIDTATALKVISETGTDLSRFRSARQFAAWLGLCPGTKISGGKVLSSASKRTTNRAAHALRLAAAALRTSQSALGAYYRRMCARLDRPKAITATAHKLARLIYAMLTKGGEFIDQGQDYYEERYRQRVMHHLARRAEKLGFKLTPVSEAA

SEQ ID NO: 59851 - protein, 313 aa, unidentified
MISMNPVVGIDCGKRNLDAALFPGTDRTRIENTPQGLAILVRWLAERNVGVAGLEASGGCERLARDALIEVGLTVRIFEPGRVRHFAGAKGRRAKTDAIDAALIAEFTAAFPESPPAVRDPAREQLAGLIRARRLVVTKKADLAKGLASAPEEAKPILEAVVAQLATAEEALETAIVKQVAADTRLAQLTTALVTAPGVGPVTAATLAAVLPELGHTTGAKIAALVGVAPFADDSGEHQGKRRIAGGRGDARRALYMAALCATRTKGVLGEFYRRLVERGKPPKVALTACMRKLVVRLNAMVAAKATWQEHPA

SEQ ID NO: 59852 - protein, 416 aa, unidentified
MFAVGVDVANGRSMVAVLDGMRNMVAKPFEVVHTAQGFAALVEKLRQLDGEVRIVMEHTGRYYESFAMTMHRAGFFVSAVNPLLIKNYQGGISVRKVKTDKADAQKIAQFALDKWTILPHYTPMDTIRYNLKTLHRQFQLASKTKTALSNNLIALLEQSYPGANRYFDSPVRTDGSQKWVDFVDTFWHVDCVAMSSEHAFVERYRKWCKRHGYVFSEQKAIQLHADARQKIPLVPKSDTCKLLVREAVSQLNAVSRTVETYRAEMDRLASQLPEYETVMGMTGVGKSMGPQLMAEIGDLRCFAHQKSLVGFAGTDPIKEESGDKVSQSAPSSKRGSPYLRKTLFVIMTILLQLQPQEDPVYQFLDKKRSEGKPYYVYMTAGGTKFLRVYYGKVRDCLKAKGLWEVPASASQEVNPG

SEQ ID NO: 59853 - protein, 401 aa, unidentified
MVSDFMKGRYNLMKIYVGIDIAKLNHFAAAISSDGEIIIEPFKFTNDADGFQLLVSKLESFDKNSIIIGLESTAHYGDNLVRYLVTELYQVCVLNPIKTCQMRKNNVRKTKTDKVDTFVIAKTLMMQDDLRFITFFDLDMMDLKALGRFRQKTIKQRTRLKIQLTTYVDQVFPEIQYFFKSGLHQNAVYALLKEAPSPKEIASMHMTHLANLLKVNSHGHFTKEQAKELRILAQKSVGANDSAISIQITQTIQQIELLDSQLEKIEAEMTDIMKFNDSVIMTIPGIGYINGGMILGEIGDIHRFSNPNKLLAFAGLDPSVYQSGNFQAKTTRMSKRGSRVLRYALVNAAWNVVRNNATFKAYYDAKRAEGRSHYNALGHCAGKLVRVIWKMLTDEVEFNLE

SEQ ID NO: 59854 - protein, 338 aa, unidentified
MVYGAIDLHMRSSQIRIIDDAGAVVRDHGVPTTRERLTDAFANQGPMRILLETGTESEWVAQALEAAGHEVVVADPNYAPMYGELTRRIKTDRRDVAALAEANRRGWYRRAHRSSPAQRETKQILRSRRFLVQARSGAVSLLRSLLRQSGYRLGTGSCDTVPTRVARLSLPAELAETLAPLCRQIATFTTEIHAIDARLQTRTASDAIVARLRSVPGIGLIVATTFRAFVDRSERFGHAGQVSAAIGLVPREDSSAERRHRGHITKAGPRELRSLLIQAAWVCWRHGGSGTLRAWVDRLAERRGRRIAVVALARRLSRILFALWRDDTTFDLAKLATT

SEQ ID NO: 59855 - protein, 417 aa, unidentified
MNQYAAYLGIDWADKKPDLCLVEGATGKQTKQVLAHTPQAIAEYFTNLRRRYPEQLLAVGLEQSRGPLLFALLQYDFLVLYPLNPTTLAKYREAFTPSRAQDDPSDAEYAAELLMKHNDRLKAWQPDDPETRTLRYLVEHRRRLVGDRTRISNRLTSLLKCYFPQVLSWFPDLATVLVCDFLWRWPALEELHGVKRSTLLNFFRVHHSVRADTLEKRLAAIKASVPLTTDRAIIDSSGLMIKALAAQLKTTSAALKQLDEAIAKLCAVHPDFPLFQSLPGAGEVYASRLLAMLGTQRDRCSSAAALACLSGIAPVMERSGQSVWIRWRYFCPKFMRQSFHESAGESGKHSFWAKPYYEQQIAKGKSRQAALRALAYKWIRIIWKCWQTRTPYNEVRYLEALRKKGSSLLSYAAKNAA

SEQ ID NO: 59856 - protein, 395 aa, unidentified
MHDGYGVYLGLDVGKGDHHAVGLAPDGKRLHDAPLPNTEARLRQLFDKLARHGTVLVVVDQPASIGALPVAVARACGHQVAYLPGLAMRRIADLHPGTAKTDARDAYVIADAARTLRRVDVGDEALAELEVLVGFDDDLAGEATRISNRIRGLLTQIHPALERVLGPKVHHKAVLELLSRCGGPAGLRKAGRRKLLSIAAVHAPRMGERLVDQIMTALDEQTVTVPGTSAAETILPRLADSLRDTLRQRDQVAGEVERMLDAHPLAPVLTSMPGIGVRTAARILLEVGDGTAFPTPGHLAAYAGLAPVTRRSGSSIRGEHPPRGGNKNLKRAFFLAAFAALADPVSRTYYDRKRAEGKRHNAALICLARRRCDVLYAMLRDKIPYQPRPATPIAA

SEQ ID NO: 59857 - protein, 418 aa, unidentified
MAEVMIGIDPHKSSHTAVAIGSGEEPLSELQVAACPSQAGTLLAWAAAWPERTWAVEGAAGLGHLLAQQLVAAGEQVVDVPPKLAARVRLLQAGNTNKNDPNDAFSVAVAALRSAAKRPVLAEDHAAVLKVWAKRHRDLARLRNQAVCRLHAVLCDLVPGGVPKEITAGQAARILEQVTPAGAVARARCELAAEFLTDIRRLDAQRREAGTKLAAAVKASGTSLTGIFGVGPVIAGTVIGDVRQVFRFGSRGHFAACNGTAPAEVSSGGRKVFRLSLRGNRRVNHAIHMAAVTQIRHKHSQGRAYYERKLAEGKTHKEALRALKRRISDAIYAALVADARHAAAICSKGPGGQPGNHSVSRAASSHPARQLFGQATPGPVTTLRPSATAGPLLTQPSRAPRRRSGHPPAASKKPQTTT

SEQ ID NO: 59858 - protein, 458 aa, unidentified
MTLGIDLACRAAHVASLAGPDGALIWRGRVLFTRPADLDKLWRDIDCPPGELTVVMEPTRNVWIIVAAWFRRRGARVVLVPTTQSADLRAYYAKHTKNDRLDSAILARLPLLHPEGLREYAGDGPADPLRRIVKQRSSLAKRRAAIFHRLDAQLELLGPAWYDALGTDYGHATLQFLARYADPNLVIRLGQARLGRFLRRYSHGHWREGKAAELIAAAHQSLQLWDGDGMDFAELAADIAVEAEQAQVLTAQMADLDARIANLYAEADPDGIIRSAPGVGPVIAGVIAGRLGDPHRFTSLAAVRSYAGLVPKVNQSGTSDKPGGLTKAGDPLLREAAWMAAEQARRFDPQLAAKYKRLMAADRHHDSAVCHIATMLLTRIATCWRRGEPYQIRDLDGAPLTMAEGKKIVTEQQQVAKKKSKARQYRATNHKADRELQESQSAPTSRPAKHQPKPPQAA

SEQ ID NO: 59859 - protein, 523 aa, unidentified
MPVTRSRKRSSNRRPEVLQKPRGVIHPRVQKVGPEHFGIVSVDCAKARSKWMLCDFYGNVLVPPTVVEHNRPALTAATTQLRQAMARHDLRDVIVAIERTGRYHHATQHAFAAAGFEVRIVHPFATKQFRQASDPGTKTDDTDLVAIHRAACSGFALIELPRDDHWKELQLLIRYRRDLVFKTSALCAQIREHLEAALPGYATCFYNLWIRACAFPLVRAFGSAEALLQAGLRGLSEVLRQQHVRFQERTLQRVLAWAEQAAPSDQAAALHLRVALRLEDDRQQKSLEILGLERDIASRLVRTPYVLLLSFPGINVVSAADFAGEMGPIGNYANSRCITGRAGLRPARYQSDQVDRPNGPLVRCANRKLRAAILGIADNLVCCNRHFNVLALRWRAEGKDPRHTRVKIAQRFCRIAYQMVAGGQVFRHPCLQHRSYILDKLNAFHREHDTAMPQALTDLQAAIEQLPRSAYAEEARPLAAELQRIEQGRRRGPQLLGDILPIVLARLGVGALQSRESGEHDLT

SEQ ID NO: 59860 - protein, 378 aa, unidentified
MSQIHTVGLDLAKQVFQVHAITVDGGVVLKRQLRRSQVLTFFSKLSPCLVGMEACGGAHFWAREIASFGHQVRLMPPAYVKPYVKRGKTDAGDAEAIGEAVSRPTMRFVPVKTSEQQAAAMLLKTRDLLVRQRNQAINALRAHLSELGIIAGTGVSRVAGLIAVVRDESDPRLPEAARRALAELSDQIEALNERLHRLEREIVVQARQDPDLRRLTTVPGIGPISAASLKALVPDPNGFVSGRHFAAWLGLTPQSHSSGGKERLADLEDGQSDVANPADPWGHHRPAPCAQRGQSLTLGDVDSGTQASQGRRRRAGQQDGAHRPGASREGRRLPQTRSLWGKRCERVIRADRSELTGEPPPAGQACKHTQGNPRSAPS

SEQ ID NO: 59861 - protein, 385 aa, unidentified
MKEQNFVPREFEIFGGLDVDKKSIAVTFMSHQGILQSFSMPYRAEHLLSYVGKHFEGKKIAFAYEAGPTGWGLYDRLTREGHICVVAAPSMIPKVPGQRVKTNRLDSQKLSEHLRGGQLKSVHVPSESYRQLRQLVQLRDTFVQDLVAMKLRIKALLLFEGLEFPPAPAGSQWSLIVRGKLKRLSCCSAVRFKLDQLMESLESTEKRILQTIQEIRRFYQQDPELCQAMKYLKSIPGIGEIVASHLLARIGDPQQIGNVRQLAGFIGLAPTEHSTGDRVARGHITRSGDGRVRSKLIQAAWSAIRQDPELREFYRSVYQRHPRDRAARKAIVAVARKLTTRIYAVLKQQRPYVVREIVHSAPLTQEETSPQGTTRRPAEPGETLS

SEQ ID NO: 59862 - protein, 387 aa, unidentified
MSVIIGMDPHKSSATIEVVDEHGKIQAVGRYGTDKAGYGEMLKAGRKFDERIWAIEGCNGIGKHIAHRLVHDGESVVDVPPKLSAQVRVFATGNGRKTDPVDAHSIAMVALRSPNLVRVEVDPDLVVLGMLVDRRDALGRGRTQTINRLHRLLLELFPGGAKRYLSSRQARALIATIRPRDIVGKTRRRLVVELIDEFEGFDKKIKAVKKELKELVIARGSTLQDLHGIGPSGAARLLADVGNIHRFVNRDRFASWNGTAPLDASSGEQNRHRLSRAGNRRINRALHIMAVVQLRNPTKGRAYFDVKVAAGKTSMEAMRALKRRLSNVVYAQMLADQKRSETTGPGGHLGTTLQSGVTDLTPDIGSWDKPLPGPATSQPRTAVPAAS

SEQ ID NO: 59863 - protein, 354 aa, unidentified
MPEYECQISKEGASKCKYLPLVSIWQKNVFVLHGVDHTGQTVLKKKLSRAKFAEFVIRLDPCLIGMEACSSSHHFARMFIRHGHQVRLMPPQYVKPYVKTNKTDATDAEAICEAVTRPNMRFVQVKTVDQQAVLALHTERDIIIRERVACTNSLRAMLAEFGFVMATGRKALNQGVPEILEDGENELSPFVRASASRQMAHIDALDDHLVLIEQQLQSWAETQAACKRMTKVPGVGLLTATYLVASVGDGKQFSCAKQFSAWMGLTPREHSSGGKQRLGRISKRGDGYFRYLLVHGARAVASVIERHREDMRWLDGLLKRKNYNVAVVAQASKTARILWSMLVHETEYRPPAVA

SEQ ID NO: 59864 - protein, 342 aa, unidentified
MAAVMIGVDPHKGSHTAVAISADERPLGRRRVRACPLQVEQLAAWAQAWPERTWAVEGAAGLGHLLAQQLVAAGERVVDVPPKLAARVRLLQAGDTSKNDPNDALSVAVAALRSKAPRPVLAEDHAVVLKVWSKRHRDLSRARNQAACRLHAVLCDLVPGGIPREITAAQAARILGQIMPWSAAAEARCELAAEFLADIRHLDAQRAGIKKKLAAAVTAAGTSLTRRVFGVGPVIAATVIGDVRQVSRFPSRDHFAAYNGTAPVEVSSGNRKIYRLSLKGNRRLNHAIHMAAITQIRHKHSDGRAYYERKIAEGKTRKEALRCLMGTWQSTATCCPGRRVFV

SEQ ID NO: 59865 - protein, 296 aa, unidentified
MMIIGCDYHPGFQQIAWLDTETGELRERRLAHREEAERFYRDLGAHRVSVRVGMEASGQARWFERLISELRFELWIGDAAEIRTKRVRKQKTDRQDAQLILRLLLEDRFPRIWVPSGENRDLRQLLWHRHRMVQARTRIMNQLQAVALNEGLRCKKRLWREAGREQLESFRLAPWASRRRRDLLELLDRLTPTIAELTQAVEREAENCPEAQRLRTHPGVGALTALAFVLIIGRAERFQCGKQIASYLGLVPLEDSSGQRRRLGHITKQGISLLRFLLVEAAQVTVRSDPESSIEQ

SEQ ID NO: 59866 - protein, 388 aa, unidentified
MIDTSGIDAFLSLDVGKGEHHATVVTPAGKEAFDKRLSNSEPKLRDVFGKLQASHGTAMVVIVDQPASRGAMPIAVARDMDCEVADLPGLTTWQTADLSPSEAKTDARAAFVMAGAARTMPQMFRSIEIEDETIAELEMTVGFDDDLAGEATRISNRLRGLLSQIHPRRGPVLGPRTQHPAVLKLLDQFGSPAQTRKAGRRRLVSVIRPKALRMAERLVDDIFIALNEQTVGVPGTDAAALIVPSLANSLTAVLDQCKILAHRIEELLEAYLSQVLASMPSVGVRIGARILIDVGDGSRSPSAAYAGLAPATCSSGSSIRSEQPSRRGNKQLKTGLPPSPPSQLRSPQAQGLLRQEDRPGKASHPSPLCLARRRADMLFARLTKPQGP

SEQ ID NO: 59867 - protein, 396 aa, unidentified
MQTQLHVAIDVGSQQHRVAIGLEEGEPIEEFDCAHTSVGMSDFFNRIRKHEELHHAEVCVAMEGFGGYARPLDSQILAQGWRLYSINNLKFARFKEIFPAPAKTDAIDAKRMLQLLQLRDRIPMARAVLQEVAPVDSLHQQLKALTRRRKQLVSERMKISQRMQAELQGVVPGLLAITGQADNLWFLNFLTCRTDLRKLKTVRKATLLKLDGVGVGYAARICAWQKTSVFASSIEWAGSMIHADAMRILGLREAIAQLETQIAKLTAQSGIAQRLLTMPGMGSVCASELAGEIGNIERFKNEASLAVYLGVAPLDRSSGKRVGAKLPRQINPRARDALIIAMVHHMHAVPTSRAFYDRKRVEGKTHMQALRALARHMVRILFRMLTDNRDYRLPNI

SEQ ID NO: 59868 - protein, 351 aa, unidentified
MYTLGIDLHKKSSVWLLIDEQRTELWKEHVSCHPDYITTALKKIPVPHSEIQVAIEPVAGWRWVTSMLTQSGMQVHIAHPRKMQLIAQSTKKTDTEDARVLANLLLAGYFPEAHKSSDIIYQLRLLLRERNFIIQKRTSVKNQLHGIATTQGLHEIKSGNPLFKKGKEDILAGTNFVLKQLHYLIEDLDKRVAPFDEQLLIEYTKHPVAKLLMTFPGVGIITALTIISEVDDFSRFSAGKKLASFAGLVPRQRSSGELVRYGSITHAGSAPLRTVLVETAMRIRAGNAPELYSFVAKLTPITGAKKARVALARKILVIMWKMVITNTPYQPKNPPSVCTTNLSDLDTASGS

SEQ ID NO: 59869 - protein, 438 aa, unidentified
MLPTLNRHAGGIDAGSTQFFVAVPDGTVTAFESHTADLYRLRDHLQQHGVTTVAMEATGVYWLCLCEILEAAGIEVCLVNGAHVKNLPGRKSDVQDCQWLQELHAHGLLRKSFVPPEKIRALRSYTRLRDDHIRTAAMQVQLMHKALDQLNVKLHTVISQIHGVSGLAVIRAILQGERQPAKLADLCAAQILERKRAQVERSLHGRWKKEHLFALRQALAGWEFCEAQVKQCDHAIAEQLAELTRDLTLPDIKPPTDKQGRHHVPDVPKLHAHLLALSGGKDAASLPGFTDTSWLKLIAEVGTDLSRWPNEKAFCSWLALSPGKNQSGKNARRARARPKTTAGQIFRLAAQSVGKSSYLALGGFYRRLKARTNAAVATVATARKLAVLFYHAMRHGLAYVERGLEAYEQAYRQRQRRYLQKCAAELGLSLVPIHDQTS

SEQ ID NO: 59870 - protein, 372 aa, unidentified
MGKSIRYLGLDVHADTIAVAICEGRGEGRSLGTIPNRPEAIRKLVKRLEPVSTLRVCYEAGPTGYALYWQLTELGVKCEVVAPTLVPVKAGDRVKTDRRDAEKLARSYRSGDLTPVWVPDAAHEALRDVVRAREAAKKDQLRAKHRLSKFLLRHGRRPPVGTNAWTGKYWNWLSTVRFEYAAQEATLLDYRTEVERAADRIERIEKAIDEAVQGAPAQMKAVIEALQALRGVAKITATTLVTEVGNFSRFVRPNQLMGYGGLVPSENSTGNSKRQGAITKTGNAHLRRVLVEAAWSYRHRPKLCGANKQRQQGVSEEIKGISWKAQQRLYTRYWRLTARGKIPGKAITAVARELLGFIWAVGVQAEREAVAA

SEQ ID NO: 59871 - protein, 345 aa, unidentified
MNKLVSNPQAIVFCGIDVSARSLSVALIGADGSLVQREFANSASGHKGLLAWLARCDAKVRVSLEATGIYSLDLALTLDGEASIELAVLNPKLVNRFAQTLRRSKTDSADAAVLAEYGQRMPFAPWQRPVASHLRLRTVGRYIESLVVDQAGLKNRLRTAEGTSTTPRAVLVDLRQALAALERRVAKMRREALELVRAEAVLWERFRLLTSVPGIAQISALQILSELVLLAPTMTVRQWVASSGLDPAHQQSGTSLHKPSRISRAGNRHLRRALYMPALSAARNDPHLRAFYQALRSRHKTGLQALMAVARKLLHAIYGIFKSGRPYDGKLLFPNIQTEVESVAG

SEQ ID NO: 59872 - protein, 355 aa, unidentified
MATIVSSEPRRVVGGVDTHKDVHVAAVIDAVGRSLASESFPTTRHGYRCLLSWLRSHGELVAVGVEGTGSWGAGLARYLTTRGVAVVEVNRPNRQNRRLRGKSDAVDAEAAARAVLNGQATVTPKSGTGPVEAVRQLRIARSGAMKARTAAANQLHSLCDTASDPVRAQLGSLSLTKKVAIAERWRPGSATTVETAAKRALTTVARRWRALDEEARELDRHIKAILDEIATALLAVHGVGYETAGQLLVTAGDNPGRLGHEKSFAALCGSSPVQASSGRTNRHRLNRGGDRRANSALWTIVLTRMVNHAPTKAYVERRTTEGLSKTEIMRCLKRYVARELYPLLQAITIATTLEQ

SEQ ID NO: 59873 - protein, 334 aa, unidentified
MEKITTLGIDLAKSVFSLHGVDEAGRVVLRRTVRRDQLLGVVASLSPCLIGMEACSGAHEWGRRFQELGHTVRLMAPKFVAPYRKSGKNDGNDAEAICEAVMRPNMRFVPVKSAEQQALLAMHRVRQGFVVERTATINRLRGLLCEFGVVLPLRSVTVRRQAAQAAENLPDLARRAIGDLLDELRSLDERIGGYDREIEAQAKLCEPAQRLMKIRGIGPTTALAIVATVGNAREFKNGRQFAAWIGLTPSQYSTGGKPRLGHISKRGDAYLRNLLVQGARSVLNSAARHQDRMSSWILELQPRRGYYRTLVAIANKNARIAWALLAKGETLRSA

SEQ ID NO: 59874 - protein, 337 aa, unidentified
MEYFAGLDVSMEETRVCILDRDDTIVHEVKVPSTPSHIEAALAGAPACRRVVFETGRMAPTLHHGLTERGVPVVCIESRQASQALKSLATHKTDRNDACGLAHLARTGFFKPVHVKSLPAHAIRSLIIARKKLVGQRIMLENQIRGLAVVFGVRLPRVLSPAFIAQALQASEGIAGLSAAMRGLATARVAVLSAVASIDADIKKLARASNACRRLMTIPGVGHLTALAFTAAVDDPERFRRSRDLGAYLGLVPRRYQSGEVDYTGGISKCGDRRMRTLLYEAANVMLTRYKGPLKLKDWALAIARRSTLRKARIALARRLAIIMHAMLRHGTEFKPA

SEQ ID NO: 59875 - protein, 355 aa, unidentified
MTASYDYHIGVDYHKSYSHLVVQDSSGKTLRSGRVKNERQSLGGFLERYRENSHAVVEATRNWMVMYDWLDEICDDVVLAHPLKVKAIADAKIKTDKIDATVLAHLLRADLVPEAWAPSDEARELRVALRERMFYVRLRTMTKNRIVTVFDRYPEQTAQLKKLGDLFGKAGRVQLAQVNVSEIDRIQIDRGLAFIGDIDVRVKQSEATIRAMTKANTNVKLLKTIPGIGEFFARLIDAEIDEIKRFRNAKKLAAYAGLVPSTYSSGGKTFHGKIIKQGNKWLRWAFVEAVAPALASDPQLRAQYEHLKSRGVNKARVAIARKLLTIAFQILRDQRPYERRGGRSEDCASTISRLS

SEQ ID NO: 59876 - protein, 408 aa, unidentified
MKRYYVGVDWADEFHQVWVSDAEGKKVVEMTIEQNMKGMSELGRWLHERKAEGVELWASIEKPHGRIVDFLLDHGVVVYPVNPKALDRARDRFRMSQSKSDCFDAYVLAEFLRTDHVHLRALQPDSEQAQELKMLTRDHHRLGRHKTRLLNQIEVTLKEYYPRPLEVFSDLESKIALDFLEQYPTPRALSELTRRKWNRFAKREHHLGEERCKELWEKLSQPQLKIPEHVVRAKAQLLLVLVTQLKSLAEAVKNYSEEVERFFASMPAANLVKTLPGGKSGTTAPMLWAELGDAKNRWASFRHLQAEAGGVPVTKASGKSRVVQFRFACNKLLRYASYWFSFNSLNRCEWANKYYRDQRAKGHSHPQALRALGAKWLKIIFVMWRDHKPYDENYHLANIARQKMRQAA

SEQ ID NO: 59877 - protein, 368 aa, unidentified
MKKNNTCPKSSKGNKARKRSITIGMDLGDKSSHYYVTDSEGQMVREGTVATTKKGMKQRFGSLAKCRMAIEVGTHSPWVSRVLSSFGHEVIVANARQVKLISSSSRKDDRLDAQTLARLARVDPQLLRPIRHRSEKAQGDLMQVRVRAALVDTRTGLVNTARGLAKATGERLPSCDADQMGVGKMQGLPAELMEALRPLLETVESLTKQIKECDQKLEQLAGRDYPETELLRQVSGVGSLISLTFVLTVEDPNRFRRSRDVGCYVGLRPRRSESGQSRPQLGISKEGDVYLRKLLVQGAHCILSHKSPDTDLKRWGLKLAGKGNKNAKKRALVAVARKLAILLHHLWVNGEVYDPLRNSRPLEQKAVA

SEQ ID NO: 59878 - protein, 341 aa, unidentified
MKSTTIAVDVAKEVLEVAVSVRPGQVSVQKRLSRAAFVKFCTDQPPATVLLEACGSAHYWGRRLQSIGHRIVLLPPHATRPYVFRNKTDRTDTRGLLEAFRNEDIHPVPVKSVSQQALTALHRLRSTWLATRTARINTVRGLLREFGCTIPVGAHHVLAKTWNLLADPESGLPDALRPGLAAACTEIRDLEGRIRVVEEQLQALADQTPAVARLRSIPGVGLITATALVACVGDVQRFPSGRHFASYLGLTPRERSSGLVRRLGSISKRGDVYLRMLLIHGARAVIWAAKKRPTPDRLRVWALHLEKLRGHNKAAVALANKLARIVWALWKHDVDFREVAA

SEQ ID NO: 59879 - protein, 398 aa, unidentified
MPLFCGIDRATDHHDIAVVDDDAAGFSQLLTLLAEAGDIREDSIPVAIETDRGLWVAALRETGRVIYPINPLSASRYRARYAVSGSKSDATDAVLLANIIRTDPDAHRLLPADTQLAQAIRVLARAQQDAVWARQQIGNQIRDLLKDFYPAALAAFAELPSGGLARADARTILAAAPTPAQAAKLTPARLRRLLVKAGRRRDLDRDVERLRALFTDTYLHQPPMVENAMGIQLATLLRQFEAACAAADELAEAAIAHFEQHPDAAIVISFPGLGNLTGARVLAEIGDDRARFADARGLKAFAGSAPITRASGKKTVVTHRYIKNRRLTVVGSIWAVASLRGSPGARRHFDARRAARDWNRQAQRHLFNKFLGQLHHCLQTGQPYNEHRAFPPPFTLAA

SEQ ID NO: 59880 - protein, 331 aa, unidentified
MKNKQIVGIDVSKSTLDAFIFKTNHLFQVSNCPFGFVRLLEDSIQLLGCSRDSLLFCFENTGCYSRALSVFLQDAGISFYAFDALDLKRSMGLSRGKSDKKDAKVIARYAWQRRDELVCSKLPGPVMDQLSALLSHREMLIKQRTALKNANKGHHNIYSDHEFKFLKDSQMRMIKQLSEEIKITESEIISIIKLNEELKRSYDLLLSIKGVGKILAFYLITLTHNFTKFTDPRKFACYAGIAPFEYSSGTSVRGRTKVHPCANKQIKSLLNMAAMASIQLPGEYQMYYQRRTEDGKNKMSTLNIIRNKLIFRAFAVVKRGSPYVDLHKFAA

SEQ ID NO: 59881 - protein, 337 aa, unidentified
MKLKPNTTNSPSFFLGIDVGKKDLFCHIIGPDQPCSEHFDNSPAGIRLLLKWLKKVCVPAQLSACLEQTGHYGDDIADALYKLQISSLHLVNPHRIKAYGMQKLRRNKSDTADAKLIARFLKAEHSELRPWHPRSPGQQRITSLSRYADTLTQDNATLKTRLHAVSEKSIVTAIKQRIAFQEKQLKAVRKSIADIIKADPEISAKNKLLVSIPGIGVVAAQTVIAELPDLAEFADARQVSAWAGLTPSHHQSGTSGRTQTPITKIGSAHLRRALFMPAMTARENNPLLKTFGDRLKENGKKPKPIIIAIMRKLLHQIYGILKSGLPYNPEKRGCASA

SEQ ID NO: 59882 - protein, 336 aa, unidentified
MVDTETGELWEGRLEHEQGEARRFYQALQGQTVRVGIEAVGNSQWFEQLLAEMGHELWIGDAAQMRRLVVRQQKTDRRDAQHILDLLVDGRFPRLWVPSQQMRDVRQLLRHRQKLVEIRTQVKNQLQHLALNQGVRRKSRLWSVQGRAVLEQLPLPPWTARRRGDLLAMLDRLQEQVGELDRAVRAEAEQRPEVRLLMTHPGVGPVVGLAYVLTIGPITRFPRGKQVASYLGLIPSEHSSGGHQSFGPISKQGNTMMRTLLVEAAQTAARFDEQLRRQYGRLKARKHSALAKVMVARKLAVRMYWMLRENKPYAQLYAQRPVARMQGSPSHSVVAS

SEQ ID NO: 59883 - protein, 360 aa, unidentified
MFIESVDRIIPQEFDVFVGLDVDARSYSVTTLNWAGNVHQFTMSAQAKGLVSWRQQNLPQARVAWVYEAGPTGYGVYDALSQAGDVCLVTPPALLPRVPGRRVKTNRLDSLELAIRLRGGELTGLRVPAPQIRSLRHLTHQWLSLAKRVRGVKCQIKALLLMEGLPFPEECRGWSRAVGTTLAALACDAEVQFVLQQRWRQLTALHEEQLRLGRRIRAYCRADPDLAESITYLMSLPGIGWVTGAHILARVGEWRRLKRPQELAKFAGLNPWEHSTGLRIVRGGISRSGDRHLRNLLIEAAWRAIQVDPELRAFYERLRRRNPREQGARKAIVAVARKLTERIGRVLMDRRCYRPVSAAC

SEQ ID NO: 59884 - protein, 445 aa, unidentified
MHYKRLLTFIDGVSSYLSVGLDVGADFTWMSIALPNGSFVGKPFKIIHSDSRSRDLAVTKIKEAQETYSLKSRCFLESTGIYHIPLLCFLRDKGFDCSVINPIITKNSTNINIRKLHNDKFDSKKAALVGLNVSLKTSILPDDSVVDLRNLVRDYYYFKDLQSAVALKLTAELKVSFPAYAKVFSKVTTQSSLKLLSSYPLPADMLAASKEDIVDIIRSTARFGEAYALRKYDAIIAAAQDAAVFSRALPSNAVRIRLYIDTYQEYQKHLDALLKALHETVEKLQDTLIYDQICLLQSLRGIGFLSAVVLIAEMGDFKLFSSPKKLYAYFGLDPAVKQSGKLNGDKVHMSKRGSSLARRVLHMAALNNVKVDKGSGTPVNPVIYDYYTRKCSGKKKPVAMGAVMHKICNIIFAMLRDNKPFEIITPEEHCRRFATEHPDKIRKAA

SEQ ID NO: 59885 - protein, 354 aa, unidentified
MTVYIGVDLHVRTQTVCWMDTADGEIHHHTLDHARDDLRAFYAQFPAPAVVGVESSGYSLWFHQLIEQAGHRLLVGHAYTIRQFARRRQKNNRRDAELLLDLLRRDEFPIVHRPAPPSQDTLALLRYRHRLVRIRTVVKNGLQAVALNHQLQLGFRLFTPRGQQRFAALPLGRAYALQRQQAQVLLATLQAQIAAVEEELQRRAEADPRVVRLRTHPGVGRLTALAVVHTLEPVTRFDRARRIAAYCGLDPQEYSSGDTMRFGHISKQGSRLLRYLLVEAACSAVRHEEDLQRFYRRLRARKKPHAVAAVAVARKLVLRLYRMLREGIDYEQFRSRGRDARRARECASPVTRPD

SEQ ID NO: 59886 - protein, 404 aa, unidentified
MRVVGMDIHRSFAQVAILEDGRIITELRVELVHERVVRFGRTLDPDDEVVIETTGNSAAVERLMRPYVKRVIVANPRLVRAIAYARVKTDKIDAAVLAKLHASGFLPEVWVADDDTLCRRRQTTERMGVLEQAVRTKGRIHAILHANLIPKYKGHLFGKAGREWLNGLPLPDEERAILGRLVNELGRISGQLAELDKVIAQQALDDPRARRLMTIPGIGPVVAATVLASIGDVLRFATPEKLSSYFGLTPKVRQSGDRPARHGRISKQGNAAARKMLVEAAWSAKTAPGPLRAFFVRVQKKRGAAAAAVATARKLAVMIWHVLTSGAEYAYARPAFTAMKLRKVALKAGAPREYGKAGPGHDYWIKEIRQREMDYVERAERAYERMVAAWTEQPGRASATTGSE

SEQ ID NO: 59887 - protein, 351 aa, unidentified
MKKTTTAIETIGCDLGDKKTEIFVLQADGGCTRQTVRTSKADLERWFSRPRAHVVIEVGAHSRWVCDLLKSLGHQVTVANPRKLKLISAADTKSDRRDSELLARLGRADVSLLAPITHRPMQAQADLAVAKARDILVAARTKLVNHVRGTIKSFGLRLPACSATCFVRKTRQLVPVSLRPALDPIYESLERIDLQIREHDRTIDRIAKRHADVEVISQPDSVGTLTALVFMLTIEDKDRFAKSRMVGAFIGLRPRKSQSGDDDPQLRITKSGDPLLRKLLVNCANRILGPFGKDCDLRRWGLEIAKRGGKNAKKRAKVAVARKLAVLMHRLWVTGEVYQPLGYCDSQRAAA

SEQ ID NO: 59888 - protein, 410 aa, unidentified
MKDSGKRYIGLDVHKHYLIALGVDEDLNIVLPARRVEFSYLETWMKKTLTQQDEVVVEMTTNTWQLYDELVVHAGSVMVVHPPHVALITRSQVMNDKIAASILARLLAKRLLVGIWVPPQEIRELRGLVAQRKKMTNMATQAKNRLHAVLQRHHLLLPEGNPFGASNTEWWQSLPIGKLEKLNLQSDLETLQFAEQQVNRMTEIMEGMTAEQEPIGRLLHLAGFGVVTAVTVWAAIGDIHRFAEPRYLVGYAGLGTRVHNSGMSTRSGQITKAGRRDLRTVLIEAANVVANSHPHWKAEFARLEPRLGHNKAIVAIARKLLVAVWYILSQNKTDRFAQPQAIAQKLLGFAYRVGKENRPAGQSAAQFVRERLDTLHLGVELTHISWGSKRPIPLPPSSLKTEKSDVPNTK

SEQ ID NO: 59889 - protein, 346 aa, unidentified
MEYYVGLDVSLKLTAICIVDRTGKIAREGVVSSDPETIAAFINSHALHIERIGLETGPTVTWLWTELNKLGLPVICIDARHAKAALKMQINKTDRNDAVGIARIMQCGWYREVRVKDLNSHAIKALLVSRALLVKIKRDLENQIRGLLKNLGLVIGRAKMNVFSLRAVQLTEGRPELATAVEPLLKARETIEQQIDHLDSKVMRLARNNSQARLLMTAPGVGPVTALCYLAAIDDPTRFKKSSSVGAYIGLTTRRYASGETDWTGRISKCGDKMLRSYLYEAANVLLTRVAKWSALKAWGIRLAKRCGLRKAKVAVARKLAVILHRMWIDGTEFTWSSKEATNQPA

SEQ ID NO: 59890 - protein, 384 aa, unidentified
MQASHVSTPIKSNVSTIFVAIELSQRSWLVTMHCPDKDKISHHKLEGGDHAGLLTLIDRMRERAARTLGAVPAVVSCYEAGYDGFWLHRLLMAAGITNHVFDPASIAVDQRARRVKTDRIDGEKMLRTLMAYLRGEPRVVRIVRVPTPEQEDARRASRERGRLTKEQTAHTSRIKALLRLLGMAVGNPRRHDWLTWLVKQRDWQGQAVPPQIMAEIKREHARLMLVREQLDALAQAPADLTPAAAQMAQRSELLLRLKSLGPAFATTLTNEVFYKDFRNRREVASYFGLTPSPWQSGGIDRDQGISKAGNPRARCAAIEMAWLWLRHQPDSKLTQEYRRRTLNASKRIKRVAIVALARKLIVALWRYLTTGLVPEGAMLKTAEV

SEQ ID NO: 59891 - protein, 358 aa, unidentified
MNICGIDIHKSFLQIAVIDSRGNIVYQERCRYSLIDIILLIAKLAKMRCREIAMESTGCFWIPLFYEFAGRGFKTVLANPSSTKSFGSKTDMLDAVRIARRHRAGALIKSYVPRDRVKIIFRSISRLRRRLKEDRNRVLNRIRRLLTISGVWLDRFVKPNTSRWFSMLEMLASGKSLNEILGLNIGYEYHCMRDRLDCYEANILAQLLSLARRIDEICSFLSKMAESLVEKLYGEEYSLIQTVPGIGRTLAYMILAEIDDVRRFPSARHFKSYCGLSPSLRESGGKARLGRCRHGNPYLRYAFYQAAVVAIRVDDELKRFYDRLRARGKHHKVALIAVAGKLAIRTWHILCNNEKYIA

SEQ ID NO: 59892 - protein, 338 aa, unidentified
MGIVYVGVDLAKNVFAVHGVDEAGRPALVRPAVPRARLHELIASLPPCTVAMEACTGAHHWARLFAGHGHSVRLIAPKFVAPYRMSGARGKTDAADAAAICEAAQRPAMRFVPVKSQQQQSQLMVHRARQGFVQARTACINRIRGLLAEFGHVLPLKADTVRRHAAGLLEDLPGWANTVIGDLLSELHRLDERITVYDRHIEQIAREDERAAQLMRLNGVGATTATAVVAMIGNGHEFRCGRQFAAWLGLTPGQYSSGGKTRLGRITKAGDGYLRSLLILGARSVLALAKSRSDALSTWALALQQRRGYWKAVVAIAAKNARLAWAVLHRGEAFKMPT

SEQ ID NO: 59893 - protein, 408 aa, unidentified
MERYYLGVDWADEFHQVWVSDPEGNKVIEKKVVENVEGLTEFGRWLDENRAKGIELWAAIEKPHGRIVDFLLDHGVVVYPVNPKALDRARDRFRMSQSKSDSFDAYVLAEFVRTDHGHLRALEPNSDPAQELKLLTRDQYRLVRQKTRLLNQLSRTLKEYYVRPLEVFSDLETNIALDFLQQYPTPQALAKLTRRQWNRFSKREHHLGEDHCKELWEKLNQPQLEVPEHVVRAKARLLAVLVVQLKTLRDAVESYNKRVKSFFACMPAAELVRMLPGAKTGTIVATLWAELGDAKSRWESFRHLQAEAGVVPVTKASGKSRVVQFRFSCNKIMRHAAYWLAFVSLNRSEWANQYYRDQRAKGHSHHQALRALGAKWLKIIFVMWRDHKPYDENIHLANITRQKMRQAA

SEQ ID NO: 59894 - protein, 338 aa, unidentified
MKVQILGIDLAKNVFQLHGVDRKGRPVLVRRLRRDQLLRVLSELEPCLIGIEASTGAFYWQRQFEKLGHAVKIMAPQYVKPFVRRQKNDTNDAEAICTAVQQPNMRFVPKKTLQQQDIQALHRARQRLVNHRTALISQMRGLLLDRGIAIAVSATRARQLIPKILAAPSDELTGLMREIVSSLYAFMLQIDERIRVFDRKIDEIFKASEVCQRIAKIRGIGPKTATAMIAAIGDGSDFKNGRHLAAWLGLVPRQHSSGDRRVMMGISKRGSRHLRTLLVHGARAVVRTAVRKTDSRSMWVNELRQRRGYNRATVAVANKNARVIWAVLTSGEPYRAAA

SEQ ID NO: 59895 - protein, 346 aa, unidentified
MEHYVGLDVSLKLTSICIVNRTGKIEREGVVASDPEAIATFIKLHAPHVVRIGLETGATSTWLWTELNKMGLPVICIDARHAKAALKMQINKSDRNDAVGIARIMQCGWYKEVCVKDLDSHATKALLVSRALLVKIKRDIENQIRGLLKNLGLVIGRAKMNTFAVRAAQLAENRSELFSAVDPLLKAREAVEQQILDLDRKVLRLARNNAQVRRFMTTPGIGPVTALCFLATIDDPARFKRSRSVGAYAGLTTRRYASGEIDWTGRISKCGDKMLRSYLYEAANVLLTRVAKWSALKAWGVRLAKRSGLRKAKVAVARKLAVILHRMWIEGTEFKWSSKEVADQPA

SEQ ID NO: 59896 - protein, 428 aa, unidentified
MAHSINANLLRRWVAEAEADDSRQINVPARVAAADVIFRRKGAIGFSAYRSHSVFDGMDSSPSAECADCVTMGCRENTTDSGGESMDTVTTLGIDLAKSVFQLHGVNEHGRVSLQKQLRRGVLLKTVAQLPPCVIGMEACSTAHYWARQFERFGHTVRLMRPQYVKPYIKGQKNDQSDAEGICEAVSRPNMRFVPLKSLEQQDLQSAHRVRQGWMGERTALINRVRGLLGEYGVALARSPATVKRELPGMLEDTQNGVTAIARHLLRQLLDHLKDLEQRIADVESLIEELGSQHEVVERLRTIPGIGLLSATAMVAAAGNGKAFRNGRQLAAWLGLVPRQYSSGGKPRLLGISKRGDKYLRGLLVHGARSVMLYAERQARPNQLWLNALRERRGKYRACVAQANKTARIAWAVMTKGEIYRAALVTPV

SEQ ID NO: 59897 - protein, 339 aa, unidentified
MDTDKEKSAPSKLKTWFIFGDVTMSYFGVDLHTNSFTVCRRTQQGKNSIRTFQIGRIDEFRKTLRSRDFLAVEATGNTAWFVSQIRDRVKKVTVVDPYKFEVIRKSVKKTDKNDARTLAFYLSKDMLPEARMKTKENAQLNSLATTRDKLVKQRTALINKIHGVLNSHGIKFKKESLGTEKGLKSIWAFEWDVIVKIELEVLIEQVRSLNKNIKTVDKEMSEHGKKLKGHKNLSSIKGIADRSATVLLSVIGDVNDFADENKLAAYFGIVPRVSDSNETVRHGRITKHGSKLGRTTLVQCTLVAKRYSPYLRRYYQRIKSHRGSGKAIIATARKFLGII

SEQ ID NO: 59898 - protein, 350 aa, unidentified
MKNHITIGVDLGDRHHIAVVLDPNGNQLEATKLINTKVALKRFFQPYDGATVAIEAGTHSPWISRLLESLGCTVYVGNPRKLRVIWDCTDKSDLRDARMLAMIARLEPKLLWPIRHRDINAHNDLEVIKAREMLVQSRSKLINHVRSAIKGIGQRLPKCSAASFANKASGQIPSALQPALIPLLETIAQITDKIRALDKRINVLALERYPHTHWLQQVQGVGPVTALTFVLTIEDPARFAKSRMLGPYLGLTPRRDQSGQTEKQLPITKAGNALLRKLLVNCAHYIIGPFGADSDLRRHGLAIAARGGKNARKRAAVAVARKLAVLLHQLWVSEQNYVPLHSRINLGKAA

SEQ ID NO: 59899 - protein, 315 aa, unidentified
MKMSKPDTVGIDVSMLWLEVVVLPRGVRFSVTNDAAGWAELVQKLRPWSVAAVGLEPSGGYERGVIRALLAAGLSVRRINPNQLRQFARARGVLAKNDRLDARLIAEYVAIMPTRSVQSDPAAERLAELVTVRRQLCDEHVSVANQVSHLEDAMLRRLSKRRLARLEADIALLDNRLAEMVGSDAELARRYRRLVTMPGVGPTLAYTLLALLPELGQMSRKQLAALVGLAPYDFDSGKLKGLVRNVLYMAALSASRFNPPLKRFHQRLVAAGKKPKVVIVAVMRKMITTLNAMLRDRADWTARCDTGRHTVPATT

SEQ ID NO: 59900 - protein, 415 aa, unidentified
MFYVGIDWADETHRVFITNDSAQRLDSFSIENSRSGVEKLFERVSQIAKDQKQVLFALETSKGLLINSILDADYTVYPINPKSVDRYRDRYKVSGKKTDDFDAMVLANILRTDKHNYRPIIPDSPITQELKILTREYSQLVRLKTLLINQLTSSLKDYYPTALNLFCKLDQQVTLAFLKLAPTPQQAKQLSLHSLTKFLSENHYPSVNKKAKEIYQKFKEPLFEVKDFIADAKSQYVLTLVEQLQLLLSKIESFEQKIEQLLKKHSDNEIFISLPGAGILLAAKMVSEFGDNRQRYENVSSVQSESGSAPITKSSGGTKFVYFRKSCKKSFRDTMHQFAFCSIKQSQWAKQKYQHYIESGKKHHHALRCLANAWIEIIFPMWKNHTPYSEQRHLLRYVKEQNLQDYNKNFSYVAT

SEQ ID NO: 59901 - protein, 387 aa, unidentified
MRVAAHGAEAPSAICVDLGAIFVSLELSRSKWLITSLSPGGGEKMSKHMVAGGDVAGMLSCFAELKRKAQARTGRCLPIIVIQEAGLDGFWIHRVLQAEGIESHVVDPASIATSRRRRRAKTDKLDGEALLRALLAYKRGEPRVCAMLRAPTPEEEDRRRIVRERKALTNERIRHVNRVKGLLFGQGVSGYEPLRSDRRKRLEELKTGDGRSLSPNLKAQISRELDRIELLLTHIKDVEEARDTMLESAQAVAPAPKLLLNLKGIGSEFAAVLWSEGLSRHFDNRRQVAAYAGLAPTPWQSGIVDHEQGVSKSGNPRLRSMLIELSWLWVRHQPQSALTIWFKERVKQNGGRFKKSTIVALARKLLIAIWKYVNAGVVIEGAALKAA

SEQ ID NO: 59902 - protein, 346 aa, unidentified
MDQIIRIGMDTSKYFFQLHGVDGSERPVLRRKLRRNEVLAFFAKQPSTVIGMEACGAGHYWARELRKLGHEVKLIAPQHVKAYVKRNKNDGRDAEGLCEAMSRPTMQFVSVKTEEQQAALMLAGVRQQLITRRTQLSNAIRGYAAEFGLIAAKGLVKVEPLLAQIAQDESLPALAREMFTLQGRDYARLQVELKAVEARLMAWHRANADSWRLAKIPGIGPIGATTLVMKAPDPRLFSSGRHFAAWIGLTPKDHSTAGKTRIGKITRAGDEMLRSVLVAGATAVIQQAKKGRGRPSPWLVALLARKSPKLAAVALANKTARIAWKLLTTGESYDGARMPVASTLAA

SEQ ID NO: 59903 - protein, 383 aa, unidentified
MYNAVGIDVSKGKSTIAVLQPGGTVIRKPFDVSHTSQSLIELAHYLGSLEGSTKIVMECTGRYHEPMLKALYEAGLFVSVVNPHLIKTFGNNSLRRVKSDPADARRIARYTLDNWAELRQYSGMDNTRTQLKTLNSQFSFFMKQKVAAKANLIALLDNTYPGVNKLFDSPPREDGSEKWVDYAYSFWHVDCVRRIGLKTFTERYRAFCRKHHYIFQPDKPEKLFHASKELVAVFPKEKTYKLLIQQSIQQSNLASGHVERLRQEMNALASTLPEYNTVMGIYGVGKTYGPQLIAEIGDVSRFTHREALTAFAGVDPGVDESGQHKSKSNRASKVGSARLRKTLFQVMATLLQNAPENDPVYRFLDKKRAQGKPYYVYMTAGAN

SEQ ID NO: 59904 - protein, 358 aa, unidentified
MVDKVTEAAVVGGVDTHKDLHVAAVVDQNNKVLGTQYFSTTRQGYRQMLAWMTSFGTLKRIGVECTGTYGSGLLRYFQNAGLEVLEVTAPDRMERRKRGKSDTIDAECAAHAAFSGIRTVTPKTRDGMIESLRVLKTCRKTAISARRVALQIIHSNIISAPDELREQLRNMTRMQLIRTLGSWRPDASEYRNVTNVYRISLKSLARRYLELHDEIADLDVMIAAIVDELAPELIKRNAIGYESASQLLITAGDNPQRLRSESGFAALCGVIPVPVSSGKTNRYRLNRGGDRAANSALHIIAIGRLRTDAKTKEYVARRVAEGHTKMEAIRCLKRYISREVYTLLRNQNRRINSIPITA

SEQ ID NO: 59905 - protein, 428 aa, unidentified
MQDVLISVDPHKASNTLAVLDPVTKTPIDGGRFANTTTGYRELMVFAERWDDRRWAVEGCHGAGRSLAQRLVASGEVVFDVPAKLAARVRVFSTGHGRKTDRDDAISVGLAALDGEGVAPVVEDGATTSLRLLSDRREELVALRTQAACRLHRLLVELTPGGMGSELSAKKAASVLVRLRPEGEVPQVRLQLATEHLADIEAIDAKIKASGVQITALVKATGTSLVDLYGIGPVIAGRILAEVDDVTRFPTKDHFASYNGTAPIDASSGDQVRHRLSRAGNRRLNHALHMMAVTQLRQPETLGRVYYERKRLEGKTPKEALRCLKRRLSDIVYYQLVADSRGRIEGCGSPTTATPMPSTSTSPKRSSHPVRRPASKPSRPKESKRSSCSTGGTTVSSASKYSTPAPGSRKTSSTVRRSSTDRRSSFVS

SEQ ID NO: 59906 - protein, 356 aa, unidentified
MSRLAGAIDGMIGVDAHRDTLAAAATDTVGGLLSQTSVGADAAGYRRLLDFGQAQVPGRRCWAVEGAGSYGAGLAALLQANRERMVEVGRPKRPPRRTGAKSDALDALRAAREALAQDHPLAPRRRGDREALRVLLATRHSACVAKVSATNQLKALIVGAPEELRAELGTLGTKRQVHRCALLRDRPARSLEHRMTVRALRSTARRIQLLAVEAAELRAELERLVAAIAPWLLELPGVGPISAAQVLVSWSHAGRLRSEAAFAALAGANPIPASSGQVTRHRLNRSGDRQLNRALHTIVVARLRDDPTTRAYAARRRAEGKSVRDIRRCLKRAVARQLFKLLERCDRSTVELIRVA

SEQ ID NO: 59907 - protein, 372 aa, unidentified
MRNDTTVFVGLDVHKDFISVAYVPDDRQADVTFVGPIGTREGDIDKLIRRLQRNAKQLIFAYEAGPSGYGLYRYLRKKGYPCLVVAPSLIPKKAGDRVKTDRRDAVQLARLMRSGDLSSVYVPGVEEEAIRDLSRAREDVLRDLKAAKLRLKAFLLRQGIYYTGRATWTPAHLRWLAEVVCPTAAQQIVFQEYVRTVTERRELLQRLETELHEQVGTWKLQPVVQALQSLRGVQFTVAVTTAAEVGDLTRFDNPRQLTAYLGLAPSEYSSGDKRRMGGITKTGNGHARRALIEGAWSYRYPAKVSRQIQERQENLPRSIQDIAWKAQVRLCKRYRRLTSRGKNPNVAVTAVARELAAFMWAIAREVKRSASA

SEQ ID NO: 59908 - protein, 400 aa, unidentified
MISVGIDVSKGKSTVCVLKPYGEIVCRPFEMQHVEKDLEAFHNLLQKLDGEIRIVMEATGIYHLPILIFFHNKGYFVSVINPFAMKKYAKDNSIRGAKTDKLDSIMIANYGIEKWFKLQRYEGDEEIYAELKLLGRRYRYYMELHVKALQELTHILDYVMPGIKKLFSSWNEANGKDKLSDFVERFWHFDLITSMSLETFTDEYLVWAKEKKYHRSRSKAETVYELASSGIPTLPSSTPSTKMLVQEAISVLRTVDSSLSLIVTRMQVLAKSLPEYSTVREMGGVGDVLAVKLIAEIGDVRRLHSAKALIAWAGIDPPPYESGQFIGSKRRITKRGSSTLRKVGYEVMRVLKSHSAPKDDAVYNYILKKESEGKSKKHAKIAGLNKFLRIYYARVMEVYQ

SEQ ID NO: 59909 - protein, 440 aa, unidentified
MSTCLRTPAPEFAALVALDWGDRKHCWALRPVPEGAVESGELENTPEAIALWAAQLEQRFGGRPIAVALEQQQGAVVYMLSRHAHLVLFAVPSSMSAAYRKAFCPAGAKNDPGDTALLLDLLLCHRQRLRCYQPDTTDTRLLQMLVEERRQSVEQKTGVVQRLTDCLKQYFPQLLRWFGSPDRLLVADLLDQWPTLQQLQSTNPAPLARFFRQHHFGNEERIHQQIQDMYTAVAATTDAAVLEARTLRARALVRLLRTLWLTIAELEARIQQLVAQHPDAALFASLPGAGAATVPRLIAAFGTQRDRFDTAYQLQCFSGIAPVLKASGKTRTVQFRLACPKFLRQTFHEFAGQSVRYCAWAKAFYEYQRTRGVPHHTAIRALAYKWIRIIFRCWKDRQPYDEARYLASLRRRGALLGAVFARPPEIKWKSVAGFQKLSEI

SEQ ID NO: 59910 - protein, 331 aa, unidentified
MEVKETIGIDISKLDFDVRIHCNQMYAHFVNSNSGFGKMVKWVYKNSPFSKDNILFVFEHTGLYSYRLSVFLSENNIPFIMVPGLAIKRSLGITRGKDDKMDATKIALYGYRLKDEIIPDKIPSNKIMALKSLLSLRERLVKQRAGYKTSLREQKRVLIKKDNKVLLGAQEKMVIYFSKQINKVEKEMASIIKEDKELNEIYDLIVTVKGVGPQTALFLIVYTNAFTKFKNARKLASYCGIAPFPNSSGTSTRGRTKVSHLANKRIKSLLDLCAKSSIQFNPEMKRYYEKRVEKGKNKMSTINIVRNKILARIFAVVKRRTPYVNFMKYAA

SEQ ID NO: 59911 - protein, 357 aa, unidentified
MSRPQASEMEAVEHYVGIDVSLELSSACVVDGRGKIVKEAKVASEPEALVYFLKELGFPVNRIGFEAGPLSQWLHAGLTQAGFEAVLLETRHVKAALSAMPVKTDRKDAFGLAQLLRMGWFQQVHAKSIGSQEIRALLVARKQLLGRLLDVELSIRGILRGFGLKVGQVTRKTFEARIRELVTGHTTLERIAEAMLSARATLKAQYEKLHKAVLAIVREDAVCRRLITVPGVGPVVAVTFKSAVDDPSRIAKSKAVGALFGLTPRKYQSGEKDVTGGITRTGDEMVRTALYEAANVLLSRITRFSKLKRWGMDVAKRRGSKRAKVALARKIAVILHRMWIDGTTYRWAEAKPIAAQA

SEQ ID NO: 59912 - protein, 345 aa, unidentified
MPCRGGQPEVSRIETTPKAIRRFVAKLGGSEGLAVAYEAGPGGFALWRMLTDMGVACDVIAPSLIPIRAGDRVKTDRRDAKKLVTLFRAGVLRFVQPPTEETEGLRDLLRCRDDLRLARTAARHRVVKQLLRHGHIYREGKQTFTKMHVAWVRAQRLDDPLAQLALQRMLVHLEAIDSQLQTLDAELEEIARQDQWAAQVQKLVAFRGISTLTALGLIAEIGDFNRFSHPRELASWLGITPTEYSSGESQHRGHITKTGNRHARRLLVEAAWHYRHAPRRPVTGPEPSPRAWQAQIRLHHRYWHLTNAGKRSTVVTVAVARELIAFLWAELTDQPARAEQEVHAA

SEQ ID NO: 59913 - protein, 466 aa, unidentified
MKNKRKTKKMKQRAATFELINTNAAGIDIGAEFHYVAIPKGRDPEGKDVRNFGTFTADLYALAHWLKDCQIETVAMESTSVYWIPLFELLDSEGIDVNLVNPRFIKNVPGRKTDVLDCQWIQQLHTYGLLRGSFRPEEQMCILRGYLRQRTMLVSYASHHIQHMQKALEQMNIKLNQVVRDITGVTGMGIIRAIINGECNPKKLAKLRNPRCKNDVKTIARALHGNYRMEHLFALKQALELYDTYHEKIVDCDRKIEQHLSSFEDQSNGRPLGKARKSNRGKNKPSFDARSHLYRMTGIDLTVVDGLDTLSVLKIISEIGLDMSLWPTEKHFGSWLGLSPGSKVSGGKVMSSKTKKCANRAAHALRLAAYSLQRSKSATGAFFRRKKAQKGPAKAITATAYKLARIIYNMLKNGTEYKDIGQDYYEQRYQKRLVENLKRRAKQFGYELNYIKEQQPVMKHADNLVI

SEQ ID NO: 59914 - protein, 359 aa, unidentified
MAAMTWVGLDVHARSIEAAALDVLTGELTRRRFAGDGQALLRWLGSLPVPVSACYEAGPTGFGLYRAAQAAGIGCEVIAPSKTPRAAGDRVKTDRKDAELLLRLLMAGALTAVAVPPAAFEAARDLTRAREAARADLMRARHRLSKLLLRYGRLWEGASSWTVAHRRWLCAQRFEWEATQLAYLDGLALVDALAARRAALDEQLGRLAQDPHFWPTVARLRCFRGIDTLSALVLALEVHDFRRFARPAQLAAWLGLTPSLSQSGQSSTSGPIAKTGSGYARRILVEAAKHAGLRPRISAELRRRQSGQPEQVCAIAWRAQQRLYRQSARLRAHGKPANVSAVALARELACFLWAAAVAE

SEQ ID NO: 59915 - protein, 474 aa, unidentified
MGKRQRFNPPTAPNIEYRYRKPNRKFKDHRGTTVLPPQLSTVNLHAAGIDIGAESHFVAVPADRDEQSVREFGAFTDDLYQLADWLKECGIKTVAMESTGSYWLVLFEILEARGFEVHLVNTHRLKYVPGRKSDVLDCQWLQTLHTFGLLAGCFRPDDEICPLRSYLRQHATLVRCSAEHIQRMQKALTQMNLKLQHVLSDITGATGIRIIEAILAGQRDPVTLAQLRDPRCKHSCETIAKALKGNWREEHLFALKQEYDLYLKYQKSITECGQKIEAELARFQDKSDGQQLPKNCPRPNLPTFNIRQALYRMTGVDLTVVEGIDAYTALVVVGELGMNLQKHFPTENQFVSWLALCPGTNKTGGRQKSSRTRRSSNRVAAALRMAASSLHHCKSALGAYYRRKQGLIGKPQAVTAVAHKLARLIYKMMTKGLKYVQRGQDEYEEQYRQRKLYNLKRNAKQLGFALVPATDAPA

SEQ ID NO: 59916 - protein, 345 aa, unidentified
MIIGCDFHPSWQQVSWLDSETGETGERNLVHAAGEAKTFYGQLAGPVLIGMEATGNSQWFIELVQDLGHEVWIGDAAQIRASYVRKQKTDKRDATHILKLVVEGRFPRLWTPDREQRDLRQLVLHRHKLVMIRSRVKNELQHLSLNKGMQKKRTLWSQAGQKLLRELPLKPWASCRREDLLGLLAMLDEQIGKLDGAVQQAAEQNPQSKLLMTQPGVGPNTALAFVLTIGDASRFPRGKQVASYLGLIPREESSGGRQKLGAITKQGNRLLRALLVEAAQIAVRYDPQFRREYLHRCHQKPKGVAKVAAARKLAVRLYWMLRTQVAYPEIVRIESSPRVPLVGAS

SEQ ID NO: 59917 - protein, 378 aa, unidentified
MISVGIDVSKGKSTVCILKPYGEIVSKPFNITHTQKDLSELSSMLFRLNDEVKIVMEATGIYHLPVLTYLQEKGFFVSVINPYLMKSYRNESLRKAKTDKIDSRIIANYGIDHWFKMKEFQTSGEIYEELKLLGQQYRHYMKLHLLSLAELTHLLDLTMPGIKNLLASWNETNRKDKRSDFVERFWHYDVITSMSEQEFTEEYILWAKEKKYVPSQEKAKVIYTLAQESIPTLPSETSSFKMLVTEAVRVLKEVDATLGLILSRMQEIAKTLPEYSVVREMGGVGNTLAPKLIAEIGDVRRFRNGKALVAFAGIDPPPYESGQFVGCNRKISKRGSASLRKVGYETMRSLKMRSRPEDPVYRYVVKKESEGKSKNQQR

SEQ ID NO: 59918 - protein, 333 aa, unidentified
MDHCAIDLGGKKSQVCLRSPDGRVLLEARYDTLSLPDFLRQLPHSRVILETAAEAFRIADAAKTAGHEVRVVPATLVRTLGVGARKTKTDRRDAQMLSEVSCRIDLPSVHIPSARSREWKTICGMHDALISSRTKLINNLRGWLRGQGLRLSSGSAETLAGRIAEIESLPEYVASQVAMLALLTEKIRTSEQRIEDLAKSDELCKRLMTVPGIGPSTAARFVAAIDDITRFESAHKVEAYLGLAPGESSSSERQQRLSITKAGPSTVRWVLVQAAWSLQVRCRSVAARPLQLWTAEVAKRRGKRIATIALARKLAGILYALWRDGTTYELRPQ

SEQ ID NO: 59919 - protein, 346 aa, unidentified
MIIIGCDFHPSWEQVAWLDTETGETAERRLIHAAGEAEPFYRQWQAPALIGMESTGNCQWLIDLLTELGHEVWIGEAAQIRATMVRQQKTDRRDAAHLLELLVEGRFPRIWVPSSGERDQRQLLIHRYKLVTLRARVKNELQHLALNQGVQKKRKLWSEAGQKLLRELPLKPWASRRREDLLKVLSMLDGQIKPLDEAAKEAAEKSKMARLLMTQPGVGPITSLAFVLTMGDVKRFARGKQVASYLGLIPREYSSGGRQRLGSISKQGNRFLRMLLVEAAQGAVRYDPGFRQEYLHRCHQKAKGVAKVAAARKLAIRLYWMLRTHTPYPEVVRIESSPRVPLVGRS

SEQ ID NO: 59920 - protein, 388 aa, unidentified
MKKNSTTAKKSPKQALAKGQKKQIRQLAAEQRLTIGLDLGDRTTHYCILNEAGEVVSEDQLQTTKTGLESLFAKMPASRIALEVGTHSPWISRHLAAMGHEVIVANAHKVKLITQSVRKNDRIDARQLARLARVDPQLLSPIRHRGEEAQMDLAVIRGRAELMEARTKLINSARGLVKPMGERLKGCDADQVGVGLAEGLREEARRAIEPLLKAVEAISEQIGKCDEQIAEITKRYPEVKVLQQVYGVGPLIAATYVLTLEDAERFAHSRDVGPYLGLTRKQRDSGDSQPELGISKAGDGLLRSLLVEGAHCILRKGAPESDLRAWGMGKMGKGGKRAKKRALVAVARKLAVLLHHLWATGEVYDPQYNRKAAEAAKAKGKGKAEAAA

SEQ ID NO: 59921 - protein, 412 aa, unidentified
MERMMERVCGIDVHKATLSACVRVGIAHGSIEQEIRSFGTTGDELLELRQWLSSRGVTHVAIEATGVYWKPVYYVLEEAFSMVLVNPAEVKQLPGRKTDVADSAWLAQLLEHGLLRSSFVPPPAIRELRDLVRYQTSLKGDHTRLANRLHKVLQDADLKLSSVMSDVLGVSGRRILQQLAAHNTDPQALAELAKGRLRNKLPQLRQALAGRFSPHHAFMLGRLLADLDNVEESGLEVSKRIEECLAPFAPTLERLCTIPGVKRITATALIAEIGTDMSCFPSAAHLASWAGMCPGNNQSAGKRRRTKARSGNRWLRTALVEAGQAAGRTRQSALSAIFRRMMLHQGRKHAAFVVGRHILEIAYHLIANQTTYQDLGTNYFEQRRAEQIKRRCLDQLRRLGFQATLTPMASAA

SEQ ID NO: 59922 - protein, 392 aa, unidentified
MRKNNKEKTENKQGRTEGVLLRKLEIARKKKQAAAEERVEYYIGIDLGDRKSNYCILDEGGEILLEGSLPTTAEGFEKHFKALGRSRIALEVGTHSPWVSDQLEKQGHDVYVANTRKMNGGKKSRRRKNDRLDALILSRQVRSDPSLLYPIRHRKEKSRQGLVLLRAREALVSARTKLVNGARGLVKSFGYRLSRCGSEVFHKASLDGLPEDLREALKPMLEQIGQLTEKIKSYDKEAKRVSLKVYPETAVLRQVNGVGILVALAYVLTMEDPEFFRKSRDVGPYLGLTPKQYDSGDSSPQLGITKTGDRMMRKLLVQSAQYILGPFGEDSDLRRHGQKIAERGGKNGKKRAVIAVARKLGVLLHRLWKTGEVYEPLHNSRVNDENDLREVA

SEQ ID NO: 59923 - protein, 355 aa, unidentified
MTSIEYIGMDVHMESISICVRNSVGKIVMECVIETKASTLLQFLDGLRGDLRVVFEEGTWATWLYDLMKPHTTEVLVCNTRKNAVRKGSKGDRIDARKLSEQLYMNNVKSIYHGEHGLRMMKELARSYLTITKDLTRVMNRLKALYRSWGIPCAGNEVYAPRYRAEWLAKIKEAGVRRRAEHYYQQLDVLRPLRQEVRRDLLVESRKHKIWKLLRLIPAIGPIRAAVLIAVMQTPQRFRTKRHLWTYSGLGLETYDSAEYRAVQGQLERSRKQATVRGLNKDYNHDLKDIFKGAAMKASTATGPLRDFYENLLAKGRKPTMARLTLARKIAAITLIVWKKEVRFDANYLKPQQAA

SEQ ID NO: 59924 - protein, 436 aa, unidentified
MRGCRCSMIMGFTKPIEHFNLQRKKVITMNTLYVGIDVSSKSNVVYLMLPNGDKHSNFSVANSHEGSTLLVKKIYSALTSHSLDTVLIGLEATSVYGDNLVYFLREDATLAPFNRKIHVLNPKQVKKFHDTYNDLPKNDYVDSFVIADCLRFGRINKEVYMGDYRYKALQNLTRARFFAVQNLVKEKQRFMNVLFKKYSTMTQEKVFSDTFSTTALAVYDEFESAEALANMDLHELTDFIIEKGKNRFPDPDAVAKAIQKAARSSYRLPKTVNDSVNQVLSISITSMKALESQIKEFDKDIKAQIELLPNVLISIPGIGPVYSAGIMAEIGDINRFNSQAALAKYAGLAWKQHQSGGFESEVTRLIPSGNRFLKYYLCEAAFSLVRCDKEYSDFYRLKYKEVNRCQHKRALALTARKFVRLVFRLLKDNRLYCPAK

SEQ ID NO: 59925 - protein, 354 aa, unidentified
MIHVGIDLHFTNMVNSAINDKGQEIWKGKLPATRASLATLFNQFDEPVQAVVECTSFWYWVADWCQEHNVSLILAHAKMVKAISYAKVKTDKVDAKTLAELLRAGLIPEAHMQRGAQRDLRELTRARLRMVHRRERLQSSLWNLAAKYNVNIHDVESVWRYPEQLGTWLQAQLPQVSWLEAELLLEQILQLSKHIRRVEQTIEGQAEFSRELERLLAIPGIGLVSGWTILAEVGDILRFTTDKKFVSYCRLVPGSTNSNRTRRHKSGNKDGNKYLRIAFGQAAVSAYSQYGPVKRFYNKIKRRSGKKVARAVVGKELAKIVWHMLTKDEEYKGFKGHSTRMAAKPSWPQPISLP

SEQ ID NO: 59926 - protein, 416 aa, unidentified
MMEGLRPTYTVGIDWASDKHDVCVLEAAGETRFAFAIPHTADGLAELVQRLHRYGAPADLPIAIERPSGLLVDTLVEAGFPVVPIHPNALKASRPRYAAAPGKSDPGDAYILADLLRTDGHRFRPLRAPSDPTKALRAAVRTRDDLVATRVQLANQLRALLDSFWPGAAVIFAAVDTPIALDFLDTYPTPDSAARLGEQRLTRFLQRAAYCGRRPAAELLGRLRAAPRGQAGPLERETKGQLVRALVAVLRPLVTQLRELEGLIAAQLAQHPDGALLQSFPRSGTVNAAQLLAELGEDRRRFPTAEQLTAEAGVAPVTHTSGKHRGVACRFACNKRLRQAATTWADNSRHGHAWAAAVYRQARVRGCDHPHAVRILARAWLRVLWRCWQDRTLYDPAQHGRALPFLTPQPPSSAAA

SEQ ID NO: 59927 - protein, 347 aa, unidentified
MHFVGVDLHKQIISVCVLVRAGDQRQVMARRTLRCDQPEQIQAYFVGWAPFQVVVEATSSYEWFVQLLEPLAQRIVLAHPKKLRIIAESTKKTDKLDAQVLAEFLSLDMIPSAHRPSPRLREYRALVRQRQYVQRRITSLKNRLRHLLSHYNADVKHLFSQEGQTYLDQLAISAADRFVVEQLREAWRFFDGQLVAIDKQLRQFARSAPVAEREARQVLESIPCVGPVTIDVVLSELGDVRRFRSQKQVAAYAGLAPGIRESAGRGKQLSITKEGSGLLRWVLIETSWRLVMKTRRWGLLYEKLKQRIGSKKAIVAIARRLLCVMVALLRSGQAYRLSSEARVLNPT

SEQ ID NO: 59928 - protein, 343 aa, unidentified
MYFIGIDVSMKESALCILDGNGKIVRETKLPSDPEIIAGFIADTGLAIERIGLESGCTAAWLFAGLQRYGWPVICIDARHAAAALQAGFRNKNDRNDARGIADLMRVNKYRPVWVKSPEAQRQGRLLTARAALQSQLVALENTIRGLLRQEGIGLTDRRTAFEAAVREVIGEDRLLHAAIHPLLETRNTVLCQRAALDRQILLIVRADPVCRLLMTAPGVGALVSLAFKVAVDDPRRFSRSRNVGAHFGLTPREHSSGELHYQGRISKMGDREVRRLLYVAASRMLRRDAALWCPLKAWAVRLAQRVGIQRARVALARKLAVVLHAMWSDGQVFQWRRSEVSA

SEQ ID NO: 59929 - protein, 347 aa, unidentified
MRFYKQTHRFYCGVDLHARSMFVHVLDHEGQTLFDQDLPAGPDAFRAAVAPYRTGLVVGCECMFAWYWLADLCEDESIPFTLGHALYMKAIHGGKAKNDRLDAAKIAGLLRGGMFPMAYVYPRDMRETRDLLRRRTYFVRQRAQLIAHIQNTNSQYNLPPFDRKLSRHPDYSELAERFPHASTKLSIGADATLINHYHQTLAELETHLVRHAKVHDPATYHLLQSLPGIGKVLGLILLYEIHDIGRFPEDGNFLSYARLVRCDHESAGKKKGAGCRKIGNAHLKWAFSEAACLMLRALPAAKAWVGRQERKRGKKKALAILEAKIGRAVYQVWKKQQPFDAQKFLTH

SEQ ID NO: 59930 - protein, 353 aa, unidentified
MDSKKYIGMDVHKESISIAVRNAAGKIVMECVIETKANIILDFIHGLRGELHVTFEEGTWATWLYDLLKPHVTKLVVCDPRKNARQGNKNDQIDARELADRLYMNKLSSVYHGGAGVRTLKELARSYLTISKDLARVMTRVKAIYRSWGIPCAGKQVYAPRHRAEWLAKITEVGVFRRAEFYYQQLDALRSLRHEVRRELLAESKKHKVSKLLCQIPSIGPIRAALLIALIQTPHRFRTERPLWKYSGFAIETHSSADYRSVKGQLERTQKRISVRGLNRDCNHDLKNLFKSAATIASVKPGPFQEFYAALVAKGMRPEMARLTLARKIATIVWIVWKKGVRFDANYLKPQTA

SEQ ID NO: 59931 - protein, 326 aa, unidentified
MQGKEASEQETKGKSNAGIDVGKSWLDAHVLPAGATLRVANTREGIRKLKRWLMQFDLALVVIEATGKWHRDVRRSLHAAMVPVAVVDPFRVRMFAKACGVLAKTDRLDARVLAQFAAVMAPAVRAPASEVMEELAELVTARASAVAEQTALKNQLSTATGIFLKRQLGRRIQRLAKDIAALEREILKCIQADQGLARRYAILTSITGFGPVVATTLIACLAELGTCSRKQIGMLAGLAPVADESGQRQGIRVVWGGRPNIRRVLYLAAITAARFDADMKAFFSRLIAAGKPAKLAIIAVARKLVVLANILISEDRMWQPHSPKHA

SEQ ID NO: 59932 - protein, 343 aa, unidentified
MYYIGLDVHKKTISYCVKDAAGHVHQEGKVGSTRRDLDAWIKTLPQPRTIAMEATIFTGWIYDHLLPHAEKVKVAHPLMLRAIAAAKKKNDKIDARKIADCLRCDFLPECHMASTEIRDRRRVLRYRSLVIKQMVQMKNRVSGLLMETGVDYNKRRLHKVGYFEDLLTTNKEVNQSIRPLLKLSRETIERSQRLDYALVSSLERDPLLAERLKRLRTVPGVGPITALTWALEIGDFTRFPSVKEAISYCGLCGDESSSADKVLRMPLSKQRNKHIQRTLIEAAKLAIRYNHELAEVYEKERQRGNANRATLAVARKLVAYLLAVDRRKQDFVPAEVFKATAVA

SEQ ID NO: 59933 - protein, 346 aa, unidentified
MEHYAGIDVSLELSSVCVVDAQGKIVKEVKVASEPEAVVAFFEALGFAVKRIGLEAGPLSHWLHAGLKEAGFETVLLETRHVKAALSAMTVKTDRKDARGLAQLLRMGWFQPVHAKSMASQEVRALLVGRKQLLGRLIDVELSIRGILRGFGLKVGAVTRKGFEARIRELVTGQATLERIAEAMLSARAALKAEYEKLHKAVLAIVREDPVCRRLMTVPSVGPLVAITYKSAMDDPSRIAKSKAAGALFGLTPKKYQSGEKDVTGGITRTGDEMVRTALYEAANVLLSRITRFSKLKRWGMDVAKRRGSKRAKVALARKIAVILHRIWIDGTTYRWAEAKPIAAQA

SEQ ID NO: 59934 - protein, 399 aa, unidentified
MIENYDSVDVFIGVDVGKGEHHAVALDRAGKQLFDKALPNDEAKLRELIGQLKRHGQVLFVVDQPATIGALPIAVAQAEDALVGYLPGLAMRRIADLHAGEAKTDARDAAIIAQAARSLPHALRSLQLADEQVAELSMLCGFDDDVVGQITATSNRIRGLLTQIHPALERVLGPHLDHPAVLDLLQRYPTPAAMKTAGTTRLGNRLVKLAPRMGRRLADEITQALGEQTVVVTGTNATSIVLPKLAEQLAALRRQRDEIAVEVERLVEAHPLHPVLISMPGVGIRTAARLLTEVSGKDFATAGHLAAYAGLAPVTRRSGSSIRGEHPSRRGNKILKRALFLSAFAALRDPLSRAYYDRKIAQGKRHNQALVALARRRCDVLYAMLRDGTLYQADHQIAA

SEQ ID NO: 59935 - protein, 435 aa, unidentified
MSFTSPASIDPVWAAFAAIDWASQKHSWSLLPAEGGSIESGQLDNTPEAVELWAAELRRRFPQAPIAVALEQKRGSVVYMLSKYQHLVLYPVPPSMSAAYRRAFCPSGAKTDPGDANLLLDLLVHHRQQLSPIATDTAETRLLRFLVEQRRQLVQQKVGLIQQLTDSLQQYFPQIRTWFGSLDTVLVTALLHRWPTLSDLQHAHPGTLRRFFVDHACRNDDLIQQRIQAIYAALSATTDPVVIEAGTRKTAAIGSLLAAAREQIHALDKRIAAVVADHSDAELFASFPGAGAATVPRLIAAFGTDRNAWTSAAALQCFSGIAPVHKSSGNSTVVVMRHACPKFLRQTFHEFAGQSIRFSEWAKAYYRHRREDQKVSHHTAVRSLAFRWIRILYRCWKDRQLYDERLFLEAQGRRNTPRTGWNTAAGFHKPATPNS

SEQ ID NO: 59936 - protein, 337 aa, unidentified
MNIIGCDFHSRFQQIAMLDTETGEIVERRLEHESGEARKFYGALSSPARIGIEATGYARWFERMLQEQKHELWVGDAAQIRAAMVRKQKTDSRDALHILELLLSNRFPKIYISKLEDRDVWQLLRHRCKLVRWQTSIRNQLHALAMGEGVCRKKKLWSRGGRKELDSLSLDAWASRRRSDLLELLDRLAPCIQELDQAVEEAAKDCPAAVLLQRQAGVGPVTSLAFALMVGPVERFGNSRRLVSYVGLNPREESSGGKQRMGAISKQGNSMVRWLLLQAAQTASRYDEDLRRDYRRLVSRRGRAVAKVAIARKLAVRLYWMLRQASEQLNAADSHAG

SEQ ID NO: 59937 - protein, 323 aa, unidentified
MNTNTLQNINVGVDTGKSQLDIYIRPLDIYFTAPNTEKGIRHAIKTIKKHNPQRIVIEATGRLEMPFVLACTEAKLPIVRANPVHIKRFAGAIGRRAKNDRLDAQLIAHYGEAIKPDLTVIKAKNIRLMSDLVIRRNQLLAMQTMEKNRIQILPKYLHSTITPILTAIKNQVSKIENKLVKLIEDCPEYQTKNTLLQSVPGIGNIAAASIISNVPELGYITNKQAASLIGVAPITRESGRYKGKRVIQGGRAQVRTVLYMAMMSAMQCNPVFKDTYARLLEAGKPKKVAIIACVRKMVVILNSMLRDGVMWDQNIAQNKGLTP

SEQ ID NO: 59938 - protein, 386 aa, unidentified
MKKNTTTTKKSVKQAKGQKLQLRQLAAKQRLTVGIDLGDKSSRYCVLDEAGEVVSEDQVPTTQAGFDSLFAKMPTSRIALEVGTHSPWVSRHLASMGHEVIVANAHKVKLITQSVRKNDRIDARQLARLARVDPKLLSPIRHRGEQAQRDLAVVRGRAELIAARTQLINSARGLVKPLGERLKPCDADQVTAGLGESLSPEAKAVVGPLLKAVESISEQIDKYDEQIEEIAKRYPEVKLLQQVYGVGPLIAMTYVLTLEDAGRFAHSRDVGPYLGLTPKQRDSGDSQPELGISKAGDGLLRSLLVQGAHCILRKGAPDSDLRAWGLGKMGNGGKRAKKRAVVGVARRLAVLLHHLWATGEVYDPQYNRKAAEAAAAKAKGKGKVAA

SEQ ID NO: 59939 - protein, 408 aa, unidentified
MQVVHTRCAGLDVHKKSVYACVICRTGEGKNREVRSFGTMTADLLRLADWLREHQVSHVAMEATGVYWRPIWAVLQGHFELLLVNPHHIKVIPGRKTDTKDCEWIADLLQHGLVRSSFVPPTDIQDLRDLTRYRAELKQAQCTVANRIQKLLEQANIKLSSVASNALGVSGRRMIEAIIAGEDNPEHLAALAKKRLKEKIPELRSALQGYARDHHRFLLREFLDEWNALAERISRVEQEIDRRIAPYEHAVTLWQSIPGMDRVTACNLVAELGVNMAQFPSAQHLTAWAGLCPGNNESAGKRMSGTTRPGNKWLRRTLCQSAWAVTRKKDCYLSAQFRRLAARRGVKRAVMAVAHSMLIIAYTMLKTGNTYRDLGGNYLEQTNKEHLQNYFVKRLRRLGLNVTVAPAT

SEQ ID NO: 59940 - protein, 377 aa, unidentified
MLNPSRARTTEIKGSKPNVLRSALEELPMITNTTKESVVYAGIDYHKRTIAVALGDKEGRVLERFNLLNQTELVTQFFQQFSKIECVVESCRGYEWFVEMLQKQGHTVHVGDSRSIKLIAHSRCKTDKVDSQILMELLAIKYLPTTYIPTAKEREYRELLRHRSSLVQTATRSKLRVHALLDKENKGIRFPFSKNGRKQLEELDLSESRRRIIEHELDIIDFAEEHAHAQQLRIHLLASYEPEIKRLRTIPGFEVLMAAAFLAEVGDVSRFKNGDQVAAYFGLVPRVYASGNTMRCGRITKAGSKFMRWMLVQAAWAAIKTSPNLRQSFGVIGRRRGQKVAIIAIARKLATIAFRVLRDKTTYKEELLDAGLARASF

SEQ ID NO: 59941 - protein, 423 aa, unidentified
MEVVAARCAGLDVHKATIVACALIAQEGRARPRKEYATFPTTAAGLASLAAWLKGLGVEQVGMEATGVYWRPVYAVLEAQGGFELIVANAQHIKTVPGRKTDIKDAEWLAMLVRHGLMRKSFIPDQPFRDLRDLTRYRRALVETQASERHRLIQVLESADIKLSGLVSDVFGLSGRLMLRALIAGEQDPAVLADLARGQLRKKRDALREALAARLGEHQQRMLAIQLSRVEAAEADIAVLDQEIDQRLEPYAEEMALLITIPGVDRVVAAAVVAELGTDLSSFPSAEHLAAWSGTCPGNRESAGKAKPARARKGNPHLKTALCNAAIAATRKKGSYLRAKYYKLKARIGGGKAALAIAHKLVVVIYHVLSKRVAYRDLGEDYLDQINAKRTAQRYVQKLNALGYGVSLSLLTRPAPAPQAEPL

SEQ ID NO: 59942 - protein, 357 aa, unidentified
MTNISQLTIGLDLGDKMSDVCVLNTERKVVRSDQLPTSRESLAALFADYPGATVVFEVGSQSRWVQQLARESGLGQVITADPRKIKLITQSRNKTDRRDAYLLARVGQGLPELLSPVEHRDEAVHADLQVLRTRELLVTQRTQLVNRVRGVLKAAGLKLPSCSATYFFRQARPHIPEYLLPACAPAFAMLEAIHAQLLGIKRLLRQMLDKYPAAKQLMTTPSVGDKTALTFVLTLEDPRRIRGTRDVAAYLGLVPRKKESGNTDPQLGITKTGDTRLRRLLVLCAHHLLSRGKDCRLKRWGLELCKRGGSNGKKRAVVAVARKLSIHMLAIWRTGETYDLLRGIPDLQENVTLTATA

SEQ ID NO: 59943 - protein, 318 aa, unidentified
MNTNTLQNINVGVDTGKSQLDIYIRPLDIYFTVPNTDKGITDAIKTIKKHKPHRVVIEATGRLEMPFILACDKAKLPYVVANPLRIKRFAEAIGQRAKNDRLDAELIAHYAERVQPELTKLKSENIRLMSDLVTRRNQLLTMQTMERNRLQILPKNISSTIPPILTALKNQLEKVEAKIAKLIESSPEYQAKSTILQSMPGVGKVLAASLISNVPELGFITNKQASSLIGVAPITRESGRFKGKRMIKGGRPQVRTVMYMAMMSAIQYNPVFKATYERLLAAGKPKKVAIVACMRKMVVTLNSMLRDGAMWDKDSVKN

SEQ ID NO: 59944 - protein, 365 aa, unidentified
MQPMYYIGLDVHKRKISYCVKDSGGKVYAEGSLPATRFDLDHWMKTLPQPWTAAMEATMFTGWIYDHLKPHAAALKVAHPLMLRAIVAAKKKNDRIDANKICDCLRCDFLPECYMASTAIRERRRTLRYRNLLVRQMVQMKNKTSMLLMEAGVSYNKQRLHKAGYFRELLATNPDIDEGLVPLLRLCRETVVRLQRTESALVRSLERDSLLMDRVERLMTIPAVGPITALTWALEVGDAQRFSSIKKAISYCGLCGAEKSSANTVQRTPLSKQRNKHLQTTLIEAAKMAPRNNPELAMLYDTEKQKGNANRATLAVARKLVAYLMAVDRRQRDFQVVETSSGIAAQSAAVNKEDFFGASPARSCR

SEQ ID NO: 59945 - protein, 323 aa, unidentified
MAKHTTICAGIDTGKRKLDVAIEGNREQLQVENTAEGHAVLLAWLRRHRVKRVGIEASGGYEQPVVAELRRKRFVVVVFQPAQVRAYAKFHSQRAKNDKIDAALIAACTAAVRKIHAAPDPRLLPFAEQLTMIDQINEDTARLKNRIESCRNAQIKKLWNEDIARLEKREKAELKALVASIRKHPDLAKRLGLINSVHGIGLPTAVAILVRLPEIGRITREQAVALAGLAPYDDDSGEQVGVRHIEGGRKRLRRALYTASLAASFRWNQQLIQLYQRLTAAGKEHKRALVACARKMLIFANTVVARGTPWQDCPPEKAALTTG

SEQ ID NO: 59946 - protein, 342 aa, unidentified
MDSIGIDLHKRESQLCTITEDGELLEQRIATSRERFTAVLGARPPARILLEASTESEWVARHLESLGHTVIVADPGFAAMYATRSKRVKTDKRDARTLCEALQLGAYRAVHRASDAQRHLRAQLAVRDALVRTRTRYIAIIKAAVRREGLRLPSGEAEQTVAKLAALPVSAHVRAELAPLVALWAPLADELTAADARLTAIARTHPVVARLATMPSVGPVTALAFLAALDDVTRFQSAHQVQAYLGLVPSEYSSGDRRARGRITKRGDARMRWLLVETAWRILRSPNEELAGLKAWARAIAARRGKRIATVALARRVAGILFAMWRDDAPYRAIRWHARVAA

SEQ ID NO: 59947 - protein, 429 aa, unidentified
MSDLFISAGIDVGADFSYMSLALSNQTFAGKPFKIVHNNLKSLEQAVLTIKEAEELHSMRSRIIMESTGIYHYPLFCYLRDKGFDVIVINPIISKNSTNLNIRKVENDKFSSRNLALIGLKPDLKTSVMPPDAVLNLRNLVREYYNLMDCRSAYVNKLNGVLRVAFPQYIGVFSKVTIQTSLALLEKYPSPDALLSAKKSSIINVIAKTARFGKAYAEKKYLATVAAAKAAGTFGYFLPSNSTQIRLCVSFIQKYDTEIAAVLALMHKLVDEHADETFAKQIRLIETIPGAGFLSAVTVMCEIGDFSVFKSPKQLFAYFGLDPAVKQSGNFKGTNVKMSKRGSRVARRAIFTIALVGIGVTRKGVPNNPVLRDYYLRKCQSKLKMVALGAVMHKVCNIVFAVLRDNKAFSLVTPEQHVQDYASLQSLSA

SEQ ID NO: 59948 - protein, 331 aa, unidentified
MAVGIDISMDDFHACIKIKNELGKVIIKGTKTFKNTGAGFKEFYQWVLDRKKGDYTLSFVMEATGVYYEDLAYFLHTKKESVSVVLANKMKGYAKSLNIKTKTDKIDSKIIADFGIERHVDEWKPMSPVYKELRDFCRELLSIKKEMNRARNQLHAMVRSHDKSKGIIRIKKQQIAFYEKAIETIKKKLIKIVDKDPALKKKLAKLQSIPGLAFETSVILASETNGFELFTSIRQLVSYAGLDIEFKESGRFKGKTRITKKGNSRIRQALFMPAMSASRCNESIKKLHERVCERNPDIKRKGIVAGMRKLLIYAFVIWKKDTAYDREFVWS

SEQ ID NO: 59949 - protein, 388 aa, unidentified
MYYVGIDIAKYKHDCFIFTSEGEIVLESFTFENTREGFDKLKLVLDALDHSQKIKTGLEATGIYGKNLKLFLSSIGYDFDELNPLQVKRFTNALSNRKTKTDKIDASQIARFVSTGASRTYVYSSYHTEALKQLTRARNSLIDERSKHQTVLTDILDVEFPEFKGFFNNKFTDTALYLLNKYKTVKRISKLSHNDCVLLHNKSRVISTSRFEELRESAKNTCGHHFDYNDSLISANLQIIKCLNNEIDKIEKEINSIMSTLDSPIVSIPGISAISAASIIGEFGDFARFDNAKQLCAFCGVEPSIYQSGTSYHEGKMVKHGSSNLRRTLFNVVPYIIMHNETFKTFYDKKRSEGKAYRVAQSHVVKKLLRVIFTLEMTGSTFAPSKLY

SEQ ID NO: 59950 - protein, 343 aa, unidentified
MKLSRVGVDLAKNVYQLHGVDRHGKTVWKRRLRRGQWLRVLTDSVEPGCEIGMEACTGAHHWARELQSRGYTVRLIAPQFVKPFVKSNKNDANDAEAICEAMSRPHMRFVSVKTVEQQDIQATHRVREELKAHRNAKANQIRGLVAEYGLVAPKTLLALRRAIPEWLEDAENGLTGHFRSLLHGLWNDLLTLEDRLKGLDKEIEQLARSNEVTRRLQQLRGVGPLVATALVATVGDGRQYRKGRQMASALGLTPRQNSSGDKYRLFGISKRGDVYLRTQMIHGARAVVSQARHRDDPLSRWVTAIAKRRHPNVAAVALANKTARMAWAMLQNDTNYDPSLAVG

SEQ ID NO: 59951 - protein, 347 aa, unidentified
MNFIGVDAGKLYCQVCEISSAGDVWETRVRTQRERLEATFRGRAHGRVLIESSTGSEWIARLLEGLGHEVIVADPNYAPMYSHRTRRIKTDRRDARALAEACRLGAYRPAHRTTDPQRHIRALIAVRENLVRTRTRWILLVRALLRREGLSTRSGHAESFVERVLELELSSALHEEIVPLLDLLGPLNDQLDAVDGRLVQMARDDDAARRLMTMPGVGPVVALAFVATVDRIDRFRSAHQLESYLGLVPREWSSSEIQRRGPITKTGNKRVRWLLVQTARAVMRAPDRRTTRPLWEWADRVGSRRSGRVAIVALARRIAGILYAMWRDGTEFQVVQLMKPRPQLRTA

SEQ ID NO: 59952 - protein, 433 aa, unidentified
MEEVTDEPLYRDRVCGIDIGKAEMHATIRVPSDRDRSRRAAETRSFATTKRGVLALADWLRCWQVPAVVMEATSDYWKPVFYRLEAEGFECVLADAKQVRNLPGRPKRDPSDSSWLAVCFERGAVTSCFVATPEFRIIREHTRYRRDLTGERTREKNRAEKLLESAAVKLSSVVTDLHGVTGRDIMDHLIAGERNPKVLAQLARARARRKITELEQALEGAEFFTPELAALLAAMLARIDSVNAEIGKLSLVIERLLAPYEEQLQQAESMPGWGRRAAQDAIAETGVDMSRFATPGHLASWAGRIPLDKQSGKRAGQARHKRGNRYLGAITGETAVAAGKTDTREGARHRRISRKRGKAKACVATGNTQMRVYHALLSHPGTRYQDLGADYYEQHADARRRARSHVRDLERLGYKVTIEPLDPETGELITSAG

SEQ ID NO: 59953 - protein, 346 aa, unidentified
MYYIGLDVHKKTISYCVKHGGGEVYAEGVVNATRGALDGWLKTLPQPWTGAMEATIFTGWIYDYLLLHAAALKVGHPLMLRAIACSKKKNDRVDAGKIADLLRCDLLPESYMAPSALRERRRALRYRHLLVRQSVQMKNKMAGLLMETGVTYNKEKLHQKRYFAELLSKNAEVEQSTKPLLKLGRETIERLSQSERALVRTLERDPLLAARVQRLLTIPGIGPITALTWVLEIGEVSRFASVKHAVSYCGLCSAENSSAGIQKRSPISKQRNKHLQTVLIEAAKLAPRWNSDLALLHDKELQRGNRNRATLAVARKMVAYLLAVDRREKPFQGGKKEPAPLAQAAA

SEQ ID NO: 59954 - protein, 340 aa, unidentified
MAELHTVGLDIAKSVFQVHGIDAQGRVVARRKLRRRDVIAYFKARETCLIGIEATCGAHHWARVLSGLGHAVRLMPPAYVKAYVKTHKNDANDAEAICEAVGRPTMRFVPVKTEAQQAILALHRTRDLLVQLRVTLVNALRSHLAEFGVVARAGSAGAKEVLRYVESGCKGELPDYAQSAVQILAEQIRRNNIDIGHCETGILAWHRNNSDSSRLTTIPGVGPLTATAIIATVGEMRAFRSSRHFAAWIGLVPRQYSSGGKPMLGRISKRGNTYLRRLLYLCARSVLVQPKRQYAFVRWGLKLREHKAFRVAAVAVANKIARMVWALLSTGETFRDVAPV

SEQ ID NO: 59955 - protein, 343 aa, unidentified
MNIQLKTNDVQVNSIHQAGIDVGAEELVMVIRKNGKLFNPQTFTNTRADRARLVMKLVKLPGVIVCMEATGVYHFDLAVALHDAGVLVMVINPKSSHNFAKVLMKNSKTDAVDANTLAEYAARMDFAAWTRPSDETIAVRCFSRRITALTTQKAAAKNHLHALTATQETPKAVLRDAKLAITQLQKRIDRLTTEALLLIGKHPKLERTLALLISIKGIAQTSAISLMGELLLLPPDLTHREWVKFAGLDPKAFDSGKSVHKKSRISKAGNRNIRAALYMPALSAKQHDPHVRAYFQHLVANGKKPLQAVCAIMRKLIHAIHGMLKNDEPFDNTRFYKIPVSAV

SEQ ID NO: 59956 - protein, 349 aa, unidentified
MSVDPAYKVVRGGALAKEAKWKDRIVIDGLLGIDVSKDTLDASMSSCNKVRAKSFANSPDGWRHLLDWLISQKIRRVHACLESTGRYSLGIACKLNEAGHVVSIVNPAQIRDFARTKLGRNKTDAVDASHIREYCELFKPAPWSPPSHAHRQLGELQTIRAGIVAGLTEWKNRKNSGMIDVVAQSLADATISHFTSQLGAVEKAIAQAIDNDTDLRRKRDLLLSISGVGETLASVVLAELPGPDVLRSSAEAVAYTGLNPRRHQSGTSIDRLTRISKIGNAVLRAALYMPAMSAMRYNPAIVALVTRLKARGRLNPKQIVVAAMRKLLVLCFGVLKTGKPFDPALAMGC

SEQ ID NO: 59957 - protein, 409 aa, unidentified
MLFVGDDWAEDHHDVELVDEHGKVLAKRRFPEGLDGVTRLHALIAEHLPDPGPDPDPGLELLVGIETERGPWVASLVAAGYTVYAINPRSAARYRERHLLSGAKSDAADAHALAEIVRLDRAGHRPVASDSALAEGIKLAARAHQGLVWERTRHVLRLRSALREFYPVALQAFPDLDEPDALELLGKAPDPDTAAALTRRTLVVALTRARRRRVEERAEELQAMLRATGLRQPAPVQAAFAAIVSAEVAVITTLNEQITILGQVVGEHFGRHPAAELIISLPGLGVILGARLLGEFGDDPTRYVDAKARKCYAGTAPITKASGKKKAVLSRHVRNKHLADAAHQWAFSSMRGSPGAKAYYQQIRARGTSHQAALRQLANRWIGILHGCLKTGALYDEDTAWAHIHQRAA

SEQ ID NO: 59958 - protein, 386 aa, unidentified
MPKPADLNRCLAPLDQDHTIIAVIEMSQSSWLVAGIVPGIARQPLKKLAPDQDALLKLLHRWRAEAGQAGREISRIAVAFEAGRDGFWLARWLRAHGIEAHVIHPTSVAVSREHRRAKTDRLDTALLKRVFLGWLRGEPEHCHMAAIPTLEDEDARRPTRERECLVGERTRIVNRIKAALVRLGVRGFKPTVRNALEHLDALRTPEGTALPPNTRAELHRDMARLHFVTEQIQQIEAARGERLEQAGAGPNAMVRLLAQVVGVGIETADMLVHEVLSRNLRDRRAVARYAGLTGAPDESGSRRREKGLAKAGNARGRRGMIQLAWRFLLHQRESALAQWYRARTADARGSTRKTLIVALARKLLIGLWRLVTTGEAPHGVALRPAA

SEQ ID NO: 59959 - protein, 335 aa, unidentified
MKFKTFIGVDVSKLTLDICSISGEGLIEDYQIPNDHKSLKSFFGLLEKKFDLSTVLVCAEHTGHYSNPLRSYCLDSGMDIWLESGAEIKLRSGVQRNKSDKIDAERIASYALRYSDKAKTERAKNDALEEAKLLLSERELYVKERAKYKAQIRDLKKFIASAYYKDRKKRMDKHLALLSRSIVQIDKRVKEIFKETEKLSKQKDILKSIDGVGEQVAVHTIVATVGFEKFSNGRQFACHAGVAPFSYSSGTSQRSRNKVSNRANKKLKTLFHMAALSAIQMKGEFRDYFERKLAEGKNKMTIINAVRAKIINRIFALIREDRKYEKNYIFTLQHP

SEQ ID NO: 59960 - protein, 523 aa, unidentified
MARAFRSKKRSSLASQSIHKPRGVISPRVQAVGPEHFGIVCVDCAKARSKWMLSDFYARVLVPPTEVEHTQACLASMIRDLRTALEQARIRDQIVVIERTGRYHRPIQRAFDQAGFEVRIMHPLTTKQHRQPANPGNKTDDTDLSAMQRGAVNGFGLLEPPADPLSVRLQLLARHRRDLVEKTVALRSQIHEHLHAIMPGYSKCFEDIYDAQIPLWIARRFGSATAILQAGAPELIVQLRRAELRLHQPTLDKIIAWARSAPAAEDESAIHLKILSELDDDRLSKVRAVRAIEAELAGLLVQTPYLLLIGIPGINVVSAAEFAGEMGPIERYPTARAITGRAGLFPSRYQSDRVDYPDGQLVRCANRTLRRAIMMIADNLIKWNDHFRVLATGWQLHGRDARAARVQVAGRFSRIAYQMVAGRKAYRHPCCQQRDYILNKLLRFHTNNDIGYDQLMINLDAAVAQLPRSVYREEAAPLADELDRVLKKRGKGPRPLSEILPVVLAKLGVKPVRSPKSGEAILT

SEQ ID NO: 59961 - protein, 375 aa, unidentified
MEHHSEAFVALDTAKLRNAVAIADAGRSGEIRYLGEFDNTEAATRKLVAKLASKHARLTFCYEAGPTGYGLYRLIKSIGHDCIVVAPSLIPSKPGDRVKTNRRDAVNLVKLLRAGELTAVWVPDERHEAMRDLVRARDAAVKDYRIKRQNVSSLLLRLGRSYPGKKTWGRTHINWLTGLKLEHREQRIAFEEMLLAVRQVRERIERLEQAMREAVADWTLAPVIEAVQAMRGIDMVGAIAFLAELGDLSRFENPRQLMAYLGLTPSERSTGESVKRGGITKAGNTRARRLLIEAAWSYRFPPRVSKDMQTRIGAAPRTAREIAWKAQMRLCGRFRTLTRKGKRPTIVVTAIARELSAFIWAINREVVGSHATANQ

SEQ ID NO: 59962 - protein, 417 aa, unidentified
MLKIVFPICCGIDVHKTFLVATIASTDRSSVTTYQTKRFSTFTKDLENLSKWLLDNQCADVCMESTGKYWIPVYNVLELTCEVILAHPKYVKSLRGKKTDRKDSVWIADLFKHGLVKASFIPEKAIRDLREVMRYRTKLVSMKSSEKNRYQNALTVSNVQLASVVSDTFGKSAQALINQLLQQPKDTSFDVLPFLHGSLKKKAEQISESLNGSIDDIQAQKIRSCTSHMAELDSHIEDLQVAADLIASPFTAALRIIESVPGIGHLSALTILSEIGTDMSKFLSAKHLCSWAGLTPCNDQSAGKKKSTRISRAGCYIKPILVQCALAAIKDKSFPYYGQRYKVLKHRRGHKKAIISIARMMLSVIYTLLSRGELFSKELYEESLKNPMVILSQEEQFQRLAKKFGYVVVKVHEPVPV

SEQ ID NO: 59963 - protein, 378 aa, unidentified
MSKVRFVGLDVHAETIAVAVADANGEVHSHGTIPNRLESIRKLIAKLGPAKDLKVCYEAGPTGYVLYWQLTQLGVECQVIAPSLVPKKAGDRVKTDRRDAEKLARCHRAGELTAVWVPDAAHEALRDLVRAREAAKKDQLKARHRLGKFLLRHGRRPEGVKAWTKKYLEWISTHVKFDQPALEATLQDYLDEVKHVAGRIVKLEKAIDEAVQKAPPEIRAVIEALQALRGVAQTTAATIVSELGQLSRFESPRQLMGYSGLVAREYSSGNRIQRGSITKTGNAHLRRVIVEAAWAYQHRPNVTGFLLRRQKSLAISDEVKQVAWKAQYRLNRRYKAMSARGKNKNQIVTAVGRELLGFIWALAVKVEREQQGEVAKAA

SEQ ID NO: 59964 - protein, 340 aa, unidentified
MSTINIIGIDIGKFTFHLVGHDSFGREVCRKKLSRPKLIQFISTIELTTIAMEACGGCHWLARKCQEFGHKVLLIPPQYVKPYVKTNKNDFIDADAIAEAATRPSMRFVTVKPESSQVISVIQRIRSIYIKDRTACMSRIGATLLEFGMSFPKSHAKMKTLFQWLAEHGEPIPPMLLLELRDHHDYYLKLNQLILTQDKKLKEIVNNDERAQLLKTIPGVGDLTASRCISDISNAADFKNGRHLAAWIGLVPRQFSTGGKPTLLGISKRGNKGLRELFIHGARAVLVRPEKAVAVFGNWILSLLSRKPFNVVVIALANKLARIAWSVLSTKQAFEVRMQA

SEQ ID NO: 59965 - protein, 350 aa, unidentified
MLAELVHHVVGVDPDRDWITLAVLDAPSAGVVAEGRFAATGDGYDDAVDFVDTHSSETERAWVIEGSGGYGRGLSAALARRGEWVIEFDRPTRKSKDGAKSDALDAIRAACETLGRARLSVPRAHHGIREAIRVHAVTRAAAVRARTGAINELKAMIVTTDEALRAQLRGLRTSAQVATCAKFRDRPYRAVEQRCTRTAMRAVARRIQHLDAEVDDHDRVLMQLLDEAAPQLVAERGIGYITAAEFYVAWSHHGRCHSEAAFARLGGTAPVEATSGQNQTRHRLSRGGDRQLNRALYHVAITKQRCDPATRAYVARRVAEGKTEREAIRCIKRYIARRVWRLLEHAPITA

SEQ ID NO: 59966 - protein, 465 aa, unidentified
MHLGGYTPRLFNVDELPKRTAVCCVTQVKSTSSKVRIPTRAIPSLHFPGRDDEMQDVLTTAMGLDVHRDMIVACLIKGQLGLEPETETRTFSTLIPEMRKLRDWVQETDCRHVAMESTGIYWQPIYEMLEPCFDGEINVLVVNARHMKNVPGRKTDMRDAEWIATLLRAGLLRGSFIPEKAIRELRHLTRYRKSIVHDITAQKNRIDKFLQSSGFRFTAFLSDAFGASGRNIIRHLIEHGSMDRDALDKCLKTKTRKRIDEILVALNGSLSAHQCSFLRMVFEHLLMLESHKHEVEDAITQEILRHEEALNLLCSIPGIDITSAASIIAEIGTDMSCFPDSQHICSWAGLSPGNNESAGKRKSTHINKGNPYLKSMLCEVAWVISSHREIYLSGWYWRVKQRKGAKRATVALARKLLALIYSVLKTKNPYNENFFEERRKRSERKRAGRMIFELQRLGYMVVAPE

SEQ ID NO: 59967 - protein, 347 aa, unidentified
MNYIGCDCHISTLDCAVVNERGQETKKQKMNTGVKGLVEFVKSIPKPRKIIIEEGTLASWLLEVCTAYGEELIITDPKTNRWIGRAGQKNDTIDASKLAQLARGGYIKEIHHPIGHRRRFRELVMSYHDTVKSQTRIKNKLKAKFRQNGIKCSGETVYSAKYREEWKRRLPNEKVVEVMVTGLWQQLDQVHEVQEELLNHIRKQGRQYAEIKRLKHIPGVGTVHAATISAIVETPHRFANKKKLWMYAGLGLAEKGSGEKVYSRNLTRSYNRLLKSALKQATEAAISARDNQFRRQYLRLTLEKGIPSHRAKLTVARSMLATIYGIWKSGEDYDPTIDKKRTESDNT

SEQ ID NO: 59968 - protein, 458 aa, unidentified
MRHYEGYCGLVFVTYHSMVLRRLQPQSLCKFVNQLDTARRFIWNEVTSARSSVVPSSIEIHSRRDIAMIYVGIDVAKDKHDCFIACSEGEVSQNVFTISNNKTGFDDLVQRIRSVSPVLDKVKVGLEATGHYSYNILGFLLDKGLTPFVINPLHTNLYRKSLSLRKTKTDKVDARTIAFMLMSDVNLKSYTDTAYHNEELKSLTRYRFDKVRDRSKLKQSVSRLVTILFPELEKLVPSLHMVSVYALLSEFPGAEQIAASNLTHLKTLLNHVSRGRYGREKAIEIRDAAQSSIGSRMPAKSLELRHTIKLVRELDAELSEIEAEIKSIMDELQSPILTIPGIGYRMGAMILAEIGDFSSFDSPDKILAYAGLSPSTYQSGQLTSSHSHMEKRGSRYLRYAIFNAAKFVCNWDPTFADYLAKKRLEGKHYYVAVSHAAKKLVRLIYALEKSRQPYSPVA

SEQ ID NO: 59969 - protein, 415 aa, unidentified
METLYTTAAGIDVHRDTLVVSVRKMDDRGKEKVKTKTFTTFHKGIVEMVAWLDEQDVPIVGLESTGVYWKPAVRVLRSLSPKRVIWVVNPAEVKQVPGRKTDVTDSQWLSKLVMHGLVSPSFLPPAHLEELRKLTRFRGTLTSTRSSQKNRIIKELETAGIKLSGVCSDPLGASGRAMIEALVEGTLAPSAIADLARGALRKKLAEIERAVEAPLSASDRIISRMLLTQLACTERDIEKLDEQIQVAMMPCLKEAALLETVPGIEKIISTAVLAEIGPDMSVFDSGKHLTAWAGLCPGSNESAGKSKHAPARKGNKYARTALVQAAWCAVRKKKNCPWKAQFVALSKRCGPKKAIVAIARKMLVAIYHMLCDKKPYQPPQSPTLPEKEISRRVQRHLNALAELGVHVTATIPAKA

SEQ ID NO: 59970 - protein, 351 aa, unidentified
MEMVGGLDLHRSQITFRTVDLRTGEVQRGKIHPGARDAFRDWLGGFEPGTDAHFALEGTTGWRFAVEEIQRMGFTAHLADPAELSERRGPKRRAKTDHADCELMVNLVLEGRLPESSIPPAHILELRALVRLRKTLVDQRIEWQQRLQAQLFHQGVVPGLRLCRPEDRRRLTGMEMSPAGRQTQGTGLVMLDDFDAQLGPLSAQLVSLAKSQPGCRALEHELYGVGWLTAVAIVAELGDCRRFHSGDQAVRSSGLDITVHESNGKRPGGHLARQGPAVLRWALFEAAQCAARKASPDHAYYVRVRDHIDHNRACLSVARKICRRACRILKDLGDAAMAPPEPPARRDPKAA

SEQ ID NO: 59971 - protein, 372 aa, unidentified
MKQISKIGITKKVIKKTTFRKDHFKGMCVYAGIDVHKKSWFITLYVEKIFIKSFTVSPPSSEKLISYLTEHYPGGEYHVVYEAGFSGYSLYDDLTAVGIDCKVVSPADVPMGNKNKKFKTDKNDSKNLAQQLKSESLYGIHVPDPIIREYRALVRLRNKLVKDRTRIKNYTKSNLMFFGKEIKDEEGKAKKSWSKEFYRLLSEVNYNTDEGKKVMERQINMIKYLDGQVKEVDKEIEALSKLPRFKEDVEILTSVPGIGILSAMVLLVEIGDFSRFYDTGQLKSYVGIIPNEHSSGEKEVKTEITKRGNKFLKKIIIEASWTAIGKDKSLLNIYTKAAKRMPGTKAIIIVASSLLNRIRSIMRQRILYKLAI

SEQ ID NO: 59972 - protein, 407 aa, unidentified
MICVGIDVSKRKSTVCFMAPGDKIIRRPFDVKHTKEELQPLVDEIRVQAKYDEIKVVMESTGVYHLSIAYFLQQNGIFVSVVNALKVANFNKAENFRHTKTDSIDSTNIARYGIAYWAKLPQFDLNGDKYFLLKRLCDAYLNFSEERSRILLQLQSQLEQTMPGIFDLFGGFDINSGKDKLLDFLERYCHIEDIIAKPEAEFVASYCGWAKEKGYRSNESKAATIYAQAKNGIPSIPNNPIVRKTIMWYVGLLRRADEALMASLTRMEDIAKDLPEYELVGEMGGVGRVTRVALIAQIGDVRRFKNKHSLIWFAGLTPSIHESGKFRASQNHIVKKGPARLRKVLYQVMMSLVMHKIPKDDAVYRFIKKKEAEGKYKKVAKVAGMAKFLRIYYGRVMHLYRDLGLAA

SEQ ID NO: 59973 - protein, 350 aa, unidentified
MIIIGVDFHPEFQQIASVDIDTGEFQEKRLTHREEAEKFYRALAGAGQKVRVGMEASGHARWFERLLAELQFELWIGDAAEICTKRVRKQKTDRQDAQLILRLLLEDRFPKIWVPSCENLDLRHLLWHRHRMVQARTRIMNQLQAVALNEGLRCKKRLWRESGREQLESFRLAPWASRRRQDLLELLDRLNPMITELTQAIEQEVEKCPEAQRLRTHPGVGVLTALAFVLIIGRAERFQCGKQIASYLGLVPLEDSSGKRRRLGHITKQGSSMLRFLLVEAAQVTARSIPEWRSRYFHLMMRRGRKIAKVAMARRLAIRLYWMWRKGWNYEQVLKFGSHAGQLGTGDGVH

SEQ ID NO: 59974 - protein, 341 aa, unidentified
MQITTIGLDIAKNVFQVHGIDRDEKVVVRKQLRRNQVIGFFQDLPPCLVGLEACATSHYWARELARLGHEVRLMPAKDVKAYIKRNKNDAADAAAICEAVRRPTMRFVQVKSADQQAQLMQHRVRDLLMQQRTQLINAMRSHLAELGIIAPQGREGVKELLAIIANEADTQLPNDARASLIVLAAQLQALQTTIGAIEKRIVVQHRANKESKRIQTVPGIGVIGASAIAATVPNPKIFRSGRDFAAWIGLVPRQMSTGGKPKLGPISKQGDRYLRRLLVVGAVSVLRRAKLHPGKFPWITQMLARRPFKVVAVALANKMARVAWALMVSGKTCRAAWFAAA

SEQ ID NO: 59975 - protein, 487 aa, unidentified
MHPRTTNIPAKTSDVYRFSFESTGVLALDNEYSGFAVSPAHYIAFAERRRARPGSTICHFGRDDVKPLPTQPFTAYVGIDWADTKHDVCLQVAGNERREFDCIAHQVGCIDEWARALHKRFGGTIAIALELAKGPIVYALQKYDFFVLFPINPSTLAKYRQAFKPSRAKDDPTDAELALDLLLRHPERFTPLHPQSAAMRTLLSLTEHRRQLVGDKTRLTNRLTNTLKQYYPQALDWFEQHDTILFCDFLTRWPTLAQVKRARQSSLKAFFHAHNGRRPGVIDARLDSIKVAKPLTEDLGVIVPCRLHVQVLVEQLRVTLHAIDRFDHAIAELAPTLPDYSLFQGLPGAGPHLAPRLLAAFGEDRQRFQGADELQKYTGIAPVTERSGKTSWVHWRWQCPTFLRQTFVEWAAQTINKSFWAGAYYQQQREKGCSHQAAVRALAFKWIRILYRCWKTRTSYDESTYLNALRKRGSPLLHNLTLNPQNA

SEQ ID NO: 59976 - protein, 340 aa, unidentified
MEMETSVVWSGIDVGKKTFFASIDIRSEAGARLALDKLPTKEFKRNLNGVNSFLKWQTELTIEHKNAIVMETTGCYSLELIAWIKMLRPDMTVSLQNARMVSDFIKSLNQPHKTDKTDARAIARFGTERNPEPAVMAEKHWRDLREFERERTALIEVRVDLENRAESLFTLVAKRANQRAISALNMEISEIEREIKLLVLEHEDIHSEVRILTTMPGVNFVSACCILAELGSLKQYDSRQISAISGLAPRIMSSGTSLNKSFMGRNGSKRLRQILYLDSMSAVNKVPLLSAMHARLIAKGKSKMTARCACMRKLLLILRAMVVNSKPYEENYFKTFPKSA

SEQ ID NO: 59977 - protein, 458 aa, unidentified
MYRELQPLRQALSAELEGTLSPAGPGIEPQHLLQSYLDRLTMSVGCDVADQTFALFAVDAAGEELGHRLDVANNPRGFERAWEWLEQLRCQHHLRITLLAMETSGIYYWAWWDFLAGRPNLARVLYNPRTTEHMTEVLSKRVRNELVDAYALAEQVRLGSTPEVLLTDDADLLSARICSRAARDLAQHINDRKNQLRALLRAYNPALCQVFPKAQLHHRAVYALLQHYLLPDEFVAAGPQPIAAILHDHCRTAFGLSDAQQLVELCRQTLTRPIGRDVLHQRVCQLTQDIRNTQQHKQLYLKTGYRLIETRPETPLLRTVYGAGISNTLALVSEVGDVHRFPDGEHLASFLGLTTSKHISGTTLFQSKHITKQGSPNGRYAAVNLAFHLSLRVPKYQQMYQRIKSRKPPRQGHFIAVVAVARDFVSNVLFDMWRFQRPFFMEVDDYRAYRRAHPRSFS

SEQ ID NO: 59978 - protein, 314 aa, unidentified
MSHLFVGVDVSKDRLDVATHPEPSSWSVPNDEAGIEDLVNRLLKAQPVCIVLEATGGLEMPAVSALAVAGLPAVAVNPRQTRNFAKAAGLLAKTDRIDAAVLARFGEAMKPEIRPVRDAAAQELHALTVRRRQVIEMLTAEKNRRGTAPKRMIQEIDKHIAWLQKSLSRIEDDLQKTIRNSPVWREKDDLLQSTTGIGPATSAMLIADLPELGWLDRWQIAKLVGLAPMNCDSGRYRGQRHIQGGRAPLRSALYMATLTAIRFNPVLAAFYQRLIAAGKEFKVAITACMRKLLVRLNAMLRDRTPWREKTPQTT

SEQ ID NO: 59979 - protein, 402 aa, unidentified
MKQLLYAGIDWASRTHAVGVVDDHGGIRARFEVPNTGKGFGGLIRRLTKLQVAGVAIERPDGPLVEAMLDAGLRVVVITPRQVKALRSRYRATGAKSDTADALLLADVLRTDGHRLQPLIPDSDATIVLRALGRTRKDLQKARVALCNQLTAQLERCFPGAVGLFADLHSATAIVFLRRYPTSQAAATLTQATLTAFLRRIHDSGHTPVAVLLARLKTAPLAAISPDQATGRAVCVQALLDAIQACHSRERELEAEIIERLEVHADQQIFTSLPKAGHGVRAAALLSEIGDVRTRFPDEEALAALAGVAPVTRASGKLRSVGFRWACDKKLRNAIIDFADDSRHASPWAASIYAQALQRTRRHPQAVRILARAWIRVIWRIWQDHTTYDPTKHGGAVRLLTA

SEQ ID NO: 59980 - protein, 247 aa, unidentified
MIAIGVDVSKSKLDIFYCGQSFTILNTKTEIRKFFNKLSLQDNCKIVMEATGKYHRLVHEVLCELTYKVMLINPFQSRHFAKAMNVICKTDIVDAKILSLYADKMEFKNTDVQTKEEFEMQDLFRHIVDLKQIKLEMECRLLESEGFIAKSLIKTIAEICKQIQQSELQLNKLISANAELNRKCQLLETIPGIGHQTAVMLLINLRELGSLNKKQIVGLAGLAPINNDSGTFKGKRVCSWRQKRCTL

SEQ ID NO: 59981 - protein, 341 aa, unidentified
MGQAHTIGLDIAKRVFQAHGADASGRVVFRKRLVRAKVLAFFAAQPPCTVAIEACAGAHHGARELGKLGHTVRLIPPAYVKPYVKRHKNDRADAEAICEAAQRPSMRFVPVKTEEQQANGVVFRARDLLVRQRTQCINALRGHLSEYGYVFPQGITHAEAVIAHVEDPDSAVPESARAVLKVLIGTFQALEAQIQALDAEITQRAKADPVARRLMTIPGIGPIAATAITALVPAPEGFRAGRDFAAWLGLTPLQKSTGGKQKLGAISKMGERTIRRLLILGASAVVRWAGQRGTPAGSWLAQMLARKPKMLVTVALANKTARIVWALLVKGGVYRAPAPAA

SEQ ID NO: 59982 - protein, 360 aa, unidentified
MQTKVNEKLFDGQSIYVGIDCHKKNWTVTILGEQYEHKTMSQNPDPDILAAYLRRNFPGADYSAVYEAGFNGFYPCRKLRQLGINCNVIHAADVPTSNKEKIQKMDPVDSRKLARSLRSREFEPIHVPEPLLEADRALVRQRFRIMKDVTRTKARVRSLLFQFNISVPDLFTLGQARSWSKVYMNWLKELQIEHESLKQTLDNYIRIGELQRNELLSVNRQVRTLSQNDTYRNNYNLLISIPGIGFLTAMTFLAQIGDIRRFERLDDLCDYIGLVPMMHGSGDKMYTGKLINRGRKELKIMIIEAAWEAVRLDPALMARFNELARRMNKNKAIIRIARKLVSRMRFVLMAQESYTLGITE

SEQ ID NO: 59983 - protein, 355 aa, unidentified
MNQEKYIGMDVHQATISVAVMDAGGKLIMECLLETKAATIVEFIRGLHGTLSLTFEEGTSAAWLHDLLKPHVSRLVVCDPRKNALLKDGNKSDRIDARKLAELLRGNQLHSVYHGEHGVRTLKELGRSYLTITQDVTRVMNRIKALYRSWAIPCAGATVYAPRHRAEWLAKIAEPGVRVRAERLYQQLDLLQPVRLEARRELLVESHKHAAVKLLRQIPSIGPIRSALLVALLQTPHRFRTKRQLWAYSGFAVETHDSGEYRSVRGKLQRNRERMTVRGLNDNHNRDLKNLFKSAAISASTHPGPLRDFYVARVEKGMRPTMARLTLARKMAAISLTIWKKGVEFDAQQLQRQTA

SEQ ID NO: 59984 - protein, 339 aa, unidentified
MHVTTIGIDLAKNSFSVHGVDGHGKRVFSKTLSRGKLLAFLAQQPPSLVGMEACSGAHHWARQLQAMGHRVGIMASRFVAPYRKGGKNDSNDAEAICEAVARPNMRFVPVKGVEQQALLSLHRIRQGLIKERTATINQLRGLLSEFGLVMPKGRYPAQHGIADILEDADNGLPMLARKLVHDVYSRLQGMNEQLLAYDRELEHLSQQSEVARRLMSIPGIGAVTATALLASVGDPRQFKNGRQFAAWLGLTPRQYTTGGKIRLGRITKKGDVYLRTLLIHGTRAVLARLTDKSDRLSVWARALIERRGYKRAAVALAAKNARILWALMVRGERFQLQSV

SEQ ID NO: 59985 - protein, 410 aa, unidentified
MELIVERPAALDVHKAQVMACVRTPDEGERTEHVEEFSTTVSGLLVLRDWLKAHKVTQVTMEATGVYWKPVWHVLEDDFELILVNARHVKQVPGRKTDVQDAQWLCRLAEAGLLRASFVPPKPIRELRQLTRYRKAQVSERQREANRLHKALEDTGIKLDCVATDILGVSGRAMLDALVCGTTDPEVLAELAKGRMRAKIPALREALEGRFEAHHALLVGAILAHLDFLDEQVELLSEAIEVKLAPFGAAAVELLLTIPGIGERTAENVIAEIGTDMAQFPSAGHLASWAGQCPGNHESAGKRRSGKTRKGSKWLNQALKEAAMAAIRTNGSYLQALYRRKKAQGGHNKALGAVKHSIVCACWHMLSTGELYRDLGPDDFARRNPERQTQRLVAQLERLGHSVTLTEVAA

SEQ ID NO: 59986 - protein, 344 aa, unidentified
MDHFAGLDVSVKETNICIVDDTGKIVREVKVASEPEALLAVLKNPAYNFKRIGLEAGPLSQWLFGALAEAELPVVCVETRHMQAVLKAQINKTDRNDARGIAQMMRVGLYRPVHVKTIRSQKLRMLLTHRQLLQSKAIAIENDLRATLRNFGLKVGMVGKVRFEARIKELVENLPDLAVLVEPLLIVRRVLREQIVILHRRLLAVVRDDEVCRRLMTVPGVGPVVSLTYRATVDAPARFRKSKAVGAVFGLTCSKYQSGEIDRSGRISRCGDEMMRVMLYEAAQSMLRSKKWSWLKAWAMQIARRRGMKKAIVALARRLAVIMHRIWVDGTEFRWTREQAPAAA

SEQ ID NO: 59987 - protein, 369 aa, unidentified
MTSIIYVGMDVHTTNYTLCSYIYGEDDVFAQVQVGPDYMNILKYLERIRKTYDDCYIQCGYEAGSLGYSLYHQLTHHGVDCVILAPTSMPETRRKGVKNDKRDAKKIAKCLANNTYSPVYVPTKDDDAVKEYIRMRDDQKDAVKKLKQRILSFCTRHGKFFGEGNSWTQKHLAWLNKLDCGNAVLNETLREYLILYHQAAEKVGLYDKRIEEIAKLEVYAERVKKLTCFIGIKAHTALALIVETGDFARFAKAHNYSSYLGLVPGEDSSGSSIQRTGITKAGNSHLRRLLVESAHSYNRGTPGKKSKTLAARQAGNEPKVIAYADRANERLRRKFHRLMYRNTKYNVAITAIAREMACFIWGMMTDNVA

SEQ ID NO: 59988 - protein, 356 aa, unidentified
MSRDLKYIGMDVHKEAVVIAVLNSSGKLVMESIVETKASSILQFIHGLRGELHVTWEEGTWAAWLYDLLQPQVKRVLVCDPRRNALLKEGNKSDKIDARKLADLLRTGMVRPVYHGEHGLRTLRELGRSYQTISQDLNRVMNRIKALYRGWSIPCAGTQVYAPRYREQWLQKIEHVGVRRRAELLYQQLDGLQALRRTLRPELLAESRKHKAAKLLRQIPCIGPIRAARLIALMQTPHRFRSKRQLWTYSGLGIETRDSAQYCYVHGQLQRTKKPQQIRGLNRNHNHEMKAIFKGAATRASCGVGPLRDFYVALVAKGMKPEMARLTLARKIAAIALTLWKKEERFDAEQLKPQAA

SEQ ID NO: 59989 - protein, 371 aa, unidentified
MNSILYVGMDVHKENYTLCCYSFDRDKVEYRQTVPSDYRLILKYLEQVRRKYPEEVEFICGYEAGCLGYSLYHQLTDHGVKCIILAPTTMGITNTNRVKTDRKDAANIARCLAFHTYSAVYVPDGEDNAVKEYLRMRDDQKLALKKIKQQITAFALRLGKQYTGGKSLWTENHLKWLRGLDLTLLEKETLQEYLITYDYLTDKLERLDARIEELARNERYGERVRRLGCFIGIKPHTALSLLVEVGDFRRFEKAPNFAGFLGLVPGEDSSGGGRTRLAITKAGNSHLRRLLVESSQSYSRGTIGFKSKELKKRQEGNPPEVVAYADRANERLRRRYYRMTLKNGAKRNVAIVAVARELACFIWGIMTDEIA

SEQ ID NO: 59990 - protein, 352 aa, unidentified
MNTSTTGGTTYSAGIDLHKGPLQLHVVDAAGTTVCQQTITHDKRRQLLAALAPYGKDVTVGVESTYNWYWVADVLRRQGIPCMLGHARDVHAQRQGKHKSDGKDAANMSQMVRMGTFPEAYASLPEWRATRDLLRKRLRLVEERTQHMQHSGCVADQYLLGEDRMADAGYGREVIADVDKAVDIDLKAQEMLTTLIDSTEKWILERAKISDKPLYELLTGTRGIGPVLSLTIMYETADITRFARAQQFASYSRTANPEYSSAGKRLGPGDRKRGNPYLCRALHMLAVQSIKYYPEVKAFYRAAVKRKGKRTARRILAHKWALAVYYMWKRRETFDVTKFLGTAYAARAQNSH

SEQ ID NO: 59991 - protein, 408 aa, unidentified
MERYYLGVDWADEFHQVWVGDLEGKKVIEKKVVENVEGLTEFGRFLDESRAKGIELWAAIEKPHGRIVDFLLDHGVVVYPVNPKALDRVRDRFRMSQSKNDSFDAYVLAEFVRTDHRHLRALEPNSDPAQELKLLTRDQHRLVRQKTRLLNQLTVTLKEYYPRPLEVFADLESNIALDFLKQYPTPHDLSNLTRRQWNRFAKREHHLGEERCKELWEQLNQPQLPVPEHVVRAKARLMGVLLVQLEALRNAVESYNARVRSFFASMPAAELVKALPGAKTGTIIATLWAELGDAKSRWESFRHLHAEAGVVPVTRASGKSRVVQFRFSCNKVMRHAAYWLAFVSLNRSEWANHYYRDQRAKGHSHPQALRALGAKWLKIIFVMWRDHKPYDENYHLANIARQKMRQAA

SEQ ID NO: 59992 - protein, 388 aa, unidentified
MNKIIYIGMDVHSTNFTLCSFEPGYGFEADKIFGQTQIKEDIFNSTVKYINKLKSMRPDVDVVCGYEAGCLGYNLHRKLKAKEIESVILAPTTMAVSRNSSKKKNDYRDAITIAKCLASSAYKAVYLPDEKDEDVRDFIRMRDDHKTALKQIKQQLNAFCLRHGHHYDKTKWTGLHLNWLRKLELSKLQRETVEEYLATYETLTSKIAALDVRIEDIASEERYAEKVNKLKCIKGIKTHTALSFVCEIGDFNRFKSADKFAGFIGLVPGECSSGNTERMLGITKAGNRHLRRLVVEISNTYRRGTVGRKSAALKERQKDMPKDVVAYADKATNRCQRKYQRMMFKGKNSNQAVAAVARELCCFIWGMMTGHHSRTAQAEASVYRSELD

SEQ ID NO: 59993 - protein, 316 aa, unidentified
MNTIAPCFVGIDIAKDRLDVCCLPSGESWFTPTDPASLKTLIGQLKARPVALVVLEASGGWEQRLLAELVAGALPTVLANPRQVRDFARALGRLAKTDRIDAAVLAHFGQSLRPQPRPQPEPENRRLRALLTRRRQLIAMRSAEKTRRMQCHDPEIKAAIVAMIQHLDRLVADLERHCKALIGSAPAMARLDALLRSLPGIGPIASATLIAELPEIGRLNRRQVAALAGVAPFNRDSGTRRGQRSIWGGRAELRKTLYMAALSASLHNPTFASLYQRLTAKGKHHKTARTAVVRKILTTLNAMVRDQKHFTPTLHP

SEQ ID NO: 59994 - protein, 347 aa, unidentified
MNLTHYIGFDVHKKHINFCCKRANGELVEEGRLVAERSVLRSWAGTRAYAWHGAMEATLFSGWIFDTLKPYAVKLEMAHPAMVKAIAAAKKKNDRIDARMIADLLRCNLLPACHVASAEIRELRRLLRYRQLVVRESVRMQNKMAGLLMECGTPFEKVRLHGKRYFSGLLDTLEEVPDSVKDLLRLSRNAFEMFQAVQKQLIQKLLSHPQLYQRVERLTTIAGIGEITALTWALEIGDPTRFASCAKVMSYCGLTSALRSSADKQQRGPISKQRNHWLQTALIEAAKLAPRWNPQLAALHARELERGHRNRATLAVARKLACYLLAVDKSCQPFQLRQPANLLPETS

SEQ ID NO: 59995 - protein, 355 aa, unidentified
MDNTKYIGMDVHTETISIAVLNSAGKLVMESVIETKALTIIQFVQGLRGDLHVTLEEGTWAAWLYDLLRPHVNQVLVCDPRRNALLKVGNKSDRMDARKLAELLYMDKLNAVYHGEHGVRTLKELSRSYLAISGDLARVMTRLKAVYRSWAIACAGKQVYAPRCRAEWLGKLSEAGVRRRAEIYYEQLDALRLLRQQVRRELLAESAKHKASKLLCQIPSIGPIRAAQLIAILQTPYRFRGKRQLWAYGGLAIETHSSADHRYVKGQLQPSKRQVSLRGLNRNHNHELKNIFKGAAIIAATKPGPLQEFYAALVAKGMRPEMARLTLARKIAAIILIVWKKGVSFDAEHLKPQTA

SEQ ID NO: 59996 - protein, 475 aa, unidentified
MEEIEFKFLVDWTKPAFYCGLDVHKYELAVAIYCKDDSQSEFLKTNIFLVDSKGLDQFWNFVSKYRPDGFAMEATGIYHHVIYRFLAKKRASVKWSFKIVVVNPADASGIPNRQKNDKIDAENLAKYLAMGLLKSGQPVIEIIEDLKAIFRMALRIEKDRTALKNRIKKTLDRAGVRPKGLDLNLEWVREFLHYFIGGEMTLGERITQIQADLEILKLHRYKIFKNIKKFVPYYDFKLSSAQRSMIRQDLVELDFKTARKRLLAVEIDQLILERPALREHAFNLSTIPGISPFSAVWILAETGNISQFHKVKPFLAYCGCAPRIVSSAGKVYSAHISRHSNSYLRTIFYNAAVVVCNLVKKESVLKEYSKRIIERKHTVSMTLVYCIVAAKIARITYAILKNSVQFNPRHGWDFDRRSSMDGGFKFSLTSKNLIRRARNSLRRVNDIQELGSLGEHVSILAEQLDLVLQRKKFSD

SEQ ID NO: 59997 - protein, 445 aa, unidentified
MDEPREELRDETVARVAAIDIAKNSGVVCLRLPNEAREGARTQKVWTVAATTNAILGLGDHLVCQGVELVVMEATGVFWQPFYYLLESRGLRCWLVNARQVKNVPGRPKTDKLDAIWLAKLTERGMVRPSFVPSQPVRHLRDFTRTRTVFVRERSRHKLRADKVLQDAQIKLSSVATDPFGLSGRAMMEALIAGERNPRTLANLAQGRLTAKHDALVEALTGQFDDHHARLLRLLLTTVDHLTAQITALDQDIAATLAALPDPRSDAPDHSPSPAAASFGDDLLARLDEIPGVGPTSARVILAEIGPDMSVFPTPAHLASWAKLSPRTIQSGTKSTTGPAGKGNPWLKGALGEAASAAARTDTFLGARYRRLVKRRGHAKALVAVARSILVIVWHLIDDPHAHYQELGPDWHQRHLNPRRKTRDLVRQLEHLGHQVTLAPSTDTA

SEQ ID NO: 59998 - protein, 398 aa, unidentified
MILVGVDVASEKHDVSIMRDTGEVIRDNFTVPNKESGYKKLLDEIEKAEKLYPDDKVRIGLESTGVYSMSLTEFLATHYEDSVILINPILTSMFELSCHVHYAKTDKTDARGICKFLSKNEDIRPYAIVSYHTRQLRALYRERTKLNKRLNQDINRLKGQLHIAFPELLDKKHATIGPFELEFLSRYPTADSIRNMKPEKLVASFSKVKYMRIDIARARRLIEAAKTSIGCSAHAEGFVIKETVERIKLYRKQINELSEAMVPLVKEEHGNLLTIPGLGAVTVGGIVGEIGDASNYHGSDCLVAMAGLNPKVYESGNYAASHTRISKRGSSYLRNALYMAAQSMYMHGAEPIYSFVNKKRKEGKRKVCALDHAARKLCNIIFSMMKTGSEFIPSSANS

SEQ ID NO: 59999 - protein, 360 aa, unidentified
MEKIITPIGTPVGVDVHKRRCTVAEFRQGKIKMRKPIANTREEWLEMLTELPPDAEIGLEVSTAGYFAMSVLEEAGWGERAHWIHTAGIDSNRRQKNDRLDAQRLARKLAAQHLDPLPEAWFPPPEIRMLRLRARARCWLARLRTQCKNHLQSLLQMHGLLAPGSDPFGAAGQKWLAAQKLPPPLAESLPQIQRLLKLLEEEIAISEQHLRAVEKQYPELVLLRSIPGIGALLAPVIWSEIGTIARFRSAKALANDTGLVASFYDSGDVQTSGPITRHGSRWLRWAFVTAANVVIQYRNPFARRYHRLRRGKKPNVAKAAIAHSLARCVYGVLKHGCPYREDRWGRKVGALEQETRGSHR

SEQ ID NO: 60000 - protein, 356 aa, unidentified
MLPITPDDTGLDVFGGVDTHQDTHTAAMIDLVGRVLGTEQFPATASGYAALLAWMRGHGRLGRVGVEGTGAYGAGLARLLRDEHVEVIEVDRPDRRTRRFQGKSDPIDAVQAAKAALAGQRTGIPKQRDGRVEALRNLRVARRSAVEQRADTQRQIKTLIVTAPDQLRSQLRGLSTTKLITTCAGLRPDRTDAANPATAVTLALRSLARRHQQLSTEITDLDDLLEPLIATINPGLLAANGVGADTAGQLLVSAGENHGRLASEAAFAMLCGVAPIPASSGKTTRHRLNRGGDRQANAALYRVVLCRLRWDPRTRDYMQRRTKEGLSKKEIIRCLKRYIARELYQIITANDLELAA

SEQ ID NO: 60001 - protein, 351 aa, unidentified
MLLIGVDYHPSFQTIAFFVEETGEYGEQELNHSDGQAEKFYRDLRQRGICVRVGMEATGYSRWFERLLAELGFELWIGDPAEIKAKRVKRQKFDREDARLLLRLLRENNFPQIWVPDPENRDLRQLLWHRHRLVQMRTRIMNQLHALAMNEGYRWKKKLFSEQGRAQLEKLALAPWASRRRQELLELLDRMNPTIAELTAAIEREARKRPEAMRLMTHPGVGSLTALAYVLIIGTPTRFQRGKQIGTYVGMIPCEESSARKQRLGHISKQGSSLLRFLLVEAAQAASRIQPDWRRRYMHLAMRRHKSIAKIAMGRRLAIRLYWMWRNGCEYSPSLEFGSYAGQLETRNGVK

SEQ ID NO: 60002 - protein, 429 aa, unidentified
MQNESTPGARGPVFCGVDTHADSHWLCVLDWRGRKVLSRQFPADAAGYEALAGAIAAAGEPACVAMEGTSSYGAGLTRHLASLGMPVREALSPARTQRRRPGQGKCDESDAERAARAAMSGSKLGTPKSQDGWVDGVRCMLAARSGAVKARTSAINTARSLLTTAPEGLRSRFRGMAGPRLMEELPSVRAEGALGAALGALADLWAAARDAALDMERAIEASLEENCPALLAMYGCGPVSAAKLAVAAGDNPGRLRSEASFAAICGACPIPASSGKTVRHRLNRGGDRQANSALHEIARQRVMRDPETAEYAERARARGKSDREVMRCLKRYVAREAYRALMRPHEVRRPEDASGLVAARRAAMVSQVRAASILGTSEKYISMLERGQRELKPIRRAYEAWVEAGLPLDWDRQAFEAERKMDSKKHLAK

SEQ ID NO: 60003 - protein, 422 aa, unidentified
MHPFERATRAQTARAVVGVDAGKFEHALVIRPRGQPDGKPLRFATTRAGFTTALSALHAAMSGGSPSEVLIAIEFAGYYGFTFAHFLHAQGFPIVSVLPAHTKRYKEVVHGQPLKTDEKDAATIVALAAQGHYVTFPFLASDYAALRYLVSARERLSTQRRGTITRLKSLLQVVWPEFETIFPNFGKATPLVLLGAFPTPADLLEARKARVLAVLRQASRGHHAEATYAALRDSARATLALPGAQRTLGDELRLLCAQFALYEQQIATLEAAMVRAMAPLPEVPCLLSIPGVAPVTAAIFLGSIGDPAAYGSSREILKVAGLSLLTRQSGIQRGRDRISKRGRPVLRQHAYMLAVRSIREGGLFYAEYQGLLARGHATAKKKAVVAVSRSALKLLFAIARDRRRFTVAPPPRSGPSRIAGGP

SEQ ID NO: 60004 - protein, 336 aa, unidentified
MVYKKLNSTGTLDASGQVHREGTIGAARNELDWWLKTLPQPRMMAMEATIFTGWIYDHLLPHAEQVKVAHPLMLRAIAASKKKNDRIDAGKIADCLRCDFLPECHMASTEIRDRRRTLRYRHLLVRQMVQMKNRISGLLLETGVSHNKQRLHKVGYFRELLSSNEEVHENIRPLLRLSRETIVRCQKTEHALVSSLERDPLLAKRIERLKTVPGVGIITALTWALEIGDVSRFRSVKQAISYCGLCGAEKSSAEKVLRTPLSKQRNKHIQHVLVEAAKLAPRQSHELALIHEREKQKGNRNRATLAVARKMVAYLLAVDRREREFVPAEDPSTVAA

SEQ ID NO: 60005 - protein, 366 aa, unidentified
MKKTSTVQALKNDLFKGRKLTIGLDLGDRWSFYCVLDEAGQIILEQTLPTTPEAMKQTFGKIPRSLLALETGTHSPWVSRLLSELGQEVIVAHAQKVQWITKSNRKDDRHDARTLARLARVDPELLGPVRHRSAQAQLHLTVIRARAELVRARTALVNAARGLVKSYGQRLPKCGTYQVSEKLGEGLSAELREVLVPLIQEIESLNGHIKEYDERMEKLAKEVYPEVSLLKQVKGVGTQIALTYVLTIEDPHRFAKSREVGCFLGLRPGRRNSGESEPQKGISKEGDRYLRTMLVQGAHYILGPFGEDSDLRRWGHKLAERGGKNAKKRAVVAVARKLAVLLHRLWVGGEVYEPLRNSQKAMGEVA

SEQ ID NO: 60006 - protein, 410 aa, unidentified
MQTLVERGCGLDVHQATVVACLLIVLKSGKVHKQVRTFGTITRDLVDLREWLLSEGCTHVAMESTGVYWKPIYTILEGAFEIVVANAQHVKKVPGRKTDVKDAEWIADLLCHGLLRASFVPPKPIRELRDLTRYRRKLVESQAAERNRLLKVLETANIKLASVATDVFGVSGRLMLRALIEGKATTQEMAELARGRLRQKIHELEPALEGKLEDHHRFLLRLQLERLEAAEKDLTVLEQCIQEKLKPYAALLALLKEIPGVDWTLAAAIIAELGVDMSVFENVSQLASWAGVCPGVNESAGKRKSSRTPKGNVYLKTALVEAANAASKAKGTYLRDKFYRLKARRGYKRAAVAVAHKILVAIYHMLSHRVSYNELGDLYLDKLNKHHLTRNLVHRLERLGYTVTLEQKAA

SEQ ID NO: 60007 - protein, 348 aa, unidentified
MSQNSNTSIAVAGIDIGKNSFHIVGLDQRGAIVLRQKWSRGQVEARFANMPRCLVGMEACVGAHHLSRQLKALGHDARLMPAKYVRPYSKGQKNDFRDAEAIAEAVQRPTMKFVATKTADQLDLQALHRVRERLVSQRTGIINQIRAFLLERGVAVPQGLRFLRAELPRILATPPDVLSPRMVRIIEDLTGDWRRLDERVQNLSDEIEAVARQDAGCERLMSVPGVGPIISSAMVAAIGAGDGFSKGRDFAAWLGLVPKQISTGDRTILGKISRRGNRYLRVLFVQAAWVVLIKPKSWERHGLKPWIEAANKRLHRNVLAIALANKLARIAWSVLARGRGFEARPAVA

SEQ ID NO: 60008 - protein, 400 aa, unidentified
MHKESVTACVLWAEGSGKKRKAKRQFGTMTRDLLALADWLRDCGVTHVAMESTGVYWKPVWNILEGQFEVLLVNAQHIKAVPGRKTDQNDAEWIADLLQHGLLRSSFVPPIPIRELRDLTRYRVSLAHECNRIANRIQKVLEDGNIKLASVATDALGASGRAMLKAMIEGEEDSGKLAEMSCGLLRRKIPELQQALEGRLRDHHRFLLRELIEHLEFVESKMARLEEVIGEHLRPFEEEVERLRTIPGVDWVTAAGLIAEIGVKMEQFGDAEHLSSWAGLCPGSYESAGKRKSGKTRKGSAWLRRCLCQGAWAISTKRGNYLAAQFRRLAARRGKKRAIIAVAHTLLQIAFYILRDRKCYRELGADYFDQLHPNRVKRYLVKRLERLGFQVSLEPAAQPA

SEQ ID NO: 60009 - protein, 388 aa, unidentified
MQFAADRLEAPTAIRTDLGAIFISLELSRSSWVVTSLSPGGGEKMSKHTVRGGDVAGLLKRFVQLREKAKGRTGKVFPLIVIQEAGLDGFWIDRVVQNEGIESHVVDPASIATSRRRRRAKTDGIDGEALVRALLAYKRGEPRVCSMVRLPTPEDEDRRRLCRERKVLIAERVKHVNRIKGLLFSQGVSGYEPLRRDRRERLDALQTGDGRPLPPHLKGQVHRELDRLKLLIAQIKTVEAERDALLAVEQTTAPVPPAMLLGVKGIGPEFAAVLWSEGLSRPFENRRQIAAYAGLAPTPWQSGSVDREQGISQSGNPRLRTTMVQLAWLWLRHQPDSALALWFHDRVKRNGGRLRKTTIVALARKLLVALWKYVTAGVVIEGAVMKTA

SEQ ID NO: 60010 - protein, 481 aa, unidentified
MAAKKNAKTGTDRDGAAAAAEHGGDGAEVAEDRVQVVERAAAIDVAKGSGMVCTRVPGSRPDRRRQKVWQAGATYAGVTALMDHLRCEGIQRLVLESTSDYWRIWYYLAEAAGLEVWLVNARDVKHLPGRGKSDRLDCVWHCKLNERGMLRRSFVPPEPVRDLRALTRTRARLAQDQARHQARVEKVLEDALLKISVVISDLFGTSGRRFLDALVAGERSPAALAALGDRRLKATRRELEDALTGRFRDIHALEIGTHLRLIDAINAEITRLDEAIGQQLAQVPRTAPCCTACGLAGGGHAPGCAGQGTPPLSLARRLDEITGVGECNARVIIAELGTDPSVFPAPGHAAAWARLTPRSRQSGETAKPGRTGKGNRYLRGALGQAAMTAARTDTRLGALYRRIARKRGKQKAIVAVSRVICEIAWILICDPAARYQELGPDYYRTRSPARQTRDKIREIERLNPGKKVILADAGPAASGAA

SEQ ID NO: 60011 - protein, 359 aa, unidentified
MQLCRFLLKRYKGMKKIFIGIDFSKEKFDATVIKAEGVEERAERKHEVFDNKVSGFLRLIRWVKSVQDERDRSLWLFCGENTGGYSKALCNYLYGSGYDMWLENALSIKRSSALQRTKSDKADSGIIAEYAMRNYDQMRLYKPLGKNLERLREVFLYRHNLVKLKAGMTTRKVEKKLTQEKSDISRFMAMSSKHLISEFNKKIEECDMRIQKIISEDEELRRNFEIITSIPGVGTQNAVCLMVYTDNFGRFDYDSRKIACYYGVAPFGRQSGTSVNTPPHVSPFANKLIKALLTQAALASVNFCPQMAIYYHRLVEAGKKKPVAVNNIKNKLLHIITAMVRKGEKYNPDHDYYAALKAA

SEQ ID NO: 60012 - protein, 366 aa, unidentified
MLRKAGLSEEADPENYLGGSSKTMYYIGLDVHKKTISYCVKDAAGCVHGEGKIGSTRRELDAWIRTLPQPRMIAMEATIFTGWIYDHLLPHAEKVKVAHPLMLRAIAAAKKKNDRIDAAKIADCLRCDFLPECHMASTAIRDRRRTLRYRNLLVKQKVQMMNRVSGLLMETGVSYNKRRLHKVGYFAKMMATNEEVSDCVRPLLRLSREHIDRAQRLDYALVSSLERDPLLAERLRRLRTVPGVGPITALTWALEIGDFTRFRSVKEAISYCGLCGDESSSADKVMRMPISKQRNKHIQRVLVEAAKLAPRESHELAVVRQRELERGNPNRATLAVARKMVCYLLAVERRKQDFVPAEKFKQVAAA

SEQ ID NO: 60013 - protein, 326 aa, unidentified
MKAHPVGIDVSAKELVLTSDRSRNARFDNDPAGHKKLIRFLTKGGRAAQVVIEATGVYSLDLALALHRAPRIEVMVANPRAVANFAKAYLQRSKTDPLDAEVLLEFARRMPFTPWVPPAPEHLDLRALSRRIAALTKTSQQEKNRLHAASQCSEVTPLVRRDIEVNIRHLERRIEHLRHQALALIEEHAPLQEAFELLVSIKGIADASAISILGELVTLPADMTVRQWVAHAGLDPRHVQSGSSIHKPARISKAGNKYLRAALYMPALVAIQHEPNVAAFYDKLVARGKTKMQANIAVMRKLLHAIFGMLKNGANFDGEKFYAINA

SEQ ID NO: 60014 - protein, 411 aa, unidentified
MRLFVGLDVSSFDMRVCFLDGEGTKLDTFAVSNDLPGATFLKERLLERVTDQEVDVLKIGLESTSVYSFHPSMFLHHDKDLKRFGAQVFVMNPKQIANFKKSYSDMDKTDEIDAFVIADYLRFGRNQLSVVKESQYMALQQLTRSRYHLVKAMTKEKQHFLQHLSLKCNTFTQEVDSSVFGNAMMELFLEKFSLDEVAEMPLEELAAFLQEKGKNRFDDPACIAAAIQKAMRSSYRLDKVMEDSMDIILGTSIEIIRTFTKQIKEIEKSIKRIMAGLSQTLDSIPGIGPVFTAGIIAEIGQIERFEDESKIAKYAGLYWRKHQSGRFTGETTSLSRNGNVYLRYYLVEAANRVRTQVPEYEAFYQKKYREVPKHQHKRALVLTARKLVRLVDALLRSQQLFTPGKGREAMT

SEQ ID NO: 60015 - protein, 427 aa, unidentified
MYRIAGIDVHKKKLAVVVSDVEVHGEYQFERCWFGANPEQLRFLSQWLAEHQVEEVVMESTALYWKPVWGALERYWQPICQKREGAGATSGILHLAQAQSNRGPRGRKKDFRDAERLVKRLVADELKLSFVPDWEQRLWRTLTRRRYQLTRARVQLQNQLEALLEEAHLKLSSLVSDLLGVSARRMLQAIADGETNPEALAGLADRRLRATPEQLSDALGACTELHAVYRRLIKMMLGELKVIEEHTAELNQELATLLRPHQDAVERLAEVPGLGVDSAQQILAEVGTNAAVFASDKNLCSWVGVCPGDEESAGESSSHRSPQGNRQMRRLLNQAANAAVKTKGSIFEIVYRRLVPRLGHNQTIGAVAHRLCRLIWLILRKGVRYEERGPAVSQRSRQNRTSKMIRELRTLGYRVEFLNAVPSNPMP

SEQ ID NO: 60016 - protein, 457 aa, unidentified
MLPVSGLPSEFEQINLNAAGIDIGAQKHYVAVAKGRDPEGRDIRHFDTFTVDLHALADWLKQCGIDTVAMESTGIYWIPLFEILEQNGFDVRLVNPRSIKHAPGRKSDVVDCQWIQQLHAYGLLTSAFHPDDQISVLRAYHRQRTMLVNHAGTHIQHMQKALEQMNLKLTNVISDITGTTGMKIIRSLLAGERDPKKLSKHRDPHCKKSEKEIAKSLHGNWRDEHLFALQQAVALYDFYQTQIMDCDKQIQAQLCRFEDRSDTGELPPAASKSSGSGKKLTFDAREHLYRMAGVDLTQIVGLNTPTVLTVLSEVGLDMSRWPTAKHFASWLGLCPGSKISGGKNFSSKSKPSANRAAHAFRMAAYSLHRSQSAIGAFLRRKKAQLGAPKAITATAHKIARIFYEMLKTRTEYKDLGVDYHQNRYKERMLRNLKHKAKEFGLELVNPNQDQLVMANSE

SEQ ID NO: 60017 - protein, 352 aa, unidentified
MRYYIGCDAHKKYSVFAGISEAGEVIPAQRVDHDRESFRRFLTTSLPRSEIAIESVGNWYWLVDEIEKAGHTPILTHAAKAKLMMGQINKTDKLDARGLAILARNGTVPAVWIPPGELRDQRELPRMRMAMSQVRTKFKNRIHSTFAKYAITFDEVTDIFGGKGRKLMEDALDELPPETRRSVREQLLLLDQVEDSIRKAEKRIRQVIKVDDTMQLLQTMPGVGPVLAIVIALEVGCADRFPTAENLASYAGKVPRVSSSGGKTRYGKVRPDVNRYLKWAFTEAANAIVLQQNRCPDRHVVRLYQRVRKHKGHAKAVTAVGRHLAEATYWMLKKNEPYREPGGEHPISSTQR

SEQ ID NO: 60018 - protein, 415 aa, unidentified
MKNENYAALVALDWGDKTHAFARQLGGAECIEQGSIAATPEALHAWLEALGKIHEGKPVALAVEAGRNSLLHALLEYPWLTVYPVHPATSARFRTAFTPSGAKDDGPDAVVILTLLRMHRAQLTPLVLDTAQTRELAALVTARRSAVDQRTSTVCQLTSVLKSYFPQALTLAGDDLAKPLALAFLRRFSELAAVQKAKPATLRAFYCKHHARSEERIAERLALAAKARALIADRAIIGPAMLEVALLVDLLEVHARHIALLETRIAEAFAAHPHAELFAALPGAGPALAPRLLVAFGDQPERYPTATSLQKYAGVAPVLERSGQKKWTHWRWAAPKFLRQSLVEWAGQTVPRSAWAHAYYHRQRRAGKAHHAVLRALAFKWIRILWRCWHDQVPYDETRYLATLAKRGSPLITAA

SEQ ID NO: 60019 - protein, 313 aa, unidentified
MTEHTIGIDISKSHLDAFRLEDQAAKRLENSRRGLQALIKWLGTTSVTRIVFEPTGPYHRAFEKALSGKFPLVKVNPLQARRFAEACGTRAKTDAVDARTLARMGAALALEPDEPVSEKLLEIRDLQISRTALVKERTRLRNRGQVQCNAILKRQTETRLALVERQIAELDAEIAKRIDEDKPTARKREILCSVPGLGPIAAALILTFLPEIGTLDRKKVGSLAGLVPHSRESGQWKGKSFISGGRKPLRDALYMPALVAMRFNPDLKAKYTALREAGKPAKVAIVAIMRKLLETANALVKGDRLWVKKPSCA

SEQ ID NO: 60020 - protein, 343 aa, unidentified
MDHFAGLDVSVKETSVCIVDDAGKIIREVKVESEPDALLPVLTNPSYRFKRIGLEAGPLSQWLFSALAEAGLPGICVETRHMRAALKAQINKTDRNDARGIAQMMRVGLYRPVHVKTLRSQKLRMLLTHRKLLQSKAIAIENDLRATLRNFGLKVGVVGTAKFEARIRELVENLPDLAELVEPLLIVRRALREQIGILHRRLLAIVRDDEVCRRLMTIPGVGPVVALTYRATVDVPARFKNSKAVGAVFGLTPSKYQSGEVNRTGAVSKCGDEMMRMMLYEAAQIVLVRSVKWSWLKAWAMKIARHRGMKKAIVALARRLAVIMHRIWVDGTEFRWTRDVAVA

SEQ ID NO: 60021 - protein, 376 aa, unidentified
MPRQPDGVPVSKTVAKPGAPRRRPNLQNPNGWQSTSSNRTARTDASGRPAKATNEQKGMVVHVGIDVSKHHLDAHVHESGQAFRVSNDDAGIEELLRRLSEVEPARIVMEATGGYENASFAAMSVRGLPVALVNPRVTRHFAKATNRLAKTDQVDAACLAEFAATLQPKITPLPDEDATELDFLITRRRQLVDQLVAEKNRRSGPQLQRLDGDSRVKQSVDRHIAWLEKEIAKFDDQIQQRIQSSPAWKQKDELLQSVPGVGPTTSANLLGHLPELGQLDRKQIAALAGLAPYNADSGQRSMPRHIRGGRAAARTALYMATVAAVTHNPTLRTFHRRLLAAGKAGQVALTACMRKLLTILNAILRDNRPWSAALNP

SEQ ID NO: 60022 - protein, 410 aa, unidentified
MRRCIGLDVHREFAEVAIWEDGVVRSAGQIATTPEALRLFAGSLCELDEVALEATCNTHAIARLLERHVGRVVVSNPAKTRAIAEAKVKTDKVDAQVLAELLAANYLPGVWLADDETQSLRRQVARRAHIVRQRTRLKNRVQSILHRNLIPRCPAADLFGRKGRIWLAEQELPVDERQALEALLRQLDFHGEELGLIDADLAKVALARNEVKRLMTIPGIDATVALSLVAAVGDFGRFRTPQQLVSYLGLNPRVRQSGGQPASHGRITKHGRAHARGMLVEAAWVAAKIPGPLHAFYERVRARRGMQIAVVATARKLAVLCWHLIARGEDYAFQRPSLTAQKLRALELRAGMPSRRGQKGKAAAYSLREVRRRENALAEQGEHAYRQLVADWQAKARTKVGAGAATGERL

SEQ ID NO: 60023 - protein, 364 aa, unidentified
MDQPLKDGVIMRQHRISIFKKRRRSMKDIKILGVDIAKDVFQLCGIDEWGKVIYTRRVKRAQYVSTVASLKVGCVVMEACGGANHWYRTFMGMGIPTQLISPQHVKPYVKSNKNDRNDAQAIAEAASRASMRFVRGKTVEQQDVQALLKIRDRLVKSRTALINEIRGLLQEYGLTMARGAKRFYEELPLILASEAVGLTPRMKRVLNCLYTELLNRDEAIGDYEEELKAVAKANEDCQRVQSIPGVGYLTALSVYASVGDIHQFHRSRQLSAFIGLVPRQHSSGNKEVLLGISKRGNVMLRTLLIHGARALLRHVKNKTDKKSLWLKALIERRGMNRACVALANKNAPIIWALLTRQETYRCGA

SEQ ID NO: 60024 - protein, 391 aa, unidentified
MTYVGIDVAKDKHDCYIVNSDGEVLAEVFTIPNDQIGFNLLFQKLQSVASDLGKVKVGLEATGHYSYNLLGFLLDKGLHTYVINPLHTNLFRKAEGLRRTKTDPIDAHTIAGMIMSNVDLTSYTAKSYHNEKLKSLTRYRFDKVQDRARLKTSVARLVNILFPELEKLVPTLHMNSVYALLSEFPGAKQIASCHLTRLIHLLSESSKGHYNRNKAIEIREAARSSIGSVMPAKSLELKHTIHLIEVLSEEIDEIETLIKEIMDENPSPILSIPGISYRMGAMILAEIGEFSRFNSPDQILAYAGLSPSTYQSGKLTNAYPHMEKRGSRYLRYALFNATKCVCNWDPTFAAYLAKKRAEGKHYNVAISHTAKKLVRVICALQKSGKPYCPAT

SEQ ID NO: 60025 - protein, 387 aa, unidentified
MAQPNNLNKSLAAFDPNNTLVAVVEMSQSSWLVGGVVPGVDRQPLKKLQPDEHALFELLSRWRDEALKAGCRITRTAVAYEAGRDGFWLARWLLAAGIEAHVIHSSSVAVSREHRRAKTDRLDTGLLKRSFLGWLRGDANHCTMAAIPTLEEEDDKRANREHQTLVGERTRLINRMKGAMTRLGVRNFKPTLRNAAEYLPNLRTPNDEPIPPKTQAELRRDLLRLRLIKSQIKEIETARDQEMAKAPDHGTHPMMRLLAKIMGIGIETADMLVHEVLSREFRDRRAVARFAGLTGSPDESGKRRREKGLAKAGSARIRRGLIQLAWRWLWFQKDSALTQWYRARTVDGRRDTRKVMIVALARKLLIALWRLVKTGEMPEAAVLRPTS

SEQ ID NO: 60026 - protein, 355 aa, unidentified
MNQEKYIGMDVHQATISVAVMDASGKLIMECLLETKAATIVEFIQGLRGTLALTFEEGTSAAWLHDLLKPHVSRLMVCDPRKAALLKEGNKSDRMDARKLAEMLRTNQLKPVYHGEHGIRSLKELGRSYLTITKDITRSMNRIKALYRSWGIPCGGTTVYAPRHRGEWLAKIVEPGVRVRAEHLYQQLDSLQPIRLEARRELLHESHKHAAVELLRQIPSIGPIRAALLVALLQTPRRFRTKRQLWAYSGFAVQTHDSGEFRYVRGKLQRNRERITVRGLNDNHNKDVKNLFKSASISASTRPGPLQDFYVSLVAKGIRPTMARLTLARKIAAISLTIWKKGVNFDPKQLHRQAA

SEQ ID NO: 60027 - protein, 333 aa, unidentified
MKDLASYKNFIGCDVSKNTLDFAIHAKGTDYRQFIHVQVSNTKEGLAQFLKWLKTNKIRVKEAVVAMEHTGIYSEALSHWCDAKQLAFVLLHPLDVKNAYSRGRNKTDKVDSQFIADYTYTMREKLETSNVESPIINRLRQLYNERRLAVRTRTSYLNQIKTVTAPDAIRRMEKTITHLTNEIKLIEMELTKLIDEDKKIKNNFRLLLSIPGIGLINAVLTIISTGNFTRFQTSRQYAKFCCVSPLSRQSGTSVNGGEHVSCAGHSEIKGILTDAARSAIQHNWQLRAYYERKRAQGKSHGCVMNAVKFKLICRMFAVIGRQTEYAETEAFRS

SEQ ID NO: 60028 - protein, 341 aa, unidentified
MNKVAVVAIDLGKHTFHLHAQDDRGHELYRKKFNRAALIQHLANLDPCTVAMEACGGAHFMAQEVSRLGHIPKLIAPHLVRPYVKSNKNDFADAEAICEAATRPTMRFVPPKNQAQQALAMLNSTRDSFIKERTATVNRIHAALLEVGISLAPGFKSIKDLPALLEAHPLPDSIKKLLTRLREHFNYLHEQVKALDKEVECQAAEDDLAVRLMTMPCVGPITSSVLAAELGDGKQFKCGRGYSASIGLVPKQHSTGGKTVLLGISKRGDRNQRRLLIQCARVYLMQLDRQKGALADWVRRLWDNHHSNHVVCALANKLARIAWAIAAHHTEFDAGPGAMNA

SEQ ID NO: 60029 - protein, 348 aa, unidentified
MNSCFENKDIYVGIDVHKKRWVVTVRTYDLELKTFSMQPIAEELEKFLVDNYKDALLHIVYECCFSGFWIYDYFNERGYKIIVTPTNRIYRDGSVVKTDKIDSRKLAFQHSRGLLREVKVPKMKIREYRSLFRIYDKEKMRLGQILRQVRSILEAKNHPLKWERWNKEMVEKLREVKFQEGIFNKKFSSLLNEYDYVKEQIRDTEKRIEEISEEEELGERIKRIEKINGIGIVSAVRLVVYLFDRKGRFESGEKLVHYVGLTPGEHSSGEAIIRSRTGLVGNKQLRSIIIQLAWVAVRKDGNLLNKFERVYKKSGSKQKAIVAVARKLMMKVYAITEKEEDYEINIAA

SEQ ID NO: 60030 - protein, 446 aa, unidentified
MAALARWVGRAIGLDVHRDFCVVAICEDGRVRSAGRVPSTPEGIRTLAESLLPSDRVALEVTGSCWEVARILEPHVQRVVVVSPDDTGISSARAKTDKLDARTLASLLWKGELEAVWMPDERCRILRRRLARREQLMRARTRVKNEIHAVLQRRLQERPPCSDVFGVKGRQWLAGLELPPEERESVDAGVRQIEFLDSEIAAVERLIAQQALSWPEIRRLMTVPGVNLVCAATFIAAVGNANRFLTSRKLVAYLGLDPKVRQSGEAPARSGRISKRGSASARWALVEAAWTAVLQPGPLHAFYERTKARRGHGKAIVATARKLAILFWCMLTRSEDYAPTTIADPQETPPPGDHRRRGEEHSSRRRDLVHQRDDARSRTRTRAPSRGLLQADGHRPTGRCASEESGRGRDTGARINKALEGQSRAADHKLLTSALRFVSHPRPPTT

SEQ ID NO: 60031 - protein, 404 aa, unidentified
MIFVGLDWAEDHHDVCVMDEAGEVLGKRRIADGVEGVAELHALVGTHAQEPNEVVVGIEIDRGLIVAALLSAGYEVYAINPLAASRYRDRHATSGAKSDPGEAKVLADLVRTDRHNHRQIAGDTELVEGVKIIARAHQNAVWGRQRQVNALRSSLREYYPGALAAFETDLSSSDAISVLSIAPTPLLGRQLSRSKIISALRRGGRTRNVEKRAAEIQIALRAEYLEAPPGIGEAHGEVARSSLSLIEAYTKQIATLEVSLDERFEQHPDAKVVLSLPGLGTVLGARVLGEFGDDRTRYAGSKSRKNYGGTSPVTKASGRSRVVLARYARNRRLATALDRWAFCSLTHSDGARRYYDDLRARGKTHGQANRQLANRWVGILHHCLERDELYREDIAWPRGPELAA

SEQ ID NO: 60032 - protein, 352 aa, unidentified
MVIVGIDAHSQSHTAAAVNEQGRALATLEVGASPRELDRLITWIEQLGEVKIVAIEGAKGFGLPITRRLLGGVVEVVDVPTHLTALGRRSSRSRGKDDAADAVTIARMALREPGLPRLRPSHLASDLKLLVDARDQLVAEGTRIRNRLHALLLALAPGYRVETGALSSRVALRTARRLVRAGAATDPIRARLALGAIRRLKAIDAEAAELEHEIAGMVEATGATSLRAICGVGPIVAGKILGETHDVDRFPSAAAFAAHSGVSPIPASSGTTTRHRLNRGGNRQLNRALFTIAMVQARWDSQGRTYLARKRAEGKTPSEARRCLMRQLAGVVYRAMVVDAAARQQDRLSGVA

SEQ ID NO: 60033 - protein, 374 aa, unidentified
MENTITYVAMDTHKKQHKIALHYPCQEEIVEFTINNTVRDIKKMVNKIKKQAPGKVEFCYEAGVCGFTLKRRIEQFDCRCIVIAPSLVPRKPGDRVKTDRRDARKLLMMFKAGLLTEVHAPNEHQEAARELTRLRETARDNLKRIRHQLLKLLTRHGYVYTDGRHWTQKHITWLRTVEFAESTLTNVFENYFNEMIYCIGRLENLDKEVGLLAGSPEYKEIVGLLCCYHGIDTLTAITIITEIFEFGRFESPRHLMSYLGLTPSEDSSGENQKKGAITKAGNKRIRRLLNETSWHYRHRYVPSAALKKRRKGQPQWAIEIADTAGRRLSTRHRYLTNKGKMPCKANIAVARELAGFIWFTVTQYQARKNTNDAA

SEQ ID NO: 60034 - protein, 347 aa, unidentified
MVTLGADPHKQSHSLVAVDDTGRQLGAHTVPATSAGHLDVLRWAQCWPERRWAVEDCRHVTRGLERDLLNAGEVVVRVPPHVAAEGRRSVRERGKSDAIDALAVARAALREPNLPKAQLEQHAREVRLLLDHREDLVGERTRIQNRLQWLLHELEPGFQVANGALSRRPAIRRVEGLLEGRAGIVAELARELTARTAQLSTRIGELEQQLAGMMPALSPSLLALAGCGILTAAKLVGETADVRRFRSRAAFAMHNGTAPIPASSGNQQRHRLNRGGNRQINAAIHRIAVSQIRRSGRSRDYFQGRLAAGNTKREAYRALRRQLSDEVFKLMLADQRTHASSAQSAAA

SEQ ID NO: 60035 - protein, 341 aa, unidentified
MAIVAGFDVHRAQITFDALDTETGEVSLGRIDATPAAVTRWLARFEGDVDVAVEACTGWLFVCDALVAAGAVPHLAEPVEARALRGRKRRANTDREDARWLRELRAEGRLPEAWIPPEHVRQWRSRARLRHTLIGERTQWMQRIQATLFHHGISGTPEKLRTHAGRAFLDALELPADARERIEIALAMVDAIDAQIAPLERELRQLARRQTGCRALMGLYGMGELTSLVTLCELGDVGRLSASRKAVRMAGIDIGVHRSDRRVRAGKLTRQGSPQLRWALYEAALSACRPSSPDHADYLALKARGLSHTRASLTIARKLARRSLHVLRKLGPAALESVATP

SEQ ID NO: 60036 - protein, 408 aa, unidentified
MNAVGIDVSKGKSMVAALRPMGEVALLPQEFLHTEVGLEQMAYAILALGEDTRVVMEATGRYHEPVAAALHEYGIYVCVLNPLFIKQSGGGSIRKVKTDKADAMKIAKYGLDNWVDLREYTPMDTVRQQLKLCSRQYNLYMKTVVSLQNNLISLTDKTFPGVNELFSSPERADGHQKWVDFVMTFWHCDCICHVSEKAFTERYQKWCMRKGYHFSAEKALDVYAGSCGHFTTLPKNDNTKLLITTAAQQLLAGKMTLAALRAEMTRLAKQLPEYDTVRAMYGVGETTATQLMAEIGDVRRFPRRSSIVGFAGVDPAVDQSGKHEAKSTPTTKRGSPHLRKTLYQIVCTYLKRSPVDEPVYQFLDKKRSEGKPYFVYMTAAQNKFLRIYYARVKECLEAFDARQSLAQS

SEQ ID NO: 60037 - protein, 481 aa, unidentified
MWNTGLDYHPTTSNLHILNADGVRVKSQTIRGRWPLVVEAMRVAAKEAAAVGERLAVCFEASCDYGHLFEALSKVAAKVVVAHPGQLRLIYKSKRKNDGVDAAKLALLLANNGVPEVWVPGQDARAWRRMIEYRRRTVDKRTACKNQLRALLRTHGIAAPGRQTLWSIKRRAWLKSAALPTAGDAMQRDMLIEELEHQERQVKRVTVELNRLASAHPGATLLQTIPGVGPRTAEAMAAYIDQPGRFRNGKCIGAYLGLVPCQDASGGKNRLGHITRQGPSTVRKMLIEAAWQGIRRSETIKAFYERIVGGKPDRKKIALVATAHRLARVMLAMLRHGEAWRHDGAEAKTTGEATTTSSATTTPAEATAPAATPHATSTSTPKQSQSSVSSKKSTPASLSTRTSAPSSATVEAPSSSTVQKQSPASSKSVRKSKPPRKAIATTSSPVKPTAGKTGASGPAPDPAPPEGALAKARRRQPGAGG

SEQ ID NO: 60038 - protein, 405 aa, unidentified
MNMNAVGIDVSKRKSMVAILRPGGEVVAKPFEVPHLSGDIQSLIHQIQSLDGESRIVMECTGHYYESIAHELTSAGLFVSAVNPQIIRNYQDEDNSLRKVKSDKADSLKIARYTLDRWAKLKQYGLMDELRSQLKTMNRQFSFYMKHKTAMKNNLIGLLDQTYPGVNTYFDSPARGDGSQKWVDFATTYWHVDCVCKMSEGTFIEHYQKWCSRKKYNFSKAKAEEIYETAKGLVSVLPKDDFTKRIIKQAVEQLNTASQTVEQLRSLMDETAARLPEYPAVMAMKGVGTSLGPQLMAEIGDVARFTHRNAITAFAGVDPGVNDSGDYSQKSVHASKHGSPTLRKTLFQVMDVLIKTKPQDDPVYLFMDKKRAQGKPYYVYMTAGANKFLRIYYGRVKEYLASLPQ

SEQ ID NO: 60039 - protein, 355 aa, unidentified
MKTKIPSITIGLDLGDKKHALCVLNQEGDIIDERSITNQRESLRRLSQKYPQARIAFEVGSHSPWIKRFLADLGHEVFVANPRKLRAIYTSDRKSDKNDARMLAKIARIDPQMLHPIEHGTEQAQRDLLQIKLRDNLVRQRVDIISSVRFTLKSLGVSLPSPNSACFAKRCRTLLANDHSELLAMIEPSLQVIDIMTQKIRELDRAIEALSEEKYPVTQRLRQITGIGPITALTFVLTIEDPQRFERPRDVAAYLGLVPKRDQSGALDKQLRISKAGDAYLRSLLVGCAQYILGPFGPDTDLKRHGLMLSERGGARNKRKAVVAIARKLAVLMLVLWKHQRDYEPLRQLDDTQAA

SEQ ID NO: 60040 - protein, 593 aa, unidentified
MYSVYFIKRSERSDTILRISAIRFLTQAPAAEAASLIEKEILALCYKSASPIKLLSSSGSSQGPYSSGAILPLYKHDSGRPLITDEAYALSHTRINQEPPRAAAATIPRRRQITMARKQKSDKSKKHQRPIQSLETIQPHAAGIDLGSREHWVAGPPQEDKTPNVERFGTTTPELLRLADWLTQQGIKSVAMESTGVYWIPLFEILDSKGFEVLLANARQVTHVPGRKTDMLDCQWLQLLHACGLLRGSFRPSDDICQLRALMRERNTMVEQRSDWVRRMQKSLDQMNVCVHHAVSDITGVTGMRIIRAIVDGERDPHALARMRDRRCRKSEEQIAAELTGNWRAEHLFTLRQELKMYDQLCTVVDDYDSEILAYLQTLQPADDNDTVAPPPASKAKERNIAKQGQEPLRQALYRFSGFDLTTIDGIGVDTASVILSELGLDFSKFPDEGHFVSYLRLAPNMSISAGKKVPSKSKASTCTRVATALRLSALTLRNSKTALGAYYRRMAWRKGASVAVFATARKLAQIVYRLVRYGQAYVDAGAKAYEARFNQRRLKFYTKALNDMGYNVEPIAAAEASTVEASTAAELRHCVM

SEQ ID NO: 60041 - protein, 346 aa, unidentified
MRIIGCDLHARQQTISMVDIETGEVTEKVLLHEGEAVREFYAALPKPVLVGLEATGSMYWFLRLLEELGIEYRVGHPAAIRKAETRKQKHDRRDAELIRRLLEEKRFPQIWLPTGEQRDLRTLLQHRHQLVRMRVMTQNGLQGLALSQGLRRGSKLWSQAGQQELKGLELAGFAATRREQLQELRQELNQRLQQLDQAVREQAEQRAGARLLLSHPGVGPTTALATEVFLGDARRFPNAKAVASYVGMIPSEHSSGGKQRNGSLSKQGNPLLRLLWVEAARAAARKDARLKQFYRKKLVQKGLGKAVVATARKLGIRLWIMMRDQIDYTEFCRQAEQRCPHAGMPE

SEQ ID NO: 60042 - protein, 343 aa, unidentified
MQTITTIGLDIAKSVFQVHGVDAAGQVVIRRQLKRRHVLMFFQKLAPCLIGIEACASSHYWSRELNALGHTVRLMPPAYVKPYVKRQKNDAADAEAICEAVTRANMRFVPTKTPEQQSCLMLHRTRHLFIRQQTAVINVIRAHLAEFGIVAPVGRKGVEELLDVVADPSDKRVPEIARACLFALGAQLRRLKEQILEFDRQIMAWHRSNETSLRLDAIPGVGPMLATALVACVADPKAFRSGRNFSAWIGLVPKQHSSGGKDRLGSISKQGDRYLRSLFMAGALAVIRYAKIHGTKHRPWLTALLARRPTKVAAIALANKIARMAWAMMVRGERYKEPVALAA

SEQ ID NO: 60043 - protein, 347 aa, unidentified
MQVTTVGIDLAKNVFCLHGRDTNGKPVLRKQLARRQLLGFLANLPRCLVAMEACASAHYWAREIEQLGHQVRLISPRFVKPYVKANKNDASDAEAICEAAGRPTMRFVAVKSTAQQEVQAVHRVRQQLMKNRTALVNQVRGLLAEFGIVVAQGVGRLRRALPTILEDRENGLSGVMRELLGEIGERLRFIDDRLHKYDLTIQRLFRQDERCQRVAAVEGVGPLTATALVAAVGNATDFKSGRELAAYLGLVPRHRASGGRTVLLGISKRGDRYLRTLLIHGARSALLRIERRRSARAIWAARLKLRRGSNVAAVALANKNARVLWALLNRHQSYQPAPFPARVPQSG

SEQ ID NO: 60044 - protein, 372 aa, unidentified
MNYNTVYVGMDVHKESFTLCSCKYEDEKASHYQRTPASYKNVLRYLAFLRTIYGEDTRFVCGYEAGCLGYSLYHQLENFNVECVILAPTTMLEQRSKRRIKTDKRDAEIIARSLAQHNYSPVHIPTETDNQTKEFIRMRDDHKAELKKIKQQILSFCLRQGYQYDGSGNWTAKHVKWLRSLKPAGLYKEILDEYLLTYTILTDKLNRLDQRIEELASKEEYKESVSKLTCFLGIKTHTALSVIVEVGDFQRFVSARKFAGYLGLVPGQHSSGDDRNGLGITKAGNTHVRRLLVESAQSYTRGKIGYKSRVLRSRQAGNSPQVINYADRANERLRRRYYKMVLKDGKKYNIAKTAVARELACFIWGMMTDNIY

SEQ ID NO: 60045 - protein, 416 aa, unidentified
MKKNTKSSMKKEPSAKRAKAQRPVPREPKEVLAELVEKLQGKLAVKATSASPTAAGPRGELSPNLNRLTVGLDLGDQWSHFCILGFEGETLSEGQLQTREAEVAEFFQALPGARVVMEVGTHSAWMQEIIAGEGHEVVVANPRLMDGSKRRKRKNDRIDAKKLARLGRVDPQSLYPIRHRSREVRQDLVVLRAREALVAARTELINATRGLVKSMGTRLPKCSSESFGHKVKDAIPEKVREALLPLVQLADALSACIQSYDQKIAELGSEKYGHTKLLRQVKGVGPITALAYVLTLENPEHFAKSRDVGPYVGLVPKQEDSGESQPQLGISKTGDTMLRKLLVGSAQYILGPFGPDTDLRRYGLRLCERGGKNAKKRAAVAVARKLAVLLHRLWVSGEVYEPLGYAVSRRIVQQAA

SEQ ID NO: 60046 - protein, 330 aa, unidentified
MKNLFCGVDISKDFLDYAICNGEDKSIIALEKIPNDRKGIKSLIRILKKESDGGSIWVCFEHTGNYGLMLASVLSEFDINYSMVPSLEIIKSSGMVRGKTDSIDAKRIALYLAVNNYKLKPTKLPCAEIMKIKALLTLRQQYVKIRTQFKNSVKSLKISAKIIPLKDEIKQQENEISRYNSLIKEIEVQIKDIIKSNEQLNKNYRKIIEILGIGLITASQFLVSTNNFTAFDNPRKFNCYCGLAPFEYSSGTSVKGRTKTSHYRNKELKAALFKAAITAIAHDQEISIYFARKISEGKHKMSVINAVACKLVYRVFAVVKRDEPYYRIAV

SEQ ID NO: 60047 - protein, 344 aa, unidentified
MQVKTIGLDLAKNIFQVHGVDARGVTMLRKQLRRDQVLMFFARLQPCLIGIEACGGAHYWAAKLTALGHRVKMMAPQFVKPYVKTNKNDSLDAEAICEAVARPSMRFVPLKSPEQQSVLSLHTVRESFVHARTAQANQIRGLLLEFGLIVPQGMRHIYARVPDLIEDANNELPGRFRLLIDRLLQHLKELDRQVHELEREIELWHRCSEVSRRLETIPGIGPLTASALVASAGDPGNFKNARQFAAWIGLVPHQNSSGGKTQLLGISKRGNVYLRTLLIHGGRALVQLAKTRVDRADTWLGKLTARRHHNIAAVAMANKNARLAWALLATGRSYEPMHMPARSA

SEQ ID NO: 60048 - protein, 388 aa, unidentified
MIYVGIDIAKTNHYASIVNYSTGEVIESPFLVTNNKQGFELLYSKIKFFDKDNVLIGLESTAHYGNNLIFYFHDLHFKLGIINPIQTATLRKTRIRKVKNDKVDSMLICEALSLGYYNLLSDYDIKLLEVKSLCRFHKELKNKTAEAKIQLETYVDQLFPELSGFFKDNLNIKTAHELLKLYQSPNDISKVNLTKLSNLLSKSSRGKYDKERAIELKKIASNSVGINNYALCIQIKMTIELIELLESQIKDIEKQVSDFIKKSDNVITSIPGIGDMTAAIIISEIGDINRFNNPGQVLAFAGLDPSVKQSGTFNASSTRMSKRGSSLLRYALILAANNVQLNTKTFNDYYNTKRLQGKLHYNALGHCAGKLIRTIFYMLKNNVKFNLD

SEQ ID NO: 60049 - protein, 336 aa, unidentified
MRDHSEAFIGIDTSKLRNAIAIAEGGRGGEVLYLGEIDSTDTATRKLVSKLAAKYRSLTFCYEAGPTGYGLYRLIRSLGHECMVAAPSLIPKKPGVRVKTNRRDAVQLARLSRAGELTAVWVPDERHEAMRDLSRARQAAKKHLTSKRQQISSLMLRLGRHYPGKTTWGPAHKKWLMQQKLAHREQRIALEELLEGMRQEAERVERLEQAIREAVPDWSLAKVATALQAMRGIDLVAAVTALAEIGDLSRFQNPRELMGYLGLVPSESSTGDKIKRSGITKAGNGRARRILVEAAWSYRHPPRVGREKQAKVAPHRDACARSRGRPKRDCAGASDR

SEQ ID NO: 60050 - protein, 348 aa, unidentified
MNSPHYIGFDVHKKTISFCVKTAAGDIVEEGVVAAQRRELRQWAAARPQPWRGAMEATLFSGWIYDTLKPYGEQLEMAHPAKMKAISAGKKKSDTLDARTIADLVRCNLLPACYVAPPRIRELRRLLRYRSLVVSEAVRMKNKMAGLLMETGALYGKEKLHRKKYFASLLEELEEVPESVIDLLRLSRGALEMFESTQKRLVRELLADPELTQRVERLMTIPAVGEITALTWALEIGDPQRFHCNADAMSYCGLTAALKSSAGKQQRGPISKQRNHWLQTTLIEAAKLAPRWNPQLAALHARELERGHRNRATLAVARKLVAYLLAVDKSGQAFQVRAPLEAPTPKAA

SEQ ID NO: 60051 - protein, 419 aa, unidentified
MRNGNTKKIKRISEKTLLVTVDMGKTTHTGYLRFPDGAEVKPFEFSNSRKGYEEFWWRICQAKRQLSLGEVVVGFESTGPYAEPLLHFLRKRNARLVQVNPMHTKRLKELQGNSPSKTDRKDPKVIADIIELGHSLTVIIPEGTAAELRRLTQARERSIHRMTVIMNQLQDLVFLVFPEFMTVMKDIAIRSTQYLLKNCPRPQDISGKGIEPLARMLKEVSRGKLGGERAEALYRAAKESVGIIEGSESIVMEIKESVSTIENMEKFVKEIEKHMSRHLREVPYSRFILSLKGVGEITTAGLIGEFGDLRKYRTIGEVIKHAGLDLYEISSGAHKGKRRISKRGRPLLRKLLFFASVNVVRKNGILHKQYQHHLQKGMPKVKALIAISRKLLGIIFALVRDHSMYVDNYSKIHQLREAA

SEQ ID NO: 60052 - protein, 339 aa, unidentified
MFRKGVGGHPSSCFWRQTHTMLGIDVSKDTLACTLFDSTTHKPLWSKTFPNTPAGIVRLLKQTPPTSPWALEPTGKYSTGPARLAREAGRDVRLAQPKAAQRFLQSLQSRAKTDTLDSAGIGLFALSRELPPYPLKPDVIEHLDQLLSARKGLSQAMASLSLQARELTHAAALLTPALEALRQQQQQIDQQIKALTGAEDSLALARRLQEVPGIGPVVAATLASRLGARSFSSSDAFVAFCGLDIGVRQSGKKSGNTGLTKQGDGELRRLLYLAAQANLKTKNSPFKHHYQRERDKGLSSTAALCVLARKLARLAWSLHKHNAHYDPERVYQQNLPQNP

SEQ ID NO: 60053 - protein, 416 aa, unidentified
MDILRERSAGLDVHRSVIVACVLVSAAGGRVTKEVRSFAAIASGLAELVAWLSGFGVTHVGMEGTGVYWMPVYAALEAVSGITAIVANARHIKAVPGRKTDVIDAEWIARLVRYGLVRASFVPPQPIRDLRDLTRYRRTLVEVQASERRRLIKLLEATDTKLAEVLSDVFGVTGRAILRALVDGTSSPAQMAALARGIARKKIAPLTAALAGQLAEHQRFILQIQLRRIEDTEQQIARLDQQIEARLRPYHAQIALLISIPGIDRIGAAAILAEIGADMSVFATAAHLAAWAGACPGNNESAGRTKAAAARTGNRHLKTALCNAAIAASRCKGSYFRAKYYSLKTRIGGGKAALAIGHKLLICIWHMLSDGCFYRDLGEAYLDRRNQQQVLKRYARKLDALGFAIVPKQQPVASAA

SEQ ID NO: 60054 - protein, 324 aa, unidentified
MSSHEIVGIDVAARKLVVIGERLALAEYENTAAGRGKLVKGLCRNQRPVRVVLEATGIYFLDLACELAAAGIAVMVVNPKATHHFAEAILQRRKNDPVDAAMLREYGRRMDFISWQPPRHDLFGFRALTREVQALSKTVAAARNRLHAITATQLAPTTLIGALERQIAHNQALIDELVAAAVAQTESDPELARLLARTDSMPGFAAKAAVLVIGELSVLPPMTARQWVAQAGLDVREETSGTSLARRPRLSKRGNKRLRETLFYPALTAARCCPAAAAFVERLVAHGKTRLQAIVALMRKLLHGLHAMWRNDEDFDAEKLFAPA

SEQ ID NO: 60055 - protein, 414 aa, unidentified
MRIVYQNVAGLDVHKKVVVAAIIIQKADGSWHQEKRSFGTMTVDLLALSDWLIGFEVTHVAMESTGEYWKPIFNILENNFEIILVNAQHVNKVPGRKTDQSDAEWLSELMQYGLLKASFIPPPGQRELRELTRYRSSFVRERSNLMNRVQKVLESANIKLGSVVSDIMGLSSRAMLEAIIEGQASPIEMAELAKGRMREKRDALTRALEGRVKAHHRFILTELLCQIDSIEETIARFDQQILEYCRPFEEAVILLDTIPGVARTTAEIIVSEIGTDMSRFPSADHLSAWAGVAPGNNESAGKRRSGKTRKGNKPLGAALTQAAQAAAHTKNTYLSAQFHRIAGRRGKKKAIVAVAHSILVMSYHMIQRKEPYEEKGSNYFDQRNKLKVTHRLVDRLEKLGYQVSLQQASSPTAA

SEQ ID NO: 60056 - protein, 344 aa, unidentified
MATYYIGMDVHCNNTELAVEKGHKIVERYSVPTTIPAIVEVLESLSGKKHLAMEEGPMAGWLYRNLFDKVDCLIVSDPRRNRLIASEGDSDDKIDSAKLATLLRGGYLRAVHHSLDVDQWRLKRWVGLYHDRIKDATRAINKIRACGRMHGIKTPRAVIRDVVKRRQWLASLDDRNAAALLEVLWIGYDAAARQSRRARQNLLSRSRKYAIVNWWQELAGVGPVRAVTMFAYLDTPWRFKRKNQLWKYCGLGLVHNSSGKDSRGRYKSGQLRLAWHVNKRLKNAVIGAAMSIINGKDSVFKDYYEQLINDGLTRSNARHAVARKLLTVMWGMWKRSCRFDESLV

SEQ ID NO: 60057 - protein, 346 aa, unidentified
MLHAGLDLSRRRLDFHLLDRNGVTVEVGAAPPDADGLRLLAERVGRHGRPVRATVESMNGARFVHDQLELHGWQVQIADALRVKGLAPLACKTDRIDAWVLAELSRRELVPAIWLPDPSVRAERERARWRLHLVRHRSSLKQRVHATLLAHGKPCPVADLFGRSGRALLGRLQLPEPWAGTLVASLRLIDELDREIAGCESELRRLGAEHRYVPVLLTVPGIGWVLAYTIAAEIGDIHRFPSPRKLSGYTGLCPRVYQSGESDRRGPLAKQGPRYLRWALIEAATHARTHPAYRDRYQRTKSRLGKQRGAKVAQVDLARRLAEAIWHMLTRNQPFAPAGATDPLAA

SEQ ID NO: 60058 - protein, 337 aa, unidentified
MIVIGVDVHKHSMSAVAVDEVGRQLDALETSDDAELISWSRRVGRRRLWALEDCRHVTRGLEQTLARERQRLVRVPPRLTAPERRRSRTRGKSDLIDALSVARAALREPVLDSPRPEEARLRELKLLVDHRDDLVDERRRAQQRLRWHLHELDPSLHVPLGALDRAVWLERLSRQLSRRQQTTQTRIARELVNRCRSLSRSIAELDRELHAQVKATAPQLLELPGCAALTASKLLCEIGPIDRFRSDAQLARHAGVAPLDASSGKHQRHRLDRGGNRQLNCALHRIAVTQGRVHGPAKAYLERKQAEGKTRREALRCLKRQLARTVYTTLKSQPLLT

SEQ ID NO: 60059 - protein, 343 aa, unidentified
MQIRTIGVDLAKNVFQVHGVDSAGKVVITRQLRRKQVIEFFSKIPPCLVGMEACGTAHHWAREVSKFGHTVRLMPPSYVKGYVKRSKNDAADAAAICEAVTRPSMRFVAVKSADQQALLMLHRTRDLLIRQRTQLINALRAHLAEFGLIAETGREGLAQLAAIITDESNREALPSAMKQALQAIVDQLAALELQVGTLDRAIHAHHRANDMSSRLETVPGIGVIGATAIASAVTDPSNFKSGRDFAAWIGLVPRQHSTGGKERLGGISKQGDRYLRRLLVVGATAVVRHARQHPQKHPWVMRLLAKKPAKLVAVAVANKMARIAWAIMAKGGHYRAPELAIAA

SEQ ID NO: 60060 - protein, 407 aa, unidentified
MVVVTDHDSKVLARRTFRCKAWDLGAALDWAAERAAKAGFGGVTVACEPTGHRWRVLGQLADQRGMTLVCVQPAASAWARKSEDLTTDKTDDKDAVLIARLVAQLRCYLPEPIDETWGRLRHLGTRREQLIEEHVRCVQQVRDLLECVWPAALDAAKHPFKSTTWVAAMTVVMARDGGDLERTRRLGPARFERAVRKEVIRRGKQRPCLRIVRHLFAALSDPAGVLPHRPAAFERIAWVMDDWDHAKAKVVDTEERMTAVLDELELTELACSIDGLSPVGAAAILAETGDLNRFTSARAVVKHAGLAPRERKSGTFTGRARVTGAGRPLLRAAAWRAVWGCLQTNRVYAARYRHLTGREANKLTPTQAQTAIAAAILRQLHFVVTHRQVWDPVVAAHGTRTVEVTAA

SEQ ID NO: 60061 - protein, 349 aa, unidentified
MAEQRLSYTGERIDVGIDVHKETYTVTCLCQRQMVKTATVPADPARLAESLLRWFPRARLFSAYEAGFSGFVLHRVLTTAGITNIVVNPASVAVAANDKVKTDRRDAKRLARDLADGRLRGIYVPTEAEELARLLPRTRAQLIAHRATLTRQIKAKLHQFGLITPASRRLMSSRYLREIAAWSLPPELQASLTLLAEQWRFATRQLLEMRRLLRHQAQAQEQIEKVYRSVPGIGEVVARTLATALGDMSRFTNERALFSYTGLTPSEYSSGASIRRGHSSRQGVSRLRHVLVETAWRALPGDPILHAMFERIAATRGKQRAIVAMARRLIGRIRACFRHGTTYAVGTVG

SEQ ID NO: 60062 - protein, 301 aa, unidentified
MRFYTQQHQHYCGIDLHARQMYLCILDASGKVRLSRNLECTAQAFLGAVKPFRDDLVVAVECMFAWYWLADLCQREGIAFVLGHALYMGAIHGGKAKNDKIDAHKIAGLLRGGMLAQAYVYPPQMRATRDLLRRRCHLMRKRSELITHIQNTVSQYNLPPLEHRIQKRCDREGLLSHFPDPQVRNSVALDLAMIEQYDALLPKLERHIRACAKQHDRKAFTLLRSIHGADLIIPLVILYEIHTIERFARMQQFLSYCRLVKPTRESAGKLLGHAGGKIGNAHLKWAFSELATTFLRANPPA

SEQ ID NO: 60063 - protein, 362 aa, unidentified
MRIIGCDLHARQQTLAVLDTATGEVMEKTLAHSGSDVKEFYSRLPGPVRVGIEATGTMQWFLSLMEELGIDCQVGHPAKIRAAEPRKQKHDRRDADLILQLLVENRFPSIWRPSKELVDLRALLLHRHQWVRMRTRIQNALQAIALANGLRRGASLWSQAGQCAIASLPLAPHTAHRRSELQAMYGKFETAIEKLNQRVQEQAAERTGATLLMTHPGVGPITALATDVFLGDPKRFADGKALASYVGIIPSEYSSGGRQRLGGLSKQGNPLLRFLWCEAAAHAVRRDPELQRFYRRKLVQKGLGKAKVAAARKLGIRLWIMLRDQIDYHEFCRRGQMQQRLGDACAGMPGTRYGATSHRPID

SEQ ID NO: 60064 - protein, 310 aa, unidentified
METKVFVGVDVSKDSLDVAIGPGKEIITFTNDQKGVDALIKKLSRIGPELIVLESTGGYERLATSSFVEARLPVVIVNPRQVRDFAKSAGILAKTDAIDARVIARFAAAVKPDIRQLKDRETSELTALVTRRRQIIDMIVAESNRLKLANKRNKKDIKDHIRWLEKRLDKIETDIGKAIQNSPIWRCKDNILQSVPGIGPVTSATLICDLPELGVLNPKKIAMLAGLAPLNCDSGKFKGRRRIWGGRASVRSGLYMATLAAIRCNPAIKGFYQRLIAAGKCHKVAATACMRKLLIIVNAMLRDQTLWQQN

SEQ ID NO: 60065 - protein, 412 aa, unidentified
MYYVGIDIAKRSHVACVMREDNSLEIKPFEFASTKSGFEKLRAQLSSLACDVNEVLIGMEATGLLFDNLYRFLRSLHYRVVLLNPYQSAKFREMDTMKRVKNDNIDAQMIAALIKSGRFSEGYVNDNQLQSLRTLYRHRASLDDQLKSIKRQTQTVLTVVFPELEQVISDPFNITGLALLEKYPTAKHYEYASAQRILKTFRGIKGNNFNTIKAEKLLALAKESIYSGAGKEGYEATIRSNITLMRLLKEQMQSVEDAMLALFEAKDATKEEQEEMAELIDNLRSIPGVSDKTILALLAECGNIDRFHNAKALTGYLGLYPTLEQSGDSQKNGRLAKRGARLAKKAIYLAAIAAIRHNKELRQVYMNYRSKGRAKKECIIITARKLLAIIYAIYTRNVPYDPQRVFVAQPNI

SEQ ID NO: 60066 - protein, 338 aa, unidentified
MALYCGIDLHSRDCWLAILDERLKVVQEAKVGNDLDALLQVLEPYREDLEGVAVESTFNWYWLVDGLQEAGYRMHLTNTWAVQQYEGLKYTDDRHDARWLAHLLSLGILPEGYIYPKEERTTRDLMRRRSFLVRKRTAFMLAMRGAFENRTGTRINSNDLKQWKAEDVEAHVDDPAAAFGITCLLEPIHALSLQITKIEKEVLARGRLRPEFAPLETVWGIGKILGLTIMYEVGDIGRFRKVGNFTSYCRLVNTARLSAGKRKGSGNRKNGNPYLSWAYSEAAHHAVRHHPEAQKYYQRKRSKTNGIIAIRALAHKLARASYHVMRDHVNFDPGRVFG

SEQ ID NO: 60067 - protein, 334 aa, unidentified
MDKVTTIGIDLAKRVFALHGVDAAGRVVLRKTVRREQFVETVAKLPPCLIGMEACSGSHEWARRFQGLGHTVRLMAPVFVAPYRKSGKNDGNDAEAICEAVSRPNMRFVPVKSAEQQALLALHRVRQGFIEERTATINRLRAVLTEFGVVLPNRTQWVRRGALAAAEALPVLARQAIEDLRAHLTQLDERIGAYDRQIEQQAGQSEAAKRLMQIRGIGPLTAVAIVATVGNARDFESGRQFAAWLGLVPRQNSSGGKARLGHISRRGDAYLRMLLVQGARSVLNTAARHTDRLSLWALSLQARRGMHKALVGIAAKNARIAWALLSKDQTLRAV

SEQ ID NO: 60068 - protein, 391 aa, unidentified
MVCVGIDVAKDKHDCCILDSEGTTLVDCFTIPNNMDGFKSLLQTIQDCSQKSDKIKVGLEATGHYSYNILGFLLDNDLPVYVMNPLHTNLYRKSLSLRKTKTDRVDAKTIATMLLSDVDLKSYTDTAYHNEELKSLTRYRFDKVQERAKLKQSVSRLVTILFPELEQLVSSIHGTSIYALLSEYPGAKQISEAHLTRLANILVKTSRGHYRKDKATHIRDAARTSIGSVMPAKSLELKHAIKLIQELTSEINEIEDAIRKIMDELKPPILSIPGMGFHSAAMILAEVGDFSNFNSPDKVLAYAGCSPSTYQSGKLTNCYAHMEKRGSRYLRYALYTATKYVCYWNPVFTEYLTKKQAEGKHYNVALSHATKKLVRLIYALQKSGKAYLAVT

SEQ ID NO: 60069 - protein, 387 aa, unidentified
MYFVGIDISKFKHDCFIVDSNGEVIVSSWSFANDQEGFLLFKDILDGLEGEIRIGFESTGHYTDNIRLFLERHHFSFMELNPLLISRFNNSKSLRKTKSDTIDAALVAQYLMTVEYKPNPPTFYHIEALKSLTRFRDKLVKLRSRQLIELTNILDKVFPEFKPFFNNRFSSTAIYIIANYQTPESIANMNSRSFEILRKKSRGKFTMAKFIQLKELAKNTVGNSSDYLIDELNMVIDIYSQLDSKICEIEALIKEYIADINPPMLSIPGIGPFSAAVILSEYGDINNFDSPAKMLSFAGLEPGYYQSGVSEHTGKMVKHGSGHLRATLMNCCLPLISHDLIFAQYYSKKRAEGKSHRVALSHVAKKLVRVIYTLETKNTTYDSSLIR

SEQ ID NO: 60070 - protein, 444 aa, unidentified
MISKAYRATRVNEVDWDRLARGKEGVDLTLGLDVGKHTLWPVCRWADGRFERPWRVKNPEEIPALLALTQRMSAGRKLVVAIESSGTYGDALRQALADAQIDLVRVSHKASHDYAEVFDGVPSQHDGKDAAVIAELAALGKAQPWAYQPASPWEQELTYWVEWMVAHRQILTTWQGRLEGLLARHWPEATEVLKLSSGTLLRVLKYYGDPKALAADPEAAQRLARWGRAFLSPEKIEHLLAGARSSVGVRVGEWQRRQIQDYAEQALAARREAERAQRHLHGLAKGHAVLQAQGKVVGVPTACVLWASVGDPRKYHAAAAYRKAMGLNLVERSSGQYQGRLRISKRGSARTRQWLYFAALRLVQNCGVRPWYEAKKARDEDDARRVIMAVMRKLAMALDHVGVRNEEFQPRRLFGQICRRGGRSAGPRSGARNQPEAEGVSARG

SEQ ID NO: 60071 - protein, 340 aa, unidentified
MNVTTIGIDLAKSVFQFHGVDEKGGIVLRKKLRRSAVLDFLRDVSPCLIGLEACATAHFWAREISGLGHDVRLIPPAYVKPYVKRQKNDAADAEAICEAVTRPNMRFVPIKSAERQGVLMLHRTRDLLMRQRTMMLNAVRGHLAEFGIVTAQGPHKILLLIREIRKGEVPGLPQIAQAALESLATQLDNLAGEIRTLERQLMAWHRADEISQRLETIPGVGIITATALSASVPDPAVFKTGRQFAAFLGLVPRQNSSGGKDRLGRISKMGDGYLRRLLVVGATSVVRRAGSNTSATGVWVRSLLERKPSRVVTVAIANKTARVAWAILARGGTYRAPRPA

SEQ ID NO: 60072 - protein, 337 aa, unidentified
MRSIGVDLHSNSLTACYLNQDKSEQLRTLSLKQLQSFKDSLQSDDEVAVEATGNVRWFVEQIRPRVSRVVVVNPSQFEVIRKSVKKTDRHDARALAQFLQKDLLPESRLKDKTAAQMESLCQTRQKLVELRTTLINKIHALHRARGMESKKSEFGSEKGLKAVLDRQWDVLERVELEIIISQLRSLEENIKKLEKQIAEHGQQMEGHRNLTSIKGIGDKSAAILLSVIGNVQDFADEEKLASYFGIVPRVSNSNETLHHGRITKRGSKLGRTTLVQCTLVAIKYSDYLKSYYTRMKAKKGSGKAIIATAHKFLGIIYRTLKNKWVFADFPNYVLAEG

SEQ ID NO: 60073 - protein, 350 aa, unidentified
MIIIGVDYHPEFQQIASVDTETGEFEERRLQNREEAEKFYRELAARGVAVRVGMEASGHARWLEHLLKELQFELWIGDAAEIQTKRVRKQKTDRQDAQLILRLLLEDRFPRIWLPGAENRDLRQLLWHRHRMVQARTRIMNQLQAVALNEGLRCKKRLWRERGRQQLESILLLPWASRRRSDLLQLLDQLNPTIAELTQAVEREAEHCVEARRLMTHPGVGALTALAFVLIIGEPERFRCGKQLASYLGLVPLEKSSGKRRRLGHITKQGNSMARFLLVEAAQATVRSDPRWRSKYFHLLMRRGRKTAKVALARRLAVNLYWMWRKGWNYEQLISFGSHAGQPGNPYGVQ

SEQ ID NO: 60074 - protein, 422 aa, unidentified
MPMKVVYQTCCGVDVHKSFLVATIIKTTSGVQPSYQKKRFSTFNNSILEFKKWLLDNSCRDICMESTGKYWIPVFNLLEDEINVTIANPKWVKAVKGNKDDTKDSKWIGDLFRLGLVPGSYIPCKEIRILREFTRYRYKLTSCRSSEKNRFQNALTVCNVALDSVVSDIFGKSATSVIDYLLEQSDNSINHEEISSRLLRSLKKKSESVIESIEGYQMTDSQKYRMRLVHAHMDYITSTISDIDSMINSLVEPYDNAVKLLCTIPGVDRNSAITIISEIGTDMTQFSNSKRLCCWAGLTPGNNESAGKKKSVRITRAGVYLKPALVQVAHAAVKSDKSPYYKAKYEHIMKRRGKKRAIIAISRMILTAAYQMLSTGEVWNPIDLYKIDMPAPLKEKQKEKAIKQAKKLLIAEGIFTAEQLAS

SEQ ID NO: 60075 - protein, 326 aa, unidentified
MKKLVIGFDISKDSLDHCILDGVDRSIESRGVIRNDKKSILKWIKKLGDNDCTVSMEHTGNYGALLASLLTQEGICFYMVNPLDVKMSMGVQRGKTDAVDAYRIAMFTISNAHRLKPYRLPTEKLRKLKVLITSRERYVKISVQLKNSLRADLLLAKTLNMKDLVKEGKKHINNINKTINILEKQMLEIIRSSQELKESYDKIKRVIGVGPITATKCIVETDNFLSFTNARKFSCYCGLAPFPYQSGSSVKGRTRTHHLRNKALKSILFNAAGSAIQHDPQLKRYYARKVDEGKHKLTVLNAVANKLVLRIFAVVNREEPFVKLSA

SEQ ID NO: 60076 - protein, 337 aa, unidentified
MKKNYQVFIGIDVSKGKLDYCVINDPSSIQHHFGIVTNNEKGIKQLITTLKNKFISEEMIICLENTGVYSMPLCYWTQHFKIDYWVVPALEIKKAKGITRGKNDKADAKDIASYCITHLHLVKLTTLPQNDFMELRLLLAEREKLVKAIGMFKMTKESQGFLPKEVLKITFAHNKKTTEVLQKQLNAIEKIIQALIDNNPTFKEQQKLLETIPGVGKQTSTNLIAITYAFTAFKDWRKFACYCGVAPFEYKSGSSIKGRTRVSHLANKKIKAILNMAALTAKKNDTEMKAYYEKKVKEGKNKMLVLNSIRCKIISRAFAVIHRNTPFVNVNKFKTAA

SEQ ID NO: 60077 - protein, 346 aa, unidentified
MRPNLFMEIDHVVSQCVGIDVSKKKLVATMCMFSQAEQAVYSKAAEFDNNKTGFNQLVKWSRREAAKELPLRYVMEATGVYHEHLANHLVRIGCTAVVMMPTKAREFAYWEGMISKNDTIDSRVLALVGCVKRSMRPWKPTNPLYRELRTMSRFSQDAKKLRTELKNHLEALEHSHEAARSVIKHYESLVASLDKRIERNLENMKRKVASDEGLNKKVENIMTAPSVGFLSAVTVIAETDGFALIQNRKQLTSYAGLDVRDNQSGTVNGVSRISKRGNSRIRAILYMPAVQCRLHNKHLRKAYDRIVAKHPDKKMIAVTAMERRLLLLIYALWKGDRPYSEDYDKE

SEQ ID NO: 60078 - protein, 417 aa, unidentified
MNSPPETIPIQRYIGIDIHKDYLMIGGQNRHQEWTLRPRKVHVSRFRDWAEKNFQPGDAVVIETTGSVWDIYNIVAPLVSKTLVAHARKVRQIAEARVKTDKEDIKRLITLLIADIVPEVWVPPMHVRELRSLISFRWRLTKQITMSKNRLHSVVQRFNLNAPEGGLLTDTNKSWWEEQEFSDLTGFEVKQDLEIVKTLEGQKEAIDQKLAELSNTEPWASDMVYLMQIPGFGLIFSMVVLSAIGDISRFSNPKKLVGYAGLGAGVHDSGKKHQGKSITKEGRKELRWALVEAAWRAVGSDPYWKAQHKRLEKRMPRNKAIVAIARRMLVSIWHILTKRETYHHFDEETIAYKMLIWAQAIGEEGRQGLTRQQFAKFGLLRLGIGKDLERIVKGGGPRRIAPTEEILALKPELAPPR

SEQ ID NO: 60079 - protein, 391 aa, unidentified
MFSACVPPVPGVRSGSKEVCARHEVGVSFARDDGGGPTETEVRARMKVLIGVDPHKKSVAIAAVDEAKGELVKRASFPQNRDGLRSLERWAKRFPQRRWAVENAGGLGRHLAVRLAAAGESVVDVPPKLSARVRVLSTGNSRKNDGLDALATALAASRNERLAAVDPEAASEVLRLLSERREDLVAERTRALNRLHGLLRDLVPGGVAGKLSAERAARILRGIRSHGGASDRLRRRLASEILRDVRTLDRKITDLERRIEAEVEASGTTLTEIFGIGPILAAKIIGTVGDVARFPSKAHFASYSGTAPVEASSGEATRHRLSLAGNRKLNYALHMVAVCQARSDARGAYYRKKIAEGKSRKEALRCLKRRVSDAVFKSLLAGSEPSSHSAA

SEQ ID NO: 60080 - protein, 442 aa, unidentified
MTDTYYIGLDVHKETIAIAYARGGTRDDAVYHGQCGGSVLAAERALRKLADKLNVGFHDLKVCYEAGPTGFVLARRLIRYGLECVVMSPSKTERKPNEKIKTDRRDACKIARNHRNGDITEVRVPPVLDEAVRDVCRARTDASDDLSRAKQRLNAFLLRNGFNYSGKSNWTPAHMRYLRELVMPHDAHKIVLEEYMQAIDTGIERVARLVERMKQLLEGWEWEPVVRALMACKGFQEVAAMTVISELGDLRRFEHPRALMSFLGLVPGEDSSGPRHRQGSITKCGNSHCRWMLVECAQHFRKAPKVGSALTTRQQGQGKEVKALSWRMQNRLHKRYVKLKARGKKENKAIVAVAREIAAFVWELQVKLGLPIPGPAPSAPDTTASGTNHGAAAPNPAELRQLDPVSSPLNPPRGTSPLPSPRGGGGRSPKKLKSKLKPADAD

SEQ ID NO: 60081 - protein, 366 aa, unidentified
MKKISTVLTFENEIFNEQKLTIGVDLGDRWSFYCILDEAGKIILEQKVLTTPEAMKKTFGKIPRSLIAMETGTHSPWVSRLLTELGHEVIVAHAQKVQLITKSNRKDDRHDARTLARLARIDRELLGPVQHRSAKAQIHLTVIRARAELVSARTALVNAARGLVKSYGERLPKCGTQQVSRELGAGLSAELRDVLEPLLKEIESLNERIKEYDERMEKIAKEVYPEVSLLQQVKGVGTQIALTYVLTIEDPYRFRKSREVGCFLGLKPGRRDSGESKPQKGISKAGDRYLRTMMVQGAHYILGPFGADSDLRRWGLKLAERGGKNAKKRAVVAVARKLAVLLHRLWVSGEVYEPLRNSQKAMRAVA

SEQ ID NO: 60082 - protein, 416 aa, unidentified
MLKIVYPICCGIDVHKTFVLATIAATDKKSITTYKTQRFSTFTKDLKSLAQWLSDHQCLHVCMESTGKYWIPVYNILEPSCRITLAHPKYVKAIRGKKTDKKDSIWIADLFKHDLVPGSFIPEKQIRDLREILRYRYKLVCFAASEKNRMQNSLTVSNIQLASVVSDTFGKSAQAIIAHLLANPGDTAFDFRPLLHGSMRKNEEQIALAIEGTVTPVQASKIQTCQQHVEQLSQYIARLESLADSLAAPFASLLLILESVPGISHVSALVILSEIGTNMAQFKSAKHLTSWAGLAPSNDQSAGKKKSTKISRAGVYIKPVLVQCALAAISDKSFPHYRQRYEALKHRRGHKKALIAIARMMLTAIFVMLTNGELFNPKMYEESLRKPAYILSPELQLEHLAKRLGYSVVKVPDLIE

SEQ ID NO: 60083 - protein, 343 aa, unidentified
MQTITTIGLDLAKSVFQVHCVDANGQVVIRRQLKRRQVLAFFQKLPPCLVGIEACASSHYWSRELQAVGHTVRLMPPAYVKPYVKRQKNDMADAEAICEAVTRANMRFVPTKTPEQQSGLVLHRTRHLFIRQQTSVINAIRAHLAEFGVTAAVGRKGIEELLRVIADPSDKRVPDAVRACLAALGKQLLRLKKQILAFDRMILAWHRSNQTSKRLNCIPGVGPLLATALVANVADPKAFQSGRNFSAWIGLVPKQHSSGGRPRLGSISKQGDRYLRGLFVAGALAVIRYAKLHGTKYRPWVAALLERRPTKVAAIALANKLARMAWAMMAKGERYNYPASLRV

SEQ ID NO: 60084 - protein, 412 aa, unidentified
MSVALPPAQFFAGLDWAAEVHAVCVMDHAGKIVDRFTIAHTADGIAMLIRRLAKLADAADVQIGIERPGGRLVDLLLEAGHPVVPVSPNAIKTWRDGEVLSGAKSDAGDAAVIAEYLRLRRHRLRVAVPYSDDTRALRTSVRTRTDLVDMRVAATNQLAALLEDHWPGAKAVFADIESPISLEFLTRYPTPASAAHVGEKRMAAFLVKHGYSGRRPAAVLLERLRAAPAGATGTALTEALRDAVLGLVGVLKSLNTAVKDLDRSTAAHLGEHPDGEIFTSLPRSGQINAAQILAEWGDCRQAYETPDSVAALAGCTPVTKESGKHRAVHFRWACNKRFRVALTTFADNSRHASPWAANIYNQARAAGKDHPHAVRILARAWIRVIWRCWHDGVPYDPTKHGAAAALNQPAAA

SEQ ID NO: 60085 - protein, 318 aa, unidentified
MRIKECDLQARQQTLAMLDTGTGEVVNRTLPHEGKSVREFYSTLPGPVRVGIEATGSMKWFLQLMQELGIDCQVGHPATIRAAEPRRQKHDQRDAGLLLKLLVENRFPSIWQPSQELLDLRGLLLHRHQWVRLRTRIQNALQAIALANGLRRGSSLWSESGQRAIASLPLATHTAQRRSELQAMYAGFEAEIEQLKQQVLQQAGPRPTAGLLMTHPGVGPITALATDVFLGDPKRFSNGKALASYIGIIPREHSSGGRQRLGGLSKQGNPLLRLLWCEAAAHAVRRDPELRRFYRRKLVQKGLGKARVAAARKLGPGN

SEQ ID NO: 60086 - protein, 346 aa, unidentified
MRKIVKQVAGIDVAAKELVVTLGRMYDDWTPEIYASKSFANNQKGFLSLVLWVKKLTGAVEAVRYVMEATGVYHEALAYFLEAQGHPLTIVLPSKISNYFKTLDVKSVTDTTAAEAIARFGLERKLDNWKKPNAVFKKLRQLTRERDQVVEARTVAKNQLHAEAAEAEPGPNTVARLKKQIAFFTKQEKEIKEEIRALVKADPQVSQAVDIMSTLPGVGSLTAAIVLAETNGFELVRNKRQLSSYAGLDVKEKQSGTSVKGKPRISKKGNKQLRKAMHLPALAAIRHAPRFKAVYARLVARHGIKMKAAVAVQRKLLEIMYVMYKTKTPYQKEYVPKIAEENQAAA

SEQ ID NO: 60087 - protein, 354 aa, unidentified
MCVAVAASGRNGEVRQVGVFENRPEILCKMAARLGKGGRRLSFCYEAGPCGYGLHRLLTGCGHSCIVVAPSLIPMKSGDRVKTDRRDAMMLAKLHRAGELTAIWIPDAAHEAIRDLVRARATAGRVLSKARQHLQGFLLRHDRIYRGARAWTLAYRRWLTTVRFEHPAQQIVLQDYIHAVEDAEARRHRLTRQIEELLPSWSMAPVVVALQAMRGVALVVAVTVVAEVGDFRRFANARQLMAYLGLVPSEHSSGSIIRRGGITKAGNTLARRVLIEGAWTYRMTARVSRKLHDRLEPLSAVIRDIAWKAQVRLCARYRRLAAAGKPKVVVTTAIAREMVGFIWAIARIAQPALA

SEQ ID NO: 60088 - protein, 384 aa, unidentified
MNKHSILFIGLDTHKEFNEVAYIEEHRGAQPVHLGRFSSSKVAVQKLVRQFESKYSDATLHFVYEAGPCGYWIYRLITSLGHCCYVVAPSLIPKKPGEKIKTDKRDALKLAKLLKSEDLTPIYVPEPEDEAVRDLSRAREVAMKDLKDAKYQLKALLLRNNINYKGTANWSQKHLRWLTELVLPHPAQHIVLQEFLQTITERISRLERLDNELTHHVHQWRYYPVVKAIQAMRGVRLLVATGVVAELGDLSRFDHPRKLMSYLGLVPSEHSSGGKRHIGAITKCGNGRARRLLVEGAHTYRYAANISTDMQKRQEGLPKNIIDIAWKAQLRLCKRYKKMIAKGKHYNLVVTAIAREMIAYIWAIAKEVVLTPVNTKLRLARVPA

SEQ ID NO: 60089 - protein, 433 aa, unidentified
MKDAQDEPLFVQRVAGLDIAKAGVEVTIRVPSDTTPGRRQQETRTFAATRAGLLSLADWLRCWGVTKLGMEATGDYWKPVFFLLESRGFDCELYNAAQVKALPGRPKTDRADSIWLAKIVERGMIAASFVPPEPIRRLRTHTRYRRHLTQARTAEKQRVEKLLEDGHLKLSSVISNIHGVSGRDMLDAIAAGQRDPKALAQLARGTMRGKIRRLEEALECSFFTGEHAAVLAMMLAVIDHYSAQIEALTATIEALTEPWLHQIAQLDAVDGIGTICAQDIIAEIGTDMSVFPTASHLVSWAQWSPQVRQSAGRRKGSNATGRGNPYLSAALGEAAISAGRTQSFLGARYRRLTRRMPKKKAVVATGNSMLVIIHALLSDPADSYHDLGADYYEQRMHARRQARNHIKSLERLGYKVTIQALSPDTGQPLTATS

SEQ ID NO: 60090 - protein, 339 aa, unidentified
MDQPITIGLDLAKNVFQVHGVDTEGTVICRRQLRRSQVLVFFARLGPCLVGMEACAGAHHWARELATLGHEVRLMPPAYVKPYVKRGKTDAADAEAICEAVTRPTMRFVPVKSAERQAALLEHKARDFLVRQRTQIVNAIRAHLGEFGIVVPKGIHDVDRLLDAARHVHSTARSALDMLAGQLRDTQARIEEVTARIGEMQVEDALARRLATVPGVGTISSSAFAATTPDVAAFRSARDYAAWLGLTPRAHSSGGKERLGRISKAGNRYLRRLLYLGAMAQISARRGRREGSSGRVPDWLDRMLARKPVKVVAIALANRMARTIWALIRRGDSYRNTVA

SEQ ID NO: 60091 - protein, 337 aa, unidentified
MKYSGIDLHSNNSLIVVTDESDRTLVSRRVPNSLPAVLAVLEPYRGELVGVVVEATYNWYWIVDGLQAAGYRMHLANPAAIKRYEGLKRSGDEEDAAYLAQLLRLGLLPEGYICPKEQRAVRDLARKRMQLVRSRTQHILAVENIQARESGARMKAEQIKRLEAKGVEAMALAPEVKLAMQANLAVIGTLTQQIDRLERRLHERVRLREEFGLLKTAPGIGETLATTIMLETGAVSRFARVGNFSSYCRCVDSERISNGKKKGEGNVKNGNAYLAWAFVEAAQFARRFCPEAKRFYERKRARTNTVVATKALAHKLARACYHVLREHKPFDVRRCFG

SEQ ID NO: 60092 - protein, 343 aa, unidentified
MEHYVGLDVSLKQTSICVVNQVGSVVREGVVDSEPEAIAAFVRSKAPGAVRIGLETGPTATWLWTALKQLGLPVICIDARHAKAVLKMQINKSDRNDAAGIARIMQTGWFKEVRVKDLDSHSVRALLTSRALLVKIKRDLENQIRGLLKNVGLVIGRAKFNVFTVRAEELIADRPELIAVVGPLLKARQAIERQTDDLDRKVLKLARYDAQVRRFMTVPGIGPITALCFKATIDDPARFKRSRSVGAYVGLTTRRHASGEIDWTGRISKCGDAMLRSYLFEAAGVLLTRVPKWSAVKAWGMRLAKRNGLRKATVAVARKLAVILHRMWIDATEFNWSKKEVAA

SEQ ID NO: 60093 - protein, 355 aa, unidentified
MSHLNSGIAVIGIDIGKNSFHLVGQDRRGAIVLRQKWSRGQVEARLANLSPCLIGMEACVGAHHLSRKLQALGHQARLMPAKYVRPYSKGQKNDFRDAEAIAEAVQRPTMKFVATKTVDQLDLQALHRVRERLVSQRTGIINQIRAFLLERGVAVRQGLRFLRVELPGILATRTDVLSPRMLRILEDLSADWRRLDARIEGLSSEIETFAHQDQHCERLMTVPGIGPIISSAMVAAIGTGDVFSKGRDFGAWLGLVPKQISTGDRTILGSISRRGNRYLRALFVQAAWVVLVKLGPKQWERYGLKSWIEAAKKRLHHNVLAIALANKLARIAWAVLNKGRAFTCVKTDAMASHPA

SEQ ID NO: 60094 - protein, 412 aa, unidentified
MKDLLEISCGLDVHKEKIVACILTGPLGKPTRSEIREFSTLIPDMIALRNWIVSKNCHHVAMESTGIYWMPIYEILEDAFYGDITLLVVNARHMKNVPGKKTDMRDSEWISTLLRAGLLNGSFIPEKRIREFRDLNRYRKSVIRDITSQKNRIEKFLQSSGFRLSSFISDIFGASGRNIILHLMEHGQIDKTTLDSCLKTKTRNRIDEILMSVNGTLSEHQKAFLRILMTHYDSLKKHLAEIETSLEEDMAPFALQVEQLNSIYGISTTASCAIIAEIGIDMKPFKTAEHICSWAGLCPGNNESAGKRKSTSVTKGNPYIKSMLCEIAWVIAGKRNTYLSAWYWRIKQKKGAKKAIVALARKLLVIIYTMLKQGTLFDESCFETRRKHCEQKQLSRYIRELEKHGYHVEAQS

SEQ ID NO: 60095 - protein, 360 aa, unidentified
MAKARTVVGLDVHATKIVAAVLDVETGELQYFGMTADIDKAAGFCGALPGPVRAAYEAGPTGYALARELARRGVGCVVAAPSKMPRASGDRVKTDRRDAELLARLLLAGKLHAVRVPGPEEEALRDLVRARESVRVDLMRCRHRLSKLLLRHGIRFDDGPAWTQRHRDWLAQVALEWPAAQATLLDSQGAIDALVHRREQLEREIVALLPGCPWAVQIGRLRCLRGIDTLTAVGLCAEVGDFERFARAEQLMSYIGLVPSESTTGQQRRLGSITKTGSGHARRLLIEAAWHYRPRPRIGKALGERQDGQPAQAVAIAWSAQQRLHRTWTRLEQRAKRRTIIAVAAARELAGFAWAICQIE

SEQ ID NO: 60096 - protein, 468 aa, unidentified
MQKSRKVNTKAKKTPKKKRSRSTALSRIHPQVAGIDLGSREHWVCAPEVTPGKPNVRTFGTTMEQLQQLADWLLEQGVESVAMESTNVYWIPLYELLESCGIEVLLVNARQLRYVPGRKTDMRDCQWIQLLHSCGLLRGSFRPHEAIVRVRTLHRQLSTLGAESTRFVQWMQKALDQMNVQIHRAVTDLTGQTGMAIVRAIVDGERDPVRLAGLRDRRCKKSSREFAEHLRGNWREEHLFNLKSALKLYDMTQREIAAYEARILEEIQALQPVERRDQPVPKHPNAIKEKAIRRRGGHHLRTELWRFAGVDLTRIDGIGTEAALTLLTEAGLDLTAFPSEKHFVSWLRLAPKTAVSAGKPLHYKKANSTGSTRAAAVLRMAAVSLKHSKTALGAAFRRKARHKGWSVAVFSMARRLAVLVYRMLCYGQDYIDIGEACYEDRFRRRRLAGLKDAAKSLGFNLVPQIAAA

SEQ ID NO: 60097 - protein, 320 aa, unidentified
MGMDIHKEKLAGCIMDKDGEIKREHIFPSSKKALEKFLLNIPSTDITIAIEACGMWRGVHQMLSDMGYQVKLANPKKTHDIACKKKTDKVDARILADLLRTHYLPEVWIPDKNTLEYRDITRHKSNLTRLRLQVLGKIRGYLLRKGVKYTKLSTEEALKHLEKQDPDIKNFVQVYRHIKKEEREVMRRIKRISQNKKETMLLMTMPGIAEFSALMIIAEIGDIKRFNSPKTLVSYAGLCPGIYQSGDTTKNVRNNMVNKWLKWITYECSGRASMLTPKFQNYYYKLKEKKGFKTARRATARKMLTIIWHMLANNETYQAS

SEQ ID NO: 60098 - protein, 480 aa, unidentified
MNNKSRKAKKQAVINNPITKTISQEELARRIAAAGSNMKSYTWRDLETQGKFTKNDKLTFISDDMLILGCDIGSETHYVRAIDARGRELSKDAYPFSNDADGFRSAKEWALQIAAKHDKKQIVLGLEPTGHYWFCLAAWMITNGISVVQVNPYAVKQTKELEDNSQLKDDRKDPKLIANLVKDGNYGMPYLPEDLYAELRRLSMLRDQLTEDRIRNMNRLHREMKIYFPEYMDAFGKLDGAFTLEVLKKAPFPEDILAIGADGLREIWHVAKLRGRGYSRADKIVAYTKESVGLKHGTSGGKEAVRWFAEQILEISKKLNEIEVRLHEKCRELPHAENLLEIKGIGENTLSGILAEMGDSTRFDDVKEIQKLAGLGLVACSSGKHKGQTKISHRGRKRLRYWLFQAAKSAVAHAEEFKTLHEYYTTRTDNPLKKMQSLIVIACKLLRIIFTLLRTGQKYDPEKMLKDIRQPSNAATEQTA

SEQ ID NO: 60099 - protein, 482 aa, unidentified
MKKRNIYQNQSQELLHLFEEAGSSEKVMCVPMDYAKNDHLVMFCNGHGDILRKPFSVKNTPEGIAYIDDQVTRSCRRRGIKREHVFFGGEDANSFAKNFVSTLRSKGFVVANVNAHDAKKQRGNVQASTDRIDLMGIATMLLNCRANCCPAQFGIYRNLRTLVRHRRRLVQMLTEVKNRVHGIVDEIFPGFLNEKNSGIIPFTQSSLYLMEDRFSPKQIRRRKRQKLVEILKRFGTSKAEYTAAKLQQYAAKVLHAPVEYVDTMQLSLAQHVKHIRCLKESVVQMEKEIALNLAQTQGAFLTSVRGIGLVLAAGVTAEIGDPNAQKPLNNLASYAGIIPRVKQTGGLDGKTYTGPVAKRCNRILKDYVVKSAYHLGLHGPQDLMNDYKCRNASGQHADFGIGRRYLRMATNLMRTSQVYLPPHLRKADSTVQDRAGYYLMSWPYLREKWKKVGALEAALANNRPLGLWRQIVQELYDIKLKL

SEQ ID NO: 60100 - protein, 343 aa, unidentified
MQTITTIGFDIAKSVFQVHGVDAGGQVIIRRQLKRRHVLAFFQKLPPCLVGIEACASSHHWSRELQALGHTVRLMPPAYVKPYVKRQKNDMADAEAICEAVTRANMRFVPTKTPEQQSCLMLHRTRHMFIRQQTAVVNSIRAHLAEFGIVAPVGRKGVTELLHVVADPNDKRVPEVARACLTALGAQLLSLKEQILEFDRLIMDWYRSNQTSKRLHCIPGVGPMLATALVASVVDPRTFRSGRNFSAWIGLVPKQHSSGGKDRLGSISKQGDRYLRSLFVAGALAVIRYAKIHGTGHRPWLTALLARRPTKVAAIALANKIARMAWAMMAKGECYKQPVALAA

SEQ ID NO: 60101 - protein, 409 aa, unidentified
MDITPIYPRVIGLDVHQAKISACAIAELADGGVTVEHREFGTFKRDLRALAEWARPFGPNVVVMESTGVYWKSPYAALERAGILAWVVNARHVKTVPGRKTDIADAQWLAILARAGLLRGSFIPPVELRNLRLVARQRQKLGGMLASEKNRLHKVLSDAGIRLNVLISDLHGQAGRAMVKAIIADQPMAEILKHTGRLRTSREDLFEALQTEDLTDTHRFVLAEILSHIETLEAQMKRFEAQLLQGLAPWQPLLVLLQTIPGIDQIGAAMLLVEIGTDMSVFGSAERLASWVGICPGNHESAGKRKSGKTRKGNAWVRRLLCEFAQAAARSHCALRDKFMALTVRKGHKKSIVALAHKMLRILYAMLSHQVPYQDLTVDYEAQMVKRNAPRWIRMLVKHGFMPQAATTA

SEQ ID NO: 60102 - protein, 423 aa, unidentified
MEVIHECVAGLDVHKDSVVACFRCISGRAAKRECRTFDTSTEGLLALRDWLTEGGCQLVAMEATGVYWMPIYKILGDGDYCVVVANAAHIKAVPGRKTDMNDAMWIADLAAYGLIKASFVPDEEGHELRTLMRTRKQLVREQTRQVQRIQKTLTEANIRLDSVISDIMGLNGRRMIEAMIGGQRDPRKLAALADKRIKASAKELYDAPHGRLTDHHRFLLKLHLGQWDALDLSVQTIDREVAARLVKLDEARKAGEARFSALIELLSTIPGVSRISALTILSEIGYDMSRFPTVGHLIAWAGLCPDQNESAGKRKRSRLRKGAPWLKTMLVQCAWAAKRATKSYYRAQFYRLQARRGPQKAICAVAASILTAIYHMLKTGTPHEDLGIDDFDRKTPETKAKRLAAQIAKPGYKVTLTPAAQAA

SEQ ID NO: 60103 - protein, 325 aa, unidentified
MSNFSNYVGIDVAKKDFYACFDEQSESRKFNNTTLGINSFLRQLSDSRFQNQDTIIGLESTGSYHLRLCLQCSTRGFQVKVINPLIVKKQNQTNLRRVKNDRQDASLIRYCLTTGAGYVFSETPDTLLLKSLVRQRNSLANMLFKNKRQQDDVNYKEDCLKTKFNPVYQEIGLILSQKMKELEKQLRTFRKPEQKLLQTIPGVGPITAVSFIAEVGDIKRFKLSKQLVAFVGLDSRVHQSGTSIRGKGYISKRGNKILRTRLYNAASVAVLHPNLFRRFFQKKRSEGKPYKVALVAAMHKMTHVIHSVWTNNKPFVDLTNTPKEG

SEQ ID NO: 60104 - protein, 379 aa, unidentified
MNAITLYLGLDVHKDSITIAIAQAGPKGEVRLFGTITNDMQALEKALGRIRKAHPGAHLEVAYEAGPCGFVIARRLKQLKVPCLVVAPSLIPKQPGSPFKTDQRDARTIARLLRVGELTGVYVPEPTDEAIRDLCRARTDAVDDLRRCRLRLKAFLLRHGYRYQGKANWSAAHMRYLRELVLPHPAMKAILEEYLQGIDAADQRILRLQNSMFDLLPTWRLQPAVKALMAMRGFQLVAAMITVSELGDIHRFEHPRQLMTYLGLVPTEDSSGPRQRLGHISRCGNGHQRWLLTECAEHYLLPPKVSKELARRQEGQPPEVRELSWKAQHRLHLRFNRLLARRLQRNKAKVAIARELCGFIWALLRTQKCYLLSTGGAAS

SEQ ID NO: 60105 - protein, 331 aa, unidentified
MKKVTETIGIDVSKLTLDVFVRITNVHKQFSNDTKGFKQIISWLNKQKINLDQTLFCFEHTGWYCLQLSYFLYENDYRYCCINAIEIKRSMGLKRGKSDKADALEIANYAWLRREELVPSTPPAKKLIELQRMMSLREQLVKQQTASKNLLKGMASIVEDDKSDVSMTILKENIGQLENQILTTEKAMNELIKQDEAMITNYKLSKTVKGVGMVLAVQMLLHTHNYTRFESSRQFSAYCGLVPYPYQSGTSINGRNKIHPISDRKMKSLLSMSAISAIQHDNELKIYYKKRLEEGKPKMVVLNIIRNKIVSRVFATINRGTPYVEMNKFLA

SEQ ID NO: 60106 - protein, 310 aa, unidentified
MERIVVGIDVAKPHLDIHVRPTDERFRLLRDEAGLGQLVERLRALGPVLVVLEATGGYEVPVAAALGSAGLPVAVVNPRQIRDFARATGQLAKTDTLDALIIARFAEVVQPEARPLPTAQAQALGELVARRRQLTDMLGAESNRQQQAHDPRLQRRIATHIRWLTKALAELEADLDDTIRSSPLWRAQDHLLQSVPGVGGVTAFTLIAELPELGHLDRRKIAALVGVAPLNRDSGAWRGRRMIAGGRPTVRGVLYMAALTAIRFNPVIAHFYQRLTAAGRPKKVALIAAMRKLLTMLNAILRDQRPWQSA

SEQ ID NO: 60107 - protein, 411 aa, unidentified
METVVERPAALDVHKEQVTACVRVPADGGREQHIAEFPTTVRGLLALRDWLEAHAVRQVTMEATGVYWKPVWAILEDDFECVLVNARHVKNVPGRKTDVSDAAWICQLAEAGLLRASFVPPKPIRRLRNLTRYRKTQIQERQREANRLHKALEDTGIKLDCVASDILGVSGRAMLAALCEGTTDPEMLAELARGKLRKKIPALREVLEGRFDRHHAVWIGAILNHIDFLDEQIDALSELIEEEIRPFAPIVELLCSHVGIQARSAQCILAEIGVDMSVFPSEKHLASWAGQCPGNDQSAGKRRSGKTRKGSKWLDWTLEEAAMAAIRANNTYLAAQYQRLRPRRGHKKALGAVKHTILTNLWHMLCTGQLYNELGNDYYRKRDPERITKRLIAQLESLGHKVTLQELPQAA

SEQ ID NO: 60108 - protein, 365 aa, unidentified
MKTVYYVGMDVHKDSVRIAVLKGAEKQTVYEATVKNEVPRIVKKVHEYKAKGAVVAGYEAGCMGYTLQRSLAKVGVECRVIPPNRVARTGSQKIKTDTRDAILIARMLKNNEGDSIYVPTADDEAARDLLRCREDIKSEVLRTKQQLSKFLMRTGFIYEQGKKQWTKAHRDWMASQAFAHELQRETFEQYISHLLELEDRLERIEAKIVDVANDAPYRERVSQLRCFKGIDYIIALALVCEVGDFRRFPTAASFMAYLGLVPSEYSSGGKRRQGGITKTGNSHLRKLLIETSWHYRYRGAPSGKLQARRIGMDETVIAYADKAMNRLQAKFAKLVYRGKSTKTAVAATARELSGFIWGAMNATYS

SEQ ID NO: 60109 - protein, 356 aa, unidentified
MKQNNKLDFTGQPIFIGLDVHKKSWEVSIYTRHGEYKSFSQPPRAAALAHYLRHHFPGALYYAVYEAGYCGFWIHDQLVQEAIGCIVVNPADVPTRNKERKRKRDPVDCRKLARGLRNDELEGIYVPPRAKLEDRSLIRTRLSMGRKQSRCKNQIKSMLLFYGVEIPEQREMGHWSRRFLRWIEGIRLERASGDMALQIHLEELYHLRQILAKLNRAILALSRTEEYHSWVSLLRTVPGISTLTAMILLLELGEITRFPSLDHLCTYVGLIPDIQSSGEKEHVGGITQRGHSYLRWLLVEASWVAIRKDPAMMESFNDYCKRMRKSKAIIRIARKLLNRVRYVLKNQAEYVPCVIE

SEQ ID NO: 60110 - protein, 321 aa, unidentified
MNKYKEIHGVDISKDVFDVVCPNGRHHQFSNAPKGFEQYLRLLGEEDLVVMEATGYYHYSLAQFLYTSRIKVSVVNPLSVKRFRQMKLAKVKTDKSDARAIRDYGRTNEVPLYDGKGALQAESLQLLALMDIYLKQRTQIKNKLHGEKVLRIPSRAVHLSLVRSLKSLDRELEALQSRLLALVKQTQQRQLTNLKSIPGLGDRTVALLIVLTEGFTKFENAGQLCNYAGITPTIRRSGSSVRGKGRISKVGNRKLRNLLFLCAFSACKHNKGCREIYERITAKGKSKKLALIAVSNKLLKQAFAIAKSGLPYDENYVSKLN

SEQ ID NO: 60111 - protein, 333 aa, unidentified
MVYTLGIDMSKKDFQAALTLDGANFFEQVVANQPAAIASYFKSMKKQVGLSLQQLVVCLEYTGIYSAPLLRFLVQHQIKVCIEPALQIKQSQGMTRGKTDQIDARRIAQYAVRNRETLRFWQPPRTVIQKLQMLLTQRERLVKIRVQLEVPIKEIGEFIEAGIAKMMQRNSLATQKAIAKDIGRIETQIQDLVKSDETLCLQYKRATSVPGVGPFTALNVIIATGEFKRITDTKKFACYAGVAPFEHTSGSSIRGRTRVSKMANMGIKKLLHLAAVSATQHCDEIKVYYERKVAAGKNKMSVINAVRNKLITRIFMCIKQERMYQKNYRNALA

SEQ ID NO: 60112 - protein, 413 aa, unidentified
MYYVGIDIAKRAHVAVIMNEDNTLKVKPFSFNNDKSGFKKLLIHLQTLCCDLSDIVIGMEATGLLFENLYRHLQSLDYNVVLLNPYQTAKFREMDTMKRVKNDNIDSVMIAALLKSGRFSEGYVSQEQLQSLRELYRHRSSIEDQIKSLKRRTSAILTVVFPELETVIRDFFNVSGLALLDKYPTAKHFHHASVERILKTFRGIKGNNFNRVKAQALLDASKRSIYSGIASDARALNIRMNIAQIRLLKEQLDETLLVMQSLFSNHSEVKQEDREVMETLIDNLRTIPGVADKTILALLAECGNLDRFYAPKALIGFLGLYPTLSQSGDSTRHGRLAKRGASLAKKAIYLASISAIRHNDEMRTIYMNYRSKGRAKKEAIIIVARKLLTIIYTIYTRNIPYDPQRVFVAKPNQ

SEQ ID NO: 60113 - protein, 394 aa, unidentified
MKLIGIDIGKNKHFFCIMDQQTGEIIFQPVSFSNDKEGFDFLIQKINSYPKDSVLIGMEDTGHYHFALLKYLLNLQYTVALINPKTTDFNRKMQGGITKNDKLDTINICDVLDTPERKKQYRISKVNSFDLYEQKQLTRHHHNLKEKENVYKNRLQKCIDIVFPEFNKLFNSKYSTVYMNILKTFGSAENIANTDIRTIRKCFEIEGRGNRISLTPERLKECARSSIGISSSAEVIQIKHLTAQIELIEEQLTEIDKKIEEFSIQNNSPILSIPGISHFSGTSILAELGDISNYSKPSQIIKFAGVAPLHYESSQFNAQHTSITKKGSKYLRKTLYQIILPVIKHNPVFNKYYQLKISQGKGHRCAQGHCVRKLLRIIYHLLKTNQQFDPQLLR

SEQ ID NO: 60114 - protein, 419 aa, unidentified
MAKVHYIAQEAVLVAIDISKKRNDVLIQIPGSTRRRRLTVLNQRAEHDRFIDQLKSFERPVLAGFEATGNYHRALAWRLVDAGIETRLISSMALARQREAIHNGWDKNDPKDAQVILHMLATGVSQTYQDPLAAGLADIQELSKTHEAVSRAKTQTIHRILTHYLPLYFPEIERFLNSSRRDWFFALLEKFPTPASITALSPEDFSMAVWDIVGKKTSKARLINDIYETAKESIGLPIPIDSKAIAMFRMVLAEARSLNRQRDAIEAEAEALLGGTRDYEALKQIPGIGPIISLTTLAEAGDLRRFGHHRQFLKFCGLDLSTHQSGTFRGQTKLSKFGNARLRKALWMAGQVAIRQKENSFRDKYTRYIAKDRDNADLKRKALSAVTAKMARTAHAVIKSGKAYRPFYEGPVPGGRTSL

SEQ ID NO: 60115 - protein, 392 aa, unidentified
MLYVGIDVAKKKHDCFIIDSDGIVHTDNLRVSNDRIGFDKLHQAILDALAGDQISNVKVGLEHTGHYSINIKRFLESQGFVVTCFNPLETSAFRKASTLRKTKTDKCDAKVIATMLFSDRSIPTLVPSYQIQELKSLTRHRFRLIGYRGKLKVSIARIIDIMFPELPDAVWSIHQKSSYELLLEFPKPNDIANCHLTKLTSIIRKGSHGKYGREKAISLRELAASSIGSANRARAFELQQTIRLIQNIQKEINALDQEIRSIVTELDTPLLSIPGISYTLAAVILAEIGDIHNFSSPSKLQAYAGLDPSTYQSGKYTASHSTMVKRGSTYLRWAMFQDARLVSMRDRTCADYLAKKRAEGKHFNVALSHVSKKLLRTIYFMLMHDVTFVPQS

SEQ ID NO: 60116 - protein, 338 aa, unidentified
MSAIKTIGIDLGKSTFHLVGHDHSGQELYRHKFSRAKLIQFISVHEPVTIAMEACCGANWLARRCQEFGHEVRLIPPQYVKPYVKSHKNDFIDADAIAEAATRPKMRFVTPKSEQAQLGSVIRRIRTGYIRERTAVMNRISSILVEFGFSFPRGHANMKRLFQWLADTGQSVHPLLVFELREQLDHYNLLNEKIKEQDKKIETLNDDNELFTLLQSIPGIGPMTAACCLSAVSNPKDFSNGRNFAAWIGLVPFQYSTGGKSRLLGISKRGNKELRELFVHAARSVLWRDATAEKYFGTWLLDLKRRKPFNVALVALANKLARIAWSVMATHKTFEIRT

SEQ ID NO: 60117 - protein, 363 aa, unidentified
MVVLIGADVHKNSHTFVAVDAAGKQIGQITVRATHNGHEKAYRWARKQFIEQDRRWGLEDCRHLTGLLERDLLAHGEPVVRVPAKLMARQRAAARTRGKSDPIDALAVARAMAREDDLPAAFTDEQAREVKLVLARREDLVAERTRVINRLRWHLHELDPEVDPAPRALTHRPAQERVRELVEASEGIVAEIAGMVLADLERLCSSISELDARLRAMVQDLEPELLEIPGCAELSAARVLAETAGIKRFATESKFAMFAGCAPIPVWSGKTEGRVRLNRGGNRQLNCAIHRIAITQTRLEGPGKEYYERLRADGKTVMEALRCLKNQIARRLWRTLTRAHAEALTHTPTPLNPTSTTCLEQAA

SEQ ID NO: 60118 - protein, 386 aa, unidentified
MQADANQTESSVAVRTDLAAIFVSLELSRSKWLITSLSPGAGEKMSKFVVPGGDVSALLERFEHLQRKAAARSGRSFRIISIQEAGLDGFWIHRVLEDSGIESYVVDPASIAISRRRRRAKTDRIDGETLVRALLAHKRGEPRVCAMLHVPTPDEEDSRRLVRERKALINERIRHVNRIKGLLFSQGVSGYEPLNRDRRERLEALMTGDGRPLPKALKAQISRELARLELLIEQIGDVEEARDAVLAEAEHSTRGPALLLNLRGIGPEFAAVLWSEGLSRRFDNRRQVAAYAGLAPTPWQSGQISQDQGVSKSGNPRLRATLIQVAWLWVRHQPTSALAAWFKARVSQNGGHRKKSTIVALARKLLVALWKYVNAGVVIEGAVVRT

SEQ ID NO: 60119 - protein, 367 aa, unidentified
MFHRQSDSATTFVGLDVHKNSITSAVLAPGAEVAVIDRFFPDEPSIRRFVGQLGDPRALAVCYEAGPTGYALARLLDRMGVDCEVIAPSLIPMMAGARVKTDRRDARRLAELHRVGQLTPVRIPTEAEEAIRDLCRTRSDLVTDRTRARHRLIKFLLRHNVVFREGSHWTMRHEAWLAKVAFDDEALSRTYARYRSVLSGLDAELAAVEADLRCYFEEGPYAECVARLAAYRGVTELGALALGAEVGDWSRFPRASSFMGFCGLTPAEYSSGDRTKRGRITKTGNIHLRTALVESAWAYQHHPAAGAEIKKRQARASDETVARAWKAQIHLTSKFRRLSATKSSRNIVVTAVARELAGFLWAEMTAA

SEQ ID NO: 60120 - protein, 327 aa, unidentified
MNLHTLGIDIAKLKFDVCLITTSGKLKHKVLPNTAAGFAQLSAWLTKHEVARAHACMEATGAYGEALALHLHQAGHTVSVVNPAAIKAFAASRLSRTKTDKVDAELIARFCVALQPLAWTPPAPEVRQLQALVRRLEALVEMRTAESNRLEAIISVDVVKTSVEEHVAYLDQQIEQTQALIRTHINHHPRLKQQSALLDSLPGIGETTAALLLAEIVDVTQFASARQVAAYAGLVPRERRSGSSVRGRTRLSKIGNARLRKALYFPAITALRCSPFFKAWAEGLRGRGKCKMSVIGAAMRKLIHLAYGVLKTGKPFDPEWMQNAKSA

SEQ ID NO: 60121 - protein, 345 aa, unidentified
MYYIGIDVSTKESALCILDDKGKIVRETKLPTDPEIIARFIAATGLAIDRIGLESGCTAAWLFAGLQRYGWTVICIDARHAAAALQAGFRNKNDRNDARGIADLMRVNKYRPVWVKSPEAQRQGRLLTARAALQSQLVALENTIRGLLRQEGIGLTDRRTAFEAAVREAIGEDRLLEAAVHPLLEICNAVLQHRATLDRQILRIVRVDPVCRLLMTAPGVGALVSLAFKVAIDDPRRFSRSRDVGAHFGLTPREYSSGEVSYHGRISKMGDREVRRLLYIAASRMLRRDAALWCPLKVWAVRLAQRVGIRRARVALARKLAVVLHAMWSDGQVFQWRRAKASASA

SEQ ID NO: 60122 - protein, 429 aa, unidentified
MSYRIAGIDVHKKMLAVVVSNVEVESEFQFERRMFGGNPEQLRLLGAWLLEQEAEEVVMESTAQYWKPVWGALERYWKPIREKREGAKRRSGTLHLAQAQSNRGQRGRKKDFVDAERLVKRLVARELTLSFVPDVEQRLWRAVTRKKYQLRRDLVRLNNQLESLLEETHIKLSSLVSDLLGVSARRMLNALADGETNPAALAALAHQRLRATPDQLCDALGACTELKPVYRRLVKMALEQLQILEQQIGQLDQELATLLHPHQDAVQRLAEVPGFGVDSAQQIIAEVGPAAATFPSEKCLSSWVGACPGDEESAGVNYSHRSPKGNRHMRRLLNQAANAAVKVKGSIFEVIYRRCVPRLGHNQAIGVIAHRQCRLIWLILHNGTLYEERGPAVTTLSKYKRTWRMIRQLRQLGYRIESPNPQPSQAPAQ

SEQ ID NO: 60123 - protein, 412 aa, unidentified
MLFVGDDWAEEHHDIEVQDETGKVLAKKRLPEGLVGMVALHELLGRHVPASWADLDPAEAASRVVVGIETDRGPWVAALVAAGYRVFAINPTSAARYRQRHSMSGAKADSTDAHLLAEIVRVDRSHHREVAGDSPEAQAVKVVARMHQTLIWDRTRHLLRLRSALREYFPAAIRAFGELDAPDTLELLALAPDPDAAAKLTKTRIVAALKRAHRRNTDERATAILQVLRAPELRLPAPVQDAYAAGIVSQVAVLGVLNEQIDQLSVVVGEHFGRHRDAEIYTSLPGLGVVLAARVLGEFGDDPHRYADSKARKSYAGTAPITKASGKKKVVLARYARNDRLADALQQWAFGSMRGSPGAKAYYKTLRGRKISHQGALRQLGNRWVGILHGCLKTAQLYDEDTAWSHHIQAVA

SEQ ID NO: 60124 - protein, 372 aa, unidentified
MDKKIIGIDVSKKTLDVAFYDGKLKSHKKVSNDVTGFQEMEVWLSSLSLDGSECFFCMEHTGEYTYSLTAYLQEKEWAYSVVGGIDVKRYFPYRKGKSDKADSAMIAQYAYERKEQLKLSKMRPSIVYQLRSLYNERNLYTKQRADLKAQITEDRIYDSEAKKLRLKRQIENLSLAIREVESEIQALIDSEESFHKNYDLCLTIPGIGKVSAWQIIIATGNFTAFKSARKFASYICVAPFPYASGTSIRGRDHTSHVGRKDIKATLTQAAKSASYHDTQTKEYLARKVSEGKNYGVVINAIRFKLLCRIFAVIKRQQPYVETYAYKAKQNSSVGERRAARGRTTGPDERNSSVGYTNLVKSSSLTIINPKYN

SEQ ID NO: 60125 - protein, 402 aa, unidentified
MNSVGIDISKGRSTIAVMRPFGEIVISPFEVRHTDSELSELARRLKSLNGETRVVMEATGNYHAPVAKLLHDAGLYVSVVNAKLVHGYGNNDLRRVKTDRKDAVKLANYGLDHWLTLPRYIPEEDTRLMLKICYRQYQQYSKVQTMLKNNLISLLDTAFPDANRLFTSPPRADGSEKWVDFVATFWHCECVCGLSKKAFTAKYQKWCRKHGYNFSEDKALDIYASACRHFGVIPKTDTAKLLVEQAISQLQTTSSALAALKQEMQSLAASLPEYPVVMEMFGVGHTLGPQLIAEIGDVRRFHSKKALVAFAGIDAPPYQSGQIDVRSRSISKRGSASLRRTLFLVMGVLLQCAPMDEPVYQFMNKKRSEGKPYRVYMMASANKFLRIYYASVKAYLDSLEHN

SEQ ID NO: 60126 - protein, 312 aa, unidentified
MANLVYAGIDVGKDKLFVNIHLDSQVRDFPNTHSGLERLSRFLIKNAVNLVVMEASGGYERLPASDLRARGLSVAVVNPTYVRRFAQGMGTLAKTDTIDARLIAHFASVKQPKPQQAKTVEEEELAALVERREQLVSLLSVEKNRLSKASDYSKASLQISIQFLTGQIASIETEIKALVAKSPERLARMRCMCSFIGVGDITAVTLLTEMPELGMESGKHIAALAGVAPINRESGKMKGKRRTYGGRARVRRTLYLAALSASRHNPIIRAFYERLLAAGKEKKVALVACMHKMLTILNAMLKKGELFNPEYS

SEQ ID NO: 60127 - protein, 392 aa, unidentified
MSQHFRFDASRSLTALEQDSTIVAVIEMSQTKWLVAALVPGIERQPLKKFDAQEEMLLKLLHRWRCEAGQAGHNIKRIVVAFEAGRDGFWLARWLRARDVEAHVIHPTSIAVSREHRRAKTDRLDTELLMRVFLGWLRGEKRHCSMVAIPTIEEEDARRPNRERQNLVTEQTRIINQIKAIFSRFGIRSLRPTKRKLAEGLEELRTAEGTPLPQNTLSELRRHLARLRFVRDQIRAVEQERLRKLAVAPAAETKSPDAMVRLIARVFGAGIETADMLVNEIFSRHWRDRKAVARYAGLTGSPDESGNRRRERGLARAGNVRVRCGMIQLAWRFVRFQKNSALAHWFAARTADGRASTRKTMIVALARKLLIALWRLVTRDEVPHGVVLRPAS

SEQ ID NO: 60128 - protein, 325 aa, unidentified
MPCQSSYIGVDASSDYLDFDGLPGESRRRLCNTPESHAALAALLSGSRGDDRDVVVVLEASGGCERGLHRVLVEAGVPAAIVNPQQVREFARSQGLRAKTDRVDARAIRMFGQVRHPRPTPLPDPVRAELIELLGYRNQIVAEITARTLQRGHLTSAFLIKQADAALERLRRESEMLAQLIEATVASDPWLSRRAEVLISFPGVGRLVAAELIAAMPELGKLNERQAASLAGVAPFACDSGKRRGVREIAGGRPRVRRALFHVARVGLRWNPVLKTLYERLTARGKPGKVALVACMRKAVVILNAMLKAGKEWDPGHKPASAAPT

SEQ ID NO: 60129 - protein, 346 aa, unidentified
MLYAGLDLSRKRLDVHILDEDGQTVEVTAVSPDAAGLRRLAAHVLHFGHEVYGAIESMTGARFVHDTLERYGWDVAIADAAKVKGIAPLAAKTDRIDARVLAELARRELVPEIWLPDPTVRAERERARFRLHLVHHRTALKNRIHATLMTFGHPVPVADLFGAGGRELLARLALPEPWTGTLATSLRMVDVLGAEIDACEADLRRLGADHPSIPLLLTVPGIGPILAYTIASEIGDIGRFSSPKKLTGYTGLCPIVRQSGNRDVRGPLAKNGPKYLRWALIEAATHAARDAHYRDRYERTKRRLGRQRGAKVARIDIARKLAEAIWHVLTKNEPFAPAGPTKLLVA

SEQ ID NO: 60130 - protein, 356 aa, unidentified
MSIVAHTHPFVVGVDTHARNHVYTILTAATGAVVDTKDFPTTAAGINRALAWIARRTEADADTLWVIEGAASYGAILAGTVAAHGYPVAEAPRMDAKQHRGVGKSDALDAHRIAAAALPLPTTKLRRPRLSDGVRQAIQILVTARNAMSKDRTRSINALTALVRSNALGLDARAALNKTQILEVSHWRGRKEELSISIARAEAVRLAKHVLELEEHLATNEQQLDELVRISEAAPLLEEKGFQAISAAKCLAAWSHHGRISTEAEFASLAGVNPIPASSGNTVRYRLNRGGDRALNSALHMVTVSKMTHDAETRAYVEKRQAEHKTNREIRRCLKRYIARRVFRILNAQHKVLQPA

SEQ ID NO: 60131 - protein, 446 aa, unidentified
MSDTTASSQPTFAACIGIDWGDKKHAWALQVAGSSQVEKGELEHTPEAIQEWVAQLRQRFPAGWLAIALEQSRGPLVFALSKYERLVLFPIHSTSAAEYRKVFRPSGAKGDGPDAALHLDMLVRHRDKLRPLNPDTPETRALQLLTADRRQLVDERTRFCNRLRDNLKSYYPQFLQWFEDPYAPVALDFLQRWPTLEELQKAKPATLRKFFQEHRCTDEAKNETRLEAIRSAVAATTDFAVITAGRAAACAAVGTLATLHESIREYDRQIAQIAKAHPDFAIFSSLPGAGEVLVPRLIAAFGTQRDRYAHASEIQQYSGIAPVTVDSGQQHWVHWRWSCPKFLLQTFHEWAGHSILHCDWAEAYYRAQRDDKNKSHHAAVRSLAYKWMRIVFRCWQDRVPYDDARYVATLQRRRQASPASKPSSSFDLPIRWTSCGSFQKLALKNS

SEQ ID NO: 60132 - protein, 451 aa, unidentified
MQDKYFLGIDVSKGYADFIILDKNKKAVEDNFQLDDTFEGHNRLFKILSDFMTKHPESSIFAGLESTGGYENNWLGYLTKCQSKLQLSVARVNPFGVNYNSKATLKRIVTDKESAKNVAEYLISHPEKVQYNKEDYYSSVRRQWTFIKMLTKQKVQLLNQLQSLLYIANPEVLRYCRSKVNLWTLKMLKQYPTARHLAKAKQESLAKVPYISEALAENLIDNAKTSVASGTDDTTAEIIKALVDEILQLRKLLYLQTKQLENSCSLEEVQLLKTFKGIGTYSAAGLMIEILSVERFSSVKKLASFFGIHPVFKQSGDGLSGYKMSKRGRKEPRQILFNVARFAIVHNPYIKEIYALHLKKGMPKMAALGAVMYKILRIVYGMLKNNSPFNPEIDRANREKHNANSTQNKPDYKRRYQPVEPEAPVSRRQIKKRKEQEKSQILKPLNAESTK

SEQ ID NO: 60133 - protein, 331 aa, unidentified
MNVCVGLDIGSRTSIVGVRKDGRPAGQWDIAQTPAGRKAAVKKLQALKPKSIVMEATGIYYLDLALELHAADLPVSVINPKSFHNFAKLMLVNSKTDAIDAQLLSEYGERMTPRLWTPPSRVQLELRALGRHINRLVGHRTRAKNELHALQATATTVSMLIEDQEEAITTLDNRIERFRKAGRELIAQCPMLNQQYKQLLAGPGMGEVSALAALAELTTLPPMLKSSQVARHAGLDVRQTQSGTSIDKPGRLGKSGNAYLRAAMYMPALTAVRCDPYAKAFYESLVSRGKKKMQAIAAVMRKYLTGIWACMRGDEPFDTAKLFSSEHLRKA

SEQ ID NO: 60134 - protein, 408 aa, unidentified
MKVVFGIDVSKSASTVCELIGESKNEFEITNDRPGFLQLLKELHVFAIHPQIIFEATGVYSRRLQTFLEDYGYDYIILNPLKAKKEMDQGLRHNKTDRNDAYHLALIQKLYHHPVNQSQAEEYHQLNALSRFYDQLTSDLIMAKNRLHQALQSTFPEIETLFSNSKGNNYWQIIKQYPHCESMIESDKEQIVRWLLTLKGFGNKHAQKTAKKLLKLAHKSYPVVKDDSVETKQARYYADRQLVLSSQRERIIDQMTALAKKLPNRDLEILESIPGFAQTTAVRVLAELGDMRRFSNPNKINAFIGIDPGRYQSGEMDSSLSITKHGNAVARKILYRAIGQIDNAAKTNPCHIADYYESKKRSSQTKGFKKIAIASIHKLIRTIYALIQNDQLYDYSVATHNQKDFCRN

SEQ ID NO: 60135 - protein, 330 aa, unidentified
MEQQQAGPQAHEFIVGVDVAKVKVDVCLRLPSGKSRSKVVPNGKAGFEELVAWLTKHGAQHAHVCMEATGPYWEAIAEHLSDAGYAVSVVNPAQIKAYGAALGVRSKTDAADAKLIAQFCAAQPPALWQAPPPAVRVLKALVARRDALVELQIQEGNRLQVAHDSVRPSIQSVLDLLAQQIREIEKRIRQHIDDDPTLKSQRELLDSVPGLGDATIPVLLSQFGGPLRFASTRQAVAFAGLDVRHYESGSSVRGRPRLSKRGNGRLRRALYMPALVSMRLTPWGRAFASRLTAAGKPKMVILGALMRKLVEIAYGVLRSGKPFDANLHSA

SEQ ID NO: 60136 - protein, 402 aa, unidentified
MIDTSSVGVFLGLDVGKSTHHGHGLTPAGKKVFDKSLPNSEPKLRAVFEKLAAKFGTVLVVVDQPASIGALPLTVARDAGCQVAYLPGLAMRRIADLYPGEAKTDAKDAAVIADAARTMPHTLRSLELTDKITAELTVLTGFDQDLAAEATRTSNRIRGLLTQFHPSLERVLGPRLDHQAVTWLLERYGSPAALHKAGRRRLVELIRPNAPRMATRLIDDVFDALDEQTVVVPGTGTLDIVIPSLARSLAAVHEQRRALQAQINELLEAHPLSQVLTSLPGVGVRTAAVLLVTVGDGTSFPTAAHLASYAGLAPTTKQSGTSIHGEHAPRGGNRQLKRAMFLSAFAALHDPASRTYYDRCRARGKTHTQALLRLARQRISVLFAMLRDGTFYEPRTPEAATT

SEQ ID NO: 60137 - protein, 449 aa, unidentified
MSRPQVIDDEQHERVRERVAAVDVAKDSGMVCTRTRHPSRPGARRSTVWTVKARMGAVRALGRQLHKDGIEIVTPESTSDYWRIWFFILEACGLAVQLVNAAQAKNLPGRPKTDKLDAQWLARLTEMGLLRASFVPPKAIRDLRDYTRARTRLIRERTRCWQRLEKLLEGALVKVSSVASKLTTVSAQDMIKAMIAGERDPEVLAGLARTRMRAKRDDLVQALDGMFDDHHGELAGMLLDQIAFLDGRIAQLSARAAELTAAMPEAWGINADGTTGPDAGAAPGAPVLPAVARLAEIPGISDDLARAIIAETGLDMSRFPTAAHLVSRAGLCPSARQSGPRIRAGKKGQGNGYLRGSLGQAATGAARTATFLGERYHRIARRRGKAKAQVAVARSILVIIWHLLAGPAARYTDLGASYYQTRTDTDRKLRNHIRQIHALGFEVTLTKTL

SEQ ID NO: 60138 - protein, 363 aa, unidentified
MNATAALPVVGVDLAKSVFQLAIANGSWRVVEQQRLTRTQFERWFANRAVGLVVMEACGSAHHWARWLNARGIEVRLLPAAYVRAYVKRNKTDAADACALLEAARCAEIVPVRVKSIEQQALQGLHRTRSLWMATRTSRINALRGFCREFGISIAQGSRLGVEQIGRVLADPHSAVPALIRTTMQLVVEEIRLLEVRIAQLERELTALARQSPACTTLLSIPGVGLLTATAMVAATSGAVSHFRDARHFASWFGLTPKEHSSGGTRHLGRISKRGDRYLRMLLTHGARSVLRAASVAVRAGKTVDGLRQWALGVQHRANHNKAACALANKLARICYATLRDGEPYVAARLHKKLTRTAFALPA

SEQ ID NO: 60139 - protein, 313 aa, unidentified
MSQPVYVGIDVAKDTFCVAACPKVLKLDLPNTPQGHRHLCQALSQYSIASIVLEATGGYERSLAAELLSAGMPVVVVNPRQVRDFARGIGQHAKTDPIDAQLLAQFAEMVKPVPKTHATPQTSQLAELVRRRRQLNDLRTQESNRESLIHHPKVKKSIRKMIKTLDFQIREIDQLIRDQIEADDDFKSKDRIIQSTPGVGPQTSAMLISNLPELGQLNRQEISALVGLAPWDRSSGKWDGKAHIWGGRKEVRCGLYMAAFNARQWNPIIRDLADRLEQKGKPYKVVMTACMHKLLIILNTMMRNQSVWTPKIV

SEQ ID NO: 60140 - protein, 424 aa, unidentified
MSNIIHPKMQYTYVGIDSHKETHTAVFMDCFFEKLGELTFENLPSEFGSFLTNAQRFLMEGTTFMFGMEDCNSYGRTLMRFLKENGYPVKHANALLVSRERKIGNFVHKTDSIDAFCVARLLLSKFGEIPDAEPEDKYWILRSLVVRRGFLVRQKAAAKHYLSSLLTQCYPNYRRYFEKIDCKSSLAFLMQYPSPQTLKNTTAEELTALLEWHSNMHVGMAKAKEILGSLEETTVPYQEVRDVVLQSTVRQLVFIKEEIARMEERISDFLKQFDCTLTSMTGIDTVTAAQILSNIGDIKKFSTPAKLARYAGIAPVSYSSGKRDTQFANQRGNRELNTLFFWLAVRLTMKHGPKHRIMNSFFYDYYNRRMTEGKTKRQALKCVERRLVNIVWTMLTHNEEYVNPPTYSLLDDDTPDNLDELEEA

SEQ ID NO: 60141 - protein, 347 aa, unidentified
MSQTLDTVAVIGIDIGKNSFHVVGLDSRGAIVLRQKWSRGQIEARLANTPPCLIGMEACVGAHHLSRELKALGHDARLMPAKYVRPYSKGQKNDFRDAEAIAEAVQRPTMKFVATKTADQLDLQALHRVRERLVSQRTGIINQIRAFLLERGIAVRQGLRFLRAELPRILAAPPAVLSSRMVRLIEGLAEDWHRLDERVDRLSNEITALARRDAGCERLVSVPGIGPIISSAMVAAIGTGEAFSKGRDFAAWLGLVPKQISTGDRTILGKISKRGNRYLRVLFVQAAWVVLIKPQSWERHGLKRWIEAAKKRLHRNVLAIALANKLARIAWSVLASGGRFEVRSAAA

SEQ ID NO: 60142 - protein, 354 aa, unidentified
MSEKPISAVAVIGIDIGKNSFHVVGHDDRGAIVLRQKWSRGQVEARLANMPSCLIGMEACVGAHHLSRKLHGFGHDARLMPAKYVRPYSKGQKNDFRDAEAIAEAVQRPTMKFVATKTADQLDLQALHRVRERLVSQRTGIINQIRAFLLERGIAVRQGQRFLRAGLPGILAAPSDILSPRMVRMIEELAGDWRRLDERIEGLSAEIGAVARQDASCERLMSVPGVGPIISSAMVAAIGAGDAFSKGRDFAAWLGLVPRQMSTGDRTILGKISKRGNRYLRVLFVQAAWVVLIKPKSWERHGLKPWLDAAKKRLHHNVLAIALANKLARIAWSVLARGRSFEARKIDEATAQPA

SEQ ID NO: 60143 - protein, 349 aa, unidentified
MGEVSTIGVDIAKSVFQIHGVDAAGMVVIRKRVGRAKVLEFFAGLPPCLVGMEACATAHQWARELKKFGHDTRLMPPTYVKAYVKRGKNDAADAAAICEAVTRPSMRFVPIKSVEQQSALMLHRTRDLLIRQRTQLINALRAHLAELGLVAAKGHEGLHQLVTAVAESSDERLPSNARFACQAIVAQLSAVQTQINGIDTRITQAHRANADSKRLDAIPGFGVILSTAVVATMTDPKAFKTGREFAAWIGLVPRQNSTGGKERLGSISKQGDRYLRRLLVLGAISIVGTARTRPDKYPWVTELLGRRPAKVVAVALANKMARTAWAVLARGETYRAPTRSSSAAIAAAA

SEQ ID NO: 60144 - protein, 367 aa, unidentified
MKKISTAAVKTTKNVSEQKLTIGFDLGDRSSWYCVLDEAGSVLLEQRVSTTPKAMKEVFGGMPHSRIALETGMHSPWVSRLLSELGHEVIVAHARNVRLIGESRKKDDRLDAQTLARLARIDPQLLCPVRHRSARAQADLTVIRARAGLVRARTALVNTARGLAKSYGERLRGCNVRNMNPEKAEGLSPELQRALEPLLVATESLSERIRECNERIEELAQKSYPQVALLKQVKGVGTLIALTFLLTLEDAHRFRKSRDVGCYLGLQPGRRNSGQSEPQMHISKEGDPYLRTLLVQGAQHILGPFGTDIDLRRWGLKLAERGGRNGKKRAIIATARKLAVLLHRLWVSGEVYEPLRNSNRIAMPAAA

SEQ ID NO: 60145 - protein, 413 aa, unidentified
MQTLVEHGCGLDVHQSTVVACLLRVRQDGKVQKQLRTFGTTTRELMGLREWLLSEGCTHVAMESTGVYWKPVYAVLEGGELEIVVANAQQVKKVRGRKTDVKDAEWIADLLGHGLLRSSFVPPQPIRELRDLTRYRRKLAESRSAERNRLLKLLESANIKLASVATDVFGLSGRLMLKALVAGQASLPEMAELAKGKLRRKIPQLELALEGKLQEHHRFLLQLQQDRLDAVEKDLATLQQRIQQKLQPYAAQLALLREIPGVDQTLAAVIIAELGVDMSVFQSVSQLASWAGVCPGNNESAGKRKSSRIPKGNVYLKTALVEAASAAARAKGTYLRDKFYRLKARRGYRRAAVAIAHKILVSIYHMLSQSVSYNDLGDLYLDKLNTHHLTRNLVHRLQRLGYTVTLTPQEKAA

SEQ ID NO: 60146 - protein, 391 aa, unidentified
MVCVGIDVAKDKHDCCILDSDGTVRADCFTIPNNMDGFKQLLQTIRNCTKKSDKIKVGLEATGHYSYNILGFLLDNDLAVYVMNPLHTNLYRKSLSLRKTKTDRVDARTIATMLLSDVDLKSYTDTAYHNEELKSLTRYRFDKVCERAKLKQSVSRLVTILFPELEKLVSSLHGVSVYALLSEYPGAKQISEAHLTKLTNLLATASKGRYGKDKAIQIRDAAKTSIGSVMPAKFLELKHTIKLIRELTSEIDEIEDSIQQIMDELHPPLLSIPGMGVHSAAMILAEIGDFSNFDSPDKILAYAGCSPSTYQSGKLTNCYAHMEKRGSRYLRYALYNATKYVCHWNPVFAEYLAKKRAEGKHYNVAISHATKKLVRLIYALQKSGKAYLTTA

SEQ ID NO: 60147 - protein, 346 aa, unidentified
MLYVGLDLSRRRLDFDVLLPDGGRLERGAVPPDVDGLASLVQRLDDANQPVCAAIESMSGARFVHDQLELAGWDVRIADAFKVKGLAPLACKTDKIDSWVLAELGRLSLVPEIWLPDPSVRAERERARFRLHLVRHRTALKNRVHSRLITHGVPNPTSDLFGSSGRELLARLCLPEPWRSTTQASLALIDLLDAEISGIERELRALGVEHRYIPLLITCPGIAWVLAFTITSELGDISRFPTPTKFVGYTGLCPKVDQSGERDWRGPLRKNGPNYLRWALVEAAHTALRHPSYQPTLARQTARHGRKRGRKIAAIEVGRKLAEAIWYMLSRNQPFAPAGAKQVLTA

SEQ ID NO: 60148 - protein, 429 aa, unidentified
MRAESTPGARGPVFCGVDTHADSHWLCVLDWRGRKVLSRQFPADAAGYEALAGAIAAAGEPACVAMEGTSSYGAGLTRHLASLGMPVREALSPARTQRRRPGQGKCDEADAERAARAAMSGSRLGTPKSQDGWVDGVRCMLAARSGAVKARTSAINTARSLLTTAPEGLRSRFRGMGGPRLMEELPSVRAEGALGAALGALADLWAAARDAALDMERAIEASLEENCPALLAMYGCGPVSAAKLAVAAGDNPGRLRSEASFAAICGACPIPASSGKTVRHRLNRGGDRQANSALHEIARQRVMRDPETAEYAERARGRGKSDREVMRCLKRYVAREAYRALMHPHEIRGPEDASELVAARRAAKVSQVRAASILGTSEKYISMLERGQRELKPIRRAYEAWVEAGLPLDWDRQAFEAERKMDSKKHLAK

SEQ ID NO: 60149 - protein, 339 aa, unidentified
MELCCGMDLHSTNTVVGIIDEKRKHLIDRKLPNDPELIRNFLKPYKTDLKGIVVESTYNWYWLADLLQEEGYRVHLSHPVANEQYNGLKHSNDKHEAFWLAELLNLGILKEGYIYPRQARSLRDVLRKRAHLVRVRTALLVSLQHMISRNYAVKVKTGDIKRLKEDVVSPVLKNEEALLLAGTSSKEVIDCLTRQIDKIERWALKRLCREGGLTQLITLPGVGDILGMTILLETGPISRFREVGNYASYCRKVSSRWTSNDKVKGRGNIRNGNRYLAWAFSEAAEHARQTNEACRRFYDRKLRQTNTKVAHNALAHKLARAAYYIMKDHVSYQEEKMFS

SEQ ID NO: 60150 - protein, 392 aa, unidentified
MPISVGIDIAKEAHWVTAVDADGLVRLDRKLPNTPTDIAALIEELVSLGGAIRVGLDVVGGIAGLAEAMLATAGLALVHVPGLAVNRARQGTTGGENKSDPRDARTIADQVRTRSDLRPIDPASELDLEIRLLVGRRRDLVDAQTQRLSRMHDLLVGIFPGLEACLDLKAKGPLHLLTRYVTPAELRAAGKKRLVRHLKAARGLPHVEALVDRALAAAAEQTIAVPAERMTARLIRELATEALVNRIRLLDLDRELEALLERHPDAALIRSLPGMGVVLTAELIAEAGDLSRFRSADALAAAAGMAPVLRQSGRTRFLRRPSGGNKSLKRVFYQSAFCSLGHDDSRIFYDRKRREGKHHHQAVIALARRRVNVLWALLHSRTPFQTGFKAAA

SEQ ID NO: 60151 - protein, 443 aa, unidentified
MAIVRQNVAGIDLGSERHWVCAATRDRSGREVASFGATTAELLRMAEWLKARQVESVAMESTGVYWIAPHEVLEAQGLQLLLVDTRQLAQVPGRDKKSDPTDCEWIQRLHSCGLLRGSFRPEPAVCMLRTLVRDKANLVAQSGDWLRRMQKSLDQMNVRVHRAVSDLDGATGMAILRAIAGGERDAGKLAKLRDRRCSKTEQEIAEQLNGHWREDHVFSLLQALKMYDAVQERIAAYEQEILRKLGEMEREEQRGQTAPPLNNMNKAKAIKKRGQEPRRQALYRMSGVDITQIDAVAVETVEVPLSEYGPDLSRFPMEKQFVSHVTLAPRVPKSGGKPVRKKKRKSASTRVAAALRMAALSLRHSQTALGAYYRKIAQRRGGDIAVFATARKLATLIYRLLRWGLPYVDEGAAAYENRYRQHRIGRLAATAKELGYQLTPVTA

SEQ ID NO: 60152 - protein, 340 aa, unidentified
MHPYFVGLDVHKQVIAYCVKTAGGEIVKEGKIPATRSALDQWVKTLPGPWHGGMEATLFSHWIFRHLKPHAARLEMGHPARMKAISAGKKKSDKLDARTLADLLRANLFPACFVMPPELEGLRRQMRFRRLVVEETVRFKNKTAGLLMENGVEYERRRLHGKRYFAQLMDQTLIDERIDQDLRPLLEFSRSQTEELTRMDDRLMRMLSQHPRLQARVEALRKIDGVGPVTALSWALEVGDPARFSSIKRAVSYCGLASALRESAGQQKRGPLSKQRNRHLQTVLIEASKIGVMYHDKLREVHDQASQKGHANRATLAVARKLVAYLLAADRAFFAASAPA

SEQ ID NO: 60153 - protein, 391 aa, unidentified
MTNVGIDVAKEVHWVCAVDSHGALLLNHKLLNTPADMQDLVDELRRLPAPIRVGIDILGGIASLIQAVILEARFELLHIPGVAVNRAREGTAGGEAKSDPRDARVIADLIRTRRDLRKVTADSEIDIELRLLVSRRRDLTEEQTRRLARMHDLLASIFPELERCLDLRRKTDLSLLRTWVTPEEFRAVTNDQILAELKSGKVLVFARKLMAQVRACAEQQTIALPGEQLTARLIRELADEALRNRQRETELDREIEARLTAHPDAALIRSLPGMGALLTAEFIAVAGPVIRFRSPDALASAAGLAPVLKQSGKSSWLKRPKKGDKRLKRIFYQSAFASMRCPESAAFYARKRKEGKRHHQIIIALARRRVNVLWAILHNRTPYAPKPLLVS

SEQ ID NO: 60154 - protein, 381 aa, unidentified
MQSIRTWVGIDVSAKRLAAERWRDAEDKEKAREFVNEAAGHRELLKWMGKGARVCMEATGVYHLQLALMLVAAGVEVMVINPRVAKDFGGALSNRSKTDRVDAWTLLEYVRRMEFVAWKAPRAAVLELRELGRRLSELVHVGAEEKNRFHAKNVAAISRTVINDVKAHVEQIEKRVKQIEKAAMVIIRDDAGLREQFAILTKVPGVARRSAILLLTELAVLDRTMTVKQIVGHAGLDPRECESGTSVHKPPRISKLGNARVRAILYMNALTAIRYDRGARLFFARLVARGKKKKQAIVAVMRKLLHGIWIVLQRRVAFDSSILFAASLAKAESTDSAVAANQPEPRQDHPKGRSEAKELRQQLDPGSAQATRSQKKPSKAA

SEQ ID NO: 60155 - protein, 412 aa, unidentified
MEVQRNKVCGADVHKRFLIATILSRDGTKQTQRFRMNPDELSKFRTWVVENGCEQVAVESTGIYWIPVLNAIEGYVDLILANAYKIKNTSRPKTDLTDSEWMAELCLNGMIKPSRIFPKDDRDLRSLTRARERYVNDTTREKNRIHKLLDSCNIRLSSVLSNIFGKVGRYILDGLLEGKDIDEIIEGIPVKRLMKKADQIREAVKDGLDITKILLIRGSLELMAALKKRIDELEAEIRRRVVHQKENIRILMSVPGIGFISAVTILAEIGDFRDFEKPEKLAAWCGLVPSVYQSADKLITGKITKHGSRHLRWILVEVAQTVARCGSPKLMRFFSRIRERKGFKVAIVALARKILCILHHLLMNQETYEDEVTKKEARIKLAAPETSMGIEEMIEYMIRAGYEVKKKSGVGG

SEQ ID NO: 60156 - protein, 451 aa, unidentified
MGHDGDRLSRPCEHEEHANAAIQVAGSHYPKAFGRNREDGAMIRENLLYIGADLHKESHTFVLVNCWNEHLKTITIDNKPSEFTKLWQKVQRVAIKHNLQPVYGLENSYGYGRSLAVWLIEKRAIVKDVNPSLAYDQRKSAPIMEKNDEHDAYSVATVLINQFHKLPDAKPEDAYWTLGQLVTRREVLVKDGVRLKNGLHSHVFVAYPSYHQFFSEVDGKTAMYFWKTYPSPMHLKDKSAEDLLCEFKSVVPGTRKNKAQLILECVQNDGDTYRDFQESRDFITRSLARCLEKQKEELSFIDTEIKRMLEFFPYKLTTLPGVDVVTAAKLIAEIGNIDRFKNADKLARFAGISPVKFSSAGKGKDVSTKQGNRYLNGVFYFMAVTMVSVRPGTKIPFQPIFRDYFLRKLSEGKTKSQALVCIMRRLVSIIFGMMKNRTEYRPFVPEQATKE

SEQ ID NO: 60157 - protein, 442 aa, unidentified
MREVPEEIPDAESEQVLARVCAIDVAKRSGMVCTRLPGPTGRRVSRVWQVPATTNAVSDLAADLVAAGVQKVTVESTSDYWRIWFYLLEAAGLDVQLVNARDVRNVPGRPKTDKLDAVWLAKLTEKGLLRPSFVPAAPIRVLRDYTRMRVDLVRDRTRYWSRLEKLLEDALIKVSSVASTLQTVSTRDMVEALIAGQRDPQALADLARGTLRGKRAALIEALTGRFDAHHGELARILLDQIDRLDTEIAKVTERIGVLLDEIDPPSPPQTPGGDGDASARDARRRLAEIPGINTESAQLIIAEIGLDMTRFPTAGHLVSWAKLCPRTIQSGTSLTAGKTGKGNPYLKGALGIAAASAARGKGTFLSERYRRLVKRRGKGKALVAVARSILVIIWHLLADPTARFHDLGADFHDRRVNTTRKINSLVRQLEALGHTVTLQPAA

SEQ ID NO: 60158 - protein, 384 aa, unidentified
MPRYIGLDLHKMYVHGCEWIPTAPGKEKAKHFRFPNTQAGWTWLVNQVDTTCRVALEVTGSAFEAYDRLSPHVEQVLLANPRELKRLGARRHTDRVDAARLARVLALDSLPTVWVPPLPMREVRRLVHYRDQLGRARRRAINQAKRVFQRHGILLRAHASVHAAARDQDLTAIPTGDRAILASTLRQINGLEAEIQTIDAEIAARVHTVPQVRQLLTITNVGLVGAAIIWASLGDPHRFTHAKQVGRYAGLDPSIVQSGEELRRGRISKNGNTLLRTVLVEVALGLARHDHGPLGSFFRRKQSQIGYTKAAIAVARKLLIVAWRMLLTGDEYRASKPRAVARKHRTLQQMIQQIPALPTIAEAAVAQPHLTYARLRHVRTRVPA

SEQ ID NO: 60159 - protein, 342 aa, unidentified
MEHYAGIDVSLECSSVCVVDGNGKIVREGKVASEPDALINWLRSLGYELNRIGLEAGPLSQWLFAAMKVAGLAVELLETRHVRKAFEAMPVKSDRNDARGIAQLMRLGWFRPVHCKSMSAQETRSLLTARKLVQSKLHDVENSLRGILRGFGLKVGKTTGQKFAGRIEELVAGHPHLQMIAKALLAVRAVLRTEFAAFEKQTRRMVRSDRQARLLTSVPAVGPIVALTYASAIDDPARFKSSKQAGAHFGLTPKKHQSGETDYTGRISKIGDASVRTALYEAANVMLTKPVKGCSQLKSWAMRIKRRAGMNKAKVALARRLAVIMHRMLADGTPFNAAAAAA

SEQ ID NO: 60160 - protein, 449 aa, unidentified
MEQPQEAEDEEHERVYGRVAAVDVAKASGVVCTRVPGDGPASRRKMHVWTVQATLGAVTELGDHLRCEGIEVVTLESTSDYWRVWHAGLEACGLKVQLVNARAVRNVPGRAKTDKKDAVWLAKLTERGMLRPSFVPPYDIRRLREFTRLRADLVHERSRYWSRLEKLLERALVKLSAVASKLTTQSVRVILEALIAGQRNPKALADLAIGKMRAKRKELAEALEGRFEDHHAELARILLDQIDALTAQIGALENRISGLIAQIPAAQGIDADGTTGPDAGRGADAAVLPAVARLDEITGCGTVAAQAIIAEVGLDMTVFGTPGRLVSWAKRCPQTRQSGQKNTSGKAGKGNPWLNGVLGEIAASASRTDTFLGERYRRLARRRGKRKALAAIARSILVIIFHLLADPAARFRDLGPDYYDNRVSRERKIHSHVRQLEALGLTVTVEEAV

SEQ ID NO: 60161 - protein, 338 aa, unidentified
MSLYAAIDLHSNNSVLAIIDEADKPVRQCRLTNDLPIILKELEPFRDEVAGVVVESTYNWYWLVDGLKAHGYCVHLANTAAVPQYAGLKYSGDESDARHLAHLLRLGILPEGYIYPREDRPIRDLLRRRFQLVRMAVGLTLSIQSTWARHTGHGLSSNAMRQLTGAAIERAFPDVSVRFGLLTHLQVWCAIQEQVRQVEQWIADARIRQPERMALRSVPGIGLILSLTIALETGDIHRFANVGDYASYCRMVKSERISNGKKKGQGNRKCGNKYLAWAWIEAAHFALRHSPPIRRWYDRKCSKRHKIVAIKAVAHKLARAGYYLLRDGGVFDVKRAFG

SEQ ID NO: 60162 - protein, 397 aa, unidentified
MYIVGIDIAKRKHEAAVIDGEGTVIIKPFSFTNNCSGYNRLLAMLAKAKLPLDEVSFAMEATGHYWLALFTRLQKEGFRVQVINPVQTNSIRSFYIRQAKTDPRDALLIAEVIRFGHFSESTLHPENIYELRELCRGRHAIVSMQADVKRKVVALLDQVFPEYETAFTNLFGDTSMAILQTCPTPKELSEMPLEKLCYLIEVSSHKRFRMAKAQELQALARNSFGFAMAGDVFSTMIRLYAKHLVFLKQQVQEMDRKIAEIMETLDTPITTITGIGPTLGAYILSEIGDINRFSSSAKLAAYAGIDPTMRQSGEYNGVRNRMSKRGSPYLRHAIWLATSSAVLHDPALKLYFQKKRDEGKPYMASVGHACRKMVSIIYAVMRDNKAYVPCIPSEISA

SEQ ID NO: 60163 - protein, 433 aa, unidentified
MKEGTGEENVSRQYHTPVGQITREQLKLKHAGETKRYIGLDLSKQSCYVCIINKQGEVEKHRSYSMRSNQRHKLYETLQTGDVVLMEASTGTFNIARAMNKHSGVVACVINPHTTRINETKKKTDKEDSLFLARLIARTPVVELSLVSIPSDQEMANRETISYYQHLKKQHTQGINRMHALFYEKGFPEAGKAYNLHTKGGRAAAIEKYIGSDRVLATTKRLLKGYSKQLTLLEQQMESEDTQFAKIVKQDDRMAAILGSIPGVGLKSISAFIAFVGDINRFSSAKQLASYCGLVPRVSQSGQKNSTGKITKEGQAALREYLVEAVLTIQNTKFDFPLKRKYLEMKQRMNGRKAAVAIARKLVTIMYAMLKNGTVFFVEKEEERKAIATYQSRKRIKSLGGYYKICNSCKEYSEMIEVTNTLHSNEIGVLKFI

SEQ ID NO: 60164 - protein, 352 aa, unidentified
MIVLGADMHKSSHTLAAVAAATGEMLDEKTAAVGARGFDGFLRWARGLGSERVWALEDCRHVSGSFERFLIARGERVVRVPTRLMANTRRSSRERGKSDRIDALAVARAALAEGIATLPTAELAGPELDIRLLVDHRERLVRTRVGLNNTLQWHLHDLWPELVLPGSSLFYGKWGPRIARRLARAEQTMRVRIARDELRRLRELTQAINALETEIAALVAQVAPQLLSEPGFGPLTAAKLVGEVAGAGRFSSDAKLARAAGLAPIPVSSGRTNRHRLDRGGNRQINAAIHRVAVTRARCHPETIEFLARKTNEGKTHREAVRCLKRHLARRIWQLLRAPHPVSETPPHPSTS

SEQ ID NO: 60165 - protein, 397 aa, unidentified
MYIVGIDIAKRKHEAAVIDGEGTVIIKPFSFTNNCSGYNRLLAMLAKAKLPLDEVSFAMEATGHYWLALFTRLQKEGFRVQVINPVQTNSIRSFYIRQAKTDPRDALLIAEVIRFGHFSESTLHPENIYELRELCRGRHAIVSMQADVKRKVVALLDQVFPEYETAFTNMFGDTSMAILQTCPTPKELSEMPLEELCHLIEVSSHKRFRMAKAQELQALARNSFGFAMAGDVFSTMIRLYAKHLVFLKQQVQEMDRKIAEIMDTLDTPITTITGIGPTLGAYILSEIGDISRFSSAAKLAAYAGIDPTMRQSGEYNGVRNRMSKRGSPYLRHAIWLAASSAVLHDPALKLYFQKKRDEGKPYMASVGHACRKMVSIIYAVMRDNKEYVPCIPNEISA

SEQ ID NO: 60166 - protein, 407 aa, unidentified
MPEQVVTTHVVGIDIGMESCTMSCLTMDKRPVIKATPFANTLQGFDWLFERLEGLGVAPKQILVGLEATSRYGENLVQALLKRGYQVCLLHPAQMHAFAQQRGLRAKTDQLDAVTIARALLSGEARFGYVPNEQVATYRELIRLQHQLSDDVVRYKNEIHALLVVLFPEFTQVFVDPTRPTALAVLKRYPSAQAIAQTEVETLSTCLHELAPRHYGRPPAQELVRLAKASISSGVAVAARSSSLRILCDQLEHTQTNLEHLQCEIDQLLDQDPKAKGMLSVPEFGPTTVAVLRAELGDLTRITRIDQVVAYVGLDLQVKQSGKWKGQTKLSKHGSGRVRRILYLAALRSIHLETSPFGAYYQRLVARGMKKGMAVVAVMRKMLIVTVHLIQTEESYDPGKVAVQAGS

SEQ ID NO: 60167 - protein, 409 aa, unidentified
MEVIYPRCCGLVVHKREVVACLVSTAPDGTARKEVCAFGTMTPDILALADWLAAHEVTHVAMESTGVDWKPLWNLLEESFILLLVNARHVKAVPGRKTDVRDCEWLAELLRHGLLTGSFVPDRPQRDLRELTRYRASLVRERTAAANRLQKTLEGANIKLAAVATDILSTSRREILAALIAGETDSAELAQLAQGRLREKIPQLERALVGCVGPHQRFLVAEQVAYIDFLDEAIARVSTELAERVRPEEDAIARLDTIPGVGRSVAEVLVAEIGVDMGRFPTAKHLASWAGICPGNHESAGNRRSGRTRKGSPWLRACLVQAAHAAARTKGTYLAAQYRRLAARRGRAKAAIAVAHSILVIVYHLLTDGTVYHDLGGNDVDERDRQAVERRLVHRLQGLGYRVSLEPVA

SEQ ID NO: 60168 - protein, 390 aa, unidentified
MDTVQNSEASTALGSDFAAIFVSLELSRSTWLVTSTSPGSGGKMSKHSVKGGDMAALLERFTQLQSRTKARTGVEYPVITIQEAGLDGFWIHRALQANAIESHVVDPASVAVSRRSRRAKTDKLDGEALVRTLLAYKRGEPRVCAMVKVPEPEQEDRRRICRERKVLIAERIKHVNRIKGLLFAQGISDYRPVRSDRRQRLEALATGDGRPLPPHVKMQIGRELDRLELLLDQIVVVERERDALLFMQENSDTAKPASIQMLLHLRGLGTEFVAILWGEGLFRHFDNRRQVAAYAGLAPSPWQSGTIDRDQGVSKAGNARLRTTMIQLAWLWVWHQPCSALTIWFKARVESNNGRMKKSTIVALARKLLVALWKYVTAGVVIEGASMKTA

SEQ ID NO: 60169 - protein, 312 aa, unidentified
MSTATVHIGVDVSKARLDLYCEAHKLPAHVSNEARGHQALLRALLRLPDGLVVCLEASGGYELALITFLAKHGVRCRLLNPKRVRDYARSQGILAKTDAIDARVIAQFAASVADQPECEVPAYQAELRALVDRREQLKATIVAEQNRFEKAVNARTARSIRHIIRLLRKERERIEIELKKLTREQPTLNQQVKRLTQISGVGDVTAWSVLAYVPELGQLSRQQVAALTGLAPFNCDSGTLRGYRRIQGGRKRVRNQLFMAALVASQHNAVLKPFYQRLLKEGKIKKVALTAVMRKLIMLMNQMIRDPEFQIS

SEQ ID NO: 60170 - protein, 317 aa, unidentified
MNNPEAFVGIDVAKAWLDVAWLGGETLRIDYTDEAVTGVVERLRSQRPSLVVMEATGGLETALASALVAAGIAVAVVNPRQVRDYARACGRLAKTDRIDAMILAAFAAAIRPQVRELPDEHTRALSDLLARRRQLIDMRVQEKLRLQRASSVQRTSLREHIAWLDERIDRLDVELTHALRSSAAWRDKDDLLKAIPGVGSLTRATMLGLLPELGTLSRRQIAALVGVAPFNRDSGTQQGQRVIWGGRAQVRRTLYMATVAALRCNPVIRSFYDHLRTQGKPAKVALTACMRKLLVIMNAMLKHRSAWSPTLDMQHGC

SEQ ID NO: 60171 - protein, 360 aa, unidentified
MAQARTFVALDVHAAATVAAIVDRESGELRRQRLSGRVSEVCDFVAALEGPVRATYEAGPTGFVLARRLEAVGVDCLVCAPGLIPRGPTDRVKTDQRDAERLVRLLIAGELRRVAVPTVQAESLRDLVRAREDLRGDLMSARHRVAKLLLRHDVRFEGAERNWTQPHLRWLSTVRFEFAGTQAAFDDYRGAVEALIIRRGELEREIAEQLPVSPSAQSAKRLMCMRGIDTLTAAGLCAEIGDFARFHHPEQLMSYLGVVPSEHSSGTRRRQGSITKSGSQHARRLLIEAAWHYRQPPRISEPLRRRQAGADPAIVALSWKAQRRLHHLWTRMESRGKRRTIIAVAAARELAGFCWAISTE

SEQ ID NO: 60172 - protein, 337 aa, unidentified
MQVVNTRCCGLDVHQKTVVACVLLTPASGQVAREVRVFGTMSVDLLALNEWLNGLGVRQVAMESTGVLWRPVYNLLEADHDVILVNAQHMKAVPGRKTASKDAEWLADLLRHGLLKASFIPPEPVRELRELTRYQATLVAERTQAVNRLHKLLEGANLKLGAVASDVLGKRGREMLEAILAGEGDPQTLAELARGRLRAKLPLLRQALDGRVQAFQRVVLRHLLDQIDFLERQLAQLVVEIEERLAPVAEAVALLETIPCVGHTAATTLVAELGDDMSRFASAKHLASWAGVCPGNKQSAGKRLGGKTTNGNTWLRAILGEVAWSIAPTSNTYLAAQ

SEQ ID NO: 60173 - protein, 438 aa, unidentified
MSNKVIFNLDELFISVGIDVGADFSWMSIALPNQQFVGKPYKILHNSIDSLATAVSKIKEAEELFSLESRIFLESTGIYHYPLFCYLRDKGFNCSVINPIITKNSTNINIRKVHNDRFDSKKAALVGLKPNLKVSLMPSDLALNCRNLCREYYDLMDNRSAYVNKLQGELRMAFPQYLGIFSKVTINTSLTLLGTYTSPSAFLEADKQEIIDIIKSTARFGLTYAQNKYNAIIQAATDANQFGYIIDSNIKRIRLYISFIRKFDEEINSILESLHELVDANKDTDFVKQIHLIETFKGAGFLSAVSIMGEIGDFSAFSKPKQLFAYFGLDPAVKQSGKFEGTKVQMSKRGSAIARRVIHTLTLQSISISRNGETKNSVLREYYIKKCDSKPKLVAMGAVSHKVCNMIFAILRDNKPFKIIAPQEHIKQYNAAKCDIAA

SEQ ID NO: 60174 - protein, 388 aa, unidentified
MQTVADRPEAPTAIRTDLGAIFVSLELSRSTWLITSLSPGGGEKMSKQVVRGGDVAGLLERFARLREKARARTGKVFPFVVIQEAGLDGFWIDRALQNEGIESHVVDPASIATSRRRRRAKTDGIDGEALVRALLAYKRGEPRVCAMVKAPTPEEEDRRRLCRERKVLIGERVQHVNRVKGLLFSQGISGYEPLRRDRREQLDTLQTGDGRLLPDHLKAQVCRELDRLELLLEQIKAVEAERDVLLAAQQVAAPAPAAMLLDIKGIGPEFAAILWSEGLFRHFDNRRQVASYAGLAPTPWQSGSVDREQGVSKTGNPRLRTTLIQLAWLWLRHQPQSALTLWFEERVRRNGGRLKKTTIVALARKLLVALWKYVTAGVVIEGAVMKRT

SEQ ID NO: 60175 - protein, 355 aa, unidentified
MLIIGVDFHPEVQQIAWVDTETGEFQEQRLQHGEPGERFYRALAVAGRQVRVGMEASGHARWFERLLAELQFELWIGDAARIQSKRGRKQKTDRQDAQHILKLMLKDDFPKIWVPSWENRDLRQLLWHRHRMMQARTRIMNQLQAVALNEGLRCKKRLWRAGGRQQLEAFRLAPWASRRRHDLLELLDRLNPTIAELSQAIEQEAEKCPQAQRLMTHPGVGALTALAFVLIIGNTERFQCGKQIASYLGLVPLEKSSGNRRRLGHITKQGSSMLRFLLVEAAQVTVRSLPEWRSQYFRLMIRRGRKTAKVAMARRLAIRLYWMWRQGLNYEQLKSSVRTQDSPDIAMVCSRTPSN

SEQ ID NO: 60176 - protein, 355 aa, unidentified
MSQEKYIGLDVHQASISAAVMDPSGKVLMECLLETKAATILEFIQGLRGTLSLTFEEGTAAAWLHDLLKPHVSRRVVCDPRKAALLKAGNKNDRVDARKLAELLRTNQLKAVYHREHGIRTLKELGRSYLTVSKEITRTMNRIKSLYRSWAIPCCGTTVYAPRHRRQWLAKIMEPGVGVRAQHLYQQLDNLQPLRLEARRELLLESHKHAAVTLLRQIPSMGPIRAALLVALLQTPHRFRSKRQLWAYSGFAVETHDRGEYRWVRGKLQRNREPITVRGLNDNHNHDLKNLFKGAAISARARPGPLQDFYLARVTQGMRPTMARLTLARKIATITLTMWKKGANFDPQPLHRQAV

SEQ ID NO: 60177 - protein, 400 aa, unidentified
MRVVFGIDVSKVSSEVAILVNGEKVHGYTISNDAIGFARLLGDLRTVHKPEIIFEATGVYSRRLQAFLDEHGYAYTRLNPLEAKKQLDSLRVRKTDQIDAEKLAQSQCVLNRKTTYVQKEVYQNLRDLSRFYQNLTEDIVRAKNRLHKVLQVTFPELENILSTPTGEQYWNLVITFPCKDFVLELSNDELSKSIRLSTSKRISDKRVAYLAEKLIALANQSYCAVKKTSPILEEVRYYAKELLRLSEQRQAVLDEMVELAQPLPEYDILLSIPGIAETTATSIIGELGDIRRFQSANQINAFIGIDLRHYESGNFLAKEHITKRGNPYARKILFKCIHNIASASHTNPCHIADFYEKRKRQSQTTSTKPHTIASIHRLIRTMYYLIMHNKLYDYASTQNR

SEQ ID NO: 60178 - protein, 342 aa, unidentified
MFDILKYAVGVDVASEELQAGFGYLSSDLLSKRNRSRKFENNKSGFKSLSQWIAKQCKQSAKVSVITEATGVYHENVAHYLHNKGYDIYVVLPNKAKRYLQSLGLRSKNDPIDCAGLTQMGLDQQHLQKWVLPDPTMRQLRALTRHRQSIQEQITNVNNQHHAIQSGFYENQLVKRSLRQTIRFHKKQLGQIDQDILEVLAQNAALKAKVERIVKSIKGVGVLTVVTLIAETNGFQNFHSVQALVKYAGYDVIEHSSGKKKGKEHISKKGNARIRRILHLPALNMVTHQVGSFSNTYERIFEKTKIKMKGYVAIQRKLLCLIYTLWRKDQIFDPNYVHPLSN

SEQ ID NO: 60179 - protein, 400 aa, unidentified
MPAVWAGIDSGKRAHHCVVIDQAGEMLLSQRIDNDETVLLEIIATVTEIADGHEVVWATDLNSGGAALLISLLVDHGQQLLYIPGRIIHHAAATYRGEGKTDAKDARIIADQARMRTDLQPVRDGDQISVDLKLLTARRLNIIHDRVRAINRLRATMLEYFPALERAFDYSTSKAALTLLSTYQTPGALRRMGVTRLAAWLKARGCRNSATVAQKAIDAAREQETTLRTEIVAATLVSRLAAVITAIDADLVDLDKTITARFNEHENAEILQSMPGFGPILAATFLANIGGDLRNFENADRLASVAGVAPAPRDSGRISGNHHRPRRFNRRLLRTCYLAALSSLKNSPASRIYYDRKRAEGKSHKQALLALSRRRINVIWAMLRDHTPYQEPAIHRPLAA

SEQ ID NO: 60180 - protein, 420 aa, unidentified
METIETAYKVAGIDVHKSMLAVVIADVAREGEFQFERRKFGATESELRQLAMGLTEHRVREAVMESTAQYWKPVWQQLEGQCELYLAQAHSNRAPRGRKRDFADAERLLRRHVAGELILSFVPGPEQRLWRTMTRSKLQLTRDRVRIHNQLESLLEDARIKLSSCVSDLLGLSSRRMLKALAEGETSAARLAAMADPKLRATPERLQDALHAAATLSVLHRQILGLFLARLELIEDQMEILDKSIGEALHGYHDAVLRLAEVPGYGIDSAQQVIAEIGPAAATFPSAAQLSSWVGTCPGREESAAVSRNNRSPKGNRMMRRVLNQVANAAVKTKGSVFQAVYRRLLTRLGHHKAIWAIAHRLCRLTWKILHQGVRYIEQGNRPNPKAVKTRMNKLIRELRSLGYQVQVAPLATPKNAAIQ

SEQ ID NO: 60181 - protein, 343 aa, unidentified
MDHFAGLDVSIKETSVCIVDDTGRIVREVKVASEPEALLQELAKSAYRFRRIGLEAGPLSQWLFSGLVEAGLPVICVETRHMRAALKAQINKTDRNDARGMAQMMRAGLYRPVHVKTLRSQKLRMLLTHRKLLQSKAIAIENDLRGTLRNFGLKVGVAGAVKFEARIKELVENLPDLAVLVEPLLIVRRVLREQLGILHRRLLAIVRDDEVCRRLMTVPGVGPVVALTYRATVDVPARFRTSKAVGAVFGLTPSQHQSGESNRTGGISRCGDEMIRTMLYEAAQTLLMRSTKWSWLKAWAMQIARRRGMKKAIVALARRLAVIMHRIWIDGTEFRWTREAVAA

SEQ ID NO: 60182 - protein, 406 aa, unidentified
MQVVHERCCGLDVHKRVIVACVLSGRERTIRSFGTMTEDLEGMAAWLEECDVTHVAMESTGVFWKPIHNVLEGHAFELLVVNAQHMKAIPGKKTDVKDAEWIADLLRHGLLKPSFVPSRPQRELRELVRYRKSLVRERAAESNRVQKVLEGANVKLASVATRVLGLSGRAMVEALISGVTDPTELADLARGRLKTKHADLQRALRGVVGPHQRMLLAAQLRHIHYLDGEIESLSQEIASREQPDEAALAQLQTIPGVGRRTAEVILAEVGADLSRFPSAGHLASWAGLCPGQNESAGKRRSGRTRKGSAALREALTEAARAAARTRRCYLSAQYRRIAARRGANRAAVAVAHSILVIAYHLLTKGSVYEDLGSNYFDDRDKVATVNRAVARIKRLGYEVTVTPNAA

SEQ ID NO: 60183 - protein, 392 aa, unidentified
MYIVGIDIGKNHHEASIVSPEGKQIGPSLRFATTHKGADSLMSFIFKNIGNSPCVFGMEATGHYWYPIYSFLKAKGYTIYVINPIQSDSLRKMYIRQTKNDSIDSFLIAEVIRFGQFGTTSMADENILAMRQLCRYRDSVISSRTEIKLRIGTIMEQIFPEYEKQFSSLWVSTSMGILEKYLTPENIENAPIDELFEIIKDKSHNRLTKAKAISIKEAAADTFGIKIAQDAFSFQLKQLIDRMNFLDKQIEALDCQILEYYEKFDCYLHTIPGIGMIAAATILAEIGDINRFKSSSALVAFAGIDPTVRQSGEFSSTHNHMSKRGSPYLRHAIFLAATTCSFHNSPLNAYYKKKRDQGKHHLTATGAVARKLTTVIYAVLRDSKPYEPKKFC

SEQ ID NO: 60184 - protein, 443 aa, unidentified
MKPLPVLDPKAAGIDVGSEKLHVSIAGDAPLVFGTFTSDLEALRDVLAKSGVRSVAMEATGVYWLYLYEVLEAAQLEVVVVNGRHVRNVRGRKTDMQDCQWLATLHAHGLLRGGFVPPAQIRRLQDYQRLRADHIVGAASQVQRMQQALERMNVKFHDVISDLTGVSGLKVVRAILEGERNPARLLALCDPQIQNQKSAVVKKSLQGCWKPEQLFALRQALELWETFQTKIADCDREMEKLLHELAGPESPEGGADASALKLAPAKAPNKNTPAIQGLQKLLARICGGCDVTQLPGLSVHLTLQLISEVGTDLSRWPSEKHFVSWLGLGGGQNQSGKRKRSVKAHRNRAGRMFCAAARALAQSLDKALGGFYRRLRGRLGGLAANVALARKLAQLFYRLLRFGAQYVEKGLKDYEAKVLATEARLLRKLAAKQGFTLIPNAAS

SEQ ID NO: 60185 - protein, 391 aa, unidentified
MICVGIDVAKDKHDCFIISSEGVVLADVFTIPNDMTGFNCLLQRIQACSAGQDRIKVGLEATGHYSYNILGFLLDNGLDSFVINPLHTNLYRKSLSLRKTKTDRVDARTIAAMLMSDVGLKPYTDTAYHNEELKSLTRYRFDKVRERAQLKQSVSRLVCILFPELEKLVPTLHMASVYALLDEFPGAQQIACAHLTHLKAVLHDASKGRYGRDKAIELREAAKASIGSRMPAKSLELRHTIRLIRELDAEIAEIEQAIQSIMDEMRSPITTIPGIGTRMGAMILAEVGDFSRFDSPDKILAYAGLSPSTYQSGQLVNGYAHMEKRGSRYLRYAIFNATKYVCHWDPTFAAYLAKKRAEGKHYNVAISHAAKKLVRLIYALEKSGEPYRLTA

SEQ ID NO: 60186 - protein, 449 aa, unidentified
MMAPQEIDDEEYEQVLERVAAVDVAKGSGMVCTRVPHPSRPGKRQSRVWQVDADTGSVMELADHLASEGVAKVALEAGLRLLAYLVLPAGGTRPGRAAGQRPRRGECPGRPKSDKLDCVWQAKLTERGMLRPSFVPPAEIRRLRDYTRLRTDLTRERTRHWSRLEKLLEDVLIKVTSVASKTGSKPVRDMLEALIAGERDPEILAGLARGKMRARHDRLVEALTGRFDDHHGELARMLLDQIDALTAHIDQITGRAGELIMAMPGAWGVDADGVTGPGAGLDAGAPVLPAVARLDEITGIGRDAAQVLIAEIGLDMGVFPTPGHLVSWAKLSPRTIQSGAKSQAGRTGKGNPYLKGVLGEAVAAAGRTDTFLGERYRRIARRRGKLRALVAVARSILVIAWHLLADPATRFRELGAGYYASRIDKNRKTRSHVRQLEALGYTVTLAHAA

SEQ ID NO: 60187 - protein, 337 aa, unidentified
MIHVGVDLHQAFCYMTALDSTGRSLKAGPVANEPAALRRWLRGFSEPVAVAVEACSFWPAFKEAVEKEVSEIRLVHPQRVKAIAAAKLKNDRVDSATLAHLLRCDLLPAVWMADRQTRERRQRVRLRISLGQHRAALKNQAHAILHQHGKRCEWSDVFGKKGRAWLKKVQLPPAARGAMDTYCALIDEVGGHIREQERTIGWMAKADARAKWLATIPGIGVYSAMILLSEIGEVQRFSSAKALYSYAGLVPWVRESAGKKSRGGISRCGSPRLRWVMVEAAHTAVRCSPAAKSYFERMRQRKHPHVARVALARKLLGAAYALLRDGVCFDESIFAAV

SEQ ID NO: 60188 - protein, 339 aa, unidentified
MQVTTIGLDLAKNVFQVHGIDDHGEVAFNRALRRAQVLVFFEHLAPCLVGIEACGTSHYWARELIKLGHNVKLIPPAYVKPYVKRGKSDAVDAAAICEAVTRPTMRFVEVKTPEQQAILAVHRTRDLIVRQRTQTINMLRAQLAEFGVVLPQGVYHPLRFAKDCVDGEQPDLPKDAQEVVFDLCDQLLFLHLKILRHSRHMTQIAKREKRVALLRTIPGVGPITASAIVATVGSGEQFNNGREFAAWLGLTPLNKSSGGKERLGHISKMGDQYIRRLLVLGMTSRIRSIRLEPEKFDPWFADILSRKPSRVAAVAMANKTARMIWAVLTRNEPYKVRTV

SEQ ID NO: 60189 - protein, 331 aa, unidentified
MNLAGIDVANETFDIQRRCAEKITHRTFSNTKSGHQQAIAWLQRGCRQVRVCLEATGIYHLQLALALNRAPGIELMVLNPKAARRFAEAQMVRGKTDKVDALVLLHYLECMPFKPWSAPSHHRLELQSMAHRLAQLTKEQTRERSRLHAAERAGAHTRVAQHDTRVHIRYLERRYQLLETKAIELMKQYASMAEDLALVDTVPGFAETAAMQVLAEVGVLPDDLQPQQWVAQAGLDPKPDESGTSVHSPRHISKQGNAKLRAALFFPSMSACRCDPNVRAFYEKLLARGKTKRAAQTAVMRKLLHSIWGILKHRQPWDGDKFCRIEKPMIA

SEQ ID NO: 60190 - protein, 337 aa, unidentified
MNYSGIDLHSNNSVVSVIDETDRVVAEKRLPNELAKILTFLAPWQAELAGVVIESTYNWYWLVDGLQAAGFVVHLANTTAIKKYDGLKYSGDETDARYLAHLLRLGILPTGTILPPQQRAVRDLARKRMQLVRSRTSHILAVENITARQFGKRITSNQVIRLDEETIKQMHLPEDVALALRANVAVITTLSTQIAIVEKRLQQKVTPDADYTLLTTVPGIGQTLATVILLEVGTIERFASAGNFASYARCVDSQRISNGKKKGEGNTKNGNPYLSWAFIEAANFALRYCAEAKRFYERKKGKTNTILARKALAHKLARACFHMLKEHKPFDMTRCFA

SEQ ID NO: 60191 - protein, 314 aa, unidentified
MHAQTAIHVGVDVAKDSLAVRSARAAKIVTVPNTAQALGAWLAGLPAGAHLVCEATGRHHRLLQRLCTERTVPLSCVNPARARDFARSLGRLEKTDAIDAEVLWRFGQERQPAATPAPSEALRTLCDLLMARHAVVEQITAFGLRQDLLSPEATRHLARVIRALHAHQLALERDLELWLESAAALPWRDKVQTLCLAPGVHVLSALSLIGYLPELGTLNRRQIAKLAGLAPLPWDSGSLKGLRLIQGGRAPVRRVLYQCAIVAARWHEPTRAHYQQLRARGKPAAVAYVAIARKLLTYLNSLLRPAHSADLPRV

SEQ ID NO: 60192 - protein, 424 aa, unidentified
MNFKMQDKQNQLIERISDTHLIIGVDIAQQLHVARAVNFRGIVVGDPITFENNEEGFVKLLNWIHDLKRLKNLDAAIVGMEPTGHYWINLSKWLYNQNIEVVTVNPHLVKRNKENRDNTQSKSDKKDALVIADMVKNGYYSFIRPSSKSFEKLRVLMSNRDVIVKRLVMSINQVNRWVDVVFPELRQVFKDVTCKGAIATLRLFPIPDEISSLETLEVMRGWKSLMKRQPGPKKAQLLINLAKSSIGTGQALDAYKFHLEQLLEEYDLAVKQLERVEQQVKEVLNKIPFAKKLLMIKGISEISLAGILGESGDLSGFSHGNSLLRHAGLHLAEASSGKWKGQIVISKRGRSRLRRFLYLATMSLVMNNPEFKAIHSHNVKVKKIKKMKSIMKLIGKLARIFVGIARRNESYCPNKVQVIIPLAA

SEQ ID NO: 60193 - protein, 411 aa, unidentified
METLIRRCAGLDVHQASVVACVRCVDEHGELQQVTETFGTTTPRLLELFDWLERWGVTVVGIESTGVYWKPVYYLLENQFECWLLNAQHLRNVPGRKTDVGDAAWIAQLVAHGLVRPSFVPPKPIRDLRELTRYRKQLLQERSREVQRLQKTLEDAGIKLSSVVSDIQGKSARAMLNALLNGVHDPAVLADLARGQLRKKIPALQQALTGWFSPVHRILVSEILAHLDYIDETVERLGGGVEKILAPFASAVDLLDTIPGINRRTAEVVIAEIGADMTRFASQQQLASWAGMCPGNNESAGKHFSGKTRKGSRWLRTALVESAQVAARTKGTYFSAQYARIRGRHGHKKAIVAVAHSLLVVAYYVLLRQEPYVELGDHYFIHRQQKESYRRRLVQQLERMGYDVNLAPRAA

SEQ ID NO: 60194 - protein, 459 aa, unidentified
MRKKSKRTKGIEQAHPFEGMSQVNPNAAGVDIGAEEIVACVAANESTQLVRGFGNYTVDLHAIADWFTEHKVKTVAMESTGVYWIPLFEVLEQSGFECLLISSRSLRRVAGRKSDIADSQWIQTLHSYGLLESSFRPQADLIALRSLLRHRRSLIDHRSPHVLHMQKALLQMNVQLTQAVSDVTGVTGQKIIRAILSGVRDPKILASLREPGCKKSEAEIGRALTGTWREEHLFVLKQAVALYDFYTQQIQECDEEIERMYSETRPDWDEGELPPPPPHKRNSRSKNRHQESAKIRKHLKRISGVDISLVDGMGVSLAQTVILECGTDMSKFPTEKHFGSWLGLAPKHEISGGKVLNNKTLKTKNRAGQAFRMAAQAVKQAECAFGVLYRRLRARLGPSQATVATAYAIARVVYRMLKYKVEYNPLSVNEYQKQYEEQQIKYMRKRAAKLGYQLLPVPA

SEQ ID NO: 60195 - protein, 461 aa, unidentified
MRNNRKSGDRPGSTRPIAGLPIVRAKVAGIDIGSEGHWVCAPGLEGSGREVADFGATTPELVRMAEWLKERKVESVAMESTGVYWIAPHEVLEKDCEVLLVDTRQLARVPGRNKKTDPSDCEWIQRLHSCGLLNGSFRPQEQVCMLRTLVRDKANLVAESADWVRRMQKSLDQMNVRVHRAVSDLNGVTGMAIVRAIAAGERDAQKLAQLRDRRCRQSEQEIAEQLSGHWREDHLFSLRQSLQMYDAIAERITAYEQEILRKLATMEIEEYPGGVVPPVKNLEKGKAIKKRGQEPKRQALYRMSGVDVTQIDAIGVETVEVVLSEYGPDLSRFPTEKQFVSHATLAPRVPKSGGKPLKHKKRNSASTRVAAALRMAALSLRHSATALGAYYRRLARRIGGDVAVFATARKLATLIYRLLRWGQPYVDEGAEAFEQRYRQQHIKGLALRAKELGYQLMPTTT

SEQ ID NO: 60196 - protein, 348 aa, unidentified
MRFYTGQHRYYCGIDLHARTMYLCILDHESGEIVLHRNLRCEPGLFLQAIKPYRDDLVVGVECIFCWYWLADLCTQEGIPFVLGHALYMKAIHGGKAKNDKIDAHKIAVLLRGGALPTAYVYPRGMRATRDLLRRRLLFVRRRSELFTHIRLTFHQLNLPAPPDRLREPRNRVGVLEAIPDPVVRANVEADLALAERLDEIIRSLERTIDRQAKVDDPETLTLLKTIPGVGRVLALTLLYELHDITRFPRVQDFMSYARLVKSQKASAGKVTGTSGAKIGNAHLKWAYSEAAVLFLQKNPPGQRLINRLRSKHGKGKALSILAARLGRTSYYMLRRSTPFDMERFLMN

SEQ ID NO: 60197 - protein, 340 aa, unidentified
MEVATIGLDISKHVFHIHAVDGQGQVAGRQRLRRGEIVSFFSSLAPCLVGIEACATAHHWAREIRQFGHDVRLIPPAYVKPYVRRGAKNDAADAAAICEAVTRPNMRFVPIKSGENQGFLMLHRARGLLVRQRTMTACAIRAHFAEFGIIVGQGRQRVDGLVDLLDDEELTLPAHARIALAVLVNQLKELDRQVEAIERELAQIQRVNPMAKLLSSIPGIGPITATALAATVPDATMFRSGREFAAWLGLTPKQHSTGGKDRLGRITKQGDSYLRHLLVIGARNVVRYPKARSRIGDGWIEALLERRRPMVVAVAVANKLARIIWAMMTTGEFYRPKLAA

SEQ ID NO: 60198 - protein, 364 aa, unidentified
MPTRKLQNPDDFRGQKFYIGIDVHKKSWAVTVRSLNLVVAHFTQPPSPEALLSHLQRKFPGGEYYSTYEAGFSGTGAHEELCKLGIKNMVVHPGDIPRTDKEKKNKTDVHDSRSLAFNLEKGNLHSIFVMSRQQQEFRALFRLRESKARDVARAINRLKGCLLYFGIDYSSIFEGYISAKVITWLRKLHMTNEAGAFTLKKYIDDLVHQRSELGKITKALRSQAKKDYSLPYKCLLSVPGIGFTTAIGLLAEIGDFNRFKDPAEYCSFLGLIPWQHSSGESVQAKGIQPRCNKHLRPLLVEASWFAIRNEPSLLKYYRKHAVKNSKHAIIKVARKVALIAKGVVQKLQMYQPGYSPFPSQEIVG

SEQ ID NO: 60199 - protein, 374 aa, unidentified
MLDLDKGRRPARAGRKQLIINFKCMSNVNSYIGVDLHKKTCFITVMNQAGRIKKQTEISTDTDKVAKFFAKHTDASVAVESTMNWIPFYENLESLGCSVVLSNPLQTKAIAAARIKNDKVDSKILADLLRTNLLPTAYLSACLAQADIQPREIRDLKELVRQRVNYVEIRTRIKNKIHSVLFKNNLKHDFTCLYGQAGMIWLKELKLRDIYRQEMDRYLTTLDLLDKQIAEMSDQIMATAKTDYDCKLLMTIPGVSYFTALVVKSEIGDINRFASAGKLCAYAGLIPSTYASAEKIRHGRISKRGSKWLRKALIDSVTSGSKHPSRLGFFYRQLKKNKGTGKAKVATARKLATIIFAMLTDKQPFREFAPVKQR

SEQ ID NO: 60200 - protein, 363 aa, unidentified
MEHYTSIGIDVGDKTSRICVMTKAGGQRRVVEERAVATTREGLSEYLADKDRSWPVTFETGVHCRWMREHIAAMGFKVYVANPAKLKQLTESDTKNDRNDARALARYTLADVEMLHPVFLRPESHQRMIRLLEARQVLVRTRTRIINELRGFAKSMGFRIPRKDAGCFHRLDRSAWPAALQDLAWPMFGVLEVVALKIKVYESQMRELADSAEFREDVGRVRQVVGVGFLCSAAFVAFLGGNYGRFAKARDVGPYLGLVPRQDQSGDVDRQLPITKKGAGMLRTLLTECAQVVLKDGVRETDLKLKGLRIFGRGGANARKRAVTAVARGLAVTMAALLKHPEREYVPLSEPARELAGQAEVAT

SEQ ID NO: 60201 - protein, 392 aa, unidentified
MIVIGVDTHKGTHALAAVDEGTGKVRRSREIKADEPGHLAGVRWARGLDDERVWAIEDCRHVSRRLEQALLAAGERVVRVAPHRMGASRRGEREPGKSDSIDALAIARAVVKDGVESFPVAYLDERAMEIRLISDHRNDLVAERTRTVNRLRWHLLELCPELERSLKRGALNNSRVLDRVDRRLRKLPAGARVRVAREQISQLRSLGRQIDALHRELAQLVTAHRPKLLAEQGCGALTAAILIGHTAGVERFGKESSFGLQSGTAPIPCSSGQRTQHRLNRGGDRQLNHALHIIAVTRAQRDSATKQYLARKEAEGKTTKGAVRALKRHLARRFQKLLSEPPADQQAAQPHTISEPEPTEHARPQIPPRPRPRREPDPTIQGQAACPMVCIS

SEQ ID NO: 60202 - protein, 408 aa, unidentified
MLLLVGDDWAEDHHDVEIQDEAGRRLRRGRLDEGIGGVERLHALIGECVGADVDDDEVEVVVGIETDRGPWVQALVAVGYRVVAINPLQVARYRQRLGVSGAKSDPADAHVLADMVRTDRHQLRPVAGDSDVAEGVKVVTRAHKTLIWERTRHTLRLRNVLREFFPAALVAFDDLAAPDALELLAKAPEPKAAAKLTAGQVAAALKRARRRGVEDKTQAICVALRSDQLGQLPRTTAAYAASVRAQTAILTTLNEQIAIMAEQVTAHFGQHPDAEIYLSQPGLGVVLGARVLAEFGDDPARYTSAKNRKNYAGTSPITKQSGKSRAVLARHIHNDRLVDALHRQAFTAISTSPGARAYYDTQRARGVGHQAALRQLANRLVGILHGCLKTGTHYDEHTAWSHRTADAA

SEQ ID NO: 60203 - protein, 439 aa, unidentified
MHRKKSKANRSRSVNLQALPVINPDAAGIDVGAKEHLVAVPCDRDPQPVRTFQAFTPELHELARWLKRCGIKTVAMESTGIYWLSLYQVLEQYGFEIRVVNARHVKHVPGRTKTDVLDCQWIQKLHSFGLLNGSFRPDQQIRKLRTYMRLRENLVVSRTEAVHHMQKALFEMNVQLTNVISDITGETGLHIVQAIIAGERDPKQLAALCSSRIKASRETVAKSLHGNWDEALLHCLKSALETYGFIQGQIQECDHCIQRQLAQLDSRAPLPNPPISLKAQLHRVCGVDLTKIPGIKEQAAQVIISEVGLDMTKWNTEKQFSSFLGLSPDNSISGGKVLRRSTRKVYNRAADALRLCAQSLTRSKSALGAKYRRLRARLGAPKAIVAMAHHLARLVYRMLRYGQSYVEKGIHDYELKFRLQRIKWLKKEAKSLDLQLVAA

SEQ ID NO: 60204 - protein, 359 aa, unidentified
MECFAGLDVSIEETAVCVVDAVGEVLATATVATDPDAIVATLKPFTGRLKRVGHEAGALSPWLQPALKKAGLPAVCLETRHVRAAMSAQRNKTDATDALGLAHIVRTGWFRTAHIKTESCYRVRLLLVQRRNLKRKFLDLENTIRHSLKAFGVRLSRVGRGGFDDAVRTATAADPLSSALMDCMLRARAALWAEYVKLHRLVIGIVARDELCRRFLEIPGVGPVTALTFASAIDDPARFKRSRDVAAYFGLTSKRWQSGSSIDVQGRISKAGDPDVRRALYEAASAMLTRFKGRDRVKSWGVKLARSKCHAKASVAVARKLAVIMHAMWRDGTRYLGDPESGSDNHEKRIVTKLVRTPN

SEQ ID NO: 60205 - protein, 423 aa, unidentified
MDVIHQRVAGLDVHKETIVACVRIMVDARVSRECRTFDTTTAGLKDLQAWLTASGCSHVAMEATGVYWKPVWNILSDGTFELLVANAAHIKNVPGRKTDVNDATWIADLMACGLIRGSFVPDQAFQELRTLLRTRKQLTREQTRHVQRLQKTLEEANIKLDSVISDVMGLSGRRMVEAMIAGERNPQKLAALADRRIKASPKALYDALHGRLTDHHRFRLRLHLAQYDVLAAAIGAVDQEVDAAIDQMDEVEKGGQAFFRSLIRLLSGIPGVNTLSAQTILAEITPDMTRFAMAGHLVAWAGLCPGQNESAGKRKSSRLRKGAPWLKTTLVQCAASAVKKKDSYFKAQFQRLKSRRGPQKAICAVAAAMLTTIYHMLKDGTQFQDLGAHHFDRRPPEAKARHLVAQLTKLGYTVQLQPLAEAA

SEQ ID NO: 60206 - protein, 349 aa, unidentified
MSMLSDLVDIVIGVDTHKHTHTAGVIDAGTGGQLGDRTVPTDPSGFDELIEFADARDGVRVWAIEGTGGYGAGLTRHLQARGEWVIELDRPDRPARRHGAKSDPLDAYRAAREALSRVTLASPRAPGSRAALSVRLAARRSAIEAATVAQRQLNALVIAAPESLRCRLRGLSIRSMIPIAARLRGHDSWDTETIETAHVLRALAKRIIALENEAAEHERALATTIKTWRPDLLELCGVGPINAAIVLCAWSHPGRIHSDAAFAMLAGAAPIPASSGQTVRYRLNRAGDRQLNRALHNIAVCRLRYDPTTRAYAERRRNDGKTDREIRRCLKRYIARQLFRQLERPLDNA

SEQ ID NO: 60207 - protein, 343 aa, unidentified
MQTITTIGLDIAKSVFQVHGVDAAGQVVVRRQLKRRYVLAFFQKLPPCLIGIEACASSHYWSRELRALGHTVRLMPPAYVKPYVKRQKNDAADAEAICEAVTRANMRFVPTKTPEQQSCLMLHRTRHLFIRQQTAVINAIRAHLAEFGIVAPVGRKGVTELLHVVADPSDGRVPEVARACLAALGTQLLGLKEQIVEFDRLIMAWYRSNETSKRLHYIPGVGPLLATALAASVADPQTFRSGRNFSAWIGLVPKQHSSGGKDRLGSISKQGDRYLRSLFVAGALSVIRYAKIHGTKHRPWLTALLARRPTKVAAIALANKLARMAWAMMARGERYRNPVALAA

SEQ ID NO: 60208 - protein, 323 aa, unidentified
MQGKVLPEPDATDPVYVGIDVCKERLDVHIHPANERFAVANDAGGWRRLKRKLAAFAVQRVVMEATSKYHRAAHRSLAAAGHAVAIINPLRARLFAEATGQLAKTDGVDAAMLARFAEQLAPATTEPAPHAQEQLRELVHARRAAIDDHTALRLRLGEASNQLVKTELKRLIKVIATHAARLDAAIDVHIQNDPVLARRSVLLQSIPGIGPVVAHTLIADLSELGTLTAKQVAALAGLAPYPRESGARVGQRRIRAGRATARRALFLGALSASRFNASMKVFYARLVAQGKAKKVALVAVARKLVILANTIVREDRMWTAQPA

SEQ ID NO: 60209 - protein, 388 aa, unidentified
MQVAADRRQTPTAIRTDLGAIFVSLELSRSTWLITSLSPAGGEKMSKHSMRSGDVPALLGRFAQLREKAQARTGQRFPIIVIQEAGLDGFWIDRVLQKEEIESHVVDPASIATSRRRRRAKTDKIDGESLVRSLLAYKRGEPRVCAMVKVPKPEEEDRRRLCRERKTLTAERVSHINRVKGLLFSQGITGYEPRRRDRRERLEELQTGDGRPLPEHLKAQVRRELDRLELLLEQIKAVEAERDLLLAAEHAATPALAAMLLKIKGIGPEFAAILWSEGLFRHFDNRRQVAAYAGLAPTPWQSGSVAREQGVSESGNPRLRTTLIQLAWLWVRHQPHSALTQWFEERVRRNGGRLRKTTIVALARKLLVALWKYVTAGVVIEGAAMKTT

SEQ ID NO: 60210 - protein, 333 aa, unidentified
MNKITLIGIDTAKQVFHLVGVDGHGHYVWRKRVSRHRLLLTLAQIECCEVVLEACGASHHWARSIQALGHTVRLIAPQHVKPYRRGQKNDYRDAEAIISAALSPGMRFVGVKRVEQQAEQALHRVRSRLMSQRNAAANELRGLLGEYGVVFRRGLKPLRDGARCFAEADEAHTLGLVDLVNDVLEEISVLQARMDHYERLIEQRVQADETSRRLREELNGVGKLGASALRVKVGDVRDYGNGRHFAAYIGLAPGHSGTGGQVRIGHLKRGHDRYLRQLLIHGARSALRHLGDKQDAQSRWLRGLLERRGFNIASVALAHKNARQAWAIMAREQ

SEQ ID NO: 60211 - protein, 324 aa, unidentified
MNTQERKEVFVGIDISKKDLDIAIRSTGEVLQVSNDEEGIAQLVKKMQQISPTLIVVEATGGFETAVASALGVAGMPLAIVNPRQARDFAKSLGRLAKTDRIDASMLAHFGEATRPEPRKLPDEQTVLLQALLVRRRQLIKMLIAEKNRLGMTHETQQARVLDHIEWLETELEDLDEALYEQLQQSPIWCEKEQLLRSVPGVGPVTVMTMLAELPELGQINRKKIAALVGVAPFNCDSGKRHGKRAIWGGRAVVRNALYMATLSATRHNNIIRVHYLHLLDKGKPKKVALVACMRKLLTILNAMMRTMKPWHPTLAAPNVLIPA

SEQ ID NO: 60212 - protein, 320 aa, unidentified
MAKQVEERILGVDVAKSWLDIYDAVSGESTRIDNNKAAVVAWLKARPDLFKVAVEATNRYHELFIEQAHARGHQVFIIDAFRLSRYREAVGHRAKTDRCDAELLARYLQQEQAHLRVWEPRDPCQTRLWQLMKRRAMLVKTRVSLRQSLEDIGSLDEAAKELIRHCDRLIRTVERELQMQAEQLDWQQDLDLARGIPGVGSTTSLALVAAFHRHTFRNADAFVAFLGLDVRVRDSGRHRGRRKLTKKGDPEVRRLLYNAAMSGCKQPHWKPYYRSLRDRGLSGTAALMALARKMVRVCFALLKMQVSFTPEARKTGCMAS

SEQ ID NO: 60213 - protein, 366 aa, unidentified
MSSVTSARGPIHLGMDTSKNTIVVGILMPGDEIPVIDRIWNEEGAVRHLVSRLGDPAALRACYEAGPCGFELHRLLASMGVACDVVAPSLIPRRAGDRVKTDKRDASRLARLHRAGELTPVRVPSPAEEAVRDLVRVRAGLLADRKRAQQRITAMLLRHGRVWRSGSYWTQAHEQWIARQSFEEPALTAALAYYRAGLDTRRAELDAIEADLRTWAGRDPLAPVVARLGCYRGIAELHGLALAAEVAGWRRFPSARAFMGFTGLVPGEYSSGDKTRRGPVTKAGSEPVRTALVEAAWAYRFKPAIGVTLRRRQHDATPGTLARSWKAQRHLHAKYKTMTSRGKPPGVAVTAVARELAGFVWAEMTS

SEQ ID NO: 60214 - protein, 377 aa, unidentified
MISREAFMQFIGIDLHTNRFTCSYRDQTTPPDAKRGKRTETFALTAEGIADFQKTLTADTYAMVEATITTFSFARIVRPMVKELIVANTYELKQISLARVNTDKIDANILSRLLKMLVLSGEQAGFAVHVPPPEIQELRGLFTTYRLMKKQAVQIKNRIHSLLKEKLYGFTQEEIFDRKNRGRIRGLESGTAMSFQVNYLLDYLESQEALVGPLKDEIMARAVPYMREIEILTSMKGISVFIAIAVIADIISVDRFRNSKAFTSYLRSAPKVSNSNTSVNVRGTNKMGRKVAATLVSQSLQHVLAASDKLREWYDRLCEYKKPGLVRTGLRRRVFSEMYQMLKKGEYHYGREADKHEKKMGCYRNFLKKRGIVLETA

SEQ ID NO: 60215 - protein, 390 aa, unidentified
MSQSFDASKSLTAFEQDSTLVAVIEMSQSKWLVAAVIPGVERRPLKKLDADAGALLKLLRRWREEARKAGRTIRRIVCAYEAGRDGFWLARWLQARAIETYVIHAASIAVSREHRRAKSDRIDTELLMRSFLGWLRGEKRHCSMVTIPTMAEEDARRPSRERESLVSEQTRIVNRFKAVLALFGIGGFNPKLRNAAQKLKTLCTVEGTPLPENAHAELRHDLERLRLVRDQIRAIESERLRRLALAPMAATGPHAMVRLIARVFGVGIETADMLVNEALARNLRDRRAVARYAGLTGAPDESGKRRREKGLARAGNGRVRRGMIQLAWRFLIFQKDSRLVRWFRERTADGRKTTRKTMIVALARKLLIALWRLVTTGEMTEGIKLRPAGT

SEQ ID NO: 60216 - protein, 317 aa, unidentified
MDVAFKSFVGIDIAKRTLDVHVLPERTSLKPPNDSKGRGQLREKLPPPGECLIVVEATGGYERALVAELIDAGHQVAVVNPRQVRDFAKACGILAKTDRIDAAVLARFGQAVVPRTQTKIPEKQLELQDLVVRRRQLVELRTAEMNRKENVASKFVKKSLQESVDALNKQIRRFEKRIAALVQSDDEWKQKAEIVQSAPGIGPGTSATLIAEVPELGKLSRRKISALVGLAPFNRDSGEFRGRRAIRGGRSSVRCSLYMATLSARRSNPVIRAFSDRLKALGKKPKVIITACMRKLLVILNTMVKNNTHWNPAISTT

SEQ ID NO: 60217 - protein, 362 aa, unidentified
MRIIGCDLHSRQQTLAMLDTATGEIEKTTLKHGENIVQEFYSNLPRPVRVGIEATGSMQWFVNLMEELGIECRVGNPAKIRAAEPRKQKHDRRDADLILTLLAENRFPAIWLPSQELQDLRALLRHRHQWVRMRTRVQNALQAIALANGMRRGPSLWSHDGQHAIASLPLAPHTAHRRSELQAMYVKFESDIEKLNQRVEEQAGQRSGARLLMTHPGVGPVTALATDVFLGDPKRFTDGKTLASYVGIIPREYSSGGRQKFGGLSKQGNPLLRFLWGEAGAHAVRRDPELQRFYRRKLVQKGLGKARMAVARKLGIRLWIMLRNEINYNEFCRRGQKQQNSGAACAGMPETRNGATSHRPVD

SEQ ID NO: 60218 - protein, 441 aa, unidentified
MAAPVMEPNAAGVDIGATEIYIAVPPDRDMQPVRRFAAFTEDLKAAADWLERCRIETVAMESTGVYWIPLFQILEARGMKVCLVNARHVKNVPGRKTDVSDCQWLQYLHAVGLLRASFRPSGQVCAVRSLMRYRESLVGMAAVHLQHMQKALDQMNLQLHHVISDLSGTTGMAILDAILGGERNPLKLAQLRDPRIKASPETIAKSLVGDYRREHLFTLRQSVTAYRSYQQLLACCDVEIEQMLGEFSDGAGPDTPVLADPKDRHRPRRNEMKFDLRGHLYRIFGVDLTEVPGLNALTAHTLLTEVGPDLSAFPNVGAFASWMGLCPDNRVSGGKVLSSRTRKVNNRVARALRMAAQSLFRSQSWLGQYYRRMRAKLGAPKAITASAHKLARIVFHMLTNRHAYDETVFAQQEIQNQHRLQQKLLQQAKKYGFQLIAITQN

SEQ ID NO: 60219 - protein, 395 aa, unidentified
MEQDSKGQAEWDARRGDRKYVGLDVHKATIAVAVADEGRGEVRKYGTIRNSPEAVVKLVRKLGPAERLECCYEAGPCGYGLHRQLEGLGARCAVVAPSLIPTRPGERVKTDQRDAAKLARLLRAGELTTVWVPDAEHEALRDLSRAREAARDARHRARQQVRKLLLRLGIAEPSGTTAWSQGYWTWLRTVRLAQPLQQIVLEDAIEAVERGTERLEKLEGHLQAAATHGRHAGLIAALQSLRGVGVITAVTLVAELGDLERFPTPRPLMAYVGLVPSEHSSGASQRRGRITKAGNAHVRHVLVQAAWHYRHPPKLTRALQQRQDGQPQAVTDVATRAQERLHRRYRALAGRKGRQKAVIAVARELVGFVWALARAHADHQAAAAVPTPDPAGVAA

SEQ ID NO: 60220 - protein, 404 aa, unidentified
MIFVGDDWSEDHHDVCLMDQAGKRLVSRRLLEGLTGIRQLHELIAEHAEEPDQVVIGIETDRGLWAGALAAAGYQVFAVNPLAVARYRDRHHVSGGKSDASDAKLLADLVRTDRHNHRPIAGDSLDAEAIKVLARAHQSLIWARTRHTNAMRSALREYYPAALVAFEDLAHGDALGVLGRAPTPEQGAHLNLPAIQSALKHGGRKRNIAARARQVQTALRSEQLAAPAPIAAAFGATTRAEVGIIAELNRQIAELETSLAAHFETHPDADIYRSLPGLGVVLGARVLGEFGDDPNRYTDAKSRRNYAGTSPLTVASGKKRAVLARHVRNRRLYDAIDQWALGAINNSPGARAFYDQHRAAGDLHHQALRALGNRLVGILHGCLRHHTLYSEHTAWAHRQTTRAA

SEQ ID NO: 60221 - protein, 457 aa, unidentified
MKSFFLGADVSKGYADFVILDEQKQPVVNNFQLDDTQKGHTRLFQIISEFLDQHPNASLFAAVESTGGYENNWYHCLKRLQRTFKVSVARLNPLGVMHNSKADLKRNTTDKISAQSIAQYLIAHPEKVCYQQHDQWAGLRKQWGFIKMLTKQCSQLLNQLEALMYIANPDLLKFCKDGVPAWVLKLLTKYPTAMHLARANAASVAKIPYITRLRAKELITAAKQSVASATDPVTKQLVEDTAKQILNMNKTIDIQHKRLIAQCEIPEIALLKTYKGIGDVSAIGIMLEIQAVERFDSVKKLAAYVGVHPVFKTSGDGSSGFRMSKQGRKEMRRILFMVVLTAIRTNPLIQQLYQQQQERGKCRMDAIGVCMHKTLRIIYGMLKHQTPFDPQIDVNNRRHGVDKATAPPVDKSRRFQDFDSQAPISRRQNKKRLERKQPQCVDNTKCGVKTPVPEPVI

SEQ ID NO: 60222 - protein, 350 aa, unidentified
MNKITTLGIDLAKSVFQLHGIDVAGKVVLRREVRRAQLMKTIAQLEPCLIGIEACGSTHYWARRFGEHGHQVKIMSPQFVKPYRKSDKNDRNDAEAICEAVSRPSMRFVTVKSVEQQDMLTMHRVREGLMKERVALINRIRGLLSEYGIVIAKNASSLRRELPGILEDAENELTVMARQIFNELYHDLSAREERIAQVERSIRTLGSRHEVVRRLETVPGIGYLSATALFGTVGDARQYKNGRQLAASMGLVPRQCSSGGKQRLFGITKRGDKYLRKLLVHGARSITTRAEHKPQPQDHWLNELRVRRGKFRSYVAQANKTARIAWVIMAKGDVYRAPTAWPESSVAVAA

SEQ ID NO: 60223 - protein, 351 aa, unidentified
MDRYIGLDAHASSCTVAVIGPSGRNLQHQVLETSAKALISFIRTIPKNRRLILEEGTHSGWLYEVLSPHVQELVAVGVRRSRGPKSDKGDAFALAEQLRIGDIKTKVYKKRGEFGALGHLARAYGTLVTDTVRTQNRIKSLLRSRGISTGGRQVYSAGGRQQWLAKLPAQARCQADLLYCQYDALLELRKRAEKQMLAEARKHPVYRVIKTCPGLGKIRTAQLLPVVVTPYRFANKRQFWSYCGLGIVMRSSSDWVRTQDGQWIKAAVQRTRGLNRNFNHTLKHIFKGAATTVISRAGKDDPLYQHYQQLLDGGTKPNLAKLTISRQIASIVLAVWRSKKEYDQKKLSPTT

SEQ ID NO: 60224 - protein, 345 aa, unidentified
MSIVGGVDIHRKQLTFDYLDTVTGQVRRGQVAPADREHLRVWLARFADRGDVAFAMEGCTGWRYVAGELAAAGIGVHLAEPADTAAARGRKRRAKTDRTDARHLRQLLAEGRLPECWIPPAPILECRALLETYHDLRREHTAWLQRIHAVFFHQGAPALGEGALRGARGLAAVRAAAAAHLSPAGQVQVAVAVEMMTVLEDRLYELRHRLLDAAGHMAGAKVLAERIYGVGPLTALALTCWLGGKDRFSSARKAVRFAGLDITVYSSDGKRSPGRLSRQGPPVLRWTAYEAGKAHARATAPDHAYYAAVRDRKNGKRAALSEARKIIRQACHILAELGDDAFAAA

SEQ ID NO: 60225 - protein, 344 aa, unidentified
MDYYVGLDVSLRSVAVCVIDVDGRALLERSIACEIEDITRCLAHLSAFDLRIGFEAGALSQHLFFGLRAAGFDVVCMEARQVNAALSAMRNKTDKTDARGIANVLRSGWFSPVHMKSREAHAMRALLSSRKAVQRKCIDLANEIRGLFRIFGLRLPSRIDQASFDEQVRPIIEADPDLSHALLPLLDARAVLFTTYRELDRRVKRAASHDETCLRFMAIPGVGPIAALTFKAAVDDPSRFSSSRTVAAHFGLTPRRYQSGEMDNPGRISKAGDADVRSALYAAANAMMMRSVASSEIKSWGLRLMRRKGRRRAVVAVARKLAVVMHRMWADNTEFRQRPLEGAA

SEQ ID NO: 60226 - protein, 398 aa, unidentified
MQPTRINHTMPAEDVLAVALELSNNTWKIALHDGKREKPAIQTVAAKVPACRLDEAMQAIEKIKTKWGIGPGVRTVVLYEAGQDGFWIERALSKLGYEVVICDPASIPVERHARRAKTDRLDAIKLVLCLRAWLRGEHDRMHVIRVPAVETEAQRHLVRDRGELQKETLQHRDRIRKLLRTVGCWQDVEGDIAKRLAKGEISCYDGAAIPAQLHARLTRECQRLALAQQQLAALEKDLVRQLPEPAQKRIADLQRLKAVGPVGATRLVLELFWRSFDNRRQVGACVGLAPQPYDSGQSRVDQGISKQGNRRVRSLLIEMAWLWLRYQPGSAMAQWYVQRTQGNSQNKRGKRIAIVAVARRLVIALWRYLTHGILPEGALLKNSKTTGLKRSAGEVAAV

SEQ ID NO: 60227 - protein, 435 aa, unidentified
MRREQVSVFRERGLRAGVSRRAEPQCLVGNANTERKTDTMKSYILLKPQTVQSQISRISAGAKPPVLFIGLDVHNDSIAVSLASSDTSEVRRYGIIGGEHDDVLQLVKKLQAAHPGATLRFCYEAGPRGFALCRCLRSHGLDCIMVCPSKVPRKPGERVKTDRRDADQLARLYRAGELTGLYVPEPVDEAMRDLIRARYQVGKAQHRARQQLKMYLLRHNLRYGGQTSWSPAHLRYLAQIKMPFPVQQIVFQEMLEVISEATARLERYDQEIERAVPGWRWEPAVRALMSLRGMARLHAATLVAELGDFHRFEHPGQLMNYLGLVPSEHTTGKDRQQGGITKMGNGPARRALVEAAWQYRAPARLSPHLKKRQEGLPKTITDIAWEAQRRLHHRYTHLTRVGKKKSQVAVTAVARELAGFVWAIARQVKPHAAKP

SEQ ID NO: 60228 - protein, 315 aa, unidentified
MTNTNITTAGIDTSKAKLDVAVHNRTERWQVANTLSGWRVLATNLAKAAVTRVGIEATGGYERGVVEHLRAAGFTVLVLQPIQVKAFGRVHLRRAKNDDLDAALIAACTATLDKPKIAPDPRLAELARNLTFLEQIEEDIARFKTRLEHIDEPRLRRLVISDIARLKARRAAQIRDIAKHLRGHDDLAKRLALVLSIPGIGERTALALIIRMPELGQIGREEAAALAGLAPFDDDSGQHRGQRHIAGGRGRLRRSLFAAALPAAFRWNKALIVLYARLIAKGKVHNAALVACARKLLIYANTVVQRGTPWTEKAA

SEQ ID NO: 60229 - protein, 463 aa, unidentified
MAARKPKRMSAQTVEDEDYQLRYERVAGIDVAKGTAMVCLRLPPGPGKTRRTSRTWEVTARVPDIEALAAELTAARVERVSMESTSDYWRIWFVVLEGAGLEVQLVNSSQARNLPGRPKTDKADAAWIARLTEMGLLRGSFVPPPEIRALRQYTRQLVHLTGDRTRYWQRLEKLLESALCKLTSVVSGLAGSASCLDMLEAMIAGERDPQILAGYARGPMKNKHAALVAAFTGMQFGQEHAFSASSDLRMIKMLDAEIAGLEQQVRDHLAAIPAAWGVDADGTTGPGAGTGPDAAVLPAVDRLAEIPGVSPGIAAGMIAEIGLDMTRFPTPDALVSWAGLAPVPNQSGSRKGRGKKGTGSSYARRYAGQAGHGASRTDTFLGERHRRIRSRPSGGGWKKACIAVGRSILVIVWHLLADPAARYRDLGPDHYARHTDTNRKARGHKRQLEALGYDVVLTPRETA

SEQ ID NO: 60230 - protein, 402 aa, unidentified
MEIFCGIDWAEREHEVALVDQDGRLLARQRISDDLAGFTALTGVLAAHTGTAFTAVDVAIETDRGLLVAALRAAGHRVFAVNPKAVDRYRDRHAVSGAKSDPGDALVLAHLLRTDRDRHRPLPDDSELGQAVSVLARAHQDLIWARQQDTNRLRSLLREFFPAALTAFPDLTTKTALTVLAAAPTPAAAAKLTRASLVDLLHAAGRGTRPADAARLADVFAVEQLHQLPAVETAMGEAVRAIVRTLTAANDSIKQLEDALATSFDQHPDAEILDSLPGLGLILGARVLGEFGDDPTRFTHAASRRAYAGTAPITRASGRRHAVLARHIRNKRLADACYRWAFSALTRSTGARAYYDQRRAAGDRHNAALRRLASKLLGQLHHCLNQRIHYDETLAWQQPAAT

SEQ ID NO: 60231 - protein, 375 aa, unidentified
MEHHSEAFVALDTAKLRNAVAIADAGRNGEIRYLGEFDNTEVGTRKLVAQLASKHARLTFCYEAGPTGYGLHRLIKSLGHDCIVVAPSLIPSKPGDRVKTNRRDAVNLAKLLRAGELTAVWVPDERHEAMRDLVRARDAAAKDYRIKRQNVSSLLLRVGRHYPGKKTWGQAHTNWLTSLKLEHREQRIAFEEMLLAVRQVRERIERLEQAMREAVADWSLAPVVEAVQALRGIDMVGAVAFLAELGDLSRFENPRQLMAYLGLTPSERSTGESVKRGGITKAGNTRARRLLIEAAWSYRFPPRVSKDMQTRIGAAPRTAREIAWKAQMRLCGRFRILTRKGKRPTIVVTAIARELSAFIWAIGREVVGSHATANQ

SEQ ID NO: 60232 - protein, 414 aa, unidentified
MLFLGVDWAEDHHDVCVMAEAGMVLGKRRVADSVAGIGELHGLVAEHADDDEAVVVGIEIDRGLVVWSLLGAGYEVYAVNPMASARYRDRHGTSGAKSDPGDAKVLADLVRTDRHNHRPIAGDSDLAEGVKLLARAHQSAIWSRQRQLNALRSALREYYPGALAAFGTDLASADALAVLAIAPTPELGRGLSRSKIASALRKGGRQRNIDRRAEEIQAALRSEYLEAPELITKAHGLVTHSTLALIITFNAQIAQLEAALSEHFEQHPDAKVVLSLPGLGTVLGARVLGEFGDDRTRFSGPKSRKNYAGTSPVTKASGHSQVVLARFSRNRRLGDACDQWAFCALTKSTGARSYYDQLKSPPQDPPTGPPTAGQPLGRDSPHLPGARRPLRRADRLARGFRPGRLTSSGHGMSS

SEQ ID NO: 60233 - protein, 365 aa, unidentified
MTKVRTWAGLDVHAAATVACVVDVPSGEISVQRLAGRTSEVTAFCALLPAPVRVAYEAGPTGFELARALAAAGVACVVAAPGKIERPAQDRVKTDRRDAERLVRLLMIGGLHPVRVPSGEEEALRDLVRAREDVRGDLMRARHRLSKLLLRHDVRYDDTASAWTTAHRAWLSRVELGERAAQSTLLDYLGAIDALVIRRDTLERTIAELVPHSPWADQVARLRCLRGIDTLSAVGLCAEIGDFSRFDRPGKLASYLGLVPSENSSGQTRRQGAITKSGSRHARRLLVEAAWHYRRPPRRGTTLQRRHEGQPVQVLAISWKAQQRLHHVWRRLDSERGKRKTVVAVAVARHLAGFCWAITTTDTNT

SEQ ID NO: 60234 - protein, 342 aa, unidentified
MTLYIGVDIHARQQTLSYLDTSDGTTGVVELSHERDDIKGYYSQFQEEVIIGIEACGYTNWFEELVERLGHKLLVGDAGEIRRLARRRQKNDRRDANLILELLVHGEFPTLFRYSKESREVLRQLRYRHKLVKLRTMVVNSLHALAINAGLSLRAKLLTRDGRRQLRGLSLSPISQQQGEELVSLADELTRRVGTVEQWLKEQAKQDVRVQRLQTHPGVGLLTSLCLVHTLGDVSRFSSLRKVTAYAGFDPMEDSSAERKAYGGISKAGSKLLRYLLVEAAQTAAKDDEQLKQFYRRLLPRRGKARAKVAVARKLLIRCFIMDRAAIDYAEFLRRGQEKETE

SEQ ID NO: 60235 - protein, 346 aa, unidentified
MEHYAGVDVSLELSSVCVVDAQGKIVKETKVSSEPEALVSFFKGLGFPMKRIGLEAGPLSQWLHAGLAQAGFETVLLETRHVKAALSAMTVKTDRKDARGIAQLLRMGWFRAVHAKSIGSQEVRALLVARKQLLGRLIDVELSIRGILRGFGLKVGPVTRKEFEARIRELVMGQATLERIADAMLSARAALKAEYEKLHKAVLAIVREDAVCRRLMTVPSVGPLVAITYKSAMDDPNRIVKSKAAGALFGLTPKKYQSGEKDVTGGITRTGDEMVRTALYEAANVLLSRITRFSKLKRWGMDVAKRRGSKRAKVALARKIAVILHRMWVDGTTYRWAAAEPIATQA

SEQ ID NO: 60236 - protein, 301 aa, unidentified
MSNKSNPTVATMGIDIGKNSFHVIGLDQRGAIMLRQKWSRRQIEARLANIPPSLIGMEACVGAHHLSRKLQSHGHDARLMPAKYVRPYSKGQKNDFRDAEAIAEAVQRPTMKYVATKTAGQLDLQALHRVRERLVRQRTGIINQIRAFLLERGVAVRQGLRFLRTELPGILATRSDALSSRMMHVIEDLAGDWRRLDERIEGLSTDIKGLADQDLACERLMTVPGIGPIISSAMVAAIGSGAVFSKGRDFGAWLGLVPKQISTGDRTILGKISKRGNRYLRVLFLLLQRGENHTVAGGPTN

SEQ ID NO: 60237 - protein, 421 aa, unidentified
MRVLYERCAAVDVGKDEIAVAVRLPGNVAGERQTVKRTFRTFYGVLAQAARWLTEQDVTHVAMECTGVYSMPVYHALVEHGDFEQVLMCNAGHVRNVPGRKTDLCDAEWLVNLLECGLLRGSFIPPAEIKAARDVLRYRVKLVQSRTSEMSRLGNVLQDAGIKIDSVASSLATKSARAMVDALVDGERRPGVLADLAKGKMRNKIPDLGQALEGRFDSHHALMCRLHLEHLDQLDAMITKLDAQIEQMMQPFRAHRELLTSIPGIAPFSAAAIISEIGVEVPHYFPTAEHLASWSGLCPGNHESAGKRYRGQRRKGNQHLQPVLVECAWAAIRHEGYLQAFYRRQVMKFGGFRSGAAKKKAIVAVAHKLLVIIWHVMATGQRYEDLGASYFTLRLDPQRETDRLVRRLQAQGYTVTLELTA

SEQ ID NO: 60238 - protein, 427 aa, unidentified
MLEETEDREEIIERVAALDIGKAEVVVCVRVPSPTQPGRRAQEIATFSTMTRSLLRLADRLRELGVTRVVMEATSDYWKPAFYLLEAQQLDPWLVNAKDVKHLPGRPKTDKLDAVWLCKVAERQMLRPSFVPPVEIRRLRDLTRYRADLVAVRTAEKNRVEKLLEDAQIKLSVVASDIFGVSGREMLAALLAGERDPKALAQLARTRMRAKIPLLEEAFVGHFTDHHAFLLRTMLARIDETSADIAAVETRIDELITPFAQAVEKLDQIPGVGTTAAHVILAEIGTDMTRWPSEKHFTSWLTLAPNNKISGGRLLSSQTPPSANRAAAIFRMAAMSLGRTETALGAFYRRLAFRVGKAKAITATARKLAVLVYRTLKGEMVYCDAGATAYDAQQQQRVIRRLRQRAATLGFDLLNRETGEVLEAAVS

SEQ ID NO: 60239 - protein, 337 aa, unidentified
MTRYVGVDLHRRRSVIVVLDSDGTELWTKRIDNDPVTLGLEIENAGPAPEVVLEATWGWYWAADVIAQAGGSVHLAHPLGIKGFENRRVKNDRIDARLLADLLRMGRLPESWIAPEGIRYQRELVRYRRKLSQLRAGLKAQVHAVLGKEGLRPPITHLWGPGGSVWLDNTDMAEAYETRVRSLRRLIKIYDTEITKLDARISDVFEGHEGYEVIQQLNGVGPVLAAIFCAELGDVTRFGSAKQVTSWAGLTPRHRESDTTVHRGSITKQGPPLVRWAAIEAISKNHGDDPIKTHYRRVSERRGRNKGRVAAARKLLTLVYYGLRDGEIRSLVPPEAT

SEQ ID NO: 60240 - protein, 342 aa, unidentified
MYYIGLDVHKKTISYCVKDASGQVHREGMIGATRNELDLWMKTLPQPWTVAMEATIFTGWIYDHLLPHAAQVKVAHPLMLRAIALAKKKNDRIDAGKIADCLRCDFLPECHMASTEIRDRRRTLRYRHLLVRQMVQMKNRVSGLLLETGVSHNKQRLHKVGYFRELLSTNKEVQESIRPLLKLSRETIVRCQKTDYALVSSLNRDPLLAERIKRLRTVPGVGPITALTWALEVGDVTRFRTMKQAISYCGLCGAEKSSAEKVMRTPLSKQRNKHIQHVLVEAAKLAPRQNHELAVVYEKEKQKGNSNRATLAVARKMVAYLLAVDRGQRAFVPSENHSTAAA

SEQ ID NO: 60241 - protein, 371 aa, unidentified
MNSIVYVGMDVHKESYTLCCYCYDTDRVEYKQTIPSDYKLILKYMESMRKAYGEDVTFVCGYEAGCLGYSLYHQLKDHAVDCKILAPTTMAITNTSHVKTDKRDAANIARCLAFHTYSEVYVPDDEDNSVKEYIRMRDDQKLMLKKIKQQILAFVLRQGKKFEGGKTYWTIAHMKWLKSIELEGLDKETLSEYLVTYEYLTEKIERFDSRIEELASGEKYKEKVKNMGCFLGVKTHTALSMVVEIGDFNRFEKAPKFSGFLGLVPSEDSSGDKVNRFSITKAGNSHLRRLMVEAAQSYTRGNIGHKSIALKQRQQGCSPEVIAYADKANERLRRRFYKMTLNKGVNRNKATTAIARELACFMWGMATGKIG

SEQ ID NO: 60242 - protein, 367 aa, unidentified
MENHSIVWVGMDTDAKKNQIALYRGWEKEPAAEWEAGMDAKGIKKLIERLEREEQEIRCVYEAGPCGYELYRKLRKAGIHCDVIAPSLTPRKPGDRVKTNRRDAQNLARLYRAGELTVIGVPDEKQESLRDLTRAREDVREDLTRRQHRLNRFLARQGYHYQDGDKWTQKHWAWIRKIHFEDANAETVLQESIRAADQSQEQLKTYDAKIEENASKPEYAKKVQRYETLRGVRTVTAMTILAEVWDMRRYGEAPQFMGSTGLVSSEHSTGDHERRGKITKAGNAHLRRVLVEASWHYRHGTSAGKAIKKRRKGQPAAVVSIAERADQRLNRKFRRMVDRYNKKPVIAAVAVARELAGFIWAIGQFND

SEQ ID NO: 60243 - protein, 349 aa, unidentified
MTQFSRIGLDTSKALFTLHCVDAAGKPLLRINLRRSQLLGFFKRHAPTVVAMEACGGSHHWARKLMALGHEVRLIPPQYVKPYLKRGKNDRNDAEAICEAAGRPGMRFVPVKSEEQQAEAMVLKVRATLVEQRTQLINAMRGHAAEFGVISGRGTGKVTALLAAIAADTAIPPAAQEMLALLGEQIAHLDCRIKALEVKLEATHKANATSQLLATVPGIGPIIGLSFAIDVDPAAFTSGRHLAAWLGLTPREHSTAGRQRMGGISRAGNERLRALLVNGATSVIRAAERAGSKLATEWLVKLLARRPRKVAAVALANKMARMIWAMMTTGEAYRRPVTLAAARLAAVVS

SEQ ID NO: 60244 - protein, 331 aa, unidentified
MFPVGIDVSKDTLDLCMLYDGMKGRVKTRNIRNDRSAVAHILRWLRLQHCGPEDVHVVMEATCVYHERLATSLHDAGLCVSLANPHRSREFARGMGIMTKTDKVDAYMLACYALLKKPHRWEPPAADIRFLSALLRRRDVLLADAVREENRLEKYQSTDTPADVVSSCIRMAQLLREEVRSIERQVKAHIQASPDLKRDYALLTSIKSVGPQLGMHMLVVLRSHHFESADQAAAFLGVVPVEKRSGTSVRGRPRMSKIGPPQLRAKLYMSALRGKIHNKRMRNIYEEMCLRGKPKMVAIGALMRKLVHWCYGVLKTGTAFCDEDPRAALNS

SEQ ID NO: 60245 - protein, 414 aa, unidentified
MKVIYPICCWIDVHKTFLVGTIISTTDGVQPHYQKKRFSTYNSDLNRFADWLHSNNCLDVCMESTGKYWVPVYNILEERKIRVTIANPKWVKAVKGNKDDTKDSKWIGDLFRLGLVPGSFIPTKDIRILREFTRYSYKLTSMKSSEKNRFQNAFTVCNVALDSVVSDMFGKSATAITDYLISEDTFNPEYCVSLLKHSLKKKSESVLESIEGYSITQEQKLRIRIVRSHLNYIESLISQIDSAIDVMVAKHESLISLLCTIPGVDRNSAITIISEIGNDMSQFGSSKRLCCWAGLTPGNNESAGKKKSVRITRAGVYLKPALVQVAHAAVKAKDNSYYRLKYEQISKRRGKKRAIIAIARMILTAIYQMMSTGEVWNHTDLFKVDMPETLKEKQLSKAVKQATKFLEKQGLTVA

SEQ ID NO: 60246 - protein, 400 aa, unidentified
MSGLKGSFDCFIGIDVSKDKFDTCGITGDETKLFQFSATMDRKGFEKLKGHLAAVSISSVLIGMESTASYHVNLFSYLVSKGYRVILINPLLISNYVKMQLRKTKTDKKDAVVIAQFLLTNGDTLVQRATSSLISDLRDLSRQRESLVDEMTALKIEIKQLLNITFPELEHMAGIFTKSILKLLQQYPSAFALRDADLGQLSQMLIADSYGHKREAFAEALIKAARASIGTNSTAKDMILKQKIALLLHLEDALQDITGMLIEMSRKLMNEEINLMTSLKGIGEKAAANFLIEMGGDINQFERSGKIIAMAGLDPAVYQSGKHEGKGRITKRGNRHLRRIIWLMTTKVIQYTDIFNVYYLKRRKEGLPYKMAVLATAHKLIRVIYAMLTQRTTFCAQVNS

SEQ ID NO: 60247 - protein, 358 aa, unidentified
MQSNKKSFKGQKIFVGIDVHAKTWAVETLTESGFTKRHAQEASAKVLFDFLSKNFPDGEYHAVYESGFSGFSTYYQLKEYGIHCVVVHAADVPSTQYEQVMKTDKIDAGKLARALRKGDIKPIYIRERENLDDRAVVRLRKTIQKQLSGYKTRVKHLLHTNGVKLPARFDKPGTHWSRAFMNWLKDEVVLLSSTRLSLDLLVNQVESIRKNLLEATRAMRILAATDKYKANYELLLSIPGIGFNVAMCLLTEIYDFKRFGNENCFAHYLGLVPTCHDTGDKHSTGGKTFRGNKLLGPMIIEACWVAIHKDYGLSQAYCSYKQKMKPQLAIVKVARKMSNIIFSVIKNGKKYEPYKWEE

SEQ ID NO: 60248 - protein, 423 aa, unidentified
MNPRVEIACGLDVHRSKIVGSIVHSDGGKETRTFTTGIDDAIALKNWILGNRCERVAMEATGIYWYPIYDLLEDHVTLQVVNPYFIKVMPGRKTDQMDAEWIAELCLNGMVKSSYVPPPQLRTRRDMTRTLDRLIRTRTRHKNRIHKIMIRSGIRIASHLSSLFGPSGLRILYGLLEGQSIDTILDQINNAKISRKRDELKGSICGNLDGNAVYLIRLELKAIRSLNNLIDDLKQRISVLMEPYTDDIEILMSIPGIGYDSAVNILSEIGDIHQFPSGKHLVSWAGLAPGMNESAGKRIPGHITKKGSKFLRTFLIEPSHSIAGMKRDNQLKRFFQKMRSKIGYKPAIIALARKLLMLVHHLLIHREMYYEEDFPMKKIRLPETIAPETLNPHDILNLVSDAVSSLNEPDRDHFIRNLNRITG

SEQ ID NO: 60249 - protein, 338 aa, unidentified
MAILHVGIDLAKNVFAVHGVDEHGKPALVWPKVARDKLRERVAALPPCTIGMEACSGAHHWARLFGDLGHTVRLMAPKFVAPYRLSGQRGKNDAADAAAICEAVQRPNMRFVPIKSVDQQARLTLHRTRQGFVEQRTATLNRIRGLPSEFGVVLPLKAATVRREAAAGLEALPGWARLAIGDLLDEVRRLDERVVEYDRHLAHMAREDERARRLMRLSGVGETTATALLATVGNGHDFRCGRQFAAWRGPVPGQYSSGGKARLGRITKTGDPYLRTLLILGARAVLALAKTKTDPISRWAAVLEQRRGYWKAVVAIAAKNARLAWAVLAKGEAFKMPA

SEQ ID NO: 60250 - protein, 419 aa, unidentified
MKRSLKGRPVLANGRAVVGIDVGKRRHAATALSPQGEVIAQLASFPNTRDGIDRLERDLLLKAGGPGKVVVAMEATGHYWMCLYAELTRRGYDCVALNPVQTGARSRGRIRKTSNDRIDSAGIARLILSGEAKASRVPDPRTAELRLLVRHRRRLMQAACDMERYAHTLADRVFPEYADVFSKPFVRCGQKLIRQVGLAPEKLVAREREVREILENAGRRKLAPETIDRLLQSAKASIGCRCAEEVAEEQLRSVFDYLDTLRQQIAAIEAELDQRVRHLNSPLLSLGISSVSAAVIHAESDPITDFATADQYVAYTGLDPSLHESGDSIHWQGKISKRGSPTLRQGLFLAAFAVYRKHEYFHRIYRKHRRQGKAHNNALVIVARHLARVIWRMLTDGRPFTKRPPTQARLCDNNQKNHR

SEQ ID NO: 60251 - protein, 364 aa, unidentified
MNATAAAPVVGVDLSKSVFQLAVADGAWRVVECHRLTRTQFERWFVNRAVGLVVMEACGSAHHWARWLNARGIEVRLLPAAYVRAYVKRNKTDAADACALLEAARCAEIVPVRVKSIEQQALQGLHRTRSLWMGTRTSRINALRGFCREFGIVIAQGSRLGVEQMGRVLADPRSAVPTLIRGTMTLLVEEIRLLEVRIAQLERELTALARQSPACTTLLSIPGVGLLTATAMVAATSGEVSHFRDARHFASWFGLTPKEHSSGGTRHLGRISKRGDRYLRMLLTHGARAVLRAASVAVRAGKPVDSLRQWALGVQGRANHNKAACALANKLARICYATLRDGEPYGRPRRLTKKIERTAFTLPT

SEQ ID NO: 60252 - protein, 482 aa, unidentified
MKKRTIFQQQSQELMRIFEEAATSKKVLVVAMDYAKKEHTIMFCNGDGYILRKPFGVKNTPEGVNYLIKQVHKSCNYHKIKRKHVFYGGEDCGSYTENFAQCLREHGWLVAGVNAQDAKKQRENIQASTDRLDLLGIARMLINRRGNCSPCQSGAYRNLRTLVRHRRKLVVLTTEERNRMHCVVDRLFPGFLAERNSGLFPFHEPSLRVMEGRFSAAQIKRRKRATLVDLLSRAGAQEPAQKAKKLQEYAANVLQPPKEYIATLQTSLTQHVGLYRCLKNNISSLEREMAIWLAQTQGAFLMTVRGIGMVLAAGVTAEIGNPATQKPVNNLASYAGIIPRVSQTGGSEGSTYVGSVAKRCNRILKDYLVQSASHLGLHGADDLMADHKRRDAAGQHANYGIARRYLRIGMHMMRHCHVYLPEDLRESSTLEARREYYQVTWPYLLDKWKRYDAHEVAFAPENPLGQWRDMVQDVYNITLRIK

SEQ ID NO: 60253 - protein, 356 aa, unidentified
MSMVAHTHPFVIGVDAHARNHALAILACPTGEVLDEGQFPATGAGLQRAVDWVARRTGGDLDTLWVVEGVGTYGARLARAAADAGYSVAEAARMNARANRGVGKSDPLDACRIAQAVLPLDVAQLRRPRTDDGVRAAVRVLIASRDHISVERTAAINALTALLRVAELGVDARRALTGGQIALVAAWRTREEALATRVARAEAVRLAKRVLAADQEIASNAKQMTALLNSSPARKLLDQPGIGPVTAAVTLAAWSHPGRVRSEAAFASLAGLNPIPASSGNTVRHRINRGGDRRLNRALHMAVVTRMRMDPATRAYVEKRTAEGRTLREIRRCLKRYLARQIYRHLNAASDTLLAA

SEQ ID NO: 60254 - protein, 327 aa, unidentified
MIEHYIGVDLHQAFFQACAVNAAGAREWEDRFPRTDAGITALRARCGRTTAVAVEASTPTWHFADALGGQVGDVRIVDPLKTKLKAGYAAKTDRLDARRLADALRRDSVVGIYYPPLAIRELRELCRYRHAVIQVRTALVNRLRAVLLRQGVVDGRRLARTRSDAWLETLHLPPRAAASVAGLRRLLTTVRTEAAEADREVLALAARDPIAQQLQAIPGMGPVLSLMVRAEVGTIGRFLTPGHLASCAGLVPSVAARAGRIRYGRITRRGSPWLRWALVEAAMHGTRRADRIGRWGRGLAVRKGALKARVALARRLCTDIFRQWPIG

SEQ ID NO: 60255 - protein, 344 aa, unidentified
MEVAIGVDPSKSSLAVAAVDPLGRVVGTAEFSNDPRGHRALLGWVGERGPDRVIGIECSLSYGATLSRVLLRSGEDVREVPTTLTHRQRRRRASQGKSDMVDSVAIARIVASGEVLPSAHRLEVLADLRALVEYRDQLVRARTQVANRTHADLVNVLPGYERQVPNLRAKAHRTTARSLLRGDRSVRGELVRKRLGELSRLEGEIAAMDRRIRATVQKTGTSLTSIPGVGPFIAAKILGEVGDPSRIRSKPAFAVLSGTAPLPASSGQVQRHRLNRGGNRQLNWALHYIALVQCRVMPEAQAYMARQREAGKSHKEAMRCLKRQLSNVVYRHLVADARRAELAA

SEQ ID NO: 60256 - protein, 321 aa, unidentified
MTYVGIDVSKATFVVAYSSAKSSKTKTFKNTTKGVHEFIQTLSASEHHCVLEATGNYSSLLVYLLSQVGITVSLENPLKIKNFARVMLSVTKTDETDARLIALYGEKMQPAPYRLRSDAILTLKQKRTVIGQLKKQLIATRNLKGSMEALPFFDPKCKKAIEKTIAFLEKQVKNLEEELAVLAQCEYKKQMDVLISIKGIGVTLAAALIMATGGFTYFDNAKQLTRYLGLSPTYQQSGTSVNVKGHINRNGDSSLRGQLYIAAMASLRCNAECKECFDRLRSNGKPGKVAVVAVANKLVRQAFAVVSQEKPYVDGFKSEKP

SEQ ID NO: 60257 - protein, 419 aa, unidentified
MTDPPLQAWTRYIAIDIHKHYLMIGGIDAHKRIVLQPRKIELHRWREWAQANLLPTDAVVIEATTNAWVIYDLLVTLVGRAVVVHPAKVKLIAAARVKTDKVDVLTLAHLLRADMLPEVWVPPSHVRDLRALLSHRRRLVSLQTTAKNRLQSVLHRLNLRPPDGELFARKQREWWKSLELSTTERLRVDQDLATLEHIGPQIEEVDTELRRLSVSEHWAEQTPYLVQLPGIGLLTAMTILGAIGDVTRFGASKQLVGYAGLGAGVHDSGKSHRDKGITKQGRRDLRFVLIEAARVAVQTHPYWKREFARLAKRIGEHKAVVAIARKLLIVVWHVLMARSADRRADAEQVAFKLMVWAWKLTDEQRGGLSSRQFIRANLMRLGLGAELTHITRGGTKRPLATIEEVLALQPELRDPPNTA

SEQ ID NO: 60258 - protein, 389 aa, unidentified
MKIFVGIDIAKLNHFAAAISSDGEILLEPFKFTNDADGFQLLVSKLESFDKNSIIIGLESTAHYGDNLVRYLVAEFYQVCVLNPIKTCQMRKNNVRKTKTDKVDTFVIAKTLMMQDDLRFITFFDLDMMDLKALGRFRQKTIKQRTRLKIQLTTYVDQVFPEIQYFFKSGLHQHAVYALLKEAPSPKEIASMHMTHLANLLKVNSHGHFTKELAKELRVLAQKSVGANDSAISIQITQTIQQIELLDSQLEKIEAEMTDIMKFNDSVIMTIPGIGYINGGMILGEIGDIHRFSNPNKLLAFAGLDPSVYQSGNFQAKTTRMSKRGSRVLRYALVNAAWNVVRNNATFKAYYDAKRAEGRSHYNALGHCAGKLVRVIWKMLTDEVEFNLE

SEQ ID NO: 60259 - protein, 344 aa, unidentified
MTYYAALDVGLRAVALCIVDDTGAVRLEKSLPSEVSDIVACLCGFGEEIACVGLEAGSLTQWLTYGLRAAGFKPVVLEARHVQAALAAMRNKTDRNDARGIAQILRTGWYRPVYVKSLESHYTRTLLAARKALLRKCIDLENEVRGLLKVFGIKLMPGLRHGAFDQVVREPIQANAELRHALAPLLDVRLELHKAFLEMDRRVKTLAHSDQICRLLMTAPGVGYIAALTFKAAVDDPSRFKRSKTVAAHFGLTPRRYQSGDRDNPGHISKAGDTEVRSALYAAANIIMTRSSKTSALKAWGHRLARSKGRKRALVAVARKLAVILHTMWIDGTEFCMKPQEAAA

SEQ ID NO: 60260 - protein, 365 aa, unidentified
MCQRVIVRDESHEGAVHMQISTIGIDLAKNVFQVHGVDASDKPVLKKQFRRGQVIEFFGKLPPCLVGMEACATSHQWARELKKLGHDVRLMPPSYVKAYVKRGKNDAADAAAICEAVRRPSMRYVPIKSTEQQSALMLHRARDLLIRQRTQLINAIRAHLAELGLVAQKGREGLQQLMRTAADADDEALPSDARFACQAIAAQLQAVQMQIAGLDKRMHQAHRANPASKRLETIPGFGVIVSTAVVATMTDPKAFKTGREFAAWIGLVPRQNSTGGKDRLGSISKQGDRYLRRLLVLGALSVVRRARTRPDKYPWVVAMLGRRPAKVVAVALANKMARIAWAILAKGETYRAPMHTSSGAIAASA

SEQ ID NO: 60261 - protein, 311 aa, unidentified
MEQSVVYIGIDVAKAHLDVAWAGTFRRLPNERSGHAVLVRWIKQSATPVQLICEASGGYEQGLLESLEKSEVKVTLVQAVRVRQYARAAGILAKTDQMDAKVLAAFGSAMQPPPTPPLCAEQKRLRQYEAQRRHLSRVLVAEQNRLAQLSCAELRTLSRALISKIKKQIETIDTRIGDLIAQDQTLREKAQKLTAIGGVGVRTAALLLAQMPELGQLNRRQAAALAGLAPFNHDSGSIRGKRAIFGGRRALRSGLYMAALSAAHFNPILSRFYRRLRTKGKPHKLALTAVAVMRKLLLALNQTLKPIPSLA

SEQ ID NO: 60262 - protein, 345 aa, unidentified
MKISRVGIDLAKNIFQVHGVDEHGELVWKRSLKRATWIGVFFKTVEPGCEVAMEACTGAHHWARELQARGYKVKLIPPQFVKPFVKSQKNDANDAEAISEAMSRPAMHYVAIKTVEQQDIQAVHRVRSELMSHRNGKANQIRGLVAEYGLVAPQQLGPLRAAIPCWLEDAENGLTDRFRALLQGLWEDLVNLDQRVKALDTEVAAIAATHPDAKRLQQLRGVGPLVATALVAKFGDATHFKQGRQAAASVGLTPRHHGTGGKNRIFGITKHGDPYLRSILIHGARAVVSQAKRRDDRLSRWTTELAHRSHMNVAAVALANKTVRMAWAMLRNGTDYDPELAVAEV

SEQ ID NO: 60263 - protein, 365 aa, unidentified
MNNETISSNGISPASLVNYVNRVLNLGLDVHYRQVTVGMQEDGGRIKAAGKMGHMDFLNWVQKKLQEGWQIYSCYEAGASGYWLHRELVKLGVKNLVVVPKAMGQGGKKQKTDKRDAGELCDCLDRYLRGQDKALSVVGVPTEEQEEKRALIRYHRQIMADRGRCEARGKGLLCAQGIEVHGRWWQGDAWLETLSDPRLKDWMKEQLIGWRNKILSTDEEQDGLRERIAALAPLILPKGVGAYSAAVLYYEMRGFERFTNRRQVGSMTGLCPGIHQSDGRGKEGSINRCGIGIVRWTLVEMVWRLIIWQPQYPPVRRLAAGLVKGKRAKKRLVIQAARRLAIDLWRLSTGQTTPEKLGLIMHSAK

SEQ ID NO: 60264 - protein, 410 aa, unidentified
MEPVLLSCAGMDVHEEKVDVCIAHGSFDKPPKFEIRTFSTMTSDLEDLKIWLKKYEVTAIGMESTGVYWKPIFNVMEGEFKIVLANAQRLKAIPRKKTDIMDSKRIANLLRYGLLPNSFIPPKEIRELRDLNRTRRKLVGMMTSEKNRLVKVLEAANIKLSSVVTKIYGVTSLALIRSLLEKDKLSREEISKMAKGKLKKKANLLEKALNGKLTDHHRFLLKMHLQNIDYLAKQIEKIDEEIKRKMVPFQKESKLIQTIPGISEVNASAILAEIGVDMSQFPDAAHLSSWAGVCPGNNESAGKKKSGKTQKGNSFLKGALTESAWAASKTKDSSYSAIYHNIVRRRGKKRALVAVAHRMLIDIYIVLTTGEPYQDKGAKAVHERTIMRKERSMIRSLEKAGYSVTRAVAA

SEQ ID NO: 60265 - protein, 390 aa, unidentified
MDRMYEKVASVGLDVHYKFSQATMRDAAGRVVRRERLEHEDREQLRDRLGRWPQGVLVVMEASFGWGWLSDEMLAAGLEVGLSNCYKLEQMRKARGLAKTNAKDADLLSLLPFERTDWWKVWRSPPVVRDRREWMRYRAGLVAVGTATQCRIRAIFHRHGIFPNIGRLYGGQGRRFLAELCRDGRTEQVQLWDGALANLRGQVRLLNHLRRQQAEVERRLHRQLEQSPLVRRLDGVPGFGLILSHTVISEIGQIDRFRDHRSLASYSLLAPISRETGEAEPEKVPLGRHLGFRGNLTLKWTFIEAARGAVRKGGRWRAMFEAYTDGGKRHRNRGYIKVARALVKVIYAMWRDGTEYSDTPPVRPGSRRRRREGRTRSGTGQLSQPMAAGR

SEQ ID NO: 60266 - protein, 402 aa, unidentified
MLPDHLNNPTAIRMQFGAIFVSLELSRKTWLITSLSPGKGEKMSKHSVTAGDIAGLLARFSELQRKAAVRTGKSFPLIVIQEAGLDGFWVHRVLQQEGIESHVVDPASIAIPRRRRRAKTDKIDGEALLRALLAYKRGEPRVCSMVVAPSPEEEDQRRLCRERDTLTAERVRHVNRIKGLLFAQGIADYMPLSRNRRKRLDELCTGDGRPLPQYVKAQISRELDRLELVLEQIKVVEKERDRVLLSLAPVVVSMGPEAVCDQPRRASGVRMLTALRGFAANGATKLWSEGLSRHFSNRRQVAAYAGLAPTPWQSGGISHEQGVSKAGNPRLRTTMVQIAWLWLRHQPQSALARWYFARVGVVATKARKKVAITALARKLLVALWKYVSAGELIEGAIMKPVA

SEQ ID NO: 60267 - protein, 395 aa, unidentified
MTVVGIDVSKGKSMVAAMKPGGELVAAPYEVRHSDIELSHLALDVLCMEPDTRVVMEATGRYHEPVAALLHSEGIFVSILNPLLIKQSGAGSLRKVKSDPKDALKIAKYGLDNWSTLLEYTPMEAIRQQLKLCARQCDLYNKNIVMLTNNLISLSDKTFPGVNELFSSPEKADGHLKWVDFYRRFWHCDCINRMSPDAFEERYKKWCKSKGYHFSTDAADALYAASCRPYTTLPRDNNAKLLVTVAADQLIALRENQSKLEAEMLNLCNQLPEYETVMAMYGVGKSTGPHLMAGLVDVRRFPHRSSIVAFAGVVPGVVGSGKMQLSSIAASKRGSSQLRKALFQVVSTYVKRKPENEAVYQFYAKKRDEGKPFFVALLLPRTSSCAFTMPALRSA

SEQ ID NO: 60268 - protein, 395 aa, unidentified
MSITDCCTPAAIHVDLGAIFVSLELSRRNWLVTSLSPGGGEKMSRRQVAGGDMSALLALLEELKRQARARTGRDYGVICIQEAGLDGFWLHRVLQAARVESHVVDPASVAVDRRRRRAKTDKIDGAALLRTLMAFKRGEPRVCSMARPPTPQQEDRRRPCRERQVLLKERIEHSNRIKGLLFSQGISDYDPMLKSRRKRLEALTTGDGRPLPVHMKRQILRELERLEQVLEQLAQVEADRDTLLAASPEAEPAAADQPRAAPGASLIRLKGIAEERAAVLGAECLWRTFDNQRQVGAYSGLVGSPFRSGQTNQEQGISKAGNKRLRHTMVEMAWGWLQHQPQSELSLWFQRRLGPTPDCRRKKILIAALARKLLIALWRFDAHGVVPEGAVFKTA

SEQ ID NO: 60269 - protein, 483 aa, unidentified
MKSKQPEKNKKAICRPTQNNWHQMNRKQRREMTRKIQSEDLSLEVVHPDAAGIDIGNESHYVAVPLTRDSQPVRRFGCTTSELKGMAVWLKQCAIRTIALQSTGVYWIAVYDILEEAGFEVYLVNAKETKNLPGRKSDVQESQWLMKLHTYGLLRNSFRPSQEIRTMRTYWRQRHDLVRAAGRHIQRMQKTLTQMNIQLANVLSDVSGMTGQAIVKAILAGERDPYQLAALRNWRVKASEEEIARSLEGNWQEDLLFVLQQEQDGYEFCQRQMAECDQRLRQYLQQLEDRSHGVGLPEEKRKERLRKKKKGNAPQFDLRAELFRMTGTDLTQIDGIDVTTTMTILSEAGWDMSKWKTEHHFVSWLRLCPDNRVSGDKIIGKGRLPTNNRVTNALRMAASTLRLSNTYLGAQFRRLRTKLGAPVAIKAMAAKLARLVYRMLRYGMTFVDRGAEFYDAQHRKLQITYLKRKAAHLGFQIIEAPAA

SEQ ID NO: 60270 - protein, 349 aa, unidentified
MHSTTVAVDLAKNVFELAVADSEGKIGERLRLNRARFSSFFVHRAPCRVLMEACGSAHYWARRIGAHGHAVQLLPAQYVRQYVRRNKTDRADAAALIEAARCAAIRTVPAKSLEQQQVLVLHRLRSQWMSTRQRYLNTLRGLLREFGIAVPLGVRVARARIAHYLAQPPQELPAAIRPLLAQMLSEVKVLEHRIEQIERDLTALTRADPVVQQLRQIPGIGLLSSTAIRAAVGDVERFPCGRCFASWLGLTPREYSSGERRRLGGISKRGDVYLRTLLVHGARSALLAAHRQQRTGRPLDHLRQWALQCERERGHNVATVALANRLARIVWATWKHGRAFDGNWGCAAQ

SEQ ID NO: 60271 - protein, 359 aa, unidentified
MNAIHYIGLDVHKKTISYCIKTADGQIVQEGTLEAERTVLRRWAEGLRQPWHGAMEATLFSAWIYDTLKPYAQQLYMGHPAKMKAITAGKKKSDRIDARTIADLVRCDLLPKCYVLPPELRDLRRLLRYRNMVVQQSVRMQNKMAGLLMESGTAFNKEKLHGKKYFTDLIKSLREVPESVKDLLRMSRGAMEMFESTQKQLIQRLLSEPALEQRVERLMSIRAVGPITALTWALEIADPHRFSSIADAASYCGLTTAFRSSAGKQQRGPISKQRNAWLQTMLIEAAKLAPRWNPQLAALYAQQLKRGHPNRATLQVARKLVAYLLAVDKSGQPFQLPTPPMLPITAKAKKKKAALARAA

SEQ ID NO: 60272 - protein, 354 aa, unidentified
MTSIKYIGMDVHKESISIAVMNAVGKIVMECVIETKANMILQCIDGLRGDLRVTFEEGTSAAWLYDLLKPHVTELIVCDPRKNASMREDNQNDKIDARRLAELLRIDHLSPLYHGEHGLRTLKELVRSYLTVTKDLARVKTRIKAIYRSSAIPYKGKEVYAACHRAEWLAKIKELGVRRRAEFYYQELDALRMLRQEVRRELVAESRKQKAWKRLCQIPAIGPIRAAVLLGILQTPLRFRTKRPLWKYSGLAIETCSSADHRSINGQLQRSKKNSVRGLNQNCNHDLKNLFKGAAVSASSKPGPFQEFYAALLAKGMRPEMARLTLARKIATIVLIVWKKGVCFDAQHLKPQTA

SEQ ID NO: 60273 - protein, 366 aa, unidentified
MSVYVGIDVYRKRSQVAVVGEDGRVQLNRNVVNGSEPMLGLLGGLPPGTPVAFEAAFGWGWLAGLLEDYGFEAHLVHPLRCKAIASARLKNDKVDAAILGQLLRADLLPEAWIAPPEVRALRALLRHRIQLVRLRTLLGNRVHAIAADHGHDRPAGYWSGPGRAWLASLDLPPASRQVIDDDLALIDALAGPIAALDEQVRRRAKAEPGVKVLTRLPGVGEFTALVILAETGDITRFGSARKLAAWAGLTPTVRSSDRTVRHGRISKQGSAWLRWALGQAAQTARRSPDFAAAYQAIAARRGKQIATTAIARKLLTRAWHLLTAAGIAGPAASPAPRLPSREGRQAPGALAKVHEPATRRRARAAD

SEQ ID NO: 60274 - protein, 360 aa, unidentified
MTSTALASVPQVTIGVDTHKHIHVAHAADELGRPLGSYTMPTTSIGYGDFLAWAQDLGQLEVVGIEGVGHYGAGLGRALRAVGVRVTEVGRPNRQRRARHGKTDSIDAAGAAAMVLAGDDLGDPKTADGITEMLRVLRIARVSAVRARAKAFNALKDLIVTAPDELRDELAGRHKLHLIGACAGLATSEIPSTPTEAVSIAVKSLAERCLQLDAETKARDTQIEALTAHACPALRQVYGVGPDTAATLLVALGDNPERIGSDAAFAKLCGVSPIEASSGKTVRHRLNRGGNRDANRALHVICVVRLRRHQPTRDYLARRIGEGRTKPEIMRCIKRYIAREIYHAVLPTRQEIPTQTIATT

SEQ ID NO: 60275 - protein, 342 aa, unidentified
MQITTIGLDIAKNVFQVHGIDAKEKVVARKQLRRSQMIRFFKALPPCLIGMEACATAHYWARELTKLGHEVRLMPAKDVKAYVKRHKNDAADAEAICEAVRRPTMRFVRIKSAEQQGQLMQHRTRDVLIRQRTQIINALRAHLAELGLVAAQGNAGVNELRAIVTDEQDTRLPIDARASVIVLAAQLEALESVIGAIEKRIKMQHRSSEASQRVEAIPGIGVIGATAIVATVTDPTIFRSGRDFAAWIGLVPRQDSTGGKQKLGPISKQGDRYLRRILVVGAIAVLRRAQENPGKYPWLTQLLARRPFKVVAVALANKMARMAWALLAYGGSYRAPELAETA

SEQ ID NO: 60276 - protein, 354 aa, unidentified
MKKRDKYMGMDVHQATTVVSVIDSEGKPVLETTVETVAGALIRLLESISGPLHVTFEETTQAAWLYEVVRGYAAEVIVCDPRRNKLLSEGSKADKVDARKLAELLRGGLLRSVYHGHEATRRLKELVRAYETLSEDVMRTMVRIKAGYRSRGIANRGRGVYQPNQRKQWLEKLTEPGARQRMEWLYEELDQLRPLRRRAKQAVLAESRKHRAISLLRTIPQLGPLRSALIVATVDTPYRFRTKRQLWSYSGLAVVTHMSSEYEIREGRVVRSRKPIATRGLNRNCNRRMKDVFIGAATGGSQRDPYRTYLQRLERSGMRSEMARLTLARKIAAIALTIWKKGETFDSKKLNLAT

SEQ ID NO: 60277 - protein, 352 aa, unidentified
MQHFIGCDVHTRNQVVAWIEAETGEIKKRRLEHAGEEVRKFYAQFPRGTVVGIEATFPAYWFERLMGELGHELWVGDAARIRASEVRYQKTDSRDAEGILDLLRTGRFPRIWVPSLEERDLRQLLVHRMKQVRARTQVKNQLHALAISPGVCRGRKLWSAKGRKELESLALLPWAARRRKELLELLDRLDEQVRELDRAVEEAGRARPEVALLRTHPGVGMVVALAFVLTVGPIERFPNRRKLVSYWGLNPREDSSAGRQRLGSISKQGNTMMRWLLIEAAQTAARLDPQLRRTYQRLKHQRNSGVAKVAVARRLVVRLFWMLRTRHNYAQLVHMSGSPSSAVVPPQGGPNL

SEQ ID NO: 60278 - protein, 345 aa, unidentified
METAYDGRQVVGMDLHRRRSVLVRMTGDGRKLGTARITNSAAELRKAIAPAGKAPQVVLEATYGWYWAADVLAAAGAEVHLAHPLGVKAFTYRRVKNDEKDAADLADLLRMGRLPEAWIAPREIRELRELTRYRHKLVGLRTSCKDQVHAVLAKLGVPVTCSDIFGPSGQLWLGGLALPQPYAGKVASLGLLSGELTREVTLLETVIADLLHGHDGYHAIQALPGIGPVLGAVTVAEIGDIRRFPSAGRLCSWAGLTPRHRESDLKVARGHITKQGSPILRWAMIEAIQRLPADTPIRRRRDAIIARRGKEARNIAKTAAARHLLACVYYALRDGHVRSLDQHAA

SEQ ID NO: 60279 - protein, 351 aa, unidentified
MIIIGVDYHPSDQYIALVDTETGEYEERQLNHSEGEAEKFYRELAARGASVRVGIEATGYSRWFERLLAELSMELWIGDAAKIKTKRVRKQKTDREDARLLLRLLRENNFPRIWVPSPENRDLRQLLWHRHRLVQMRTRIMNQLQALAMNEGQRRKKKLWSEAGRAQLEKLPLAAWAARRRKDLLELLDRMNPSIEELTAAIEREARKWPEALRLMTHPGVGPLTALAFVLIIGTVERFQCGKQIGSYVGLIPCEDSSAGHQRLGHITKQGSSLLRFLLGEAAQAAARCDADWRRRYLHLAMRRQRNIAKVAMARRLGVRLYWMWRKGWEYAEWVKFGSHAGQLGIGNGVQ

SEQ ID NO: 60280 - protein, 368 aa, unidentified
MKDVTTYVGIDAHKKDLFIAMLVGTQATPVTWTVANEPNAIRRLVRKLEREAPGPVRSCYEAGPCGYALQRRMTTMRVACQVIAPALIPRKPGERIKTNPRDARKLAELLRAGLLTAVQPPTPEDEAVRDLCRARDDAREDLQRAHHRLGKWLLRRGLHFSGRNWTKAHRRWIESLEWTHAPERVVVDDYLLAIDHLEARLVELDARLADLAQTDPYREPVGWLRCFRGIDTLTAMLILAELHDFHRFQSPRALMAYLGLVPGEDSSGEKHRRGRITRTGNALVRRLLVETAWHYHHRPSIGVAMTRRRKGQPTRVIAIADKAQQRLCRRFRRLAEQHKPAPKIAVAIARELAGFLWAALQPAPGSAH

SEQ ID NO: 60281 - protein, 415 aa, unidentified
MFYVGIDIAKSFHVVSIIDDNETKVINKPFKINNDAKGFEKLLTILDSVSLDKKEFTIGLEATGIYGENLQEFLKFQEYLVKLLNPFQTTRYREQITLKKVKNDEIDSLVIALLLKSGKFSSGYITDDEYQSLRTLYRNRATIQADMKDVKKRILTQITVTFPEFEGFIKPFTVTGLVLLDKYPTAHHYRHSSVERIMKLFRHIQGNNFTQSKALQLLELSKESIYSGKAKDARAIAIRSSIRLLQMYLSELDIIEAEILSLLQNSSVETTVDEAGHEIQKADSLLANLKTIPGVAEKTIAALISECGDLTRFPTIAKFIGYLGLFPTENSSGNSKHIGHLSKRGSPLAKHALYMSAVSCLIHNTQLKQLYDTKRSQGKSKKEALIAVSRKIAVIIYSIVKYNVPYNPNRVFAKS

SEQ ID NO: 60282 - protein, 342 aa, unidentified
MNISTIGIDLAKNVFQVHGVDAHGDVVVVRKLRRAQVVAFFAKVPVCLIGMEACATAHHWARELTKLGHTVRLLPPAYVKAYVKRSKNDAADAAAICEAVTRPSMRFVPIKTEEQQASLAVHRTRALFIGQRTQLINALRAHLAELGLVAETGRDGFTKLVEMVWDEDNVSLPPAMRQALLAVVDQLEALSQQLSKLDRVIMAQHKASDVSRRLESIPGIGVIGATAIVATVADPSAFKSGRDLAAWIGLVPRQHSTGGKEKLGGISKQGDRYLRRLLVVGATAVVRQARLHPEKYLWVMKLLAKKPAKVVAIAVANKTARIAWAIMAKGGHYRAPELAAAA

SEQ ID NO: 60283 - protein, 406 aa, unidentified
MHPAPTTTYAGIDWASRNHAICVVDATGSVLERYEVEHREAGLRSLVRRLTAAHVDGVAIERPDGPVIDALLEADLRVVVIASRHVKALRSRYGLAGNKDDRADAYVLADVLRTDGHRLRPLLPDSDATVALRALVRARKDLVRTRVRLVQQLSAHLELVFPGAVDLFDDLASPIAQAFLARFPSAERAAWLSPKRMAAWSRAQGYCGRRSGKELHTRLVAAPRGRVGEGADAMAAITLAFVRAIGEIRQQADALAGRIGEQLALHPDGHIFTSLPRSGSVRAAALLAEIGDCRERFPTVESLACLAGAAPSTRQSGQHRVVTFRYACDKKLRDALIDFAGDSRHASPWAADIYRRARAGGKRHPHAVRILARAWLGVIWRCWQDHTAYDPNRHRALQRVLLAPAA

SEQ ID NO: 60284 - protein, 345 aa, unidentified
MELHTIGIDLGKTVFHLVGLNLRGEVVVRKKFSRTQLLRFTANVHVGLIGMEACGGAHFLGRALREQRHEVRLIPAQYVKPYVKTNKTDYIDAEAIAEAVARPTMRFVPIKTDDQLDLQSLHRVRERWVMRRTAVINQIRSLLLERGITLRKGRRYVDAASPLILEDADAKLSGAARMLLAQLKLDLDQLAVRIEEADAVIGKTAHENEACRRLVAIPGIGPVTATALIATIGNGGAFHKGRESAAWLGIVPREHSTGGQQKLLGISKRGNSYLRRLFVQGARAVMQQRSKQSLGLSAWLAQLTARTHRNVAAVALANKLARIAWAVLAKNEQYRPQVLADAAAA

SEQ ID NO: 60285 - protein, 343 aa, unidentified
MQITTIGLDLAKNVFQVHGVDATGQVVVRKSLRRSQMLAFFTKLAPCLVGIEACGTSHHWARELIKLGHEVRLMPPAYVKPYVKRGKTDAADAEAVCEAVTRPTMRFVPVKSPEQQAALSMHRTRDLLVKQRTQLINMIRALLAEFGVDIPKGMERALLMARQIVDGKAPEVPFEAAKVVGTLSQQALDTHVRLREIDRDLAVWLRGNEVARRLMTIPGIGPVGATALAASVTDPHQFRSGRQFAAWLGLTPLQKSSGGKERLGHITKMGDKYLRKLLIVGMTSRVRRAKQNPTVDPRLADLLARKPTRVATVAMANKTARIIWAIMARGETYRAGHQPAPAA

SEQ ID NO: 60286 - protein, 347 aa, unidentified
MITIGIDPHKSSHTAVALDQSGALLGELRVPADNSTLATLSAWAARWPQRRWAIEGAGGLGRLLAQRLVAAGESVVDVPSTLAARARVLQRGHGRKSDGIDARSVAIVAQNRNDLPPVRSDDHSAVLRLLSDRRDELTAERRRTVNRLHRLLRELHPGGAPRALSADRASRLLATIRPIGAVDIERKAMARQLVTDLRRIDRALIDNRRRCAQAVTASGTTLTEIFGISEVLAAKILGHSGDISRFANADHYASYTGTAPIEVSSGEQRRHRLSRAGNRSLNHALHLAARVQTMHPGPGRTHYLRKQAEHKTPAEALRSLKRQLAKVVYRHLHDDQLLQISPAPGLT

SEQ ID NO: 60287 - protein, 357 aa, unidentified
MKYIGCDFHPSFQVIAMLDKETGELVERRLLHTEEARSFYQELQGPVVVGIEASGNTHWFESLLARWGHELWIGDAAAIARQEGRKQKHDRRAAALILRLMLENRFPKIWVPTVAERDVRQLLIHRQHLVRMRSRIKNQLQHIALNQGWQKKRKLWSEAGLELLRNLKLEPWTGQRRDTLLAMLAELEQKIRPLDQAVEKEAFACQGARRLQTHPGVGPVISLATVLTMGDVKRFEDSRSWVSYLGLNPSEESSGQRRRLGAISKQGSPFLRYLLVEGASSAAKGDKSLARMYARLKAKKHHGVAKVAVARKLAVRLYWMARTEKSYPEVVRTQGSQSHPVAEVMAVPLNRPPASRQ

SEQ ID NO: 60288 - protein, 327 aa, unidentified
MVTRPRPASTDLSAVAGPLCIGVDVSKDWLDIADNAGRALRIANTVAAITEALGGSWAQGCRAMVCEATGGYERPLMLVAAQLGLPLRRVHPNRARAFATAAARLAKTDAIDARMLARFAAFIADEPARPSPAPQTQTLAALVSRLDQLSDLRQSESCRAHQAHEASVKASIGAVIEVLDSQIGAIQHAIDALIASDPILTEKASLLRSCKGVGPKNAQMILARLPEIGALDRRKIAALVGVAPITCKSGSSINHASIAGGRKPLRDTLFMAALSASSHNPTFIAFRDRLKANGKPHKLIIVAVIRKLIVTLNAMIKAKTPFKPALT

SEQ ID NO: 60289 - protein, 377 aa, unidentified
MGDYSEAYVGFDTSKSRNSVAIADGGRRGEVRFLGEIENTPAATAKLVRKLATKYERLTFCYEAGPTGYGLHRQIRDLGFECVVVAPSLIPKRPGDKVKTNRRDALSLAKLLRADELTSVWVPDGRHEAMRDLTRARETAMLDLRTKRQHVSAFLLRLGRPYPEGKKTWTKAHLSWIAGQKLEHPQQRLVLEEMMLAIRQAQERLARLEQAIAAAVPEWSLAPVVTALMAMRGIDMISATTLLAEIGDLSRFRTPTELMAYLGLVPSEDSTGDTVKRGPITKAGNRRARRMLVECSWSYQHPPRVGQAKQPKVDAAPPAVREIAWKAQCRLYRRYRALIRKGKRKTVAIVAIARELAGFIWAVARAVTTGRVAAATA

SEQ ID NO: 60290 - protein, 361 aa, unidentified
MSDGIRERMKMMAGMDLGDKYSHLCLIDTQNGKVIEESRLRTTPEAMRCRFDSEQPLHIAIEVGTHSPWISRLLTECGHEVLIANPRKTRLIYGQRRKTDKLDAEKLARLARADPELLYPVEHRGEDSQAHLAVVHSREALIRSRTQMINHVRGTVKSFGHRLPKCSAPSFHKKVPGRLPSELAGALGPMVETIGSLTEKIKDYDRRIEELATEHYPETRLLRQVPGVGSLTALTFVLTLEDPRRFAKSRSVGAYLGLAPAIDQSGEQDPQKRMSGEGDEMLRRLLVSSAHYILGPFAVDSDLRRHGEKIAERGGKNAKKRAVVAVARKLSVLLHRLWVSAEVYEPLRNARWLGVQGEEVA

SEQ ID NO: 60291 - protein, 428 aa, unidentified
MDVCLLDEHGERVAVTAAPPDADGLRGLAERLAGYGEPIYAALESMNGARFVHDELERYGWRVELADAQKVKGLAPLAATTDRIDAYVLAELARRDLVPAPWLPAPGVRAERERARFRLHLVRHRAALKARIHASLIAHGHPCPVSDLFGTRGRALLDAFELPEAWRTSTDASLRVIAHLDTEIDACERELRRQGAAHPYVPLLMRAPGIGWVLAYTIAAEIGEIERFSGPKKLTGYTGLCPRVYQSGQSDRRGPLAKNGPTYLRWALIEAAVHAARHPAYVAHYPPTTRRLGRQRGAKVARVEVARSGVDPSWQTSKIGRESAQKGCRSMEQQRRERRSFTDAHKAEVVALCQTSGKSVREISRDLDLTESSVRRWVAQAEIDAGEREGLTSAEREELTRLRKENRILREERDILKRATAFFAKETR

SEQ ID NO: 60292 - protein, 369 aa, unidentified
MAHATQWAGLDAARVSALMKGGGLSQDEVSLPLVMGLDQHRAQITTEWIDLVSGEISRARVRPADRSAFRRFLSRFAGRRLEVALEATTGWRFIVEELERVDAGVHLADPAELSALRGPKKHAKTDWADARHQRELLLIGRLPESWVAPEHILDLRALVRLRHEISHERTEWQQRIQAVLYHHGCPQKRNLMTADGREWLAVQPLPATARQQVGVALTLIDGLDVQLAPLTRELRLYARRQVGCQALIDAHYGVGELCAVTILAELGDCQRFSNSRDVVRHSGLDITVRQSDRNRSPGHLSRQGPPALRWALYEAAQHARHPRSPDRDYYLTIAERLGGNRACLALARKMLKRCYHTLRELGDEALTPA

SEQ ID NO: 60293 - protein, 358 aa, unidentified
MTETKSIELRVSVDVGYRRHSVAIGLPNGEVLEEFEIAHRPEGFQEFFTRIEKHRKAQDCGVGVAMEGYNGYARPLDSLVRSRGYRLYNINNLKLARFKEIFPGAAKKDRIDARKGLELFQLSDHLPLAKEVLQEVRGTPKENEVLKRLTRRRRRLVNERVRVVNNLQADLQAVCPGLLEITSEASNQWFLNFLLSAESLSQLARLRKATLLKIPAVGRKYASLIQDWQKRAHFSEEAAWVSEMIQEDAKRCLELDEKVKTLETKIREVAQDSKIAKILLSIPGFGPVCTTELAGEIGTVERFSKEGSLALYLGMSTLDNSSGQYQGTKAPKHVNTRAKAAMMTALDRHRKYVPESQR

SEQ ID NO: 60294 - protein, 338 aa, unidentified
MKLYVGLDVSLVRTAVCILNESGEIVAERQVDSEPDAIASSLAKVQGITERIGLEAGPMASWLFAGLSGQGLPVVCIEVRQMKAFAKASPVKTDKRDARLIAQAMRTGLFKATHVKTDESQRLRLPLRHRQAVMRRNKDLINTVRGTLKAFGIRTGGGKNTPYARRVREAVADPSLLTVTEPLLVAYEQGLAVLAELDRMVLAAAREDAVCRLLMTVPGVGAVTALAFRTGIDLPERFAKSRLVGAVLGLTPRVYASGESEHIGRIAKCGDGTRWLLYEAANVMLTRVKGDNWLKSWALGVAQRRGMRKAKVALARRLAVVMHAMWISGQAFSLAKPL

SEQ ID NO: 60295 - protein, 353 aa, unidentified
MSNYITIGMDLGNSKHTVCAIDGAGEVLWRNEVANTPEALKPFFEENAGATVAMETGLCCRWISALAKRCGCEVLVGNARKLAPIWQSRQKSDENDAFMIAKLARFDRGLFHPVSLRDDERHEMVQILELREVAVSQRTQAVNSVRGLCKAMGVFIPDCDASRFHRVAKDAIPRDLSWKFMPMLRQLKGTEETIRRYDEMLKRYASGHFGEEVALVSTIPGIGPVTSCAFVALVGDAKRFGKARDAGAYFGLTPARDQSGDRDAPKRVTKAGSKMMRRLLVTAANYVMRTSSPDTAIKRHGMRICARGGKIAKRKAKVAVARKLAVVMLAMLRSGRPYEDRLAANVPAKPDAA

SEQ ID NO: 60296 - protein, 318 aa, unidentified
MNTLPENSRVVHLGVDVAKHELVLDLQGSIRRFANTPKGIAELINAISSRTDFPPHLVCEATGGYERALTAAALQRGVPISVVQPQRVRHFAKAIGLHGKSDPLDAGLLSRYGSQVLPLPLMPKDSARQRLDALLRARTELLDSMHRELNRSENDVSPVVIRIRKDLVKRFEKHLATLDDEIAKLVAGDSALARADAMLREVKGVGPQTSRTLLAFLPELGRIGRRAIAALVGLAPYDRDSGKTKGRRFIQGGRAHVRQVLHMAAVVAARHNPVLKAFYQRLREAGKPFKVAIVAVTRKLLLHLNTRMAIFLGNPLVD

SEQ ID NO: 60297 - protein, 326 aa, unidentified
MEHELHYIGIDTAKEKLDVDVLRPDGRHRTKKFANTTKGHDELVSWLKGHKIDHAHICIEATGTYMEPVAESLYDAGYIVSVINPALGKAFAQSEGLRNKTDTVDARMLAEFCRQKRPAAREAPHPLERALRALVVRHQALTDMHTQELNRTETAREVQRPSIDAHLLWLEAELKRLEKQIKDLTDDDPDMKHRRKLLESIPGIGEKTSAVLLAYIGLKDRFAHARQFAAFAGLTPRRYESGSSVRGASRMSKAGHVSLRRALYMPAMVATSKTEWGGAFRDRLAANGKKGKVILGAMMRKLAQVAYGVLKSGVPFDASRHNPVAA

SEQ ID NO: 60298 - protein, 338 aa, unidentified
MALYCGIDLHSNNSYVAVLDEERREVDCRRLRNELPAVLGFLEPYKEELEAIAVESTYNWYWLVDGLMRAGFDVRLMNPTKATAHRGLKYTDDRHDARWIACLLALGILPEGYIMPVEERGLRDLLRRRLFLVQKRTAHLVSLKAIFARSTGKQMSADEIQRWDCEAIREVIADPLVVESMTVMLPVVRVLTVQIKAVERTAVRIGELRDEFGLLQTAPGIGQVLALTIMCETGDIRRFPGVGNYASYCRCVPSDRMSNFKRKGSGNRKNGNKYLSWAYSEAAHHAIRFEPLAKRYYDRKRARSHLMVASRALANKMARACYHVLRDQVPFDPARAFC

SEQ ID NO: 60299 - protein, 385 aa, unidentified
MQTPNDLSQSRIVLKQDSTLIAVIEMSLSSWLVAGIVPGVERQPLKKLAVDESALLKLLNRWREEAEKAGRKIERIAVAFEAGRDGFWLARWLRARGIEAHVIHASSVAVSREHRRAKTDRLDTELLKRAFLGWLRGERDHCKMVAIPTTKDEDAKRPNRERQSLVGEQTRIVNRMKAALIRLGIRGFNPKLKKAAGRLEDLRTPEGEPIPPNTLAELHRDMERRRLVSDQIRQIEEARLERMEQAPGDGPHAMVRLLARVIGIGIETSDMLVHEVLSRRLRDRRAVARYAGLTGAPDESGSKRREKGLAKAGNARVRRGMIQLAWRFLLFQKDSALAQWYRTRTEGAGKKRKTMIVALARKLLIALWRLVTTGEVPAGVVLRAA

SEQ ID NO: 60300 - protein, 452 aa, unidentified
MARKGKQASKSNNTALPVMRPDAAGIDIGATEIFVAVPADRAQENVRSFPTFTQDLYALADWLKHCGIRTVAMESTGVFWIPLFQILEERGFEVCLVNARHVKNVPGRRTDVSDCQWLQFLHSVGLLRASYRPEQQVCAIRSLLRHRESLVQMAATHVNHMQKALDQMNLQVHHVISDIVGQTGLAIVDAILDGERDPLTLAQLRNKRIKASEEVIAKSLVGDYRPEHLFTLRQSLAAYRSYQQLVDECDREIRAQLRDFEPPHPPAEIPEEGKSIKKPISSDGVLRSELKRVFGIDLTQIPGIRTGIAQTLFGEIGPDFTKFRSASAFASWMGLCPDNDISGGKVLWTGTRKVNCRAATALRMAAQSLHHSKSALGDFYRRMRAKLGAPKAITAAAHKLARIIFHLISARQEFDDSKFAADQLRFQKHQEKKLRAKAKSMGYELIPIEPAA

SEQ ID NO: 60301 - protein, 344 aa, unidentified
MFYCGLDVSLRETAICIVDADGKIMKELKVASDPNAIANAIRDSGFVCEKVGLESGSTAAWLQAGLVALEFPAICIDARHAAAMLQAGLRNKSDRNDARGIAQLIRMNAYRPVWVKSERSQRLSALFTARNTLQDQLVRIENVVRGLLRCDGVRLPLGRRHFEAEVRNRVGDHGEIMATIEPLLVARAELIRQRSVFDQRIIALARRDQVCKLLMTMPGIGAHVALSFKAGIDDPGRFRRSRDVGAHFGLTPRRYSSGEVDLSGHISKMGDRHVRHMLYVAAQVTLRRDQGLWSSMKAWAMNVAKKRGLAKARIALARRIAVTLHKMWLTGEPFHWQKPGAAMA

SEQ ID NO: 60302 - protein, 349 aa, unidentified
MIARSDAACFVGIDLHKDTLTACTIVAKDREVAYRKISCVAREKVREFLAGLPRPSVVAIETVGFYRWLWMEAEPIVDQVVLADARGCRALAGRRIKTDREDALNVAELLMTGRLPMAWAPPGNIQRVRNLTRHRVGLSRDHAKTLHRVKSIMNRLNRPGPARMDAAGLQRYLLASVDRIEADDLTVLWQHQRRLVEVEQDRSAIDRRIIDLMRADEFRRLHTILESIPGVGLVVSATAIAEIGDFSRFPDSKAIGRYAGLTPTGYASADKNRLGRICKTGSPDLRWALQQAAWTAIRCDPDIKKTWLKISKTAGKKAAAVAIARKILVLMWTLVRKDELYKAREPVAA

SEQ ID NO: 60303 - protein, 331 aa, unidentified
MKNKELIGIDVSKNVLDVFILGLSYHFTVENHPTGYAKLLETCCIKLSCNKDHLFFCFEHTGRYSRLLSIFLSDSLIVFAKVPAMDIKQSRGMTRGKSDKKDARMIAQYAYRKLDELITTKLHTPEVGQLRQLLSLRNKLLRHRTAYKNSIKDLQDCFMEGETDFIRITQERLIQHLNVELDNVEGQIDTIINSMPAWARNFRLMQTVKGIGPVVSRYVIIYTENFTRFTDPKKFACYAGIAPFEYSSGSSIKGKTRLHPCANKQLKSLLNMAAMGAVRLKGEYKAYYERRTDEGKNKMSTLNIIRNKLLFRIFAVVKRKTPYVDLTMFAA

SEQ ID NO: 60304 - protein, 326 aa, unidentified
MKIIGCDLHARQQAIAMVDTETGELMEKILSHEGDAVREFYAGLEAPVVVGIEATGAMQWFLELLEELGIECRVGHPAKIRAAETRKQKHDRRDAHLLMDLLEMGRFPEIWMPSTEQRDLRTLLRDRHQWVKIRSRLQHTLQAIALNHALRRGPGLWSAAGRNALQALPLPPYSSQRRTELLRLYVQLQKRILELDKEVEVQARQRPQSRRLLTHPGVGPVTALATEVFLGDPKRFQTGNQVASYIGMIPCEHSSGKRQRLGKLSKEGNSLLRYLWTEATMHAVGKDPELKRFYRRKLIQKGMGKARVAAARKLGIRLCPSSRRWA

SEQ ID NO: 60305 - protein, 421 aa, unidentified
MQVQLSKCAAFIGIDWADRKHDVCLQVAGVDACERSVLEHRPTVIDAWARDLRKRFDGRPVAVCLELSQGPIVSALLEHDFFVIFPVHPSTLANYRGTFTPSGAKDDPTDAAVALEILRRHPDKLAPLRRESVDMRALRRLVESRRDLVQDRVRVTNRLIYALKAYFPQVLDWFRDKETDVFAAFLERWPSLPQAQRARHDTLIDFFHAHNVRRASTIEKRIRAIQSERPLTTDPAAIEPALLLVQILLPQLRALSAGVAAFDREIARRCQVLPDYRLFANLPGAGKVFSPRLLVAFGEQRDRFANAAAFQKLTGIAPVTQRSGKSHWVHWRWACPIFLRQTFVEWSASSIPHSFWARAFYERHKAKGASHNAAIRALAFKWIRVLFRCWVDRVPYDESRYLAALQKRHSPILKFAAQAVS

SEQ ID NO: 60306 - protein, 313 aa, unidentified
MNFVGIDVSQSTWDVYLRPQGRSFSVPADHDEATLLGQQLVTLGPCLVVLEATGGLERGLAAELIDAGLFVAVVNPRQVRDFARALGRLAKTDRIDAETLALFAEKVQPRPTQKCPEKQAEIDALVTRRRQLVELRSMERTRQHQATIKAARRSIDKLLKVLDRQIAALDKAIGQLLESDDDWRTRCELLQSVPGVGATTSATLVAELPELGRLNRQEIASLAGLAPFNHDSGRFRGQRRIRGGRSAVRSILYMAALAARRCNPILQRFAQRLEQAGKPFKVVITACMRKLLTMLNTIVRNGTPWAPPSTAQR

SEQ ID NO: 60307 - protein, 427 aa, unidentified
MSERKSLEVRVSVDVGSRRHSVAIGLSDGQVLEEFEIAHRPEGFQEFFSRIARHEKVHGCEVAVAMEGYNGWARPLDSLVRQHGYRLYNINSLKLARFKEIFPGAAKKDRIDARKGLELFQLRDHLALAKDVLQEVTGTPKENEILKGVTRRRRRLVNERVRVVNNLQADLHAVCPGLLEMTSDAGNQWFLNFLVSADTVPQLARLRKSTLLKIRAVGRKYAGLIAQWQKQAHFSDEAEWVSEMIQEDARRCLELDEKIKTLEIKIKEIARNSTMATLLSSIPGFGAVCTSELAGEIGTVDRFSKEASLALYLGMSHLDNSSGKYQGTKQAKHVNTRAKAAMMTAIDRHRKYVPQSQKYYEKKRAEGKSHNQAIRALGRHLCRIIFTMLKEQRAYQLRPETGDTQGRVSSVACVKTALQRSKIFVNN

SEQ ID NO: 60308 - protein, 339 aa, unidentified
MDLYCGMDLHGDNVFCTVMDRAYRPVFERRLPNDLPVVLEALAPYRKRLASVAVESTYNWYWLVDGLRAQRYTVRLANPARMQENIGLKSANDKTDSRFLAKQQVMGVLPEGYIYPQAERTVRDLLRRRMHLVQDRTAEWLRLEGLVARHSGKDLGVQALRGVEDGELLTLLGGELLVLQSAQVSYRHIAFLEREIRALEQTVEGRVRLRDGYDRLLGVPGIGRILTMTIMLETGPITRFPGPGNYASYCRAVKTQHTSNDRKKGAGNGKCGNRYLAWAYIEAANFAVRHSPELRAWYQRKAARTKRVVALKALANKLAKACFFILRDGVDFDVKRLVG

SEQ ID NO: 60309 - protein, 413 aa, unidentified
MEVWWGGGSCLLWEGGRRMDRMFVGVDISKDTFSAAGLDAEGNECFSGFYAMDSDGFCKFLEIVTTHCPDRQKVLVAMESTGCYHINLFSFLTSQGIHAVVINPLLIANFAKRSLRKTKTDKKDARTIAKFLRENGEEIFQLPISQDLQDLRDLARERESLSHLISATKVEIKRVLRTIFPELESIADIYTRVMLRFLQAYPSARLVKAAKLKVLAQALRQPYVGHKLTFSAEDILRAAQSSVATASPAKEIILKGKIATLLHLQERMEEMTKLLTDLCKATRVEDLKILRSIKGVGPKTGVPFLAEMGSVENFSSHKKLIAFAGMDPSVCQSGKNIGKSKLSKRGNRHLRRAIYLMTAAVVSKNAFFKAYFLRRKKEGLIPQKALLATAHKLIRVIFAMLSHRTYFQVKMAI

SEQ ID NO: 60310 - protein, 352 aa, unidentified
MEQITQSICEKAMLFVGIDMHQAKWQITIRDEANVLWRGSIPGKWEELKRRLDRYSGYRIRAVYEAGCFGYWLHDNLQEYGVECVVTPPSLVPMEYGNKVKTDRRDSDKLAQLLAKDLLKSVYVPSKEEVLHRQTFRQRNQLVKDRVQTQNRIKAALRFFGLRIPDIRAPFSSTYISNLRHVNFGNHSYQKSFNFLLNEYEFLTELIRQQNKLIADMAKLPQYREKVEMLTRTKGVGVLSAMEIILELQDVSRFPNGDHIAAYVGVTPSQHSTGPHVRMGRITGIGKPHLRGTLIELSWSLIRYYPEEREFYLKLKARAGSKRAIVAVARRFIIKVWYMLVTNTPYHVRAAV

SEQ ID NO: 60311 - protein, 313 aa, unidentified
MAMPAKQFIIGIDVAKVELVSYCEQAGQHQSFRNTQPEIRKWLALQPANTAICVEATNIYHLDLVEMAYEKGFAVYVVDGYQLSNYRKGIGGRVKTDASDACLLARFLDREGSALRPWVPPPPVYRKLQSLLRRRAALVSARTSLVQSWSNEGVLKEAFNSFIKHFESLDLLIQKQLKTVVREAGLTEQVVRCQKVEGIGFLTAVALVTAFIRGEFRSSDAYIAFLGMDLKVADSGQKSGRRRLTKRGCSEVRRLLHNAAMAASKSAAWKELYEYYRSKGKATTQVLVILARKLARVAFALMKTQGEYVSRRA

SEQ ID NO: 60312 - protein, 316 aa, unidentified
MQTILDLGADVDSQYVMIACAACSFKSHKIVNERRTILAWLRCIPRGSRLGMESTGGYHELLADLAHAAGLQVFVLNPRDLRRYAQGIGRRGKTDRIDAEAIARYVAREHAELHAYVAPSKEQRVLARLIRRRAKLVSIQGALKQSLRDVAGAQRDLKQALAALSRLIAKVDALMQRTLEKLPAAHEAAQQITTIPGFGVLSSTCLGHRFTRLPYSNSDAVVAQVGLDPRPEDSGKKHGRRRLSKRGPAEERRLLFNCAMSACRTSHWRPYYQAQRAKGLSSTAALNVLARKMLRVAFALYKHNRSFDPARSGAHA

SEQ ID NO: 60313 - protein, 364 aa, unidentified
MRHHSEAFIGIDTSKSHNAVAIAEGVRGGEVRFLGEFPAIEAGMRKLIAKLAAKYNRLTFCYEAGPTGYGLYRLIKSLGHECIVVAPSLIPKKPGERVKTNRRDAISLAKLLRAGELTEVWVPDERHEAMRDLSRARLAANKDLQGKRQQISSLMLRLGRCYPGKTTWGPAHMKWLMSQKLEHREQRMALEELLHGIRLEQAIREAVPEWSLAEVVTALQAMRGINLIAAVAILAEIGDLSRFQNPRELMAYLGLVPSESSTGDTVRRGGITKAGNGRARRILVEAAWSYRYPARVGREKQPKVAAAPRRVREIAWKAQTRLCGRFRSLLRKGKLPTVAVTAIARELSAFIWAINREVVANRQP

SEQ ID NO: 60314 - protein, 340 aa, unidentified
MLYIGLDVHKEFCQACVIDESGRALSNERFSSTSEELDRFLDRFQDAKFVLESTGIWEFIYEGIEKRGFEAVLAHPLKVRAIAEARVKTDKVDAETLAQLLRADLIPRSWIPPKDIRDLRQLVRQRAYLVREATRFKNRIHAEVLRRGVRRPENLKTPFAQRSIRWMRSLDIPTVTSCLNCLENVQAQVEEINIQLLEEYNRRPDAQLISTVPGIGFYGALLILAEVDDVHRFHHPEKLCAYAGLVPTVRQSASSVKYGSISKDGSAYLRWILTESVHVHTRYDPESQLSRFHSRVAKRRGKRVATVATARKLLRIIYWMLVRHEPFHSHGFNPVKRVHC

SEQ ID NO: 60315 - protein, 345 aa, unidentified
MPIVGGLDIHRKQITFDYLDTVTGEVKRGQIAPADREHPRAWLARFAGCEDAAFAVEGCCGWRYVAGELAAAGIGAHLGEPADTAALRGRKRRAKTDKTDARHLRALLAEGRLPECWIPPAQILEYRALLETYHDLRRAHTAWVQRIHAVFFHQGAPPLAEGALRTEPGLAGPRAAAAAHLSAAGQQQVATAVDMLAATEAQQGPLRHQLADAARHLTGAKVLAERLYGVGPLTGLALTCWLGGKDRFSSSRKAVRFAGLDITVHSSDRKGPPGRLSRQGPPVLRWAVHEAGKTHARASAPDHGYYAAVADRKNTKRAALSEARKIVRQACHILTELGDDALAAA

SEQ ID NO: 60316 - protein, 372 aa, unidentified
MKKNSTGSAPGSKTRPAASQKAIAKLTVGIDLGDQNSAYCTLDAVGDVLSEGTVRTTENGFAQQFQKMSPCRIALETGTHSPWVSRLLQKYGHDVVVANARQLRVIYDSDRKNDKVDARTLARLARVDKDLLHPIRHRSEKAQADLAMLRARDTVVQVRTKLMNCARGTVKSVGGRLPGASGECFAKRVREHVPEAIRDALLPVLDQVGHLAAQIREYDKRIEQTAKTEYPQTQLMRQIPGVGVITSMAFTLTIDDPHRFRKSRDVAAYLGLLPRQSDSGASKPQLSITKAGDHMVRRLLVGCAHYILGHWGPDSDLRRWGLSLMERGGKNAKKRAVVAVARKLAVLMHKLWVTGEVYEPLREPNQVKSAVA

SEQ ID NO: 60317 - protein, 343 aa, unidentified
MEYGAIDLHTKQSEIRIVTAEGSVVLHRRIATTRAALSGIFAERSRLRILLESSTESEWVAQHLEELGHEVVVADPNYALMYGQRHRRIKTDRRDAIALGEANRLGIYRTAHRVSSAQRMVRRQLQVRDQLIRMRTQIINLLRGQLRSEGLRIRSGRAESFVARYRAVAASAALRAVLEPVVEALSALAPLIATADAWAHDTAHGDAVARRLMTAPGVGPITALTFQAALDTVARFGGPGAVTAYLGLVPQEATSAERQRRGPITKAGPGRLRAVLVQASWATWRSPRSSATLHAWVHRLADRRGKRIAIVALARRLARILFAMWRDRRDFQPAQVGRAVVAA

SEQ ID NO: 60318 - protein, 307 aa, unidentified
MAKPVTKITLGIDVAKDKHDIHNWQTGKLTTLANERSVIKAWLRCFQGPVQIALEPTSIYHMVMVEEAHALGYDVYLINPRQLAHYREAINEGNKTDPIDARLAARYLEHEGSLLRPFKPRDPRAQRLWRLILHRATAVKSRQQLRQSFVGLKVSIQGVLTQYQQLLARIDRQIINLIRELGWWSDYLFCLSIPGIGSGNATALVAAFHRCAFASGDAFVSYLGLDVRIRESGRYRGKRKLTKRGEPELRRLLYCASQGAQSYHRFADYYQKQLEKGLSKIAARVILSRKLARIAFALMRNEEMFIK

SEQ ID NO: 60319 - protein, 367 aa, unidentified
MNYSAIDYHKKNSFVSTVNEQGQRVAEAKIKGNEPAAFAQFFAGLGGEPTKVVVEACWNWGWLYDVLEQIEEVEEVVLAHPYKTRVIAEAQVKSDKLDARILSQLLRGNLIARAHAPSWPTRQRRFLLRQRMFWVRVRTMVRNRVHALLARQHGLELPHRQDLFGSGGMKFLRSLTLSGIDGALLSQNLQMFEQLEVQIKASEGEIARELGAEPEVERLQTIPGIGKLLGAVIAAEFDGAERFRTNKKLWGYCGLAPSTRSSDGHTWHGPLLGQCNKWLRWAFIEAAWVAIVHSGYFGAIYSRQIERGKIPNQAIVVVARRLCEIAWKLLREKRSFQAIAPSKLSHPPHVILADAQLKKCAPRPRSD

SEQ ID NO: 60320 - protein, 334 aa, unidentified
MQFNNFVGIDISKNTFDLALIKDNNASIFISDAFSNTHSGLVRLEEFLKKQGLKMEETLFCMEHTGIYCRLLSQYLTERKYAVWLEMPVKIIHSLGLQRGKNDRLDAKRLAEYACSKKGKAVLWDPPREVIIRMNDLLTLRDRLVESRKSLKQPIKELRDSGFTDAAELIESKCKTTLNAIDKEIKQIEKDLEDTINKDTNLKKLYRLATSVPGIGKITAMFLLYFTNEFKLFGNAKQLACYCGIAPFEHSSGTSIRGKTRVSHFANKKLKKLIHLVALSTISRNKELSVYYTRKVAEGKNKMLVINAVRNKILHRLCAVIRRGTPFQSEYQFA

SEQ ID NO: 60321 - protein, 343 aa, unidentified
MPTVTTVGLDIAKSVFQVHGVDAARQVVIRRQLKRRYVLAFFQKLSPCLVGIEACASSHYWSRELQALGHSVRLMPPAYVKPYVKRQKNDMADAEAICEAVTRANMRFVPTKTPEQQSGLMLHRTRHLFIRQQTAVINAIRAHLAEFGIVAPVGRKGVEELLRVVADRNDERVPDVVRACLSALGTQLLGLKERILEFDRMIMAWHRRNETSRRLHYIPGVGPLLATALVANVADPGAFRSGRNFSAWIGLVPKQHSSGGKDRLGSISKQGDRYLRSLFVAGALSVIRYAKAHGTKHRPWLTALLARRPAKVAAIALANKLARMAWAMMARGERYRNPVALAA

SEQ ID NO: 60322 - protein, 343 aa, unidentified
MGEVITIGLDIAKSVFQAHGVDEAGAVVIRKRVSRAKLLEFFASLQPCLVGIEACPAAHHWGRELQALGHTVKLMPPSYVKAYLKRSKNDANDAAAICEAVTRPSMRFVPIKTKEQQAALMLHRARQLLVRQRTMLSNAIRGHLSELGIVSAKGRKGTGALLEIIADAEDGRVPPAARGTLDVLARQYSAIGAEIGSIDRSIVAWHRSCEASRRLEEIPGVGPIVATALVAEIGDWKAFGSGRNLAAWIGLVPKQQSTGGKNKLGSITKQGNRYLRWLLVAGAMAVIRYAQKHGTLKRPWLGRLMERRPTKLAAVALANKIARMAWAIIVHGDRYREPKPLAA

SEQ ID NO: 60323 - protein, 356 aa, unidentified
MLNKFNNFVDFSGHNVYAGLDVHGKSWTTTIIVDDIEHRRFTQPPEPMALYKYLSSNFPGANLFSAYEAGFCGYHHHRKLIELGIENIVINAADLPITNKEKVNKNDHIDSRRLAQALQRNELKAIHVFGPEHEQFRSLFRMRWTAAKEHRRAKNRIRSFMYYYGINPPSEFNPEHWSLGFIHWLDLIIMPTQAGTLSLKSLLKAYHNTREQLLEVTRQLRHEVKLHYPDLYKLIMTVPGIGPIVALCLIAEIGDITRFRSYRHLSSYAGFIPNSHQSGDKDPKGRLTYRSNKYIRSMLVEAAWVAMRHDPALLKYFKDRVIKQESKRVIIKVAHKLLNRVRQVWISNNPYQTGLI

SEQ ID NO: 60324 - protein, 373 aa, unidentified
MPKYSTAFGMDVHLRSTTACALDADTGEAVTRRFPGNPWGEIAGWMGGFPGPSLAAYESGYPGFAPQRELAGLGVECVVAAVSKIPRSAADSASKNDRNDAARMAKAILAHDISPVWVPSPEVEGIRDLAGAYDGATARLATAKQRLLAFLAKRGFAYGGTTPAGNPRKYWTYDFLRWLDKVRPEDDGGVRTLAALRNEVEAAAEARADLLSEYRAAVDASPIAAEVAALQSIKGCAFALAAAFSAEVGDFTRFRSGRQVTAYFGLAPSQRSSGDSVRLGGISGAGNALVRKLAVEGSWCYAAARHQPKLMPRDTGVPLEIRMHGRKGSERLLRRREEMLARGMPAAKANAATAAELVRWLWALGTMCREGAE

SEQ ID NO: 60325 - protein, 343 aa, unidentified
MMSMYYIGLDIHKKIIAFCTKTSNGDLVKSGTIPATRCALSEWIAGLPQPWIAAMEATLFTGWVYDFLKPHAIAVKVAHPEMLKAITAAKKKNDRKDAEKICDLLRVDLLPECYMAPLELRELRRMLRYRNHICRTAVKEKNKISGLLMEVGATYNKKKLHGKKYFSQLLDSVEYVPESVLSMLRLSRSNLEILTGIQKRLVGAIKDHGIIKDRVQRLLSIQGIGEITALTWVLEIGEPERFRSIAQAVSYCGLCAAQKESAGKQYRGPISKKRNKHLQTVLVEAAKLAPQWNPQLARIHQKELAKGNRNKATLAVARKLVAYMLAVDKNKRPFQSMTKDMAA

SEQ ID NO: 60326 - protein, 337 aa, unidentified
MELYCGLDLHARNTYIGILDTDFKRVFKKRVSNNLNLILETLEPFKDQFKGIVVESTFNWYWLVDGLMDAGYGCVHLANPSAIKQYEGLKHSDDQHDAFFVAQLLILGILPQGYIYPKQDRPVRDLARKRMFLVKHKTAHILSLQSLIARCCGQRISTNQIRNLKIADLRQLLREEYLFLSAQANLNTIAFLIQQIKALEKAIKKKVKLDKAFEQLMTVPGIGFILAMTIMLEVGDISRFAKVGNFASYCRCVSSQRLSDGKAKGSGNRKNGNRYLSWAFVEAAQLGRRYSQRFGRYYDRKAAQTNTIVATKALSNKLARICYYIMRDQVPFREELF

SEQ ID NO: 60327 - protein, 351 aa, unidentified
MYLIGVDYHPSFQTIAFFVEETGECGEQELSHSGGEAERFYRDLQQRGVNVRVGMEATGYSRWFERLLAKLGFELWIGDPAQIKAKRVKKQKTDRKDAQLLLRLMQEDNFPRIWVPSPENRDLRQLLWHRHRLVQMRTRIMNQLQALAMNEGKRMKKKLWSEQGRAVLEKLTLGPWASRRRQELLELLDGMNPKIEELTAAAEQEAKKRPDALRLMTHPGVGPLTALAYVLIIGTPERFPRGKQIGTYVGMIPCEDSSAGKQRLGHISKQGNSLLRFLLVEAAQAAARIHPDWRRRYIHLAMRRHKSIAKVAMGRRMAIQLYWMWRNGCEYSQSGKRGSYAGQLGTVHGGK

SEQ ID NO: 60328 - protein, 466 aa, unidentified
MENNYILYVGMDASKGKADAAILKVSDRRSVKPKFLRKKLSFKFVKSEVTSFLETVRSYSDDNCTSICFALEVTGIYSTNVYNFIKDNLNDNESIKFLNTDFVNQWRNAHNIAKSDPLDAQTISTIIGTDSDVQYVNDNVFENKNGYQDLKALVHRHYQIKKIYSQEINRLIAQCDCLFPELQYVFEPKSAAFIAVLSSYPTTHDIINASRLEVFNVVYEATKHRCSMDKIDKLFDLCHDTLVPDNISSYGRSIILDLVENIKNIKGQLKMIERYIRDVASLNPAYKLLLTITGCGPLTAATVIAETGDIKRFKNADCFVSYSGTSPRNKRSGTSVETMGKISKKGSRYLRHAIYMIAEFARRHNPVLKHQFERIKNGNKKRHKLANIAIANKIARYIYSIMKNESGFVIFHEHIMRLPEETQNTFFNSISLDFPKNTRKQIYQYSDINGEVHKFVYTKLEETMIV

SEQ ID NO: 60329 - protein, 386 aa, unidentified
MQKLNDLSRSLTALEPNGTLIAVIEMSLSSWLVAGIVPGVERQPLKKLAVDESALLKLLHRWREEAEKAGRRIERIAVAFEAGRDGFWLARWLKARGIEAYVIHASSVAVSREHRRAKTDRLDTELLKRSFLGWLRGERDHCKMVEIPTMKDEDAKRPNREHDSLIGERSRIVNRMKAALVRLGIRGFNPKLKRATTRLDGLLTPEGEPIPPNALAELRRDMERRRLVNNQIRQIEEERLERIEQAPCDGPHVMVRLLARVMGVGIETADMLVHEVLSRNMRDRRAVARYAGLTGSPDESGRKRREKGLARSGNARVRRGMIQLAWRFLLHQKNSALTKWFRSRTENARGTRKPMIVALARKLLIALWRLVREGVVPDGVVLRAAQ

SEQ ID NO: 60330 - protein, 379 aa, unidentified
MPDVSSIAPADVDRWIVFDVHKNSLVAGVLPAQGGKPEVARLENTERAVRRFVDRLGGPAGLAVAYEAGPCGFDLFRLLSRMGVACDVIAPSLVPVRAGDRVKTDRRDAKKLVRLYRAGELSFVKPPSPAQEGLRDLVRCREDLRRARTAARHRVSKQLLRHGHIYREGKKAWTKQHQAWLARQTLADPLAQRALSHMRAHLDAVDAQLAAIDHELEQVANAEPWCDPVRWLCSFRGVGPLTALGLLAEIGDFRRFSHPRELMSYLGLTPSEYSSGDQQHRGHITKCGNRHARRLLVEAAWHYQHAPRRSALHRRLQSEIPTEVSARAWQAQIRLNHRHRTLINHGKRSTIANVAVARELCGFLWAAMTHQPPREDLAA

SEQ ID NO: 60331 - protein, 338 aa, unidentified
MKLYGGIDLHSNNNVVALLDEENHVVYRKRLPNEVPVVLEALTPFKEAVTGLVVESTYNWYWLVDALMEAGYRVHLANTAAIVQYSGLKYSDDDSDAAWLAKLLRLKLLPEGYIYPKAERAVRDLLRRRSRLVQQHSANILAVQNLFSRNRGRSISANEIRRLTPEKAGELIRDKNLALAVQCTLLAMRGQQAAIELLEREVCQQVKGSPAYAHLLTVSGIGQVLGLTILLETGPIERFPRVGNYASYCRCVGSERLSNGKRKGTGNTKSGNKYLAWAYVEAANFAVRYNPKIKRYYQRKRDRTNGVVAIKAVAHKLARACYYILRDGTDFQVDRAFA

SEQ ID NO: 60332 - protein, 418 aa, unidentified
MGGIREVAKVACGLDVHRSEVVACLITSGTRKRPKVEIRRFRTVLAELLQLRTWLVEAGCEVVGMEATGPYWKPIYAALEGHVHLVVGNPLQMKGLKGRKTDQKDAEWIADLTRLGMIKPSFVPPPEFRALRDLTRERRNVIHARSLLRNQILKLLEGTGIKLASFISNVFGVTGMGLLRSLSEGQDVRAQLPLLVKGTLRRKLTDLNLALEQPLPEHLRELLAIQLMRHDDLDRVVSHIEAMIETRMEPYHAERKLLLQVYGLGITAVNIILAEIGVDMNVFPTPAHLAAWAGVCPGNRETGGKRISGTTRKGNTYLTTILVECALATVRAKGSYFRSKYHHLRARIGHKRALMAIAHKLIRLIHRLLSRKEPYKDLGEAFLDKREKTVKADKLTRRLQALGYRVTLEPLPDEGLTA

SEQ ID NO: 60333 - protein, 372 aa, unidentified
MPKYSTAFGMDVHLRSTTVCALDADTGEAVTRRFPGNPWGEIAGWMDGFPGPSLAAYESGYLGFAPQRELAGLGVECVVAVSKIPRSAADSASKNDRNDAARMAKAILAHDISPVWIPSPEVEGIRDLAGAYGGATARLATAKQRLLAFLAKRGFVYGGTTPAGNPRKYWTYDFLRWLDKVRPEDDGGVRTLAALRNEVEAAAEARADLLSEYRAAVDASPIAAEVAALQSIKGCAFALAAAFSAEVGDFTMFRSGRQVTAYFGLAPSQRSSGDSVRLGGISGAGNALVRKLAVEGSWCYAAARHQPKLMPRDTGVPLEIRMHGRKGSERLLRRREEMLARGVPAAKANAATAAELVRWLWALGMMCREGAE

SEQ ID NO: 60334 - protein, 348 aa, unidentified
MHFYTGQHRFYCGVDLHTRTLSLCVLDQAGGVALEATLPPEPDRFLEALAPFRDGLVVGCECLFAWYWLADLCAAEGIPFVLGHALYLKAIHGGKTKTDTIDARKLARLLRGGAFAEAYVYPKPMRATRDLLRRRTYLVRKRAELLAHLQMTFLQYNLTPPAQKLAYAANRAGLDLDVFPDPSTRSMLAADLAIVTALSQQIKRLEGELVRTAKAHDPQAFHRLRTVPGIGPVLALILLYEVHDIRRFEDEGRFLSYARLVGGVRESGGKKLGTGGRKIGNAHLKWAFSEATCLLLRELPKAKTWLARKERRIGKRRALGALAARLARTVYHLWRKREAFDVNRFLAS

SEQ ID NO: 60335 - protein, 405 aa, unidentified
MHQIEHYEQVAVFIGLDVGKSEHHAVALTRDGSKLYDKPLPNTERGITEVLDRLAKHGPALVVVDQPATIGALPVAVAQAHGVLVGYLPGLTMRRVADLHPGEAKTDARDAFIIAETARTMPATLRSIKVADEQIAELSMLCGFDDDLAAQITQTSNRIRGLLTQIHPTLERVLGPRLDHPAILHLLQKYPSPALLRRAGVKRVGNQLRKYAPRKWGAWAGEIFEALDEQSVTVVGTDAAALVLPRLARQLIELRQQRDDVAAEVEKIVEAHPLQPVLTSMPGVGVRTAARLLTEVVGKAFPTAGHLAAYAGLAPVTRRSGTSIRSESPSRRGNKVLKRAMFLSAFAALRDPESRAYYDRKIGQGKRHNQALIALARRRCDVLYAMLRTGSLYQPKTQTDTVLAA

SEQ ID NO: 60336 - protein, 339 aa, unidentified
MFMIGIDPHKGSHTAVVVDRSEAVLDTIRVTADRDQRDRLLAWAARFEPRTWAVEGASGMGAMLAQQLVAAGEHVVDVPPKLSSRVRLLERCKIDKTDPNDARSAAIVAWRTPALNVVAGLDEHRVVLRLLADRDHQITAHRTRTVCRLHALICVLIEGGTTRLLTATKAAELLGNVTITSPVIAQRLATCHQLIDEIHTLDRARDDVRERTAAAVIASGTTVTEGFGIGSLMAAVIVGRVGDVRRFPSSGHFARHNGTAPIEASSGPKARHRLNPRGDRQLNHAIHTAALTQIRNDTPGRAYYLRKQAEGKSRKEAMRALKRHISDAVYQRLIADTRS

SEQ ID NO: 60337 - protein, 318 aa, unidentified
MPPAAPTFVGIDVAKTELVIRIRPSGDRWTVVNDGAGVQALVKRLDRHAPALVVLEATGGYERAAMAALAAARLPLVVANPRQVRDFARATGQLAKTDRIDADILALFAERVRPEPRALPDEAANALDALLTRRRQVLGMLVAERNRLEHALPAVRRGITQHIRWLERQLQEVDRDLDDHIQASPVWRAKENLLRSAPGVGPVLSRTLIGELPELGTLPRKQIAALVGVAPLARDSGTLKGKRLVWGGRAPVRAALYMAALVGTRCNPVIRAFYLRLLAAGKPKKVALTACMRKLLTILNAMMRTNTTWRQTAQSETT

SEQ ID NO: 60338 - protein, 416 aa, unidentified
MKDLLEVCCGLDVHKEMIAACLLSGSLGTEPKEEVREFSTLLSGLEEMREWLKANNCRDIAMESTGVYWFPIYNVLEAGAEEDFKFNITVANPYHMKNVPGKKTDIKDSRWIAGLLRAGLLEPSYIPPREIRELRDWTRYRRTLVQEMTGHKNRIEKQLQACGFKLSTVLTDIFGKTGMALIRKLCEAGSIEPEEILNLLHGTARKKLDVIRQAVNGRMDGHDRAFLSMLVRNYEQSLKEIEDVEREIYACAQKYEPSIALLETIPGISGMTAITMISELGTDLSMFPTSGHLCSWAGVVPGDNESAGKKKSNRLKKGNPYVKCVICQCAWAATRARKNYLREWFYRLSKRRGMKKAVIALGHKLLVIVYNILTTGEAYDESRSAEAQKRVDESKKMKLIAQARKYGLVLTDARGT

SEQ ID NO: 60339 - protein, 373 aa, unidentified
MDYNTIYVGMDVHKESFTVCCFSIESEKVSHVVKIDPDYKKVLLYIEKMRTVFGRDTRFICGYEAGCLGYSLYHELTSRGAECIILAPSTMLEQRNGKRIKTDRRDAMLIARCLAYHQYSPVHVPTAEDDQVKEFIRMRSDHKIALKKIKQQILAFCLRHNLRYENSGSNWTQKHISWLYSLELEDLNRELLDEYLATYDYLDNKIKRLERRIEELACGERYQESVRKLTCFLGIQTHTALALISEVSDFSRFPDAQSFASYLGLVPGERSSSSNINRLGITKAGNSHLRRMLIESAQGFTRGRTGQKSKVIIARQKGNKANVIAYADKANERLRRRYYHLALGSNKNSNLAKVAVARELACYIWGMMTDHIA

SEQ ID NO: 60340 - protein, 358 aa, unidentified
MKSQVNKLNFTGQNFYVGVDIHKKKWKVSIEHEMMPVKTFVQDPEPDILSNHLKRNYPGATYHTAYEASYCGFWIHYRLKELGINSIVVNAADIPTTHKEKTQKEDKRDSKKIAKCLRNGNLTPIYVPPVKTIQDRGLIRMRYTLAKEKRRVKNRIQAFLLFHGIKCPEEFAPKSGHWSKKFISWLESLSFERESAAYSLSVLIGQLKAIKLALIEITKEIRKLARTPDYKRKVDILMSIPGIGLITAMLLITELDDINRFKSLDRLCSYIGLVPSTHSSGENDLTGEITPRRHNALRTAIIESSWIAIRHDPALLMKYNDLCKKMESEKAIIRIAKKLTNRIRFVMKNEKEYVTSTV

SEQ ID NO: 60341 - protein, 450 aa, unidentified
MINQPKQIEEIPDADHEQLIERVAAIDVAKEFGKVCVRVPDPARAGRRISRVWDTDATTNAVLALACRLVDLGVEKVTVESTSDYWRIWFYLLESRGLDVQLVNARDAKNVPGRPKTDKLDAVWLAKLTEKGLLRPSFVPPAPIRALRDYTRMRVDFIREATRHWQRLEKLLEDALIKISSVACKLDTLSTRDMIEALIRGERDPKTLADLARGRMRGKHAALIEALTGCFDDHHAVLARMLLDQIDALDRQVEALTTRIETAIAAIPAAGTGGPDDPDPSQHTSRDELTAIERLDEIPGISPLGAQIILAEVGLDMSRFPTANHLASWAKLTPRTIQSGTRHRAGKTGKGNPYLKGLLGEAAAAAAKTNTFLGERYRRIVKRRGKLKALVAVARSILVIVWHLLANPTKRFHELGADYHTSRINKGRKIRNLVRQLEALGQTVTLQPAA

SEQ ID NO: 60342 - protein, 429 aa, unidentified
MTRISAGVDVSKNRSTVCIMDQDGKFIMRPFLVWHSTEELDFLADTLKRLNGEVRVIMESTSIYQYPIALHLKEKGIFISIVNAYKVKKFANTDFIGGKTDKKDSRTIASYGISYWDKLMEWQIPKDTYFNLDLLNRTYMNAKKHRQIILQELQHYIDCAMPGMDKELHSLNLNTKKDFMLDFVEKFWHRDEIVNMTEAEFTEVFTAWAKKKGYRPVEGKAAKIYAIAKSCIPYYPANPTVKTILQCIVDKLSGVNRTLVTIVTQMIEEAKKLPEYQIVREMPGVGDPLAARFFGSAGDIRRFKNSKALVAYAGIDSPPDESGDFSSTHRHITKKGSKVFRDTGYEIMMALRAQKRTWEKVRKNPEVYDYMLKKEAEGKPRKVAKIAALNKFLRIIYARIKELYDNMALAERAKTKTRSKTRAKTKATD

SEQ ID NO: 60343 - protein, 410 aa, unidentified
MIFVGDDWAKAHHDVYVCDETGTKLAARRLPEGIEGMAKLHELVATHAADTGDVVVGIETDRGLWVNALVEAGYVVYAINPKAASRYRDRHTLSGAKSDPGDAKMLAELVRTDRHNHRQVAGDSALSEGIKILARGHQSLVWERTRATNRMRSSLREYFPAALDTFAELADRDTLAVLTAAATPSEATKLTPGKIRTLLRRAGRQRNIETRADTIAAGLRSDALRAPAAIEAAHGATTRSSVAILAALNTQIDALASELADHFEQHPDSDFYLSLPGVGVVLGARALGEFGDDPNRYADAKSRKNYAGTSPITRASGKRHVALARFVRNHRLADALDQRAFSSITSSPGARTFYDRRRAAGDSHHKALRALANRWVGILHGCLDHQTRYDEDTAWGHRIESDLRKIAQAA

SEQ ID NO: 60344 - protein, 469 aa, unidentified
MHRGRLGLGARTCWTDGPGYLQAPLIVAPSKEARKSVSDDTGILACLSQETSEVRDADHYENVAGLDVHKKTVVATTSVKQANSTWHEERRTFGTMTGELLSLSDWLLGQGVTHVAMESTGEYWKPIFNILEENFEVILVNAQHLSRVPGRKTDQSDADWICELMQYGLLKASFIPPKGQRELRELVRYRTSFVRERATLINRLQKVLEGANIKLASVVTDIIGASGRAMLEAIVGGSATNAEMAELARGSLRGKRDELAKALEGRVKAHHRFVLTELLCQIDSLEDSIARFDQEIEAMCRPFEEVIVLLDTIPGVARQTAEIIVGEIGVDMSRFPTADHLASWAGVAPGNNESGGKRRSSKTRKGNQHLRTALTQAANAAARTKGTYLQAQYHRLVGRRGRKRAIMAVAHSILIIAYHLIVRKEPYRELGGDYFDNIHPEKTAKRLIKRLEQLGFQISIVEALAPVVS

SEQ ID NO: 60345 - protein, 402 aa, unidentified
MFDTEDVGVFLGLDVGKTAHHGHGLTPAGKKVFDKQLPNSEPKLRAVFDKLTAKFGTVLVIVDQPASIGALPLTVARDAGCKVAYLPGLAMRRIADLYPGEAKTDAKDAAVIADAARTMPHTLRSLQLTDEITAELTVLVGFDQDLAAEATRTSNRIRGLLTQFHPSLERVLGPRLDHPAVTWLLERYGSPAALRKAGRRRLVEVIRPKAPRMAARLIDDIFDALDEQTVVVPGTGTLDTVIPSLARSLAAVHEQRRALESQIKALLEDHPLSKVLTSMPGVAVRTAAVLLVTVGDGTSFPTAAHLASYAGLAPATKSSGTSIHGEHAPRGGNRQLKRAMFLSAFAALHDPASRTYYDKCRARGKTHTQALLRLARHRISVLFAMLRDGTFYEPRIPEATAA

SEQ ID NO: 60346 - protein, 355 aa, unidentified
MDSTKYVGMDVHKDTMSIAVMNSAGKVVMESVLETKAVTILQFIQGLRGNLLVTLEEGTWAAWLYDLLKPHVTKVTVCNPRKNALLKSGNKSDRIDAQKLAERLRHGSLSAVYHGENGLRMLKELARSYLTVSKDLTRVMNRLKALFHSWGIACAGTQVYAPRHRLEWLSKITEEAVRGRAEFTYQQLDGLQALRQAVRRDFLAESRKHPAIKRLREIPGIGPIRAALWVALLQTPDRFRTKRQLWAYSGLAIETHGSGQYCYLEGQLRRVKKPVALRGLNRNHHHDVKWIFKSAAVKASSPTGPLHEFHEVLLAKGIKPSLARLTLARKIAAITLTVWKKGVRFDAEHLKPQAA

SEQ ID NO: 60347 - protein, 337 aa, unidentified
MMYGGIDLHSNNSVIAVVDDAGHIVAQKRLPNEISKIIGFLARWQDEMAGVVVESTYNWYWLVDGLQDAGFQVHLANTAAIKQYEGLKHGGDETDARHLAHLLRLGILPTGTILPREHRAVRDLARKRMQLVQSCTAHVLAVENIMTRQLGGRMTGNQIKRLTADAIDSLPLAADVSLAIKANVAVVATLQSQIELLEKRLQERVKPRPQYGLLISVPGIGQTLATVILLETGPIDRFADVGNFASYARCVDSVHTSNRKKKGEGNVKNGNKYLAWAFVEAANFARRFCPEAKRFHERKKARTNNIVATKALAHKLARASYHILKEGKPFNVARCFA

SEQ ID NO: 60348 - protein, 496 aa, unidentified
MLEESLDDQQIIERVAALDIGKAELVCCVRLPGPGGSRRRLQEVITYSTMTPSLQVMAERLLDLGVTRVVMEATSDYWKPPFYLLEAHGLETWLVNAKDVKHLPGRPKTDRLDAVWLCKVAERQMIRPSFVPPPPIRRLRDLTRYRAALVSDCTGEKNRVEKLLEDAQIKLSVVASDIFGVSGRDMMAALIAGQRDPKVLAQLARSRMRVKIPQLEEAFVGRFGEHHRFLLAKMLQRVDAISADIAEVDARIDAEIAPFADTVARLDQIPGVGVTAARVIIAEVGLDMSRFPTSSHLTSWAKFAPGVKRGQGVRRAQERPRVHWPRQPVLGQRAGRGRRRLSQDRHLPRRTLPAPGPAPRQQEGHGRGRPLHPGHRLAAALRPQRPLPRPWPRLLRQPPRRRPHQAQPHPPTRGTRVQSHPRTRGLNRHTAPTPAGHARSHPRPGHLHFRIRHHSGFPERERLRPACAGGLPHRRRGLHTGRRRWLACSGPPGKRL

SEQ ID NO: 60349 - protein, 338 aa, unidentified
MGRYIGVDLHRNCFTVCVRWGNGRSHLRTWKLDDLNKFVSTLASTDEVAVEATGNTRLFYDKVRSRVLRVVVVNPHQFKVISESVNKTDKNDARNLALFLSKGLLPEVRMKDKQHAGVASLVQTRDKLVKLRTSLKNKINNLVSARGVNLKKESLSSEKGLQEVLKFKFDVLVDLELRVLVDQIRGLNRSIEELEEAIKEAGQELPGHRNLKSIKGIGSLGATILLSVIGDVEDFADEGKLASYFGIVPRVANSNESFRSGRITKRGNKLARTTLVQCALIAKRYSHYLSNYYERIKARRSSGKAIIALARKFLSVIYYTLKNHWVWDDFPNGVLAQG

SEQ ID NO: 60350 - protein, 400 aa, unidentified
MRTVFGIDVSKASSEVAILVNGERVHGYTMPNDIIGFSHLLKDLKTVSNPEIIFEATGVYSRRLQAFLEENSYDYTRLNPLEAKKQLDGLRVRKTDKIDAEKLASSQFVLNRMPTYVQEKVYQNLHDLSRFYQNLTEDIVRTKNRLHKVLQVAFPEIENLLSTPTGEQYWNLVSIFPTNHWVLELSEVELKETIRQSTSKRISENRVGNLAEKLVGLAKQSYSAISKTSPMIEEVKYNAQELIRLTNRREQVLEQLIELAKPLPEYEILLSIPGIAETTATSIIGELGDIRRFQSSNQINAFIGIDLRHYESGNFLAKEHITKRGNPYARKILFKCIHNIASASHTNPCHIADFYEKRKRQSTIASTKPHTIASIHRLIRTMYYLITHNKLYDYSLTQNR

SEQ ID NO: 60351 - protein, 346 aa, unidentified
MIYVGIDLHRKRSQIAALDEQGTELLSRRVANDPEALKAILGELGGELQVALEATYGWEWLADLLEAEGHELHLSHPLRTKAIAAARVKTDAVDARTLAHLLRTDLLPEAYVAPRELRDLRDLLRHRVVLTRMRSALKNRVHALLARHGIQREHADLFGPGGRRFLAELPLREPTRRRLDSLLSLVGDFDREIQQARREIDGLARHDPRVAVLCQLRGIAPYTAMLVIAEVGEIERFRTARHLCAWAGLTPTVRSSDGRARLGHISQQGSPHIRWALVEAAQKAATGGGPLRAAFERIAKRRGRNIAKVAVARRMLTLCYYGLRDGEIRCLQAPGPASARPVKAAP

SEQ ID NO: 60352 - protein, 314 aa, unidentified
MENIALIGIDLGKNSFHIHCQDRRGKAVYRKKFTRPKLIEFLATCPATTIAMEACGGSHFMARKLEELGHSPKLISPQFVRPFVKSNKNDFVDAEAICEAASRPSMRFVQPRTESQQAMRALHRVRESLVQDKVKTTNQMHAFLLEFGISVPRGAAVISRLSTILEDNSLPLYLSQLLLKLQQHYHYLVEQIKDLESQLKRKLDEDEVGQRLLSIPCVGTLTASTISTEIGDGKQYASSRDFAAATGLVPRQYSTGGRTTLLGISKRGNKKIRTLLVQCARVFIQKLEHQSGKLADWVRDLLCRKSGTVANSRW

SEQ ID NO: 60353 - protein, 343 aa, unidentified
MENLFIGIDYSKKSFDVSAYISSEKSKEEKMKLHLLGHQNFSNDETGYIQMLSWLGTLTSLSPKHWLFCGEDSGLYSYSMSHYLYIKGFSIWLENPLHMKRSMGLVRGKSDKKDSGLIALYSYRFRDRRVDFVPKQDTIQRLQDLEAYRQRLIKAKKLLGDSSKELNLYEQTRDTAVLVYEKSMELVEQIESQLKEVEVQIQQVLKSDKEVYDNYERITSVKGISWKTAVVLLIYSHNFTRFETARQFACYAGVAPFEYSSGTSVKGGTHTSRLANMRVKSLLGMAAMSAKRFNKDIAEYYNSKKEKGKSHRVIMNNISNKLIHICFALVRHQTMYQYTYKLV

SEQ ID NO: 60354 - protein, 348 aa, unidentified
MMVTFGTDAHKRSHTIVATDEAGAELGSVTVSATPEGHLRALKWAAQWGERRWAIEDCRHLSRRLEADLLAAGETVVRVPPKMMAGAGRAARTRGKSDPIDGLAVARAALREPDLPAARLDGPAREVKLLVDYRERLVRERTAAQSSLRWRLHELDPTFDPPAGSLDRYKTLDQVEAFLAGHTGITAELARRETARIRDLTQEANQLEGDIKTRVADIAPSLLELVGCGALTAAKLVGEAADITRFTNRDAYAAWNGSAPIPVWSANKHRFRLSRGGNRQTNAALHRIAVTQIRVHPDAKAFMERRLAAGNTKKEAPRALKRRLSDVVYRTMIQDTINPAQAAPAKAA

SEQ ID NO: 60355 - protein, 339 aa, unidentified
MELCCGMDLHSTNTVVGIIDEKRKHLIDRKLPNDPELIRNFLKPYKTDLKGIVVESTYNWYWLADLLQEEGYRVHLSHPVANEQYNGLKHSNDKHEAFWLAELLNLGILKEGYIYPRQARSLRDVLRKRAHLVRVRTALLVSLQHMISRNYAVKVKTGDIKRLKEDVVSPVLKNEEALLLAGTSSKEVIDCLTRQIDKIERWALKRLCREGVLTQLITLPGVGDILGMTILLETGPISRFREVGNYASYCRKVSSRWTSNDKVKGRGNIRNGNRYLAWAFSEAAEHARQTNEACRRFYDRKLRQTNTKVAHNALAHKLARAAYYIMKDHVSYQEEKMFS

SEQ ID NO: 60356 - protein, 361 aa, unidentified
MKLSAALDTSATTTALCIVNSRDGSIVLETTVPTDPESIFLVLEPYLPRLQRVGHEATSWSAWLHRELERRGVPMVLLETHHTARMLEAQRNKTDKNDARGLAQLVRSGWFKPVHAKSDASNRLKLLLAHRRTLKRKLMDIENEVRQSLKMFGLMVGRRVQRASFEARVSALVADDPLLAGTTACMMRCWAVLWIEYKRLHTLLVQMVGRDELCRRLCRIPGVGPVTALTFKAAIDDPARFPKSKTVGAHFGLTPRREQSGTSVDRDGHISKAGDGQVRTALYEAASAMMTRSQKQCTLKAWGLRVAAKRGHRRAVVAVARKLAVIMHRMWLDGTEFRFSTNAEAVPATQRDGTLAALAAA

SEQ ID NO: 60357 - protein, 459 aa, unidentified
MNNHEELIGIFKSVGHEKTIFIGFDIGKYYHVCQICNGYKEPLMSAFKFNSTESGYKEFKLAFDDILKINMPDYMIFGCEPSGTYYLNLMNQLSIDYPNADFRLVNPLATSAQRKMEMEHNKSDPIDVNAILELMLQGLSYPLPIQDQVYDEIKEYVRYYDKLSSQLVGLRNRILLCIDELYPGFRIPNSTYFNSQAGKQFLRVLPDPRLLKDMNLVDVLKYFEEAGEHLSAQMAMRFSIAAKDILIPDKPVIKAKINTLKGVIKQYELTEELKIQTKLEIEQIASQFTFSKEILKLVGLGPLTLGRIIAYLNNPYRFSNGDQVAKYAGLVPRHSSSGVYSGRESLTHMGHPQLRSVTVQLTQHLISSTGYFTAFYNHLVIDKGKDINLAIVATAHKVLRVIYHMMIFNDKFNPPSARNSELSSSKIERVTKQKLKQRNRKGTVIPLTQINSEEYHTRV

SEQ ID NO: 60358 - protein, 331 aa, unidentified
MKNLSIIGIDVSKLVLDVFILSSKYHFQVENSPAGFSQLLEISCTRLKVSGNHLYFCFENTGRYSRMLAVFLEQSGIIFSQIPALDIKASKGISRGKTDKADAKDIALYAWRKKDELQPTKLNSSETSELRQLISLRDKLIKHRTAYKNSIKDLQDCYFEGETKFIRDIHKKTIEHLNDQIEQVEVRMDTIINSMSDWKKNFILVQSVRGVGPVIARYLIIYTENFTRFPNHRKFACYAGIAPFEYASGSSVKGRTRVHSCANKQLKSLLNMAAMNAIQIPGEYKQYYQRRQKEGKNNMSTLNIIRNKLLARIFAVVKRQTPYVNLYQFAA

SEQ ID NO: 60359 - protein, 436 aa, unidentified
MEEVTDEPLYRDRVCGIDIGKAGMAVTIRVPSETNPARRAAETREFATTKRGVLALADWLRCWQVPAVVMEATSDYWKPVFYRLEAEGFECVLADAKQVRHLPGRPKRDTSDSAWLAACFERGAIRSCFVATPEFRIIRLHTRYRRDLTDERTREKNRTEKLLESAAIKLSSVVTDLHGVTGRDIMDHLIAGERNPKVLAQLARARARRKITELEHALDGAEFFTDDHAALLTTMLERIDRVNAEIARLSEVIERLLAPYEEQLQQAESMPGWGRRSAQDAVAETGVDMTKFPTGGHLSSWAGKTPLDHQSGKRAGRARHKKGNKYLAAVTGETAVSAGKTATREGARYRKLARRRGKAKAQVALGNTQLKVYHKLLSSPGMRYQDLGPDYYERQAAIRRKIAHHVREIEALGLDVTLTRPAPEPGPDAPGNTQAA

SEQ ID NO: 60360 - protein, 316 aa, unidentified
MTSIIYVGMDVHTTNYTLCCYSMEDDRFFAEAQVEPDAKNILKYLARIEKQQSRDCRIVCGYEAGCLGYSLYHQLHAHGIDCVILAPTTMMTKPGKRIKTDRRDARLISKCLAFHTYSPVYIPTEVDDAVKEYIRMRDDANSALARVKQQIIAFCIRHGKIHDGKSYWTNKHLEWLSSLDLGNKILSEVLQEYLIRYYQLREQVDMYDMRINELAQAEPYRQKVEKLGCFRGIAAHTALSFCVEVGDFRRFATAQQFASYLGLVPGECSSGDKQQYTGITKAGNSHLRKLLVETAQVFQKAENQQRSRNDRQSAIH

SEQ ID NO: 60361 - protein, 338 aa, unidentified
MNIVFLGIDLAKNVFQLCGLNQAGKPVYTKRTGRKELLQTLANIPACLIGIEASTGAFYWQREFEKLGHKVKVISPQYVKPFVRGQKNDGNDAQAIAVALMQPTMQFVPPKSPEQQDIQALHRARQRIVNHRTATVCQIRGLLLDRGIPIGSAVSRARRAIPLILEDAENGLSSRMRRTIAELYDLFNDPGRRIHFFDKEIETVFRQSEACQRIAKVKGIGPKTATAVVAAIGKGTEFKNGRHFAAWLGLVPRQHSSGDRQVLMNMTKKGDKHLRTLFIHGARAVVRVATNNNDGHMNQWVNQLKERRGFNKTTVAVANKNARIIWSMLRNETGYQVV

SEQ ID NO: 60362 - protein, 370 aa, unidentified
MRQSSTLYIGLDVHKDSIAVAYVAQEHGAEVIYLGAIGTRQCDIDQLIRKMQSKAPHLIFVYEAGPCGYWLYRYLTKKGYDCWVVAPSLVPKKAGDRVKTDRRDAMQLARLVRSGDLTVVYVPKVEDEAIRDLTRAREDTLSDLKDAKFRLKAFLLRHDIRYTGRANWSPAHLRWLSEVVCPTPAQQIVFQEYVRAVNEHTDRLQRLEQELQDHVQSWRLNPVVETLQALRGVQFTVAVTTVAELGDLTRFDNPRQLMKFLGLIPSEYSSGERRRQGTITKAGNTHARRALVEGAWAYRYPAKVSRHLQLRLETQPKVIQDISWKAQVRLCQRDRRLVAKGKHANVVTVAIARELVGFMWAIAKEVPVTP

SEQ ID NO: 60363 - protein, 372 aa, unidentified
MQQNSKIYVGLDTSKLKISVAVAEEGRDGEVRFIGDIDSAPDAVERLVTKLAKRHRQLAFCYEAGPTGYGLHRQITQLGHECIVVAPSLIPKRSGERVKTNRRDALTLAKMHRAGELTAVWVPDPGHEAVRELVRAREAAMEDLRRTRQHLQSFLLRHGRIFTGRSAWTNAHTRWLCEQSFDHRAQYLVLAEYRQAIENAETRLKHLTGQVVEVVASWSMAPVVAAYQALRGVAFLTAVTFVAEIGDVRRFNNPRQLMAYLGLVPSEKSTGERVWRGKITKAGNSRARRVLIEGAWTYRFPARMSRLLQERQAGLTKVVRDIAWKAQLRLCSRYRKLMARGKRQTVVTVAIAREMSAFLWAIGQEVEPHPVA

SEQ ID NO: 60364 - protein, 339 aa, unidentified
MTVKTIGLDLAKDVFQVHGISENGRVIFNKAIKRAKLLAFFEALPPCRVGMEACGSAHYWGRTLRQLGHDVRLMPANYVKPYVKRGKTDAADAEAICEAVRRPTMRFVKIKTEDQQALLSIHRTRDLAVRQRTQMANVIRSLLREFGHILPIGVEAVTAFGKRHLDGDHPDMPDIANGMLGIQCYQFIGLNERIAGYSKMIEQHALSSADARRLMRMPGVGPITASAIVATIGDAQQFRTGRDFAAWLGLTPLNKSSGGKERLGKITKKGDRYIRKLLVVGMTSRAVMAKRSPEKVDLWTAKIIADKPFRLATTAMANKSARIIWAMLTKKQEYRQPAF

SEQ ID NO: 60365 - protein, 420 aa, unidentified
MEVLYGRCAGLDVHKDTVVACVRLAEAGGEARREVRSFKTTTSGLLELSDWMTGHGCTHVAMEATGVYWKPVWHVLEGSFELVLANAAHIRNVPGRKTDINDATWIADLLAHGLIRGSFVPPAAIQQVRDLTRTRKQLVREVAQHTQRIQKTLEDANIKLTGTISDVLGLTGRAILDAVVAGEADPERLADLAHHRIKAPREKLVEALRGRVTDHHRFLLKLHLGQVDALRAAIAEVDAQLGKALGEAMAMAELLTTMPGVGELVAQVIIGEIGTDMGRFPSAAHLVSWAGLCPRSDESAGKRRNTRIRHGAPWLKTTLVQAAWAAVAGKKNSYHRAQFQRLKARRGPKKAIIAVAASMLKAAYHMLRDGTAFQDLGADHFDRKDRAKTAQRLTRRLEQLGFVVDLRPAAQAVALSTVSS

SEQ ID NO: 60366 - protein, 461 aa, unidentified
MKKEKCYLGIDVSKGYSDFTLLDEEKNPLEKVFRLDDTRKGHDALKKIIQDKIKEHQMECLYCGLESTGGFENNWFNSLTGWSKTMPVKVARLNPSGVKNNIAAGLNRNVTDALSSRYIAEYLIDHESKVSYDVEDNEYSEFRSLYAYIQLENKQKTQLINELKMLLYSGFPEMVRYCKKGVPVWVLEVLKRYPTAEKAARLKSSQLITIKNVTAEKAAAIISKAKETVSSRHSSTQGFLIQNLAEQIMDKQKIIEKAKKFLAENCKGPEVDLVTSLIGVGEYSGSCIMIEIENIYRFASPKKIASYFGIHPELKESGDKIKKYRMSKKGRSSMRSVLYMCAMSAVLHDPHFKQIYHNHRSKGKSHNQAIVVIMHKLLRLIWGILTNKKPYEAATDKANQNKKVTAIKDENKRKENKVKRRYQEADLEAPISNRQTKIRKVQSDSQVDIVEQMRDVPIARL

SEQ ID NO: 60367 - protein, 373 aa, unidentified
MNHHSGAYVGIDTSKLRNAVAVAEEGRGGEVRYLGEIDTTEAATRKLVTKLAAKYRQLTFCYEAGPTGYGLYRLIRKLGHDCIVAAPSLIPKKPGDRVKTNRRDAVGLAKVLRAGELTAVWVPDERHEAMRDLSRAREAARKDLKGKRQQVSSFMLRLGRHFPGKKTWGPAHMNWLMLQKLEHREQRIALEELLGAVRQESERVERLEQAIRDAVPEWSLAEVVTALQAMRGIDLVSAVTVLAEIGDLSRFQNPRELMGYLGLVPSESSTGDTVNRGGITKAGNGRARRILVESAWSYRYPPRVSREKQIKVAAAPRAVREIAWKAQMRLCGRFRSLTRKGKRPTIVATAIARELAAFIWAINREVMAHATAS

SEQ ID NO: 60368 - protein, 387 aa, unidentified
MPQPNDLSRSLVALDQNSTIIAVVELSQSSWLVGGMLPGIERQPCKKLEPSPERLLAVLHRWRDEAVKADRIITRIALAFEAGRDGFWLARWLAARGVEAHVIHPSSVAVSREHRRAKTDRLDTELLKRGFLGWLRGERGHCSMVRVPTLAEEDAKRPNRERECLVKERTRLVNRIKGTLARLGIRNFKPTLRQATERLATVHTPEGTPVPPNALAEMQRYLARLRFVVGQIKQIEEARRQRLEEEPECGRHATVRLLARVVGIGIETADMLVNEVLSRPMRDRRAVARYAGLTGAPDESGAKRREQGLAKAGNARVRRGMIQLAWRFLRFQKNSALAQWYQARTADRRGATRKTMIVALARKLLIALWRFGTIGEPMDGVTLRPAR

SEQ ID NO: 60369 - protein, 430 aa, unidentified
MLNEKYLSVGIDVGSDFSFMSIVDFNENLILKPFKIIHNDLDSLGRALAAIKNAEESNSMKSRTFMESTGIYHFPLFCYLIESGFEAFVINPLVTHSIKNIGIRKVKNDKLDSIGIAKLGLNPGLQVSVMPTKLVLELRSLTRNYYRLVDIRSAYVNQLKAHLHTVFPQYLDIFYNVTGSTSMMILENYPTPDKLLRAHKDCLIQKIAKTSRKGLVKATEKYDKLMLAAKAAKVFGCDLDSVYFNISTTLTLIKGMDEAIASTMDKVRHLVKEHSSEKFVKQIHWLNSITGIGFLSAVTIMCEIGDFSVFKSPKQLFAYFGMDPEVKQSGKFNATKVHMSKRGSRIARRAIFAAALACIRTKRNGEAINPYLHDYYQQKATTKPKMVALGAVMHKISNYIFAVLRNETEFCLRSPQEHCQTYRTIELLAA

SEQ ID NO: 60370 - protein, 356 aa, unidentified
MISSTKYIGMDVHKESISIAVRNAAGKISMECVIETKANTILQFFDGLRGEVQVTFEEGTWAAWLYDLLKPHVAKLVVCDPRRNALLQDGNQNDRVDARKLSDLLYMNKLNVVYHGDHGLRTLKELGRSYLTMTRDQSRVMSRIKAIFRSWAIPCSGKQVYGLRHRAEWLGKIAEPGVHRRAELYYQQLDALRTLRQAVRKDLLAESKKHKIWKRLCEIPSIGPIRAAELLGILQTPHRFRTKRQLWTYCGLAVESSSSADHQVENGQLRRRKKRKETRGLNENCNHDLKDLFKGAAVVASLKPGPFAEFYAALLAKGMRPEMARLTLARKIATIVLIVWKRGVCFDAQHLKPQTA

SEQ ID NO: 60371 - protein, 347 aa, unidentified
MRFYTNQHRYYCGVDLHARSMYVCVLGRNGEPVVHRKLECDPDAFLRLIKPFRKDVVVAVECLFCWYWVADLCADQGIPFVLGHALYMKAIHGGKTKNDKIDSYKIAFLLRGGNLPQAYVYPRDMRATRDLLRRRLFFVRKRGELLAHIQNTNTQYHLDPFEKRIDQARNRDGLLEHFEDEDVQMSMAANMALIDSYDETIAELELFLEQRVKVHDAATFYLLRSIPGIGKILSLTIIYEIHEISRFPSVGQFLSYGRLVAGSRESDGKRKGSGGRKMGNAHLKWAFSEAAALYLRGNPLGQKYFTRLEKKHGKGKALSLLAIKLGRAVYFMLCRHVPFDPKRFVRT

SEQ ID NO: 60372 - protein, 344 aa, unidentified
MIIIGCDFHPSWQMISWLDTETGETGERKLMHASGEVRLFYEGLTGSVRVGLESTGNSHWFVDLLTELGHEVWIGDAARIRASQVRKQKTDRRDAEHILHLLVKDSFPRIWTPSRQERDQRQLLIHRYKLVTLRARVKNELQHLALNQGMQKGRSLWSKTGQKQLLDLPLQFWAGTRRKNLLELLKQMDQQMGVLDQAVKKAAEENEKARLLMTQPGVGPITSLAYVLTLGDVTRFRRGKQVASYLGLIPREYSSAGKQHLGGISKQGNRFMRMLLVEAAQIAVRFDPGLRNEYLHRCHHKPKGVAKVAAARKLAVRLFWMLRTNKPYPEVVRIESSSRVPLAG

SEQ ID NO: 60373 - protein, 436 aa, unidentified
MRGCRCSMIMGFTKPIEHFNLQRKKVITMNTLYVGIDVSSKSNVVYLMLPNGDKHSNFSIANSHEGSTQLVKRIFSALTAHSLDTVLIGLEATSVYGDNLVYFLREDATLAPFNRKIHVLNPKQVKKFHDAYNDLPKNDYVDSFVIADCLRFGRINKEVYMGDYRYKALQNLTRARFFAVQNLVKEKQRFMNVLFKKYSTMTQEKVFSDTFSTTALAVYDEFESAEALANMDLHELTDFIIEKGKNRFPDPDAVAKAIQKAARSSYRLPKTVNDSVNQVLSISITSMKALESQIKEFDKAIKAQMELLPNVLISIPGIGPVYSAGIMAEIGDINRFNNQAALAKYAGLAWKQHQSGGFESEVTRLIPSGNRFLKYYLCEAAFSLVRCDKEYSDFYHLKYKEVNRCQHKRALALTARKFVRLVFRLLKDNRLYCPAK

SEQ ID NO: 60374 - protein, 578 aa, unidentified
MLPQSASTPQLVDANFTPIGVGIDTSRYGHYAAFLRHDLQQAVGELQFVESAAGYAQFRARLQQIVARHDNVHFFVRLDAAGQYADNLLHFLHALASSFHVTISCGDPQRNKNYRAALFGGKKSDPVEARAAARYAVSERPASVKVLPAELRTLRQVAGRLQAVVRQRTRLINQLHHLLALTFPELALLVKDIALGWVLELCSRYPTAKLLAAASAADIATIPYLPDKQIDTLHQYARASIASLSDDTVAELVRDQVRQLRDVRARQLRLEKTLVDAYRQLPDPNHLDSIPGFGEVTAAILTAFILDIDRFETPNQLVAYFGAMPIEVGSGVDRDGKARPARRYVMCRRGNDLVRRYLWMAALSAVRFNPAVRALYARVVAKHPDKKAIAIGHAMRKLLHLAFAIWKTKKPFDKNYYPSDTPTHVETEVAAPTQEQAAGLKLTAEPARKEVTATCDEILAHGAPVDESTFIDFAHLKRQLPIARVFDHLGLSTRLRGPASQKRCACPIHRADGRGRTFSVNLHDNVFHCFDATCQKKGDVIDLWAALHHLDLRQAALDLVRTFNLEPAPIQRTEKRNG

SEQ ID NO: 60375 - protein, 354 aa, unidentified
MTVYCGVDFHARQQTVCYCDTADGEVKFSELKHNREEIIAFYGSMTGEVIVAIEATGYSRWFEELISGLGHQLLFGNPTLIRRRAPRKQKNDRRDAELILTLLIKGELPIVQPHPAESGEVLRQLRYRHKLVKVRTLAKNSLHNISISAGCSLQKSMLYKGRAKLEALKLPEDLGRQRRQWLETIERQDKLVDEIESWLEKKASGDRLVKFLQTHPGIGLISSMVIRHTLEPVTRFSTTRKVVAYVGLDPVEDSSGERKRFGSISKAGSRLLRFVLGQAGLVACRRDESLGRFYKRIAARRNHQTAKVAVARKLLVRAFIMMRDEIDYAEFIRRGVEARSARLTRRPAVQSSHQ

SEQ ID NO: 60376 - protein, 457 aa, unidentified
MEGDAVKKAKKIAKLPIINPNAAGIDIGATQIFVAVPPDRDAESVRCFATFTADLEKLADWLAACKIQTAAMESTGVYWIPLFQILEKRKIEPVLVNAQPLKNVPGRKKTDVEDCQWIQHLHAVGLLRGSFRPADEICTIRSLWRHRENLIQLASIHVQHMQKALDQMNIQLHHVISDLTGTTGLAIVDAILSGERDPAKLAQLRNPHIRASQQTVRESLVGDYREEHLFVLRQSLESYRHFQRLIHEVDLEVKQMVKELPSKVGVQDPPLPKAKNPRKTPWRNEPPELREDLYQAFGVDLTQVPGLNTLTTQILLTEIGPDFSRFPTSGDFCSWLRICPDPKITGGKVISSKTRPSKNRAALALRMAAQGLHRSQSFLGNYFRRMKARLGTPKAITAAAHKLARIVYHMVTSRQEFDATIFEALERRSRDHKHLRLCAQARELGFDLVKINPEAAN

SEQ ID NO: 60377 - protein, 419 aa, unidentified
MFKIILNNCCGLDVHKTWIYACVGITDSHNQTHYHEARFTAFSKGLRDLCGWLAKLGCTQVCMESAGKYWIPVFNILEKTCRVTLAHPKYTKPMKGNKTDRKDARWICDLFMCGMVKPSFIPPPVIRQLRDLVRYRMKLTNMITGEKNRAQNCLTVSNLKLDDVFSDVFGKSARSITEYILAHPGETFDVAPFVDRRCKTPISEIQAAVDGAVSHEQAVKLRQCLDHIDELELHRSHIESEIRRIVSPFTTDLDLIHTVPGFVKNPLTAITVVSEIGADMSVFPSSKNLVSWAGCCPRNDKSNKTVKSTRISKAGSYLKPVLVQVANAVIKSKDHPEFGIRYRRIKAHRGHKKAIIAICRMLLTAIWNVLSKREPYSPDGYAVPQPSFVAKPLTKSQGLALLRQMGFVIMNDNPPLVPA

SEQ ID NO: 60378 - protein, 378 aa, unidentified
MHFTRYVGMDIHKKTMTWVALDVEKKLVGEGKMPMSALGAWAQKYLVKTDRVVIEATGNSHYVHKVLSEYAGEVLMADPLGMHDRTRGRRKTDRVDAHALAEALASDYVKAVWVPDDATWRKREYASHRRALAEQLTSTKNQLRAVLFRNGLEYIGRDITDAKSLQYALDSRMPEMTKGLYQSLWRVSQALLKEIHRVDCEISAQGLKDEECLRLMTMPGVGAHAALIIQSAIGDINRFETPQKLASYSGLVPRVSKSDESVYYGSITKQGRSLLRWIMVEAAHAGIMTPGPLKERYERFKRKGKKHQEAIVAVARHMLELVWHLMKKKTVFRHARAVYLQTKLRGVLRKAYGRAPKNAAATMAKTLMGWKDSPATAT

SEQ ID NO: 60379 - protein, 387 aa, unidentified
MSGRNTAALSVTDAERRRLFGPVDFAMTAPAVTAVVEQVCAVLPGVAVKVGIEAAGHYHRPLLAAGVWPAGWEVLELSPARVAEQRRVQGRRRVKTDVIDLEAITELVLAGHGVPVTVRAATLTELTGWAMHRSRRVQTRTATKNQLLAQLDRCFPGLTLALPDVLGTQVGRLVAVEFADTHRLAALGVTRFVRFAANRGVRVRHSAAERLVAAARNALPTPEAVVARQVLADDLVLLADLDAQIAAAEAQIARLLPDTPFAPLTTVPGWGVVRASNYGAAVGDPQRWPRARQLYRASGLSPAQYESAGKRRDGTISREGSVALRRALIDLGLGLWHADPAARRYGQQLRARGKKGGVIGCAMAHRANKIAYALVRDQTGYDPSRWA

SEQ ID NO: 60380 - protein, 353 aa, unidentified
MDKYIGFDIDSKKVSVCVFESGKKEVYATIGPDIGSMKKFLLSQKSAGYQLHLAYEVSGCSGYIHDQLCEYVDRIAVANPTKTTWIYRTAKKTDRIDARKLAVLLYMGELPTVHVPDKEVRQWRQMILHRRNIVKDVCRVKNMIRAVLKSAGYFKAGLSGGWWKKANILWMHQVSTGCELWQMQLGNLLSQYEFLKTQLNRVTDYLDNYLKTKPGAVLFMSIPGIGPRTAEAVLAYTDGVERFRDSKRYCSYFGVVPKLDQSGDNRRVGHITKHGPSVVRWLLCEAAWKSVQKSPSLKQFYERVMNGDAKRKKIAIVAVSRKLLSIMRAMLSTGELFNEKLVLENHEEINKAA

SEQ ID NO: 60381 - protein, 414 aa, unidentified
MGSGCEFCIGGMNVNCVGVDVSKGKSMIAVMRPLGELVIPPFEVGHTGIELCELSSRLRELGGETRVVMEATGNYHLPVASFLHDSGFYVSVVNAMLVHGYGNNSLRRAKTDKKDAIKLANYGLDHWLALPRYIPEDEVRLMLKTTYRQYQQCAKVQTMLKNNLIALLDTAFPDANRLFASPARADGSEKWVDFVAAFWHCECVCGLSEKAFAAKYQKWCKKHGYNFSQDKALDIYASACGHFSVMPKTDTAKLLVEQAVSQLRAASAALATLRNEMQSLAASLPEYPVVMGMFGVGPALGPQLMAEIGDVRRFHSKKALVAFAGIDAPPYQSGQMEVRSRSISKRGSSALRRTLFLVMSVILQHSPSDNPVYQFMDRKRTEGKPYRVYMMASANKFLRIYYATVKRHLDSLEA

SEQ ID NO: 60382 - protein, 498 aa, unidentified
MVPPCPSFRLAPARQTIIGEAERLSPRQDLHTLSAGPCAPANKEEHMPKTTPVFNEIRRNVAGIDIAGHADHYVCGPRREDGGPDVAHFGTTTSELRLMLAWLKERGVESAAMESTSVYWIPVADLLEAEGVEVVLVDAREVKMVPGRKSDVKDCQWLQRLHSCGLLRGGFRPPENIAAVRTLLREKESLVAMRAQCIQQMQKSCDQMNIRIHHAVSDIDGKTGMDIIGAIAGGQRDPSELAKLRDRRCKKSEAEIAAHLTGVWREEHLFTLGQAYRTLEFIDGRIAEYDGKISSMYKAIAEGCGRPPPPPRPADMKPSEKDRRDAEGKSVLRQIVGFDMTAIPGIGYDTAAVVVSELGADFSRFPTERHFAAYIGLAPALGKSAGKDIRQKKRCRNTSRAGRALRMAASSLYRSQTEIGAFFRSVARRSDRRTAVKATARRMAHMIYRGVRHGAAYLDKGAEAFEKRLRERSLKTVKTLIKLHGINQLELQTAFAAS

SEQ ID NO: 60383 - protein, 446 aa, unidentified
MAKRKVKDGMAESNSAVVFEDDEVFYERCAGIDVHSGLFTVCLRIGRKSDVREFGTTTGEIRRITAWLKESGCQMTAMESTGSYWKPLYNIFEQEGIPAMVCNAYHIKNVPGRKTDIADARWIARCLREGLLNPSFIPDREQRELRDMTRFLKAQTEERARNVNRLQKFLEGANIKLSEHVSDIEGMSATELLELVIGKPDFTLDDVRTRMHKNMKSAPEQLFAALEGYITPTQRKFFQHVMHIIREQTKQLEETRALIDSILSENYKSAIVALDKVTGIGPASALTIIAETGTDMGHFRNQHAFSKWAGVAPGNNESAGKAKKAKTTPGNKTLKSALTQSAKAAVKNKSSFFSAQYHRLVSHRGKNRATMAVAHSIAIAIYFVLSGQEFKDLGSDYYNQFNREKKINSHIRQLSKLGVVLPDEILWGIPERPPDSPGAILGSAFA

SEQ ID NO: 60384 - protein, 321 aa, unidentified
MTYVGIDVSKATFVVAYSSVKTSRTRTFKNTVKGVHEFIQTISPATHHCVLEATGNYSALLVYLLSEAGITVSLESPLKIKNFARVMLTVIKTDEIDARLIALYGEKMQPAPYKLRSDAILVLKQKRTVLRQLKKQLVATRNLKGSMEVLPFFDPKCKKTIEKTIVFLEKQIKEMEEELASLAQGEYKKQMDLLTSIKGIGVTLAAALIVATGGFTYFDNAKQLTRYLGLSPTYQQSGTSVNVKGHINRNGDSALRSQLYVAAFSSLRCNTECKACFDRLRSNGKPGKVAVIAVANKLVRQAFAVVTQGKPYVDGFKSAKP

SEQ ID NO: 60385 - protein, 369 aa, unidentified
MNHATSIGLDVHARSIAAAALDPLTREVVTKTFAYSPGEVASWALGFDSPKAVYESGVTGFHLCRELNALGLECAVGASSKMQRPPADVKRKNDLSDAQFLARLLATHNVTEVFVPDAETEAARDLVRAHADARADLTRARQRLNLFLMRHGHVFCEKGPTGAPVGSWTKAHWAWIRQISFPDEADEEALAFYIAQVRHMEGQKRELEKFIRAHAREPRWRGRVDALRCLKGIEEITAFALVAEAGVFSRFDSARAFSTWAGLVPSEHSSGPRRRTGGITKTGNSNVRRLLVEASWHYARATAARKPAPSPDVPLRIENHAAKAVKRLVARRREMSARGKRPSVANCATARELACWCWAIGRMAEGADA

SEQ ID NO: 60386 - protein, 338 aa, unidentified
MGYFVGIDLHGDNNYIGILDEEDRKVFKRRNRNDINEIKRVLEPYKKEIKGIVVESTFNWYWIVDGLMEAGYQVHLANTSAMQQYEGLKYIDDTRDSFWLAKMLRLKILPEGYIYPKETRSVRDLLRKRMMLVQQRTVHILSMQTMVNRNKGVPISGDTIKKLSNEEVMGMFSDVHLTMSAQCDHEVIEVLNKQIYKIEKAVLKEVKLKKPYKKLLKVPGIGEILAMTIMLETGNIERFSDVGMYSSYCRCVSAKKLSNGKSKGKGNRKNGNKYLAWAYVEAAHFHVRFCEKGRKWHQRKASKSHVVLATKALSNKLARACYYIIKEQVNYDEKKMFG

SEQ ID NO: 60387 - protein, 342 aa, unidentified
MITIGIDPHKASHTAVALDGGGRVQGELRCLANQATLERLLRWAERWPERIWAIEGAAGLGHLLAQQLVAREETVLDVPATLVARARLLAPGHGRKTDGIDAASVATVAQNQPDLRRVGPEDHSAVLRLLSDRRDELSGERRRAVNRLHRLLRDLRPGGAPTELSAARASELLGHIRPGAVVDLERKAMARALVADLRRIDRALVENRARCAVAVAASDTTLTDIVGISDVLAAKILGHVRDITRFGSADRFASYTGTAPIEVSSGEVTRHRLSRSGNRSLNNALHLAARVQTMHPGPGRDHYGRKLAEHKSSREALRSLKRQLAKVVYRHLVADQVRRLLT

SEQ ID NO: 60388 - protein, 377 aa, unidentified
MGATRQALINDTSVVVMLYMALELSASKWKVALADGQRAASQHTLEAGDVGGLLKLIEKAKKRCGLQGTLKVMSCYEAGRDGFWLHRWLLEQGIHNVVVDSSSIEVNRRARRAKSDGLDAVKLYEMLVRYVGGDKRMWRVVRVPSVQQEDERRVHRELERLKRERTAHVNRMRSLAVLHNVRLQRVGGRGWSERLEQLKGQLPGALWAEIERESVREKLVCEQIVALEQERKEQLQAMLEQGGPLVALLKLRAIGLQTAWVLVRELFGWRHFNNRRELAACVGLNPSPYDSGASQREQGISKAGNRRVRALVVEIGWYWLRYQPHSALSEWFNRRFGAGGKRMRRIGIVALARRLLIALWRYVEHGVVPAGAQLKKA

SEQ ID NO: 60389 - protein, 471 aa, unidentified
MAIRVGIDVACRTAHRAACADASGQLLWRNVRFQTNAEDLELLWRRLPEGEKDITVVMEPTRNAWVPLAAWFRRHGATVIMVPPEQSADLRAYYNKHAKTDRLDAELLARLPALHPEGLHAEEGLGCAEPLRRAVKIRSNLVRRRVTCTQRLDALLELLGPEWIAALGTVMTATVLLFLSRWSDPHQVLRLGQRRLTDWLIRQSRGHWREAKAENILNAAKATLSLWGDDGMDFAALGADIATEAELALDLDRQIKALDQRIARHYDQADPQLIALSAPGVGPVLAAQIIGRLGDPQRFTSLAAVRSYSGLVPRQNSSGVVNAVGGPTKQGDACLREALFLAADQARRTDPTLAARYHRLMVENGKHHTSAVCSVAAVLLTRMAACLRKGEPYALHDVDGTPITAQQGRALVKARWCVPEEVRKARRSVQRSSPRGQLKAPKGGKRRGGSTESGVDTRSKMSTTPTPSCTN

SEQ ID NO: 60390 - protein, 320 aa, unidentified
MTYIGIDVSKDSFVAAYPTKSGYTTKTFKNIANGVRQFINSLPEDCHCVMEATGNYSMLLLYLLQKANITVSMENPQKIKHFARAMLSTTKTDEIDAKLIAMYGEKMDPKPYRIPSESILLLKQKRTVLRQLKKQFAMWTNLQESMEPLPKKDPASKVAIEQTIKFLRKQISKLEDEITHLSNKEFKRQMELLTSIRGIGENIASALIIATGGFTYFSTAKQISRFLGLCPTYQQSGTSVNVKGHINRNGDTYLRSQLYIAALASIRFNAACKETYDRLKAKGKSGKVAVVAVANKLIRQAYAIVTNNQPYIDGYVSSLA

SEQ ID NO: 60391 - protein, 357 aa, unidentified
MKYIGCDFHPSFQVIAMLDKETGELVERRLLHTEEARSFYQELQGPVMVGIEASGNTHWFESLLGRCRHELWIGDAAAIARQEGRKQKHDRRAAALILRLMLENRFPKIWVPTVAERDVRQLLIHRQHLVRMRSRIKNQLQHIALNQGWQKKRKLWSEAGLELLRNLKLEPWTGQRRDTLLAMLAELEQKIRPLDQAVEKEAFACQGARRLQTHPGVGPVISLATVLTMGDVKRFEDSRSWVSYLGLNPSEESSGQRRRLGAISKQGSPFLRYLLVEGASSAAKGDKSLARMYARLKAKKHHGVAKVAVARKLAVRLYWMARTEKSYPEVVRTQGSQSHPVAEVMAVPLNRPPASRQ

SEQ ID NO: 60392 - protein, 343 aa, unidentified
MAEIATVGLDLAKNWFQVHAADAQGRPVLRKKLARSKVLEFFANLPPCLIGMEACGGAHYWARELIKLGHEVRLMPPQYVKPYVKTNKHDAADAEAICEAVTRPSMRFVPVKTVEQQTLAQLHRIRQLLVKQRTMHVNALRGHLAELGIVRGQGRGKAGELVRLIEAAADDGIPAKVRQQLRHLVELLRDLERRLAELDRELGELAREDPVARRLATIPGVGPITATALAMTIGDIGRFRSGRHLAAYLGLVPKQHASGGKERLGRISKRGDTYLRSLLTHGARAVVRVVRARPDPSPGWIGRLLQRRPVNVAVVAQANRTARIVWALLTKGEDYRRPTAAST

SEQ ID NO: 60393 - protein, 317 aa, unidentified
MTRIICGVDIASSSLAARIGRDGIASTFANTQPGIAELAAFCESHGVELVAMEATGGYEQRAFAQLSEHGLPVAVVNPRAVRQFAQSMGALEKTDAIDSGMIAWYAETKKSQPLCLAPKTQLELRARVTRLRQLTEMRTAQLNQQRLVIDPAIQKGFRKMLQFLAQQIEELELAVAGLIQSDPLWRELDQAFRTIKGVADRTVARLMAEMPEIGTLSNKTISKLAGLAPLANDSGKHQGRRAVRGGRSAVRDILFIVGSVVARHEPDFIVFQQRLRAAGKPPKVVRIAVAHKLLVRLNAKAREVRNLHAQEAFVCLG

SEQ ID NO: 60394 - protein, 448 aa, unidentified
MKGDCMKKSYEKHMEKKQMLSGKRIVGIDPAKEKHQAVVVNEKGLQQGRSFSFPVSHEGYNEKLWKGLGKVLGAYSADDLVFAIETACALWKTLADYITAKGYTVLLVNPLTTYHSRPLMNHDYSKTDPKDSLLIATNAYQGNYTVYQHFTPEINKLHRLGIVQSKLTKDRQKAMARLRALMEEVFPEYLSCLGIDTGTSLYLLEKYFLPEHFRCLPVAEEELPVRSISNGNHGAKTLTKLKECAHKSVGSHTQGEEEVLRLTLDTWIMQIRQADKALKAIMEKMVELAKKTRHFEILTSLTGISDISATLFIAECRDLDLYTHYKQIEKHAGMNLKLSDSGKYVGARRISGIGNKRLLRLIYLMTTQTVRFIPEVRIKFITRQLKRKCYRKNIMASASQLLKLLMALFKENRLYTFKKDAAKKLAKLETKYEALENKQTKEKVRKAA

SEQ ID NO: 60395 - protein, 384 aa, unidentified
MTLDRPDAPAGTEYATIYVAFELSKATWRIGVLLPGSQKMSRFMIDGGDTATLATRLASMRTKAERCGKPVRIVSCYEAGLDAHWLHRWLTDQGVVSYVVDPASIEVNRRGRRAKTDNIDLEKLMRVLLAYLRGEPRVCSMLHVPSVEDEDRKRRTRERERLLQERTAHTNRIKALLVGQGIRDVQPLKPGFIASLEQMHTGDGRMLPPLLKQEIVREHERLMLAQKQIAVLEAESKAELRAAAPGSVAARIMHLIDLKSIGVISGEKLVNEAFYRSFDNRRQVGSYFGLTGTPYDSGTIRREQGISKAGNRRARTLAIELAWLWLRHQPDSELSRWFRQRVGDLKGRIRRITIVAVARKLMIALWRYLTTGVVPTGAALRPSF

SEQ ID NO: 60396 - protein, 320 aa, unidentified
MKWLGIDIAKRKFDLAVLDKGKIRSKVFENTPTGHETLLAWLAAHGHQLEELHACMEATSQYYEKLAIFLHDAGIRVSVINPLQIKAFGESRLSRQKTDRADAALIAHFAEQQSPPLWHPAPREIRELQRLLARLEAVQQMRVQEQNRAYEAEGEALESVGRTLAHLKAEEETLRKRIREHIDQHPHLSEQHALLTSIPGVGEQVSSHFMAWLRPERFDDARQAVAFVGLSPKHRQSGDSVRGKTRLSKVGHARLRKILYLPAMSAIRYNSAAKAIAERLKASGKTGKVVIGAVMRKMIHWMFGVLKSGQPFNPDLALAK

SEQ ID NO: 60397 - protein, 358 aa, unidentified
MKIIGCDYHPSFQQIAMVDLDTGEYVELRLLHAGGEAQRFYESLSGPVRVGAESSGNMLWFERLLQKLGHELWLGDAGAIRAKAPRKQKTDVRDARHLLQLMLENNFPRIWVPSVAERDLRQLLKHRHTLVQMRTRVKNQLQHIALNQGMQKKRKLWTQAGQEWLRGLELDRWTARRRDDLLRLLEQFEGQIEALDQAVQAEAEQRAEVRLLMTHPGVGPVVGLATVLTLGEVTRFPRGREVAAYVGLIPSEDSSGKHRRLGSITKQGSSFLRFLLVQAAVSAVKGDVGWARMYKRLAHKKHHGVAKVAIARKLLVRLYWMLRTRTRYPEVVRMPGSPSHSVAQLQTEALSGHPASRR

SEQ ID NO: 60398 - protein, 408 aa, unidentified
MTVVGIDVSKGKSMVAAMKPGGELVTTPYEVKHSGIELSRFALDVLCMEPDTRVVMEATGRYHEPVAALLHSEGIFVSVLNPLLIKQSGAGSLRKVKSDPKDALKIAKYGLDNWSTLREYTPMEAIRQQLKLCARQCDLYNKNIVMLTNNLISLSDKTFPGVNELFSSPEKENGHLKWVDFYRTFWHCDCINRMSPDAFEERYKKWCKRKGYHFSADAADALYAASCGLYTTLPRDNNAKLLVTVATDQLIALRENQSKLETEMLNLCKQLPEYETVMAMYGVGKSTGPHLMAELGDVRRFPHRSSIVAFAGVDPGVVGSGKMQLSSVATSKRGSPQLRKALFQVVSAYVKRKPENEAVYQFYAKKRDEGKPYYVCTTAAANKFLRIYYARVKACLNAAESATQAEDG

SEQ ID NO: 60399 - protein, 453 aa, unidentified
MKEKSVSMKVVNSHAAGIDVGSRSHFVAIGQDDDQVREFGAYSEDLNSLAQWLIANDVKTVAMESTGTYWQNLYTVLQGAGLEVILCNGKFTKNIKGKKTDVQDCQWIQKLHTLGLLSGSFLPDEASEQLRTYCRHRTNLLGLAASTTHKMQKYLQLLNLRLDIVVKDVTGLTGLSIIHAICNGESNPEKLASLRNGNCKKSEKEIAKALKSNGRKDYLFTLTQEYKLYLSVQEKIKECDEEIEKMLQEQINGDEEKKQHFIGKKVHKRVNKNTPKNIDINLLAYQYYEGVDLLAIEGVSHATILTLMSEIGTGINKFSTAKEFSSWLRLSPNTKISGGRVLSSKVAKGSNRLKIALRNAANAIGNLKDTALSNFFRRIAFRKGRVSAISATARKLAVIIWNMLVKKVPYKPETDYEFLDQKRKRKVMEMKKLIHKFDITPDDLGLQLNINNL

SEQ ID NO: 60400 - protein, 322 aa, unidentified
MSVSVLGIDIAKQKFDVALLVDGKTKHKICKNSVEGFEALMIWLEKQGVQKVHACLEATGNYGEELAIYLHETGHMVSIVNPARIKGFGQSELIRTKTDKIDAALIARFCLAMKPSPWSPPSPKIRSLRALVRRVDSLIDMRTQEKNRISTAHESVSSLIKGHIDYLNKEIEQIRDQIADLIDQDPNLRNKKDLLVSIPAIGTATIPHILAELDDLGKFNNVRELVAFIGLAPRETLSGSSIKGKPRLCKIGHARLRKALYMPALVSIQCNPVMIAFYNRLKEKGKNGKVIVCAIMRKLVHLIFGILKSGKKYDPNYKPALA

SEQ ID NO: 60401 - protein, 369 aa, unidentified
MVPTMPKRIALSNPDRAGEPLLVFGGVDTHADTHTVAAISHLGAMLGHQSFPATAKGYRQLYGWLAGHGTLMRVGMEGTSSYGAGLAAALTGHGVELVEVNRPARTTRRARGKSDPIDAEAAARAGLAGVATAVPKTHTGVVEEIRVIFVARRGAVQARTAAINTLHQMIITAPLQLRAQLQPLTRTQQITGCAALHTGDITSPTRATKLALRRLARRIGHLTAEITDATNDLTTLVQAHAPQLLTQVGVGSLSAAQLLITAGDNPDRMTSPASFAALCGTSPIPVSSGKTNRHRLNRGGDRQANCALHTIVLSRLRYHPETQAYAAKRQTEGKTERDIRRSLKRYLARRLFTLILTASQATDNTLIAA

SEQ ID NO: 60402 - protein, 392 aa, unidentified
MYIVGIDIGKNHHEASIVSPEGKQIGRSLRFATTHKGADSLMSFIFKNIGNSPCVFGMEATGHYWYPIYSFIKAKGYTIYVINPIQSDSLRKMYIRQTKNDSIDSFLIAEVIRFGQFGTTSMADENILAMRQLCRYRDSVISSRTEIKLRIGTIMEQIFPEYEKQFSSLWVSTSMGILEKYLTPENIENAPIDELFEIIKDKSHNKLTMKKAISIREAAADTFGIKIAQDAFSFQLKQLIDRMNFLDKQIEALDCQILEYYEKFDCYLHTIPGIGMIAAATILAEIGDINRFKSSSALVAFAGIDPTVRQSGEFSSTHNHMSKRGSPYLRHAIFLAATTCSFHNSPLNAYYKKKRDQGKHHLTATGAVARKLTTIIYAVLRDSKPYEPKKFC

SEQ ID NO: 60403 - protein, 351 aa, unidentified
MMLRGVDYHPSFQTIAFFVEETGECGEREVNHSAGEAEKFYRDLKQQGISVRVGMEATGYSRWFERLLVELGFEVWIGDPAVIKTKRVRKQKTDREDARLLLKLMLEDRFPGIWGPSPENRDVRQLLWHRHRLVQMRTRIMNQLQALAMNENQCRKSKLWSERGRAEFEKLPLSFWASRRRQELLELLDWMNPKIEELTAAVEQEAKKRPDALRLMTHPGVGPITALAYVLIIGTPARFPRGKQIGTYVGMIPSEDSSGGKQRLGHIRKQGNSLLRFLLVEAAQAAARIHPDWRRRYVHLAMRRHKNIAKVAMGRRMAIELYWMWRNGCEYSQLSKCGSYAGQLGTGHGGK

SEQ ID NO: 60404 - protein, 349 aa, unidentified
MTNGNRWVGIDLHRRRSQIAIIDDHGELTLSRRIVNDPGTFRELLGDPEATHVALEATYGWEWLAELLEEADYDVHLAHPLRTHAIAAARVKTDAVDAKTLAHLLRTGLLPEAYIAPPELRDLRELLRHRAVLTRMRTAVKNRVHALLARQGILPEHTDLFGKGGQQFLATLKLPDGSRRRLDSLLALISDFDREITATTSEIDARARADERVSVLCQIRGVGRYTAMLVIAEVGDVKRFPTARHLCAWAGLAPTVRSSDGKARLGHISRQGSPALRWALTEAAQKIPTGGGPLRAQFERIAKRRGRKIAKVAIARQILTLCYYGLRDGEIRCLTKTANDNDDELAKAA

SEQ ID NO: 60405 - protein, 322 aa, unidentified
MSNKNYGGIDVAKQNVVIGIFGYPKTKTEANNPNGHTNTVEYLKKHNVNLVVLESTGGLEVPLANALYAAGMRVVIANPQRTHKYAESFSLGKTDHLDAKMLADYAQALDARKKVDDILYVPPSAEIQELEALVKRRSQLVEMRKMEKNRLEQTHASQKASVTALIAHLGELIAALDKDIDRYNKNGFDGKGEILSETKGVGNTTCATLLSMMPELGKVSHKRAAALAGVVPLPHQSGDKEKKTGCIGGRKMVRNALYMAALTATRFEPKIKEFYERLMNRGKPFKVAINACMHKLLRILNARMRDYLASLEQTEESRPQTA

SEQ ID NO: 60406 - protein, 314 aa, unidentified
MTFPAAAGIDAGQRYLDVGLPSGTVFRTANRPEAFPALLARLKREGVERVVLEAIGSYTHALVQALAAAGFAVGLVNPRRIKAFRVAEGKRAKTDRLDAGLITRFADRMRDAFRPLPDADQIALKALSTRRRQLTEMIAMEKTRLKQALDPLVSESHKATILALAEACRRIEDEIESRIAKDEQRAKNRRILLTIPGIGARVAQVLLTELPELGRSDRKAIASLAGLAPHVSQSGQAPPRAAIAGGRPCVRTALYMSALVAARHDPNLRAHYQTMRAAGKPAKVALVAIARRILVTANALIRQQASYKPEPNPS

SEQ ID NO: 60407 - protein, 370 aa, unidentified
MTQPTPLFVGLDVHKDSIAVAHAQGQSADPPVFVGAIGTRQADLAKLIRRLQAKTSNLVFAYEAGPCGYTLYRDLTGQGFACHVVAPSLIPKKPGDKVKTDRRDAIELARLLRSGDLTRVYVPTVEDEAIRDLCRARDAARLTLKNAKLRLKGFLLRLGLHYVGRADWNAAHRRYLAKVVCPTPAQQIVFQETLGAVDEQVDRLGRLEAELREIGATWRLDPVVQALQALRGVQWLVAITVVAELGDLTRFDSPRQLGAFVGLIPSEYSSGPARRQGGITKAGNGRARRALIEAAWAYRHPAKVSQHIQTRIDTLPKPIQAIGWKAQVRLCKRFRRLTARGKHPNVAVTAIARELIAFMWAIAKEVTVTV

SEQ ID NO: 60408 - protein, 377 aa, unidentified
MKKELYLGLDVHKDSIATAVAQQGRRGEVRDTGVISPDLHAVEKWIGRLRKAHGPEAQIRACYEAGPCGFGLARRLGQLGVECEVVAPSMTPKRSGDRIKTDQRDARKLARLLRAGELSAIYIPEPTDEAIRDLCRARTDAVDDRRRSRHRLKGFLLRHGYRYQGKSAWSAAHQRYLRELVLPHPAMKVILEEYLISIQAAGERIERCEVAMGDLLEKWRLKRAVQALMAMKGFQIVAAMIVVSELGAIDRFAHPRQVMAYLGLIPSENTSSDKRRQGAITKCGNAHARWLLVECAQHYAAPPKVSKELSRRQEGQPREVRALSWRAQNRLHRRYTRLMARRLQRNKAIVAIARELCGFIWELLGSQRCYEAQSLSS

SEQ ID NO: 60409 - protein, 395 aa, unidentified
MEVGMDRVWVGIDAGKEVHWAHVLDASGEKLLSRKVENDEADLAKLIDEALSFADEVVWAIDQPGGGATLLLGLLWEREQRVLYIPGLTVERSRDTYPGESKTDARDAHVIADQARMRPDLEELTAGEGELAELQILLARRRDLVTDQTRTINPLRDALLSSFPALERALDLNNRGALTLVSHYQVPAQIRRAGRKRIATYLRNRGVKGADALSGQALTAAKAQSVTLPAEDVTARIVAELAAEVLCLKESLKTLDEELEKRFFARKEARVLTSLPGVGVILGAEFLVRAGDLSAFESADKLAAYAGLVPAAHDSGKRVGNDRRMRGGNKALKYVFYQSAFASLRSSPESRAFYDRKRAEGKRHTQALIALARRRVNVLWAMLRDGTTFEARFVA

SEQ ID NO: 60410 - protein, 313 aa, unidentified
MAQIAPNVGIDVSKETLDVAVYPGDAHFRVSNDTKGWGELVRRLAALKPRAIGIEASGGYERDVIGVLGAKRLPVRSVNAWKLRQFAKAAGVLAKNDRLDARVIAWFVATLPCREVRHDPARDQLAELVTARRQVLDAKLQISNQLEHLRDPELRRLQQRRIRQLEADERLISTRIAAAIAADAVMTARHNLISSMRGVGPVLTATLLAFLPELGSLTHRQIAALVGVVPYDFDSGKMRGLRSIFGGRAAVRRVLFMAAQAAAIWNPTLKAFNKRLLAKGKAPKVAIVAVMRKLIVTLNAMLRDSAPWQQTAA

SEQ ID NO: 60411 - protein, 371 aa, unidentified
MRFYTRQHRFYCGVDLHARTKHVCVLDQAGDIVFDRNLAANPKAFLDALAPFRDGLVVGVECMFAWYWLADLCRREGIAFVLGHALYMKAIYGGKAKNDRIDAGKIARLLRGGTFPLAYAYPHGMRETRDLLRRRTYLVRQRAALLTHVQILNSQYNHAPFGKQLTAPGNRARLQITERFSDASVRHSVAIDLALAERLDELIDDVESYLARTAQVDDMQTYQRLQTIPGVGKILALMLLYETHDIGRFDTAGQFLSYARLVRCMHESAGKKLGSGGAKIGNPHLRWAFAEAVCGWLRVSERAKRLQEKLAARHRPGKVLAILAARLGRAVYHMLRKKEAFDEQRFWHGGERVRTGSSSLFRPEEAHHAGN

SEQ ID NO: 60412 - protein, 338 aa, unidentified
MNPSQTVETYELFVGVDIAAKTAMVSTLRPGGKTSRSFTIDQTPEGSSSLLHTLQATGHAPSEVLVVMEATGSYWMSLATRLVHEGFVVSVIHPAQAHHFAKALLKRAKTDAIDAQTLAQFAMVLRPEPWALPPPIYYALQQRLAQRDDLLNLRQQVRNQLHALVQHPEVIAEVRARMESLLATFEAQLTEVESELTAALSQDSAWAAAAERLQSIKGVGWVTAAWTLVTTRNFSSCDTIDALTASAGLAPMPRQSGSSVWHRPSIGHTGNGRLRTALYMATLSSAQHNPVIKAFYTRLREAGKPEKVARCAAARKLLHIAWAVVKKDQPFDPNYALG

SEQ ID NO: 60413 - protein, 346 aa, unidentified
MKIMALDLSKFKSVGCVYEAESGKHGYRRVNTRPAELHDLLVELEPDRVVIEVSSVSGWVSDLVRALGIELQVVNTNGEAWRWRSVKQKHDQADALKLARLSAMNQLELVHVPAPEIRQWRAVIKYRQHLVGRRTDIKNHVRELLVREGVILPRGRKCWSQEGHAGLEEKARSWEEVGISELWRGELQSELQQLQVIQERIRELEAKLEELAKTDDRVGLLRTIPGVGPRLAEAMVALIDDPHRFKRARDVGAYLGLVPRQYQSGEMNRLCRITKRGSKLLRSLLVEVSWVSLRHNPWLRSLYERMNRGSKTRKKIAIVAVARHLAIYCWAMLRDGTTWRQPCTNQ

SEQ ID NO: 60414 - protein, 440 aa, unidentified
MAMRKRDDEVFPNAAGIDVGASSHWVAVPPHLSEEAVREFGAMTDDLNALADWLLACGVDTVALESTGVYWIPVFEVLEQRGLKVWLVDARQLKYVPGRKSDVQDCQWLQKLMSFGLLRAAWRPDGEVCVVRAVARQREMLLIEQASWVQRMQKALVQMNIQLTEVLSDIMGMTGQAIIRAIVAGERDPQVLARYRHSRVKASAEEVTKALTGNWREEHLFVLRQAVAMYDDIGRHLTECDAKLETLLAERSQRQMDLGKAPKVGSKLRLEFDVRQALANWAGVDLTRINGLGVTVVMKLLSEIGPDLSRFATVKHFCSWLGLCPGTKISGGKVLSSATKHSANRARQALRMAAMSLSHSDSALGAFYRRLCARMDKPRANTAVAHKLARLVYFMLTRGEAFVDQGQQRYEEQQRQRSIAALKRRAAALGFELNPTTATT

SEQ ID NO: 60415 - protein, 412 aa, unidentified
MLFIGDDWAEGHHDVVVQDDAGKTLARRRLPEGADGIARFHELVASWAGQDAEPDPARVIVVIETDRGPWVKALAAAGYRVYPANPEQAARHKETIAVSGKKDDFFDAGALADMGRTRRHQLRELAADSDIAEAVKIAARAHQKLVWERTRHMLRMRSALREYFPAALKAYAGLGLTGPDALELLGRAPDPDSAARLTVTQITAALKRAGRRGDLPQRARDIQAALRAPHLPQPAVITEAYAASVRAGAAVIAALNEQCKIMEAKVSELFRRHPDAGVYLSQPGIGDITGARIPGEFGDAPGRYASAKARKNYAGTSPLTIQSGKKKTVHARYIRNRHLIDALHAQALSALSVSRGARAYYDELRAHDAGHGDALRRVAGRLAGILHGCVKTGREYDETAAWSHRAGCPQAA

SEQ ID NO: 60416 - protein, 417 aa, unidentified
MSTKSQKSNKINTQKMVVSLDIGKGSHFGYFRAPGGEEDGPFEVTNSRSGFHQFWKRLCRFKQAHRLSQVIVGFESTGPYAEPLMHFLRQKPVQLVQINPMHSKRVKELTGNSPNKTDRKDPRVIADVMMLGHSLSVVIPQGAAAELRRLTQARERAIKERTAMLNQLQHLVVIIFPEFLKVIKAASCKTGLYLLKRCPSPKAVLALGLEELSRDMKRVSRGRLEHQRAAELFRAARDSIGVTEGRRSMAEEIGHLVDQIERVNAFTDRLERRMRLYLDEIPYSPFFLSMRGIGLITVAGLIGEVGDFRQFDTLSEITKLAGLDLFEVSSGQHKGRRRISKRGRALMRKLLFFAAINTVKTNGIMHAPYARMVGGGMPKIKALVAISRKLLAVMFALARDGSNYIEGYRNHRYQQAA

SEQ ID NO: 60417 - protein, 351 aa, unidentified
MRHIGVDLSKRAFTVCFLAEDDSSDLVTYPLTNEGLGAFRAQLAADDRLAVEVGTNAYFFHDQVIDSVAEVVLVSTYQFAVIAKSKKKTDRADAILLARFLKLDYLPRVVMPEPRVRELRHLFTAREALVGMGRGLKNMGHAALARNGVAVTRAAFASETGRRRLAHLEGLAPVDRQVLDMVLRQLETVDREIEEMERAIIQVGRHLPGLKRLLQVRGLGLIAAIGVLSEIGDVSRFPSAKQLVAYAGLATAVRQSGATDRRGHITKHGRQRLRGFMVEAVLSMMRNPADRRTPLVDFYQRKKQEKGAGKAICAAARKLLTVIYVILTKPLDYWFLEERLYQKKLKQLAAA

SEQ ID NO: 60418 - protein, 330 aa, unidentified
MDSISVFVGLDYHNTVVQVCVLDGNGKVLGNRPCANEVAEIVRFAEGFGAVRSAAIEACTGSANLAEELVRHGWSVDLAHPGYVSRMKQNPDKTDYGDARMLADLERVGYLPKVWLAPEAIRELRRLVRYRQSLVDARRAARQRIRAILREHRRHRVGRAWSRPWLCWAKTVDLPEQSRWIVDQQLEAVQSLNAQIGRTEKRLDQVTGDDPLVQKLLAEDGIGPVTAWTLRAEIGRFDRFRSGKQLARFCGVTPRNASSGARQADAGLIKAGNPQLRAVLIEAAHRLRRGQGKWRDLSDRLLKAGKSGSVTTAAVANRWVRWLYNQLQAA

SEQ ID NO: 60419 - protein, 398 aa, unidentified
MTESSDYESVQVFIGVDVGKDTHHAVAINRSGKRLFDKALPNDENKLRSLISGLKQHGQILLVVDQPATIGALPVAVARSEGVLVGYLPGLAMRRIADLHAGEAKTDARDAAIIAEAARTLPHALRTLKLADEQIAELSMLCGFDDDLAAQTTQASNRIRGLLTQIHPALERVLGPRLDHPAVLDLLQRYPSPEKLASLGEKKLAAQLCKLAPRLGKRLAADIAQALAEQTVVVPGTNAAAVVLPRLALQLITLRKQRDEVALEVEQRVLAHPLYPVLTSMPGVGVRTAARLLTEVACRAFASAAHLAAYAGLAPVTRRSGSSIRGEHPSRRGNKALKRALFLSAFAALRDPISRAYYTRKMSQGKRHNQALIALARRRCDVLFAMMRDGTFYTPQAS

SEQ ID NO: 60420 - protein, 347 aa, unidentified
MNFYHSTHRHYCGIDLHARSLYVCILDQQGEVLLHKEIKARPEPLLTLLDPFRDDLVVGVECMHCWYWISDLCEEHGIHFILGHALYMKAIHGGKSKNDRIDSFKIAMLMRGGNFPMAYVYPKKMRATRDLLRRRTRIVQHGAMLKAHVVNTVSQYNLPPSKANLNNPGGRSQLTSAFSDPDVQRNVDLDLAIVDSYQHELKKIEWHLEQQAKQHDPASLTVLKTIPGVGRILALTILYEVGDIQRFESVQKFASYARLVKCKAESAGKVYGTQGNKIGNAHLKWAFSEAAVLFIRNSDKAKRYVEKLQKRMSKPKALSALAHKLGRAAYFMLKDKRVFDEERFLKG

SEQ ID NO: 60421 - protein, 413 aa, unidentified
MVKTAGKEGLMDFYVGIDVSKFKHTVAIIDQNGEVRKKSFDISNSREGFNLLLNELGLLGLKEQIKIGMEATGHYMNCLVRCLISNGYQVQIYNPSLIARFRDSEAVNLAKTDNLDAMLIAKYVATHPFTSSPQISYLIGEIRKISRTKYFLFGDKTACYNHLLRYLDEIFPEFVSFFKKNEDGSRKNMGRNLFESPTIRWLLSNYPSASKMAKMRVETGEALRRMSKGAISFNRFNQLRELAKNSIGYSTEVDEQIIRNLVNQVRIIDDEIDNLNELLEPLMEELNSPILTIPGIGVNLTAVIIGEIGDINRFSSPEKLIKFAGLDVKVYQSGTINIKGHIRKRGSPILRYALALSVQKLRIHSPVFSEYYYSKLRQGKATNVAIIATTRKLTRIIWKIMTTNQVFENIKRD

SEQ ID NO: 60422 - protein, 452 aa, unidentified
MGHYAGVDWAADKHDVRVCDETGEELLAATFAHDEKGLRALCRALARLRVELVAIERPDGLLVERLLDAGLRVLPMHPKQVAAARARFRAAGGKSDRFDAFVLCELARTDSHRFRVLEPDSDETKALRALTRAREDLVHARVALCSQLRAELERFWPGPIGLFTKLDSPISLAFLERYPSPADARGLGEQRLGAFLARQRYSGGQKPTDLLSKLRRAPEGRVGEAELAARRALVLALVTAIKPLVEQIKQLTEQIATALREHPDGEIFLSLFRDPRSVVTAAELLAEIGDCRARYPTRDTLAADAGQAAVAVESGRRKTASFRCGCNKRLRGAFCTLADSTRHWHPWAQDRYAAARARGHEHPRALRTLGRAWCRIVWSCWQRRTPYDPAKHRALQQHCTVTVPTPSGPVPDLPAIQRMLGAAVTEPVARRAEREALDSKPPPATPSRRLMS

SEQ ID NO: 60423 - protein, 344 aa, unidentified
MYFIGVDHHKQVSVMTVLDEDGRELKNGRVANLRSHVERFLEGYRPFTAVVEAGRASYVMADLLRELGGEIKMANPLQVKAIAHARIKTDKRDSRTLAQLLRADLIPEVYQRDEWNRRAQRVMRMRAYWIGKQTEVRNKIRALLAQQEEEIRLEVERREGKLFSLKGQEFLSGLALEGQDKLILDDLLQGHRETQAHVQLSDGLVTALYGELEDAARIDTIPGFATTLSVLVAVEIADVRRFPRPADLHSYAGVIPSTYSSGGRTVHGHITKQGSVWLRWAVVEAVYPAVRKDFALGALYKRLARRKGPNVAKIAVARRLLTIIYRVLTEKRDYIPGLMKQSAA

SEQ ID NO: 60424 - protein, 314 aa, unidentified
MSSLVFVGIDVSQGCLDIAIRPGASFSLPHEESAIATLVEQLCALGPTLIVLEATGGMEIPLTSALATAGLPVVVVNPRQVRDFAKASGHLAKTDALDAQVLAQFAEVMRPQPRPLPDAEARALAALLIRRRQLVEMLTAEKNRLLSAPSPIRTRLRTHITWLERELQSTNTALAEAIRQSPVWREKDELLQSVPGVGPVLTSTLLASLPELGTLTHKQIAALVGVAPLNRDSGTLRGRRTVWGGRAQVRAVLYMGAIVAARFNPVIRVCYQRLQRAGKAKKVALTACMRKLLTILNAMLKHRTPWREVEAHHA

SEQ ID NO: 60425 - protein, 404 aa, unidentified
MTAVMIGVDPHKGSHTAVAIGAAEEPLGKLRVRASAGQAQRLVAWAAAWPERTWAVEGAGGLGHLLAQQLVAAGVLDVQPKLGARVRLLATGASNKNDPNDALSVAVAALRSPARRQVSADDHAAVLRVWSRRHRDLGRAKNQVACRLHAVLCELVPGGVPKEITAAQATRILQSAQPSGVAGQARGELAAELLADMRRLDAQMLQSKKKLAIAVTASGTSLTGLFGVGPVIAATVIGDAADVARFASRDHFAAYNGTAPIEVSSGNRKIYRLSLRGNRRINHAIHMAAITQIRHRHSDGRAYYDKKLAEGKTHKEALRSLKRQISNAIFRCLQADARQAAPAACAKGPGGQPGNDSDSSAAGSHPERRLFGQATPEPSPTLRPDPAKRTSQPTRRSRRTSQNP

SEQ ID NO: 60426 - protein, 310 aa, unidentified
MEPIFVGIDVAKDRLDVHVQPSGQAFSVSRDDAGLADLVRRLPPLGATRIALEATGGYEVVVAATLAAAPLPVAVINPRQIRDFARATGRLAKTDALDAQAIAGFAAAVRPAARTVADADARLLGELVARRRQLVDMLGAEHNRRRLIEPPALKRRLDAHIRWLERALRELEGDLDTTVRASAIWRATEDLLRSVPGIGPITAYTLIADLPELGRLDRRKIAALVGVAPINRDSGTLRGRRMIAGGRASVRHVLYMATLTAIRHNPVIAAFYRRLVSAGRPGKLALTAAMRKLLVILNAILRDPRPWRPA

SEQ ID NO: 60427 - protein, 357 aa, unidentified
MVVLGIDVHKHTHTTVAVDQVGRQLGQCTVRTNDEGCTQLLGWARATWRGDPDQRLWAVEDCRHVSGRLERVLLAAGERVVRVPPKLTGVHRRATRTRGKSDPIDALAVARAALADPDLPVACHDPVTRELKLLIDHRDHLIAQRTGLINRLRWSLHNLDPDFHIPARTLHRPANLARIRALLAQQHATLETRLETRLAGEHVDDIQALTQRVSDLERDLHTRVQTLCPQLLDLPGCAHLTAAKLLAETADITRFVTSDRYAAYAGTAPIPASSGNTHRHRLARGGNRQLNAAIHRIALTQIRIEGPGHAYYLRRQADGKTKKEAIRALKRKITRAVYQALKTAQTDPQHAAIAPAA

SEQ ID NO: 60428 - protein, 321 aa, unidentified
MTMITASAAGIDAGKTYLDIGIEPSRICFRVANAAAGIEDAVTRLQQAGVHKVLLEAIGPFAQPAVTRLVAEGFEVGLINPRRIKAFREAEGKRAKTDRLDASLIARFAVLMTDAPRPVPSANQQALKALATRRRQLVEMIAMEKTRLKQASDPLLCESHRTAIAALTVERRRIDANIDDRLTIDAALARRKVVLTSLPGFGPAIATTLITDMPELGTLDRRAIASLAGLAPHPSQSGTSAGRNQIGGGRPCVRTALYMAGLVASRCNPHFRAEYQSMRSDGKPAKVAIIAIARKLLVLANSLVKNDSLYDPDRADATVIH

SEQ ID NO: 60429 - protein, 372 aa, unidentified
MGEHSEVFVAFDTAKLKHAVAIAAGGRDGEVRFLGEVENQPAPIEKVIKKLARRYRKLHVCFEAGPTGYGLYRQIQGLGHDCLVVAPALIPKRSGDRVKTNRRDALTLARLHRAGELTAVWVPDAVHEAVRDLVRGRTTAAEDVRRKRQQLLSFLLRHGRIFTGRDHWTRAHRRWLAEQRFDHPAQQIVFQDAVAAIEDAIERLRRLEEQLGAVVPKWSMASMVAAYQAMRGVSFLVAVTFAAEIGDVRRFDTPRQLMSFLGLVPAERSTGETVRRTGLTLAGNRRARRMLIEAAWSYRHPARVSETLRARLEGLSKAVRDIAWKAQVRLCNRYRRLNAAGKKLPVIIAAVAREMAAFLWAIGRQVTPAAIS

SEQ ID NO: 60430 - protein, 400 aa, unidentified
MLSIGIDVSKGKSTVCGMKPGGEIVYTPFEVQHTREGMSELVSLLRSSGEEVRAVLESTGSYHCPVVTALLENGIFVSVVNSLRMKRFCSQSIRKVKTDRIDAMQIALYGLAYWQELQPTRLPEDTYRELQLLARQYYQMTSLLIKAKVDFNAICDQVLPGMQELMSDHAGRHKLSDFVLRYCHTTHILEMGETRFRKDYCKWAEKKGYRNCERMAALIFATAQNGIPVLPNAPSTQIVITEAIRVLHTVEASRDAILTQMQALAKTLPEYSLVREMPCIGDTLAPRLIAEIGDVRRFHSKRALIAYAGIDAPPYQSGKFCANNRHISKRGNRYLRKTGYEVMQSYVMHKPANDPIFTFIEKKRGEGKSGKLAMVAGLNKFLRVYYGKVTELYRSLSAIE

SEQ ID NO: 60431 - protein, 343 aa, unidentified
MAIVILGIDLGKNICSLVGVNEDGAVVLRRRMRRQTVLTFAAKLPSCVVAMEACCGAHHLGRLLTAQGHTVKLMSPEYVRPYVKAQKNDDRDAEGIAEAASRPTMRFVDLKSQEQLDLQSLHRVRSCLVGVRRTLLNQLRAILLERGHIFPQGRRKFEAAIDTLVADPAYEISSRIRQLVIDIRSEWQALDSRIEALNGEFVAIARHDETARRLVTIPGVGVLNATALVAAVGDGAAFRRGRDLGAWLGLVPKQHTTGGKPKLLGISKRGNKYLRMLFIHGARAAMPSLSASQSPLGEWLRGLLARTHRNIAIVALANKLARIAWATLRRKTSFDLRHLAVAG

SEQ ID NO: 60432 - protein, 359 aa, unidentified
MREQRNKISFRGQKIYVGIDVHLKSWSVTVLSETSVLKKFSQHPSPEALYGFLTRSYPGAEYHSVYEAGFCGFWIHERLTALGIDNIVVNPADVPTKSSEKLRKTDTVDSGKLARSLRANELKGIYTPDSVSLEMRSLIRLKNSITKDTTRQKNRLKSQLRYLGIEIPQEFLTPFSNWSKRFFAWLKEIETLTPSGRQALDIHIRHLEELRRQKLEMTRALRTLAKTDRFRKPLRLIMSVPGFGQATGMAFLSEICDITRFRNAEQLAAYIGMIPMCHSSGEKDGTGDITIRKHAVMRCNLIEAAWVAVRQDPAMNLFYTEQCKRMPKSKAIVKVARKLVNRLFFVLKHQTEYVNSIVS

SEQ ID NO: 60433 - protein, 387 aa, unidentified
MPLNIAPGFQSETAVAPDHATAFVSLELSRSKWVITSLSPCSNKMSKYSIDGGNGTALLDCLARLRVKAESRIGTAVKIVVIQEGGLDGFWIHRLLESNGIESHVVEPASIAVPRRHRRAKTDAIDGEILVRTLMAYKRGEPRVCSMVVAPTPEEEDRRRISRERRTLIKERIEHVNRVKGLLASQGIFEYEPMRKDFRNRIESLRTGDGRPLLPQLKAEIIRELDRIDLVLRQIAAIEAERDALVKSDSTDEAPAALLMKLKGIGPEFAAVLWLEGLFRRFANRRQLAAYAGLVPSPWQSGSVNRDQGISKSGNPRLRTIMVELAWLWLRYQPASALSCWFRERVGSERGRIRRITIVALARKLLVALWRYTTHGELPNGAELKTA

SEQ ID NO: 60434 - protein, 320 aa, unidentified
MITTKVTLGIDVSKQTFDVALLMGNKLKHKTFTNNLKGYHALLAWLNKHDAHELHACMEATGIYGEALAEYLYDHEINISIVNPARVKGFAQSELLRTKTDKVDAGLIARFCFALEPSLWQPMPIEIRQCRDLVRRLEALGNMHRQESNRLEGASDVIAAQLHDHLAYLDAEMKKVKKMIKQHIDNHPDMKQRKALLESIPGIGEATINVILSEFGNITQFKNAKALAAFIGVAPKTRESGTSLRSRARMSKMGRSNLRKAFFMPALVALRYNPLIMELKLRLTKAGKSKMAIVGAAMRKLVHIIYGVLKNGLPFDQNFA

SEQ ID NO: 60435 - protein, 498 aa, unidentified
MPQLHKQSKLKHPNHLPEANPGIRPKPNKGRKKTSRAQVQPDPTEGLMVANPNAAAIDIGSSEHWVAVPPGCAQPNFRKFGCWTADLEALADWLVECKVDTVVLEATGNYWVVLYDLLEARSLRPVLVNPRYAKNMSGKKGDIPDCQWMQKLHTYGLFVNSFRPTEPMRVLRAYLRQRETLVAQASQSIQHMQKALTEMNVQLTNVISDISGETGLRIIDAILSGERDAKQLARLKDPRIRASSAELARALEGHWKDEQIFVLEQSRLTYLHHQEQIAACEESVQQQMRALEARLPAAPATAGKTGTATEAAAAEAAVEPAPKSAAVQPQVEAFNLSAELRRIVGVDLTAIDGIGPVTAQVVLSEIGTDMSYWPSEKQFASWLGLCPDHRISGGRILGRSTRHVVNRARHALRLAAYTLERSKSWLGAKYRRLKYKLGAPKAIVAMAHHLARLIYRMIKNGADYVDKGMEVYEAKYREQRVKWLQKQAKELNLQVVAA

SEQ ID NO: 60436 - protein, 330 aa, unidentified
MKQYKYFFGVDISKKTIDVTLAKDAQLIHRQFSNDSTGMDELMQWLRELNLNFSDVLFCMEATGLYCFPLTQFLAGNAIDIWIEHAAQIKKASSLDRGKNDKIDSRRIAIYASKNIDRMRLWKPLSSTLEKIKHLASLRERLVETKKRLITPINEFEEVGNVVMAKLLAKTIKSSLAAIDKDLKNVEIRIISIVNEDENLKQLYKLITSVVGIGFVTAINLIVYTNGFTILRDTRKLACYCGVAPFEYSSGSSIRGKTKVHYMANKKLKCNLHMASLSAVKLDPDLKAYYERKIAEGKNKMSVLNAVKNKLLERVIAVVNRQEEYVRKTA

SEQ ID NO: 60437 - protein, 346 aa, unidentified
MCSLPVFVGLDYHDSSVRVVVQDTDGSEMGNADRTNHWKAIADFGDRFGRPVRAAIESCCGAADLAEELVSCAGWSVALAHPGYVQRMKQNPDKTDCQDAQLLADLERVGYLPRVWLAPRYIRELRHVVRYRLQLTEQRRATKLRLRALLREQRCHAPEGLNAWTKAWQHWVRQTAELSEQGRWLAEQHLDELARLAIRIHEVEKRLEHLTTNDVEVQRLQQQPGIGPVTAWTIRAEIGHFDRFRTGKQLARFCGLSPRNASSGQRQADAGLIRAANPALRTVLIEAAHRLVQYDPSWQKFAQRLRARGKPGSVVAAAVANRWMRRLYHEMKTPSGELAVAVGPAQ

SEQ ID NO: 60438 - protein, 397 aa, unidentified
MYIVGIDIAKRKHEAAVIDGEGTVIIKPFSFTNNCSGYNRLLAMLAKAKLPLDEVSFAMEATGHYWLALFTRLQKEGFRVQVINPVQTNSIRSFYIRQAKTDPRDALLIAEVIRFGHFSESTLHPENIYELRELCRGRHAIVSMQADVKRKVVALLDQVFPEYETAFTNLFGDTSMAILQTCPTPKELSEMRLEELCHLIEVSSRKRFRMAKAQELQELARNSFGFAMAGDVFSTMIRLYAKHLVFLKQQVQEMDRKIAEIMDTLDTPITTITGIGPTLGAYILSEIGDINRFSSAAKLAAYAGIDPTMRQSGEYNGVRNRMSKRGSPYLRHAIWLAASSAVLHDPALKLYFQKKRDEGKPYMASVGHACRKMVSIIYAVMRDNKAYTPCIPNEISA

SEQ ID NO: 60439 - protein, 420 aa, unidentified
MSDSFRFFVGVDLGAERHAVVLLDAAGEVLGRRSFAHNGAEVLELFTWLAKLTGAGSHEIALAAETPRGSIVEAALERDHPVFSINPKQLDRFRDRFSMAGAKDDQRDAWVLAASLRTDPHCFRRLRLGDPRVVLLRELSRSEGQLQESFRRAANQLWSLLQRYFPVLLTLAQAADEPWLWSLLRAAPLPAAAARLKLPRLEKILSRHRIRRFSAAELTELLKQPPLPMAPGAAEALAESALLLIPQLELLHRQLAQLALRIEKAIDALQQDADFPQHRDLEILRAFPGLGRVFTATVLAEAYGPLVERDYHALRTLTGAAPVTKQSGKTCLVQLRRACNHRLQHALFHSAQVFAQKDPRAKRQYQLLRDHGETHARALRGVGDRLLELLFVLLKAGSCYDPQRRKIAPLEGTPPPQKNS

SEQ ID NO: 60440 - protein, 420 aa, unidentified
MEELTEEPAELLERVAALDIGKASLVCCVRVPHESRLGARRQEVRTYGTVTPALLELRDWLICQGVTRVVMEATSAYWKPPFYLLEDDIECWVVNARDVKNVPGRPKTDKLDAVWLCKLAERGMLRPSFIPGRPQRQLRDLTRYRRTLTHERTREKQRAEKLLEDAQVKLSSVISDIFGVSGRDMLAALIAGERDPHALADLARKRMRAKISVLRQALTGHFTEHHAFLLGMMVDRVDALTAQIDTLTTRIEKAIAPFAAEVAQLDEIPGTGITTAQEIIAETGTDMSRFPTPGHLVSWAKFAPKARQSAGRSKAAATGKGNPWLGGTIGEAAAGAARTSTFLAARYKRVVKRRGKKRALVAVGNSILTICWHLLSDPGAHFTDLGPDWHDRLAPQRRKRQLIAELERLSGKKVTLNDAA

SEQ ID NO: 60441 - protein, 352 aa, unidentified
MLIIGCGDYHPSDQQIAFVDKETGECGEQRLNHSGGEAEKFYRDLQLRGVSVRVGMEATGHARWFERLLAELGYELWIGDPAQIRAKRVRKQKTDRQDAQLLLKLLLEDRFPRVWVPSPENRDLRQLLWHRHRLVQMRTRIMNQLQAVAMNEGVRRKKGLWSKSGRAQLESFLLAPWAARRRQDLLELVDRLNPSIEQLSTAIEQEAEKRPEVRRLMTHPGVGPLTAMAFVLIIGSPERFRCGKQIGSYVGLIPCEDSSAGHQRLGHISKQGNSLLRFLLVEATQAAVRHDPDWRRRFLHLAIRREQRIAKVAMARKLAVRLYWMWRKGWDYQQVLRFGSHAGQPVHVHGVE

SEQ ID NO: 60442 - protein, 415 aa, unidentified
MARSAPPDTRYLGIDLHKDYLVIGGVTAEQDVVLQPRRFTFEAWAAWSKAHLCKSDVLVVEATSNTWTFYDGCVELVARVEVANANKVTWIAGTDVKTDRVDVMKLARLCAAHLIPQVWVPPQPVRELRALFSHRRRLVKVSTLVKNRLQSLLHRHQIKAPTGDLYGEANREWWIALGVSDTERLHIRHDFANLRLVQQQLEEVELELQRVSTTEPWASTLPFLMQIPGIGLLSALAILAAIGDISRFEEDRSLVGYSGLGARVHDSGSTHRTGRITKSGRRDLRFALVEAARAAVRYDPYWAAVAAKLGSRIGEKKALVAIARRLLVTIWHVLTKHEADLHAQPERVAAKFMRWSWKLKPQHRQGLQSREFIRWKLEPLGIGAELTHLTYSKMPRRIASAEELWSSRPDLRPPD

SEQ ID NO: 60443 - protein, 376 aa, unidentified
MNTNTIYVGMDVHKESFSLCCYSIEKDEASHQQKIGADYRLILKYLGSMRGVFGEDTEFVCGYEAGCLGFTLYRQLTDLNVKCIILAPTTMMAEQGRKRIKTDKRDAVLIARCLAYHTYHAVHIPTEQDEQIKEYIRMRDDHRLALKKDKQQILSFCLRHGFQYTETNSRWTQAHINWLRKLELEGLYQETMAEYLMTFDRLTEVIERLDKRIAGLAEQDTYRSNVKKLTCFMGVKTQTALAVLVEVGDFNRFARAENIAAYIGLVPGEDSSGGDKQRLSITKAGNTHVRRLLIEAAQSYSRGVVGYKSKALKERQEGNPPEVIAYADKANTRLRRRYYHMILQNGRKANVAKTAIARELMCFMWGMVTGNIEARI

SEQ ID NO: 60444 - protein, 414 aa, unidentified
MSLTDTTPTTRAATAGVDWAKDNHAVCVVDADGEPVERVTVVHNSVGLDRLIAVLARHRVDDVGIERPDGPVVDALLAAGHTVYVIAPSQIKALRLRYGAAGNKDDRFDAYVLADTIRTDRRRLTPLQCDTAATVVLRRLCRARKDLVAHRVAVANQLRAHLETALPAAIGLFRDIDSPITEAFLTRFTTQDAVDWISVVRLAGWLNRVKYSGGTRPQVLFRRLAEAPRGPTGIHGQALAGITRAYLAALAAIRAQIAALTEQIEQALEAHPDRNIFTSLPRAGTVRAARLLAEIGDARGRYPTASSLACIAGVAPSTRESGKSRIVSFRWAVDKQLRDAMCDFASDSRHNNPWAADLYAKARARGHDHPHAVRILGRAWTDIIWKCWTTNTAYQPDRHRALQRLLQQDQTVGG

SEQ ID NO: 60445 - protein, 347 aa, unidentified
MELHAIGIDLGKTLFHLVGLDSSGNVIVRKRCSRTQLLKYTANLQVQRIGMEACSGSHFLARALREQGHDARLIPAQYVKPYVKTNKSDYIDAEAIAEAVQRPTMRFVPIKTEEQLDLQTVHRVRERWVTRRTAVVNQIRGLLLERGLTLPKGRSHVDRALPEILTDPTLRLAGSFRVLLGQLQLELEQLSARIEQMDAVIQETARENEACQRLTAIPGIGPVTATALVAAIGNGAGFRRGKDLAAWVGMVPREYSSGGKQKLLGISKRGNSYLRRLFVQGARVVMQYRTKQAPGLSCWLSQLMARTHQNVAVVALANKLLRMAWAVLCKNKTYRIPALAAPCVRTQ

SEQ ID NO: 60446 - protein, 330 aa, unidentified
MYLGIDTHSRYSQVAVVDDDGNLQDEIRLPNDRLSDLAEQYAGGEAAIEASGHYRPVYEMLDEHLDVTLVNPSKNRLIAEATVKTDRIDAKRLAHMLRADMLAESYVPSDEIRTLRDLVRTRKSLVEERTAEKNRVRAVLKRTDNAYESELFGPTGREFLAELSLSEADRAIVEAHLSVIAEYDEQIERLETKIEEKVFESPAAQRLLSIPGVGQSTAALIVAEVGEIDRFDRHEELVSYAGLDPQVHQSGDKEIHGSISKEGSGALRWALVQCAHISVRHDDYLGNFYTRLKRRKNKQIAIVATARKLLVSIFYMLKRQEPYNPPEVSA

SEQ ID NO: 60447 - protein, 341 aa, unidentified
MLIIGCDYHPSMQQVACLDTETGEFICQRLAHRAEAEQFYRKLAKEHIQVRVGMEATGHAHWFERLLGELNIELWIGDPAQIRATMVRKQKNDKRDAEHILKLMRQDNFPQIWVPNPKNRDLRQLVWHRHRLVGMRTRVMNQLQAIAMNEGLRRGRGLWGKRGRMQLESLPLAPWSNRRRQELLQLLDRLDPTIEELSQAIEGEAEHRPEVQRLCTHPGVGPLTALAYVLVVGTPDRFHCGKQVGSYLGLIPCEDSSAEHWRLGHISKQGNALLRFLLGQAALNATRSDEQWRRQYVHISMRRNHAIAKVAMARKLAVRLFWMWRHNWDYEQLKKFGSHSG

SEQ ID NO: 60448 - protein, 390 aa, unidentified
MRFAGIDIASETHVLAIVDAEGAVAVKATPFAEDAAGYAQVLALLGAPADLLIAMEATGHYWQNLFAVLAAAGHRIALVNPLRTHRFAGEELTRTKTDAIDALGIARFAAQKRPAIAPLPDALSNELRELVRLRQRLLQDFGDRVRQLHRLVDLGFPEFTRYVRTLDSELASAILRAYPTAAAFRGVSVKRLAALRYDERHPVGLELARTLIDAARHSVGQHHSPAYRVQIRYACDDLAILRRRLRELDHDLEDTLRQHEIGRLLITIDGIGPHTAACVIAEVGNPAHFKSPAALAAYVGVIPGLKQSGKRSPSRAALTTIGNARLRAALWMPTLAAARFNPWLRAHYLRLRARGKLPKVALVACMHKLLFAIYSVAKHRQPFIAKVAST

SEQ ID NO: 60449 - protein, 392 aa, unidentified
MIYVGIDVAKDKHDCFITNSDGEVLFKPFTIPNNRDGFETLFQRILSVSDDLNKVKVGLEATGHYSYNLLGFLLDKGCHTFVINPLHTNLYRKSLSLRKTKTDKVDSRTIATMMMSDMNLKSYSNTSYHNEELKSLTRYRFDKVKERAKLKTSVSRLVCILFPELEKLVPTLHMPSVYALLSEFPGANAVASAHLTRLSNLLSESSKGRYGKDTAVIFREAARNSIGSVMPAKSLELKHTIKLIQELTSEIDEIETAIKRIMDEEIQSPILSIPGISYRMGAMIIAEIGDFNRFDSADKILAYAGMSPSTYQSGQMDNCYAHMEKRGSRYLRYALYNATKYVCHWDESFGAYLEKKRSEGKHYNVALSHAAKKLVRLIFAMEKSGQAYVPAA

SEQ ID NO: 60450 - protein, 445 aa, unidentified
MPPPAGEERWTTGGMLCPEHCSISSSLLSFGSVSTRATEVMPMVFVGIDWAEAHHDICVVDEAGQVLEKRRVPEGLEGVGKLHALIAEHAEDPAGVVVGIETDRGLLVGSLVAAGYQVYAINPLASSRYRARHATSGAKSDPGDARVLADLVRTDRHQHRPLAGDTNLAEAVQILARAHQGLVWTRQRQVNQLRNALREFYPGALSAFVDLDAADAVAILERAPTPIRGRALSQAKIISALRQGGRERNLEAKAAQIQVQLRLPQLQAPALLAEAYGHSVAATVAVIKQLNLQIAALEQELAASFEIHPDAEIYLSLPGLGVVLGARAMAEFGDDRARFLHPKARKSYAGTAPITKASGTRKVVLARVARNRRLADACYQWAFSALTRSDGARHRYDVLRRRGQTHHQALRALANRLVGILHGCLTSRQTYSERIAWSADMQVAA

SEQ ID NO: 60451 - protein, 341 aa, unidentified
MDLHTIGIDLGKTIFHLVGLNQRGEVMVRKKFSRAQLLRFTANRQVHLIGMEACGGSHFLAKALQQQGHEVRLIPPKYVKPFVKTNKNDFIDAEAIAEAVGRPSMRFVPIKSDDQLDMQSLHRVRERWVMRRTAVVNQIRSLLLERGITVPQGWCHLEALLPAILTGTEMKLSGVVRLLVAQLKLELDQLAARLEEADALIEQTAQENEACRRLDAIPGIGPVTATALLAAIGNGAAFRKGREFAAWVGLVPREHSTGGKQKLLGISRRGNSYLRKLFVQGARAVLQFKEKQSSGLKAWLTNVSWRTHYNVVGVALANKLARTAWAVLAKGEVYRPPVLAC

SEQ ID NO: 60452 - protein, 422 aa, unidentified
MVRAIGLDVHRDFCEVAIAEEGRVRSAGRIATRPEVLELFAQSLTRDDRVALEVTGNAWEIARIIEPHVARVVVVSPSDTGIRQARAKTDRHDARTLAKLLATGSLDSVWMPDERTRVMRRRLSRRSQLVEARTRVKNEIHAILIRRLKGRPDVSDLFGKKGRAWLAELELPIEERETLDSGLRQIDFLDAEIKLVDRVIAHDALNWPQARRLMTVPGVNLIVAATFLAAVGDIHRFPDRRKLVAYLGLDPKVRQSGDAPASHGHISKQGAAPVRVALVEAGCSVVRQPGPLHAFYARIRARRGHQVAITAAARKLACLFWILLWREEDYAFGQPSLTAKKIRRLKIMAGAPRWQDRKGIWIAHRLLRDAELNVARQAEHAYAQTVRDRQAAGAIKTGASATPGRASQQPIEGKAARQTTSP

SEQ ID NO: 60453 - protein, 389 aa, unidentified
MILVGIDVAKDKHDCFIQTADGKVLFKAFSFANNYEGFEELYAKILSCDDADVRIGLESTGHYSYNLLGFLLSKELPTFVFNPLQTNQFRKSLSLRKTKTDKVDAKTIALMLATESNENAYSLQVYQNEELKSLTRYRADKVSQRSKLKQSLSRLVTILFPELKSVVSTLHSNSIYAMLLKYPSAKDVAKSQFHSLVNLLDNSSRGRIDKDKAKEIRNLARKSVGVYVSAKVLELRHTIKLIQILDEEVAEIEKRIQNHMQELHSPIESIPGISTRLAAVIESEVGDFQRFSSPDKILAFAGLSPTTYQSGKYTSQNATMEKRGSRYLRCALFLAAHLVSRYSKTFAAYLKKKRDEGKHYFVALSHVAKKLVRVIFHLQRTRESFSDFA

SEQ ID NO: 60454 - protein, 356 aa, unidentified
MSQKLNSAIAVIGIDIGKNSFHVVGHDKRGAIVLRQKWSRGQVEARLANVPPCLIGMEACVGAHHLSRKLQALGHDARLMPAKYVRPYSKGQKNDFRDAEAITEAVQRPTMKFVTTKTADQLDLQALHRVRERLVGQRTGIINQMRAFLLERGVAVRKGPRFLRAELPAIVAKRTDVLSPRMLHLIEGLAEDWRRLDERIETLSNEINALARTDSACDRLMSVPGIGPIIASAMVAAIGTGEAFAKGRDFGAWLGLVPKQISTGDRTILGSISKRGNRYLRALFVQAARVVLARIRPKQWERYGLKSWIEAAQRRLHHNVLAIALANKLARIAWAVLNKGRAFECAKTHAMAPRAA

SEQ ID NO: 60455 - protein, 458 aa, unidentified
MAPSTSTSTSKKRGRSPRLSTVNPNAAGIDIGAQFHVVAVPAERDDEPVRSFKSFTGDLYRLAEWLLACGIETVAMESTGVYWIPLYQVLQERGIDVIVANARDVKHVPGRKTDVNDAQWLQQLHSYGLLRGSFHPPAGIATLRAYLRQRERLLEYAASHIQHMQKALMQMNLQLHHVVSDITGQTGMRIIRAVLDGVRDPLELAALRDPRCKASLETIAAALQGNYLPEHLLALRQAVALYDSYQAHVAECDRESEAVLGQLQAEEPPQEPLPAPRHRTKQHNEPAFDVRAALYAMLGVDLTQIHGMGASLALKLVGECGTDMSQWPSAKHFVSWLCLAPGNKISGGKVLSAKTRRTKSRTSAMLRLAAVNVGKTDSALGAFYRRLAARVGKAKAVTATARKLAILFYNTLRYGADYSDPGASYYEEQHRARVLHNMQRRAKQLGYTLEPLPEAGVS

SEQ ID NO: 60456 - protein, 380 aa, unidentified
MKTNSDTTPQLYIGLDVHKEKSSVAIADPGATGEIRHHGEVATTQVALDRLIRRIAKSKNIPLSRISVCYEAGGCGMWIARMLHKMKVPCTVVAPSLIPTKAGDHVKTDKKDAIKLARLLRAGELVSVFVPDETDEAIRDLCRARVDAIDDRRRAKTRLLGLLRRLGFNYTGKTTWNDAHKRYLRHLSLPFAAHRVILEELIGQIDQLDERIARYESHMESLYADWRRKPIVDAVMGLKGFQMIAAMMIVSEVGDFVRFSHPKQLMSYLGLTPGEYSSGGKSKRSGITKCGNSHARWIMVECSTHYGKEPRIGAHLSTRQAGLARWIIEKSWKAQNRLYLRTSNLRKRLMHHNKIKVTIARELCGVIWEIGYKIQSNPAK

SEQ ID NO: 60457 - protein, 341 aa, unidentified
MGAIGIDTHKATLAACAVDALGMAHAERTFDNDPAGHRALLEWARAADPNAVIGVEGSASFGAPAARVLIAAGRSVREVPPQLSRRERIRTRRAGKSDPGDALAIARVTLRESDLPLVRLADRSLEIQLLVAAREDVVTEMTRVRNRLHADLRVLVPGYGASVTSLTTVRHQRTVARLLRSLAGVQAELARGRLGRLQALGTDEHTLAAQIGTRVDGHPLLALPGAGALVTARLVGEIGDVRRFRSADAFAALAGVAPIPASSGQTQRMRLNRGGNRQLNRALYTIALSQAFHHPPAMAYIARKRAAGKTWREALRALKRQLVRTVFRLLQAGARSLDLAA

SEQ ID NO: 60458 - protein, 341 aa, unidentified
MNSVKYVGLDVHQSTISVAVLNAEGRLVMQSVIATQAAAILDFIAGQRGTLQVTFEEGTHAAWLYDLLVRRVARLVVCNPRQNALLKSGNKSDPIDARKLAELLRAGMLSPVYHGENSTGGLQQLVASYTALTQDTTRVMARIKALYRSQAIACAGKKPLGKRHRQQWLEKLTAAGQRQRAEWLYAELDAVQGLRRQARQALVAENRKHAAAKLLRTMPFLGPLRAAVLLAKVQTPYRFRSKRQFWAYCGLGLETRSSADYVIQNGEVVRRRRALYIRGLNWNHSHPLKNLFREFYQARVAKGMQPALARLTLARKMAAIALILWKKGEVFEAKHLNSQAA

SEQ ID NO: 60459 - protein, 377 aa, unidentified
MKRIKFVGLDVHAETIAVAVAELDGEVRSIGVIPNRCESVRKLVKKLGPVEELRFCYEAGPTGYVLYWQLTALDAKCEVVAPTLVPVRAGDRVKTDRRDALKLARSYRAGELTAVWVPDAAHEALRDLVRAREAAKRDQLRARNRLTKFLLRHGKRPPEGVNPWTLNYMNWVRKDVHFEPLAQQATLLDYLHEVEHMAARVTRLEQAIEEAVQLAPHQMREVIEALQALRGIAKVSAVTIVAELGELSRFGEARQLMAYSGTVSREHSSGESCKRGGITKTGNVHLRRIVVEAAWAYRHAPAVTACLRKRQERVSEEVKEIAWKAQHRLHGRYRKLTARGKNTGKVITAVGRELLGFIWAIGVHTEATRGQAPSAAA

SEQ ID NO: 60460 - protein, 338 aa, unidentified
MFYVGLDIHTKRISICALNETGQVVQRTQVRSIAEMLRALQDLPDRFEVCYEASCGYGHFDDLLRPLATRVLVAHPGQLRLIFRSKNKNDRHDAERLAKLLYLGETPTVHVPSLEVRTWRELINCRSQVIAKRTRAKNTIRALLRSAGIAPPKQPGLWTQKGLAWLRQLTLPTESQQLRRDLLLEEIETLVRQVRRIEQQLNRQAQQTPAVARLRSIPGVGVRTAEAVAAFVDDPHRFRNAKAVGRYFGLVPCQDQSGDKNRLGHITREGAPVVRQLVAEAAWQAQRRSPTVRAYFERAQRGDPQRKKIALVATAHYLVRVMWALLKRGTVWEEKMAS

SEQ ID NO: 60461 - protein, 353 aa, unidentified
MQKEKVIKQSVGIDCGKVELVVAFGVMQVGFEEKIISNTAFKNNAEGFKKLQKWASKLTDPDVELVYVIEATGVYHEKVSLHLHNEGCKICVMLPNKVKSFSQTLTVKTVNDKTSSQAIAYLGLEKRLDAWQPPHPVYRELKQLTREREQLIEERTLCKNQLHAEESGAWPNTGSMKRIKQRVKLLNKQMTEIDAEIVAIVSKHEWLKKKLEYVCSIKGVALLSAVIMVAETNGFNLVRNKKQLVSYAGLDVVEKESGISVKNKTRISRKGNKYLRKALHFPALVAIRHNDQMKAVYNRLVSRHGIKMKAAVAVQKKILELVYVLWKKEEMFDQQYLKNKGQQLKVATLCELA

SEQ ID NO: 60462 - protein, 399 aa, unidentified
MRTDKKLWRNRKARKELARRLQSENPGLEVVHAHAAGIDVGNGAHYAAVRADRDSQPVRRFECFTADLYRLADWLQNCGVQTVAWQSTGVYWIPLYDILEERGFQVDLVNARHTKNLPGRKSDVQESQWLLKLHTYGLLNNSFQPPSKIRILRTYWRQRLQHIPGAATCVQRMQKALTQMNIQLANVISDLSGVTGQLIVRAIVGGERDPRKLAELSHPRIQASRGAIAKSLEGNWRQELIFVLQQEIQMYDTYQRRVAECDQELQKHLSAFADTVSPPGKEELPPQKKEKQNKNNPHFHLAAELQRISGVDLTRIDGVDVMVAQTLVREVGLDMSRWKTEAHFASWLGLRPDNRISGDKVLSRGTRHVLNRAATALRPGGFDPTEKPNLPRSAVPRLA

SEQ ID NO: 60463 - protein, 487 aa, unidentified
MSVVTGHVCDIGEAAKAAIPFERVSITTYPNRCGIPNEMMEEGMAQRKRTVLELAHPNAAGIDIGSASHFVAVSPDRDDEPVREFKSFTEDLEELADWLVCCGVDTVAMESTGVYWIPLYEILEARGFAVNLVNARHVKNVSGRKSDVLDCQWLQQLMSYGLLSGAFRPTDEICMLRAVSRQRDMLLASQGRHIQHMQKALTQMNVQLANVISDIVGETGQKIVRGIIAGERDGHVLAKMKNTRIRASEEKIAKSLQGNWREEHLFALKQAMVLYDNYGTLLTECDAKLESMLATLVGDDDSEPGKGRRASNSKNAPQFDVRTYLFRLCGVDLTRINGINPTTALKVIAEVGPDMTRFKSAKHFASWLGLCPGTKISGGKVLSGASKRTTNRAAQSLRLAAAALHKSQSALGAYFRRLAARLDRAKAITAVAHKLARLIYTMLTKGEEYTDQGQDYYEERYRQRVMHHLARRAEKLGMQLVPAPQST

SEQ ID NO: 60464 - protein, 366 aa, unidentified
MKKNSTVAAERKQIFKQARLTIGLDLGDRTSYYCILDEAGNVIWERNLPTTSNGIRQAFGRIPRCRIALETGTHSPWVSRQLSELGHEVIVAHARNVRLIGESSRKDDQVDARTLARLARIDPGLLGPVRHRSAQAQIHLTVIRARAVLVSTRTALVNAARGLTKSYGERLKKCGTEQMNRESAKGLSQELREALDPLLREIESLNERIAEYNGRIEQIAKEVHPEVARLKQVKGVGTLIALTYILTLDDPQRFRRSRDAGCFLGLRPGRRNSGKSEPQLHISKEGDRYLRTLMVQGAHYVLGPFGQDSDLRRWGLKLAERGGKNAKKRAVVAVARKLAVLLHKLWVSGEVYEPLRNNHKVVSAVA

SEQ ID NO: 60465 - protein, 312 aa, unidentified
MTKLICGVDIASEWMDVCLRPGGETRRFARTAEGIRALAAFCTTHGVDLVAMEATGGYEKLPFGLLWAEGVPVAVLHARAVRQFAESMGLLEKTDRIDADVIAWFAETKGIASQPPAKAAQERLEALVTRLRQLTDLRTAQGNQRRLVTDQAVLASFDELFALLARQARSLETAIAELIAGDPLWRELDKAFRSIKGVADRTVARVMAELPEIGTLSNKSASKLTGVAPLARDSGKFKGKRPVRGGRSGIRSILFVVAEVVRRHDPDFAAFHKRLTQAGKPKKVIRIALAHKLLVRLNAKARDVRNELACAT

SEQ ID NO: 60466 - protein, 347 aa, unidentified
MKYVSTIGLDLAKHVFQVHGADIAGSALFNRKLRRGEVLRFFEKLPSCLVGMEACGGAHYWAREIANLGHDVRLIPPAYVKPFVKRGKTDAADAEAISEAVIRKTMRFVPIKTAEQQADAMVLKTRALLVQQRTQSVNALRAHLAELGIIAAGGLPHVAALMTIVREGEDTRLPAAARFALMAVADQIDTLADQIFKLERAIVTEAKRDEDMRRLTTIPGVGAITAATIKALVPDPGGFKSARHFAAWVGLTPRPHSSGGKERLGGISKMGNPELRVLLVLGATAVLRIARNDDRARPWLKALLARRPFKVAAVALANKMARIIWALLNKGGIYHRPEPLSIAAVAR

SEQ ID NO: 60467 - protein, 333 aa, unidentified
MDFTYFIGNDTSKNELDIAVYKSKELLYHTEVSNESKAIRKFLKELNKLEGFNLQEAVFCMEFTGIYNNHFVYELVKKKANVWLEPASKIKKSMGMVRGKNDKLDAIRIGKYAYKNSDEARLWKPRRNVISKLHHFTTLRRRLLTIKNMLSTPLKEMDLYVEKSVSSKCKRFSKRTLNSIEADIKKVEKEIDQLINEDPGVARQVELITSINGVGKQTAIGVIVTTNEFKDIRDPKKYACYSGVAPFPYESGMFKGKAKVSHLANKRIKTVLHMAALSAIQYNVDLNRYYERKLTEGKNKMSIINAVRNKLIHRIFACVQQNGYVVRGGERAF

SEQ ID NO: 60468 - protein, 343 aa, unidentified
MQSVTTVGLDIAKSVFQVHGVDADGNVVLRRQLKRRYVLAFFQKLPPCLIGIEACASSHYWSRELQALGHSVRLMPPAYVKPYVKRQKNDAADAEAICEAVTRPNMRFVPTKTPEQQSCLTLHRTRHLFIRQQTAVINSIRAYLAEFGIVAPVGRSGVEALLEVVANANDTRLPEIARACVAALGTQLLGLKTQILAFDRRIMAWHRSNETSQRLDEIPGVGPALATALVASVADPKAFRSGRDFSAWIGLVPKQNSSGGKDKLGSISKQGDRYLRSLFTAGALAVIRYAKIHGTKHRPWLTALLARRPTKVAAIALANKMARMAWAMMTRGERYKQPVALAA

SEQ ID NO: 60469 - protein, 461 aa, unidentified
MIRRLVGVDLGIASAHTVRVLTEDGREVCRRRCEPTVDSLRRVETAALAGAPAGTVLEVVMEPTGPAWLPIAVFFTARGHRVFRVSSAKAADLRRFLSRHAKSNGIDADTLARLPLVDPAGLYPLELPGTEAAALDRRVRATDRLTVLAAQHKVRIKDLTRQLLPCSPLTGDLGVADLAVLERWADPRALLAAGPARLTALIVKASNGHLGADRAQQWRAAAAAAVELYGDHPAIAWTDLAAEVGTEVRLLRATLGELAAHARERETAYRYADLGGLARSLPGVGDVGGPVLVAGMGRPGRFPNGAAFKSYTGLAPRAAETGNTDRKGQPMSKAGSSLLRTTLIRAADTARKQDPQLARIYYTQMVERGAEHLKAVCVVAGALAERIWTVMNRQMPYVICDIDGTPVTPEQAKQIIAQNFTVPDEVRRRRRSSKTPSRKPAQQPTISSKGGRPLSKPHTAA

SEQ ID NO: 60470 - protein, 337 aa, unidentified
MKRYLGVDLHRTQFVVCTRWENGEQETRQWRIGELARFVEQLQPEDQIAVEAMGTTARFYDAVVGRVARVVVVNPHQFKVISESVKKTDREDAAALALYLEKDLLPEVRMKPKQNRELMHLAETRDLLVKQRSALKGKINNLLAMQGIELKREALSSKIALERVLVLPVSGMVQLELRVLVGQIRSLSESIAELDEQLEEEGQQLPGYENLTSIKGIGSLSATVLLTVIGKISDFADENKLAAYLGLVPRIANSNESERSGRITKQGNKLARTALVQCGLVAKRYSPYLQRFYERIKQRRGAGKAKIALARKLVKIVYDTLKNQWVFEDFRSCTLAA

SEQ ID NO: 60471 - protein, 402 aa, unidentified
MEADSTQVWVGIDVGKAHHWAAAVDQNGRQVWSRKVLNDEADILDGIGEALALADQVSWAVDISGTTSALLLALLAAHGQEAVYVPGRTVNSMSSGYRGEAKTDARDAFVIAETSRLRRDFAPVQVNAELVTELALLTGHRTDLVADRIRLLNRLRDVLTGIFPALERAFDYSAQKGPLVLLTGYQSPAALRRRGQVRLEAWLRKRGVRGADKVAAKAIAAAAAQHTVLPGQDVAGQIVADLAAQILALDERIGRLDTQIADTFARHPQAEIITSMPGIGPILGAEFVVAAGDLAGYANAGRLASAAGLVPVPRDSGRRTGNLHRPKRYSRRLRRVFYLSAQTSIVRDGPNRDFYLKKRSEGLKHTQALIALARRRVDVLWALLRDNRTFAPEGPGTAVAAA

SEQ ID NO: 60472 - protein, 318 aa, unidentified
MSLNPSTLTAGIDTSKEKLDIAVHGQSGCWEVANDQPGWRKLAQLLTEAGVRRVGIEATGGYERGVVEHLRAASFIVLVLQPIQVKAFGRARLRRAKNDKLDAALIAAFAASLDEVRDAPDSRLAELTEQLTFLEQIEEDIKRFKTRLEHIDKPGLRRFVLDDIARLKARRLSQIRHIAKQIRAHHDLAVRLDLVLSIPGIGERTALALLVRMPELGRVSREEAAALAGLAPFDNDSGQYKGQRRIAGGRARLRRSLFAAALPAAFRWNKAVMALYARLTAAGKAHNAALIACARKLLIYANTVVQRGTPWAEKPIGV

SEQ ID NO: 60473 - protein, 351 aa, unidentified
MLYIGLDVHKEFCQACVIDEHGRVRSNEKFSSTQDELDRFLAGFKNAKFVLESTGIWEFIYEGIERRGFEVQLAHPLKVRAIAEAKVKTDKVDAETLAQLLRADLIPRSWVPSKDVRDLRQLVRQRAYLVQQSTSFKNRIHAELLRRGVRRPLNFVMPFSKKSIDWMRSLEIPTVISCLNCLESVQAQIEEMNIKLLEEYNRRPDAQLIATVPGIGFYGALLIHAEIDDIKRFSHPEKLCAYAGLVPTVSQSASSVHYGAISKDGSSYLRWMLTEAVHTHTHCEPGSRLSRFHAKVARRRGKQKATIATARKLLLIIYWMLVRHEPYHSQGLDPGFPPARNECDIGIGAGP

SEQ ID NO: 60474 - protein, 351 aa, unidentified
MRTVAEEYDRVVGVDTHAATHTMTLLTATGGVVEHRVFPNSVAGLRRALSWIGNRTQDRRCLVVVEGTGSYGAQLTEHFTQGGIVVAEAPTIPAVRPRGKDDVLDSARIGRAVLGLRLDQLCWPRAGGTRTAIRVLVSARDQMGTERTKTINSLTALVRSVDLGVDARKALTSAQITTIAGWRTRDEDPAVGACRREAIRLASRIRALGRDLAANMAELRQFTAAEVPELLDLPGVGPVVAGTILLAWSHPGRVRSEAAFAALAGTSPIPASSGNTIRYRLNRGGDRQLNRVLTTTVLVRMRQDQATRDYLARRRAEGRTTKEIMRILKRYIARQVFRVLTAAHPTPASPA

SEQ ID NO: 60475 - protein, 286 aa, unidentified
MPQSRTLYVGFDVHKESIAVAYIAQAPHAEVVSLGNSGTRQCDIDKLIRRLQSKSPHLVFVYEAGPCGYWLYRYLTKKGQGCWVVAPSLIPKKPGDRGKTNRRDAITLARLMRSGDLTPIYVPAIEDEAIRDLCRARAEAIRDLKTAQFRLKAFLLRHAIRYTGRATWGPAHLRWRSEVVCPTPQVQTWRLAPVVDALQALRGVQFTVAVTAVAELGDLTRFENPRQLMNYLGLTPSEYSTGERRRQGGITKTGNSHARRALVEGAWAYRYPAKVSRQRHCALPRQ

SEQ ID NO: 60476 - protein, 424 aa, unidentified
MKRTQNEKILQMKSETLVVGIDVGKDTHYSRAIDNRGVELGKLLRFSNTKQGYEALDSWMQKIMQEHGKTEAIVGFEPTGHYWFTLGDHLQKEGHRLGIVNPFHVKCARELDDNSPTKNDRKDPKTIAMLVKDGRYRDVYIPEDLFQELREAVIERERLLEQEIALSNQVIRWLDIRFPEFNEVFKDWSGTAAWLTLKSYPTPAKVMAAGVKGIVDTWRKGMKKPSHKKAERLIKAASESIGRMAGSEAAEASLQNLMTQYELIKQQKREIESLMQELMLRIPNASKLAAIKGIGMVTAAVIVSEIGDIHRFQDPRQIQKMAGLSLRENSSGRHKGKTTISKRGRKRLREGLFRGIITMLATNQEFRVMHQKNLTREKNPLTKMESIIALCGKLIRVMYVILTKGHDYEANKMMNDMNRSMKAA

SEQ ID NO: 60477 - protein, 408 aa, unidentified
MDVVHERCCGLDVHKKTVVACLLTPGLRGGTIREVRTFGTTTRELLALTDWLSAAGCTHVAMESTGSYWKPVYNILEGTFELLVANAQHLKAVPGRKTDVRDAEWIADLLRHALLRPSFIPSRPERELRELSRYRTALVRERASEVNRIQKVLEGANIKLASVASNVVGVSGRAMLAALVAGEEDAQMMAGLALGKLRNKKAALEEALHGRLEAHQRFLLAAQLRHIDNLDALIEEVSGEIEERLRPFQPDLERFTTIPGVGRRIAETLLSELGPEMGRFPSARHLASWTGLCPGQHQSAGKSRSGRTRKGSPWLRSALVEAARAAARSRTYLGAQYRRIAARRGANRAAVAVAHSILTIVYHILARGQTYVDLGDNYFDRLQRDRVCSRLTHRLEALGYSVSLQPAV

SEQ ID NO: 60478 - protein, 383 aa, unidentified
MTESQMIPAPDTIRNDKLYIALELSNTTWKIAFGNGFKIRLKTIAARDLEEFKQELERSKKHFGMSEDVQVFSCYEAGRDGFWIHRYLSSIGIGNMVVDSSSIEVNRRYRRAKTDLLDANKLATMLMRYLNGETKVWSVLHVPQDQDEDGRRLHREIERLKKERTAHTNRIKSLLALHGIVIKTGIGKNFVEFIDKVILWNGQKLPRMVKEEMIREYNRFVFVKQQLESLEREKKGILSEEKNKTSEKDLKLQNLKGIGPIISWNLVHEFGWRVFKNVKEVGAAAGLAPTPYASGGLQNEQGISKSGNRRVRTLMVETSWRWLTHQPGSKLSRWFMERYGGGSKRIRRIGIVALARKLLIALWRYLEQGTLPEGATVKAFYCS

SEQ ID NO: 60479 - protein, 414 aa, unidentified
MTEEETISWFVGVDWGSERHQVCLLDARGTTVGEREFPHSGEGLAELGDWLLSMASVASTVAVAIEVPHGPVVDALIDRGFVVYAINPKQLDRLRDRFSVAGAKDDRRDAYVQADGLRTDRRLFRRLQVADPRLIELRAWSRLAQELRAERVRLSNRVRHQLWRYYPQMLKLTDDLAAPWFLELWANASTPAKAGRLRKSTVERLLKQHRIRRMEAETVLRILREPAIKVAEGVAEAASIHMRSLVARLRIVNRELREAERKLDEVCTAISEIEQTSGEGLQRRDVAILRSMPGIGRINLGTLLSEASGPLSRRDYEGLRTLSGAAPVTKRSGKSLIVVRRYAAHVRLRDTVYHWARVATQRDPKCRTQYTALRKRGHSHGRALRGVADRLLALACVLLQRQTLFDPSFGRPTA

SEQ ID NO: 60480 - protein, 343 aa, unidentified
MEHYAGIDVSLERSSVCVVDATGKIVREAKVASEPEALVRFFRELGLPLARVGLEAGPLSQWLHAGLTGAGFEAVLLETRHVKAALSAMIVKTDRKDARGIAQLLRMGWYRPVHRKSPPAQEVRALLVGRKLLQGKLVDVELGIRGILRGFGLKLGEVSKGRFAARVRELVAGQPMLEQVAEPMLEAREALRREFHVLHRAVLAIVREDAVCRRLMTVPGVGALVAVTFASAVDDPARFRRSRSVGAHFGLTPKRYQSGETDVSGGISKAGDAMVRAALYEAANVMLTRAGKFSAVKRWGLEVAKRRGMRRAKVAVARKLSTVLHRLWVDGSEFRFGKEVAAA

SEQ ID NO: 60481 - protein, 419 aa, unidentified
MDLTDLTSTDTEPASPAPPPGLVAGVDTHQDTHTLAVLTAQGAVIATSSFPSDQQGYDDLTAHLDRFGPLMAVGVEGTSSYGAGLTRTLRQAGYDTVEVLRPSRRVRRHHGKSDPIDAIAAARTVLSGDGVSQAKDTTGPAEQLRLLLAARTRLISAATAITNSIHSLLTTAPEPLRERYRRLDTPALITRLARTRPTRTITTPQQAATSALHHMARTHQDLHHRAERLNQQMHHILTTHYPGLLAVYGAGTTVAAQLAVTAGGNPGRIHNEAAFAHLCATAPIPASSGKTTRHRLNPGGDRRANAALHRIALVRLRHDPTTKNYANRRTQEGKTTKEIIRCLKRAIAREVYRALTQPPPTDTTSTLAAHRKRHHLTQTDVAHALNTYPARISDIENHRRPLPQLTHRYHQYLTTLDTQ

SEQ ID NO: 60482 - protein, 357 aa, unidentified
MVGVQTPLSNKTSQYRLAGGDWQSLLKLIERIRRQVSRELGRPVEMISCYEAGYDGFWLHRLLEAHGVRNHVLDPASLLVNRRARRAKTDRIDVERMLRALGRYLRGEPDACSVVRVPSVEQEDARRLHRERHRLIRERVQHVNRIKGLCATQGIYDYEPLRSDRKAQLDGLRTGDGRTLPTRLKAEIIRELQRLELVLKMIAQIEAERDAIVKEAAPQHLNAGKIKALVNLKSIGPEFATTLVGEVFYRSFDNRRQVGGYIGLAPSPYSSGSMDRDQGISKAGNPKARSTAIELAWMWLRYQPDSTLSIWFRQRVGDRKGRVRRIAIVALARKLLVALWRYLETGLVPAGAVFKTR

SEQ ID NO: 60483 - protein, 403 aa, unidentified
MSHHADYAALVGIDWADTKHDFCVRATGSEQEEYGVMGSMPEEIDQWARGLADRFPGGKIAVCLEQSKGSLIYALLKYDHLVLYPINPRMLAKFREALAPSGKKDDPADAQLLLELVSKHRAKLKPWRPADEHTRTLQFFVEHRRKLVQDKTRLTNRLTSVLKGYFPHVLRWFAALDTPLVCDFLKQWPTLEAVQTTDDTALRAFFEAHRAHNPAINQRRMDGIRQAMPATTDQAVIRSSVMVVHTLVAQVRGLAEAIRRFEQELEELTRAHADFQMFASLPGAGPVHASRVISALGTDRSRYECVEDFLTFTGMAPIIERSGKTIVTHFRWCCPTCLRQSFHECAGQSIPYSRWANAFSRPQRMRGKDHQAAVRSLACKWTRMIFQMWKRRTPYHERISMAA

SEQ ID NO: 60484 - protein, 369 aa, unidentified
MADLTLFIGLDVHKKTISVAIVEASGGAPVRFYGTIANTPDSLRTLCRKLSRSGEQLHFCYEAGPCGYGVQRQLTRLGHRCDVVAPALIPRKVGDKVKTDRRDAMMLAQTLRAGQLTAVWVPDEAHEAMRDLVRLRAQAVRDLRKTRQQLLSFLLRHGLISPYGHWTKMHRRWLGELVFAHPAQHLAHEEMLQRIERAEALCDRLKAAILELVPQWSLAPVVEAIQALRGVSLIVASVIVAEVGNFGRFDSPRQLMAYLGLNPSEHSSGATIRRGAITKTGNTLARTCLVEAAWTYRFPARVTQIIRNRLLGLPEPIRNVAWKAQVRLSARYRRLAAAGKPAPKVVVAIARELVGFIWAIARMVEPKFA

SEQ ID NO: 60485 - protein, 323 aa, unidentified
MSAFVGIDIAKNSFDIATPLDNGKFRTKAKLANNPKGYQVLLDWLSTHSEPSAWVVMEATSVYHQGVADCLHAHGYRVCIVNPAILHQYGKDELRRVKTDKADAKLIARYAQDKHARLREWVPEPAPRRRLRALVRRLEDLQEIQQMESNRLDVAEDKVKASIESVISHVKQQIDETRKAIKDNIDDDPDLRQKRDLIVTIDGLGDTTAALILAELGDPLDYKGPKSIVAFAGLDPRCASSGESVGPTHISKTGSKRLRAGLYMPGMVGLKHNAVLRELKTRMRANGKAPKEIICAAMRKLLHLVYGVLKSGKPFDVDIALAR

SEQ ID NO: 60486 - protein, 411 aa, unidentified
MDVLYERCAGLDVSKRDAKACVRVTTGGKITQTTTTWTSMTNQVHELAQYLLRERVGRIVIEATGDYWRQFYFILEEAGLNVQLVNARDARNLPGRKTDVSDAAWLAQLGAHGLVRSCFVPPADIRRIRDLTRARTAITDERSREIQRLEKMLEGSGIKLSSVATDITGASGRAMLEALIRGEDDPETLASLAKARMRTKIPQLIEALTGRFNDHHAFMAKLFLDRIDAQTADLERVEARLEALMTPFAPARELLSGIPGISNRIAEVIIAETGADMAVFATSGHLVSWAGTAPGANESAGKAKPTGTRPGNRYLKRALGTAALSVSRSQSTYLGAKYRRIKSRRGPMKALVAIQHSMLTAIWHMLTNGEIYTDPGPDYFIRQRPAQTQIRAIHQLEALGYTVTLEPRPAA

SEQ ID NO: 60487 - protein, 439 aa, unidentified
MSDKLQKVYSHAAGIDVGSLKFFVGVENEEVKDFDTYTNGCHQVVEYLQLKGITSVAMEATGVYWTTLHDMLVSVGIEVFVVNGRHVKHVPGRKTDVKDCMWIKELHSYGLLRKSFIPPATVREMRHYVRLREQHIEQKVTAVHRMDKSLIMMNIRLSSVVSDIQGESSMRIINAILQGERDGSKLLALCDVRILKKKEILMKESLNGFYKEEQLFALQQAWDQYTFAAQQIKQCDERIGKLLQVLTEHTPEPVLNKKPKRIYHNKPDVEDLHKLVQKLYDGKDLTVLPGITSYSLLKFFSVTGSDFSAWGNEKNFTAWLGLAPSKYQSGKSRKYKKIQMNTEGGQILKECVQPLLRSKHIALGQFGKRIAGRRGPGVAIKAMARKLACWIYWMVTKGMGFVENGIKAYEEQVNKQKIKWLERQAKALNLQLLPNPRVH

SEQ ID NO: 60488 - protein, 385 aa, unidentified
MTNQDQGTTFIARDYEIFGGLDVDKKSMAVTFRDHGIMRKSFRLPNSASQLLSYTRKHFPGQRVAFVYEAGPTGFGLHDELTAASHPCLVVSPSMVPTVQRKRVKTNRLDSLKLAEGLRGGQLRGIHVPAPGYRELRHLVQLRDTQMGQLRATKCRIKSLLLYEGIPFPAANGKWSGAVLRELEALPCNATVRFKLDQLIDALQFHFLAAAKVQKQIRYFCQNDPELRGCISFLVSLPGVGTITATHALARLGDWRQIKDVRQIAGFLGLVSSEHSTGDKENRGEITRIGDSRLRNKLIQCAWTAIRKDPELRAFYRRIYERQPKKVAARKAIVAVARKLTTRMYAVLKEQRPFVIRADSSIAPLTAEETGGPRERLDAAQNDQP

SEQ ID NO: 60489 - protein, 341 aa, unidentified
MCEYDGPQVVGIDLHRRRSVIVRQSEAGEHLSTVRIVNEPAALLAEIGKAGQRPQVVLEATYGWYWAADVLADAGAVVHLAHPLGIKGFAYRRVKNDVRDATDLADLLRMGRLPEAWIAPPAVRQLRELVRHRAKLVALRSGLKASVHAVLAKQGLHIPVTDLFGARGRRELAAAPIDAPYRARVNSLCRLIDAYDFEIDLAAKLVAQRLAHDPGYHTIQQIPGVGPTLAAVFVAEIGDVHRFRGPRQLCSWAGLTPRHRESDTTVHRGPITKQGSTLLRWAAVEAAQKLPDTGWLTATRAAITVRRGRNTATVAVARKLLTLVYYGLRDGHIRCLAATGT

SEQ ID NO: 60490 - protein, 309 aa, unidentified
MIITPDAVGIDVSKHHLDIFDGATAKASRLPNDLRSIETWLQGLGDERRVIFEATGAYDAALRRALSEAGVRFARVNPTAARCFAKAAGYLAKTDQVDARMLAAMETALRPRLAEPPSPAAEGLAWLHKRRDQLVATRKQERTRRREARQAELLTSLERHLAFLDAEIEALEAQIAALVADEPALKRDARLLVSLPGIGPAVSACLMALMPELGQRSPKTIAALAGLAPINQDSGLKRGQRSIRGGRKRVREALYMAAVAAARSKSRFGADYRRLRAAGKPAKLALIAIARKLLITANAIIRDQQPYAA

SEQ ID NO: 60491 - protein, 406 aa, unidentified
MSEAEFDWFVGIDWASQEHEIRLLDAQGRDCGRRCVAHSGAALGELADWLMEQSGGRPDRVAVAIELVRGAVVEGLLTRGFAVFGINPKQLDRFRDRYTVAGAKDDRLDAFVLGDTLRTDRPRYRRLQLGDPKIIALRALVESEEDLGGEIRRLANRLRALLESYYPQVLALCPAADESWLWSLLEIAATPERASQVTKARLTRLLRDHRIRRVEASEVMTTLRQKALPVAPGTSEAASGQVLLLLARLRLAHSQRSRCEKKLKTALEELANDPEGDAVLLQSLPGIGRVVSAALLVDAGDLLLARDYSRLRSQAGIAPVTRRSGKRKTVVMRRACSSRLRRAMYHWAFCSMQRSARSREIYAAARARGQSHGRALRGLADRLLRMLVAILKTRTPFDPERLSAPA

SEQ ID NO: 60492 - protein, 348 aa, unidentified
MHEISRIGLDIAKRWFQVHAATADGKTAFSRKLSRDGVLGFFAGIEPCDVALEASGSAHYWAREIGKMGHKVRLIPPAYVKPFVKRGKNDAHDAQAICEAAARPDMRFVPVKSEEQQAALMLHTTRQLMVERRTALVNSLRGQLAEFGIVAPRGVAHARALIRLVRQPDNTEFSALQPEALEVFNLIIEQLDHTERAIKTLDLKIEAQLARNDKAKVLASIPGIGPLIATAIAATSPDPSVFKSGRDFAAWIGLVPRQRSSGGKQRLGHISKQGNPYLRKLLVLAATSHLRWNGKRTCGLSAWIRELLRRRPARLVAIAVANKLARICWAMMRTGEIYRSVTMPTATA

SEQ ID NO: 60493 - protein, 346 aa, unidentified
MGKSIINLSSVTTVGLDLAKHVFQVHCVDASGRVVVAKAIRRNKLLEFFASLAPCLVGLEASGSAHHWARELITLGHEARMMPPAYVKPYIRRQKNDASDASAICEAVTRPSMRFVGVRSLMNQAALMRHKAREMLVTQRTQLLNGLRGHLTEVGVIAPQGLRCARELADLIEACDETIPFEVCEALAPLVVQLRNLDEAIAQLDRIIAKLAQKDETARRLMSVPGFGPITASAMAAAIQDTSSFAGPREFAAYLGLTPKQNSSGGKPKLGRISKMGNRYLRKLLVVGAHAVLFHRKPHTDPLRMWAKKLIDKKPFKLVAVALANKMARIAFAIMRGTTVYREIPA

SEQ ID NO: 60494 - protein, 302 aa, unidentified
MDISKEALDVSLAGQSPGRFANDAAGIAELIKALKKEPGAVQVICEPSGGYERDLLEALWAAAIAVSLVNAARIRAFARAQGLLAKTDQIDASVLREFGELLRPEVLEAPSPQRQRLAALVQRREQLVIILSTEEQRLAQSRDAGVRKMGASLIKELQAQVEQIEKMIEKQIDDDDTLKGQSERLQQVKGIGKVTASTLLAELPELGKLSRNEAGALAGVAPYNRDSGAHRGRRTIRGGRVKVRRVLYMAALVATRFNPILKAFYQRLVAAGKPKKVALTAVMRKLVVLLNHLLKKPEFKLA

SEQ ID NO: 60495 - protein, 356 aa, unidentified
MTTAQKQSCMFIGIDVHKDTHTAVGISPYGEKMFEITVGNYQEDFEKLNLKVKEHSSVLSPYIGLEDVRGYGERLAGYLYEKYPVYHVPSILVDRARQNATHPEKSDSLDALGVAKVMIQSIDTLLPYTISQESEKAKQLKEISIDREDLVLERTRLKNQVHTLLYRIYNTEYEQKFKDPFSLKALRFWRNAKPKCDLFLLKTMKRKIRRLLDIHIEVSELEKDMQILLDENYTIQTASGCGVVLASTIVGEIGDINRFTSPGALSKYAGCSPRERSSGKKTRHVKSRSGNRRLNCAFHRMALSQISRSGNEKARAYFKRKISEGKSKNQALVCLRRQMVNIVWMMLKHKTTYRTA

SEQ ID NO: 60496 - protein, 319 aa, unidentified
METVQFEQLISVGCGIDVHKDVIVATIRKGNKEYETRSFSAFTSSLIELMDWCKSENVSHIAMESTGIYWKPLYNILEENFEIILVNARHIKNVPGHKTDKKDSVWISKLLLSGLLKGSFIPPQEIRELRDLIRYKKKKTQFIASEKNRMIKFLEDCNIKLSSVVSDTQGISATKIINDIIDGKDDVNHLLTHVHYRIKADRTDIAKALTGRVTTHHRFMLKMIRKTIDENEKLITELDKQIDLSVEKYQVELELLQTIDGVGKDTAITLISEIGVDMSAFENEHHLASWSGLSPGTNESAGKKKAHESSTAINTFNRH

SEQ ID NO: 60497 - protein, 343 aa, unidentified
MEPMYYIGLDVHKRKISYCGKDSSGKVFAEGSFPARRLDLDHWMKTLPQPWSAAMEATMFTGWIYDHLKPHAAALKVAHPLMLRAIAAAKKKNDRVDAGKICDCLRCDFLPESYMASTAIRERRRTLRYRNLLVRQMVQMKIKTSALLMEAGVSYNKQRLHKAGYFRELLATNPDIDAGLCSLLRLCRETVVRLGKTESALVRSLERDSLLVERVERLMTIPAVGPITALTWALEVGDVQRFSSIKKAISYCGLCGAEKSSGNTVQRTPLSKQRNKHLQTTLIEAAKMAPRNSPELAMLYDQEKQKGNANRATLAVARKLVAYLMAVDRGQRNFQVATRNIAA

SEQ ID NO: 60498 - protein, 377 aa, unidentified
MGTPSAQTLVDMGVGEIFQELEEVPLMTMVGGFDVHRQQITFDYVDDDGLVHWGQIRPATRDMLRHWLSEHCRDGDAEFALEGCTGWRYVSEELAAAGLGVHVGDPAEIAVLRGPKKRAKTDRADAKLLRTLLLEGRFPESWIPPAHVLEVRTAGRLYCTLMDERRGWQQRIHAQLFHQGCPPIRALLSAAGRAALVAAELSAVGRQYVDAAVRGIDELTPEIEALRTQLVDFARRQAGCRALQAHYGIGWLCAAIMWAEIGDARRFTSSDQLVRYAGLDVTVYSSDTKRSPGHLSRQGCPELRWAAFEAAKCAARRGSPDYAYYRKLAAKREGHNGKNPTLAVERKILRRCYHMLRDLGDAALALPEARPQQEVAA

SEQ ID NO: 60499 - protein, 313 aa, unidentified
MNQKEQERFVGIDISKQELVVAVRPSAELQTFSNTEEGLAALVRFLQALSASSIVLEATGGFARAAVNALALAALPVVVVNPRQIRDFARSVGLLAKTDAIDAQIIARFAEAVRPEFRPLKDLETQKLEDLNNRRRQIVEMISAEKNRLGMAPVWSQKDIRAHIAWLEKRLNKVNDNIDGLIKQSPIWSQKEKILTSVLGVGPVVSTTLLCGLPELGSLSARKLSALVGVAPFNRDSGQYRGRRSCWGGRAHVRAALYMAALTASRCNPVIRAFYLRLRNAGKPAKVALVACMRKILVILNAMLKNNTCWQQA

SEQ ID NO: 60500 - protein, 409 aa, unidentified
MRHIVGMDIHRTFAEVMFWEEGRLRPAGRIDMTRSGLEGFGRLLTKEDEVVVEATGNSMAVVRVLSPFVARMIIANPLEVKAIAHAHVKTDKIDAGVLASLRAADFLPEVWLPDADTERRRRLVARRNQVVRHRTRIKNEVHAILHAHLIPPCPHADLFGQRGRAWLAHQPLPEDERAAIERHLRELDRLGEDLQVLDREIAQAVCDDPAVRRLLTISGVNLTVAAGLVAAIGDIHRFDSPQKLVSYVGLNPRVHQSGLGLAQYGRISKRGRSHARSLLVEAAWAAAKAPGPLRAFFLRIRARRGHQVAAVAVARKLAVVCWHLLTKDTDYQWARPALVAHKTRAMELQAGAPMKKGNQRGAAYAYNVKDLRDHEIAMAEQAQQAYEEFVSRWQPRRPKTAPPAKAAPA

SEQ ID NO: 60501 - protein, 341 aa, unidentified
MKKFIRTAIDLGKNYFQVHGLESEGDGSISRKLTRSKVRDFFRQMQPCRVGMEACGSAHYWARELVAMGHEVVLIPPAYIKPYVKRGKNDAVDAAAICEAMSRPDMRFVPIKSADQQAVLMLHKTRELFVKQRTMSVNALRGHLAEFGIVAARGIGRVDELLALAQSDATLPEIAKSSVAGLAQHLECLDQSIAAVDDDIARAHRHNPTSGLLDEIPGIGPLIASVTAASVPDPAVFKSGRDFAAWLGLTPRQNSSGGKEKLGSITKQGNRYIRKMLVTGATSVLRVAHKRKGALADWINALRARKPERVVAVALANKLARICWAIMSTGESFRADTYVKA

SEQ ID NO: 60502 - protein, 399 aa, unidentified
MKGVLPMIYVGIDIAKDMHDCVIINEEGEILVDYFSFSNHMDGFNLLFKKLTSTTNDFENIKIGLEATGHYSYNILGFLTEKGFATYVLNPLHTNLYRKGISLRKTKTDKVDAHTIALMIMSKQFLKSYSDKSYHNENLKSLTRYRFELVAQRAKLKTSIARLVNILFPELETLVSTLHGKAIYMLLNEYPNAASIANVHLTKLTNLLLAASNGRFSKDRAIQIREAALHSIGSNMTSKSFELKHTISRIQYLNSLIIETDSKIKEALNDLDSNILSIPGIDHALGAMIIAEIGDMNRFDSPDKILAYAGLSPSTYQSGKVESTHAKMEKRGSRYLRYALFNAAKLVCIWDPNFKSYLSKKRAEGKHYYVAVSHAVKKLVRLIFALHKSGKVYIPTYLT

SEQ ID NO: 60503 - protein, 342 aa, unidentified
MIASTIGLDLAKHNFHVHAVDAAGLVIKTAALRRSEMIKFFQSAKPCLVGMEACATAHYWARELTKLGHEVKLIPPSYVKPFVRRGAKNDAADAAAICEAVRRPDMRFVAIKSEANQGFLMLHRARGLLVRQRTMAVCAIRAHLAEFGIIFGQGRQRIETIMPSIEEVAASLPEHARFALNSLMRTVGELNTQIEGIETKLAEVGRSDPVSNLLSSIPGVGPITSTAIAAIVPNARMFRSGREFAAWLGLTPRQNSSGGTTRLGGITKQGDAYLRHLLVIGARNIVRYPKARAKVGGAWIDALLQRRRPMIVAVAVANKLARIIWAMMTNGEMFREAHVKAA

SEQ ID NO: 60504 - protein, 344 aa, unidentified
MTIITVGIDLAKNVFAVHGVDGNGTAVLVKPRVARAQLLSLIAQLPPCTIGMEACSGAHYWARLFRQYGHTVKLMAPKFVSPYRMSGKRGKNDAADAAAICEAVSRANMRFVPVKEEQQQTVLCLHRTRQGFVEERTATYNRLRGLISEFGIVLPQKVANLRRSIHSELEDLPTHVNRCVGDLLSHADRLDEVIAGYDVAIAQAARADARSQRLMQRPGIGPTTASAIVASIGNGHDFANGRQVAAWIGLTPGQYSSGGKARLGRITKAGDPYLRSLLVMGARAVLASLGDKQDGFSRWARTLEQRRGYWRAVVAIAAKNARVAWAVLKFGDDFRLPPGSTTTA

SEQ ID NO: 60505 - protein, 323 aa, unidentified
MHYLGIDVSLATLELSDSEGAFRETYANSLSGHRKLIRQARLRLPQQCVRMVIEPTSTYHERLIASLASAGIGHVLVSPLRARRYASSLGLRAKTDRVDARMLARMGEREMLAESRPPEEGKQRLRALRRHLQWLEDEAISVRNRLGAANASPYTPSSVLRTLRRLVKDLERQAEETEREIERTVKEDQELSTRAQLLTSVPGIGVKSALLMLTELPSPEECADSRSWPAFCGATPKTVQSGKVSYAVLSRAGRPDLRAHLYMPAMVAMRANPAVAAYAARLAARGKTGKKAIMAAMHKLLRICFGVLKTGRPFDPTLHLKNA

SEQ ID NO: 60506 - protein, 384 aa, unidentified
MTLDRPDAPAGTEYATIYVAFELSKATWRIGVLLPGSQKMSRFMIDGGDTATLATRLASMRTKAERCGKPVRIVSCYEAGLDAHWLHRWLTDQGVVSYVVDPASIEVNRRGRRAKTDNIDLEKLMRVLLAYLRGEPRVCSMLHVPSVEDEDRKRRSRERERLMQERTAHTNRIKALLVGQGIRDVQPLKPGFIASLEQMHTGDGRMLPPLLKREIVREHERLMLAHKQIAVLEAESKAELRAAAPGSVAARIMHLIDLKSIGVISGEKLVNEAFYRSFDNRRQVGSYFGLTGTPYDSGTIRREQGISKAGNRRARTLAIELAWLWLRHQPDSELSRWFRQRVGDLKGRIRRITIVAVARKLMIALWRYLTTGVVPTGAALRPSF

SEQ ID NO: 60507 - protein, 356 aa, unidentified
MDNRKYIGMDVHQASISIAVSDAAGKVLMECIIETKAGTVLEFIQGLRGSLWVTFEEGTSAAWLYDLLKPHVTKVVVCDPRKNALLKAGNKNDRVDARKLSDLLRAGLLTPVYHGESGVRTLRELSRSYLAASKDLTRVMNRLKAIYRSWAIPCGGQQVYSPRHRAVWLEKLREAGVRRRAEQTYQQLDFLMGIRKETRKELLAESRKHPARKLLEQIPRLGPIRVALLIALMQTPHRFRTKRQLWNYCGLGLRTRSSGEYRYTGGQLQHARKPPALRGLNVNHNHDLKNIFKSAATQACVGKDDPLGEFYQNLLARGMEPPMARLTLARKIAAIALKIWKEGAHFDPTKLKQQAA

SEQ ID NO: 60508 - protein, 402 aa, unidentified
MNAVGIDVSKGKSMVAIMGPFGEVVRSPFEVSHTGSELSELAKLLKSLPGETRVVMEYTGYYHAPVAYSLCEAGIYVSAVNAILVHDYGNNKLRRAKTDKKDAVKLANYALDHWLTLPRYIPEEDARLMLKTCYRQYQQMCKVQTMQNNNLVSLLDITYPNVNRLFTSPPRPDGSEKWGDFVSQFWHCDCVGNLSLNAFTERYRKWCKKHGYNFSADKAAKIHEAARNHVAVMPMNETTRFLIRQAVEQLQVTQKALAAMRDQMQSLASALPEYPVVMQMYGVGKNLGPQLMAEIGDVRRFHSKKALVAYAGIDAPPYQSGQYELKSRSISKRGSSSLRRTLFLVMSVILQKSPEDQPVYQFMDKKRSEGKPYKVYMMASANKFLRIYYASVTKYLASLENA

SEQ ID NO: 60509 - protein, 356 aa, unidentified
MDSTKYIGMDVHKEATTIAVMNAAGKLVMESIVETKAATIVQFIEGLRGELYVTFEESTWAAWLYDLLKPHVTKVVVCNPRKNALLKSGNKNDRIDARKLAELLRAGLLSAVYHGETGLRTLKELCRSYLAISKDLARTMNRIKALYRSWSIPCGGVSVYAPRHRAEWLSKIMEPGVRRRAELFYQQLDGLQKLRQEARGDLLAESRKHGGTKLLQRIPYIGPIRAALLIALMQTPHRFRTKRQLWAYSGLALETHTSGEYHYVQGQLQRSKRPVALRGLNQNHNHDLKSIFKGAATKAGSAKGPFHDFYSALLAQGMKPTMARLTLARKIATITLLVWKKGVCFDAQQLKRQVSV

SEQ ID NO: 60510 - protein, 350 aa, unidentified
MATKDIVIVCDYHSENMQFLTLNTGTGEERTFKLPTTSASVREVLDEAEKALLAPGAEARGKIVWIMESTTGWARVKKLVAVRSELVVANVLQLPLPPKARRRKTDKLDNRRVLREYLGGQLPVAHQPDEVLRAQRRVVALRENLVRRTTCLRNQIRAHVMHELWEDLGDAWSGKGMKKLADLAQAMGAEDRLALELKLDELRWQTKRIARVEEELLRLYAGSEAAQRLDDIPGIAEVSAIAIVLRIGPIDRHKSADALVSYAGLCPGVHQSDGTSRSLSVGGGGSDKHLRNYLIEATTWAKTIPRYQEAHRRTLEKRGKRVARIVVARLVLRSIYQMLKTGCRFNPAAA

SEQ ID NO: 60511 - protein, 334 aa, unidentified
MYYCGMDVSDKSSTIHIIDERGAVLLRSTVFNDPDGVRQFFEGREKMSVGIEACGISARLTEEIEQYGHDVKVLHPQTIGALTRGRKTDRNDAEMLAQILRGGWYREVHKKSDDARLLRTLIGTRGKLVEIRTQLANEIQGYMKHWGSPVGSSQKANFYERVNKGLERIPDLKGIIGPLMNVLEEVRLQVKDLDRQIENKAKASSDAKIAMSHPGVGPVVAMAYLATIDDASRFRASRQVGAYLGLTARVYQSGETTLYGRITKDGDKLLRGYLLTAANALLTKSRKHCKLKAWGLKLSKKKGYSKAKVAVARRISVNLHRMLVDQKPFDYGIS

SEQ ID NO: 60512 - protein, 406 aa, unidentified
MWKLSQLLNLLKVGVLHMYSYFVGIDIAKNTHWASCISSDGEIIFEPFSFSNDATGFQKLVSKFNSLDKEKILIGLESTAHYGENIISYLFNLNFKIGLINPIQTANLRRSNIRKTKNDKVDTKIIIKALTLGNYSLITSRDINNLKLKGLCRSRRNLVTMRSKAKIQLVSYMDQLFPELSEFFKGNLHLNVSYQLLKEYSSPNEIKNIHLTKLANILHDNSQGHYNKDDAIQLRNLAKSSVGIDNPSLSLQVKHAILQIELYDEQIKEVESLYKQILDDMNSPILTIPGMSYNQAAVILGCIGDIQRFKHPCQLLAFAGLDPSVIQSGNFQARSTRMSKRGSGMLRYSLVYSAHNVVKNNQTFKEYYDLKRSQGKSHYCALGHVAHKLVRIIFKILKDNVEFNLD

SEQ ID NO: 60513 - protein, 347 aa, unidentified
MKDVTTIGLDLAKQVFQVHGADAEGAPLFNRKLRRAEVLRFFAKLPPCLVGMEACASAHYWAREIAAIGHDVRLLPPQYVKPFVKRGKTDAADAEAIAEAVTRKTMRFVPVKTSEQQAAVMVLKTRALLVCQRTQAINALRSHMGELGIIAPTGIANVKSLAVIVRDEDDVRLPSAARFALTEIVEQIEMLAARIDKLEREIVIQARKDEDMRRLTTIPGVGAIIAMAVKAFVPDPAGFKSARHFAAWIGLTPKAHSSGGKERLGRISKMGNPELRSLLTSGASAVLRNVRYHDRVWPWLKDMLARRPFKVVAVALANEIARMIWALLNRGGIYRNPMEMMEAPVPA

SEQ ID NO: 60514 - protein, 322 aa, unidentified
MNKDIKYYGIDISKDVFDVCDSTGESSQYENSVKGFKRFVKTLSVNSHCVMEATGYYHYQLAYYLLESAVKVSVENPLSIKRFIQMKLSKVKTDKSDAKMICEYAQKVEMRLWEGQSKNQVECLQISRLLDLYFKQSTAVKNKIHGENVLGKPSSLVMKSLQQSKRNIEKLIKELEARLTELVKSEHQELLTLLESIPGMGRKTAMMLIVLTDGFNRFDNAKQLCCYSGLTPTIRQSGSSVRGKSRISKVGNRKLRNLLFMCSFTACKHNKSCKQMYDRIVAKGKSKKLALIAICNKLLKQAFAIAKSGLPFDQSYRSKLGI

SEQ ID NO: 60515 - protein, 424 aa, unidentified
MKKVLYVGLDVHKESIVVATAPQGDTEAQLYGKIGGTLDALDKVIKKMARPDLELRFVYEAGPCGYVIYRHLKKQGYHCQVIAPSLIPTKASDRVKTDRRDARQLARLFRAGELTAIYVPDEEDEAVRDLVRARDRAMVDQRKARQRLKGFLLRLGHRYLGRGNWSAEHLRYLAQIKLSHAAQQIAFQEYLEAITVATERLERLTKAMEAALPAWKRAPVVHAVMSLRGVALINGMTLIAEAGDLTRFDSPTSLMSYFGLTPSEYSSGEKRVQGGITKAGNGACRRALVEAAHHYRIAPRVSPAMQKRQEDQSKEVRAIALKAQQRLHSRYRLLTARQKKPVIVIAALARELCGFVWAIACQLSAPEKLKTREKGTSKETKAAVQTTPAPVQSSVLTETTKKTYQLNAEKTFKKQAVNTRAIPG

SEQ ID NO: 60516 - protein, 343 aa, unidentified
MKITTTGIDLAKNVFQVHGVDERGKVALKKQLKRGQVMAFFANLPPCLIGMEACGSAHHWARQLQVLGHTVKLMAPQYVKPYVKTNKHDAADAEAICEAVGRPNMRFVPIKTVEQQAILMVHRARQGFVKARTAQANQIRGLLAEFGLVLPQGITHVTQRMPEILEDGDNALPGSFRQLLARLHQHLQQLDRQVAELEREIQRWHKESEASRRVAALPGVGALSASALVATVGNGRSFANGRQVAAWLGLVPKQASTGGKPTLLGMSKRGDSYLRTLLIHGARSVVQQVARHPERADPWLKRLLARRPKNVVAVALANKNARIAWALLAHGRDYQPHYTPVVT

SEQ ID NO: 60517 - protein, 342 aa, unidentified
MSFYCGIDLSARESQICVIDKGVKKVLEVKVPNKLEHIKQLLAPYKADLQIVVESTFNWYWLVDGLQAAGYNVVLAHTLGLHMITAAKVKTDRRDAFALAKLLLAGMIPTAYIYPAETRPVRDLLRRRGWLVQVRAGEYGSLRRLLLRQGILSHKQQEIKQATEEDLEKWFTHELVRLHASQELERIHLYSEQIETLEETILERAKKARAFEKLQQLPGIGPIIALSIYYEMGELGRFASVKDFSSYCRVVPGVAQSGQMTRRGRGSKQGNPYLKWALSQAAVHAVRCYPGVRRYYERQLQRHRGRARQMVVYNIIAHKLAQAIYHVLKEDSEYREELLFGK

SEQ ID NO: 60518 - protein, 451 aa, unidentified
MARKRKQDGKKTTHAVLPVMRPDAAGIDIGATEIFVAVPADRAVENVRSFPTFTQDLYVLAEWLKQCGIHTVAMESTGVYWIPLFQILEERDFEVCLVNARHVKNVPGRRTDVSDCQWLQFLHSVGLLRASYRPEQEVCAIRSLLRHRESLVQMAATHVNHMQKALDQMNLQLHHVISDIVGQTGLAILDAILAGQRDPQVLAKLRNERIKATEEVIAKSLVGDYRVEHLFTLRQSLAAYRSYQQFIDDCDREIRLYLEEFKPPDPPPDGSSKQTSKKPSADGVLRSELQRVFGIDLTKIPGIRTGIAQTLFGEIGPDFTKFRSASAFASWMGLCPDNDISGGKVLWVGTRKVKCRAALALRLAAQSLHHSKSALGDFYRRMRAKLGAPKAITAAAHKLARIIFHLVSTVQEFDDSKFAADQLRYQQRQEGKLRAKAKSMGFALIPLEQAG

SEQ ID NO: 60519 - protein, 310 aa, unidentified
MESIIIGIDVSKDRLDVAVRPSGEVFMVERNAAGLEKLVRRLRELSPRIVALEATGGFETVAAAALAGAALPVAIVNPAQIRAFAKAIGQRAKTDPIDAGVIAHFADATELEPRAVPDEATRLLGDLVARRRQIVEMIGAERQRETRVTVRRLKSSIARLLKALERELASVDADIDDAVRGSPAWREKENLLASVPGIGPVISRTLIAELPELGQLDRKQIAALAGLAPFTRKSGKWRGKSFIGGGRSSVRAAVFMGAMVAKVHNPVLKVFFDRLVAGGKPRMQAIIAVARKLLTILIAILRDRRPWQPA

SEQ ID NO: 60520 - protein, 592 aa, unidentified
MRWADLGSPERETASSKPSRLRRPYSIKPACGVPNGKGTRLVFSSEMTYGVDPTASGGKYPDSPVVLPHRSPSYSMGPGAATKTLVTPSCEGDPVLGDCTLFTARTNRLPSKGNDMRENKYTKKRSKNKHKDPSSSGSSVLLHPDAAGADIHPTVIYIAVPPGRDTRNVRKFSTFTRDLLAAVEWLKQCRVDTVAMESTGVYWIPFYQILNDHGFQVCLVNARHVKNVPGRKTDVTDAQWLQYLHSVGLLRGSFRPPQEICALRSISRHRESLLQMGAVHIQHMQKALDQMNLHLHHVIDDITGVTGLAIIEAILAGERDLKRLAELRHYRIQSSESTIMKALEGDYRREHLFVLRQSLTSWKHIQQQIAECDGELESLTRQLEAKFNRDPVLLAPSPRKKVSKNQPKGEWQQLLAQAFGVDLTAVPSLNTTTVQTFFMELGTDWSCFPTSGHFSSWLNLCPDLELSNGKVVRRHRRITQKRLRCALRMAALSLHRSQSPLGAEFRRRKAQLGPAGAITAMAHKIARIMWHMVTHKTPYDEAVFFAAEKKHQQRQQKNLIKRIESMGYRVTPAQHPGFGATTASPSAPAQVP

SEQ ID NO: 60521 - protein, 318 aa, unidentified
MTSTQIRPAPAGHIGIDVSKTHLDVYWDSSRRWLHVGNTPDGVTQLQQQLCAQPVRHIVVESTGGYERAVLQSLWQSRCPVSLVNPRPVRHFARGLNLLAKTDRLDARMLALYAACVRPRLTPPVTPATAALRELVTRRRQIVDQLTQQRNHREHARLDAVRASIARMEQHLRTELEGLEALIQQHIDDQPALRRRYDRLQTICGIGPQVARVLVSELPELGVLDRRKLAALVGVAPYNDDSGARRGHRHIRGGRPVVRCALYMAALVAARHNDIIREYYQGLKKRGKPRKVALVACIRKLLNHANALIMELENEQNA

SEQ ID NO: 60522 - protein, 438 aa, unidentified
MIDAEIERCAGIDVGKTFLAVCVMTGPLQEEPHTEQRHFGTNTTELEGLRDWLQREGVTHVVMESTGSYWKPVFNVLEGSVKIYLANPQEVKNRKGHKTDDKDCWWLAHLLRHSMIDPSFIPPRAIRELRDLTRRRKRLLGDATAEKNRVQKVLEDANVKLGNVLSDVFGISGQLMLEALLEGKAQPAEIAQFAKRKAKQRIPEIVQSLEGHRMSDHHRQMIRYSLKHLQFLEEQIAEMDAAIVAKIEEAKLVEQWQLLQTVPGIQERSAASILAETGADMEQFPSPQQLSSWAGVCPGNNRSAGKNKSSHTTGGNPWLRSALTECAWAAAATKNSFLNQKFWRITSKTGGKKAPALVAVAHTMLVLIYQVLKTHKPFTDRHAPPLDERQKQRMIRHHIRRLGKLGIAVSRSIVVAPEGNKRSRRCRSRLATNDPASD

SEQ ID NO: 60523 - protein, 403 aa, unidentified
MDTCFAGLDWASQTHAVCVIDAHGTVCERFEVAHDAKGLADLCRHLRHWHSPAIAIERPSGMVVDTLVEAGFTVVPIHPNAVKATRPRYRSHGAKSDASDAYLLADLLRTDGHRFKPLAPQSDDIRALRALVRGRDDLVATRVQLANQLRSLLESFWPGASVVFAELDSPIALAFIERYPTPESAARLGPKRMAAFCAQHAYSGRRSPEELLARLHEAPTPVCAELEMQAKGELARSLATTLTRLVGQIRLLTSRTEHHIASLEDGRIMMSFPRAGRICAAQILAELGSVRERFDNVERLAAEAGVTPVTYASGKSKAVAFRWACNHRLRTAITCLADNSRHANAWAADIYTRARARGCDHPHAIRILARAWLRVIWRAWTDRKPYDPALHASAQLLLQTARG

SEQ ID NO: 60524 - protein, 416 aa, unidentified
MQVLYPRCCGLDVHKRSITACCLWFNHARQRQEETRQFGTQTTELRRLSAWLREHEVKHLVMEATGSYWRPVWNLLETEGFELTLANPQHMKAVPGRKTDTKDAQWSADLFQHGLIAPSFVPTQTMRHLRDLTRTKTKVIQDHTRVVNRIEAVLEDTNIKLSSVVSDIMGVSAQAMLQFLLNGERDTAKLAELAQGRMRSKVPQLKEALEGNLQPHHEFVLKRLFMQSRFLQQQQRALSHEIEHRLNEEMRQAIALWDTIPGVDENIAMTMVAEIGIRTEQFADGPHLASWTAMCPGNHESAGKRKSGKTRKGNRWLRGALTQAAWAASHTKGTYLSALFRRISARRGAKRAIVAVGHSILISAFYMWKNKQPYHEVGDSYQDRIKPEKTGTRLLKRLAKLGYVVTLAEVPVPAAP

SEQ ID NO: 60525 - protein, 356 aa, unidentified
MTSKSKYIGMDVHKESISMAVRNAAGKIVMESVIETKANMIVEFIDGLQGEVHVTFEEGTWSAWLYDLLKPRVTKVVVCDPRRNALLQEGNQNDRVDARKLAELLQNNQLRPVYHGDHGLRALKELVRSYLTITKDLSRVMTRVKAIYRSWAIPCSGKQVYASRHRAEWLGKICEPGVRRRAELYYQQLDALRLLRQEVRKDLLAESKEHKIWKRLREIPSLGPIRAAVLLGILQTAHRFRTKRQLWTYSGLGIEVHSSADHHVVKGQLERKKKHIEIRGLNKNYNHDLKNLFKSAAVVASSKPGPFEEFYAALISKGMRPEIARLTLARKIATIVLIVWKRGVCFDANHLKPQKA

SEQ ID NO: 60526 - protein, 341 aa, unidentified
MKNLFIGVDFSKEKVDVAIIFADGLTETAARVFNEFKTTVSGYKQLVKWVEQNSCGIDSSLWLFCGENTGDYSKGLCNFLYGKGYDMWLENAKSIKDASGLRRLKSDRADASMIAEYAMRNYDKAVMYEPLSESLAQLRELFLYRQMVVRHRCSFQVRRGEKRLTMEKSPIKTMISQSGRHIVSELNKEVEKIDKRIAELIKSDEELTEVFTIVTSVPGIGTQNAVCLMVYTDNFRRFNYDSRKISCYYGIAPFGKDSGTSVHSDPRVHYMANRQIKAMLTQAALAAVNFNPIMARYYMRLVERGKKKQVALNNVKNKLVHLVTAMVRNRQLFSPEYKISA

SEQ ID NO: 60527 - protein, 346 aa, unidentified
MEQYVGLDVSLKNTAICIVDRTGKIEREGMVASDPAAIAAFVRLHAPHVARIGLETGATSTWLWTELNKMRLPVICIDARHAKAALKMQINKSDRNDAVGIARIMQCGWYKEVRVKGLDSHAIKAVLVSRALLVKIKRDLENQIRGLLKNLGLVIGRAKMNMFVVRAAELIEDRPELAAAVEPLLKAREAVEKQIADLDRKVMRLARNDVQVRRFMTAPGIGPITALCYLATIDDPTRFKRSRSVGAYVGLRSRRYASGEVDWTGRISKCGDPMLRSYLYEAAGVLLTRVAKWSVLKAWGMRVAKRSGLRKAKVAVARKLAVILHRMWVDGTEFKWSSKEVATQPA

SEQ ID NO: 60528 - protein, 399 aa, unidentified
MKMCDTVTQVGLDVHRKFSSASLRDASGKVIARERLDHVDRQKLRERIAQWPPNTPVILEATFGWGWLSDELQALHMQPHLASSGKVAAWRDGRGIAKSNKIDADLLGELWNEKPTPRRGVLKHWWEVWLAPQEVRDQRELLRHRMALVQAQTQVKNRIHATLHRHGIIIELTDLFGVQGRRFLSLLTEDKALRLSGRRTLKEDLILLDALRRLIARATRRFRMTMTRADTGQRLTTLPGVSTVLGYTLVAEIGRIERFASSRCLLQYSLLAPQAYDSGEEREGKPVGRRLGHAGRTTLQWAFIQAAHSAVRKDKFFRDLFNRRTNGGKQDRGRGYITVANRMCRIAYAMWKRQQNYQEVPPPRPGSQRHKELISSGSGPARARIGHELEATQAREATS

SEQ ID NO: 60529 - protein, 391 aa, unidentified
MIYVGIDVAKDKHDCCIISSEGEIIADVFTIPNNMDGFDLLLIRIKSALVELDKVKVGLEATGHYSYNILGYLLDKGLATYVINPLHANLYRKSLSLRRTKTDRVDARTIAAMMMSDVSLKPYTDTSYHNEELKSLTRYRFDKVRERAKLKQSVSRLVTILFPELEKLVPTLHLASVRALLSDCPGAKQMASAHLTHLTSLLHTSSKGRYGKEKAIEIRDAARKSIGSSMPAKSLELKHTICLMDTLDAEIGEIENEIKRIMDGIASPILTIPGISYRMGAMILAEIGDFAMFSSPDKILAYAGLSPSTYQSGQLTSSYARMEKRGSRYLRYALFNATKFVCIWDATFAAYLAKKRSEGKHYNVAISHAAKKLVRVIYHLQRTGQAYVSAA

SEQ ID NO: 60530 - protein, 403 aa, unidentified
MEVLYKRCCGIDIHKNMLVACVFISVRKKEIRQFGTMTDDILQLTQWLKEVDCEMAAMESTGSYWKPVYNIFEEEHIPVIVVNAQHIKGVPGRKTDVKDAEWIADLVRHGLVKASFIPNREQRELREITRYRQELIEERARELNRIQTVLEGCNLKLSSVLTDVSGKSSIAILKAIVSGETDPYVLSQLAEGKARNKCTELQRALRGSIHSHQQLMLKHQLEHIETLSKIIEDIDSDIEEKTKPMNKQIQLLDEIPGVGKKSAERLLAETGIEMNQFKSQSNFSSWAGLVPECKESAGKKMSTRIRKGNQHVKSVLVECARSAIRNKKSYFYSRYQRIASRRGGKRALIAIAHSMLVAIYHILKDLQPYRELGCGYYDTCNHEKIIQRNVRSLERLGVKVVIE

SEQ ID NO: 60531 - protein, 342 aa, unidentified
MQVTTIGLDLAKSVFQVHAVDEEGRVVVRKALRRAQVLQFFARLPSCLVGMEACGTSHHWARELTELGHEVRLMPPAYVKPYVKRGKTDAGDAEAICEAVTRPTMRFVPVKSAEQQAALALHRTRDLLVRQRTQLVNMLRGLLAEFGIEVARGLHHALRLAGRLSADEAPEVPPPARLVIKGLADQIGTVQLQLARLEKELLAWHRSNQLSQRLATIPGIGVISATALAASVVEPERFRSGRQFAASLGLTPLHNCSGGRERMGRISRMGDRYLRRLLVVGMTSLVRRARTQPASVDPRLSLMLARKPARLVTVAAANRTARVAWAIMTRGGTYRAPISAAA

SEQ ID NO: 60532 - protein, 347 aa, unidentified
MDYCAGIDVSLECSSVCIVDGGGKIIREAKVASEPEALIGWFGSLGLELARIGLEAGPLSQWLYAAMKQQGLAVELLETRHVSEAFKTMPVKSDRNDARNIAQLMRLGWFRPVHCKSMSAQETRAILTARKLVQSKLLDVENSLRGILRGFGLKVGKPTRAGFAGRIAELVKGHPNLEVIGEALLNVRAVLLCEFKAFEKRVRTMSRLDAKARLLMSTPAVGPIVSLTFAAAIDDPSRFTSAKRAGPLFGLTPKKYQSGETDYSGRISKLGDASVREALYEAAHIMLTKPIKGCVQLKSWAMRIARRAGPSKAKVALARKLAVIMLRMLMDNAPFNQAAKPTTAAAK

SEQ ID NO: 60533 - protein, 343 aa, unidentified
MLITTIGLDLAKHWFQVHGVDAAGKVVVKRRLRRAEVVAFFKTLEPCLVGIEACATAHHWARELIALRHEVKLMPPAYLKACVKRNKNDAADAEAICEAVTRLSMRFVPVKDIDQQSVLMMHLARKLLVRQRTMLVNALRAHLAEFGVIAPRGLRHVEQLIAAIEAESTALPELARSILRLIVNQLNDTQAKIRQVEATLAQWHRNSQLSKLLATIPGVGIMGASAIAATVCDPNLFRSGREFAAWLGMTPRQNSSGGKERLGRTSKRGDKYIRCLLVAGAVAILRHARTRATKDAEWVRGMLARKPAKVVAVALANRTARIVWAVMKRGDGYKAKEIVGQAA

SEQ ID NO: 60534 - protein, 469 aa, unidentified
MKKVCRKKTKKVNKKSRKMKKSVADRKLEMINPNAAGIDVASEEMWVCVPADRAEFNVRKFGAFTCDLYEIADWLKDCGVTSVAMESTGIYWIPLYQVLEEREFEVCLVNARQLKNVSGRPKTDRLDCSWIQRLHSYGLLMPSFRPDDEICQLRSLLRHRDALIRGAARDIQHMQKALHQMNLLLDKVISDITGVTGMAIIEQMLDGERDPATLAKLRDYRVRKPEEEIAKALQGDYREEHLFVLRQAYEAYQFAQRQIATCDDEAERWLKKTEKTIDIRKHPLPPEKTRRKKGRDNEPSYDARSYIYEIYGIDLTQIPGFGPSTIQSLLAEVGRDLSKWPTVKQFTSWLGLCPNLKRSGGKDQSSQTRKVKSRAAKALRLAAQTLRGSKSALGAFYRRLAGRIGPSKALTATARKLAVIFYNMVRFKKAYTDLGEDEYLKRQQQRQLARLKKQAARLGFELVPHAASA

SEQ ID NO: 60535 - protein, 419 aa, unidentified
MTSKSAQFAALIGIDWASQRHALCLYDCATAKRESSILEHTPEAIAQWARGLQERFKGKKIALCLEQSKGPLIYALLEYPFFVLYPINPATAARYRMAFKTSRAKDDPSDAQVCLELVLHHREKLNPWLPNDAPTRELSCLLQHRRAAVDLRTLLTNMLRDALKSYYPQALELAGQDLFAPLGCQFLLKWPSLQELQKARKESVRKFYYAHNCRRMDVIEKRLDAIAQMTPLCRDRALLEPAMVQVRMLARQLLQLGGALKEYHSKIEQLFAQHSDALIWESFPGAGPTLAPRLACAFGTQRSRYQSAVAIQQYSGTAPVTEKSGKNQHWVHRRWARPHFTHQSFFEYASQSVLHCSWAKLYLKEQMARGKAYPTAIRALAFKWQRIMFVCWRDRVPYEETIYLQSLQRRGSHLAHKLN

SEQ ID NO: 60536 - protein, 371 aa, unidentified
MEWTAPYGISCARMRLLQSQTREPSVNQIIRIGMDTSKHIFQLHGVDSAERPVLRRKLRRNQVLAFFAELPPTVVGMEACGAAHYWARELRKLGHEVRLMAPQHVKAYVKRNKNDGRDAEGLCEAMSRPTMQFVPVKSEEQQAALMLAGVREQLIARRTQLSNAIRGYAAEFGLTAAKGLDKIAPLLALIAQDQTVPAMARELFALQGKDYARLQIEIKTIEAKLMAWHRANATSRRLAQIPGVGPIVATAMVMKAPDPPLFPSGRHFAAWIGLTPKDHSTAGKTRLGKITRAGDERLRSVLVAGATAVIQQAKHGRGHPSPWVVALLKRKPPKLAAVALANKIARIAWKLMVTGESYDGARMPGVSAFAA

SEQ ID NO: 60537 - protein, 400 aa, unidentified
MKKPCIAIDVSKGESHVEVYLSLNKLFSKAKKIKHDAEGFNYILDVVKKIEEKVNEKPVILFEATGVYHKALEFFVSEQGLEYFVINPLHSAKFRKRELRSVKTDKRDCSNLARMYYNGLLKESYKEEEIYDELRQLNRYYETGISHLVKCKVNFNEKLDIVFPGYEDLFTKLYSDMSLLIIKKYNHPKSIVGKDVGTIAKFLESKTTHKKIYCMNLADKLISFSKQCCPGCDKKSIHVDILLGLINELEYYQDLTEKTLNRIINLAKTLPYFNILHSIPGIGENLAARLIAEIGDITRFENNKQLIAYAGIDPIIYQSGQMSGEHLKMSKKGNKRLRRLLYLAITCMLRNKSDNNSIRDFYKKKMQQTSGMKSMVASFACANKFLRIIYSMCINGTLYQ

SEQ ID NO: 60538 - protein, 361 aa, unidentified
MHATTVAVDLAKSVFQLAVADAAWKVIESHRLTRTQFERWFQNREVTLVIMEACGSAHHWARWLNGLGIEVKLLPAAYVRAYVKRNKTDAADACALLEAARASDIVPVRVKSVEQQALQGLHRTRSLWMNTRTSRINALRGFCREFGLAIPQGARTGVEAISRVLADPNSPVPGLIRGSMKLLVEEIRLLEARIAQLERELSAVAKHSPACTTLLTIPGVGLLTATAMVATTGGQVSHFKDARHFASWFGLTPREFSSGNRQVLGRISKRGDRYLRMLLTHGARSVLRAATVARRAGKKIDGLRTWATTVEGRTNHNKAACALANKLARICYATLRDATPYGQPASRQQRKIGRTAFAIAA

SEQ ID NO: 60539 - protein, 518 aa, unidentified
MVPGPVRRTLVTAGNNLSTDSDRKNTPFLHDLAIAGGRGGVMRSTGGERDYRTIGKRNSKTRKRQGMSLEDRPILEANAAGVDVGAREMFVSVPPDRDPNPVQVFDTFTTDLHRLVDWLVQCRVTTVAMESTGVYWIPLYDIVEQRGLKACLVNAKHMKNVPGRRTDWHECQWLQYLHSVGLLRAAFRPESEICAVRSLMRHRSELVKMAAQHVQHMQKAMTQMNLQLQHVINDITGKTGLAIIDAILAGQHNPTELAKLRDPRIKADSATVEKSLIGNWRSEHLFTLKQSRELYESYQKQILECDKEIDRLVRRFQSRVDPSEKPLPPDEKAKHSRNKAMKNKLNLEARLEFRTEVYKLFGIDVTQIPGIDSTAFQLFAEVGRDMSKWPTAGHFASWLGLCPDNDISGGRIWRGARHAKTRAGQLFRFAAYALHRNSSPLGDYLRRKKAQLGAPAATTATAHKIAVIFYTMVKNQVEYDATIWATRDLQRQKRLESKLKRQARQLGYNLVTADPQTT

SEQ ID NO: 60540 - protein, 299 aa, unidentified
MSQEKYIGMDVHQATVSAAVRDRNGNLLMECILETKADTILEFVQGLHGTLSLAFEEGTLAAWLNDLLKPHVTRLVVCDSRKAALLRDGNQNDRIDARNLAELLRTNQLKPVYHGEHGLRTLKELGRSYLTVSKEMTRTMNRIKSLYRSWAIPCPGTTVYAPRRRRECLAKIAQPGARVRAEHLYEQLDHLQAIRVRARRELLRESHKHAAVKRLRQIPSIGPIRAALLVGLLQTPHRFRSKRQIWAYSGFAVETHDSGEYRYVRGKLQRNRERITVRGLNRKPQSRPEEYFQRSGPLG

SEQ ID NO: 60541 - protein, 407 aa, unidentified
MGITCGIDWSESHHDVALIDEHGTVVARTRIDTGATGFHILLALIAEHGGSVDDTPIALETDKNLLVVALAKAGFTVYPINPRAVARYRERYGQAGGKSDPGDAAVLAHILRTDRHLHRPLPAVSEEGRAVKALARQHQEAIWALHQTVSRLRSVLLEFYPQALQAFPNLKHKAALTVLAAAPTPAAGQRLTRGRVVALLRRSGRGNHPALVEQILTDLHTPALGQPPRVEEAYGHTVRGLVAIVIAMGQAVDDLDTELAREFDQHPQAAILRSVPGLGPVLAARVLGEIGDDPARFDNPQGLRAYAGTAPVTIASGRLRYVKARKVRNKRFGDACHWWAYTMLTKSAGARAHYDRRRAAGDHHNAALRNLANKLLGRLWWCLVNNQPWDEHGAWPDHGHTENPTAA

SEQ ID NO: 60542 - protein, 312 aa, unidentified
MLPSVVYVGMDIAKATLDLHALSPSPQSRQFTNSPAGHRTLRRWLQGLGPVHVVCEASGGYERSVVLALQQAAVAVSVVNPRQARDFARAQGRLAKTDQLDAQVLAEFGERLRPAVSSAPSAAQRQLAELVSRRQPVQQLRGVEHNRLEHTTHPAVRRQVQRHLLGLERQLEQLDAWIPELIDAEPTLTQQMARLCAVVGVGRITAAVLLATMPELGTLNRRQAAALVGVAPFNRDSGPRRGHRLIGGGRPVARRALYMAALVAAFANPRFKVFYQHLIAAGKAPKVALVAVMRKLIIVLNQLLKNPEFQLT

SEQ ID NO: 60543 - protein, 331 aa, unidentified
MTNVIGIDISKATLDCAYLRNKEQKKAKRKSCINQGRGFNSLLIWSKKISGLAIQDLSFVIEPTGIYHESLVNYLYELGATVLLVNPGKVRKFAEGIGFLSKNDIIDAEVLTRYGYMATKLTVWKPVPKDVRDLQSLLKRLNTLEKELRREKNRQEKMQECLEPHPLEKRSIKKSIKRLGEEIKQFKEHIRHHIKETKSLRKGYDLLLTIPGIGEKTAWVVLVILRAKDFSSAPEVASYIGLNPIEKRSGKSEYRKPRLSKAGNSDLRKSLYFPAIVAIRKNPDVKALHDRLRGSGKTEMCAIGAAMRKLIHICFGVLKHQQPYQVQSQSS

SEQ ID NO: 60544 - protein, 418 aa, unidentified
MHETQSWFAGVDWASQKHDVWLTDASGKRLGKRTFAHSGEGLAQMCDWLIATSGGKPEDIHVAIEVPHGAVVETLLDRGFKVYSINPRQLDRFRDRFSPAGAKDDSRDAETLSSSLRTDRRAFHQVSLAGAAIIQLREWSRMADDLRADQIRHANRLREQLQRYYPQMLQFDSDLAEEWVLKLWEAAPTPAQAARLRQAGVERLLKRHRIRRIGAAKVLAILKEQALIVAPGVTEAAVAHIRVLIESIRLFTQQLKEAHRQLDKLCKLLAEPIASENEQTGPEPEQTLGAILQSLPGAGRIVISTLLAEAFETLQRADYPILRKLCGVAPVTRRSGKSRAVTRRLACNPRLRNAIHYLADAARRCDEKSKAKYLALKARGCSHARALRTIGDRLLYVACAMLKNRTLFDPALESQKCT

SEQ ID NO: 60545 - protein, 353 aa, unidentified
MKTYYVGMDVHRASIVIVVLNGAGKIVMQSVIETGAERVRGYLKQLRGQVYVTFEEGTQANWLYEVVRPLVTEVVVCDPRHNKLMQSGNKSDRVDAQKLAELLRLGSLKAVYHGENGVGALKELVRSYDCLVSDTTRVMNRLKAIYRGRAIGCAGHDIYRQDRRQQWLDKLTERGAKERASFLYRQLAALKPLRHEAKRAMVKEARRQRAYPWLMSVPQFGSVSVAQLLAIVSTPHRFRSKRQFWTYIGLAVVTRTTADHEVVNGVLRRSRRPVSTRGLNRNHNHLLKRVFKNAANGACHSGPFKAAYELRVKQGMAPSLARLALARQLAAITLAVWKHGEQFNPERMKQQAA

SEQ ID NO: 60546 - protein, 350 aa, unidentified
MIIIGCDYHPSFQQIAFVDTETGELQERRLQHREEAEKFYRELAAQGMKVRVGMEASGHARWLERLLSELQLELWMGDATEISARRVRKQKTDRQDAQLILQLLLEDRFPQIWVASWENRDLRQLLWHRHRMVQARTRIMNQLQAVALNEGLRSKKRLWREAGREQLEGFRLAPWASHRRRDLLELLDRMNPTIAKLTQAIDVEVEKCPAARRLKTHPGVGSLTALAFVLIIGKADRFQCGKQIASYLGLVPLEKSSGNLRRLGHITKQGNSLLRFLLVEAAQVTARSLPEWRSKYVHLTMRRGRKIAKVAMARKLAVRLYWMMRKEWDYEQLRKFGSHAGKPGTGDGVK

SEQ ID NO: 60547 - protein, 347 aa, unidentified
MITVKQVVGIDISKDSFDAQFAVTDEKQQQRFVALAKFRNTLPGFRKLSRWAKKMAGSSTAPLWFVMEATGVYHEHLAYYLAEQHQRVTIVLPTKMKNYVRSLDIKSKTDRLDARAIAQFGLERMLQPWQAPSTQLRILKALVREYDAATEQLTKIKNQLHAKDHSYQPAIQTLARLEAQHKLYEAQLKAIEVEIRALVEDDDDLRARIGNITSAQGVGFMTAVRVIGETNGFALIANAKQLTSYAGFDIRIKQSGLRSGKPSISHKGNSNLRRALFMPALAATRCNPALRRFYLRLVQSKANKMVALVAVARKLLCLIYALWRDNVPYQPNYRQTAVLSTAQQQVK

SEQ ID NO: 60548 - protein, 375 aa, unidentified
MEHHSEAFVALDTAKLRNAVAIADAGRNGEIRYLGEIDNTEAETRKLVAKLASKHARLTFCYEAGPTGYGLYRLIKSIGHDCIVVAPSLIPSKPGDRVKTNRRDAVNLVKLLRAGELTAVWVPDERHEAMRDLVRARDAAVKDYKIKRQNVSSLLLRLGRHYPGKKTWGRTHINWLTGLKLEHREQRIAFEEMLLAVRQVRERIERLEQAMREAVTDWTLAPVIEAVQAMRGIDMVGAIAFLAELGDLSRFENPRQLMAYLGLTPSERSTGESVKRGGITKAGNTRARRLLIEAAWSYRFPPRVSKDMQTRIGAAPQTAREIAWKAQMRLCGRFRTLTRKGKRPTIVVTAIARELSAFIWAINREVVGSHATANR

SEQ ID NO: 60549 - protein, 456 aa, unidentified
MAKRRKKAKSRSFKITSLPAQLQHINLNAAGIDIGSERHMVAVPEGRDEVSVREFGTFTADLEALAAWLKKCGITTVAMESTGVYWIPLFEVLERRGFEVKLVDARHVKNVSGRKSDVLDCQWIQQLHTYGLLAGAFRPPDEVCVLRSYLRQRGMLTQAASMHIQHMQKALQQMNLLLHNVVSDITGVTGMKIIKAMLAGERDPRRLASHRDERCKNTTATIAKSLEGNYREEHLFALRQAVDLYETYLAKIADCDEAIVKQLEQQPDATNDGPPPDQRIPARDRLRNDVDIHTLLFKKTGVDLFAIPGLAADTLLVLASEVGFDMSPWKTEKHFASWLGLCPGTKKSGGKVLAAKTKRNPNRAAQAFRMAASSLYRSQTALGAFYRRIKSRSGGQQAVTATAHKIARFFYAMLSKGQSYIELGQQAYEQRYKQRRINHLLVQAKSLGFQLVPCAT

SEQ ID NO: 60550 - protein, 474 aa, unidentified
MNSSGTLKIARNGYIVMAVVFCALGIFLMAVPEKAVKIICVLAGILFIADGIIKIIGYFSRDFYCLAFQFDLGFGILMIAVGIDISKAKSTVAVIDSDGTVLASPFTMAHTQPEMEAFVSYLKGLGEPTTILMEYTGHYHYPVLKKLQDEGFPVCIVNPYQMKKYGDVEIHKAKTDKKDALRIAAYALEKSYKLVPYSSMEQKYEDLKFLSRQYNQRISYVAKLKVQLIALLDQTMPGITRILPLNSRNPEKCALLLFIKRFKSFDEIQRIGKARFLASYDVLAKKASERSASSKGLSIYELAVDSITTRGEDPYIWLSQNQCVDLLSATQNAADEIISQMRNIAETIPEYKVLRAMHGVGDRLGPIILAEIGDVHRFHSGKALNSYAGNDAPPYQSGQFESRNRHISKRGSSALRKACYEVMQALKLIKPQDDPVYLFMLKKEQEGKPFNVAKMAGVNKFLRIYYARAMELYK

SEQ ID NO: 60551 - protein, 464 aa, unidentified
MTDKKLWRNRKERKEWARRLQSEDPGLEIVHPHAAGIDVGNGAHYVAVRPDRDPEPVRRFECFTADLHHLADWLQSCKVKTVAMQSTGVYWIPIYEILEERGFQVYLVNARHTKNLPGRKSDVQESRWLLKLHTYGLLNNSFQPPSEIRVLRTYWRQRGEHVHGAATCIQRIQKALTQMNVQLANVISDVSGLTGQAIIRAIVSGERDPRKLAELRDPRIHATHEEVAKSLEGNWRPELLFVLQQEVEMYDIYQRRIAECDQQLQKHLASFVDIIPSPTSQVEPKRKKAKPAKNAPRFELSSELQRITGVDLTRIDGIDIMVAQTLVSEIGLDMSRWKTEAHFASWLGLCPDNRVSGDKVLGRGTRRVINRAATALRMAAVTLMRSRTYLGAQYRRLRTKLGAPKAITAMAHRLARLVYRMLKYGQGYVDKGAEYYEQRYRRQQIEFLTKRATKLGLQITVAHA

SEQ ID NO: 60552 - protein, 372 aa, unidentified
MIERTTLSFIGQEIYCGFDVHKNLWSVCVRHCGRELACYSMPAHAREVGRKLRKDYPDASIHSVYEAGFSGFEAHRILVDEFGIHNIVVNPADVPTNGKERVHKSDRIDCRKLAKSLEAGLLEPIYVPSREHLLLRNLLRRETQTSGAIVRTINQLKSHWYFNGEPIPHRAGKTVLGARREQAHARGDYVAVNLIDQWHCLTESRQRIVKCEHETLAKLSLTKEIKHVASAPGIGMRSAIVLLSELWDMHRFPDKNHLASYVGLAPHLVGSGDKEETVSGGNRKQKQLHYILIQAAWRASRSDPQMISLYGRLRLRHLASQRIACIIAKKILFIIRALLLEDRDYQAIFPTREITCKQTKATRNETPPENGR

SEQ ID NO: 60553 - protein, 417 aa, unidentified
MDSLFARVAGLDVHLKSIQVAVRCRQESGKLVRQVRSFGTMTRDLRALADYLQNLGVTHVAMEATGEFWKPVWNVLEGRFTLLLVNPRHLKKVPGRKTDVTDAEWIAQLLECGLLRGSFVPSRPLRNLRDLTRQRAQLAGEHTRVANRIHKILEDANIKLGAVASDLLGQSGRKMLRALLQGEASPEEIAELAQGRLRAKIPELKLALEGNCTEHHRYLLGRLLAHLNYLEGQRRSFSQRIGQRLSELLPAAARDRLDAIPGINQTMIENVVAEIGVDMSVFPDEHHMTSWCGMCPGNEESAGRRLRSRIRKGNRWLRRAMVEAAWAASHAKKSYFRAQYRRLAPRRGKKRALVAVAHAMLVVIYHILKDNVEYRDLGPDYFDRLEPERVRRYLVKRLQHLGYDVTLAPKNADANAA

SEQ ID NO: 60554 - protein, 341 aa, unidentified
MSIVGAFDVHRRQLTFEYLDTGTGELNRGRVVPADREHLRQWLARFGGQDDVHFALEGCTGWRYVVEELAAAGIMPHLAEPADTAALRGRKRHAKTDKTDSRHLRSHLLAGDLPESWIPPGHVLEARAVVRLYKDLLDERGAWHQRIAATLFHQGVPVSASMATPAGRAAVAQMDLSAAGWQAVETGLRQVDRLTGELEPLRRQLQMISRRQPGCRALRATQFGVGAVTSVAIWAELGDVRRFGKSDDVIRHTGLDITVYSSDGKRSAGHLSRQGPQLLHWALYEAAKCAAKPASPDHGYYTATRDRRTGGLATLSVARKLARRCYHTLRELGEEAMAPAA

SEQ ID NO: 60555 - protein, 406 aa, unidentified
MADYREASIGIDVAKLKNAIAVAEPGREGEVRFWGEVDASDTSMRRIIQRIAAKFDRVHFCCEAGPTGYGLHRLIRSLGHECVVVAPLLIPRKPGDRVKTNRRDALVLARLLRAGELTAVWVPDEGHEAMRDLVRARAAAVETLRVHRQQISAFMLKHSRIYPRKKGWTMRYLRWLQEQQFDHPAHQIALQEMVEAVRVSKERVERLEKVIEEFVPTWSLAPVIRALQTLRGVDLIVAVTFATEVGDVSRFESPRQLMGYLGLVPGERSTGEKVRRGGITKAGSGRDGTCWSRAPGLIGIRQKSARESSTSLEQAPSKVREIAWKAQSRLTSRYRMLATRGKRTTVVCTAIARELTGFMWAVATRRRRSNHKSPKRTCTSRMGGGGTTAGEHPSDALWPAIDRRPQ

SEQ ID NO: 60556 - protein, 407 aa, unidentified
MDRVNACCAGLDVHKDSVWAAARCDGRQQVQKFGTSSRELLRLGDWLVDQGVKIVAMESTGVYWRPVWNLLEDRLQLMLVNAQHIKQVPGRKTDVSDCQWIAQLLEHGLLKRSFVPDRPQRELRDLTRQRTQLLGERARVVNRVHKTLEDANIKLASVATDIMGKSGRAILDALVENRLTAEQMAELVHQKMAAKKPALREALQGRVTAHHRFMLTQLLGQVDHLDRMVESFDRRIQEVMSPLEHESVQRLDEMPGFDRRTGQNVIAEIGTDMSRFPSPHHLASWAGICPGNNQSAGKRQSGKTRKANRWLKATLTQAAWGASRTRRSYFSAQHRRLTTRRGVKRATIAVAHSLLVTAYSLLSDPRPYLDLGVDYFEKQQDPEHKAQQLLRKLQRLGYAVEIKRPAA

SEQ ID NO: 60557 - protein, 383 aa, unidentified
MKSVCGLDVHKDSVYLCILSEFGELIEKVFGVLTYQLEEMRDLMLHHHVVEVSMESTSVYWIPIWRVLSPHFKLNLANPYFIKQLPGRKSDVKDAQWIAECTMKELIRGSFVPPETIQQLRQYDRRIFDLNEEIVRKLSKLDAVLQRCNIRLSNYVSNVDSKSYKAVVRAISQGITDPEELVKLIHGRIIKHHGMDVITASLKGVVSLAEIDMISQLRDELDMAEAHKEKCQARMLEICEREFPEELKRLQTIPGIKERAATSLIAEIGTDMNKFETANHLASWSGLKPRNDESNKKIKSRSITHGNVYLRKTIIECAWAASRTKDCFFSRFSFHQTQVRKKNKMKVLVAVARKMLIAVWHVLHDNTIYIDFTTDRKTSRTKG

SEQ ID NO: 60558 - protein, 326 aa, unidentified
MMNYLGIDVSKEKIDCCLFINGISGKGKSKKFSNSESGFIILTDWLSHLNINTNDLLVTLEATGIYHENLCYFLHDLKINIAISNPMRTRRFAQGMSILTKTDKVDSEVLAKYGALAPIKYWKPDSKNFRELRDLMIRRDALSTDLVRESNRLEKSTFTKTSLHVISMIKESIDSLQTRINHIDVIISELIKNDSELTNEMNLLISIPAIGQRTALQMLTLFHGKDFDNAGAAAAYVGLVPIQKQSGTSVRGATRISKSGSSRIRAALYMAAIVAIRFNPHSKVLYDRLLKNGKSKMSALCAVMRKLVYLCYGVLKNKTPYQPDYA

SEQ ID NO: 60559 - protein, 374 aa, unidentified
MEEFSKYVGMDVHKETIAVAVAEARGGEVRYLGEIANSAEAIQKLVKQLRKGDAELSFCYEAGPCGYGIHRQLTELGWDCQVVAPSLIPKKAGDRVKTDRRDSLSLARLHRAGELTAVWVPDDAQEALRDLTRAREDMKHLQRQAKQRLLAFLLRHGKSYDGKSNWTQAHHRWLEGVKFSQPVQQIVFQEYVDTVKMLSQRVAALDQQMADAAGKSVLWPVIEALMALRGVSLLTATTIVAEIGDLKRFASAPQLMAYLGLVPSEHSSGGSKSRGGITKTGNGHVRRVLVEAAWTYRHPARKTACLQRRAERTPEAVQDIAWKAQKRLCARYRSMEGRGKLKVQACTAVARELAGFIWAIGQALPQPATQAKGQ

SEQ ID NO: 60560 - protein, 468 aa, unidentified
MTADKKLWRNRKERKQWARRLQSEDPGLEVIHPQAAGIDVGNSAHYVAVRPERDPQPVRRFECFTVDLRRLADWLQSCGVKTVAMQSTGVYWIPLYEILEERGFEVYLVNARHTKNLPGRKSDVQESQWLLKLHTYGLLNNSFQPPAEIRALRTYWRQRGEHVASAATCIQRIQKALTQMNLQLANVISDISGLTGQAIVRAIVAGERDPRKLAQFRDPRIQASEEEIAKSLEGNWRPELLFVLQQELEMYDTYQRRMAECDLQLQKHLASLTDSVPPRPPEVEPEPKKGKRAKPAKNAPRFDLSRELQRITGVDLTRIDGIDVMIAQTLLSEVGVDMSRWKTEAHFASWLGLCPDNRVSGDKVLRRGTRHVVNRAANALRQAANALFRSRSYLGAQYRRLRTKLGAPKAITAMAHRLSRLVYRMLKYGQRYVDKGTEYYEQRYRNQQVQLLRKNATKLGFQITEARA

SEQ ID NO: 60561 - protein, 343 aa, unidentified
MSEYAGQQFVGIDLHRRRSVIVRTTGSGEVLESVRILNDVESLDRVIERAGEDPEVVLEATYGWYWAVDALREAGARVHLAHPLGVKAFEYRRVKNDFRDAADLADLLRMGRLPEAWIAPPATRELRELVRHRAKLVALRSHCKAEIHAVLAKCGIQVSMSDLFGVAGTALLDRLQLAAPYAARIASLRRLMDDLDFEIEVFTNAAQGRLDADPGYLAVQQIPGIGAILGAVFVAEVGDVTRFDHAPQLACWAGLTPKHHESDTHVRRGRITKQGSRLVRWAAVESVKRVGPHTRIGALRDRVAERRGGNIGAVAAARQQVEYVFYALRDGHVRALHTPRQVA

SEQ ID NO: 60562 - protein, 307 aa, unidentified
MATDIGIDVSKHTLDWCPGPSGKIQQTRNEPRCIASLVQRVIAVEPERIIVESTGGYERKLVLKLAEANLPVIVVNPRRVRSFGEGMGMLAKTDAIDAKLLALYGEKVQPPIRPILQGRDRLLADLVARRRQLIATVVSEKNRRETAARPVQRSIAAVLRVLEREIKRIDQQIDQSIEEDADRSELSELLQTTPGIGPGVTRTLLVDLPELGHLGRREIAALVGVAPFAKDSGQYRGRRSIRGGRASVRTALYLAAMTASRFNPKMREVYQRLRESGKPPKLAFIAVARKLLIALNAIARERRAWQP

SEQ ID NO: 60563 - protein, 345 aa, unidentified
MKYYFIGIDVSKEKLDATLIHYESESDIEQQLAYTTVENNPKGFRSLVSWSKKNAGRGVKTDTMLFCCETTGGYDRALCDWLYDNGLNIWRESALQIKRSMGLRKGKDDKADSEMIAHYALRFRSQATLYKPLDGNMRSLRDLFLYRQSLVADRQAKMVSSKEKQHISSKSKVDNFIYRDAQKSIDIMTKSIKECERRMIEIIKEDEEMYRNYLHLISCKGVGLVTSVMLIIYTDNFKSWSPKKMASYCGIAPFYESSGSSVFHRANTSGYSNRRLKGILTQAARSAITHNPTLRQYYLRMKAQGKPYGVILNNVNNKLVHILFSLVLHDCDFELDHEAKRALRA

SEQ ID NO: 60564 - protein, 423 aa, unidentified
MEVMYERVAGLDVHKATVVACVRLGTDRKITRECRTFDTTTDGLRILLAWLEECRCSHVAMEATGVYWMPVWKILGEGNFALIVANAAHIKNVPGRKTDLNDAMWIADLLACGLIKPSFVPEEEVQELRSLLRTRKQLGREQTRHVQRIQKTLAEANIKLDSVLSDIMGASGRRIIEAMIAGIRDPRRLAALANTRIKATPKQLYDALHGRLTDHHRFLLTLHLRQWDNLDATIREIDREVEARIARMDKEVKAGEAPFRDLIGLLCTIPGVSTLSATTILSEIGRDMSRFPTAGHLVAWAGLCPGQNESAGKRKPVRLRKGAPWLKTMLVQCAWAAKRKKDSYYKAQFFRLQARRGPQKAICAVAASILTAIYHILKNGTEHHDLGADHFNRRSTEAQTKRLVAQLTRLGFEVQLQRTAEAA

SEQ ID NO: 60565 - protein, 397 aa, unidentified
MVNVGIDLHKTQFTICVREQSGNKFEKYPTTAEGYEEFLKKVALWQRGGKEVRAGVESTGNTRYFRDRLEAVGVKVTVINTLKLKVVTESVKKTDKHDAATIAEFLEKDMLPVAQICSRESEKQRRMIKARTTLVRAQVVMKNQIHGLLTAEGMEDIRGSLQSKKGRQQALDTLNKCENGLEAQTLIETIDDLERSVNGTEKQLRRLTEGDRVVELLMSIPGCGEVSAWTIRAYTDDIKRFSSAKKYAAYCGLAPWVQNSNETVHHGKITKRGPEELRTALVQVVMGMRRMKAKTCDWRLMQRYAAMKKSKGSGRAIIATARKLAIIIWHMLSEEAEFDIGMMVDRKLTGKSETMSSTAKLAEEATCEKKDQPVSKKITGKKIKKSGVASKKRKKVG

SEQ ID NO: 60566 - protein, 397 aa, unidentified
MYIVGIDIAKRKHEAAVIDGEGAVIIKPFSFTNNCSGYNRLLAMLTKAKLPLDEVSFAMEATGHYWLALFTRLQKEGFRVQVINPVQTNSIRSFYIRQAKTDPRDALLIAEVIRFGHFSESTLHPENIYELRELCRGRHAIVSMQADVKRKVVALLDQVFPEYETAFTNMFGDTSMAILQTCPTPKELSEMPLEELCHLIEVSSHKRFRMAKAQELQALARNSFGFAMAGDVFSTMIRLYAKHLDFLKQQVREMDRKIAEIMETLDTPITTITGIGPTLGAYILSEIGDISRFSSAAKLAAYAGIDPTMRQSGEYNGVRNRMSKRGSPYLRHAIWLAASSAVLHDPALKLYFQKKRDEGKPYMASVGHACRKMVSIIYAVMRDNKAYTPCIPNEISV

SEQ ID NO: 60567 - protein, 402 aa, unidentified
MNAVGIDVSKGKSMVSIMRPFGEIVSAPFEIKHTASGINSLVELINSVEGESRIVMEHTGRYYEVLAHQLSEANLFVSAINPKLIKDFDNDSLRKVKSDKADAVKIARYTLDKWQNLKQYNVMDELRNQLKTMNRQFGFYIKHKTAMKNNLIGILDQTYPGVNTYFDSPARSDGSQKWVDFASTYWHVDCVRKMSLNSFIDHYQNWCKRKKYNFSQSKAEEIYGKAKELVPVLSKDAITKLIIKQAVDQLNSASTTVESLRTLMNETASKLPEYPVVMAMKGVGTSLGPQLIAEIGDVSRFTHKSAITAFAGVDPGVNESGTYEQKSVPTSKRGSADLRKTLFQVMDVLIKTHPQDDPVYQFLDKKRAQGKPYYVYMTAGANKFLRIYYGRVKEYLSSLPES

SEQ ID NO: 60568 - protein, 341 aa, unidentified
MTEIIRIGVDIAKNVFEVHAVNAQEQVVVRRSLRRNQVLAWFGKLPPCLIGMEACGTATHWARELSGLGHTVRLIPPAYAKAYVRRNKNDPADARAICEAVGRPSMRFVPIKTVEQQGEAVTHKARQLLIKQQTMTRNSLRGLMAEFGIVVPQGPQHISKLLVILADPGDPRIPAVARTALNAMADLLAALEQQVETLDKTIRAQVRANPIARRLDTIPGFGPILSGAIAAIVADPRHFDSGRDFAASLGLVPRQDGTGGKVKLGPISKRGNGYLRRLLVNGATAVLNGKNARNDAWQAKLLDSKPKKLAAVALANKMARIAWAVMTRQETYRPRAVAAAA

SEQ ID NO: 60569 - protein, 348 aa, unidentified
MSKHSVPAGDIAGLLRRFAQLKEKARARTGRDFPIIVIQETGLDGFWIHRMLQSEGIESHVVDAASILTSRRGRRAKTDRIDGETLVRTLMAFKRGEPRVCSMARAPTPQEEDRRRVCRERRTLVGERVTHVNRIKGLLFAQGVFGYQPLRKGRREQLEELRTGDGRPLPVHLMAQIVRELDRLEVVLEQLKTVEAERNALLKPATGAAASPPAMLLELKGIGPETAAVLWSEGLFRQFDNRRQVAAYAGLAPTPWQSGSIDHEQGVSKAGNPRLRTTMVELAWLWLQNQPASALSLWFHERVRRLGGRMRKTTVVALARKLLIALWRYTTAGVVIEGAVMKAAPATI

SEQ ID NO: 60570 - protein, 387 aa, unidentified
MPQPNDLSRSLAALDQDSTLVAVIEISQSSWLVGGIVPGVNRQPLKKLAADETALLQLLSRWRGEATKAGRTISRIAVAYEAGRDGFWLARWLRGRGIEAHVIHPTSVAVSREHRRAKTDRLDTELLKRAFLGWLRGEQRHCSMAMIPTLEEEDAKRPNRERENLVSERTRLVNRMKSALARLGIRGFKPHLRKAPERLDTLRTAEGMALPPNTLAELRRDMARLRFVMDQIREIEAARLARLEQHPEQANHAMVRLLARVVGVGIETADMLVHEILSRHLRDRKAVARYAGLTGSPDESGARRREKGLSRAGNARVRRGMIQLAWRFLMFQKDSALAQWYRRQTTDGRGATRKTMIVALARKLLVALWQLVTTGEVPEGVVLRRAA

SEQ ID NO: 60571 - protein, 406 aa, unidentified
MDLVYSHVCGLDVHKKNVVACIITPEGKEIRTFSTMTDDLIALKEFIKAKGCSVVAMESTGSYWKPIYNLLELESIKILLVNAKHIKNVPGRKTDVKDAEWIASLLQHGLLQGSFVPDREQRELRELVRYRKSLIEEKSRELNRIQKVLEGANIKLSSVVSDINGASSRSILEAIINGEENPETLAELSQGKLKNKMDELKRALKGLINHHQRMLLEIQLRHIDYLDEEIAKLDEEIKNRMLPFEKDLALLDTIPGVGRRTAEQIIAEIGTNMEQFPSAAHLCSWAGLCPGHNESAGKQKSAKTRKGNQKLRSSLIEAARAASRAKDTYLSSQYHRIAARRGANRAAVAVAHSILIIVYHILKRKQPYIELGPTYYEEKKRNMIIRQSVKKLESLGLKVTVESAAS

SEQ ID NO: 60572 - protein, 370 aa, unidentified
MLDTTTFVGLDVHARSIKAVSLDVMTGEVRAATFGYDAGAVAEWVRSVDPGARCVYESGVTGFDLQKRLSGLGVDCVVGAVSKMIKPSADRRRKNDRNDAEFLARMLSVGNVVEVWVPDDECEAARDLTRALEDARDDLSRSKQRLSKFLLRHGLVFDERTPTGRRKGNWTRAHWSWIESIRFAEGADEEVLAYYVDAVRRAAEEKARLEGLVEGEARKPRWRRRVDSLRCLKGVDTASAADLVFEAGEFSRFRNARSFAAWVGLTPSEHSSGESDRRGAITKAGNKHLRKTLVEAAWHYLTCSGRPKDLAKGQAPDRGARRHAAKGVRRLVERREALLARGVHGNKANVATARELACWVWAVGLMAEEA

SEQ ID NO: 60573 - protein, 331 aa, unidentified
MNYSHFVGLDVGKKTFDASLMSADEKELSHKSFDNTPTGIQSLLDWIAGYHLSLSKLLFCAENMGSYVTELSVSSVSMGFSLALVCPLTIKKSIGLQRGKNDRIDAKRIANYAVLHYRKLELYKLPDKDLVRLRGWIIIRDNLVKQKVSSIKLLETFSQMAKLADVTESISFLEEQLKSIKERILEVEEDMEQLIAASTSLYTNYLLLRSIKGIGIINAIVLLCVTDNFQRFDNPRKFACYCGVAPFEHTSGISIRGKTQTSSLANKEVKVYLTRAAITAISWDPQMKAYYKRKIAEGKHKAVVINAVRAKIIARSFAVIRRQTPFVTLAV

SEQ ID NO: 60574 - protein, 343 aa, unidentified
MKLIRVGVDLAKNVFQVHGVDRSEKAAWRRKLMRENWLKVLLETVERGCEIGMESCGGAHHWARRLQAHGFRVRMIAPQFVKPYVKSNKNDANDAEAICEAMSRPHMRFVSVKTVEQQDIQAVHRIRAELTKQRTAKANQIRGLVAEYGLVAPKELLHLRRALPCWLEDAENGLSARFRRLLNGLWGDLRTLDERMAELDREIAMIAQSDPAARRLQQLRGVGPIIATALVAAVGNGEQFVNGRQMSAAFGLTPRQHSSGGKERLLGISKRGDAYLRALLIHGARSVIHHSKDKDDRLSQWVTRLAARRHPNVAVVAMANKTTRMAWAMLRNGTDYQPAMVTS

SEQ ID NO: 60575 - protein, 376 aa, unidentified
MNAAGIDVSSRKSTVAVLRPFGEVVKLPFDIIHSVEGFASLVQQLKSIEGETRIVMEHTGRYYESFAMSMYRAGFFVSAVNPLAIKGYQEGISVRKVKTDKADALKIAQFAIDKWEILPHYTPMDTIRYDLKTLHRQFQLSSKTKTALNNNLIALLEQSYPGANRYQKWCKRHGYNFSEAKAVEIHEDARQRFPLVPKSDTCKLMVREAVAQLNAVSRTVETYRAEMDRLASQLPEYETVMAMTGVGKSMGPQLIAEIGDLRRFAHQKSLVGFASTDPIKDDSGDKVSDSKPSSKRGSPYLRRTLFVIMTILLQLQPPDDPVYQFLDKKRSEGKPYYVYMTAGMTKFLRIYYGKVRDCLKEKGLWEQPNVDEVNPV

SEQ ID NO: 60576 - protein, 364 aa, unidentified
MTSMTTATGFVTGGVDTHGQTHHAAVLDAVGRQLGDREFPATPAGYRALLAWLGEQGRLERVGVEGTGAYGAALARHLRAQGVAVVEVDRPDRKARRAKGKSDPLDAYAAARAALSGTATGAPKSRDGCVEAIRTLRVARSGAVKARSQAINQLKSLLITAPAQLREQLRHLSTTALLATCARLRPTDELADPEQATKTALRRLARRHQHLSEEITDADRELSNLVAATAPKLLAAFGVGVEVAGQLLTSAGDNPDRLRSEAAFAHLCGVAPIPASSGRTDRHRLNRGGDRAANNALYIIVLVRLRYDPRTREYMQRRTKQGLSKAEIIRCLKRYVAREVFHMLTVRPADHPPAVAASSLSTAA

SEQ ID NO: 60577 - protein, 351 aa, unidentified
MGEYIAFDSHKRYTWVDRQDHSTGKSRGCRLEHAPGAVRNYLSACEPGTAVAVEATGNWYWIIDEIEQAGMQPLLVNPRKAKLMMGQVNKTDKLDAQGLNRLQRNETLPTVWIPPGKLRDLRELTRTRLVLVAQRTRLKNRLSATLAKWGTPASEYSDPYGKAGRVELEKHLERLPEQTRWVSQQLLAQLDFVGAQVKQLENRLDHLVEVTEEMQWLMSMPGVGVILAATIALEIGDVERFPSAMHLASYSGTTPRVHASGGKVRYGSLRSDVNRYLKWAFAEAGNSVAVNHTRRPDQHVSQLYRRLRARKGHPKAIGAVARHLAEAAFHVLQKKEAYRDPKFGRDRTSQV

SEQ ID NO: 60578 - protein, 347 aa, unidentified
MSKLSHPLQNQLSNPQPPTVFCGVDVSAATLAVAIQQDEHAVAQREFPNTDSGHKALIACLHKRKAWARVSLEATGIYSLNLALALDAADEVEVAVLNPKVVNRFAQTLRRSKTDSADAQVLAEYSRRMDFVAWRAPSRKGLQLRTLSRYIDGLTVEHTREQNRLHAALGSAATPGCVVQDLLRSLASLQRRMVRLRREAMALIASDAILAQRFELMISIPGIAEISALQVLGELSTLSPEMSVRQWVAHSGLDPVHEDSGTSVHRPSRISRAGSRHLRRALYMPALVAAQRDPHLRAFYELLQSRHKAKLQALLAVARKLLHAIYGIFRSQKPYDGHKLFPALIPQ

SEQ ID NO: 60579 - protein, 345 aa, unidentified
MKIIGCDFHPSFQQIAICDLETGELQERKLSHADGQAERFYQELGESALIGIEATGNCQWFLDLVQRLGHEVRVGDAAKIRASYVRKQKTDKRDAGHILKLLLEKRFPQLWTPSAAMRDQRQLLRHRDKLVEIRTKVKNSLQHLAMNRGMQKKSRLWTRQGMEQFQQLAMPGWAGTRREDLLQLLKELNGQIEPLDQAVKQAAEQHPQAQLLMTQPGVGPVTALAFVLTVGDVTRFAGSKQLTSYLGLVPSEHSSGSKRWLGAITKQGNRFLRKLLVEAAQTTVRKDEGFRKEYQHRCRRRPKGVAKVAAARKLAVRLYWMLRSNVGYPEIVHIESNPRVPLGEV

SEQ ID NO: 60580 - protein, 349 aa, unidentified
MGEVSTIGVDIAKSVFQVHGVDADGAVVIRRRVGRAKVLEFFAELPPCLVGMEACATAHQWARELKKLGHDTRLMPPTYVKAYVKRGKNDAADAAAICEAVTRPSMRFVPIKSVEQQSALMLHRTRDLLIRQRTQLINALRAHLAELGLVAAKGREGLQQLVTAVTESSDERLPSNARFACHAIVAQLHAVQTQINGLDKRITQAHRANADSKRLDAIPGFGVILSTAVVATMTDPKAFKTGREFAAWIGLVPRQNSTGGKERLGSISKQGDRYLRRLLVVGAISIVRTARMRPDKHPWVIELLGRRPAKVVAVALANKMARIAWAVLAKGETYRAPTRSSSAAVAAAA

SEQ ID NO: 60581 - protein, 409 aa, unidentified
MELLYQHCGGLDVHKRTITACVRLLREDGSIQQETRTFGTMTRDLLELADWLTAADVTHVALESTGSYWKPVYNILEGKFTLVLVNARHVKHVPGRKTDVQDCQWLAQLLQAGLLRGSFIPPRPQRELRDLTRHRSQLVAEKNRVANRIQKILEDANIKLASVATDILGASGRDMLRALIRGETDCEKMADLARRQLRTKIPQLRPALEGQVTDHHRFMLGELLNHLEYLESRIEEFSRRIEEVSRPFAPAMAKVATLPGFDQRSAQNVVAEIGADMDVFPSAPHLASWAGVCPGNNESAGKRKSGRTTKGNRWLRAALSQAAWSAARKKDSYFQAQYRRLTGRRGKKRAIVAVAHSLLTIIYHMLTNASDYRELGGGYLDKRNAHRLLPKLLRRIRDMGYQVTLQEAA

SEQ ID NO: 60582 - protein, 388 aa, unidentified
MSQQAEQVIIGVDPHKLSATIEVVDEREQLLGSGRFTTDRAGYAAMRKYAKKWPRRVWAVEGSNGAGRPLAQRLLEDGEQVVDVPAKLAARVRLFDTGHNRKTDAHDAHAVAAVAVRTKTLRVLQVDGELEALRMLADRREALTRRRVQTVDRLQALLAELLPGQAKRDLTTGQAKAMLAGVRPRDIAGKTRRRIAAEELAELVAVEAKIKKATAELKTIVLARGSRLMDLHGVGPVVAARILADVGDVSRFADRNRFASWTGTAPLDASSGEQNRHRLSRAGNRRMNHMIHIAAISQIRLDTEGRVYYRRKLAEGKRPLEAIRCLKRKISDAIYRQLLADATRDEGADPGGHCGASLNSSAVDSHPPHRHFGSATPGPAEKTLRRTG

SEQ ID NO: 60583 - protein, 441 aa, unidentified
MPRRIGLDVHREFAQIAVWEDGLVRQAGQVATTPEALRTLADSLLATDEVAIEATCNTHAIVRLIAPRVARVVISNPMKTRAIAEAKVKTDKVDAEVLAQLLAADYLPAVWMPDERTQALRRQVARRAHIVKQRTRLKNQVQSILHRNLVPRPPVADLFGIKGRCWLANQPLPPDEELTVEALLRQLDFHGQELRIIDAELGRVALEREEVKRLMTIPGVDATVALSIVAAVGDFHRFPRPEQLVSYLGLNPRVRQSGGAPASHGRITKHGRAHARGMLVEAAWVAVKTPGPLRAFYERIRSRRGMQIAVVATARKLAVLCWHLIIKGEDYAFQRTSLTQQKLRKLELRAGMPSRRGQKGKAAGYSLKEVRRRERELAEQAEQAYRQLVADWQAKAPKSKPGVAAANGTRVSRPSAGQAARQASVPEPALRSGVDHALTEA

SEQ ID NO: 60584 - protein, 400 aa, unidentified
MGQPLWAGVDAGKSDHYCVVIDADGKRLLSRRVANDEAALLELINAITALADGGELTWAIDLNAGGAALLIALLIGAEQRLLYISGRTVHHASGGYRGEGKTDAKDAAVIADQARMRRDLQPLRLGDDIAVELRILTSRHTDLVADRTRAINRLRAQLLEYFPALERAFDYSASKAALILLTGYQTPDGLRRAGAARLAAWLRKRKARNADAVAAAAIEAAKSQHTVVPGQQLAAAMVARLAEEVMTLDTEIGDTDAMIEERFRRHRHAEIILSMPGFGVILGAEFLAATGGDIAAFGNTDRFAAVAGLAPVPRDSGRISGNLKRPRRYNRRLLRACYLASHIAIRTDTASRIYYDRKRAQGKRHTQAVLALARRRLNVMWAMLRDHKPYQPTAPNAATA

SEQ ID NO: 60585 - protein, 325 aa, unidentified
MSSHEIVGIDVAARTLVAIGDEVVLQPAYANTPDGRRALVTALGRSKRPVRVVLEATGIYFLDLACELAAAGIEVMVLNPKAAHHFAEAILQRRKDDPVDAAMLREYGRRMAFVRWTPPRPELFAVRALAREAQAQTKAVTAAKNRLHALTAATLTPARLIRALERQIRASEALIDQLITAARELIAGDGELQRLFERTDSVPGFAAKGAVMVMAELVILPPMGARQWVAQAGLDVREERSGTSLARKPRISRRGNKRLRQALFFPALTAARCCPEAGAFVDRLVARGKTKLQAIIALMRKLLHALHALWRNNEDFNAAKLFAKA

SEQ ID NO: 60586 - protein, 416 aa, unidentified
MLFIGDDWAEDHHDVEIEDEDGRRLARARLPEGLEGIARLHALVAEHAPAAWAELPPEQTAGQVVVGIETDRGPWVTALRAAGYSVFAINPLSAARYRQRHSTSGAKSDAGDAHVLAEIVRLDREHHRPVAGDSDLADAVKLLARAHQTAVWERTRHVLRLRSTLREFFPAAVEAFEDLAASDSLSLLARAPDPARAAKLTRGQLVAALRAARRHHVEAKADALLVMLRAPALRQPVITEAAYAAVVSGQVAIITAVNAQIAALAQVMGEHFGRHPAADIYLSQPGLGVVLAARTLGEFGDDKGRFADARARKNYSGQSPITRASGKKSVVLARYATNRRLGAALHMQAYAALTGSPGARAYYDALRGRNIGHHAALRQLANRLVGILHGCLKTGTLYDEDTAWQHHRTNTENIAA

SEQ ID NO: 60587 - protein, 355 aa, unidentified
MNSEKYIGLDVHQATISVAVLDSTGKLVMESILETKAATILEFFAGLRGTLSVTFEEGTWAAWLYDLLKPHVAKLVVCNPRKNALLKDGNKSDRIDAHKLAELLYLNKLSSVYHGETGVRMLRELARSYLTIAKDLTRVMCRLKAVYRSWAIPCAGRDVYYTRHRAEWLGKIKEAGVRRRAERLYQQLDMLQYLRQQARRELLAESRKHAITVKLRQIPSLGPIRSALAVALIQTPHRFRTKRQLWAYSGLALETRTSAEYCYVKGGLRRSKKQISIRGLNKDHNHDLKGLFKGAATRASVLPGPFQDFYQRSLAKGIKPTMARLTLARKIAAITLTLWKKGENFDADKLKSQAA

SEQ ID NO: 60588 - protein, 327 aa, unidentified
MTAYLGIDISKDNLDVFLVREDGKTEISKIENNAKGFKTLHNFLTKRVKTTLHACMEATGHYGDAIATFLYEAGYIVSVVNPLQIKSYGDSQLRRTKTDASDAALIADFCRTQHPPVWTPPPPELQELQAMVRHLNALKDMRQQELNRRKSGISSPAVLDTISKHIAFLDDQFAQLLAKIHKHINKHPHLRQQRDLLTSIPGIGDLTAFRILAELPHWTSFSTPNQVAAFAGLAPRLHQSGSSVRGRTRISKRGSARLRTALFMPAIVAQKRNPAMAIFAKRLLAAGKPKMAVVAAVMRKLLLLAFAVLKSGRRFDPHYATLLKFAS

SEQ ID NO: 60589 - protein, 363 aa, unidentified
MSVKAMSLVGLDVHARQTHAAVLVPDTGELSVSKLRMAPVEVVSFLEGLGPEVRAVYEAGPNGFGLARAARERGVVVRVVAPGSIPKGSGDRVKTDRRDAIRLARLLAAGELSFAFVPSVEDEHFRDLIRAIEDVRGDLMRARHRLGKLLLRRGERYPGPGTSWTIKHLDWLRALHFEDACSQATFVDYLASVELLMGRRTGLISALETQIPDCSHAPVIARLRCFRGIDTLTAAGLCAEIGGFTRFAKPTLLSGFLGVVPSERTSDTKRRQGSITKAGSPHARRLLVEAVHHYRYRPFIGQTLARRQAGQDPRIIEIAWRAQRRLHARWQHLHHERRKPASVVAIACARELTAFLWEAATLD

SEQ ID NO: 60590 - protein, 375 aa, unidentified
MKEKVRFLGLDVHAETIAVAIAEPDGEVRSLGTIANRAESIRKMVKKLGPVEHLKACYEAGPTGYVLYWQLAELGVVCEVIAPTLVPVKAGDRVKTDRRDAERLARSYRSGDLTAVWVPDEGSEALRDLVRARETAKQDQLRARHRLNKFLLRTGHRPAAGMKAWTLGYMAWVRQLRFKQVAQESTRLDYLHEVEHMAERVKRLEQAITEAVKLASAALQEVIRGLQALRGVAQISAVTIAAELGNISRFNTPRQLMGYSGVVPSEDSSGQRTRRGSITKSGNAHLRRIAIEAAWSYRLRPGVGPALRKRQEGVAEEIKEIAWKAQHRLHKRYCRLAAAGKDQRKIITAVGRELLGFIWAIGIKAEAIGKLRMAA

SEQ ID NO: 60591 - protein, 590 aa, unidentified
MPTTAAAVPPLLTTLIGRLAAAVPRRARTTFTELLIGAATTRGGHVTDAILAAGLSRGWTTYYWFLQRGRWAWLAVWQALLMALATLFDPLVWHVVIDDTVVERISARAPGSLVHHNHTAKPNRSRFLRGQGWLCLAAVVERRWKVGAVPLMLRLVRRGTHRGKLTSARFLLRLLGDRLGRVRLLLDAWFMRARLIEAAVADGHTVIAITLRDSRPAGHLQRRPITWRDRGAGRAPIMGPSLRRSAMGQHYVGLDVSLEMTSVCVLDEAGAIVWRGKVASTPEAIAAAIRARAPQVARIGLETGPLCTWHWHSLRALGLPVVCLDARHAKAALSLQLNKTDANDAYGLAQIVRTGWYKAVAVKSLDSHRLRTLLSSRAQLVNMRRDLSSKIRGVLKTFGRIVGKVGDRGFAARVRELAAGEPGLEEAVTALLAVRERLEQQIEALEARILRFAKRSDPCRRLMTIPGVGALTAVSFVTAIDDPARFGRSSGVGAYLGLTPRRHQSGEVDRDGKISRCGDALTRTYLFEAAGTLLSRVARWSALKAWGARLARRIGSKKARVALARKLAVLMHRVWMSGTEFRWSKEAATA

SEQ ID NO: 60592 - protein, 351 aa, unidentified
MRIIGCDLHARQQTLAMLDTETGEVVNLTLMHEGNQVREFYSQLPRPVLVGIEATGSMHWFLNLMEELGIECRVGHPATIRAAEPRKQKHDRRDADLILKLLAENRFPTIWLPTKELLDLRALVLHRHQWVRIRTRIQNALQAIALANGLRRGPGLWSYDGQAKIAFLPLLPHASYRRSALQALYRSMEEEIDNLTQQVAEQAEQRSGARRLMTHPGVGPVTALATDVFLGDPKRFLDGKALASYVGIIPREYSSGGKQRFGGVTKQGSPLLRFLWCEAGAHAVRRDPELKRFYRRKLVQKGLGKARVAVARKLAGIMFAMWRDGSEFQFKAQRQADGNATSMPKLIGTAA

SEQ ID NO: 60593 - protein, 344 aa, unidentified
MQIVSVGIDLGKTTFHLVALGVAGKVLVRKKFTQRQLLTYTVNMQTSLIGLEACSGAHFLARALRKQGHDVRLMAAQFVKPFVKSNKNDFVDAEAIAEAVERKNMRFVPIKTDDQLDLQAIHRVRDRLISRRTAVINQLRAFLLERGLVFAKTPAKLRAALPDILENADLDLTPQMRKLIDLLWKEWKTVEDQIKGLSFELERISAADPGCTRIRQIPGIGPIVATAIVAAIGNGAAFRKGRDFAAWLGVVPRQYSTGGRARLFGISKRGNVYLRKILIHGARAAVLRIKRDRAPIGAWLDALDARAPKNVVVVAMANKLARIAWALLSSGEDYRPSSNMATAS

SEQ ID NO: 60594 - protein, 360 aa, unidentified
MMHDNDSSAVLVGIDTHADTHHVAVITNYGRPLVDVMVPATASGYRKALALVAEYSQVDKVGIECTGSYGAGITRKFLDAGYTVVEVNQPNRFDRRRRGKTDQFDAYAAAEAVLSGRATAMPKGNDGLVESLRVLRTTRSSAVRDRTATINQIRAMLVSAPEPLRQKYRGLTTSKLVAALAATRPPAQPVTAAESTAVCLRHLARRYKFLDEQVADLLRQITRLLDDHAPALMEVYGAGPDSAAQLLITAGDNPERMRSERHFAALTGASPIPASSGKTNRYRLNRGGDRQANSALHHIVLVRMHYETRTREYVERRIAEGKTKREIMRCLKRYVAREVFPILKSTLEPNLGAQTLDKAI

SEQ ID NO: 60595 - protein, 364 aa, unidentified
MKRKVYVGMDVHKETIQIAYLTSNTKEMVKEQQIKHNEVHIKKFINKLKTEWNEIHCCYEAGVTGYPLYRYLKSLGVNCILVAPGKIPRQSSDKIKTDKRDAIKLARLLRSGDLESIHVPSEEDEAVRDYLRSRDSLRLDLGRNRQRLMKFLLRKGNVYSTTKYWTVSHYKWLNNLHFENEILHETFNDYYSRVRVQEENLKAMDQKIQEIAKSEAFRERVGILRCFRGVDYLTAMFLLSEVNDFRRFKTAGSFMSFLGLVPGEYSSGSKRKQTGITKTGSPRLRRILTEAAWQHRFPGTGSKIVAARRTEQPALVVALAEKASLRLHKKFRNLQLRGKTPQVMITAVSRELSGFLWAAMNLVA

SEQ ID NO: 60596 - protein, 405 aa, unidentified
MNAVGIDVSKGKSTVAILQPFGVVVASPHDVPHTGSSLKELAASIKKLRGETRVVMEATGNYYEPIARFLHEQGIFVSVVNPMLISDFGGNTLRKPKTDKKDSLKIASYALTYWVDLQQYHPQEDLRKSLKMLNRQYQQSVKVQTMLKNNLISQLDLTFPGINKLFTSPVRDSDGHLKWVDFVLEFPHRDIVAKLTLSAFKKKYQHWCDKKGYYYRNGKAEKIHAFARESVSAVSADESILLIVKQAAEMLNGALKYSHSLRTEMHRIAAALPEYETVMNLYGVGDTVGPQLMAEIGDTRRFHSRKAITAYFGYDSENDDSGTKVSKSNPMTKKGASALRRTLFTIMITLIKTQPADNPVYQFLDKKRSEGKHYYCYMNAAANKFLRIYYAKVNEALNSREHSSG

SEQ ID NO: 60597 - protein, 353 aa, unidentified
MENQESREEIILGVDTHLDIHVGVVIDAAGRVLGTLSVGTHNDGYKQLLCWAQTFGPLRRAGVEGTGSYGAALTLVLQTGGITVIEINRPDRTRRRGRGKSDATDAESAARSVLAGDARSIPKAHNGLAEGLRTLSLVRRSAVKAKTQTINQIRALLVSAPQAIRDAVYKADAAKCVEACAALSQGSISVSLASLPTALRLLAKRWTALNDELRELDAQLARLTKKAAPRLLARFGVGPQTAATLLITAGDNPTRLHSEAALAALCGTSPLQASSGKVHRHRLNRGGDRQANNALWTIAMVRMRSDARTRQYVARRTGEGLSKKEIHRCLKRYIVRELYPLILADLKDSTSSA

SEQ ID NO: 60598 - protein, 442 aa, unidentified
MANNYYLGIDVSKGYADFTILNQKKQEVENNFQLDDTFEGHNKLFKFLSNFYIQHPEAKLFAAVESTGGYENNWFKTLHKLQFTMELSVARLNPFGVSHSSKASMNRIITDKQSAKHVAEYLISYPEIVNYEVEDYFASARRQWTSIKLFTKQKTQLLNQLNSLLYTANPEILTFCRNGIRLWTLLLLEKYPTALRISKAKATSLSKIPYLSKFRAEEIIENAKQSIASANDEITEETIVMLVKQIISLKKIISRQIKLLDSNINLPDEVKLLKSFNGIGTYSAVGLLIEIISVDRFSSSKKLASFFGIHPAFKVSGDGKSGFRMSKKGRKEPRNILFNVTRYSIAHNPFIKDIYKNHLSKGISKLAAMGAIMHKILRIIYGMLRNNTSFDAQIDIDYRNKTKVIKISNIINLDRRFQNHDSKAPISKRQNKLRREKELFPK

SEQ ID NO: 60599 - protein, 355 aa, unidentified
MNEIKYIGMDVHQASTSIVVLNAAGRVLTSALVETQGQALVAFIQGQHGTLHLTFEEGTYAAWLYDLLAPHVSRIVVCDPRHNALLKAGSKNDPIDAHKLAELLRVNALRPVYHGQNSLGTLKELSRSYLCLVQDSTRVMNRLKALYRSRGVPCGGTEVYSPSHRTSWVDQLKEAGVHQRAQLLYQHLDLLGRLRREAKGALLAESRKHSVSRILRPVPGLGPVRIAVLLAMVQTPFRFRSKRLFWAYVGLGLVTRISAEFALVNGQLQRSGKAPTIRGLNPNHQRELKEIFKSAASAAVRRPGPWQQFYQRRVEAGRKPELVRLTVARKLAAVTLHLWKKGERYDVKHLKSTAV

SEQ ID NO: 60600 - protein, 354 aa, unidentified
MSVVAQTYDYVVGIDTHAKTHTLAIISTLTGGEIANETFPSTSAGMGRALTWISRRSAADPERTLISMEGTGSYGAKLRHVAAEAGYRVVEAPFPQRRVGRKLGKSDSIDAAQAARAVLGLDTSDLREPRSGQNHTALRVLTVARSSMVRERTAAINSLIALLRVVDLGIDLRQSLTGKTIETIAAWRSRDEGVGTRVSRSEATRLARQVLALDLQLEQNQADLRMLVSQFRPVLLGLTGVGPISAAVILTAWSHPGRVRSESALAALAGTSPIPASSGGTTRYRLNRGGDRQLNKAIHTIAIVRMRCDQDTKDYVAKRISQGRTKKEIIRCLKRYITRQIYRVLKEASPHPAS

SEQ ID NO: 60601 - protein, 408 aa, unidentified
MTVVGIDVSKGKSMVAAMKPGGELVAAPYEVRHSDIELSHLALDVLCMEPDTRVVMEATGRYHEPVAALLHSEGIFVSILNPLLIKQSGAGSLRKVKSDPKDALKIAKYGLDNWSTLREYTPMEAIRQQLKLCARQCDLYNKNIVMLTNNLISLSDKTFPRVNELFSSPEKADGHLKWVDFYRSFWHCDCINRMSPDAFEERYKKWCKRKGYHFSTDAADALYAASCGSYTTLPRDNNAKLLVTVAADQLIALRENQSKLEAEMLNVCKQLPEYETVMAMYGVGKSTGPHLMAELGDVRRFPHRSSIVAFAGVDPGVVGSGKMQLSSVTTSKRGSPQLRKALFQVVSTYVKCKPENEAVYQFYAKKRDEGKPFFVCTTAAANKFLRIYYARVKECLNAAESATQVEEG

SEQ ID NO: 60602 - protein, 405 aa, unidentified
MFEIEDVGVFLGLDVGKSTHHGHGLTPTGKKICDKPLPNSEPKLRTVFDKLTAKFGTVLVIVDQPASIGALPLAVARDAGCRVAYLPGLAMRRIADLYPGEAKTDAKDAAVIADAARTMPHTLRSLELTDEITAELTVLTGFDQDLAAEATRTSNRIRGLLTQFHPSLERVLGPRLDHQAVTWLLERHGSPAALRKAGRRRLVELIRPKAPRMAARLIDDVFDALDEQTVIVPGTGTLDIVVPSLARSLAAVHEQRRALEAQINTLLEAHPLSQVLTSMPGVGVRTAAVLLTTVGDGTNFPTAAHLASYAGLAPATRQSGTSIHGEHAPRGGNRQLKRAMFLSAFACMNADPASRTYYDKQRARGKTHTQALLRLARQRISVLFAMLRDGTFYESRTTNHVELAA

SEQ ID NO: 60603 - protein, 337 aa, unidentified
MIAVGVDTHKHEHLARALDSVGQILGGITITASLAGYLELIAWLRRLGDGVVVGIEGAGSYGAGLCESLLAEGIRVVEVERPRRQERRRGKSDEIDALLAAKKVLAGEGLSAPRCGGARQALAALMVAHRSCVSERTRLLNQLQSLHTTAPVALRERIGPGDGRKLAARLAKMRARSDAARTEQLIFDVLRDLARRAQQLAADAQTYKSELTRLINSLDPTLLDEEYGLGPITATKLLVCDPQRLKSEAAFARCNGTAPKPASSGQTIRNRLSRGGDRQANTALHTVALIRARHDAKTRAYIERRISEGKTRREAVRALKRHLSRSLYKRLITVPLT

SEQ ID NO: 60604 - protein, 341 aa, unidentified
MNEISMIGLDLAKNVFQIHGVDVSGAVVLRRQLRRSAVEKFFAKLPPCLVGMEACGSAHHWARLIGSYGHEVRLMPPGYVKPYVKRNKNDGRDAEAICEAVSRPTMRFVPVKSVQQQATLAVHGVRSLLVRQRTMAANALRAVLSELGIVAAQGYDGLRQLIAKLEEPSEQIPEDMRHALLKLAGQWQTLDADERVLERQIAKAARCNQDARRLMEVPAVGPIIASMVLAKVPDAKVFRSGRDFSAWIGLTGRDHGSGGKHRPGRISKQGDRMLRSLLISGASAHLRHQKARGISDPWLRELVARRPYKVAMVALAAKTARIIWAMMAKGEAYRASAPAAA

SEQ ID NO: 60605 - protein, 430 aa, unidentified
MGAMSECEVLLGQELQFSAFVGIDWADQKHAWCLQASDTRQRENGEVEHTPEAIEAWVGQLCRRFDNRPIAAAVEQVKGALVFMLSKYGSLHLFPVPPTMSAKMREALYPSGSKDDPRDADLLLELLLQHRDKLRRLSPDSEATRRVQNLVEERCNLVDEKTAQINRLTHQLKIYFPQMLEWFEQLDTELVCALLEHWSTLEELQKVSPERLRRFFRKQRCRYPELIERRLVGIRQAIPAIRDRAVIEAKSAVVKVNAQVIRSLVRGIADLDRKIEEAAAAHPDFFIFESLPGAGAVLAPRLLATFGSQRERYASAEEVQTYSGIAPVMKRSGKKKWVHFRWACPKFVRQSFHEWAGHSIAHSQWARSYYRQQRERGKGHHAAVRGLAFKWIRIVFRCGKDRVAYDESRYLMTLAKRNSPLAAVPGGTML

SEQ ID NO: 60606 - protein, 366 aa, unidentified
MNYIFVGCDSHDKTLVNKIALNREAAERRGFAATRAGRRRMVEYLKERSGKAGGAKVVVAYEASGSGFILCDELKAAEFECHVLAPTKIERSMKQRRNKNDDRDADRLLEILRGHYLAGNKIPSVWIPDLQTRDDREPVRGRQDLSQKQTTVKTQIQMLVKRHGIEKPDGMGSSWSRPYRRWLKALAEDAHQGWGKQKALGSLLRQLEFLESEIEQLDEAMAELAETPRWKPIVQAMRKEKGVGLMTALKYGTDIADFSRFRRGRQVGAYYGLVPSSHESGENGDRKGHITREGSPWGRQVLCQSAWSRVRHDEHEREVYRRLAVKNPKKKKIALVACMRRLAVRLWHVGLQAQLQMNARKPGGNE

SEQ ID NO: 60607 - protein, 347 aa, unidentified
MRFYNKQHKYYCGIDLHTKKMYVCILNSNGETVAHRNLRTDSNAFLEFIAPYRENIVVAAECMFTWYWVADLCAREGIPFVLGHALYMKAIHGGKSKNDKIDSQKIALLLRGGMLAQAYVYPAKMRATRDLLRRRNHLVRKRAELYAHIQNTRNQYNLPDPLGNLGRSKNREGVAKRFDDPSVRKNMEVDLEMIEAYNRIIVPLEREIVKSAYGHNALGYNLLQTIPGVGKILALVMVYEIETIDRFETVEDFASYCRLVKCSKESNGKNYGSSGKKIGNAHLKWAFSEASVTFIKGNEPGKQYLDRLAQKHRKGKALSILAHKLGRAAYYMLKNKVAFDQDKFLSH

SEQ ID NO: 60608 - protein, 383 aa, unidentified
MENQSSDYCVQTSVIVSVELSKRTWLVASLTPGAAKISLRTIPAGDSAALLGHLRNLESKTGERIGKPAAIRLCFEIGYDGFWLARLLRANGIDTYVLDPASFLVSRRGKRVKTDRIDAEAMIGILKAYLAGDKSVCRVVDVPTPDEEDARRVMRERGDLVHERTRIISRIRGLLALQGIQSVKAISGGDWSKQLDDMRTGDGRLLPPNLRRQIERCFGRLELLNEQIKSIERDRADVVLDEASTFPCREKAIRLEQLKGIGANSAVMLVAEVFCRKFESRRHVAAFLGLAPAPYASGDVSRDQGISKAGNHGTRVLMVELAWCWLRYQPSSELAVWYRNRFKGNGGRAAKVGIVALARKLLIALWRFVETGLVPQGAELRAV

SEQ ID NO: 60609 - protein, 343 aa, unidentified
MVTIGIDAHKRSHTVVAVDEQGRQLAAKTVGTTSADHLELVAWAARFGERRWAVEDCRHLSRRLERDLLAAGERIVRVPPKLMANARTAARSFGKSDPIDALAAARAALREPDLPVAKLDGAEREVRLLVDHREDLVGERTRIISRLRWHLHELDPGNEPALRTLNHLRNLDLLAERLAGVEGTVARIARELVDRCRGLTTEINQLEKEICALVERLAPTLLAVCGCGTLTAAKILGETAGIERFKSPDAYARHNGSAPLPVWSSNRARHRLSRSGNRQLNAALHRIALTQARLHPGARALLARRRAHGDGGLEALRVLKRHLSNVVYSALKADATTQLRLAA

SEQ ID NO: 60610 - protein, 333 aa, unidentified
MYIGLDISKKTVVAVCKDKEGNKVWEETFETNGCGLDNLIKKLQKDDEIVLEASTSGIFVYDYLVENNFSVKVANPYNLSLIYRSEKKTDRTDAEKLVDLLRTNMLPTSYIPSKESRQLRDIIRHRRSFVITNTIWKNKIRSILAREGISLDVTDILGDKALKLLEEVELGNVQKEAIDKILSIALYTETKIEEYDKELYSEFKTNKQAKLMDTIPGIDYYSAMHIMSAIVDIKRFPSDEQLASYAGLAPRISQSGEVAYTKGLMHGDGLLKWILIQNAHAAIRCSKRFRKLYLKKKRKNGSQRAIISVARKMIEIIYCMLTRGEEYREDYNN

SEQ ID NO: 60611 - protein, 344 aa, unidentified
MSEVSIIGLDIAKHVFHAHGADERGRAILSKRISRGKLLDFFAAQPRCMVALEACGGAHHWARQLTQLGHKVRLIPPAYVKPFVKRQKNDAIDAEAICEAAQRPSMRFVAVKSEQQQAAGLVFRTRDLLVRQRTQLINAIRGHLTEYGWVAPKGPSHVAMLADLIEEEEMVNSLPEAARAMFRVMLDLLAGLNSKIADLDKEIARRAREDEVSRRLMTVPGIGPISATAIAALAPPAETFAKGRDFAAWLGLTPLQRSTGGKQKLGATSKMGERTLRRLLIIGSSAVVKQASKRGAPRGSWLEQMLARKPRMLVTVALANKMARIVWALLVKQENYRAPVAAKA

SEQ ID NO: 60612 - protein, 397 aa, unidentified
MTEYAAYCGLDVGKEAHHACALDPEGKRLFDAELPQDEARLRRLFTDLSGHGRVLMVVDQPNTIGALPIAVARSMGIDVAYLPGLAMRRIADLHPGSAKTDARDAYIIADAARALPHTLRRVDVGEEALAELKVLVGFDDDLAGEATRLSNRIRGLLTQVHPALERVLGPRVSQKATLALLTQYGGPTGLRKAGRARLLQAARKANPRGADTLIEAIVAALAEQTVTVPGTAAADRVLPNLARSLADTLDQRRQIAAEVEQVLDVHPLAEVLTSMPGVGVRTAARILLEVGDGSSFPTAGHLAAYAGLAPVTHRSGISIRGEHPARSSNKHHKRAFFLSAFAALRADPNSRAYYDRKRAEGKKHNAALICLARRRCDVIHAMLRNRQPYQPRTAAAA

SEQ ID NO: 60613 - protein, 408 aa, unidentified
MKRYYIGLDWGDRLHQVYVGDDQGKKVREMKVPETVEGLAEIGRWLDEQRAEGFALWAAIEKPAGRIVDFLLDHGVEVYPVNPKAVDRVRDRYRMSGSKSDAFDAYVLAEFLRTDQAHLKALRPSSEKAQELKMLCRDQRRVVRHKTRLLNQLTTTLKEYYPRPLDAFENIETEVALDFLMRYPTAAHLGALKRKEFNRFATQQHSLSKPRCEELWEKLQKPQLAVPEHVVRAKAQLLEVLIDQLRASIKAVKTYHHKVESFFASSPAAQLATTLPGGKSGTLVAAIWAELGDAAGRWKSAGHLQAEAGAVPVTKASGKSHVVLFRFACNKHLRYSMYWFSFVSLNNSEWAKLYYRSQRDKGHNHPQALRALAAKWLKIIFVMWRDHKPYDEQFHLANIALQKMRQAA

SEQ ID NO: 60614 - protein, 425 aa, unidentified
MSEKIVVGIDVSKAFSDICILSPNNDIIKRLKISNDINGMKSLIYVLEKVEDEYEDRAVIIMEATAHYHQILANFFRKHNYEVIVINPIQSGALKNINIRKIKSDKTDAYNIALLYRIKNYNETITHSDTVNSIKKLCRQHKELTDEIVEHINRLIAFLDISFPDFKKVFTDLQGKTPLSLLEKYPTIQEVLSPENKQDIIQLIKENSHKSSSYAEAKYEKLVKAARKSIEVCIVNLSSAVLIQTTVRVIFSLQEALKAIDDEIKRLSLLDEKFHKEIVLLQSIPGVGEYTACVVLSELGDISNFSKPKELVAFFGLDPGVTQSGTYNRKNNKISKRGSPHVRSILHMLAKSNVYPNRNREYLNPVMRAYFEKKISEKPYKVVMCAIMRKMVQIIFAVLRNQKSFELRTPEEHQKLIREKSKLVA

SEQ ID NO: 60615 - protein, 309 aa, unidentified
MEPLFVGIDVSKDRLDVALRPTGDVFAVERNAAGLAALIEKLQPLAPALVALEATGGFETVAAAALAAAGLPLVVVNPAQVRAFAKAIGRHAKTDAIDAAVIAHFADATRPAPRPLPDAATRLLADLVARRRQIIEMIGAERQREKRAPRRLQKSIARLLKALERELSSVDADIDDAVRGSAVWRETEDLLASVPGIGPTIARTLIAELPELGRLDRKKIAALAGLAPFTRQSGQWRGKSFIGGGRTGVRAALFMGAMVARRHNPVLRAFFERLVAAGKPKMVALIAVARKLLTILNAILRDRKPWQTA

SEQ ID NO: 60616 - protein, 411 aa, unidentified
MYYVGIDIAKKTNVSSIINDKDVFIKKSFKFNNDEKGFKEFTNLLSSIDKNIDNFIIAMEATGLLFENLYLYLKGKGYNVILLNPYQTSKFREMNTMKKVKSDNIDAIMIASLIKSGRYSKAYVSEEVYASLRALHRHRASLEEELKKHKRQVSSLLAVVFPEFEQVVKNPFSVSGLALLEKYPTAKHYKHASPQRILNVFRKIKGNNFNIQKAEKLLELAKSSIYSGNAYDERAFVIQSHIRAIKFLQKEIESIDNEMLKLFNASPSFTKEEEQEVIDIIDNLRTIPGVSDKTLFTIMGECGNLDRFKNINAFIGYLGLYPTLEQSGNKISYGKLAKRGSKLAKKALYQAAVAAIRHNDEMKKLYCDKVSQGKAKKEALVIVARKLAAIILAIYKNNTPYNPARVFNQNT

SEQ ID NO: 60617 - protein, 394 aa, unidentified
MTTTRNDQRSDRGPILHLALELGLDQWKLAFTIGLAQPPRVRAVAARDRAAVLREIALAKTRFDLPPDAPVVSCYEAGRDGFWIHRWLTAEGVGNYVIDSSSIEVNRKQRRAKSDRLDAGALVRLLVRYELGEKKSFSVVRVPGEADEDQRQLHRELSALKDERTSLVNQLKGLLYSQGLRLPTVNAQFPEWLSHARCWDGSAVGGELQARLRRTFERWQQVQGQIGALEAQQRQQIGHDSTPQVDLVRRLMTLKGIGGCGAWMLVKELFGWRRGFNRKQLGALVGLVPTPFDSGQRRREQGISKAGNKRLRRLLVELAWCWLRHQPDSALSGWFRRRFAEGARLRRIGITALARKLLLALWRYVEQGEVPSGAVLVDWQPKLRKRRAGPALVT

SEQ ID NO: 60618 - protein, 303 aa, unidentified
MEGAPMLDTTTFIGLDVHARSIKAVSLDVMTGEVRAATFGYDAGAVAEWVRSMDPRARCVYESGVTGFDLQKRLSGLGVDCVVGAVSKMIKPSADRRRKNDRNDAEFLARMLSVGNVVEVWVPDDECEAARDLTRALEDARDDLSRSKQRLSKFLLRHGLVFDERTPTGRRKGNWTRAHWSWIESIRFAERADNDVLAYYVDAVRRAAEEKARLEGLVEAEARKPRWRKRVDSLRCLKGVDTASAADLVFEAGEFSRFGNARSFAAWVGLTPSEHSSGESDRRGAITKAGNKHLRKTLVEAAC

SEQ ID NO: 60619 - protein, 292 aa, unidentified
MTKTQPAVEVFAGIDVSAREIKVARIQCQEVNPTLATFANNASGHKALLAFLLQKTERVRVCLEASGNYSLDPALALQAHRQVEVSVINPRRARKFAESLGERSKSDPVDARVLCQYAARMPWESWQPPSSLALRLRAITRAIESLSVMHTQENNRAHALGSSQALPALVLRERQRHQRYLENRMKQLRREARRLIVRDAELDRRYRLMLTVPGIGETSALQILGELVVLSDTADARQWVAFSGLDPRIFTSGSSVEKRPRISRGGSRHLRRALYMPALVALRREPHLRPFL

SEQ ID NO: 60620 - protein, 416 aa, unidentified
MRTRDGAHWAGVDWGQRVHDVCVLDAHGEVLAERRFDNSGKGLGELSAFLSGFADVQVGIETPRGPVVEALLDRDLTVFAINPKQLDRFRDRFYPSGAKDDRRDAYVLAHSLKTDAHAFKAVSAEHPVIVELREWSRMHRELSEERVRLTNRLQAQLRRYYPQLDGFGVPLWSPWILDLFTAAPTPERARSLRRVTLVRLLRRNRVRKWTLEEVREALREPGFTVAAGTVAAASAHAETLVERLRVVSDQHQRAVKRLGELTERYRATELGEVDSDEDSSEQHDVDILRSLPGVGKLVLAVLLAEALELLQRRDYHGLRAFSGVAPVTRRSGRKLVVLRRHACHQRLAWAVFQWARAAMSNDPEWHARYAALRARGHTHGRALRTLGDRLLRIACAMLEQGTMYDADRLAPVQRAA

SEQ ID NO: 60621 - protein, 406 aa, unidentified
MKDNNVENRRSEVLLEMETCVETGVESTESEVGSEYPAYVGMDVHKDTIVVAVAREGRSVPDSRGRIANTKKAVKRLIRKLSEEFGGEELLFCYEAGPCGYVLYHQITEMGHICEVVAPTEIPKKPGERVKTDRRDARKLARLLRSGDLTSVWVPNKEREAMRDLTRARDDFKSQEHRARMQLNGFVLRHGHAWPSGKKRWTEKHYRWLESIRFESPLQEMVLNDYIEATKAATERVRMITAEIEKALPEWSMAPVVYSLMALRGVAKITAIGVLAELGDISRFTSPKQLMGYLGLVPSEHSSGSKRRKGAITKTGNRHVRRLLVESAWSYRFLARQTAHLKRKAKLASPEAKTIAWKAQKRLCSRHRTLINSGKMKTVANVAVARELTGFIWDIVRHEMPKVKAA

SEQ ID NO: 60622 - protein, 372 aa, unidentified
MTQCTKTQFVGLDVHKDSIVIAVAQLGREPARVIGTVPHEWSALRKVLDKLGPRCEVACCYEAGPTGYGLARALIAAGWACDVIAPSLIPKKRGERIKTDRRDAVKLAQNHRSGELVAVFIPDEQGEAIRDLERAREDAKKAERVVRHQLSKFLLRNNRRYPGRTTWNAAHQGWIAKQAFAEPAQQYVLSDGLAAVEAATLRVSQLTARLRELTVGWSQEPLVKALQAMRGVEFVTAVTLVAEVGDFRRFATAQDFMGYVGLIPSEQTSGPHRRQGPITKTGNAHVRHVLVESAWHYRRQPRMSKALRERSVGVAPQVCAIAWKAQKRLHGRLNRLIGRGKNKGEAVTAVARELAGFVWAISREEKLLVSLR

SEQ ID NO: 60623 - protein, 335 aa, unidentified
MIIYSGIDVSKDKLDIALTKDGINIISTATFQNSLSGFQKLFIWVKKRSKGFNCVHFCIEATGIYHEEIAEYLQEQENVLVSVINPFQSKSFANSRLLRTKNDKVDAALLACYCAISQPRQTVKTSNEIKTLRKLVRYLNTLIAERAKQKTRLHSVKNDDVANVVKATINFYSQSISQIELKIKEHIKMFSKLKHQVKLLRSIKGIGDKTAWQILAELHVEDGKNINTKAQIAHAGLAPRQFQSGSSVNGKPRICKTGNKRLRTALYMPAMCALRHNRPLSLFYHRLTSKGKSKMVALIAVMRKMLVLAIGVLNNNVPFDENWALKYQETFALVS

SEQ ID NO: 60624 - protein, 359 aa, unidentified
MQTQSNKIDFNGQNIYVGFDVHLKSWTVTIMTEKLTHKTFTQPPKPEALYHYLRKTFPGGVYHSAYEAGFCGYWIHNKLIKFGVNSMVVNPADIPTTGKEKVMKTDPRDSIKIARSLRNGELRPIYVPSLQTLEDRGLVRTRATLVKDLTRYKNRIKSFLYFHGIELPEAFNKSTSHWSNRFNKWLEDLEMTEASGKASLNVLLVQSNHLRASVLQVTRQIRELSKTDRYKIQQVLLCSIPGIGILTAMIILTEIETINRFSNLDQLCGFIGLVPSTHSTGDHEIVGEITPRGHSVLRTAIIESAWMAARLDPALNKCYHDYCRRMEPNKAIIRIARKLTSRIMFVLKNNQPYVCSVIK

SEQ ID NO: 60625 - protein, 319 aa, unidentified
MAETVLGIDIGKQKFEVHLLVNGKTKSKSIKNNKEGFTILSQWLDKHNARLVHACMEATGSYGDELALYLHDAGHTVSIINPARIKGFAQSELVRTKTDAVDAGIIARFCLAMNPEPWTPPAPAVRRLQAIARRLDALIAMRTQELNRLGVAHTLVEPSIKAHLLYLDSEIEKLKEQMRSEIDDDPDLRNQRDLLITIPGISDATISVILAELDFQKFESVREVVAFMGLAPKDKISGTSVKGKPRLCKTGNARLRKCFYMPAMVAMRFNPIVSSFQRRLKDNGKNGKVIVCAAMRKLVHIIYGVLKTGKPFNPQIASL

SEQ ID NO: 60626 - protein, 337 aa, unidentified
MEVYAGLDLHSTNTYVAMIDRENKVLYKQRHRNELPSILSALDPFKKDIRGVVVESTFNWYWLVDGLMGQGYPVHLANPSAIKQYEGLKQVDDKRSSLWLANLLRLGILPTGYIYPKEERPTRDLLRKRLHLVRHRTSHILSVKNILARSLGVGMRSKDVKELTDAQVKALFPDKEMCLAVMASVDLIRHLQENIDDIEKVVKKKVKLKEEFAKLLTMPGIGEILALTIMLEVGHIDRFPTVGDYSSYCRLVKSTRSSNGKVTGHGNRKSGNKYLCWAYIEAAQFARRFHDTVRSYYERKMAQTNRIVAIKAVSNRLARASYFVMRDRVDYDQARLF

SEQ ID NO: 60627 - protein, 382 aa, unidentified
MASKRTKQANDVGVDPHKRTLTATVLDSRGGVIATRSFRVSGEGHRELEAWATSYGRVRRWGIEGASGLGRHTTIFLARHGHDVRDVNPGRTAEQSRKRRQGKTDKLDSLRIASALQADPDMPVAFKRAQGDSGPDERAELLALWHKARRWAVDQRRQLLNQAESLLCALPEEARAGLPDQPDVRARLVALSKRDRARSWDAATALRLQLLDGHTDALEGLDAQEREATAALAGLVDQAGSTLGELCGLAERSVAELLVEVGDPRRFAGEGGFARFNGTAPLPASSAEGDDEPVRHMLNRGGNRRVNAVIHRMAVTQKRCDPRAQAIWDTARARGHRKKECMRVLKRHLSNVIYRRMLQDLARAEGRRPPAAAPTEALAEAS

SEQ ID NO: 60628 - protein, 338 aa, unidentified
MTWYSGIDLHSTNSLVAVIDEADRVVYRRRLPNELGKIVAALEPYRAELAAVVVESTYNWYWLVDGLQAAGYSVRLANTTAMKRYAGLKHSDDETDAVHLAHVLRLGILPTGYICPAPERALRDLARKRLQLVRHRTTHVLAVENIMARQTGATLSSNVIKRLAVEAVQTLGLPEDVARAVAANVALIQSLNVEIGKLEARLREAVRLRPPFRVLTSAPGIAEVLATTIMLETVSVERFAAVGNFASYARCVNSTHLSNGKKKGAGNIRNGNRYLAWAFIEAANYARRYCTEARRFYERKKAQTNSIVATKALAHKLARACYHMMKNGQRFEVKRCFA

SEQ ID NO: 60629 - protein, 360 aa, unidentified
MKSLTVSESKVTVGLDVGDRFTQVCVLDEAGEVIEEARLPTRQESLAHRFAGAESMRLVLEAGTHSPWVSRLLAELGHEVIVANPRKLRLIYQNDSKSDRVDAEYLARVGRLDPALLAPLTHRAAETQADLALLRSRNALVRARTRLISHARGTTKSLGGRLPACSSDTFVKKASPVVPDELLPALTPVLTVIEQLSAEIRALDAQIETMARERYPETALLAQVPGVGTLTATVYVLTLEDPERFPRSRSVGSYLGLRPRQADSGSLAPQLRITKAGDEHVRWLLVGAAHYILGPFGPDSDLRRWGLKLAAQGGKRGKKRAVVAVARKLSVLLLRLWVTGEVYEPLRNARLRGEVVTTNT

SEQ ID NO: 60630 - protein, 430 aa, unidentified
MTGRKKPHKQDGMALIHPHAAAIDIGSRMHVAAVAPDRNAMPVRTFGTFTEDLYRIADWFEECGVTTVAMESTGVYWIPAFEILEERGFDVILVNARDARHVPGRKTDVSDAQWLQRLHAYGLLRGSFRPHGEITALRAYLRQRERLLDYAASHIQHMQKALTLMNFQIHHVVSDITGMTGMRIVRAIVEGERDPAVLAQFRDARCRASVDTIRQALIGNVRDEHIFALTQALDLYDLYQAKVVDCDRRIEAVLASLERPDAQPAASLPKPRHHTRPPNAPAFDAREALYAILGVDLTQIHGIGPYLALKLVGECGTDLSAWPTAKHFTSWLSLAPSNKISGGKICHRRPAGQITALPPSCDWRQSPSVGPRRHWAHSIVVCLLASGRRKRSRRRRERSPCCFTTRFVTASSMPIREQNITKNDIVSASS

SEQ ID NO: 60631 - protein, 344 aa, unidentified
MTYYAGLDVSLRSTNICVIDDQGEVVTESKTDAEVADIVTFLDELDIEISQVGLEAGTLTQYLTYGLQFAGFDVVCMEARQVKAALSAMRNKTDKHDARGIAQLLRSGWYSRVHIKSMESHRVRALLSSRKAILAKCIDLENEIRGIFKVFGLKLPPRLGHGAFDPKVRPLIEADETLSLSLLPLLEARLMLYQTFRVLDNRTRHLAHDDPICRRLMSAPGVGFITALTFKAGVDDPARFKHSRTVAAHFGLTPRRFQSGELDLEGHISRCGDANVRSTLYTAANAMLTRSSKWSSLKAWGMQLAKTRGHRRAVIAVARKLAVILHRMWIDDTHFRWGTEGVRS

SEQ ID NO: 60632 - protein, 405 aa, unidentified
MSAGLRVNSNLKSVASYQPVLYLALELGWSKWKLAFASAPADQPRRRDVEARNQSGLLSEIAAAKQKLGLPADCPVVSCYEAGRDCFWIHRWLETQGVRNVIVDSSSIEVNRRARRAKSDGLDAAKLLSMLFRHAGGERVWSVVRVPTEEEEHARQLHRELQSLGQESTRHVNRIKGLLASIGLALEVDKHFPQTLKEARQWNGKPVPEELRDRLLRDFERLQVINRQIRALNQQRNKTLRTKDSPTLRKVQQLLGLRGIGVNSAWLFVHEFFGWRDIQNRRQIGSLSGLAPTPYSSGDLRHEQGISKAGNRRMRWMAVEIAWWWLHFQPGSALSQWYERRFAKGNSRQRRVGIVALARKLLVALWKYLNTGELPEGAELADWQAKTRTSISSLDLSPVKRRQAS

SEQ ID NO: 60633 - protein, 430 aa, unidentified
MEVIYSKACGVDVHKRFIIAVICDSSSANPKYIRKRFSTFNNQLIAFKNWLIEHDCQNVCMESTGKYYVPVYNALEGFISNVVVANPKWVRAIKGEKDDNKDAKWIADLFKLGLVRSSYIPSKDIRILREFTRYQYKLINTRSSEKNRFQNALTVGNCKIDMVFSDVFGKSASSIINLILSNDTYTSEEILSKVHGRCKASHEDILSAIDGVTLDTHQKARIEIVKNHMEYVDSLLCKIQKHIDEMIVGYENYIQLLCTIPGVDRKSAITIISEIGVDMSQWSSHHKLASWAGLAPGCNESAGKKKSVKISRAGVYLKPCLVQVAHAAVKDKDYDYYANKFNKISKRRGKKRAIIAIARKILVAIYHMLKTGEFFNPSDMTDIETSQKKRIEYIKNNFKNAFNQLMRTELSSEEILAFLPTKSTDSPLKE

SEQ ID NO: 60634 - protein, 355 aa, unidentified
MNDAKYIGMDVHQATISVAVRDSRGNLVMEAILETKADTILQFMHGLRGSLSVTFEEGTWAAWLYDLLQPHVARVVACDPRKNALLKVGNHNDRMDARKLSELLYLNKLSPVYHGEQGIRTLKELARSYITITRDLTRVMSRLKAIYRGWGIPCAGQQVYAPHYRPEWLAKISEAGVRRRAELHYQQFDVLAALRQQARRELLAEARKHPAMRLLQQIPSIGPIRAALLIALIQTPNRFRTKRQLWAYCGLALRTYTSGEYRFVAGQLKRSKKVLAVRGLNINHNHDLKNIFKGAATRAAATSGPFQDFYQACVASGVKPHLARLTLARKIAAITLLVWKKGVRFDAEHLKQQAA

SEQ ID NO: 60635 - protein, 319 aa, unidentified
MNAISLAYSDPSGRNVGIDVGSQQLDIFIHELGKHWSTENSSAGIKQLLSQLRRYKLARILVEATGGYERQLVEACAELDLPIVIVQPMQVRQYAKAQGLMAKTDKLDAAVIASFAAVIKPEPRALPSKNVRIFKDLLARKRQLNEMRTQELNRHKKSQKCVVRSHAAAIKFIEKEINWVNEKLATELDKICEWKATYELVSTVPGIGDGVAYTLLGELPELGRLTNRQISALCGLAPYNRDSGNMRGKRRIRGGRAPIRTVLYMAMLSAIQHNPVMRDFYQHLVAQGKHKKIAITACMRKMMTILNAMVRDGREWKMA

SEQ ID NO: 60636 - protein, 345 aa, unidentified
MQVITIGLDLAKNVFQVHGVDAAGTAVIRKALRRAHVLPFFAELPPCLIGAEACSSANYWARELMKLGHTVKLMPPSYVKPYVKRGKTDAADAEAICEAVRRPTMRFVAVKTPDQQAVLMLHRVRALLMRQRTMAVNALRGHLAEFGIVSGQGAKNLRELIERILAEGPDRLEFPRLARIALDPLIMQLNDLQTRVRAIEIELLAWHRTSAASRRLETIPGVGFITATAIAATVTDPTHFKSSRQFAAWLGLTPKLNSSGGKERLGGISKMGDRYLRTLLVVGATSVMRYARGKAAVSAVWINRLLAKKPARLVSVALANKTARIAWALLIKQEDYRAPKMSAAA

SEQ ID NO: 60637 - protein, 370 aa, unidentified
MRKPTPLFVGLDVHKETISVAHAAGGTVEPPHFVGQIGTLQRDLDKLVRRLQSLSPQLVFAYEAGPCGYVLHRYLTEKGLDCRVVAPSLIPKKPGDRVKNDRRDALELARLLRSGDLTGVYVPSVEDEAVRDLCRARDATRVTLKSAKLRLKSFLLRLGFNYVGRADWNDAHRRYLAKVVCPTPAQQIGFQESLRAVDEQVERLARLERELLDLAPTWRLYPVVESLQALRGVQWLVAITVVAELGDLTRFDNPRQLAAFVGLTPSEHTSGEKRRQGGITKTGNGRARRVLIEGAWAYRYPAKISVHIQRRIEKLPKIAQDIGWKAQVRLCKRYRRLIARGKHANIVTTAIARELLAFMWAIAKEVKISA

SEQ ID NO: 60638 - protein, 318 aa, unidentified
MPSTPIYVGIDGAKAQLDIAVRPTGDRWAIPNTEAGRQDVLTRLTALPPTLVLVDAAGGLELPLVAALAAADLPVVVVTPRQVRDFAKATGQLAKTDALDARALAHVAEAVQPVPRPLPDAATQALTALLARRQQVVAMLVAEKHRLSLAAPTIRPRLQAHITWLERELETWDQDGGEMLRHSPVWREKEALLRSVPGVGPQLARTLLAHLPELGTLDRKRLAALVGVAPCNRDSGTLRGTRTVGGGRARVRVPLYMAALVASRHNPVIRAFYHRLCAKGKPKKVALTACMRKLVTILNAIVKPRLRWHGIIPQASCS

SEQ ID NO: 60639 - protein, 379 aa, unidentified
MLKSRWRSLGILERIPETSFSHKEATMSKIDTTILRDQEVFVGIDVSLRRYAIAVRSGRELVYRCTVPARYEHLRGLWARLPGCRIHAVYEAGFSGFGLHDALCADGIDVRVTPPSKVPRSADRVKTDRRDAQTLAHALEQGMLRRCRIPSLHLRTDREWSRYLQQLTQQQTRLKNQIKMRLALHGLTPELDQSRRWSKAYRAQVLAIAGTDGPLASILRDMLEQLGDLERRRTQVKRALRHLARSEFYQAAVQLLQSAPGIGWLTAIRLVLEWGDLKDFPNGASFASYLGLTPSEYSSGDRTRRGPITRQGNGWVRTWLIEAAWKAIAIDPVLGTRFRRLSPRPADRNRAIVAVARVLALRLRACWLSGQPYVIDVVH

SEQ ID NO: 60640 - protein, 320 aa, unidentified
MYCGIDISAESFDICMLQPEGDFTWHQLSNDTKGFRQLLKLCSGNYHFVMETTGVFHLPLCLFLHEKHCAYSVVNALQIKRYIQMSLERNKTDKKDAWHICRYGIERRPAQYEMPEQQYFECRALNSSIETITAEITAFTNKIYAQKKQKTDTAAVLRSYHQIIRTLKAELKKLKAELQKKMLLWQPGLVKQVSSVKGIGSRATATLIVATQGFKNTHSYQQLISYAGLSPKEYSSGKSIKGKVRISKRGGKQLRHILYMCALNAKATNSACKALYDRLVAKGKNKKLALIAVCNKLLKQVFAVVKSGKLYNDNYYKQIA

SEQ ID NO: 60641 - protein, 355 aa, unidentified
MSQEKYIGMDVHQATISVAVMDGNGKLVMECLLETKAETILEFVQGLRGTLSLTFEEGTSAAWLHDLLKPHVSRLVVCDPRKNALLKEGNKSDRIDARKLAELLRTNQLKAVYHGEHGIRTLKELGRSYLTLSKDVTRTMNRIKSLYRSWAIPCAGTSVYAPRHRAEWLAKIVEPGVRIRAERLYQQLDGLQSIRQQARRELLQESHQHPAVKLLRQIPSIGPIRSALLVALLQTPHRFRSKRQLWAYSGFAVETHDSGEYRYVRGKVQRNRERITVRGLNDNHNRDLKNLFKGAAISASTRPGPLHDFYVARVAQGMRPTMARLTLARKVAAITLTMWKKGVSFDPQQLSRQSV

SEQ ID NO: 60642 - protein, 363 aa, unidentified
MDNGITWVGMDVHKESIVVTAVRHDSDKATARFEIPNTDTGVHRLVKRLREMGEVRCAYEAGPCGYELRRFLASQEIPCDVVAPSLIPKKAGDRVKTDRRDAEKLARLHRMGELTPIRVPTPAQEALRDLVRTREDAKEDALRRRHRLLKFLLRQGRRYEGKSWTQVHWNWIRSQKFADDNAQAVLTEYLVALEQELERIQRLNVKIEEESHRPEIAPAVARLRTLRGVDTVTAMTLVSELVDFSRFTTAHELMSFAGLVPSEYSSGGKERRGRITKTGNAHVRRVLVEAAWHYRHTPTGTGISLRKRREGQPPGVLEIARRAELRLCRKYRKMTSKGKNSRLTVVSVARELAGFVWAIGRSR

SEQ ID NO: 60643 - protein, 315 aa, unidentified
MTSTPVFVGIDVSKAHLDLAFRPEGRVSAPNDEAGVAQVLERLRAVSPTLVVLEATGGLEIPLTGVLAAAGVPVVVVNPRQVRDFAKAAGRLAKTDAVDAQTLAHFAEVMRPKPRPLPDEQTQALAAILARRRQLVEMLTAEKNRLGSAAKPVRKSLRTHIAWLARELSHTDSGLAHAIRESPVWREKEALLRSTPGVGPVVTTTLLANLPELGTLTGKQIAALVGVAPFNRDSGTWRGKRTVWGGRTQIRAALYMATLVATRFNPVIRAFYQRLCAAGKAKKVALTACMRKLLIILNAMLKHRTPWRQEGAPHA

SEQ ID NO: 60644 - protein, 420 aa, unidentified
MKVVYQTCCGVDVHKSFLVATIIKTTSGVQPSYQKKRFSTFNNSILEFKKWLLDNSCRDICMESTGKYWIPVFNLLEDEINVTIANPKWVKAVKGNKDDTKDSKWIGDLFRLGLVPGSYIPCKPIRILREFTRYRYKLTSCRSSEKNRFQNALTVCNIALDSVVSDIFGKSATSVIDYLLEQSDNSINHEEISSRLLRSLKKKSESVIESIEGYQMTDPQKYRMRLVHAHMDYITSTISDIDSMINSLVEPYDNAVKLLCTIPGVDRNSAITIISEIGTDMTQFSNSKRLCCWAGLTPGNNESAGKKKSVRITRAGVYLKPALVQVAHAAVKSDKSPYYKAKYERIMKRRGKKRAIIAIARMILTAAYQMLSTGEVWNPIDLYKIDMPAPLKEKQKEKAIKQAKKLLIAEGIVTEEQLAS

SEQ ID NO: 60645 - protein, 496 aa, unidentified
MGCCALEGGDAVSAIPIRNLMNCAAQPFRWRQQEELEMNPKRSKSRHGRKMPMVHPNAAAIDVGATMHMAAVRADRTPEPVRSFGTFTADLHRLVDWFTQCGVETVVMESTSVYWIPVFELLDARGFTVFLVNARDAKHVPGRKTDVSDAQWLQRLHSYGLLRASFRPKGQIAELRSYVRQRERLLEYAASHIQHMQKALTEMNLQLHHVVADITGATGLRIIRAILAGERDPEALAALRHYSCHSSAETIAKALTGSYRAEHLFALEQALALYTAYREKASACDVRIEAVLKELSIHRGRDHGAVPPPRRRHRTDQVNALAFDVRAALFALLGKDITAIDGLGAYLSLKLIAECGDDLSSWPSAKHFTSWLGLAPSNKVSGGKMLSSRTRRSGGRAAALLRLAAVAVGRTDTALGAFYRRLSSRIGKAKAVTATARKVAVLFYNAVRHGMEYVDPGASSYETRYRTRVVNNLHRRAKAFGFLLQPLEPKAGAAVS

SEQ ID NO: 60646 - protein, 367 aa, unidentified
MSSVASQAGLIHLGMDTSKNTIMVATLLPGEESPVTDRVANEEAAIRRLAGRFADRSVLRCWYEAGPGGYELYRLLASMGVACQVVAPSLIPKGGSDKVKTDRRDARRLARLGRAGELTPVRVPSAAEEAVRDLARARDAMLADRKRAQQRLTAVLMRHGRVWRGASYWTRAHRDWIAAQRYAEPALAAAISCYRATLAVREAELAAIEAELIPWAQREPLAGPVARLGCYRGIAELGALTLAAEVVDWRRFPVARAFMSYTGLVPAEYSSGERTRRGHITKAGSEPVRTALTEAAWSYRHAPAIGAGLRRRQAGATPETLARSWTAQRRLHARYVHLVHDGGKAAPEAAVAVARELAGFAWAEMTA

SEQ ID NO: 60647 - protein, 329 aa, unidentified
MYLHVLDAQGQTRFEKNLPARPDAFLDAIAPWRNGLVVGCECMFAWYWLADLCEDQHIPFVLGHALYLKAIHGGKTKNDRLDAAKLAALLRGGAFPQAYVYPRAMRQTRDLLRRRTFFVRQRAQLLAHVQNTNSQYNLPPIPQKLSFAGNRDEDELAGRFAHTSTQASIRADLRLTAAYDEQIRTLELHLTRHAKVDDPVTYQLLRTVPGIGPVLALILLYEIHDIARFPEPGNFLSYARLVRCEHESAGKKKGFGGKKIGNGYLRWALGEAACLMLRCHEPAKQWLARQQKKGSKARALGILAAKLGRTVYHLWRKQVAFDARRFLTS

SEQ ID NO: 60648 - protein, 343 aa, unidentified
MYYIGLDVHKKTISYCVKDAAGHVHREGKIGSTRCESDAWVRTLPQPRVIAMEATIFTGWIYDHLLPQAEKVKVAHPLMLRAIAAAKKKNDKIDARKIADCLRCDFLPECHMASTEIRDRRRVLRYRSLVIKQMVQMKNRVSGLLMETGVDYNKRRLHKVGYFEDLLTTNKEVNQSIRPLLKLSRETIERSQRLDYALVSSLERDPLLAERLKRLRTVPGVGPITALTWALEIGDFTRFPSVKEAISYCGLCGDESSSADKVLRMPLSKQRNKHIQRTLIEAAKLAIRYNHELAEVYEKERQRGNANRATLAVARKLVAYLLAVDRRKQDFVPAEVFKATAVA

SEQ ID NO: 60649 - protein, 319 aa, unidentified
MAKRVEEVTLGFDVSKRQLEVLGSDEAGNRFIDNDPVAIARFLDRFDGPVVIAVEATNVYHEQLVDLALARGFTVYLIDGYKLNKYREAVGVRAKTDANDAELIHRYLVSERPHLRPVNPQSQAERRLWRLLKRRAKLVKLKSQMDLSLRDLDMDLPEVGAVLKELDRLIRRLGQLANALARSCGWQGMLSRLRSIPGVGPLNALALVSMYHRGEFRTVDQFVAFLGLDVRVRDSGTFKGRRKLTKKGDPEVRRLLFNGARAAANRNNEWAAMKQQLMARGMSEIQTSVILARKIARIGYALLHTGRSYESARITCTST

SEQ ID NO: 60650 - protein, 320 aa, unidentified
MLSFCGIDVSKDRLDVMVLPEGQRSSVPNDVAGWAELVEQLRGCSIAAIGIEASGGYERGAIRALLAADLPVRQVNPFKLRQFARASGVLAKSDPLDARMIASFVATMPTRPAPRQAPAAERLTEMLAVRRQLSAEKVAAENASRLVEDAMLQRLSRRRIARLAADIDVLDQRLVEIVATDVALAHRYRLLTSMPGVGSVLACTLIALLPELGRLSRKQVAALVGVAPYAFDSGALKGRRCIWGGRANVRQVLYMAAMSASNWNPVLKAFHDRLAAAGKLPKVVIVAVMRKMITMLNAMVRDDVLWADRLSGRHIVPTTR

SEQ ID NO: 60651 - protein, 345 aa, unidentified
MKYYAGLDVSVKETSVCIVNEAGKVCREVKVISHPEDLVRALQDPAWRFTRIGLEAGPMSQWLFSGLIEAGLPAICIETRHAKAFLKAQVNKTDRKDARGIAQMMRVNLFRPVHVKTLTSQKRHALLTARKLLQEKAIAIENDIRGLLRNFGLKVGVVGTLGFDSRIHELVEGMPDLLEIIGPLLASRQKLREEFSRLHRKVLEIARDDAVCNRLMTIPGVGAVTSLAFTSTIDIPARFRNSRAVGPALGLTPVLNQSGESHRVGRVSLCGDAMMRSLLYEAAQVMLTRVKKWSWLKAWAMNLAKRSGGRKAVVALARRLAVIMHRIWSDGTEFRWTKEPVPATV

SEQ ID NO: 60652 - protein, 341 aa, unidentified
MKSTTIAVDVAKEVLEVAVSVRPGQVSEQKRLSRAAFMKFCTDQPPATVLLEACGSAHYWGRRLQSIGHRVVLLPPHTTRPYVFRNKTDRTDTRGLLEAFRNEDIHPVPVKSVSQQALTALHRLRSTWLATRTARINTVRGLLREFGCTIPVGAHHVLAKTWDLLADPESGLPDALRPGLAAACTEIRDMEGRIRVVEDQLQALADQTPAVARLRSIPGVGLITATALVAFVGDIQRFPSGRHFASYLGLTPRERSSGLVRRLGAISKRGDVYLRMLLIHGARAVLWAAKKRPTPDRLRVWALHLEKLRGHNKAAIALANKLARIVWAVWKHEVDFREVAA

SEQ ID NO: 60653 - protein, 357 aa, unidentified
MDYGVYCGVDFHARQQTICCLTTEDGVIATYELKHDNKKAVRDFYAQLPGPVLVGLEAGGYSLWFEQLLEELSHEIWLGDASEIRRCARRRQKNDRRDAALILDLLVRGEFPRIHRQTALSREILRMLRYRHRLVKIRTISKNCLQALAIQSGLALKSQLFTEAGRQQLASLAMSPAMQCQRKQWLELLATLDERISTCEKWLSDQALADQRVRRLRTHPGLGLLTALAVLHTLDPVSRFPNQRKVAAYGGFDPCEDSSAERKRYLGISKAGSKLLRFLLIEAGQTAVKEDADLKRFYWRLQQRRNKPKAKVAVARKLLIRSYILLRDEIDYAEFQRRAVAARLARENARLPCLSSD

SEQ ID NO: 60654 - protein, 408 aa, unidentified
MRSADPHRDVVDRSAITVPAEVELMSTRRRGPGPSSVLTTPDHAGNVVGVDPHKRTLTATVADPRGAILASGHFRVSGDGHRALEAWARQFGQIARWGVEGASSWGRHTAVFLIARGYDVRDVCANRTPRSDRARQRGKSDTLDSERIARETLAHPLLPRAFKRAGHDSGPDEHHELLSLWHNQRRSILTSRQHLLNEAEHLLSSLPLELREQLRDTTAVRPRLTALAARNRRRRYDQPTALRLTLLDDYRAQIAKLDAHDKQVTAELAALVKASGSTLGELCGLSTVLVSELLVEVGDPRRFTIGGFARFNASAPLAASTAEGPGEPVRHRYNPGGNRRVNRTLHLMAVTQLRCEPRAQALYENARSRGHTKKEARRILKRHLSDVIYRRMIRDLADRTADHSLLAA

SEQ ID NO: 60655 - protein, 316 aa, unidentified
METSQPFVGIDVSSQRLDVDTVPISQPFSEPNNEDGIASLVGRLKPLNPQIVLLEATGGYEIPVAYALYEAGLPVVITNPKNVRHFAKAIGRLAKTDKLDAQVLALYAERVHPPVQPLRDQEQLELANLMTRRRQLQGMIVMEENRRRTCTPKVRGNIDLSVAHLRRLLEDLDREIHDSIRRTPLWHENSEILQSVTGIGPKVSASLIADLPELGLLPGNKASALAGLAPMNQDSGKHRGKRMIKGGRPAVRRALYMAALVASRHNPVIKEFYQRLRLAGKPAKVALTACMRKLLVILNAMLKNRTYWNPQLPLAA

SEQ ID NO: 60656 - protein, 318 aa, unidentified
MSDNSVVIGIDVAKAHVDVAAIGAVLTGTRFANDSEGQTALAGVLAPLQPAVVLMEATGGYEAELACALQAAGLPVAIINPRQGREFARSMGQLAKTDRIDARVLAELAAVLARRDDLERYLRPLPDAQQQDLAALVARRRQLVTMLGAERQRLAHARAAVRPSLEAIIRAIRHQLDLVEGEMAAHVARHHASIDRLLRSAGGIGPIASATLIADLPELGRLNRRQISALVGVAPFARDSGAMRGRRTVIGGRARLRPTLFMATLTPTRYNPAPRDFYPRLVAAGKLPKVALVACMRKLLTILNAMVRTQQHFEPVHG

SEQ ID NO: 60657 - protein, 426 aa, unidentified
MNYTQNSKIAQVTEKTLVVGVDIGSETNFARAFNWRGQELSKKVFRFSNSLEGFQSFQAYLERCKSNASAEQIIVGCEPTGHYWFNLARYLRTQHINLALVNPYHVKQIKDLDDNSPKKTDLKDPKTIAKLVVDGRYSYPYLPEGIYADLREAVSSRDRIVKELNAAANRIKRWLKIYFPEYLTVYKNFSAESGLTLLEAAPLPEDVVKLGAEGVNRIWRDKKLRAVGMKRAQTLVEAAQNSIGLDGGNCARMEMQLLLEDYRAKEIQLEKVTAVLEAETLKVPHAEKLLSIKGVGLITVAGFLSEVGDIRRFDSPKQIQKLAGLELKENSSGKHRGRSSISKRGRKRLRKILFQVMLPMIRNNAEFREVYEYFTTRQNNPLKGKQAIIAAGCKLIRVFYAILKHGVVYDPQKLRLDMIRPELTAA

SEQ ID NO: 60658 - protein, 355 aa, unidentified
MNSEKYIGLDVHQATIVVAVMDSSGKLVMESILETEAATILQFFAGLRGTLSVTFEEGTWSAWLYDLLHPRVNQLVVCNPRKNALLKDGNKSDRIDARKLAELLRGNQLKPVYHGETGVRMLRELSRSYLTIVKDLSRVMNRLKAVYRSWAIPCAGRDVYYRRHRAQWLAKIREAGVRRRAERLYEELDMLQHLRQQARRELLAESRKHAITAKLRQIPYLGPIRAALAVALIQTPHRFRTKRQLWAYSGLALETRTSAEYRFVEGQVRRSKKMLSIRGLNKDHNHDLKGLFKGAATMASVRPGPFQDFYTAALAKGIKPTMARLTLARKIAAITLTLWKKGENFDAEKLKSQAA

SEQ ID NO: 60659 - protein, 318 aa, unidentified
MALLIQFVGIDVAKEWLDVWFEAQKRLERFSNDPGGWVALLAFVDGLGPRSGYCFAFEASGGYERGVRDALIEAGCGVTRVNPLRVRLYARSIGRVAKNDRIDARVIARFAAAVEFHPEVLDPARERLAELVTHRRRLIDDRTALSNQLGTVRGADLRRQISQRLAQIARHIVKTDALLQEKLGTIPAMVERVRLMKTLAGVKDVTANALVALLPELGKLNRRAIAALVGLAPFDRDSGKMKGKRSICGGRAGVRVALYMAARAAASSKSPLGAFYARLIADGKTPKVATVALMRKMLTTLNAMLRDGHVWKHAKVRP

SEQ ID NO: 60660 - protein, 354 aa, unidentified
MPSNAETAVARTIGIDTGKNTLHMIGLDEKGAIVLREKVSRTRIAARFVNLPPCLVGIEAGMASHYVARELVGLGHEVKQVPPAYCKPFRQSHKNDFRDAHAVAEAVERPSTRCVPIKTDGQLDLQALHRLRSRLIGNRTAAINQTRGFLLEHGIPVRQGHHFLRQQLPQILATRTDVLSPRMVRIIGDLMTEWKYLDGRIEGVTDEIEALAHADEGCQQLITVPGIGPIISSAMVAAIGNGAAFCKGRDFAAWLGLVPKQRSTGDRTILGRITKRGNRYLRMLFIQGARAVLLRPASWAKHSFGSWLTAATRRLHRNVLAVALANKLARIAWTVLAQGRRYEARVEPRVEAAA

SEQ ID NO: 60661 - protein, 441 aa, unidentified
MAMRRREDDEVYPNAAGIDVGGSSHWVAVPRTADDQPVREFGATTCELHAMADWLLACGVDTVALESTGVYWIPVYEVLEQRGLAVWLVDARQMKYVPGRKSDVQDCQWLQKLMSLGLLRAAWRPAGEVCVVRAVVRQRELLLTEQGSWIQRMQKALVQMNLQLTEVLTDLMGMTGQAIVRAIVAGERDPKALAQHRHARIRASTAEIEQALTGNWRDEHLFVLGQALAMFDSLAQRVFECDAKIEALLAPLGCHEIELAGPGKRRGKNTPQFDARVALARWAGVDLTRINGLSVTTVMAILSETGPDLSRFANVKHFCSWLGLCPGTKISGGKVLSARTRRSANRVRQALKLAAMSLSRNDSALGAFYRRLCARMDKPRANTAVAHKLARMVYFMLTRGEAFVDQGQQRYEEQQPQRSIDALRRRATALGFQITPTAQVA

SEQ ID NO: 60662 - protein, 367 aa, unidentified
MFTERTSVGLDVHARSVAAAAIDGVTGELFQSKLTPSHEHVVSWVQALPGPVAVTYEAGPTGFGLYRHLAAAGIRCEVAAPSKLQKPSGDRVKTDAKDAIHLARLLRLDEVTSVAIPSVDQEAARDLVRAREDCRGDLMRARHRLSKLLLRHGVVYYGGAAWTGKHDVWLRQEALSQLTGRATRLAFDSDYEAVLTVQARRDRLNVAIEEMAADGEFTDVVHRLGCLRGVGTLTGFALAVEVGDWHRFTGNSIGSFVGLVPSEYSSGSSCVQGSITKTGNTHVRRLLVEAAWHHRPRYRIGKTMRDRWDLAPAAARSRGDAGNRRLHERWVRFNERRKKPTVANIAIARELAGWCWSLAVLEGASMP

SEQ ID NO: 60663 - protein, 445 aa, unidentified
MARKNKKQRLEIIHPHCAGIDVGSKEHWVAVDPGQDDEPVHCFSAFSDDLYALADWLKSLDVEVVAMEATGVYWIPLYEVLDARGFQVHIVNARATRQVSGRKSDVLDCQWIWQLMSHGLLRGAFRPADQVCVLRSLVRQRATKVQEQSRCILHMQKALTQMNVQLDNVVSDLTGKTGLAILRSIVAGEHDPQQLAKLRDRRLRADEATVARSLYGNWRKEHLFALTQALAHYDFESAQIHECDQAISQTFIDLPTLSQEEAPTPVKPLRSPQRTRAEQTALHQALYAVLGVDLTAVPTLGIETVLVIASEIGPDLSRFPSSGHFCSWLSLAPPTRISGGKPLPGKTPKVFNRAGQALRQAAANARNSDSFIGAAHRARLARMDTAKAIKATAHQLARLIYAMLTKGQAYVEQGIEAFEARRQDRQFRALQRKAAKFGLALVEAA

SEQ ID NO: 60664 - protein, 358 aa, unidentified
MSTYYIGADVHSNSTELAIEKRCKVVARYSVPTTIPAISNVLDSLQGKKYLAIEEGPMAGWLYRNLNKKLDKFISSDPRRNKLIASDGDKDDKIDSVKLASLLRGGFLRPIHHSDDDSRAELKHWVSLYHDRVRDAVRSINKIRARCRMHGVTISRSALREPASRFNWLLKTNHRPLANQLKMLWIGYDATVKQVRFARRQLGTLSKKYGIIKQWSLLPGIGLIRAATIFAYLDTPWRFKKKNKLWKYCGVGLQRATSGTDKKGKPKPARLKLPWAVNRILKNAVLGAAQTAINQKDNAFKDYYERMVTDGIVPSNARHAVARKLLTVTWAMWKSNSPFDENLVSDKSNSSTVPASSR

SEQ ID NO: 60665 - protein, 484 aa, unidentified
MERLAPALGGLGGDDHRQLRAGLFQLRFDLGAFGRIAVVSLAAQLFDVVFEGARHRRHLLFDVKDDGVGHDGTVRVKTRFSGSRVGEPIFLPSRFSGSAAKLMMWTALRDLSAKVLFSAGTIRTRNHVMAFEKISVIGLDLAKNVFQLHAVDEAGDVIIRRQLRRNQLLQFFEKLPRCLVGMEACSTSHYWARELGRQGFEVKLMPPAYVKPYVKRGKNDAADAEAICEAVTRPTMRFVPVKSCERQALLMQHKTRDLLVRQRTALINALRGHLAEFGIVTSQGRLGLRAAIEALSAAQEFLPEPSWQPFEHIRKQLEELTHKIAELDRIILRWCRNEAAARRLMTIPGVGFLTAAAIAASVGDATEFKSGRQFAAWLGLTPRQNSSGGKERLGRISKQGDRTIRRLLVVGATAVMRRARLDAASFPWIARLLGRKPAKLVSVAIANKTAALHGPYSRGWKIIALPPPEKICSATCGRMEEWRT

SEQ ID NO: 60666 - protein, 519 aa, unidentified
MHQTKYRGIITEAGSLTTPPWEPAFRLAKPLRKSVSPFGGDLCFGWLGSPRLYLYKPLGCVSAFWKWIPARKDKTMQYQKVLKMLENIPYLSVGLDVGADFTWMSIMLPNGTLAGKPFKIIHSDPQSRELAVAKIKEAQEAYSLKSRCFLESTGIYHIPLLCFLRDKGFDCSVINPIITKNSTNMNVRKLHNDKFDSKKAAKVGLDASLKTSIIPDDEVIDLRNLVRDYYYFKDLQSAVALQLTAELKVSFPAYRKVFSKVTTQTSLKLLDAYPLAEDLLAAPKETVVEMIRSTARFGRKYALAKYDALRTAAEDAAIFGRSLKSNSVRIRLYIDSYREYQKRLDTIMEAIHASVDGLKDSPTHGRILLLQSLRGVGFMSAVVLVAEMGSFDLFPSPKKLYAYFGLDPAVKQSGKFNGDKVHMSKRGSSLARRILHMVALNNLKVDKGSGMPVNPVIHSYYADKCKAKKKNVAVGAVMHKICNIIFAMLRDNKPFEVITPQEHCKRYLAAHPDKVQSAA

SEQ ID NO: 60667 - protein, 358 aa, unidentified
MTGSSDYESVQVFIGVDVGKDTHHAVAVNRSGKRLFDKALPNDENKLRSLISDLKQHGQILLVIDQPATIGALPVAVARSEGVLVGYLPGLSMRRIADLHAGEAKTDARDAAIIAEVGCELSMICGFDDDLAAQATQASNRIRGLLTQIHPALERVLGPWLDHSAVLDLLQRYPSPEKLASQGEKRLASQLCKLAPRLGKRLAADITQALAEQTVVVPGTNAAVVVLPRLALQFITLRKQRYEVAMEVEQRVLTHPLYPVLTSMPGVGVRTAARLLTEVACRAFASTAHLAAYAGLAPVTRRSGSSIRGERPSRRGNKTLKRALFLSTRPDIQGLLHTQNEPGKATQPGAYRPGKAAL

SEQ ID NO: 60668 - protein, 359 aa, unidentified
MQTQGNKLNFSGQNIYVGFDVHLKSWKVTILTDELTHKTFTQPPRPEVLFDYLKHNFPGGVYHSAYEAGFCGYWIHNKLVFLGIDSMVVNPGDIPTTNKEMVQKEDKRDSRKIARSLRNGELVSIYVPSIKTLEDRGLLRTRSMLVKDLTRYKNRIKSFLYFHGIEIPDTFRNSQTHWSKRFMDWLEGISLTQESSKTSLLLLLTESKHLRASILAVNRDIRALSKTDAYKKQVILLQSIPGIALLTAMLVLTELETITRFPNIDKTCSFIGLVPSTNSSGESDKVGSITPRGHNSLRAAIIESAWVAARTDPALMKSYHDYCKRMEPNKAIIRIARKLLNRIRYVLKNNQPYVYSLVK

SEQ ID NO: 60669 - protein, 355 aa, unidentified
MKKHSDSKGWTIGLDLGDRFSQVCVLNAAGEVEARLRVATTPKGLEAGLRRYAGARVVLEVGTHSPWVSHWLEGAGYEAIVANPRRLRSITQSDRKDDRTDAEQLARLGRVDPRLLSPIRHRGLEAQRDRALLRVRDGLVRARTLLVNQARGLAKPLGLRLPKCMTEGFASRMRREGLAEAFPGMAALVETVDELTRKIRALEREIEAVSRERYPETELVRQVSGVGPVTGLAFVLTLEDPQRFSRSRSVGAYLGLRPRRRQSGEQDPMLRITKAGDPYLRRLLVQSAHYILGPFGPDTDLRRFGERLQARGGRAGRKKALVAVARKLAVLLHRLWVSGEVYEPLRGAGAQATAA

SEQ ID NO: 60670 - protein, 311 aa, unidentified
MKKSLIYVGLDVHKDSTVIAMATGKDRAVVVRTIPNDWPMLLKVLGELGGSQRLRVCYEAGPTGYGMARRPNNSGICCIVVAPSRIPREPGQRAKTDRRDAKKLAELLRAGLLREVKIPEEETAAMRDLERCRDDAKNAERTVRHQLDKDIEELVETWSLASLVRALQALRGVRLLTAVILVAEIGDFLRFMTPRQLMAYLGQVPGEDSSGQRRHRGRITRTGNGHARRILTEAAWNYRFRPRPSRAIRKRRESLPPEIVAIAEKAEQRLSHRYQHLVNKGKSSPKAATAVARELAGFVWAIAREVRSQVA

SEQ ID NO: 60671 - protein, 339 aa, unidentified
MGLYTGFDLHSTNTFVGIIDEGGARLWKKKLRNDPSLISETLRPFKKDIVGIVVESTYNWYWLVDLMMEEGYQVHLANPSRVQQYSGLKHGDDEDDAFWLAEMLRLKILPEGFIYPKEQRPLRDLLRKRGHLVRLRTSLILSLQNILARNMGTKMKTNRMKALRTDHVTPLLAGNDDLSLAGRVSKDAIDALTRQITAIEVVVEKKMNLRRPYDLLLSMPGVGRVLALTIMMETGPIDRFADVGNYASYCRKVPAGRFSNDKKKGTNNRKNGNKYLSWAFAEAGELARRFDSEARAYYDRKRRRTNAPIAHSALSHKLARAAYYIMRDGVPFMPEKAFA

SEQ ID NO: 60672 - protein, 309 aa, unidentified
MAYKVAGIDVHKEVLMIVICEVDAPEAEPERRRFGTTTSELRRLSAWLREQGVQQAVMESTAPYGRPVWHELEPSLHLSLAQAFSNRAPRGRKHDFRDAERLARRLMAGELILSFVPEPEQRAWRTMTRMKVQLTRDKSRLQSQLECLLEEMRIKLSSVVSDLLGASGCRILRALAQGETDPRKLAALGDDRLQCTEEQRVDALTGNPQPFHRQLLALYLERHQLLTEQMDKLERLIAEAMKSHQEAVVRLAGVPGFGADSAQQVIAEVGPEASTFPSAAELTSWVGTCPGEETSAEENQSSRSAKGNR

SEQ ID NO: 60673 - protein, 343 aa, unidentified
MKKITTVGLDLAKSVFQVHGIAEEGDVIVRRALRRSQVLDFFRTLQPCLVGMEACGSAHYWAREIQALGHTVRMMPPAYVKAYVKRNKTDAADAEAICEAVTRPTMRYVPAKTQDEQAAGMVLKTRDLLIRQRTQAINALRAHLAELGIVRATGLVGIVSLAAIVRDDSDLRLPGAARMALEELVEQIETVTARIERLDRKILEAVRKDDSARRLTAIPGVGPIIAATVRAVVPDPAGFKTGRDFAAWIGLTPRAHSSGGKERIGSISKRGNQQLRTLLVAGATSVLKLARRGLQPSPWIAAMMLRRPFKVVAVALANKIARIIWALLVRGDNFRGAKMIVQA

SEQ ID NO: 60674 - protein, 391 aa, unidentified
MNTDQKRAYAATFPVHVGVDTAKVFHKLVVRGPDGQRTKAYKVLVSRAGFEAADAHLRDSYPGIAPQQMLVGLEFAGHHGFTFAHFLAERGYVVVNVLAAHTKASKEIEDNNPRKDDAKDAAQVCKLVGDGIFVRFPFLEHPYLELRLLTVHRHRLTVEATRFKNRLQGLLDLLAASIRTVRKEIHAASRGHVSREQIDALVASARTTIALTQAAPERRLEIQSLLARWALVRKQLAVLERRITALVEQCPEAKILTTVPEVSAVCAATLVAELGTPKDYMHYRQVLKLAGMNLASRSSGQTEGRKWQSKRGRPMLRRQLFLLAGRWCLTRGLYHADYLALKARNGGAGTKAVCTLARKLVPLLLKVMQSGEPFDKDRWLGNRRRREAVVS

SEQ ID NO: 60675 - protein, 352 aa, unidentified
MIIIGVDFHPEFQQIASVDTATGEFQEKRLAHGEEAENFYRALAGKKVRVGMEASGHARWFERLLAELQLELWIGDAAEIRTKRVRKQKTDRQDARLILQLLLEERFPQIWVPSWENRDLRQLLWHRHRMVQSRTRIMNQLQAVALNEGLRCQKRLWRERGRQQLESFRLAPWASRRRRDLLELLDRLNPTIAELTQAIEQEAEKCPPAQRLRTHPGVGALTALAFVLIMGEADRFHCGKQVASYLGLVPLEDSSGNRRRLGHITKQGSSILRFLLVEAAQVTVRSIPEWRSKYFHLAMRRGRKIAKVAMARKLAVCLYWMWRKGWNYEQLTKFGSHAGQPGNRHGVQSNTE

SEQ ID NO: 60676 - protein, 383 aa, unidentified
MDCTTPTAGSTLHCALELSKNTWLLGIQFPDRPQPSLYPIKGGNTEDLMAKLTAARDRCAKLSGWAPSIVLCYEAGYDAFWLARFLKARGIECLVVDSASMQVNRRARRAKTDRIDVGKLLRGLIAWLRGDRHVWSVVRTPSIDEEDLRRSHRERDYLVHERTAHINRIKGLLFAQGIRGINVKRQYKTLDVDKLVTGDGHPIPPRLASEIVREIARLALVQEQIAALERERDERPTPCTATEKKRAQLMYLNGIGPAISAVMTREVYYRQFDNRRQVAGFLGLATSPYDSGEVERSQGISRAGRGQVRGTMIQAAWLWIKHQPRSTLTRWFLERTMGQGGRVKRIMIVAVARKLAIALWRFLEHGLVPQGAILSGQMTSMAR

SEQ ID NO: 60677 - protein, 410 aa, unidentified
MLKIVYPNCCGIDVHKTFVVAVIAITNNQGITEYHCKRFSTFTNGLTQLRDWLEYYSCFDVCMESTGKYWIPVFNILEEQTNVCLAHPKYVKAIRGKKTDKKDAQWIADLFKHDLVASSFIPPLKIRQLRDLFRYRMKLTQLQVGEKNRYQNCLTWSNLQIASVVSDVFGKSAQAIIIKSILDNPQDKPNIEQLVHKRMKNKVQDLEIAMEGALTPEQAEKIRVIKAHYDALAICKEDLEQMIRELGQDYQHQVKLIQTVPGFKEDLSALRIISEIGCDMTVFDSAAKLCSWAGLVPANNESAGKKFSTRISKGGKYLKPFLVQVANAVVKSDKHPELRNKYLKLKKRRGHRKAISAICRRLLVSVYQVLRKQEDYNPVLQGLTEIRNPDKTMSVQDAVRFAQQHGFNVA

SEQ ID NO: 60678 - protein, 321 aa, unidentified
MKSEQHISSEKIVIGIDVSKDKLDIFIDGRDEHFTCSNQIKHLQKLAKRFKKIFPVLIVMEATGGYETAAAIVFGEAELPFAIVFPRRVRQFALGLGINAKTDDIDARVLAYYGRVAGISPVPIASKELRTLAALTNRRQQLIEMLRAEQYRLDMFEDTSRRGIRKHIRFLEREIAAAETEIQSQIKECPAWNQTDILLQSVPGVGPVLSATLITHLPELGHLSRRKIAALVGVAPFARDTGKSFGKRFCKGGRNSIRRVLYMATISASRFNPVIKAHYESLCNRGKLKKVALIACARKLLVILNAMTRTKTPWLSGTEAH

SEQ ID NO: 60679 - protein, 402 aa, unidentified
MKNPTLFVGIDVSKHKHDVAIMSSNKQLVGRLFEIRDELAGYQRLLKQLKAAAFKQKTQQFKIGMEATSDYWKNIYYFLDRQSDDFILTVINPIQTHNWAKTELRRAKTDPLDAKDIALFMVEKNPAASFIREPVWDIIKDMDRQIYAIGKQHTVSKNRLRLELTKVAPELEKATVNLNAKRILALLSAFPTARDITNASFDELVNIGYGKNNWALPASFIEKIKALTEHSIAYKTGFGAGYVVQSLVRQIIGYQQEVCQLKEQIVQLYQTIADQESLLTTIPGIRHETAIVLEAYIGDANRFSNAKKIVAYFGLNPTVHQTGKTRRKSRLQKKGSPIVRQKLFMAVICIIGTKNGPIYRYYQRLVDSGKPKMVAIGAAMRKLLVTIYAMLKNHRPFDQNYM

SEQ ID NO: 60680 - protein, 452 aa, unidentified
MARKPKQASKSNNAVLPVMRPDAAGIDIGATEIFVAVPADRAEENVRSFPTFTQDLYALADWLQQCGIRTVAMESTGVYWIPLFQILEERQFEVCLVNARHVKNVPGRRTDVSDCQWLQFLHSVGLLKASYRPEQEVCAVRSLLRHRESLVQMAATHVHHMQKALDQMNLQVHHVISDIVGRTGWAIVDAILDGERDPLTLAKLRNERIQASEEVIAKSLVGDYRPEHLFTLRQSLAAYRSYQKLIDECDKEIRQRLRDFQPPHPPAETQEDEKRTNKARPPGSVLRSELKRVFGIDLTRIPGIRTGIAQTLFGEIGPDFTPFRSASAFASWMGLCPDNDISGGKVLWTGTRKVSCRAATALRMAAQSLHHSKSGLGDFYRRMRAKLGAPKAITAAAHKLARIIFHLISTRQEFDEAKFAADQLRFHKSQETKLRAKAKSMGYQLVPIQPAA

SEQ ID NO: 60681 - protein, 378 aa, unidentified
MQLTQGMDRTPVLAVSLELAGKAWKMAASDGARANPAVLRTQQAPLGARLQELLEQLARLRARWGLAENCRTVLIYEAGQDGFWIARALQAKGVQALVVDAASVAVPRHARRAKTDRLDALRLLQALRAWERGERGELRMLRIPTEEQEAMRQRARERGLLQKEICQHRDRMRKLLRTVGCVQDLEDDFTQRLGAGQVRCADGKPLPAQLAERLVHECERLALARQQLRSVEKGLLHQLPEQVQRNIASLAAMKGVGWVGAMRLVLELFWRDFSNRRQVGACVGLVPQPYDSGDSHVDQGISKQGNARVRSLLIEMAWMWLRYQPDSELARWFARRTSGSGKRGKRVAIVAVARRLAIALWRYIKDGVVPQGARMKAA

SEQ ID NO: 60682 - protein, 331 aa, unidentified
MKKLARVGIDVSARELAVAMERAGGPLQESTFANDAAGHRKLIKFLTKNGFRARVCVEATGVYHLDLCLALHGTKNLEVMVVNPRAAKDFHRAQLQRSKTDRVDARSLLEFLRRMDFTAWEPPRSEILHLRGLSRRIQALLVNRAQEKNRRHADGAVEDTSPAIQESIERHIAAIDEEMKILSQAALDLIHADAGLAKRFAHLTSVKGIANASAITVLAELAVLPADMTVRQWVAHAGIDPRCRESGSSVRAQVRISKVGNRHLRRALFLPAMVASQHEPQVKAYYQHLLERGKKPLQALVAVMRKLLHAIYGMFKSESDFDGVKFYAMNA

SEQ ID NO: 60683 - protein, 344 aa, unidentified
MEHYAGLDVSVKETSVCIIDAAGKVIHEVKVATEPEALRAVLLDDTFTIERIGLEAGPLSQWLYSGLAEAGLPIICVETRHMKAALSAQLNKSDRNDARGIAHMMRAGLYRPVHVKTLASQKRRMLLTSRQLLQAKALDIENDLRGTLRNFGLKVGTVGTSKFEARICELLADHPDLAAIVEPLLIARRALREQLGVLHRRLLAIVRQDEVCRRLMSVPGVGPMVALTFRATVDVPARFKNSKAVGAVFGLTPRRHQSGEVDRMGGISKCGDAMMRRLLFDAAHVMLTRTIRWSWLKAWGMKIARHRGMKRAVVAVARRMAVIMHRMWADGTEFRWTSTNIAAA

SEQ ID NO: 60684 - protein, 353 aa, unidentified
MAPVKYRPCNYDVFIGIDVDKKSFSFTTTDRDVMINRSKRIPANEDNLYRYIQNSFPDKNVLCGYEAGPTGFYLYDYLIQKGVPCIVMPPSSIPKPSDSRVKTNRIDSERIANCLRSGEARAVRVPDESYRDLRHLISAREQYACDIRSAKQRIKALLLYAHIDAPIRDSWSGACIAHLKKLEAPGATRERLDLLLEDLAYSRLKMARVLRSLKEFSSTHEGIDRYRAYLETIPGIGMQTALTILARIGDPKRLSNLQEIGSFFGLVPSERSTGEKVQRGPITHLGNQAARALLIEAAWVAIRYDTELKQFYHRIHSRHHPACAAKKAIVAVARKLTLRIYSVLTEERPYTVR

SEQ ID NO: 60685 - protein, 376 aa, unidentified
MQEKLRFLGLDVHAETIAVAVAEQDGEIHSLGTIANREDSIRKFIKKLGLPEQLRACYEAGPTGFVLYWQLAQLGVQCAVVAPSLVPKKPGDRVKTDRRDALKLARSHRSGDLTAVWVPDENSEALRDLVRQREAAKQDQLRARHRLTKFLLRTGRRAPLGVKAWTECYMEWLQQIHFTQPAQEATLLDCMNEVEHMGERVKRLEQVIVEVVQLAPAPMQKVIRGLQALRGVAHISAVTIAAELGNISSRFENARALMGYSGVFPSEDTSGERVRRGGITKSGNAHLRRIVVESAWSYRHRPWIGAKLRKRQEGLPAEITEIAWKAQNRLHKRYMKLMARGKEQRKTMTAVARELLGFIWAIGIKAEAAGKQQMAA

SEQ ID NO: 60686 - protein, 365 aa, unidentified
MNTIYIGVDFHARQQTICYLTTDSGELQLHELKHQNKEEVRAFYSQFEGHVIVGLEASGYSPWFERLLEELGCEVWLGHATEIRRRARWRQKNDRRDAELILDLMLHDEFPRLYVPPLQSREVLRMLRYRHKLVKIRTMGKNSLQALALQSGLAKGSHLFTKVGQQELRAAVMSPAMQWQRDQWLQLLESLNQRMMETMFWLKQQSLDDARIARLRSHPGIGLLTSLCLVHSLEPVTRFRNQRKVVAYAGLEPLERSSAERIRFLGISKAGSRILRYLLVEAAHVAVRKDEELKRFYQRLAERRGRAKAMTAAARKLLIRAYIMLRDEIDYAEFRRRAVAARLARNRQRPNVPEVLIGQPASSEQ

SEQ ID NO: 60687 - protein, 343 aa, unidentified
MEMRVIGIDLGKSVFHLVGMDQHGKVVARKRLSRSQMMVFTAKIPHCLIGMEACCGSHFVGAALTAQGHEVRLIPAQFVKPFLKSNKNDYLDAEAIAEAVQRPNMRFVPIKTDDQLDLQALHRVRDRLVSRRTSVINQVRAFLLERGITFRQGRVYLRKHIPELLGDAEQKLSPRMRQLVDRLWQEWKALEEQIEALSREIDSIASQDAACQRLLGVPGVGPLVATALVAAIGNGAAFTKGRDFAAWLGLVPRQHSTGGKAWLLGISKRGNAYLRRLFIHGARSIVMSLNRDNHAMGKWMSQLEARTHRNVLVVAVANKLARIAWAVLARGEVYRSTPAFVAS

SEQ ID NO: 60688 - protein, 405 aa, unidentified
MEIFCGIDWSEAAHDVAVVDESGRLLARRRIADDAAGFTALTELLAGYAGRPERVDVAIETGRGLLVAALRAAGHRVFAINPKAVDRYRDRHGVAGAKSDPGDARVLADILRTDRDRHRPLPADSDLAAAVGVLARAHQDAVWARVQDANRLRSLLREFFPAALTAFADLTTNTALAVLAAAPTPTAAARLSRANLTDLLRVAGRGTRPTEAARLAEIFTVDQLRQPPVVEAAMGQAVRAIVRTLTAANQSISDLEAALAAAFDQHPDGEILRSLPGLGPILAARVLSEFGDDPTRFPDPASRRAYAGTAPITRASGRSRVVLARHVRNKRLADACYLWAFAALNRSPGARAYYDTRRAAGDRHNAALRRLASKLLGQLHHCLTTSRPYDEALAWPQPDTTPAAA

SEQ ID NO: 60689 - protein, 356 aa, unidentified
MSMVAHTHPFVIGVDAHARNHALAILACPTGEILDEGQFPAAGAGLQRAVDWVARRTGGDLDTLWVVEGVGTYGARLARAAADAGYSVAEAARMNARANRGVGKSDPLDACRIAQAVLPLEVAQLRRPRTDDGVRAAVRVLIASRDHISVERTAAINALTALLRVAELGVDARRALTGGQIALVAAWRTREEALATRVARAEAVRLAKRVLAADQEIASNAKQMTALLNSSPARKLLDQPGIGPVTAAVTLAAWSHPGRVRSEAAFASLAGVNPIPASSGNTVRHRINRGGDRRLNRALHMAVVTRMRMDPATRAYVEKRTAEGRTLREIRRCLKRYLARQIYRHLNAASDTLLAA

SEQ ID NO: 60690 - protein, 341 aa, unidentified
MEQIITVGLDLAKHVFQVHGADGNGAAVLRKKVRREQLLGFFAELPRCTVAMEACGGAHHWAREIERLGHEVKLIAPAYVKPFVKRQKNDMADAEAICEAAQRPTMRFVPVKSEAAQASALVFRTRDLLVRQRTQLINALRGHMTEFGIVVAQGPMHVAKLVAVVGDPASSLPEPARTVLNVLIAELRALDERVAKLDAEIVRRAKEDAVARRLMTIPGIGAITATALIALAPSAASFRRGRDFAAWLGLTPVQRSSGGKERLGRTSRMGERTLRRLLIIGASAVAGWASRKGVAPGTWLASMMARKPPMLVRVALANKMARTVWALLAHGGVYRAPAAAM

SEQ ID NO: 60691 - protein, 421 aa, unidentified
MRDSGLDVHRDFCEVAIAEAGVVRSSGRIATTPEFLEVFAASLAPDDRVVMEVTGNAWEIARILEPHVARVIVVSPSDTGIRQARAKTDRLDARTLAKLLAAGSLDAVWMPDERTRVMRRRLARRTQLVRSRSRAKNEIQATLIRRLKGRPPASDLFGVKGRKWLAGLELPLEERETVASAMRHIEFLDAEIAEVERVIALDALTMPQIRRLMTVPGVNVIVAATFLAAIGDIRRFPDQRKLVGYLGLDPKVRQSGPGPGTHGRISKQGSSSARHALVEACWTAVRAPGPLRAFYQRIRARRRHQVAIVASARKLACLFWCLLTRQQDYAYAQPSLTRKKMRRLEITAGAPRWQGKSGIWGANQAVQRAERELALQAEIAYQRTVRDWQATGPVKEGAGATPGRASNRPSKGKAARQTTSP

SEQ ID NO: 60692 - protein, 394 aa, unidentified
MEIVYPRVAGIDVGKKVVAVAVRTPGDQPGQRHQQLRKYRTFYPTLREMVGWLVDQAVTHVAMEATGVYWKPVFHVLCEVESLDVLLVNARHVKNVPGRKTDAKDAEWLAELCEVGLLRGSFIPPKEIAAIRELTRYRKKLTEARTSELQRLCKVLEDGGIKLDSVASSITTLSARAMVEALIGGERDPRVLADLARGVMRKKIPDLTMALAGRFGAQHALLARMHLGHIDHLSGMIQTLDGEIEQVITPFAEQVRRLRTIPGIGERTAQVLVSEIGVDMTRFPTAEHLASWAGLCPGNNESAGKHRRTTTRKGNREVREALVEAAWAASRTSTYLGARFRRLHRRFGKQGGSKAAVAIAHNLLVIAWFLLHDKRRLIRELQALGYTVDLTPAA

SEQ ID NO: 60693 - protein, 465 aa, unidentified
MKHNHRRHAAQTRRTSPSILERLQVDVAGIDCGAAEHFVSVPPDRDPAPVQAFPTFTADLQRLADWLLACGITSVAMEATGVYWIPVYDILEARGLTVLLVNARHVKHVPGRKSDVQDCEWLRELHSVGLLRGSFRPTAAILALRALLRHRDTLVKSAGTYVQRMQKALIEMNLLLPRVVSDITGRTGLLILRALVAGERDPHVLAQHRDPRCKATATEIAAALTGHYRDEHVFVLTQNLELFDMCQTQLAACDTAIEAQLATLTATTAPPPTPLPRPRVTRRHGNEPAFDLRTPLHHLTGADLTQIDGIAPYTALKLLSEIGTDMSRWPTDKQFTAWLTLAPQNKISGGRRLSSRTQPSANRAAAMLRMAALSVVRGQTALGAFYRRLAVRIGKPKAITATARKIAILVYRTLRGTLTYQDPGAPTYNARQRHRLLRRLRTQAETLGFTLLNRETGEVLEGTVS

SEQ ID NO: 60694 - protein, 320 aa, unidentified
MTESSVVVGIDVAKAQLDAAVVGASAVPARFANEADGHTALLAWIQPLAPQLVVMEATGGYESLIVCAPQAAGLAVAVVNPRHAHAFAKALGHLAKTDRIDAAALAELGRTLLARDDLARYLRPLASAEQRVLVALVTRRRQLVTMLHMERQRLALALPEVQASVQALIKAIQKQLRDVDRDLNRHVTEHFAELDRLLRSMGGIGPVASATLLAELPELGHLGRRQIAALVGVAPMAHDSGTLHRRRRIGGGRFELRRTLYMATLTATRHNPIIHAHYRRLVDAGKYKKVALVACMRKLITILNAMARNHTEFNASYTHA

SEQ ID NO: 60695 - protein, 403 aa, unidentified
MNAVGIDVSKGKSTVIALAPGGKLLARPFEVLHTKSGIKELISFVHTLGADTRIVMEHTGRYYEPLLQWLAASDLFVCAVNPKLIKDFGNNTLRKVKTDKADAKKIARYALDNWVDLRQHTGMDTTRTQLKTLNRQFAFCMKQKTACKNNLIALIDQVYPGANTYFESPARADGSQKWVDYVLTFWHVDYVCSMSLSAFTERYRKWCHRHGYNFQPDKPALLMEKAKDLIAMLPMDKTTKVLVQTSIAQLNVLSKTVEALRTQMIALAEQLPEYPVVIDMNGVGPTLASQLIAEIGDITRFPRRGSLTAFAGVDPGAKQSGTMQLKSNKTSKAGSPHLRRALFQIVSGLLMRSPDDPVYNFMDKKRSEGKPYYVYMTAGANKFLRIYYGRVREYLASLPKEQE

SEQ ID NO: 60696 - protein, 334 aa, unidentified
MQNVTLIGIDLGKHSFHVHCQDKSGKALLRKKFTRTKLIEFLAGCTSATVVMEACAGAHFMARRIADLGHEAKLISPQFVRPFVKSNKNDFVDAEAICEAASRPSMRFVQPRTEAQQAMRALHRVRESLVRDKVKTTNQMHAFLLEFGISMPIGAAVIKRLSTVLADNELPPYLAQLLMRLHAHYLYLVEQITELETALEQELSRDETGQRLQTIPGVGPITASVLSSQLGDGKQYGCSRDFAASTGLVPRQYSTGGKNTLLGISKRGDKNLRRLLVQCARVFIQKIDYQSGKLADWVRAQLARKHSCVVCCALANKLARIAWAITTRQTVFER

SEQ ID NO: 60697 - protein, 472 aa, unidentified
MEFKFLVEWTKPAFYCGLDVHKYELAVAVYCKDDSESELLKTNVFSVDSTGLNQFWIFVSKFHPKGFAMEATGIYHHVIYRFLVKKRAHCEWGFNILVVNPADASGIPNRQKTDKIDAENLARYLAMGLLKSGKPVIEVIEDLKAIFRMALRIEKDRTALKNRIKKTLDRAGIRPKGMDLNLEWVRELLHYFLEGEANLGQVFNQIQEDLELLKSHRHKIFKNVSKFIPYFDFSLSPAQRSMIRQDLVELGFKTARKRLLAVEVDQLIFERPALRQHAFNLSTIPGISPFSAVWILAEIGNIHQFHSVKSFLSYCGCSPRIVSSAGKIYSAHLSRHSNSYLRTIFYNAAVVLCNLEKKESVLKEYARQVINRKRSVSMTLVYCIVAAKIARIVHALLRTSAPFNPRHGCDVDKRYLKDKGTEFSLTSKNLIRKARNSLKRVKDVQELGLLGDHVSILAEQLDLLLQRKKICE

SEQ ID NO: 60698 - protein, 405 aa, unidentified
MSKDVFVGLDWAVHAHEVCIIDAAGKPADRKGFAHDREGLAELMRWLARFGKRLRIAIERPSGLIVDALVEAGHLVFPIHPNAVKASRPRYRSHGGKSDVSDAYLLADLLRTDGHRWQALSPQSDSIRALKALVRSRDDLVHARVALGNQLTSALESFWPGAACIFADVTSPIALAFLARYPSPAAAARLNEARLQRFCRSQHYSGRRSAAELLARLHAAAEGLAGPIAVDALAQVVGSMVVVLQPLVEQIALLTRRIELFMESLPDGQIIMSFPRAGHVCAAQILAEMGDVRERFPSVERLAAEAGAVPVTYESGKARSVTFRWACNHRLRQAVMCLADNSRHANAWAHAIYAAARARGCDHPHAIRILARAWLRVLWRAWFDRQLYNPELHLGALKLSNEQGG

SEQ ID NO: 60699 - protein, 408 aa, unidentified
MYNAVGIDASKLKSTITIIQPAGVVIRKPFDVLHTSDELNTLVTYLKSLEGETRSVIECTGRYHEPVVKSLSEAGIFISAVNPKLIKGQKQNTLRKVKSDPADARKIAKYALDNWAELREYSSMDTTREQLKTLNSQFTFFMKQKVAAKTNLISLLDNTYPGVNKLFDSPTRDDGSEKWVDYAYSFWHVDCVRKIGLKAFTERYEAFCKKHHYNYQKNKPALLFEESKQLVAVFPKEKSYKLLIQQSIQQLRLASEHIEIIRKEMNELASTLPEYETVMSMYGVGETYGPQLIAEIGDVSRFTHREAITAFAGVDPGVNESGQFKQRSNRASKNGSTRLRKTLFQVMSTYLQNKPVNEPVYQFLDRKRAEGKPYLVYMTAGANKFLRIYYGKVKECLRNLEQSQIEES

SEQ ID NO: 60700 - protein, 345 aa, unidentified
MEDMYYIGLDVHKKTISYCVKDGSGRIYAEAEIPATRLDLDMWMKTLPQPWTAAMEATIFTAWIYDHLKPHAAAVKVAHPLMLRAIAAAKKKNDRIDAHKIADCLRCDFLPECYMASTEIRERRRTLRYRNLLVRQAVQMKNKIAVLLMEAGVTYNKQKLHKVGYFRELLASNQDIDEGLKPLLRLCRETVVRLGKTESALVRSLQRDSLLMERVERLMTIPAVGPITALTWALEVGDVQRFSSIKKAISYCGLCGAENSSANIIKRTPLSKQRNKHLQTTLIEAAKMAPRNSVDLAMIYDREKQKGNANRATLAVARKLVAYLVAVDRRQKDFLVVERENCTAA

SEQ ID NO: 60701 - protein, 412 aa, unidentified
MYYVGIDIAKRSHVACVMREDNSLEIRPFEFSSTKSGFEKLRAQLSSLACDVSEVLIGMEATGLLFDNLYRFLRSLHYRVVLLNPYQSAKFREMDTMKRVKNDNIDAQMIAALIKSGRFSEGYVNDDQLQSLRTLYRHRASLEDQLKSIKRQTQTILTVVFPELEQVISDPFNITGLALLEKYPTAKHYHHASIDRILKTFRGIKGNNFNKAKAGRLLTLARESIYSGAGKEGYEATIRSNITLMRLLKEQMRSVEDAMLALFETKKATKEEQEEMAELIDNLRTIPGVSDKTILALLAECGNLDRFHNAKALTGYLGLYPTLEQSGDSQKNGRIAKRGARLAKKAIYLAAIAAIRHNKELRQVYMNYRSKGRAKKECIIITARKLLAIIYAIYTRNVPYDPQRVFVAQPNQ

SEQ ID NO: 60702 - protein, 466 aa, unidentified
MSKKRKQRTKKAQQAQRVRAHLKQVNLFAAGIDIGSRSHFVAVPGELDKEPVREFAGFTGDLHQLADWLVKIGIQTVAMESTGVYWIPVYEILEARGLEVLLVDARHVKNVPGRKTDVLDCQWLQQLHTYGLLRGAFRPQNDMVALRAYLRQREGLIASASDSIRHMQKALRQMNLLLDNVVSDITGLTGLAIIRAILAGERDAQQLAKLRDRRCRSDERTIAGSLEGHYREEHLFALAQAVERYDFYQQQVEACEKAIERHLRQIEGDDDNDPDVPPASKPKGHSKNGFDFDVRSELYRLTGVDLTEINGMSENNVLTILSETGTDMNAWPSEKHFASWLSLSPGNKVTGGKRLSGKTKASANRAAAAFRLAAYSLANSKTALGAFYRRLRNRLGAPKAITATAHKLARIFYQMLKTKRPFVEAGQDYYEQQYRERATRNLKKRAAALGFQLIPEPTNDLQQSMC

SEQ ID NO: 60703 - protein, 318 aa, unidentified
MKSPVFAGVDVSRRTLDTALEGDTQVRQIDNRLAPIRRWLHSLPEGCAIGVESTGNLHQLLVRTAIAAGRTVYVLNARDLAHYARALGRRAKTDRLDAQLILRYLQREHEHLHPYHLPSARQTEIAELIGRRHRVVKAQGALQQSFTSSSHRPRALGRTLRAFEALIAELDARLQALVAEEDTLHSAATHLRTMVGFGPLLSASMAHAVKRHPFKNADAFIAYIGYDPRVRDSGQWRGRRFLSKRGPAELRRLLFTAAMSACKTKLWQPFYQRYRARGLSTTAALVVLARKLARIAFSIVRHNVDFRPELVKVPCAQP

SEQ ID NO: 60704 - protein, 486 aa, unidentified
MANRKQSTFERLSSGRLNRQQRKELARKLTAENPGLEIVNRNVAGIDVGNESHYVAVAPRCDPQPVREFGSWTADLERMADWLKVCGVEMVVMQSTGVYWMALYDMLEARKFKVCLTNARHTKNLPGRKTDVQESQWLLKLHTYGLLRDSFHPPEEIRALRSLWRLRDRHVKEAGRAVQHMQKTMTMMNVQLSNAISDISGATGQAIIRTILNGERDPWKLAKLRDRRIKATEEEIARSLEGNWRADMLFELKQAVDAYDFTQNQIAECDQRLQTLLAALPEREVKSTEAQAEVPASESAKRKQKRKKSRADGNAPRFDLQAELKRVCGVNLTSIDGIDVMTAQTIVAELGTDYSRWKNESHFTSWLGLTPSRDISGGKIVKQESRKIKSPVAIMLRMAASSLIRSESYLGARYRSLRTRLGAGKAIKAMARYLACLVYRMFTHGQDWVDRGIKEFESKRTQRELSYLQRRAATLGYSIVPQPTSA

SEQ ID NO: 60705 - protein, 337 aa, unidentified
MKTTIDPTNPPSFFLGIDVGKAELFCHIIGPEETCSECFENSGAGIRLLTKWLAKNAPGKQLRACLEQTGHYGDAVVAALYQKHPDSIHLVNPHRIKAFGMQKLRRNKSDTADAKLIARFIKSEHLELVPWHPRSHDQQRITELSRYADSLTQDTARLKTKLEAQPEKSITVSIKRRIKMQEKELADTRAAISKLIKANSELLAKSKLLKSIPGLGEVSTQIVIAELPNLGEFTDARQLAAWAGLTPQHYESGTSGRTRTPITKIGSVHLRRGLFMPAMTARVFNPLLKTFADRLLANGKKPKQIIIAVMRKLLHQIYGILKSGVPYNPEKRGFAGS

SEQ ID NO: 60706 - protein, 331 aa, unidentified
MTIPAKQKVVGIDVSKDSLAICHLTGEKAQHLETENNQAGFKQLVKQCGTDSLYVMEATGIYYLQLAYYLYEQGAQVVVVNPVIIKRYIQMHLGKGKSDKKDAQWIRRYGEQNQTAYWQPEESIIVECRQLEQVTEQLIKQKTMVINSLEALELQPIKSQLAAKSLKQTLKTLEKQIKQLEDKLLATLEKAFTKEIKLLSSIPGIGRKTAGMLLLFAGGFRQVSNYRQLIAKAGLSPREYTSGSSIRGKVRITKMGGSLIRSKLFMCSFSAKKSNAACKALYERLVAKGKNGKLALIAVCNKLLKQAFAIVKSGIPYRPDFANIFTQKLDF

SEQ ID NO: 60707 - protein, 468 aa, unidentified
MGHKRSRSRQPDRKKGKQPSLLKRINRNAAGIDCGSEAHYVAVPPERDAEPVRSFKTFTADLHHLADWLKACKIKTIAMESTGVYWIPIFEILEEHGFEVVLVNSRHIKNVPGRKTDVLDCQWIQELHSVGLLRGSFRPAAEIVSLRAYLRHREKLVQSAASHIQRMQKVLVQMNLLLHNVISDITGVTGMRILRDIVAGVTDPMALAAHRDYRCRASVEQIAASLTGNYRAEHLFVLRQNLELFDTFQRQIQTCDGEIESLLCTLAAKRRRPKAPVPSPRCKPRFCDNEPRFEIRDPLYRLAGADLTQIDSIGPYTALKLIAEVGTDMSRWPTHKHFTSWLTLAPKNKITGGRLISSKTQPSANRAATALRMCAMAVGRSSTALGAYYRRIAYRIGKPKAITATARKLAVLVYHTLKGDFDYNDPGAHAYEEQHRDRTLRNLRNRARQLGFGLVDVETGELVQGAVT

SEQ ID NO: 60708 - protein, 382 aa, unidentified
MTGTEPHAWGTGLMDDITFVGLDVHKATVCIAVAEGGRGGEVRQLGVFENRPEILSKVASRLSKGGRRLSFCYEAGPCGYGLHRLLTGYGHECVVVAPSLIPMKAGDRVKTDRRDALMLAKLHRAGELTAIWIPDAAHEAMRDLVRARATSVRVLAKARQHLQGFLLRHERIYCGARAWTLAYRRWLTTVRFEHPAQQIVLQDYIHAVQEAETRRDRLTQQIEELLPNWSMAPVVAALQSMRGVALVVAVTVVAEVGDFRRFANPRQLMAYLGLVPSEHSSGSSVRRGGITKAGNALARRVLIEGAWTYRMSARVSRKLHDRLEGLPAAVRDIAWKAQLRLCARYRRLAATGRPKVVVTTAIAREMVGFIWAIARLAQPAPV

SEQ ID NO: 60709 - protein, 319 aa, unidentified
MAQNDLVVAGIDVAKDKVDVCIRSLSLKRTFASTAEGRRELASWLRRNKVGKAVMEASGGYEREWAKALRVAKIEVRIVDPKRVRSFAQSAGRLAKNDTIDAEMIAWFAETFDQARGQAYDATREQLHQMVHARQALKDMQSKLTSQGEHALPAAVQRIHARISKTIAVELVKIEAEITALIQATPHFAELAEIIESVPGLGRTTSAALIAAMPELGQANNKIVAALLGVAPYDDDSGRRRGERHIKGGRRRTRNIFYMACLGAATQHNPVLKAFYDRLVAKGKLKKVALTACMRKLICILNVMIERRQKWDAKRYAVS

SEQ ID NO: 60710 - protein, 346 aa, unidentified
MSKRTYVGLDVHLNSIVAVWMVLGGKLRKLVVEPTVEGFDKLIQAVGGVEVWAAYEASSCGWEAHDELTRRGWKVFVLAPTHLPQSVRRRKRKNDLEDAKMLLHVLMMHGELGSKLPAVWIPGQKIREDREVVRRRLTVGEKLGRVKAEIGSLLRMNRVKKPEALKSLWTQKYQAWLQGLCTQEGVLGESVRKALASQVRELAFLEEEAQVLQAEIEELSKAETYRARVEKMTHRQGVATLTAMTYLVEMGDVNRFNNRQQVGSYLGLVPTSDESGQQNNRKGHITRMGPARIRKVLNQAAWACLAFDEELRAWYTPLAKRRGKKIAIVAVMRRLGIELWREAKSA

SEQ ID NO: 60711 - protein, 319 aa, unidentified
MSTMKEVYSDPQGKNVGIDVGKSQLDICIHETDIQWSTSNNTGDIKTLARRLARYKLARIVVEATGGYERDLVAACAERGLPVVVVQPRKVREYARITGVMAKTDKLDAQVIAKFGAQIQPEVRALSGESVRLFKDLLARKRQLNEARTQELNRQHKATKTVARSHVAMIKLLDKEIAWVNDKLSKALTDIEEWQHTYDLISTVPGIGDGVAFTLLGELPELGTLTSREVAALCGLAPFNKDSGSMKGKRRIRGGRAPIRTVLYMAMLSAIQHNPVMRSFYLRLVAQGKHKKVAITACMRKMMTILNAMVRDQRPWQMG

SEQ ID NO: 60712 - protein, 355 aa, unidentified
MSQKLDTSPAVIGIDIGKNSFHIVGQNQRGAIVLRQKWSRGQVEARLANLPPCRIGMEACVGAHHLSRTLKALGHDARLMPAKYVRPYSKGQKNDYRDAEAIAEAVQRPTMKFVATKTADQLDLQALHRVRERLVGQRTGIINQIRAFMLERGIAVRQGLRFLRAELPSILATRTDALSPRMLHILEDLSADWRRLDARIEDLSSEIEALARQDKGCERLMTVPGIGPIISSAMVAAIGTGDAFSKGRDFGAWLGLVPKQLSTGDRTILGSISRRGNRYLRTLFVQAAWVVLVKVGPKHWDRYGLKSWIEAAKKRLHHNVLAIALANKLARIAWAVLHKGCAFECVKTNEAYRPA

SEQ ID NO: 60713 - protein, 318 aa, unidentified
MNSSCFIGVDVSQRTLDVAMDEQEQVRRIDNTEAAIQPWLKEVPPASRIGVESTGCLHYALVRAALAAGHTVYVLNARDLAHYARSLGRRAKTDRLDAQLIVRYLKREHLQLHPYHLPSALQAQLDELISRRHQVVRAQVSLRQSFSTCTCELPTLKPALQALQSLIQQIDTQMRQLIAADAHLAQAAKHLRTVVGFGPLLSTSLAHALNRHPFGNADAFVAYVGYDLRVRDSGQWRGKRCLSKRGSAELRRQLFAGALSACKTALWRPFYQRYRDRGFSSTAALVILARKLARIAFSLVRYDTDFQPERLRMTCAHP

SEQ ID NO: 60714 - protein, 413 aa, unidentified
MPAWNIIYLDHMSARRRGDPSHSMQVARVAPDWPVAILMRRRRVVGDRITYVGLDVHKDGIVVALAEDGLRGEVRDYGRIANTAAALQRLARKIGQEGVELRLCYEAGPCGYGIQRQLSASGHGCIVVAPSLIPKRAGDRVKTDRRDAASLARLHRAGELTAVWVADAGHEAMRDLVRARLDAVHALRRARQQLSGFLLRQGCHYRRPAWTKLHRRWLAGLRFEQAVHHIVLEDYIAAVEAAQARRDRLTAQIEAMLPNWTLAPVVKALQTMRGMALVNAATLIAELGDLSRFANPRQLMAYLGLVPSEHSSGTSIKRGGLTKAGNSAARRLLIEAAWRYRFPARVGRELRLRQEQQPKPIREIAWKAQLRLCARYRRLARTGKPANVVTAAIARELAGFVWAIARQVPPALG

SEQ ID NO: 60715 - protein, 355 aa, unidentified
MSQQSNCAIAVIGIDIGKNSFHVVGHDQRGAIVLRQKWSRGQVEARLANLPPCLIGMEACVGAHHLSRKLQLFGHNARLMPAKYVRPYNKGQKNDFRDAEAIAEAVQRPTMKFVATKTADQLDLQALHRVRERLVGQRTGIINQIRAFLLERGIAVRQGLRFLRLELPSILATCTDVLSPRMSRVIEELAGDWRRLDARIEGLTREIETLAHQDQHCERLMTVPGIGPIISSAMVAAIGTGDVFSKGRDFGAWLGLVPKQISTGDRTILGGISRRGNRHLRVLFVQAAWVVLVKLPKQWERYGLKSWIEAAKKRLHHNVLAIALANKLARIAWAVLNKGRAFACDKTDAMTSRAA

SEQ ID NO: 60716 - protein, 350 aa, unidentified
MDRYIGLDAHASSCTVAVVGPSGRRIHSQVVETNAGALIRVLRGIGGTRHLCLEEGTHASWLYEVLSPHVEEIVVAAVRESRGPKSDKLDAFGLAEQLRIGAVKRKVYKKRGEFGSLGHRAKAYTLLVSDSVRVQNRIKSVFRSRGVAVAGKGVFSKAEREAWLKKLPVSARPLAELLMQEQDGLLELRKKAEKTMLAEARRHRAWRLVKSCPGLGEIRTAQLLPIVVTPYRFKNKRSFWAYCGLGVVMRSSSDWVRTQSGEWVKAPVKQTRGLNRNSNRTLKGIFKGAATTVVGQAKDEPLYRHYLQLLDGGTKPNLAKLTLARQVASIMLAVWRNEEVYDPARVGQAV

SEQ ID NO: 60717 - protein, 330 aa, unidentified
MKQYKYFFGVDVSKRTVDVTLLKDDIPNHRQFSNDSAGMDELMQWLSELIPEFDNVLFCMEATGLYCFPLTQFLTSNAIDLWIEHAAQIKKTIAFDRGKNDKIDSRRIAVYASKNLDRLRLWKPVSSTLEKIKHLASLRERLVETKKRLVTPIKEFEEMGNTAMAKLLNKTIKSSLIAIDKDLKNVEARIMAIVNEDENLKHLYKLITSVVGIGFVTAINLLVYTNGFTVLKDTRKLACYCGVAPFEYSSGSSVRGKTKVHYMANKKLKCNLHMASLSAVKLDADLKAYYERKIAEGKSKLSVLNAVKNKLLARIIAVVNKQKEYVQKVA

SEQ ID NO: 60718 - protein, 427 aa, unidentified
MEGQTPSKQAGWGGYRYFLGLDWAKDHHAVVVLAPDGRRVLDVQIAHDAQGWQGLRKKLVDLAETDLSVVAATVETTCGPAVERLFELGCAIYPINPKAGQRYRDRKAPCGGKSDHLDAWSFADALRTDGHAWRRLAPEDPCLQELRLLCRDERCLIGRRTAMVNQLRQALLEYYPAALEAFDDWTIPGPWDFVIRFPTPAALVKAGQRAWEKFLHSHRLYRPSTYAKRLEIFARARQFCGTESVTRAKSLLAVSLAKELGTLQGQLNDYRRRIEELFQKHPDHELFGSLPGAGDMLAPRLLSECGQDRRRFEDHEALQCYAGTAPVSFQSGQIHVVKFRWACNRDLRAAVHLWADGSRKSCTWAQVYYEHKRQEGKSHACAIRCLGQRWLKILWKLWQTRQLYDEQVHTRNQVRHGSWVLALAPAK

SEQ ID NO: 60719 - protein, 361 aa, unidentified
MTNRMTLQPEARRTIIGVDTHKHVHVAVAIDTCGIHQGAHSFAADAGGYRALLAWAETHGRIDAFGIEGTGGYGVGLAGAVRRAGHRVVEVNRSDRRLRRIAGKSDSIDAEAAARSVLAGQATATPKTADGAVEMMRQLKVARDTAVKARTAAMNALKQILVNAPPVLREPLQHLTDQRLLARCAGLRPGRLDTPTAAAKHALRALARRWLALAEEVATHDRHLARLTTETSPTLRASFGVGANVAAELLIVFGDNPDRIRSEAAFAKLCGACPIPASSGMTTGRHRLYRGGHRQANAALYRSVIVRMRYHQPTVDYVARRTADGRTKRDIIRCLKRFLAREIYQRVMTDFRARQTVLDAT

SEQ ID NO: 60720 - protein, 581 aa, unidentified
MASRFASSDKDGSSSGSGMSSTSAPVATSEHSSASSLCDRSLDDGCEVVCLDDFVTGSRANVAELRRRDGFRFIHGDATDPAVWHTLADRFDLVLLFACPTSPITFLVAPQWGRPAFGVGMTVSPCRVDGLGGGVTGSGGIDRPLIRGMTTGFFAGREALRNVDVAIGAVGRPGEDDRRTSVIDVSDIGAFLGLDVGKGEHHATAVTPAGKKAFDKRLPNSEPKLREVFGKLKAKHGTVLVVVDQPASIGALPLAVARDMGCPVAYLPGLTMRRIADLYPGEAKTDARDAFVIADAARVMPHTLRSVDLEDETIAELEMIVGFDDDLAGEATRISNRLRGLLTQIHPSLERVLGPRVQHPAVLRLLDQFGSPAQIRKAGRRRLVTLTRPKAPRMAERLVDDIFTALDEQTVVVPGTDAAALIVPSLASSLQAVLDQRKLLAARIEELLDNHPLSKVLTSMPGIGVRTGARILIDVGDGRSFPSSAHLAAYAGLAPATRSSGSSIRGEQPSRRGNKQLKRAFFLSAFAALADPVSRAYYDKKISQGKHHTQALLCLARRRADVLFAMLRDGTFYEPQPTPSA

SEQ ID NO: 60721 - protein, 347 aa, unidentified
MNATTVAVDLAKSVFQLAVADEHWHVVETQRLTRTQFERWFANRDVSLVIMEACGSAHHWARWLNGLGIEVKLLPAQYIRAYVKRNKADAADAAALLEVARASDIRPVRIKSVEQQALQGMHRIRSLWMGTRTSRINALRGFCREFGIAIPVGARTGIEAISRVLADPATAVPDLIRGTAKLLLEEIRLLEGRIAQLERELAALAKLSPACTTLLSIPGIGLLTATALVAATSGDVSHFKDARHFSSWFGLTPKEYSSGNSRYLGRISKKGDRYLRMLLTHGARSLLRASKVADTAGREVCGVRRWALDVQGPGAITTRQPVRWPTSWRASAMPCSETRNRLAKASG

SEQ ID NO: 60722 - protein, 338 aa, unidentified
MTILFVGIDLAKSVFALHGVDEHGKAALVAPKVARDKLVGMVAALPPCTIGMEACSGAHHWARVFAGFGHTVRLMAPQFVAPYRMSGRRGKNDAADAAAICEAVQRPNMRFVPPKSLEQQGRLTVHRMRQAFIEQRTGMINRIRGLLSEFGIVLPLKAATVRRQAGACLEDLPGWANLAIGDALSELHRLDERIEQYDRHIAQMAREDARAQQLMKLCGVGETTATAMVAMIGNGHEFDCGRQFAAWLGLTPGQYSSGGKSRLGRITKAGDSYLRSLLVLGARAVLAAAGSKSDPISRWAKSVAERRGYWRAVIAIAAKNARMAWAVLKRGEAFMLPT

SEQ ID NO: 60723 - protein, 422 aa, unidentified
MNKPDKAMQGQTRHWVGIDWGRACHAVSVVDDQRALLTQFVAPATLEGLEGLCKRLKPYGAIAGIAIEATADPIVGFLAVRGFTLYLINPKLSKNWRESNSVAGVKSDARDGRVLAEELARRHESLRTFVQDDPAVARSAGLCEGERVLIGRRTALVQQLQSVLRQYYPGVLPFFSDWTSPAAWRFIVKFSTPKTLARTRKNTLIAFLKANQIGLKPIWLERIDGRGNVTAWPEPPNSEGLQMLALATAKELLSLQPCIEQCERRIEECAQELPQVELMRSLPGAGPRLAPALAAIMMMAQARGNDLEMVRGVSGVAPVEDSSGKRRKTRMRRRCNKHWRNTLHLFARCSMMCCTWAKAFYDLRRERGDSYATALRKLADKWLKIIHRMLLTNEPYDEQRYLEALRKNGSPVYQRLCGKTCA

SEQ ID NO: 60724 - protein, 351 aa, unidentified
MSYKLDSGIAVIGIDIGKNSFHVVGHDKRGAIMLRQKWSRGQIEARLANLPPCLIGMEACVGAHHLSRKLQMLGHDARLMPAKYVRPYSKGQKNDFRDAEAITEAVQRPTMKFVATKTAEQLDLQALHRVRERLVSQRTGIINQIRAFLLERGVAVRQGLRFLRAELPRILAAPCDALSPRMLRVIEDLAGDWRRLDERIEILSSEIEALARQDKNCERLMTVPGIGPIVSSAMVAAIGTGDAFSKGRDFGAWLGLVPKQTSTGDRTILGSISKRGNRYLRTLFVQAAWVVLVRIGPKHWHRYGLKSWIEAAKKRLHHNVLAIALANKLARIAWSVLACGRAFEASKIQAS

SEQ ID NO: 60725 - protein, 422 aa, unidentified
MEKIQTKKLKSVNDKMLIATVDIGKGLNMGYARCPDRSEVRPFEFANNRAGFDKFWTRLVEARNAKGLDTIVVGFESTGAYGEPLQHFLKDKPVRLVQVNPMHTKRVKELQGNSPNKTDRKDPKIIADIIELGHALTVVIPEGSAAELRRLTHARERTIKRRSALYNQLQDLVFISFPEFLQVVKDVKTKTARHLLQFYSDPQTITELGLGTLGSVIKRISRGKLGPAKAKDLFDAAKTSAGITEGRFSVALEIQATLEAVAACDTFVLRLEEEMSRYLKAIPYGHLLLSMKGIGRITAAGLIGEIGDFNSFDTQRELLKHAGFDLFEISSGKLRGSRRISKRGRPLLRKLLFFAALNTVRKGGVMHEHYQRHLKKGMKRVKALVAIARKLLGIIFALVRTGQEYQLNYMELQTHANLAKAA

SEQ ID NO: 60726 - protein, 315 aa, unidentified
MPEETFVGIDVAKDQLDVHVLPRGVHFTCENDAKGIASLVSRLQQENPAVIIMEATGGHEINVAAELGAVGLPVAIVNPRQVRDFARGIRKLAKTDAIDAFVLARFGQTNKPEPQPIPTDQEKQIKQLVTRRRQLVDMRASEKNRRYSARSQRVEQSIDTVIATLDREIAKVDKDIDDLIRNSPLWREEEKLLRTFKGIGPVVSRIILAKLPELGKLNRQEVACLVGLAPLNKDSGKMRGKRMISGGRKEIRDALHMAALSAIKHNKIIKPFYERLMKAGKLFKVAITACMRKMLIILNAMVKNKAPFQNPEVFA

SEQ ID NO: 60727 - protein, 346 aa, unidentified
MSYSTTVGVDLAKNVIQISVVNGRGKELSNRSLTRKKFAEFLGKQKPSLVAFETCATAHYWARAAERHGHEARIIPAKAVAPFRQGHKTDSNDALAVAEAARRPNIKDAPIKTVEQQGLQAILRGRDRLIQECIAQSNHMRGILLEFGIAIPLGFAALLRKLPEVLEDGDNELPDFYRPTLHRMYQRMLELREDIDGMTKEVGELVKNHPVCSRLSDIEGIGPIGATALYASLGSGAAFANGREASAYVGLTPRQYSSGGKANIVGLSKYVGNRKLRSVLIQGALAYVYRLKEPKSSKDCWLKELIERAGPRRAAVALANKNVRTAWALIAQGTEYQRRPRLEMAA

SEQ ID NO: 60728 - protein, 357 aa, unidentified
MRFYTTQHQFYCGIDLHARTMYACILDQHGEIRLHRNMPASPETFLKAIAPYRDDIVVAVECIFTWYWLADLCAREGIPFVLGHALYMKAIHGGKAKNDKIDSQKIAVLLRGGMLPQAYVYPAEMRATRDLLRRRMHLMRKRAELLAHVQNTNSQYNLPEIGKKIAYKANRTGVAERFPDPAVQKSIAVDLAMIDSYDRLLTDLELSIVQTAKQHDANTLYRLQTVPGIGKMLSLVLLYEIHNIHRFPRVQDFVSYCRLVKCAKESAGKRYGTSGKKIGNAYLKWAFSEAAVLFLRNNAQGQQFLVRLEQKHGKGKALTILAHKLARAVYYMLTRGTVFEMAMFLNGYGSKAGKPAA

SEQ ID NO: 60729 - protein, 349 aa, unidentified
MNATIVGVDLAKNIFELAVAGSDWRITQRQRLARPKFLSFFVHLAPCEVVMEACGSAHFWARRISALGHTVRLLPAHYVKAYVRRNKTDQADAGALIEAARCAEIREVPVKTVEAQQIQSLHRLRSQWMSTRQRCVNTLRGILREFGFAIPLGVNVAKAQIGLALGDTETDIPAALRATLAEMFQQIAVLEEKILSVEHQLNALTRTDVRVQQLRQIPGIGALTSTALRAIVGDIQRFPSGRHFASWLGLTPNERSSAEKRRLGRISKQGDVYLRTLLVHGARSALLAAHRALRAGRPLDRLRQWALDCERQRGHNKATVALANRIARIVWATWKYERPFDGNWSPEAH

SEQ ID NO: 60730 - protein, 309 aa, unidentified
MRSVGIDVGKYWLDVAQHGDPRIVRFGNDAAGISELIERLTPRSEHFVVLEATGGYEKPLLQALIQAGLAVSRVNPRQSRSFARASGQLAKTDALDAIGLADMAQCLHLRLPRYVEPQAWQSTLAAYVTRRAQLVLTIHQQQQQIAALIVPALKKSAQRTLRALKREHDDLERTITALTAPHLTPAWRSIKGLGPVVQATLLSLLPELGALSRQQIAKLVGVAPLNRDSGTLRGQRRIFGGRARVRSTLYMATLVAVRWQAEFKAFYQQLRVRGKLAKVALVACMRKLLVVLNARIRDERRSSVPIHTT

SEQ ID NO: 60731 - protein, 368 aa, unidentified
MGYATILGLDLGKFKSVCCVMDADTGRHAFETLATTPATIHDLLTRHASAAGAGVLLVIETCDAAGWVHDVACAIHGVTVTVVHTQGDERWRWRKVKRKTDRDDALKLARLARLGELPQPPVHVPAPARRQWRRLVVHRRSVVARRTRSRNAIRSIYNQQGLSLARGNKQWTRAGVAQLQADAKAIEDCDDALDLWRGRLHVELTLMAAVDAQLKILDAKLDALAATDPRVALLQTVRGVGPRLAEAVVLHVGEDPRRFRTGEQLANFAGLVPKQLASGETTRLGHITGRGPALLRSLLVESAWMVWRLNDWAQHFVEKVSRGGRGRRKLAIVALARKLLILLWGMLKSNRPFRAPKPKAPKPALAIA

SEQ ID NO: 60732 - protein, 368 aa, unidentified
MLVRGTEDKEYAMSQKLNSAIAVIGIDIGKNSFHVVGQNKRGAIVLRQKWSRGQVEARLANMQPCLIGMEACVGAHHLSRKLQALGHDARLMPAKYVRPYSKGQKNDFRDAEAIAEAVQRPTMRFVATKTVDQLDLQALHRVRERLVGQRTAIINQIRAFLLERGVAVRQGLHFLRAELPGILAKRTDVLSPRMLHTVEGLLDDWRRLDARIEALSTEIGAVACKDPGCNRLMSVPGIGPIIASAMVAAIGTGDAFAKGRDFGAWLGLVPKQISTGDRTILGSISRRGNRYLRALFVQAAWGVLARIGPKGWERYGLKSWIEAAQERLHRNVLAIALANKLARIAWAVLNKGRAFECVKTHASSSQPA

SEQ ID NO: 60733 - protein, 547 aa, unidentified
MVKIVTKATTGKKSTKRRTKAFAAAVMGRPAGQIQERVKLAGPEHFGIVSVDCAKDRSKWMLADFYGRILVPPTVVEHQRSQIQLTLLMLKQATEKHGIKDSIVAVEMTGTYHQIIFRAFRDAKFETRIVHPFASSHYRAPEHGDVKTDDHDLIAIFRAAVNGFGLLEQPWDDVHRALQLLVRHRRDLVNKRAKLQCQIRHHLERSLPGYSNSFPDDSLWTQPVAIRILQYIAEHGGTHQALLDAGIPGVSKWLKQQNVAFQSRTVARVVAWAANAVVGDPMRTMMTRIWQTLLIDWQSKTQQISLLERDIAGLLVKTPWVLMMSHPGINVISAAELAAETGPIEHYASAKAISGRAGLFPSRYQSDGVDRGGNLSRFRNGRMRAAWMLTAECLLKCNVYWSGKFQHWKSQGHDPRDIRVRIANRITRTAFQMVAGRKVFNHRSRLDRGYILDKLLTFHREHDTPIVQILSDLKSATDQVPTHAHADEAKPLQEVHRKSMRSRKSGPQQIGNLLVAVLARLGVTISSPAVNLTSLEAPAAESDKGDR

SEQ ID NO: 60734 - protein, 447 aa, unidentified
MVDGTGLSRGDRNRNGRLGGLRELLPAGNAVVGIDLAQVKQAAVVCDHDSRVLARRRVSARAWELGSLLDWAVERATAAGFASVTVACEPTGHRWRVLDQLAAERGLPLVCVQPLLVWRAREAEDLTWDKSDPKDAVVIARLAAQLRCYEPERADATWARLRQLGARRARLVTDATAGVAQLRDLLECVWPAVLAGSGSPFRSASWRACLAVVLDRAAGDLSRVHRLGLARFTVAVRRELPRWGATRPCLRIVRAVFDALVDAAGVAVHRPGALERADLVLGDWRDTRRRLAEVETRMVAVLDELDLTGLVTSIDGLSAVGAAAILAETGDLTRFGSPRAVVKHAGLCPRDNASGSHQGKTSISGKGRPGLRLAAWRAVWAALPNNRVLAARFRYLTTREHHRLARQQARAACAAALLRWLHVVVTQRVAWDPAIAAGQKPPLHRAA

SEQ ID NO: 60735 - protein, 414 aa, unidentified
MEQKMIYVGIDWADDHHDIVITDDSAKTLDQFRIDHTCDGFALLHSHLANHQKSPSLVLIAIETSRGLLVHELLQKGYTVYAINPKAVNRYKDRHVLSKAKSDALDALSLGHLLRTDRHLFQPIKPLPEDYRLLSRLCEDLRKVVDERSRIVNQTISCLKEFYPKALEIFSLNSQIFIDFLKAFPDHGTLSACTKKTFLVFLKKHRYPYPAKAEELWKTIQSPALQPDRVVARTGRLRLGMLLDQLKNLKEHITHYEQEIQVILDSLPESTPVKSLPGVGERLAPELVATLGPNRKDGHHRFHAAEEIAKLSGCVPVVRESGKWRSVSLRYACVKSLRRTFHDWAFASINHSSWARAFYDYHKARNQSHCTILRNLGKKWIKILFAVWLKGTTYNETLHIQNLKARNVPWAMAL

SEQ ID NO: 60736 - protein, 351 aa, unidentified
MALLTLPDPAALVTLGVDTHAETHVAAALDQAGRLLGTRTIPTTPSGYAALLAWASTLGRVDRIGVEGTGSYGAGLGRWLRAHGQVVVEVDRPDRAARRRRGKADTLDAHAAARAVQAGTATTTPKAADGQVEMIRSLRLARRSAVKARTQAANQLTALLVTAPDGLRAQLRGLPLAELVAAAARLRPDQVPATPTDAAKFALRSVARRWLRLTEEINELDVLLERLVATAAPALVAVKGVGTQTAAVLLVAAGDNPERLRSEGAFAHLCGVAPIPASSGKTTRHRLSRGGNRQANSALYLIAVGRMAWHPPTRAYVKRRTTQGKTKAEIIRCLKRYIARELYAVLTGPTS

SEQ ID NO: 60737 - protein, 431 aa, unidentified
MSGEEIVAWIGIDWADEGHEVCEYEVESRRKHRYAVKQSAESLQEWLNRLRIRYGGKRVAVVLEQARGGLIYALMSTDFIAIYPVNPESLAKFRKALYPSGAKSDPPDAELLEEMVRHNPERFRVWVPGDVSTRSLQLLTEGRRKFVDDMTALTNQLTSVLKTYYPQALEWAGELSSQRACAFLEKWPTLGELQRSRAVRIREFFQKHGRLQRELMEERIQQMQTAQSLTSDPAVIAAAVMMVTALVAQIRTLRPVIERYDGEIQRIFRQHPDRAVFESFPGAGKVLAPRLAAAFGADRDRFEAAVDLQQFSGIAPVTVRSGKRIWVHRRLACPKFLLQTFHEFADQARKFCAWSALYYQQQRARGKKHHATIRALAYKWIRIMFRCWKDRRPYDDSVYTASLVAHGSGLAQQLNIESRVQKCTEAPQPAA

SEQ ID NO: 60738 - protein, 388 aa, unidentified
MNKIIYIGMDVHSSNFTLCSFEPGYGFEADKIFGQTQIKEDIFNSTVKYINKLKSMRPDVDVICGYEAGGLGYNLHRKLKAKEIESVILAPTTMAVARNSSKKKNDYRDAITIAKCLASSAYKAVYIPDEKDEDVRDFIRMRDDHKTALKQIKQQLNAFCLRHGHHYDKPKWTGLHLNWLRKLELSKVQRETVEEYLATYEALTSKIAALDVRIEDIASEERYSEKVNKLKCIKGIKTHIALSFVCEIGDFNRFKSADKFSGFIGLVPGECSSGNTERMLGITKAGNRHLRRLVVEISNTYRRGAVGRKSAALKERQKDMPKDVVAYADKATNRCQRKYQRMMFKGKNSNQAVAAVARELCCFIWGMMTGHHSRTAQAEASVYRSELD

SEQ ID NO: 60739 - protein, 389 aa, unidentified
MKKVKLLARFSPFSVLVKGFKKLVDKISSLKLKKSQVVIGIEATGNLWENLYSFLEGYKVIILNPYQTRKYHQVLSKKAKTDKVDSLVIAGLLRSKEALASYVPEEEVQVLRELVRLRHHLQKNKKNYLRKTYSLLNLVFPEYIDLIKNPFKKVSSMILKKYPTAIHMARARRTDLVKMARRIKGNNYSSELAEKLIQVAKESIYSGKASEVRGMALRIIIDEIQFLKNKIKDIENKIEEILSSDEPSSPQKRLLKISGVGPKTVAAFLGEVGGDVTRFSSANKLIGFIGWHPKISESGEKKNLHPKMSKKGPSALRASLYMAAVASLKHNPYLRSLYHRKISEGKESKQALICVGKKIISIMYSMLKYEADYDPQRIFFQFEKEQVLI

SEQ ID NO: 60740 - protein, 352 aa, unidentified
MNKDNTKYVGIDLGDKTSLIHIRNGAGEFVEESRIPTTAKAMKRVFGQQTPQKIAIEVGSHSRWVSRLLRSYGHEVVVADARKLRLIYENPRKSDRVDAEYLAKLLRLDASLLSPVLHRGDEAQQHLAILRSRDSLVQARTQLVNHARGIVKSFGHRLPSCSTKSFATKARPALPESLRPALGPILDSIQQISEHIQKYDQEIERLCQQTYPETINMRQIKGVGPLTALAYVLTLEDANRFQKSREVGPYLGLIPRRNQSGDADPQGRITKTGDQYLRRLLVGCAQHILGPFGEDSHLRIWGLRMAENGGKRAKKRAVVAVARKLAVLLHKLWISGEDYHPFYPRQMKPSIA

SEQ ID NO: 60741 - protein, 360 aa, unidentified
MLYLAIDQHRKQLTVNLRNEQGDAILRRQVSTEWARVRSFLEEVQKTSTPEGGFVTILEVCGFNDWLVKLLAEYGCRETIVIQPEKRSKKKTDRRDANALGELLWVNRQRLLAGKKVHGVRRVQLPGETEAEDRQITALRKQVGQLRTRTVNKIKHLLRKHNLEQDQPAKGLDTQRTRKWLAALPLGATDRLEMDLLLAQWKLWDAQIATLELQIERRQHKSATAAVVATIPGCGAYGSLALASRIGVIERFARPASLANYWGLTPGCRNSGQATDRLGSITKQGSSMARFILGQVILHVLRRDARMRAWYGRIKRRRGSKIARVAVMRRLATIIWHMVKYNEPYVLGGPPPRPWTTPAA

SEQ ID NO: 60742 - protein, 337 aa, unidentified
MQRFIGVDLHKTAFTVCFLEGEEKRLATYKIGEVEKFRSELRLDDEVALETTTNTRSFMKQIRDCVAHIHVINTMQFKVVSQSVKKTDANDAEAMAFFLSKGMLPEVRMKDERYAELESLANTRHKLVQLKTALKNKIHNILNAQGIVTKKECLSSGKGLAKVLEYQVRPVARIELEVIIEQIKGLNAGIAKIDEELSDKGKGLDGHEGITSIKGIGDKGGAILLSVIGDVNDFEDEKKLAAYFGIVPRVSNSNETNRQGRITKRGSKLGRTTLVQCTLIAIRYSNYLRAFYEKLKAKKGSGKAIIATAKKLLGIIYLTLKNKWVFEDFPNFVLKEA

SEQ ID NO: 60743 - protein, 360 aa, unidentified
MKIVGVDLHAKQQSIAMLDNQTGELTERVIRHEGNAVREFYAALEGSVVVGLEATGSMQWFLELLDELGIQYRVGHPAKIRAAEPRKQKHDRRDARLILELLTANRFPDIWMPSIEQRDLRTRLRDRHQWVKMGARLQHTLQSIALNHALRKGISLWRAAGLETLQRLPLPPYTRQRRNQLLSLYAELQKRIQELDRQVEEQAQQRPQARRLLTHPGVGPLPALASEVFLGDPSRFTTAKQVASYIGMIPREYSSGQRQGLGTLTKQGNSLLRYLWTEAALHAVRKDPELKRFYRRKLIQKGMGKARIAAARKLGIRLWIMLRDQIEYEEFCRRGKLRQNGEAHAGMPNFNSGPATAVTG

SEQ ID NO: 60744 - protein, 394 aa, unidentified
MRFVGIDIASETHVVAVVDETDAVLVRPTKFTEDAPGYDRLFSLLGTPADTLVALEATGHYWKNLFAVLVTRGFAVALLNPLRTRRFADEELARTKTDAIDALGIARFAAQKRPAPTRLPDRATEELRELVRLRDRLVQDFGDHLRPLHRLVDLGFPEFTRYVKSLDSERATAILHDYPTAAAFRNVSARRLAGLRYDGRHKVGDDLARALLDAATRSVGQHHGEAYRLQVRYACEDLDLLRRRLRTLERDIERTLDDHEIGALLTTIEGIGPQTAARLIAELGDPAEFRSAAALASYVGVIPAIRQSGKWTSSRAGLSPLGHAALGAALWMPVLTAVRKNPWLRAYYQRLIARGKLPKVALIAAMRKLLIAVYTVAKTRRPFVSHLAPQEARA

SEQ ID NO: 60745 - protein, 351 aa, unidentified
MDRYIGIDAHSESCTVVVMGPSGKRIRQQVVDTQAEVLIDLLKGVAGEKYVCLEEGQLAEWLLEVLGPHVKEMAIVQPPEHGGRKSDLDDAWALAERIRVRADGIYVFKPTTQYRALREAVRAHIVAVKEQTRAKNRLRALFRSRGVAKLDGSLYEPESSAQWLAKLPLPYRRRAEWLGQQVASTTQAQAIAESWLKEEGKKLPDVQRLKTVPGLGDVRAAQIVALVVTPHRFRKTRQFWSYCGLGIVTRASGEWTRSASGQWQHVQGKVQMRGLNLNRQPLLKAVFKGAATSVLTRSNPLHEHFDRLVAGGTAPHLARLTIARRIAAATLAIWKKKEEYEPAKHRSTEAA

SEQ ID NO: 60746 - protein, 348 aa, unidentified
MTTVAERFDHVVGIDTHARSHTYCLVDTRTGAVVDTATFPTTTAGITRATSWITRHSNRTSLLAAVEGTSSYGAGITAALAATGIGVAEIRPLSRPSRARTGKSDPIDAEGAARAVIGEHLDRLAQPRRTGDRAALRVLLAARSLMDQQRTANRNALTALLRSTDLSVDARRPLTDAQIAVIAGWRTGRDDAPVRVFREEARRLARTVLDQTELLRINHRQLAQLTEALAPGLQSIPGVGAVTGAILVTAYSHHGRVRSEAAFASLGGIAPLPASSGNTTRHRLSRSGDRQLNRAIDVVVRTRLSCDPATRVYAARRRSEGLSRREIRRCLKRYVCRALYRELRTRMA

SEQ ID NO: 60747 - protein, 316 aa, unidentified
MSQFNVFVGIDVSKDHLDVHLLPDEQSWRVANDEAGCAELSERLMGLSGPVLVVMEATNVFWRLAATRLASAGLRAAVVNPRQVRDFAKATGQLAKTDAIDAHVLALFAQRIEPPVRALPSEQCQVAAELLSRRAQLMGMRVAEKNRLSSARAAKVRKDIAATIAFLEKHLAALDEEIDQWLKSTPIDQSRANLLKSFAGIGEHTAKSLLITLPELGSLTAKQIGALAGLAPFARDSGNKRGQRQIRGGRSTVRAALYMPALTAIRCNAVIRALYQRLINAGKHHYVAITACMRKMLIILNAMLKSNQPWKNPQEA

SEQ ID NO: 60748 - protein, 441 aa, unidentified
MKIPKHLQHINPYAAGIDIGSRSHFVAVPEGLSEQPVQEFSTFTDDLHRMVDWITACGVTTVAMESTGIYWIPVFEILESRGLEVKLVNAHHVKNVPGRKSDVLDCQWLQQLHTYGLLEGAFRPTEQVCSLRAYVRQRMNLVRYGASHIQHMQKALLQMNLQLSNVVTDITGVTGMRIIKAILGGERDPQVLAGMRDRRCKNSENTIARSLCGNYRPEHLFSLKQAVDLFAFYQGQIAECDKEILSQLTTFDAISGTKDDQETKPTKTVDDALRRMSGVDLTRIDGIDTNSALKIIAEIGIDMNRWKSAKHFASWLGLCPGTKVSGGKVLSGKSKQVANRAAATLRLAAFTLFNSKSALGAYLRRQRSRLGAPKAITAAAHKLARLVYAMLKHGTAYIDAGQEYYEERYRTRVVQNLKRKAQELGFALVEVASPQLKTATA

SEQ ID NO: 60749 - protein, 340 aa, unidentified
MKLYAGIDLHASNNFIAVIDADGKRMFKKKLPNEAELILSTLGSFREELAGVVVESTFNWYWLVDVLGEAGYRMHLANPSAIQKYSGLKHSDDKHDAFWLAEMLRLAILPEGYIYPKEERPIRDLLRKRGHLVRLRTSLILSLQNIVARNCCIRLSANDAKRLRKDVVNPLLESNEDLAMAGMVSKESIDFFTREIRKVETMVEQRVKLKDQYRYLLTVPGIGKILALTIMLETGPISRFPKVGDYVSYCRKVSSKWTSNDKTKGKGNKKNGNKHLAWAFSEAAEFARRNDTQCRGYYSRKMQKTNFMVAHQALAHKLARAAYCIIKAEVPFTPEKLFAS

SEQ ID NO: 60750 - protein, 371 aa, unidentified
MAEYREAFVGIDVAKLKNAIAIADAGRTGEIRFLGEFDASASSMRRTIQRIAAKFDRVIFCYEAGPTGYGLYRLILSLGHECTVVAPSLIPRKPGDRVKTNRRDALALARLLRAGELTSVWVPDEGHEAIRDLVRARASAVETLRVHRQQISAFMLKHSRIYPGKKTWTMRYLRWLQEQQFDHPAHQIALQEMAEAVRVSKERVERLEKVIEEFIPNWSLAPVVRALQALRGVDLIVAVTFATEVGDVTRFDSPRQLMGYLGLVPGERSTGETVRRGSITKAGNGRIRHMLVESAWTYRHPPRVGAKKLYRLDAAPPKVREIAWKAQSRLTARYRMLAARGKRTTVVCTAIARELAGFMWAVAREAQTVKS

SEQ ID NO: 60751 - protein, 373 aa, unidentified
MPRYSTAFGMDVHLRSTTVCALDAETGEAVTRRFRGNPWGEVAEWMSGFPGPSLAAYESGYLGFAPQRELSGLGVDCVVAAVSKVPRSAADLSSKNDRNDAARMAKAILSHDVTPVWVPSPEIEGLRDLAAAHDAATARLAAAKQRLLAFLARRGYVYGGTTPAGNPRKYWTYGFLRWLDGIHPADDGGIRALAALRNEVEAADETREALLAEYRAAVAAGPLSAEVEALQSIKGCGFALAAAFASEVGDFSRFRSGRQVTAYFGLAPKQRSSADSVRLGGISGAGNALVRKLAVEGSWCYAQAGHQPKLMPKGSGVPLEIRMHGRKGSERLLRRREEMIARGMPQAKANAATAAELVRWLWALGTMCREGAE

SEQ ID NO: 60752 - protein, 361 aa, unidentified
MNPSPLKTIGVDLHKTSLTATVLDPTGTVLERKDLPTKCRRQIAAYFASHGPDVQVAVESVGFYHWFWEAVKPKVRRLHLADPTGVRACAGRRTKTDRNDSLLLANLLRENRLPMAYVPEEPIRALRELCRHRHRLARQLALARRQLRWLGLKNNLPGPATFTSDRAQKWLLSQETRLNSVHRLSGRQFVDQITTLERQLCDVESVLKETVAAHADLAPTLALLQSVPGIGFITALTILCEGGDLTRFDCIDQLSAYAGLCPRVTQSGESAHHGHISKQGPPVLRWVLQQAAWVAIRCDPQVRRIHARIARRAGNKKAATALARKLLSYAWSVVRRGQPFVWPNPDTQPGPTPVPVWSYDI

SEQ ID NO: 60753 - protein, 363 aa, unidentified
MFTERTSVGLDVHARSVAAAAIDGVTGELFQSRLTPSHEHIRSWVQDLPGPVAVTYEAGPTGFDLYRVLSAAGIRCEVAAPSKLQRPSGDRVKTDARDAVHLARLLRLDQITAVAIPSVEQEAARDLVRAREDCRGDLMRARHRVSKLLLRHGIVYYDGHAWTRRHDTWLRHDAAAQLSARATRLAFDSDYENVLAVKARRDRLDVAIGEIAAASEFTPLVHRLGCLRGIGTLTGFALAVEIGDWSRFTGNTIGSFVGLVPSEHSSGSSRVQGSITKAGNTHVRRLLVEAAWHHRPGYVVGKTMRERWELAPAAARARGDEGNRRLHQRWVKFIERRKKSTIANVAIARELAGWCWSLAVLEE

SEQ ID NO: 60754 - protein, 350 aa, unidentified
MKFYAGLDVSQATTAICVIRENGEREWEGLAPTEPSAIAEALTKYAPQLERAVLESGQLSTWLTRELRSLGFPTICVDARQAHKALSARLNKSDSADAESLAQLARTGWFREVHVKSPEADRLRMLLAARRRLISCRKDIEAQLRGTLKTFGIKLGAVTAGGNRVSFREKVRAALIADEFLRAIVEPLLTVHEGLCRESSKLDRTVSTMARRSPIARRLMTVSGVGIVTALTFMAVIDTPARFRRSSDAAAYIGLTPKRYQSGQVDYSGRISRSGNSELRACLYQAGCAVLNRTSKFSALKSWGLRLAARKGFRKAAVAVARKIAVIMHRIWSDGTVFRWASSKGDVVAA

SEQ ID NO: 60755 - protein, 344 aa, unidentified
MGEVSTIGLDIAKSVFQVHGVDVDGAVVIRKRVSRAKLLEFFADLPACLVGIEACPSAHHWGRELAGLGHTVKLMPPSYVKAYLKRNKNDANDAAAICEAVTRPSMRFVPIKTKQQQTALMLHRTRQLLVRQRTMLSNALRGHLAELGVVSAKGRNGTAELLKIIADGADNRVPSSARGILDVLARQYSGLGAEIGSIDKSILAWHRSCEASRRLAEIPGIGPIVATALVAEIGDWKAFSSGRSLAAWIGLVPKQHTTGGKDRLGRITKQGNRYLRWLLVVGAMAVVRYAKKHGTKNRPWLARLMERRPTKVAAVALANKIARMAWAIMVRGDRYKEPKLLMAA

SEQ ID NO: 60756 - protein, 346 aa, unidentified
MTHSTTIGVDLAKNVIQVSVVSGRGKELLNRSFTRRKFAEFLGKQKPALVAFESCASAHYWARAAKRHGHEARIIPAKAVMPFRQGHKTDSNDALAVAEAARRPNIKEAPMKTAEQQGLQAIQRSRELLIGECTALSNHMRGILLEFGVTIPQGFASLMKALPEILEDGDNELPDLYRPTLHRLHGRMLKLREDIESMTKEVEQLVKQHPVCKRLTAIEGIGPIGALSLYAVLGSGKAFAKSREFSAYLGLTPRQHSSGGKTNIIGLSKKVGNRRLRSVLIQGARAYVYRMKEPRSPKDRWLQDLIERAGPNRAAVALANKNVRTAWAMVTQGTEYQRRLQLEMAA

SEQ ID NO: 60757 - protein, 314 aa, unidentified
MQTPFEVLNIGADVAKDEIVVACSEGSFPVRKIENKRAAVTAFLRDLSAGSRIGLESTGIFHELLAEVAHKLGFIVFVLNPKDARHYAKGVGLRGKTDRVDAELIARMIAHEYTKLHVWIPPTPEQREMSRLLKRRAKLSSLRQALAMSLSGLDGFGADLKALRARFDQVIARIDQRVKTLVKVNPDRKEHVTHLRTIYGVGPVVSAALVNILERVPLNSADAFVAFTGLDPRPDESGKHRGKRRLSKRGPADLRRLLYLAAMSAIKTQAWKPLYEHYRAKGLSSTATFVILARRIARTAWSMYTYKTEFDYLV

SEQ ID NO: 60758 - protein, 318 aa, unidentified
MNTKMKQSINVGVDTGKTQLDIHIRPLDILFSVENTDKGIKEALRVIKQHKPERIVIEATGRLEMPFVLACAEANLPIVRANPVHVKRFAGAIGRRAKNDRLDAELIAHYGEAIKPTLTVIKAKNIRLMSDLVIRRNQLLSMQTMEKNRIQILPKSLHSTIKPILTAMKNQITKLEEKLVKLIEDSPEYQAKNTILQSIPGIGNIAAASIISNVPELGYITNKQAASLIGVAPITRESGRYKGKRVIQGGRAQVRTVLYMAMMSAMQCNPVFKATYTRLVDAGKPKKVAIIACVRKMVVILNSMLRDGVIWDENTAKK

SEQ ID NO: 60759 - protein, 364 aa, unidentified
MNNNHNQASDGEAKAKPEVIKLGLDLHARQVTECRQLDGSTPKTAQKWGPWKLLNQVEEWVKAGIKVYSCYEAGACGYWYHRELIKCGAINYVVAPRRLENQRSKHQKTDRLDARALLDNLESYLRGNRHAITIVAVPSPEREQQRSVVRHREQLVRNRRRGEARGRALALTQGILAPVGWWRPAAWKQFKTQLPEWMDSQLEHWQEQALATDAKERQVRRELEKMVSIELPIGVGALSWITLELEIRGWDRFQNRRQIASYTGLCPGIHNSNGRGREGRINRCGNSVVRYTLIEMVWRMTRWQPDYPPIKKLHTMVSKRGKRRLVVAAARRLAIDLWRWATGRATAQELGLQLQPTMTQKPSV

SEQ ID NO: 60760 - protein, 412 aa, unidentified
MVTCGIDWAQDHHDIAIVDTDGRLVAKRRIPESVAGFAELTLMLADAGDDPEDQIPVAIETPRGLLVAVLRASGRPIYPINPTSVARYRERTSMSGKKSDHADAVTLANILRTDADQHRRLPADTELAQSITVLARAHQDATWRRNRAGNELRSLLREYFPGFLHTFADRPGGITAPEARAVLAIAPTPAKAARLSKPQIVAALRRAGRQRGLAPLAAAIQQQLRLPQLRQPTLVEDAFGIQAVAMLATLDAECASVDRLGEATTAAFSQHPDHRIITSFVGLADLTGARLLAEIGDDRTRFADARALKAFAGSAPVTKASGRSIRITHRHVKNNRLAAVGFVWAFIAAGCDGPTRAHYLARRDHGDRHPAALRHLYNRMLGQLYHCLQTDQTYDPIKAYGQPPTHPTRAAA

SEQ ID NO: 60761 - protein, 408 aa, unidentified
MKDSRKRYIGLDVHKHYLIAIGVDDELNVVLPARRVAFSYLETWMKKTLTQQDEVVLEMTTNTWQLYDELSVYAGSVMVVHPPHVALITRSQVMNDKIAASILARLLAKGLLVGIWVPPQDIRELRGLVAQRKKMTGLATQAKNRLHAVLQRHHLLPPAGNPFHEAQQSWWLTLPLGALEKVNVQSDLDTLHFAEAQRMHLTSMMEALANQQEQVTRLLQVPGFGVVTAVTVWAAIGDIQRFADPQHLVGYAGLGTRVHDSGMSTRTGRLTKAGRRDLRVVLIEAAQVAANSHPHWKAELARLAPRLGRNKAIVAIARKLLVAVWYILAQHKPDRFAQPEAIAQKFLKFAYQLGKENRPAGQSAAHFVRQRLDALLLGQELTSIAWGSKKPIPLPPSTNKVSDVPNTK

SEQ ID NO: 60762 - protein, 386 aa, unidentified
MYAWERLETPSLLFPGDPSMLYLGIDQHKRQLTVNLRSEDGSVILKRQVSTTWEKVRAFFANLAERARPEGGFLAILEVCGMNPWLLEMLKEYGCREIVVIQPTERSTQKTDRRDAGELSHLLWVHRQQFLDGKHPLGLRRVQPATPQEADDRQLTALRARLTKKRTAVLNGMHKILRKHNLEQACPTKRFQTQKVRRWLAEMELSALDRLEMNLLLPQWDLLDGQLEVVEAKIAARAEADEEVKLLESVPGLGHYSAVAIVSRIGNIDRFRRPASLANFFGLTPGCRNSGQATQRLGSITKRGSKMVRYLLNQAVVRVLRFDGAMRTWFKRIKRRRGSKIARVAVMRRLATILWHILKRKQKYRYDSPIKKHQEFERFEGQTEAA

SEQ ID NO: 60763 - protein, 421 aa, unidentified
MTPPNEVVWAGIDTHTDTHTIALLDERGRPLGAETFTADPDGYDRLIGMLPGPGRVAAVGVEGTNSFGAALARRLTAAGYEVREVLRPRRSVRRRDGKSDPLDAVAAARSVMAGDGTSLPKSSDGWVEALRHLNAQRSQLVSAMTAISNSTNGLLVTAPEPIRERYRGLRSETRMNRLAECRPAGGLVEHSVLAALKSAAKAWKALKRQAGLLEERMRLILEEHARPLLDMYCAGTVIAATLAIVAGDNPERIRSEAAFAKLCGVCPIPASSGRTNRHRLNKGGNRQGNMALHRIAIVRLRYHKPTRDYMAKKTREGKGKLEIIRCVKRFIAREAYRALISIRNGEVGRGTPAERGAKLRELRVSRNITQQQIGEALCVPSSRISEIERGARDLPELEQRAIQWIHSITDPKQHTQTLDNV

SEQ ID NO: 60764 - protein, 417 aa, unidentified
MSEYAALVAVDWADQQHAVCLLDPSTGEREQSIVKHTPAALQEWALSLHQRFAGQPIAVCLEQSRGPLIYALLQYDFFVLYPINPATLAKYRQAFSTARGKDDPTDADYLLDLLEHHRNRLRPWHPDDEKTRTLRLLVEQRRRLTGDRTRVSNRLTALLKGYFPQVLDWFEDIRTQLVCDFLERWPQLSLLQQARPATIDKFLRSHHSTSKPTNLRRLTEIKTALPLTTDAAVMTSSVINVKALVAQMKTVIAAISEYDRHLEALCQTHDDYHLFAALPGAGPIHAARLTAALGSDRSRWQSADELVTFAGIAPIIERSGKQFRIRWRYFCPKFFRQTFHEFAAQSIQDSFWARAYYSMQRAKGKDHHAAVRALAFKWIRVIWKCWHTRTPYNEVIYLESLRKKGSSLLKFAVDYQQ

SEQ ID NO: 60765 - protein, 357 aa, unidentified
MKKKSNTVSFKNQLFYIGMDVHKRSWTVTIRTNGMVLQTYSMNPDPAELARHVNRNYPGGIYKSAYEAGFCGFWIHNKLTELGIENIVLHAADVPTTNKEKVNKTDKVDSKKIAKKLENDDLNSIYVPGNKEQQLRSLCRLRSRLVSHSTRLKNRIKGHLNFYGVELPLNHEMAHWSANFIKYLESMCIGKKPGVDYLRICINELKEERTRILEVTKLLRSYMQKMPIWETTISNLLSIPGIGFFTAARLYTEIIDINRFKNINKLATFVGLVPGSNSSGDKEQCTGITSRKNPHLRYMLVEASWIAVRRDPSLLKSFSELTKRMTKSQAIIRIARKLLNRIRFVWKNETPYKYFVN

SEQ ID NO: 60766 - protein, 355 aa, unidentified
MDEQRVVVGGVDTHKDLHFAAVVDDQDHVLGNQCFPSTRHGYKQMLAWLRSFGELARIGVECTGTYGAGLLRYLQQAGVTVLEVTAPDKHDRRKRGKDDTIDAENAAHAALAQVRTVTPKTRDGMVESLRVLKACRKTAIAARRVALQLIQNTIISAPDELRESLRTLTRMQLIRTLAAWRPDLSDYRNLSSAYRIALKSLGRRYLELHDEIADLDTMIAALVNELAPELIAQNSIGYESASQLLLTAGDNSGRLQSESSFAALCGVSPVPASSGKVSRHRLNRGGDRAANSALHIIAIGRLRTDPRTQAYVAKRLNEGHSKLEAIRCLKRYIAREVFYIIQRRQREINATKITA

SEQ ID NO: 60767 - protein, 374 aa, unidentified
MDKAYYTTIGMDVSDRKTQVCVMAKAGTTPRIVMETTIPTTKDGLAKFLSTQDGAAPVVFETGMHCRWMNEVAEGMGFKVYVANPCRIRMIAESKTKNDVNDARTLARLALSDPGLLHPVKLRGPEHQKMLNLHEMRNLLVKQRTGIVVQLRAVAKSMGFRIAKCQAASFHKLERRAWPKELNDIAWPMMKNLEQLAVTIKTYEKQIRELAGTPTFKAQVERLMEIRYVGLYVATGFVAVTGGDMDRFDKPRDVGPWLGVTPRQDQSGDIDRQCHITKAGSPLMRRLLVESAQMILRDGSADTDLKAKGLRICARGAKIAKRKAITAVARSLAVLMVAMLKKPDAPYVPLSARCEKELLAMRATVEAAGPGKNP

SEQ ID NO: 60768 - protein, 310 aa, unidentified
MGGMNAAIEVGKHKLDVALGSNGELFSEPNQARAITRLAKRLAELDCARVLIEGGSYQNVLVAALRAAELPVVIINPRRVREFAKSIGQLAKTDHIDARVLALYGERIQPPVRELPDEQNQALRGLWVRREQLIEMLLMEENRLEHAPKALHRSLRAHIDYLRKQIKQADNNLDRAVRNSALWDKYGLLSSVPGVGPVLSVALLADLPELGRLNRREIAALAGVAPFNCDSGTLRGQRKIQGGRKRLRRVLYSATVASVRCNPVLRPFYQRLRVSGKPAKVALVAAMHKMLLILNAMLKTQTPWRPPCPV

SEQ ID NO: 60769 - protein, 357 aa, unidentified
MRELSKVAGLTVGLDLGDRFSQFVILDAEGQILEEGRLGTNEAGLRRFFSSRPPMRIALETGTHSPWVSRQLVQSGHDVLVANWRRLRLIYEHPSKDDRVDARYLARLARFEPALLCPVEHRNATLQKDLALLRSRDALVVARTLLVNHVRGVVKSFGTRLPACSTGCFSKTASKQIPEVLEPVLLPVLEQIASLTQQIKGLGQKIQILADDQYPQTKLLRQVKGIGPITSLAFVLTLGDPRRFARSRTVGAFLGLVPGRKQSGHSDPQRRITKQGDSGLRRLLVNAAHYILGPFGPDCDLRRFGQKISSRGGKLGKKKAIVAVSRKLAVLLHHLWRTGEVYEPFHRQAARAKATAA

SEQ ID NO: 60770 - protein, 369 aa, unidentified
MTFFIGVDLHKTQFTVHVRTEEESESLDQIRQYPTTTDGYAEFLARISRYKATGADVKIGVESTGNTRFFKNQVEKAGAEVTVINTLKFKVINESTKKTDKHDASTISEFLSKDMLPESYLCGKETENIRRLLKSRERLVRSTVGQKNEIHALLVSLGLSDELRSLQSKKGRQRILDTLESNNDYVLEAQSVKLMFEIIERIEESVKIIEKQLVELTKDDEMVNRLLTIRGCGKITAWTIRAYTEDISRFASAKKYAAFYGLVPWVQDSNETIHHGKITKRGPQELRTCFVQLVLGIRRCKDTSNWRMMQRYEYMKTNKGSGKSIVAAARKMAEIVWAMLSDKKDFDAQKMIGKYKPMSLAEEALTVMN

SEQ ID NO: 60771 - protein, 353 aa, unidentified
MDRYIGLDGHSQSCTLRVLTATGKDVGREVVETNGAALVQAVRAIPGSKHLCLEEGVQSSWLYELLRDEVDEIVVTMPVRRVGSKDDARDALELAEGLRTGAIKRRVYKPCGPYSELRAAVRSYTMLTRDVVRAKARLKALYRSRAILAPGDEVYQASKHEQWEKKLPPPQRESAGLLYEQVEALTKLWSSAEERLLEASKAHKIVKILSTAPAIGPIRSAQIVATVVTPHRFRTSRQFWAYCGLAIVTRSSSDWIPGPQGWVRSKTCQTRGLNRNRQPMLKAVFKGAAHQVAVQMKSHALHESYKRLIDEGGVKPNLAELTIARRIASAVLAMWKHGEVYDPAKHRSNITQA

SEQ ID NO: 60772 - protein, 412 aa, unidentified
MQVLYERCCGLDVHKVTVAACVVVPGPGGVPRKEVRTFGTMTADLLALGDWLAAQGVTHVAMESTGVYWKPVWNLLEERFSLLLVNARHVKAVPGRKTDVRDSEWLADLLRHGLLRASFVPGRGQRELRELTRYRTSLVQERSAEVNRLQKTLEGANIKLAGVATDVLGLSARRMLAALVAGIADPAAVAELAQGRLREKIPQLERALVGRFGAHRRFLVAEQLAHIDFLDERIDRVGAEIAERMRPFAAMTAAVERLDTIPGVGRRTAEILVAEIGVDMTRFPTAAHLASWAGMCPGNDESAGKRRSGRTRRANPWLRTALVEAAHAAARTKNSYLGALYRRLAARRGKKKATVAVGHAILVIAYHMLQDGTVYQDLGPAHFDERDRDAVERRLVRRLQRLGYKVTLEPAA

SEQ ID NO: 60773 - protein, 315 aa, unidentified
MNSKEAFVGIDVSKDHLDIGIHPTGKAWQLVHDEAGEEKLCQELRKLKPDLIVMEASGGMESALAVRLQEAKLPAVVVNPRQVRDFAKAHGILAKTDRIDALVLARFAERIRPEVRALPDEAQRALEGLMVRRRQLVIMMGAEKNRLRRASKEVAQGIQEHIEWLKRQLDGVDREISRRIQRNDVWKQKDKLLQSAPGVGSVVSRSFLSGLPELGTINGKKISALVGVAPFNCDSGRFKGRRRIWGGREHIRSILYMGTVAAVRWNPIIRSFFLRLVKAGKSKKVALTACMRKLLVMLNAIIASNKPWKYGKVVY

SEQ ID NO: 60774 - protein, 336 aa, unidentified
MKKNYGFIIGLDVSKAKLDYCIINQGTMHQDFGCIANTAKGIEAFLASLKKKLKVEKEDILFCMENTGVYSMPACYWIQNGQFDYWVVSALEIKRSKGIVRGKTDKTDSRDIALYAMSHLHELNLSILPEKDFLEIRLLLAERDKVIKAISLFNMTNENKNFLPKEVLKTTLQHNTKMITFLKKQLTQIDASIEKLIQSNPVFKQQDDLLQSIPGVGRQTSVLLIAYTQAFTLFKNHRQFACYAGVAPFEYSSGSSVRGRTKVSNLANKKLKTALNMAALTAKKFDLQLKQYYESKVEAGKNKMLVLNAIRCKIISRAFAVINRNSKFVDTLKAVA

SEQ ID NO: 60775 - protein, 329 aa, unidentified
MSEATQLKRFSQSPDPDALYAHLVRNYPEAEYHSVYEAGFCGFWIHYRLVGLGIHNIVVNPADVPTTTSEKLRKTDAVDSAKLARSLRSGDLKGIYVPGSESLETRSLIRLRDSITKDQTRLKNRIKSHLRYLGIEIPEEFSGPGRCWNRRFVVWLKGAETGTAYGRQTLDFLVRQYEALRGQRLEMLRAVRALSRTERFEKPLENLMTVPGIGQLTGMSLLSEIDDIRRFKSADQLAAFIGMIPMCHSSGEREGVGDITVRRSARLRSVLVEASWVAVRQDPALSMAYGSYCKRMAPGKAIIKIARKLVNRIYFVMKRNQPYVKCVVA

SEQ ID NO: 60776 - protein, 367 aa, unidentified
MKRILKIGMDVHTTNYTLCAMEPIIGEDDRVFATIKVTPDYKNILMFIENLKLKLGLNDEYDIQCGYEAGCLGYSLYNQLTAAGIKCVILAPTTMLTPQGVRIKTDMRDAYMIAQCLSYGGYHAVYIPTEDDDSVKEYLRMRNDHKLALKKIKQQINAFCIRHGFCYDGTKWTLSHLKWLKKLEITNGLYRETLDEYMASYEEQEAKIERYDKRIGEIAEQTRYHDKVKKLGCFLGIKTHTALSLIVETGDFERFAKGNQYASYLGLAPGENSSSDNIHRLGITKAGNSHLRQLLIEASGGICKGAVGHKSKELRARQNGNTAEVIAYADKANTRLRSRYYKFIRHGKKRNVAVAGMMTDNIEMKAA

SEQ ID NO: 60777 - protein, 340 aa, unidentified
MEHVAGADLHKRVTQLALLRDGRPPCQTRFANDRTAVEGALTRLSAGTTIAVESTGSWWWFVDTARRLGHHVVLSHPKLTKAIAAARLKSDKGDAVMLARLLKADLLPMVWIPAERERHIRELVAHRGRVVRTRTAVINELHALYSKRNLEVPRYLWHRQAPEPSQPEALGGYGPQIVHENVALLKALHEQIRGLDQALKALAKEDPEARRLMTHPGVGAITAVAVRAWVGDIHRVASAKHLVSYFGLAPRVRQSADTERHGHISKEGNRMVRALLVQATLSAMRHTGGPVRRQYLGVVKRRGKQIARLAATATRLGVLFQMMKQGVTYEELHQRGGSAQ

SEQ ID NO: 60778 - protein, 482 aa, unidentified
MKKKNIFQNQSQEILTLFEMAEDRSKVMCVPMDYAKKDHMVLFCNGNGKIIRKPFSIKNSMDGKRYLIEQVTKSCRQHGINLKYVFFGGEDCGSYADNFIAALRADKWLTAGVNAHDAKNYRENMQASTDSLDLLGIGKMLLNCRGNCSPAQCGIYWDLRMLIRQRRKLVNMTTGVKNRIHTIVDRIFPGFLDESKSGIAPFSKCSLLLMKDRFSAPQIHRRQSPALIKLLSRQGVQKPDSCVEKLQKLSAQALRPLEQHIATLQVSLSQQIKLCTCLQESIQQLYIEIAHNLAQTPGAFLTSVQGIGIVLAAGVSAEIGDIGKQKYLSNIVSYSGIVPKVKQTGGIEGKTRIKKVGKRCNHILKDYVVQSASHMGLHGPEDLMADYKRRDAQGQHADFGMARRYLRMAVGMMRNYQAYLPKRLRSTKIDKKERAEYYLTAWPKLREKWHKASSLDIAFDKDMPLGQWRNVIQELYGIELKL

SEQ ID NO: 60779 - protein, 346 aa, unidentified
MQHCGFDLAKTSSQLCLRTEDGQLVEHRLQTTREELTRFFAERPPTRILIEAATESEWVAQHLEGLGHEVIVADPNFAPMYATLSKKIKTDKRDARALCDACERGTYHPAYRSTDAQRQVRAELIARETLVATRTKYISVIRSMLRREGIRVQSCGAQYFRTHVELLDLPAHLRSAIAPLLAVLCVLGEQIGQADEQLAAVSKSEPLIKRLCLIPSVGPVTSITFVAILGEASRFSSAKQVRAYLGLVPKEDSSGERQHRGHITKAGNSRVRSLLVEVAWSMLSSKKREVQELKQWALRIAERRGKRVAVVALARKLAGILYALWRDGTEFDPARLRQPVTEAAAS

SEQ ID NO: 60780 - protein, 309 aa, unidentified
MKQSVVYIGIDVAKAHLDVAWAGTFRRLPNERSGHAVLVRWIKQSATPVQLICEASGGYEQGLLESLEKSEVKVTLVQAVRVRQYARAAGVLAKTDQMDAKVLAAFGSAMQPPPTPPLCAEQKRLRQYEAQRRHLSRVLVAEQNRLAQLSCAELRNLSRGLISKIKKQIETIDTRIGDLIAQDQTLREKAQKLTAIRGVGVRTAALLLAQMPELGQLNRRQAAALAGLAPFNHDSGSIRGKRAIFGGRRALRSGLYMAALSAARFNPILSRFYRRLRTKGKPHKLALTAVMRKLLLALNQTLKPIPSLA

SEQ ID NO: 60781 - protein, 360 aa, unidentified
MRIQRTSVGLDVHARSVVGCAIDEDTGEVIRHRFGYDPVAVLEWVRSLPQPAAVTYEAGPTGFALARLFTAAGIECLVAAPSKLQRPVGDRVKTDARDAMHLARLLRLGEIVAVAVPTIEQETARDLVRAREDNRGELMAARHRLSKLLLRHGIIYDGKQAWTGAHDAWLRRQRFDHPGLQAAFDADYEAVQQVRARKDRLDAIIEQMAATSNYAPVVRRLGCLRGISTLTGFGLAVEIGNWERFTGSSIGAFVGLVPSEHSSGQSRSQGSITKTGNTHARRLLVEAAWHHRKPYRPGAVMQARWAAAPSLAVSRGDDGNRRLHQKWQQFTARKKRPTIANVAIARELAGWCWSLAVMPD

SEQ ID NO: 60782 - protein, 337 aa, unidentified
MEYVGIDLHKKGFTACVMDQCGVVSHTGGYQNNIGELEKLLLEVHEPSFVIEATQNWMWMVRYFEKANLPVTLAHPLRTKAIASARIKTDELDAKTLAHLLRSDLVPMAYIPTINEQEDRDLARARCQMVRQQTWIKNQVHSLLTKENLLSPMSALFGKRGRIWLSKQNLTDNNKVILREFLALLEDVKEKILTLDKEIERKAKLNPKVEILKSIPGFGIITAFVLASEIGDPKRFPSGKKMAAYLGLVPSLYQSGNTKRLGSITKLGSPYARWVLVQTAHRLVRSDINTKIFYQTLSLRRGKKKAIVAVARKRVELSWRLLKDNRKYELRGTPKRD

SEQ ID NO: 60783 - protein, 408 aa, unidentified
MRVVGLDIHRVFAEAVMLDGAKIVRLGRVGMTRAHLNAFAQTLTHDDHIVIEATGNAAAVAEAIAPHVGRVVIANPRQVRLIAEARIKTDMIDATVLARLYASGFLPEVWVPDATTQALRRQVTRRMQIVRQRARLKTVIQSILHAHLVPQCPHADLLGSKGRSWLLAQTLPPDESDAVQRHLREHERLTDDLRVIEREIARDALANPNAQRLMTVPGIDMVVAVGLLAAIGPVTRFEAPDKLVSYLGLNPTVHQSGEGRPRHGRISKQGRTHARTMLVEAAWQAVRGPGPLRAFYERVARRRGTHIAAVAVARKLAVIVWHLLRRGEDYAWVRPALHAKKLRDLELRSGQPVRRGQRGTAYAYNLTRTRLEERGRGEQAEAAYRRQVDGWTQRGPKVPTGAANEERH

SEQ ID NO: 60784 - protein, 344 aa, unidentified
MVTTIGIDPHKATHTAVAIDESETVLGEMTIPADRYQTARLMDWAGKLNGDGRIWAVEAAGGLGYLLSQQLVARDEEVIDVPPVLASRIRVLSSGHSDKNDPNDARSVAIAALRQPGLARVRREDHAQVLRMLAKRHLELTSLRTQAVCRLHSVLVQLRPGGIPPRLSANQASQVLRNMRTLDYVGEQRRASARTHLADIRRLDRDIKTNKTQIRRAVTASNTTVTNVFGVGPVLAAFLVGYTGNAARFPSPDHYAAYNGTAPIEYSSGGKTRHRLSLRGNRKLNHAIHMAAVTQIRFETPGRVYFDKKVAEGKTKKEALRALKRRISDAVFQRLITDQQRATS

SEQ ID NO: 60785 - protein, 348 aa, unidentified
MPCQSYCIGVDASSDYLDLDGLPGQSRRRFANTPESHAELAARLSALCAAGPDVLVVMEASGGCERGLHRALVEAGVPAAIVNPQQVREFARSQGLRAKTDRVDARAIRRFGEVRRPRPTPLPEPVRAELIELLGYRDQIVAEITARTLQRPHLRSTFLITRADAALARLRQESEMLARLIEATVAGDAELSRRADLLTSFKGAGPLVAADLVAHMPELGTLNERQAASLAGLAPFARDSGKMRGVREIAGGRPKVRRALFHVARVGLRWNPTLKALYDRLTARGKPGKVALVACMRKAVVILNAMLKSGQPWDPDYEAKRQEAKKAAKAARHQPGPAEGVTQGAAAF

SEQ ID NO: 60786 - protein, 394 aa, unidentified
MSKLFVGIDVSKDSASARGLGPEGRSCFSLLFPMDSAGFSNLSESIRSHCGDLSEVVVAMESTGCYHLNLYTFLISQGIKTVVINPLIIANFAKLSLRKTKTDKKDALTIAQFLVVHKDAISQIALSQDVQDLRDLARERESLTVLIASMKNDIKRILQSTFPELESVCEVFSETMLQFLREFPSARLIKAATPRRIGKALCHSDRRKRISVSAEEIIEASKNSVASVSAAKEVILPEKISTLFHLIEKQEKITKALIELCKSTRVEDLEIITSIKGISDKTGATFLAEIGSFHDFPSPKKIIAFAGIDPTIHQSGKFEGMSKISKRGNRHLRRVIFLMAKHVSREDTFFKQYYLRRRMEGLSFKEAVLATAHKLIRVIFAMLSTRTYFCAKEN

SEQ ID NO: 60787 - protein, 328 aa, unidentified
MKDIKILGVDIAKDVFQLCGIDEWGKVIYTRRVKRAQYVSTVASLKVGCVVMEACGGANHWYRTFMGMGIPTQLISPQHVKPYVKSNKNDRNDAQAIAEAASRASMRFVQGKTVEQQDVQALLKIRDRLVKSRTALINEIRGLLQEYGLTMARGAKRFYEELPLILASEAVGLTPRMKRVLNCLYTELLNRDEAIGDYEEELKAVAKANEDCQRVQSIPGVGYLTALSVYASVGDIHQFHRSRQLSAFIGLVPRQHSSGNKEVLLGISKRGNVMLRTLLIHGARALLRHVKNKTDKKSLWLKALIERRGMNRACVALANKMRRSFGRF

SEQ ID NO: 60788 - protein, 430 aa, unidentified
MHNKKYISVGMDVGSAFSFMTILAPDETVILKPFKITHNNKDSLERAVSEIKKAEELYSLESRTFLESTGIYHFPLFCYLVDCGFNASIINPIITHSTKNGNIRKVKNDKIDSKGIAKLGLSKDIPVSQFPAKLVLELRSLTRKYYDLTDERSAHINKLKGDLHTVFPQYLDVFCDVTGKTSTMILRQYGTPDKILRGHKKTMIEKISKASRKGLAKASERYEKLCAAANAAKTFGCQIDSIYFNIFLTLDLVEKLDSALDSILNRIRQLITFNKNEKFIQQIKLLNTIPGVGFLTAVTIMCEIGDFSAFRNPKQLFAYFGLDPEVNESGKFVGTQLHMSKRGSRIARRAIFAVALASIRTKRNGEGINPYLRKYYELKSGQKPKMVAIGAVMHKVCNIVFAVLRDEKAFELRSPEEHCKQYQRPALAAA

SEQ ID NO: 60789 - protein, 391 aa, unidentified
MPMYFVGIDISKYKHDCCIISAADQQIISKFTITNDKDGFEQLLTALNSLSNPEDIKIGFESTAHYALNLELFLENAHHSFMEVNPVLIKEYKKSTTLRRTKTDSVDCESIARWLITVEYKPHSKGFYHAYSLKSLTRLRDRLIRQRSFYLVKITNVLDHTFPEFKPFFNERLSKTALYLLENYGSAEKMARMNSASYDKLRCISRGKFSIQQFLRLKELAANTVGVNNSIFDLELNTLLTLYKSLSDEINTLETEIIKLIEEVHPHYMSIPGIGPISSAVIYAEYGDISNFSNPGQMLAFAGIEPGINDSGTESHSGRMVKHGSSQLRYVLLNACLPLIRFDLTFATYYEKKRAEGKKHRVAITHVAKKLIRVIYALERQDVDFNAQKLR

SEQ ID NO: 60790 - protein, 288 aa, unidentified
MTTAGIDVSKAHLDLALLGPSYQRNLRFPNTPEGREALLAALRLHHPQAIAMEPTGPYHLLLLKLLQAAHLPVGLVHPAQAKALRVGMGHRNKGDRTDALALARIALSWPKALQMVEGQLETLGEGKGAVEAWLKEDLERLKGKLKEVEARVEALLSSVEEAQVLLQEPGAGLWVVAAVLAYLPPGVWGKAKAAAAYAGLHPANRESGTSVRGSRLSRRGPGVLRRYLYMGAMVGRGWNGELGAYYEALIGRGKRPKQALVAVAHKLLRRMMGRLKAFYREKGVGGRS

SEQ ID NO: 60791 - protein, 408 aa, unidentified
MKTLHKRCAGLDVHKVEVVACLRLISKRKVEREVRRFPTTTQGLLALAEWLESAGCTHVAMEATGVYWKPVWHILEGRFALILANAAHVKNVPGRKSDVNDATWLADLLAHGLIRASFVPPPAIQELRDLTRTRKQLTREIVQHVQRIQAVLEEANVKLCSVITDIMGVSGRRILKALIAGETDAAKLAALGHERLGCTRAELVQVLTGCVREHHRFLLGQHLRTIEQLEDSVAAFDARIEAALLPFHDVVERLNEVPGLGATAVETVIAEIGIDMSQFPSAGHLLSWAGFVPALDESAGKRRSTRIKKGAPWLKPVLLQSAWGAARKKNSYLQAQFLRLKARRGAKKAAIAVAASILTIVYHMLRDGTYYQDLGPEYFARRNPAKTAARLANRIRNLGYQVEIRAAA

SEQ ID NO: 60792 - protein, 466 aa, unidentified
MENNYILYVGMDVSKGKADAAILKVSDRRSVKPKFLRKKLSFKFVKSEVASFLETVRSYSDVNCTSICFAVEVTGIYSTNVYDYIKANLYENESIKFLNTDFVNQWRIAHNIAKSDPLDAQTISTIIGTDSDVQFVNDNVFENKNGYQDLKALVHRHYQIKKIYSQEINRLIAQCDCLFPELQYVFEPKSAAFIAVLSSYPTTHDIINASRVEVFDVVYEATKHRCSMDKVDKLFELCQDTLVPDDISSYGKSIILDLVENIKNIKGQLKSIERYIKDIASLNPAYKLLLTITGCGPITAATVIAETGNIRRFKNADCFVSYSGTSPRNKRSGTSVETMGKISKKGSRYLRHAIYMIAEFARRHNPVLKHQFERIKNGNKKRHKLANIAIANKIARYIYSIMKNKSSFVILHDHIMRLPEETRDTFFNSISLDFPKNTRKQIYQYSDINGELHRFVYIKTDEMIPA

SEQ ID NO: 60793 - protein, 492 aa, unidentified
MPALVVRLVSGKGPLPMAAKRPQHAQQQVRPQLTNETLYVGVDIGKKAHVAGFISFTLLSRHQRFEHCPALAFDNSREGFRSLIDRIESYVPLTHVQALVEVTGHYHRALLQYLQELTIPVFVIHVQKRQEGLLKSDKRDALGLANMLYNQLEKGIQVGDPLQAVRRLVSPTPAAAQLRGLVRHHYELTAESTQRKNKLTAICDELFPEFTRLLRNPNLPTALALRSRFPTPADLAAATFWELREARGRTCSVSDAKLLELQRLAAQTIGTKDPARIQSLVIEQQQLIRELEVIAQHLAQLETAMIQMVGTCREGKILTSIPGIGPLAAATLIALIGNIANFERAAQLKSYMGWVPKVAQSGALLDWTRLSPRGVRQMKQTMYLIVWRAIQWDAEWKAMYERLIARKCRTDERTRRLIGREKVIGRLAGQMVGVIYVLLKSDQECLAHLAPGAELPEPALYDPEVHRQHRLGLYQPRGAKGKGPQLLQLPPA

SEQ ID NO: 60794 - protein, 342 aa, unidentified
MEGYAGKQFVGIDLHRRRSVIVRMTDTGAPLETVRINNDVERLASVMARAGEAPETVLEATYGWYWAVDALQAGGASVHLAHPLGVKAFQYRRVKNDVRDATGLADLLRMGRLPEAWIAPPPTRELRELVRHRAKLVALRSGCKCEVHAVLAKCGIQVLMSDLWADPGTMLLERLQLPAPYLARIGSLRRLIDDLDVEIDLFARLVRGRLIADPGYRAVQTIPGIGPTLGAVFVAEIGDVTRFPSPAQLASWAGLTPKHHESDTHVHRGRITKQGSRLVRWAAIESVQVIGAHTPAGALRERVAARHGRNIGKVAAARRQLEHVYYALRDGHVRALQHRGAA

SEQ ID NO: 60795 - protein, 368 aa, unidentified
MFTERTGVGLDVHARSVAAAAIDTVTGEVIERRLDGDYGSVIDLAHRLEAGHGPLRITYEAGPTGFGLARELAAAGLTVQVAAPSRLLRPAGQRVKTDRTDAMLLARLTINDDIVAVRVPTLSQESARDLVRARDDARADLMRARHRLSKMMLRRGWVYPGRTTWGPAHDAWLRRIRTNDVPALGSGAAAAFDDAYDAVAHALARRDRLDEAITALAADCEFTDTTTRLSCLRPISTLTGFALAVEIGDWNRFTGATIASYLGLVPCEHSSGQTRSQGGITKTGNTHARRLLIESAWQHKPAYRPGPTLRAAWAKAPAVVAERADRGNRRLHRRWTALAARHKRHAVANTAIARELAGWCWSLATMDA

SEQ ID NO: 60796 - protein, 483 aa, unidentified
MKSKPEEKNKGATNHPRQHHWDEMNRKQRREMTRKMQSEDLRLEVMHPDAAGIDIGNESHYASVPPSRDSQPVREFGCTTAELKAMAAWLKQCRIRTVAMQSTGVYWVAVYDILEQAGLEVYLVNARDTKNLPGRKSDVQESQWLMKLHTYGLLRNSFRPPQEIRTMRTYWRQRNDLVQSAGRHILRMQKALTQMNLQLANVLTDISGVTGQAIIKAILAGERDPHKLAEFRNPRVKASEEQIAQSLEGNWQPDLLFVLKQEHEGYEFCQKQMAECDRQLQHYLQQREDRSQGAPLPEEKRKGRLKKKRANKPQFDLRGGLFRMTGTDLTRIDGIDVLTATTVISEAGYDMSKWKTENHFVSWLRLCPDNRISGNRVIGKGRLPTNNPISIALKMAASTLKESKTYLGAQFRRLRTRLGAPIAIKAMAAKLARLVYRMLRYGMKYVDQGAAFYELRHRELQIKRLKAKAEKLGYRVAPIPVAA

SEQ ID NO: 60797 - protein, 418 aa, unidentified
MKKHSKSSQRSEPSLKRTKARGPVQRDTKEVLAEVLEKLTGKLSAPAESTSTKEKRRGNTVGPNRDRLTVGVDLGDRWSQYCILGLEGETLAEGQLRTTQEDVREFFQALTVARVVMEVGTHSAWMQDVITEWGHEVLVANPRLMEGSKRRKRKSDRIDAHKLARLGRVDPQSLYPIRHRSREVRQDLVVLRARDALVSIRTELINTTRGLVKSMGTRLPRCSSPSFADKVKDAVPVEVREALLPLVQLTETVNDCIARYDQKIEELGQKKYGHTTLLRQVKGVGPITSLAYVLTLEDPQRFSSSREVGPYLGLVPKQEDSGDSQPQLGISKTGDRMLRRLLVGSSQYMLGAFGPDTDLRRYGLRLCERGGKNAKKRAVVAVARKLAVLLHHLWVSGDVYEPLHHSEAETRTAQAMAA

SEQ ID NO: 60798 - protein, 498 aa, unidentified
MSTQSINPEERLRHLEGHYADRVTAFRQRLARVGFDRVLIVLLDIGKNVHWTTASLASGLELVRPHRLPSTHTGLTQFIQMTDSLVAKHNPSLLLLGHEPTGVYHEPWARDLMDRYAPHLHGKAQPDFEYRFFNPYQVKLARLQTHLRHRKTDPRDLAAMLDLMQRGLGQPAFLPTGAELLIRQEVGFIRAQSRLLGHLERQLRQQLDRLWPGAIVNVGQFAKAHPDLPKPTPIIQTRPLQRDRLRVLLQYCPNPHDLIAMSDQQILNLYRQHVGRAGPALLNTLRTWAENAVLLPAQISAPLSKQVQRLFRQYTAAETLVEEGRGRLVPLLPSTPARHLLAIPGLGDMDAAAYLAGLGSHTRFHRAAEVWAFFGFDPIADGSGDKPERVGHLSKHGDPAARDALYQMGYRVAQNYAPVSITFLDAFDRGKSEVEATIHAAHRVNRICFHLMQHDEPFENQSTPTLEGEKARRWREFKAEKRRRGSRRKRGKRRSRRR

SEQ ID NO: 60799 - protein, 409 aa, unidentified
MDQLIARVAGLDVHKATVVATVRTPAADGGRESRTETFGTMTADLIALRDWLHAYGVTHVALESTGVYWKPIYYVLEDGFQLLLINMLELKHVPGRKTDVKDSEWLAQLLECGLLRASFVPPPAIRELRDITRYQVQQVRDRSREVNRLCKVLEDAGIKLTSVATDVLGVSGRAMVDALLAGTTDPTVLAELARGKLRKKLPELRRALQGRFRRHHAFLVEQILAKIDFLDETLDRITAELEERLAPFAPMLANLDTIPGVNRTTAVSILAETGGDMTRFVTAARLCSWGGMCPGHDESAGKQRSGKTRKANRYLRGALIQSALGASHTKGTALQARYHRVKRHRGHKKAVVAVGHQILEIAFHIMRDGVTYNELGADYFDRRHKDRTVRRHVRQLEALGYHVTIEQAA

SEQ ID NO: 60800 - protein, 346 aa, unidentified
MKHYAGLDVSLKEISICVVGETGAVQARKTVACDPAAVTRFFAGKRIAPVLAIHESGQLSIWLQRSLSDLGLAVTCVDARGAHKVLSARLNKSDAADAERLAQLARTGWIMPVHVRSLDADRLRTLIGARDRLLRLRNDPERHVRGILKTARIRMTGIHQGRLRQSFRDQLAEAASREPVFGVIGLRLHDSPRHAVLGRCRDRQGPARPRQGVGAGPAPDDRSRCRSDCRAQLHRRRGQGRPVRQVRKHRRIPRPHPRRYQSGETDCQGRISKCGDAAMRSLLFEAATSLMCRVKRFPPLKAWALRLAARKGAKRARVAVARKIAVLMPTLWKTGADFRWTAEAAA

SEQ ID NO: 60801 - protein, 410 aa, unidentified
MEVLYPHCAGLDVHKETVVACQRHMANGTVKREVRTFRTTTKDLLALSEWLTGQQCTHIAMEATGVYWKPVWHVLSDGDFTLVLANAGHVKNLPGRKTDVNDATWLADLMAHGLIRGSFVPDAQTQELRRLLRTRKQFVREGSSHVQRLQKTLEDANIKLDSVISDIIGLSGRAMIEALIAGESDPDTLAALAHHRIKAPPAALREALRGRVTAHHRFLLQLHLQHIDALDTAISAIDREVDTHLEPFRTTVLLLTTIPRVSDLSAQVIRAEIGGDMSRFPTVGHLISWAGLCPKNDESAGKRRSNRMRKGAPWLKTTLIQCAWAAARKNGSYLQAQFHRLRSRHGAKKAIGALAASILTAAYHMLKDGTLYHDLGPDHFDRRAKTVQTRRLITRLQKLGYAVQITPLAA

SEQ ID NO: 60802 - protein, 342 aa, unidentified
MQITTIGLDIAKNVFQVHGIDGSEQVVVRKQLRRSQVVVFFKALPPCLVGMEACATAHYWARELTRLGHQVRLMPAKDVKAYVKRNKNDAADAEAICEAVRRPTMRFVQIKSAEQQARLMLHRTRDLLMRQRTHLINALRAHMAELGVVAAQGREGIKELLRIIASEQDARLPVDAHTSLVVLAAGLQAVQTMIGSIEKRIIVQHRSNEASKRLKTIPGIGILGATAIAATVPDPKVFRSGRDFAAWIGVVPRQDSTGGKQKLGPISKQGDQYLRRILVVGAHAVLKRARQQPQKYPWLTQLLARKPFRVVAVALANKMARIAWALLAKGGTYRAPALRAAA

SEQ ID NO: 60803 - protein, 343 aa, unidentified
MTDRRPTVRKKIYVGIDISKEMCNLCFRSGLEIVREEECSNDVKALKKAFKAALKVLGASVDEVLVCAEYTGRYIYPLTVASQELGIFLWMDDPTRIKNSMGLTRGKNDAIDAARIAEYAFRYSDKAIRYCIPDAALVSMKNLLADREFLLIDRKRYLSQLTDQKKYMAPGDFKHKSSRWKKVIKSIDEQIAAIDTEIETLIAADPVLTRQKELLLSIDGIGERIAINMIAITGGFTRFQNARQFCSFAGLTPYKYDSGTSVRSKAKISKRANQTMKALLHLAAVGAATHMKEGEYKDYYERKTKEGKHVMCVLNVIRAKLVHRMFSVIKRDTEYTKEYKPAC

SEQ ID NO: 60804 - protein, 355 aa, unidentified
MTRTVYCGVDFHARMQTIAYCDSANGEIQLAQLDHRKDDVREFYSKLTGQVIVGLEAGGYSSWFEAMLEELGHTVWMGHAAEIRRRANWRQKNDRRDAELILEIMFRGDFPKIHRHSRESVEVLRMLRYRARLVKMRTMISNNLQAIAISSGLSERSRMRSRAGQQRLKNARMTPAIRHQSDDLISLLVPLNERIARVERWLKEQASTDERVKLLMTHPGVGLLTALGVVHTLEPFNRFTRQRAVVAYVGLEPMERSSAERKRYIGISKAGSRLLRFLLGEAAHTAVRFDPELKRFYERVGKRRGKPKATVAVARKLLIRCWIMLRNNIDYVEFRSRGVEARLARNMPRPSVPAE

SEQ ID NO: 60805 - protein, 352 aa, unidentified
MSYDYHIGVDYHKAYTHLVVQDGGGKVLRSGKVKNDPRSLASFLSPYLENSHAVMEASRNWTVMYDWLDELCDDVILAHPLKVKAIADAKIKTDKIDATILAHLLRADLIPESYVPCEAARELRQALRERIFFVRLRTMVKNRVVTIFDRYPDQTRALREMSDLFGKMGRGQLELLSVSTIDREHIDRALAFIDDINQRIRESEKTIRRFSKDNADVNRLKTIPGVGEFFARLIAAEIDDVTRFRSAKKLAAYAGLVPSTYASGGKCWNGRIIKAGNKWLRWAFVEASIPAMRAEPALKFEYERLKATKGANRAKVVVARKLLTIAYQMLRDQRDYERRDALERPSDPSRLS

SEQ ID NO: 60806 - protein, 418 aa, unidentified
MSVLNSLFVGIDVSKNSNQVYAMNFDVKKLLSFSSPNDTEGASKIENKLLECLVKNNYENIVIVLESTGMYSFHIATYLSSSEALLKYNVLVYCIDPKTSCNYRKSFSEMDKTDPKDAYILADMARAGKVNKLNPVKGPQKLAMQRLTRHRRHISEQIVREKLYVLNNIFLKFSAFDRKYDGIQPFSDPFSATAQEILLEYKSPEEIINTPIEDLTSFISTASKNRFADSKKVAEILTKCARMSYRLDKTAYEPINTAIASSLAILRCLENEIKHIDKEIANLSKGYNSDEYTCLISIPGIGPVFAAGILSEIGSIKQFDNEEALAKYAGLTWRRHQSADVEHEDTPMTKTGNAYLRYYLCEAASMAVLHNPVYKEYYQKKFAEVKTHQHTRAIALTARKLVRLIYGLLSKNQLYKNQ

SEQ ID NO: 60807 - protein, 356 aa, unidentified
MSQKLDNSTAVIGIDIGKNSFHVVGQNQRGVIVLRQKWSRGQVEARLANLPPCLIGMEACVGAHHLSRKLQALGHQARLMPAKYVRPYSKGQKNDYRDAEAIAEAVQRPTMKFVATKTADQLDLQALHRVRERFVSQRTGIINQIRAFMLERGIAVRQGLRFLRAELPGILATRTDVLSPRMLRVIEDLAGDWRQLDVRIEGLSSEIEALARQDTHCERLMTVPGVGPIISSAMVAAIGAGDAFSKGRDFGAWLGLVPKQLSTGDRTILGKISKRGNRYLRSLFVQAAWVVLVKIGPKHWDRYGLKSWIEAARKRLHHNVLAIALANKLARIAWAVLHKGCAFACIKTNEAASQPA

SEQ ID NO: 60808 - protein, 378 aa, unidentified
MHRMTQEDRLVVGGVDAHADTHHIAALDERGALLSTKSFPTTTPGYRECLDWLSSFGEIDAVAVESSGSYAAALVRYLREHDVHVVEVNQPHAHTRRRVGKSDPIDAEMAARLFLAGKAKAVPKQTDGIVESIRLLRAARHSAVKSRSAAMVQLRDLIITAPQELRDQLSCRRTLRGKATVCARFRPSARELRCPSQAAKFALRSLAHRIESLDREITALDGELEQLVRAAAPRTTQLLGISTGHTGQLLVTAGQNIDRLRGESAFAALCGASPIPASSGKTVRHRLNYGGDRQANRALHLIAVCRLRYCERTRAYAQRRTAEGKTKLEIMRCLKRYIAREVYNSLRADLAETQPQPPPQTVTIMCGSPGFGITRKRT

SEQ ID NO: 60809 - protein, 422 aa, unidentified
MLGVGIDFAEEFHLVAFGRPGDGVIEVTRVDHTPAALADLVARIAVLEPDPAEVRVVLETSHGLLVERLLDEGYVVVPVNPDLVARRRGPARKKDDAEDARIACLIALDRHATLRPLIPHGELAAELRAIARDDERAARDERRLLNRLRTDLLETFPAALELAADDLGAPTMLRLLERWPTAADLRTATRGELIAFARSAHHGWPDRFADRVTAALAGEQFVARPALVRAKADTIRLAARQLLLLGAQRRAWERRMGEILLGARRFGRAREPRADERGEQFPGGEIYLSFPGLGDRLAARVAGEIGDHPEMFASPNGLQCYAGKAPVTRRSGKSELVVSTRLACNGHLRDAVQQWAFCSLRTSGWAREFYDGQIAKGKRHHAALRALGNRWLEILWHCLMRRVRYDEAIHVANRNRALQRAA

SEQ ID NO: 60810 - protein, 369 aa, unidentified
MRPGACAFLIRSSKLEPLKERARMHRTGLAFASMSQNNNPMIYAGVDVAKATLQLSLNGAGHSFANDAKGHARILHRLDAAEQAQPGHHVHLVLEATGGYEAALVKALHGAGRIVSVIPPARARHFAQAKCAHAKTDPIDAEVLAAFGQAIAPQPTPAPSANQTHLAELVGRRAQLVETRTAELNRSAHDTDKLLRRQSRQLLTLLERQIAQCDRAIAAQIAADPEMKARAQRVQQVPGIGPVVAAVLQAAMPELGTLQEGEAAALAGLAPYNRDSGPWKGTRRIRGGRAPVRCALYMAALSAVRFDPILRTFYQRLCAAGKKPLVALTAVMRKLIVLLNRMLQKPDFQLSTLTSKTIPSVSPEKITCS

SEQ ID NO: 60811 - protein, 316 aa, unidentified
MSTQEYWVGIDVSKNELDIHVRPAGQCLRLSNCPEGVEQLVGVVEPLAPQLIVLEATGGMESLAAVALSRVGLAVAVVNPRQVRDFAKATGQLAKTDRIDAGILAHFAQVIQPEVRPLPDEQAQLLGELVSRRHQIVEMIKAEKNRLPTMKGPMREHIQVHIDWLQLQLVELEQILREAIRQSPLWQEKVDLLKTVPGIGDVVSCTLVAFLPELGRLSGKKIASLVGLAPINRDSGKFRGKRTIWGGRARVRTALYMSAIVATRFNPVIKTFYDRLLQRGKPKKVALTACMHKLLLILNAITKSGQPWSNAIAGGS

SEQ ID NO: 60812 - protein, 374 aa, unidentified
MVDDIALYVGLDVSKEKIAIGLAEAGRKGEVRYYGEIANRADAVRKFVDKLAGRHGRLCLCYEAGPTGYGLYRQLCDLGHECLVVAPSLVPTRPGLQIKTDRRDAVALAALLRAGELSSIWVPDETHEAMRDLCRAREAAVSDLRRARQHLLSFLLRHGRVFEGRSHWSKAHRNWLATQRFDHRAQQIAMEEYIRAIEQIEERRDRLTRQMLGLLQDWSLNPIVEAIQALRGVAQISAVTLVSEIGDFRRFSNPRQFMAWLGLVPKEHSTGASVSRGSITKAGNTRARRMLVEGAWTYRLPARVGQEILKRTEGLPEAIRATAWKAQVRLCQRYRRMQASGRPTNIVIVAIARELAAFVWAIATTFPITPTKAA

SEQ ID NO: 60813 - protein, 349 aa, unidentified
MQHYAGIDVSLELLSVCIVDAKGKIVKEAKVGSDPDTLVAFLRGLDLAIERIGLEAGPLSQWLHAGLTSAGFEAVLLETRHVKAALSAMTVKTDRKDARGIAQLIRMGWFRAVHCKSAGSQEVRALLVARKLLLSKLLDVEFSIRGILRGFGLKMGMVTRKRFEARVRELYADHAMLEQICSAMLTARSALQTEYAKLHKALLVIVREDEVCRRLMTTPGVGPLVAITFKTGVDDPSRIHKSKAVGALFGLTPKKYQSGETDVTGGITRAGDEMVRTALYEAASVLLSRVTRFSALKRWGMDVAKRRGTKRAKVALARKIGVILHRMWVDMTSFRWTKGAPTTMRLARV

SEQ ID NO: 60814 - protein, 375 aa, unidentified
MEGAPMLDTTTFIGLDVHARSIKAVSLDVMTGEVRAATFGYDAGAVAEWVRSVDPEARCVYESGVTGFDLQKRLSGLGVDCVVGAVSKMIKPSADRRRKNDRNDAEFLARMLSVGNVVEVWVPDDECEAARDLTRALEDARDDLSRSKQRLSKFLLRHGLVFDERTPTGRRKGNWTRAHWSWIESIRFAERADNDVLAYYVDAVRRAAEEKARLEGLVEAEARKPRWRKRVDSLRCLKGVDTASAADLVFEAGEFSRFRNARSFAAWVGLTPSEHSSGESDRRGAITKAGNKHLRKTLVEAAWHYLTCSGRPKDLAKGQAPDRGARRHAAKGVRRLVERREALLARGVHGNKANVATARELACWVWAVGLMAEEA

SEQ ID NO: 60815 - protein, 331 aa, unidentified
MFPVGIDVSKNTLDLCMLYDGIKGRIKTRNIQNNRHSVENILRWLRLQHCSPEDVHVVMEATGVYHERLATELHDAGFRVSLANPHRSREFARGMGIMTKTDKVDAYMLACYAFLKKPHRWEPPAPEIRYLGALLRRRDVLLGDALREENRLEKYLSTDTPADIISSCRRMAQLLREEVGNIERQIKAHIKASPALRRDYTLLTSIKSVGPQLGMHMLVVLRSHNFVSAEQAAAFLGVVPIEKRSGTSVRSRPRMSKIGPPQLRAKLYMSALCGKIYNKRMRNIYDEMCLRGKPEMVAIGALMRKLVHWCYGVLKTGTVFNDEGLKPVLSS

SEQ ID NO: 60816 - protein, 315 aa, unidentified
MLIHYIDIAKRNFVIAVSSLSKTKTETNNPKGIAHTIEYLKKHKVALVVTESTGGLEIPAAKAIRRAGIAVIIANPRQTHQFAQSQPLTKTDAKDAKMPAFFTQMMTQKEDWQTMPYQPPTEAEEVLEALVNRRNQSADMRTAEKNRLHQVHETQVGSVKQLIAHFDRLIDELDKQIDDHTHTHFDGKAQVAEQIKGIGSITTATLMAMLPELRRLSHKRIAGLAGIAPHPREGEETKFKSRCFGGRSAVRKALYMATVAATRFEPLIRDFYQRLPSEGKPYKVVVTACMRKLLTISNARMRDYFAENDTAENGI

SEQ ID NO: 60817 - protein, 356 aa, unidentified
MNTNEQHMSGHVVIGVDTHKHVHVAAVMDTIGGILATLTIPTDTGGFQQLLDRATSFGKVLAFGVEGTGSYGATLASFLRRAGHKVVEAGRPDRRLRRMNGKSDTLDAENAARAVLAGFATATPKTADGEAEMIRRLKIDHDQAVEQRAAAMVTMKAMLVHAPDGLRHETAGKTQIALARHLAGLRTRQLEGPKDALRHALRTLAKRWQYLDSEAKELTKMIDDLVHRAAPQLLEPFGIGVDTAAEILVVVGDNPERIKSEAALAKLAGIAPVPTGSGMTSGRHRINHGGHRQLNSAIYRTVIVRMRFHRPTIDYVARRTAEGKTKREIIRCLKRYVIREVYHLIRPASNAITTTS

SEQ ID NO: 60818 - protein, 456 aa, unidentified
MYTIGIDLAITAAHKAIVAGAGGKFITPLLSFHTRWCDIQQLVARIRKDVPPDVPMRAVMEPTGMVWFPVSIALHSLGVRPYLVSGQRTYDLRRYFKRHSSSDRVSARVLAKMPFVDEESLYPLEIPSSIQFACQRACKELDRVQTDIAAIKNRLRDTDRFSWPGLEGVFSNIFNPAARLFRETWYDPFRVVSAGAETVQRTFLPLFEHENDLSWVEKLVDLASEVTKLYGPDALDYTRLQEEVCREQEHLEYLEKRKAGVWRDTIRPLYRQLHPSRNLETLYGVGELSGAVHASYIGNVERFPTSRRFRGWHGMIPDSRQSGEFESKGLHISQAGPDLIKKFSYIGADVARRYDPQIAAIYYDQIVNKGKHHKQAVCACATHFLDRVYLVLKEDRPYELRDVDGTAVTPEQARAIIAQRYTVPEEVRRRNNQRVRKERKERRVERRYKKRGKRSS

SEQ ID NO: 60819 - protein, 364 aa, unidentified
MKEKKAETRYVGIDLGKRTYEMAIVGKGSKVAMSNGKTYVEGRQKLYRKLQQTDKVALEAGSLAFIMAKEIEAIVGCHVYVLNPFRLSVIYKSMKKTDKEDALKLAHIIEDFQEDRLPVVPVPSDKEIARRKIIAGYRRAQQSRSREINRLHALFLSQGITTIVRKDLSTDEDRKVAIEVLTGLEREEANYLVEILELHEKRIEMLEKKVKEESKEDEVIQRLQSIPGVGPMVSFAFTAHVGAERFENAGQLSNYIGLVPRVYMSGDTVRYGNITKRGNGYLRALLVQASWSLTRAKKGGKLKERFLYMTIEKSIGKKKSIVAIARRLAELMYVLMRDGTRFEARSFKKNNELVRDISDIKFCA

SEQ ID NO: 60820 - protein, 377 aa, unidentified
MHSENIAAYVGLDVHKETLAVAIAAPERLGEVRYYGTINNEGQAVRRLFQKLQGLYGNILSCYEAGPCGFGLYHQLTAMNIKCQVIAPSRIPKSPTDRIKNDHRDAISLARLLRAGELTPVWIPDLTHEAMRDLIRARAAAKRDSRVARQRILSMLLRTDKHYTGKHWTGKHRTWLANQSFSQPSQQIAFQHYCQSLEQIEDRILQLDQEISRLLPEWSLCNLVCQLQALKGVGQLIAITLVAELGDFSRFSNPKQLMAFLGLVPGEYSSGNSIRPRGITKVGNSELRRLLYEAAWSYRTPAKVGAWLIYYRPDSVTQYSKDIAWKAQQRLCSHYRSLTAKGKKSQVAITAVARELTGFMWDIALAAQSSFSQQKQN

SEQ ID NO: 60821 - protein, 345 aa, unidentified
MKIVGCDLHTRYQQIAMLDEETGELVERRLEHGNGEAKEFYTHLSGPVRVGIEATGHTRWFEQLLAQLGHELWVGDAARIRAAEVRKQKTDARDAALLLDLLLSGRFPRLWRPAPEERDLRHLLWHRQKLVWMRNAIGNQLHALAMGEGLCRKRQLFTKKGRCELEALRLDKWASRQRQELLHMLDQLDASLAQFDQAVNEQAAANGDAVRLMTHPGVGPVTSLAFVLIVGPVARFERSKQLVSYLGLNPCEHSSGGKQKLGAISKQGNPMLRGLLVEAGHTAARMDPELRQDYQRLRLRRGGSVAKVAIARKLAVRMYWMLRRQVNYTQLVRMQGSSRATLVQQ

SEQ ID NO: 60822 - protein, 461 aa, unidentified
MTTHKHVFRNRKERREWARRLQSEDPGLEVIHPHAAGIDVGNSMHYVAVRPDRDSDPVRRFECFTVDLHRLADWLQSCGVKTVAMQSTGVYWIPLYELLEERGLEVYLVNARHTKNLPGRKSDVQESQWLLKLHTYGLLNNSFQPVSEIRMLRTYWRQRGEHVRGAATCVQRMQKALTQMNVQLANVISDISGLTGQTIVRAIVAGKRDPRELAALSDPRVQASREEVAKSLEGTWRSELLFVLKQEVDMYDAYQERITECDQQLQKQLASLKGTVSVDPPKQKNKKPAKNAPRFNLGSELQRITGVDLTRIDGIDVMVAQTLVSEVGLDMSRWKTESHFASWLGLCPDNRISGDKVLSRGTRRVVNRAATALRQAANTLIRSRSYLGAQYRRLRTKLGAPKAITAMAHRLARLVYRMLKHGQAYADKGSQYYEERYRQQQIHLLRKRAAKFGLQIMEMRA

SEQ ID NO: 60823 - protein, 348 aa, unidentified
MNDYSESKELKIIGIDLAKSVFHLHGANSHGKVVVRKKLSRSKLIVFMANTPPCLIGMEACGGSHDWARKLIAMGHDVRLISPQFVKPYVKSNKNDVADAAAICEAVQRPDMRFVPIKSVEQQDIQSLHRARSLAVSHRTAQANQMRGLMLEYGVTVAKSVAALRKAVPDILKDADNALTPMFRELLCGLWEDMLKLDKRIVAYDTQIKHLSKQSEACMRLMTIPGIGPMVSTALVAAVADGKAFKSGREMAAWLGLVPRQHSTGGKPRLLGISKRGDVYLRKLLIHGARSALRWADRKQDRRSRWVSELATRRGQNIAAVALANKTVRTAWVLMTRGEEYRTATATV

SEQ ID NO: 60824 - protein, 346 aa, unidentified
MLYAGLDLSRKRLDFHLLDIGGATVEIGAAPPDADGLHTLTSRLERHREPIRAAIESMNGARFVHDRLELAGWQVEIADAQKVKGLAPLACKTDRIDAWVLAELARRDLVPAIWLPDPRVRAERERARWRLHLVRHRSSLKQRVHAVLLTHGKPCPVSDLFGVRGRRLLASLGLPEPWQGTIEASLRLIDELDREIGECERELRRLGADHRYVPLLCTVPGISWVLAYTIAAELGDITRFPTPRKLAGYTGLCPRVYQSGQRDLRGPLAKQGPRYLRWALVEAATHACTAPVYRDRYQQTKARIGKQRGAKVAQIDLARRLSEAIWHMLTRNQPFAPKGATDPLAA

SEQ ID NO: 60825 - protein, 352 aa, unidentified
MQHFIGCDVHTRNQVVAWIEEETGEIKKRRLEHAGEEVGKFYAQFPRGTVVGIEATFPAYWFERLMGELGHELWVGDAARIRASEVRYQKTDPRDAEGILDLLRTGRFPRIWVPSLEERDLRQLLVHRMKQVRARTQVKNQLHALAISQGVCRKGKLWSVKGRKELESLALLPWAARRRKELLESLDRLDEQVRELDRAVEEAGRARAEVALLRTHPGVGMVVSLAFVLTVGPIERFSNRRKRVSYWGLNPRENSSGGRQRLGSISKQGNTMMRWLLVEAAQTAARLDPQLRRTYQRLKKQKTSAVAKVAVARRLAVRLFWMLRTRHNYTQLVHMSGSPSSAVVPPTAEPNL

SEQ ID NO: 60826 - protein, 360 aa, unidentified
MEATQEILGLGIDISKKRADICLKNSTVLDRFQTSNDEQGIASLLRRLEPHVKSGFTVKGAIESTGNLWIKIYEALERNGVDISLANPLKTRAIAEARIKSDKLDSTILADLARTDLVARCYVPDRNSRDIRALVRYRIDLAERSTQVKNKVHNILDKYSLRCDGEPFSKGWMEWLGAQTLGSVDRQLVDSHIREIAMLDELMQGVEKQMASLAVNDRRVDLLLGFTGIDYYGALLLLYEIGDVKRFYGPKKLVSWAGLAPSLHQSGDTRYTGRITKQGNKRVRWYLTEAAKNAARFDPKLRPFYERVASRKGNHKATIAVARKMLVSIYWVLTRNEHYDGDRQEVRERKVKKLERLLEQ

SEQ ID NO: 60827 - protein, 315 aa, unidentified
MAMPIAITQPIVGVDVAKDELVIYHAESDRLETIPNTKAAIKKWLKALPAPVDVAIEATNTYHQEFADLAYAQGCVIYIIDGYELSHYRKGVKVRAKTDALDARLLARYLNNEGHLLHPWVPPSPLYCRLISLFRRRAALVQARVSLKQSWANEPLLEAAFKSQINAMQRLETLLEKTIQTQLEQAGLGHQLKRCMKVEGIGLLSGARLIASFQRGDFRNADAFIAFLGLDLRIADSGKKKGRRCLSKRGDPEARRLMHNAAMSASRTAAWKGFYEALRARGFSTTQALVALARKLARVVFALLKNQSEYLPKGI

SEQ ID NO: 60828 - protein, 292 aa, unidentified
MIVKNLLISLMRDFSRNLITFLSKNFNKNFLVIIYEPTGPYSAFLEEFCALEKIKVVLLNPRKVPRLLEVLGHRAKTDGLDAKALYEYRKLISHKDIKTLELNENLQKLASLLSEYHFLKKQRVNFLNYLETLKFNPWGDKESEKTIENMIFEINKRLKEIEEKIKKLIKKEADTKNKVEAIKNIEGIGFLTAVNLFLFFERKKIRNRKEAVALVGLDPIIYESGKRKIGCRISKQGDSYLRNLLYMAAMCAIRINERIKKFFVRLVHRGKPRKLALVALYEEAANYCFGIL

SEQ ID NO: 60829 - protein, 342 aa, unidentified
MKLTTIGIDLAKNVFQVHGADEKGKAVLKKQLKRTQMLPFFANLTACRIGMEACGSAHYWARKLQGLGHTVQLIAPQYVKPFVKRNKNDAADAEAICEAMMRPNMPTVPIKTIEQQAILSVHRARQGFVKARTAQANQIRGLLAEYGIVIAKGIGHIAKRVPQILEDGENGLPGSFRLLIGRLADHLKALDRQVGELEAQIQLWHKDNSASKKLAKIPGIGPMTASAMVASIGDARNFKNGRQLAAWLGIVPRQHSTGGKSTLLGISKRGDSYLRTLLIHGARAVVRVSEHKPNADPWLKNLLARRHKNVAAVALANKNVRTIWALLAYDRDYEAGYARTAA

SEQ ID NO: 60830 - protein, 412 aa, unidentified
MLYLGIDIGKRWHETALLDDAGGAVWRQRVAASRAGFAALEQQLTGVDVSALTVALEATGVYWLALHAWLTERGVARVVVLNPLQTKAFRNANLRGSKTDRIDAVALATLVRWMGATLSAHVRPDERQAAARDVGRLRTEMVELRARQLVKLSGVLDRLFPEFRAAFGKLGSASALAVLARWATPAALGAADEAEVAAALAQAGRGMLGTAKAAELQALAATSAGLPGPLDAVAVAVRTLVAHVEHLGGQIAALGARLGELLAPDAATEALLRSCPGVGVDTARTWLAEAPPIARVRGKDGAEKLVALAGLDVRVSESGASAGRPKMSKRGNRYLRRALMLAAESAARTDPQCRAILAKHRAKGKHYRVAVSHVARKLVHILYAVLTHEQPYAVPAAYATAPESPTEVLIGA

SEQ ID NO: 60831 - protein, 412 aa, unidentified
MEVLYPHCAGLDVHKNTVVACVRHMVNGTVNREVHTFKTTTKELLALSQWLAAEGCTHIAMEATGVYWKPVWHILSDGDFALVLANAAHVKNVPGRKTDVNDATWLADLLAHGLIRSSFVPDQQTQEMRDLLRTRKQLVREASRHIQRLQKTLEDANIKLDSVISDVMGLSGRRMIEALIAGQSDPEQLAQLAHRRIKATPEELCEALRGRVTRHHRFLLSLHLQQIDAIDAAINTIDQEVDAHVELFRTTVHLLTTIPGVDELSACVILAEIGRDMSRFPTAGHLISWAGLCPRNDESAGKRRSTRMRKAAAWLKTTLVQCAWAAARKKASYLQAQFHRLRARRGAKKAIGAVAASILTAVYEMLKTGALYEDLGSHHFDRCGKGKQIHRLVSRLQNLGFAVQITPVPAVA

SEQ ID NO: 60832 - protein, 347 aa, unidentified
MVHVGLDLSRTRLDVHVMDESGAPLVVTTALPEAGGLAALAGRIGAEFGGPVYAAIESMNGARFVHDQLELAGWQVEIADAQKVKGLAPLACKTDKIDSWVLAELSRRDLVPAIWLPTPAVRAERERARWRLHLVRHRTALKNRIHATLLAFGHPCPVSDLFGTGGRELLARLALPEPWAGDTTAALQLIDELDHEVTECERVLRQVGADHRYVPLLMTTPGIGWVLGYTIAAEIGDIARFASPAKLAGYTGLCPRVYQSGGKDHRGPLAKNGPKYLRWALIEAAVHAARHPVYADRYRRTKTRLGRQRGPKVAQVDLARRLAEAIWHMLSTNKPFAPAGAALSLAS

SEQ ID NO: 60833 - protein, 395 aa, unidentified
MENPIIACDVSKGKSHIQGFIGLSNPVGNPFVVRHLKSDLKLIKELAKSLEKQAHKKPKFVFEFTGIYHECIARYVQSLGLDLYAISPLESAKVRKSQIRVTKTDSKDCLNIATVYYTRCIRKFESDNNDIKSLSRRKRDIREEMVRQRGVYHRYLDLIWPCFDEYFDADSKVCDIIVSTYKHPYVIKRRSVNMVIEILLNNGRFSKKRAFDIAYKIKDYASNCVSGVDEKSDYVNALISSYSKINNLKKEIEEINLELDNLLRKSPAYQLLKTVPGIGANLLIQMSAEIGDYTRFKTAKQFVAYIGLDPSILQSGTNDGEHYSITRKGNGILRSCLYLAVSQMLTRKLDNQITRFYFKKKSSGLSHKVAAVASCRKLACCVFGMLKSGTCFETI

SEQ ID NO: 60834 - protein, 322 aa, unidentified
MTQRGVMNQDHVVVGIDVSKDEFVMNTLPSDDRWTSGTDPVAIDLLVTRLCTLQPHVIVMEATGGYEAPLAAACAMAGLPLAIVNPRQVRAFAQAVGRTAKTDAIDAGLLALFGARVQPTPRPLPSAATTQLAQLVARRRQLLEMLTAERQRLAQLGTTTGPVARDLRHHIRWLEKRVTDADGAITTAIQQSAVWRVNDDLLRSVPGIGPTVARTLLAELPELGTLDRRAIAALVGVAPFNCDSGHFRGRRMIWGGRPSVRAALYMAALVAARHNPILARFYHRLRAAGKPGKVALVAVMRRLLTIVNAMIKHQSAWRPETA

SEQ ID NO: 60835 - protein, 373 aa, unidentified
MPQTLNTTIAVVGIDIGKNSFHIVGHDERGAIVLRQKWSRGQVEARFANMPPCLVGMEACVGAHHLSRKLRALGHDARLMPAKYVRPYSKGQKNDFRDAEAVAEAVQRPTMKFVATKTADQLDLQALHRVRERLVSQRTGIINQIRAFLLERGIAVRQGQRFLRAELPRILATPPDVLSPRMVRIVEDLAGDWRRLDERVEGLSNEIEAIARQDAGCERLMSVPGIGPIISSAMVAAIGAGDVFTKGRDFAAWLGLVPKQISTGDRTILGKISRRGNRYLRVLFVQAAWVVLIKPKIWERHGLKPWIEAAKKRLHHNVLAIALANKLARIAWSVWPVAGHSRRGRWIRQRTNPLDSYSTPTATETEQNEEPAT

SEQ ID NO: 60836 - protein, 339 aa, unidentified
MDTIRFLAIDLAKNVFQVHGVDAAGKLVLRRRVGRAQLTELVLRLAPCTIGMEACSSAHHWARQFLQQGHTVKLISPQFVKPFVKGNKTDGNDAEAICEALQRPSMRFVPIKSVEQQDVQSLHRARSRLVSNRTGLVSQMRGILAERGIVFAQSITRARREIPVIVADTSNALTPLAREMLADLMDQLRELDKRIAGFDRRIDLVFKASETCQRIAQIEGVGPKTATAIVAAVSDPKDFRNGRHFAAWLGLVPRQSSSGDRTHLLGISKRGDRHLRTLLIHGARAVLRTAPTKHDKKHAWALALKARRGTNRAIVAIANKMARVIWSMLATGQSYQKAG

SEQ ID NO: 60837 - protein, 413 aa, unidentified
MPFALPEALFFTGIDWAAETHAVCVTDAAGKIAAEFAIEHSADGITVLLRRLARFGDPGGMPVAIERPDGRLVDLLLEAGHPVVPVKPNAIKAWREGEVLSGAKSDAGDAAVIAEYLRLRAHKLRVAAPYSDETKALRTVVRTRGDLVEMRVAATNQLSALLDAHWPGARAIFADVESPVSLEFLTRYPTPVAAAHPGEKRMTAFCAKHGYSGRRTAAELLARLRHAPAGAAGEALSEALRDAVLAAVGVLTALNASVKNLDRSTAAHLGEHPDGAIFTSLPRSGQINAARVLAEWGDTRQAYEHPDAVAALAGCTPVTKESGKHRSVHFRWACNKRFRVAVTTFADNSRHASPWAAQIYNDARAAGKDHPHAVRILARAWIRVIWRCWQDGIPYDPARHGAASRLARPAEAA

SEQ ID NO: 60838 - protein, 398 aa, unidentified
MSEIIRIGVDTSKSVFRLHGVDAAEQPVLRKKLRRRDMLAFFARLPATKVGMEACGGAHYWARELTALGHEVKLLPAQHVKPYVRRGKNDRNDADAICEAMSRPRMSFVAIKSAESQAAQMLMTTRERLVAYHTQLINTIRGHAAEFGLTAAKGPAHVEPLLARIADDKTVPELAKDLFAMHGQALKRLKAELREIEAKLKAWHRQNEMSRRLAEVDAIGPIGACLLAIKAPDPQAFRCGRDFAAWMGLTPKDHSTAGKMRLGVITRAGDEALRRTLVVGATSVIKQVSKDKGNPSPWLRDLVARKPPKLAAVALANKVARIAWKLMRSGERYDAARAGIVSPAASLAPPSRRQGRYAPGPSTYGSRLCAAPLARCSASGTRELNSKRESQSDATPQT

SEQ ID NO: 60839 - protein, 344 aa, unidentified
MYHFAGLDVSVKETSICIVDDTGRIVREVKVASEPEALLQVLGNPIYRFKRIGLEAGPLSQWLFSALAEAGLPVICVETRHMRAVLQAQINKTDRNDARGMAQMMRAGLYRPVHVKTLRSQKLRMLLTHRKLLQSKAIAIDNDLRGTLRNFGLKVGMVGTVKFEARIKELVENLPDLAVLVEPLLMVRRVLREQFSILHRRLLAIVRDDEVCRRLMTTPGVGPVVALTYRATVDVPARFRKSKAVGAVFGLTCAKYQSGEVDRNGRISRCGDEMMRVMLYEAAQSMLRSKKWSWLKAWAMQIARRRGMKKAIVALARRLAVIMHRIWVDGTEFRWTREQATAAA

SEQ ID NO: 60840 - protein, 315 aa, unidentified
MDESRRVTTCVGIDVSKDRLDVHMLPSGEAFAVARDGKGLESLVERLTALDVSLIVLEATGGFETTVAAALAGAGLPLAVVNPRQIRSFAKALGRLAKTDAIDAEVIALFADKVRPQARPLPTSDARALGALVGRRRQVVEMIGMEANRRRHAADKRLAKTIDRHLAFLEKELAAVDADIDTDVRGSPAWREMEDLLASVPGVGPVTARTLIAELPELGDLDRRKLAALVGVAPFNRDSGAWRGHRMIGGGRTSVRNVLYMAALAAIRHNPLVRATYQRLVNRGRPKKVAIIACLRQLLTILNAIVRTKSPWKIA

SEQ ID NO: 60841 - protein, 353 aa, unidentified
MSNVKYVGLDVHKAITVIVILNAAGQVESRTQVKTKADNLRDFFRGLSGRVEVVFEEGTQSAWLYQLLKPLVAEVTVCDPRHNKLIGDGNKSDDDDAETLARLLRMREVKAVYKGDAEQQKLKELCRAYENLVADTTRVQNRLKAIYRARGIDCAGAEIYRPERRAEYLAQLADEAARFRAESLLDQLAALRALRKQAKSRFLAQTRNHADYRILAQLPGFGAVRVGQLIATVGSPHRFRTKRQFWPYCGLAVVTKSTSDYKEVEGRIVKAQKKVSTRGLNWNHNPRLKQVFKGAALTALRHEEMRAYYQQLVDDGTRPELARVSVARKLAAIALTLWQRREDYDPKKITAQN

SEQ ID NO: 60842 - protein, 330 aa, unidentified
MSAKETIMTETNKELIMIGVDVAKHKLDIAIDEKTVQTIDNEEESFKKLIRTLSDIKSICFVMEATGGYEKKRVNFLQSQDIAVAVVNAKRVRDYANAMGAYAKNDRIDAQMIRQFGQVSYTRKRLKLREFRTVTAQRLEERLRRRNQLVDQRAVEKQHLEAASDKETVRSIKRIIKQFDKEIEKIEVKIKADIEDNECLKKSHQRLIKVPGIGEITVLTLLTQLPELGRLSNKEIVALVGLAPYCNDSGHKTGRRTIYGGRTLIRSTLYMATLSAVRYNKPIREFYQGLLARGKLKKVALVACMRKLVTILNSMTKAESEWDAAFEKTA

SEQ ID NO: 60843 - protein, 344 aa, unidentified
MNKVTVIGIDLAKNSFQLHGVDAKAKVVLRRKLRRDQVPMFFANLPECLVGMEACGSSAYWARVIESCGHTVRRIHPRFVKPYLQADKNDANDAAAICEAVQRPHMRFVPHKSQEQADIQAIHRVRQRFIRDRTATINQIRGLLAENGIVYRQGASTIRTVLPAVIDDNNSELSLVMRRLLRSLYEEIVFLDSKITEQNLALHEIVKSNETCKRLMGVPGIGFITATILLSVAGSAHDFKNGREFAAYLGLVPRQHSTGGKQRMLGITKRGDTYIRTLLIHGARAVLRSIKKGGVPLGEGGQAVWLAQLNERRGINRASVALANKTARVVWSMMAHGTEYRIAA

SEQ ID NO: 60844 - protein, 343 aa, unidentified
MDITTVGLDVAKHVFQVHGIDKHGEVVVRKQLRRKEVVAYFTKLPACAIGMEAGSSSHYWARRLQGLGHTVKLMAPQFVRPYVKTNKNDARDAEAICEAVTRPSMRFVPIKTAEQQAILALHRARQGFVKARTAQANQLRSLLAEFGIVLRQGIHVLLREVPAIVSDDENGLLESVRDLFTRLLGHVKELDRHVTEVEQQILQWHKSNEQSRKLEKVPGIGPITASALVATIGDATAFHHGRQLAAWVGLVPRQYSTGGKIRLHGISKRGDVYLRTWLIHGARSVLRVAARHTDPTTRWLKDVQARRNANIAAVALANKHVRVVWALLAHDRDYTPEYASTSS

SEQ ID NO: 60845 - protein, 343 aa, unidentified
MQIRSVGIDLGKTTFHLVALGASGKVLVKKKFTQKQLLVFTANMETSLIGLEACSGAHFLGRALRQQGHDVRLIAAQFVKPFVKSNKNDFVDAEAIAEAVERKNMRFVPIKTDDQLDLQAMHRIRDRLVSRRTAVINQIRAFLLERGMVFAQKPAKLKAAMADVLENAENALTPMMRNMIGILWDEWKTVEHQIDELTDRLEQIAASDVGCCRIRQIPGIGPIVATAIVAAIGNGAAFRKGRDFAAWLGLVPRQYSTGGKTRLLGISKRGNIYLRKILIHGARAAAMRIKRDRFAIGGWMNALEARAPRNVLVVAMANKLARIAWAVLSTGKDYRPGVIVAAA

SEQ ID NO: 60846 - protein, 414 aa, unidentified
MALKIVYKICCGIDVHKTFVVACIASTNSQGVAIYKSHRFSTFTKGLRELLQWLLDNNCTDVCMESTGKYWIPLFNVLEQSCTIVLAHPKYVKAIRGKKTDKKDAKWIADLFKHDLVAGSFMPPADIRQLRDLMRYRHKLTCFKSSEKNRLQNCLTVSNIQLGNVVSDTFGKSSQKIIDKILENPLDTSFDVEPLVHSSMKKKLPELELAIDGYINPHQAGKLNIIKQHYEDLETRKQELEQLILALAKPYQQELDLILTAPSFKNIFSAITVISEIGINMEAFPSAKHLCSWAGLTPTNNESAGKKKSVRVSKAGCYIKPLLVQCANAVVKSAKHPEIRNRYLRLRKRRGHKKAIIAIARMLLTALYNMLKNKESYNAELYRKSDIIPVDREITIEQAVLFARSQGYRIKDVS

SEQ ID NO: 60847 - protein, 334 aa, unidentified
MTIQMLAIDLGKQSFHLHAIDDDGVVISRKVCRSKLDLAVAELAPVVVAMEACASAHHWGRRFTADGRKVLLINPRFVKAFVRGSKNDAVDAEAIYEAASRPTMRFVPLKSAEQQDLQSLHRVRERLVVQRTSLINHARGLLAEYGIVLAKGPWRFRDRAPAAIAEAGLSPLAGELFAELLSQLEDVDIRLARLDARLIMLCRENDACRRLSELPGVGPVIATALVAAVDDGRHFRSGRELAAWIGLVPRQYTTGGKPRLGGIGRRANHYLRRQLIHGARAVASRLARRDDRRSEWLKGVVARAGFNKALVALANKTARIAWVLLARQESYRAA

SEQ ID NO: 60848 - protein, 344 aa, unidentified
MNEVITIGVDLAKNVFQVHGVDAEGDVVIGRQLRRSRVLPFFKKLPPCLIGMEACATAHHWARQLIGLGHEVKLMPPHYVKPYVKRGKNDAADAAAICEAVTRPTMRFVSVKGLERQSVLMLHRTRELLVRQRTMLINAIRAHMAEFGIVAPVGVPQVKKLLAVIADMDDARLPSLARTCLESLARQFLSLHDEINAAEKRIHAWHRSNEVSRRLETIPGIGPITASALAASITDPEVFKNGRELAAWIGLVPRQTSTGGKQRLGKISKQGDQYLRWLLVAGAMSVIRHAKRRGTTNLPWLAGMIARKPTKVAAVALANKTARIAWVVLMRGGTYQKPVAVQAA

SEQ ID NO: 60849 - protein, 314 aa, unidentified
MSQPVFVGIDVAKDTVEVACSDASSHSFTNNEAGHAKLLRWLARKPVALVVLEATGGYERACAVALAASGLPVSVLNPRQARDFARAMGKLAKTDRIDAGVLAEFAAVLHARGHQPRALASLEQRELAALVARRRQLVAMLVAERQRLGVAHMRAKPSIEAVIELLLRQLGDIDDDLQRTLKEHHADLSELLQSVKGVGPTTASTLIAELPELGLLTRKQITSLVGLAPLNRDSGTFRGQRHIFGGRASVRRVLYVAALVATRFNPAIKDCYTRLVAAGKPKKVALVACMRKLLITLNAIARTKTPWRNDFASH

SEQ ID NO: 60850 - protein, 338 aa, unidentified
MQITTIGFDTAKNLFQVHGADAQGRPVLKRKLARGKVQEFFATLPRCLVGLEACAAAHYWARELTKLGHEVRLMPPQYVRAYVKTNKHDAADAEACCEAVQRPGMRFVPVKGEDQQSLLMLHRVREQLLKQRTATINALRAHLAEFGIVAAQRQMGLRELLAVVADPEDRRVPPLARELLQVLAHHLRGLEERTAELDRRLVEVARGDAACARLAAVPGIGPVIATALVAMVGDAKAFASGRHLAAWVGLVPRQHSSGGKERLLGISKRGDSYLRRQLMHGARALVKVSKGREGKPWAWIDGLLARRPFNVVVAAVANKLARIAWALLSRSEDYRAPA

SEQ ID NO: 60851 - protein, 338 aa, unidentified
MPQLNDLSRSLVTLDQDATLIAVIEMGQASWLVAGVVPGVERQPLKKLGVDESTLLKLLHRWQEEAEKAGHKIKRIAVAFEAGRDGFWLARWLRACGIEVHVIHASSVAVSREHRRAKTDRLDTELLKRAFLGWLRGERDHCKMVAIPTTQDEDAKRPNRERENLVGEQSRIVNRMKATLTRLGIRGFNPKLKTAAARLDGLRTPEGGPIPPNTLAELRRDMVRRRLVSDQIRQIEDARLERLKHAPGDGPHAMVRLLARVIGVGIETADMLVQEVLSRNMRDRRAVARYGGLTGSPDESGKKRREKGLARSGNARVRRGMIQLAWRFLIFQKDSALA

SEQ ID NO: 60852 - protein, 368 aa, unidentified
MFKVGGKSKSVSSGRGTVPKLRLMLEETMSKGSVDQGAWTCCGVDVSAATLAVAVERVKRDGFDEREFANTAAGHRQLVAWLLQRGPVRVALEATGIYSLDVALALDGADGIAVAVLNPKMVHRFAQTLRRSKTDKADAVALAEYSRRMPFVPWRQPSRQVLELRALSRHIASLCEEHTRSSNRLHAAEGSATTPGCVRQDLKRSMALQQKRILRLRRVAMELVRREENLARQFEQLIGIPGVGEVSAVQLLSELAALDPQMTVREWVAHSGLDPAHRVSGTSVHKASRISRQGNRYLRRALYMPALTGARCDPHMKAFYELLQTRRKTKLQAIIAVARKLLHAIFGIFKTGTPWDGAKLFPQLIPTS

SEQ ID NO: 60853 - protein, 321 aa, unidentified
MQANNTVVYAGVDVAKATLQLHLQGQQSEFSNTPKGLLQLLAQLQTVPSVQVVCEATGGYERAMVKALQQEQIPVSVTNPARVRAAAQAQGQRAKTDRIDAQGLTDYGQRYQPEPTPPTSATQDQLVALTQWLKQLIHGRALAKTQAEHHQDAFVRRQHTKLMTHLQSQIEAVEKQIEALLEQDAALQQRVNCLDEIQGVGPRTAWMVLAHMPELGRLNRHEVAALAGLAPWTRESGTMKGMRCIGGGRPEVRLALYMAALSAARCNPVLCILYKRLRAKGKLPKVALTAVMRRLLTYMNHCIKALPSETAGARTQELKAA

SEQ ID NO: 60854 - protein, 442 aa, unidentified
MRTLSVINANAAAIDVGSEQLHLSIAGERPVVFGTVTNEVYRLRDYVKGQGVTTVAMEATGVYWLYAYVVLEAAGLEVVVVNGRHVRNLPGRKTDMADCQWLATLHAHGLLRGGFVPPAAIRRLQDYQRLRADHIIGAASQVQKMQQALERMNIKFHDVISDLTGVSGLRVVRAILAGQRDPEQLLDLCDVQIQKKKRERVIESLHGVWAPEHLFALQQALAVWEFYQQLLADCDRQIEAVLKDLAGPEPQPPTSTGGPASSTPVKPLGKNAPGIEHLHEMLVRICGGRDATALPGVGDHLLLQLVAETGTDLSAWPTEKHFTAWCGLAPGSRQSGKRRGSIKRQRNRAGRLFCTGSRSLAQSVDKALGAFYRRMRGRKGGLLAMKALARKLAELYYRVLRYGLAYAEKGLRAYEEKYAESQRRLLANLAAKQGFKLVAVQA

SEQ ID NO: 60855 - protein, 415 aa, unidentified
MGMDVIVERCAGIDVHQAQLTVCVRVPGADGKRVEELASFGTTTPDLLALADWLAAHGVTQVAMEGTGVYWKPCYWLLEQSFELWLVNAQHVKNLPGRKTDTKDAAWLCQLLEHGLLRKSFVPPREIRDLRDLTRYRKALIRERAAEVNRLHKVLEDAGVKLSSVASDIMGVSGRAMLEALVAGTSDPELLAELAKARLRAKLPALRKALDARFRDHHGFLVAQVLAHIDYLEEAIAAVGERIDAAIAPFQAAVELLVAIPGVQRRTAEVVVAEIGVDMSRFATSRHLSSWAGLSPGNNESAGKHKHGRTTKGSPWLRTALVEAALGATRPHGYLRAKYWRVRGRRGHQRAVIAVAHGLLEIIHHVLSTGELYSDLGNGYFERRQAEYLRRRAVRQLERLGHHVTLTEAPTPQPA

SEQ ID NO: 60856 - protein, 453 aa, unidentified
MSNKRAEKKKGCSPGSGLQPDASGVDVGATEIYIAVAEGRDAEPVRRFATFTEDLQAASEWLVRCRIKTVAMESTGVYWIPFFQMLESRGLQVCLVNARHVKNVPGRKTDVSDCQWLQYLHSVGLLRGSFRPEQQVCAVRSLARHRESLVEMAAVHLQHMQKALDQMNLQLHHVISDLSGTTGMAIVDAILAGERNPQRLAKLRDPHIQCDGRTIAKSLVGDYRGEHLFTLRQSVTAYRHYQQLLAACDVEMERLLEEFSDRTGPGTPALQEPTKRRKPRRNEIRFDLRAHLYRILGVDLTAVPGISALTAHVLMTEVGPDLSAFRNEAAFSSWMGLCPDNRVSGGKRLGSRTRKVNSRAAKALRMAANALYRSQSWLGHYFRRMRAKLGAPKAITAAAHKLARIVFHLLTTRQPYDESIFATEELLHQRRIQRKLQKQAKLLGFQLVPIQLA

SEQ ID NO: 60857 - protein, 408 aa, unidentified
MELTPLHKRVVALDVHQAKITACAIIEHDDGRTEITKRDFGAFKRDRRALAQWALEMAPEVVVMESTGVYWKSPFAALEAVGIVAWVVNARHVKAVPGRKTDMADAQWLATLARAGLLRASFIPPVQLRQLRLVARQRQKLGGMLSAEKNRLHKVLTDAGIRINVLVADIHGASARAMVKALIAGKPMHEILDLKGRVRASREELFESLSTEQFSAVHTFVADEIMQHIEQIEQRIERMEQYLLDGLQAMQPQLNLLQTLPGIDRVGAAMLLVEIGADMSVFGSAERLASWVGICPGNNESAGKRKSGRIRKGNAWVRRLLCEFAQAAARTRCALKAKFESLNVRKGHKKSIIALAHKMLRTIYAMLASGTHYKDRSVDYEALTVARNAPRWMKMLRKHGFIHTPAAA

SEQ ID NO: 60858 - protein, 347 aa, unidentified
MKNTVIGIDISKKSTDWCLMRGTEIVSYHCVDNEASAIEQQLQELMNLYLIDKCDLMVCAEHTGHYIYPLAIACQNKQVDLWLESGYNIKCEARKERGKSDKEDSRRIAEYGYKNQADAHYYSIPEHDITVLESLLSERADYVVERAKLEGQLNDQKGYTDREVYKAKAKRLKKLIRQYDRLIEETEKELERLMRENKTMGHQAALLETIPGVGRQTAMRMIAATKGFTLFENGRQFCCYAGTAPFEYSSGTSIRSKHRVSQRADKSLKAMLHLCALTVSRRCKPNHFSDYYQRKVDEGKNPMSVLNAIRSKLVLTMFALIKTNQPYSPEIVHNYVEKFSLKPIAIS

SEQ ID NO: 60859 - protein, 440 aa, unidentified
MAVRKREDEVFPKAAGIDVGASSHWVAVPAHMAEKSVREFGAMTDDLNAIADWLLECGVDTVALESTGVYWIPLYEVLEQKGLKVWLVDARQMKYVPGRKSDVLDCQWIQKLMSLGFLRAAFRPDAEVLVLRAVERQRELLVVEQGSWVRRMQKSLVQMNIQLTEVLSDVMGETGQAIIRAIVAGERDPKALAQHRNGRVKASVEEIERALTGNWREEHLFVLKQSLAMYDHFATQLGECEAKLQALLRDLGQKQVNLGKVPRSGSKLHAEYEARQILANWAGIDLTRIDGLGLTAATKILTEIGVDLKRFASVKHFCSWLGLCPGTKISGGKVLSAKTKRSTNRVRQALKMAAMSLSHSKSALGAFYRRLCSRMDKPSANTAVAHKLARMVYFMMTRGEAFVDQGQQRYEEQQLQRSVAALKRRAKDLGFVISPLATAA

SEQ ID NO: 60860 - protein, 422 aa, unidentified
MLAESHDEEQIIARVAALDIGKAELVCCVRVPAPAGGRRRLQEVSTHSTMTKSLADLANRLVGMGVERVVMEATSSYWKPVFYLLEAHGLDPWLVNARDVKHLPGRPKTDVLDAVWLCKVAERQMLRPSFVPPWPIRRLRDLTRYRTDLVAARTAEKNRVEKLLEDACIKLSVVASDIFGVSGRAMLAALVAGERDPKVLAQLARARMRGKIDRLEQAFDGHFADHHRFLLSRMLSRIEALDADIAAVDAQIEAQLAPFAEAAAHLDEIPGIGPVAAAAIIAEIGVDMSRFPTAGHLCSWAKFAPGINSSAGKTKRSASSGHGSPYLARVLGEAAVGTSKTNTFLAGRYRRIARRRGQPRAVVAVGRSILVIIWHLLHDPDTRYQDLGVDHYTRHVDSSDKKRGHIRQLEALGYTVTLTPAA

SEQ ID NO: 60861 - protein, 419 aa, unidentified
MSSVVDIVYPVCCGIDVHKSFLVACIATTDERSHTTHLIRRFSTFTGDLRKLADWLASHNCKDVLMESTGKYWIPVFNTLEKTCNVNLTHPKYVKAIKGKKTDKKDAKWISELFKCDLIRSSFIPPEAVRQLRDLCRYYTKLTNVNTSEKNRGQNCLTVCNFKLDDVFSDVFGKSASRVMDKLLEYRNGNFDVAPLIDRRCKASLEQIKAAIDGELNTAQAEKLQFVRKHMEYITSAQAALEKLILNLAGEFQPQIDLLLTVPGIKEPLTAVRILAEIGVDMSVFETAKRLCSWAGLTPQNNESANKKKTTRVSRAGVYLKPLLVQVANAICCKSNKFPELKNKYLMLKKRRGHKKAIIAIARKLLTAIWHMLSKNEVYNAELYHKADKPPVERVLSPDQAFALLRSKGYQILDKPPAP

SEQ ID NO: 60862 - protein, 343 aa, unidentified
MQAVTTIGLDIAKSVFQIHGVDAAGNVIVRRQLKRRYVLPFFQKLPPCLVGIEACASSHHWSREPQALGHTVRLMPPAYVKPYVKRHKNDAADAEAICEAVTRANMRFVATKTPEQQSCLMLHRTRHLFIRHQTSVINAIRAHLAEFGIVAPVGRNGVEQLLDVAADASDTRLPEAARACLLALGAQLRTLKAQILNFDRQIMAWHRSSEASKRLDEIPGVGPALATALVASVADPKAFRSGRNFSAWVGLVPKQHSSGGKDKLGSISKQGDRYLRSLFTAGALAVIRYAKIHGTKHRPWLTALLARRPTKVAAIALANKIARMAWAMMAKGERYKEPVALAV

SEQ ID NO: 60863 - protein, 414 aa, unidentified
MDVIVERACGLDVHKRTVVACLMPPGPDGKPHKELRTFSTVTADLLRLADWLAAAGCTHVAMESTGIYWRPVYNVLEATDHFELLVVNAQHVKAVSGHKTDAHDAAWIADLLRHGLLRGSFIPPRPLRELRDLTRYRSELVHDRVRLVNRLHKVLEDANLKLAMVATDVMGASGRAIFAALIAGESDPERLADLARGTLQKKRQELEQALKGQFRPHHAFLLAELLSQIDALEEAEARVTAELEARLQEEADALAYLDTIPGVNQRIAQIIIAEIGTDMARFPSAKHLASWAGICPGNHESAGKRRSGKTRKGSRWLRQALTEAAHGAAHTKQTYLAALYQRIAARRGRKKAIIAVAHAILVICYYLLMRQEPYQDLGANYFDEREREGVERRLIRRLERLGYTVVLQPVRAAA

SEQ ID NO: 60864 - protein, 341 aa, unidentified
MKNKSFIGIDISKNVIDVSIFCEETPIKDFSHDVFNNSRKGFGEMCTWLKKNHVVLSNCLFGMEFTGSYSMELEKFLNARKYQFCMLSTHVVKHYPMGPKDKSDKIDSAKIADFLYRYNGTECVKPYNMPNKTMQRLKALMNERKFLVEQRTCFMNRRQLCITKEDAQLYDGYIKEFSHDIENIELEEQKLLATDDSLLSTYKNLLTIPGIGFVNAINVIVITRNFTAFETARQYASYIGVAPHFHTSGTSVRWRPRPSARCDGQAKADLSMAASVAVQCDAELQSFYNHKLGDKQDSDTKRKALNAVKFKLVLRMFAIGKQNRKWEPLDSKSSNEKLAIS

SEQ ID NO: 60865 - protein, 387 aa, unidentified
MSEMFNPHAPATAYDHNTTIVAVLELSGKNWLLGAVAPGLSRRTKRSFEARNVEAVVRALEQAKGESAKARFEVARIVVGFESGRDGFWIARALQQRGFEVYVMHAASIAVERRGKRAKTDRLDVDLLLTTLMGWLRGEPGRCTMAPVPSEEEEDLREAGRRRETLVHARLKVENQISSLLIRQGIEGFKPRLKNAETKLCELRTFDGRSLPANTMNSLRLLLAQHRLLSAQLKEIEEARQRVVNVAKPDRLQRMILALARVVGVGVETATVLVHEVFSRSFKDRRALGAFVGLTGTPYNSGSSKTEQGISKNGNARVRRMLSQLAWRWLGHQPESALAQWFNARLGGAKGRVKKVLIVALMRKLVIALWRLAETGEIPIGARLAAR

SEQ ID NO: 60866 - protein, 334 aa, unidentified
MENIALIGIDLGKNSFHIHCQDRRGKAVYRKKFTRPKLIEFLATCPATTIAMEACGGSHFMARKLEELGHSPKLISPQFVRPFVKSNKNDFVDAEAICEAASRPSMRFVQPRTESQQAMRALHRVRESLVQDKVKTTNQMHAFLLEFGISVPRGAAVISRLSTILEDNSLPLYLSQLLLKLQQHYHYLVEQIKDLESQLKRKLDEDEVGQRLLSIPCVGTLTASTISTEISDGKQYASSRDFAAATGLVPRQYSTGGRTTLLGISKRGNKKIRTLLVQCARVFIQKLEHQSGKLADWVRDLLCRKSNFVVTCALANKLARIAWALTARQQTYVA

SEQ ID NO: 60867 - protein, 387 aa, unidentified
MVQINDLSRSLAAFDPISTLVVVVEMSKASWLVSGVVPGVERQPLKKLEPDATALLRLIERWRNEAVRAGRPIRRIALAYEAGRDGFWLARWLIARGIEAHVIHSASVAVSRERKRAKTDRLDAAMLMRVFLGWLRGERGHCGMVAIPTMEEEDARRPNRERESLVNERSRIVNRMRSALARLGIRGFKPHLRKAPERLAGLRTAEGTGLPANIIEEFRRDMARLALVREQISSIEKTRAERLERAPDTGPHAMVRLLARVIGIGIETADMLVREILSRNLRDRRALARYAGLTGSPDESGLKSREKGLAKAGNARVRRGLIQLAWRFLMFQKDSALARWYRTRTEGPSGARKTTMIVALARKLLIALWRLVTTGEVPDGVELRPAA

SEQ ID NO: 60868 - protein, 369 aa, unidentified
MKHSTIFVGLDVHKDSIDIALADDGRNGEIRFYGTIGGDLDSLDKAIRKFRRAGTELRFVYEAGPCGYEIYRHLTAQELHCDVIAPSMTPKKSGDRIKTDRRDAVTLARLYRAGELTPVYVPREDDEAMRDLVRGREDAINATRKARQRLSAFVLRHGFRYSGSTAWSVAHLRWLADIKMPHPAQQIALQEYIHSIEECSERVDRLTEQILKLIPTWRMAPIVTAFQSLRGVAPLVATTMVVEIGDLRRFDNPRQLMAYLGLVPSENSSGQTTKRGGITKTGNCHARRALIEAAQAYNFLARVSRVLRKRHENLPREIKEISWKAQVRLCGRFRKLMAKGKNRNRTVTAIARELSGFMWAIAKEVPMPI

SEQ ID NO: 60869 - protein, 354 aa, unidentified
MEKTTTQATVATIGIDLAKRVFQIHGIDSSGKVVIRRAVKRREVVAFAARLPACLIGMEACATAHHWARELARLGHEVKLIPPAYVKAYVRRQKNDTADAAAICEAVTRPAMRFVPVKSAEQQGVLMLHRVRELLVGQRTALINALRGHLAEFGVVAPQGARHVAELVAVIADAGDARLPDIARGALAPLVAQMQRLEVEISHLDRRLLAWHRADATSRRLATIPGIGPVTASAIVASVTDPSMFNSGREFAAFFGLVPRQSSSGGKERLGRISKMGDRYIRKLLVVGATAVLRYAKKDSSPSQAWAKALLQRKPFKVAAVALANKTARIAWAVLARGEAYQAGKASAVAPEAA

SEQ ID NO: 60870 - protein, 330 aa, unidentified
MEREYIGVDLHKQFFQACAVTPSGDRLWEARFARTDEGLTQFRRHCGVQTAIAVEACGPTWPFVDAVAPTGARVAVVDPRKTKLKAGFAAKTDRLDARRLADALRRESVVSIYVPPPAIRELREVCRGRHHLVRLRTRASQMIRALLLRCGAADVPVRRVYSARGLAWVSQVPLSPDASASLQRLRRVLEAVQDQAAAAEAALMTRAQADPIAVALDTLTGIGPILGLTIRAEVGDIARFARGAELASYAGLVPRVDASADRYRTGRITRQGSPWLRWAFIEAAMHTVRRQDRTGRWARRLALRKGAGKARVACARVLCDDIVAVWPKGV

SEQ ID NO: 60871 - protein, 368 aa, unidentified
MEKCITYVGLDVHKNSIAVAFADEYGAEIRSYGTIGPDPASLDKVARRLVSQGKEPRFVYEAGPCGYKIYRHLRQQKFECMVAAPSLIPKRSGDRIKNDRRDAMMLARLYRSGELTPVRVPSAEDEAMRDLSRARGDAKKAERKARQQLGAFLLRHGFRYSGLSHWSLAHWRWISDIKMDHEAQQFTLQEYVDTVRCCTERVDRITQQIRLLVGKWRLGPVVEALQALRGVSLVVAATVVAELGDLTRFDNPRQVMAYLGLIPSQHSTGEKIKLGPITKTGNGHARQMLTEAAWAYRLPARVSRRLLDRQQKLPEKVRQVAWKAQVRLCARYSRLLARGKPSQLVITAIARELAAFMWAIARTVEVSA

SEQ ID NO: 60872 - protein, 338 aa, unidentified
MQVARIGLDIAKSVFQVHGVDEHGTVVVRKQLTRSKGLTYFAQLPACRIGLEACGSAHYWGRELQKLGHDGRFMAVQLIKPYRTKPKNDRNDAEAICEAVSRPQMRFVPIKTVEQQAVLIVHRARELLVSERTAVANQIRGLLLEYGIAIAAGIQRLRRELPAVLSAEDETLPALVRTVVTELQARLQELDERIAGHDRQIAQVAKQSEAAKRLMQVEGVGPITATAMVATVGDAKAFSHGRQFAAWLGLVPKQFSSGGKSVLGRITKHGNVYLRTLLIHGARAVLQSTAKRTNAKSVWVEALRQRRGDNIAAVALAAKHARIVWALLARGQEYRVAA

SEQ ID NO: 60873 - protein, 340 aa, unidentified
MEEISMYGVDTAKSVFQVHGENAARSVKVVKRLRRGQFLTFFARQPASVVVLEACGASHHWGRELTALGHEVKLIPPQHVKPFVKRNKSDARDAEAIFEAAHRPGLHFVPIKPVAQQCDRALHRARDLLVRQRSQLGNAIRSMLSEMGIVTAQGAAGSAQLFARIEAGDAAIPPRLLVAAGSLLAQWRSLHAAIKDLEDQVLLAARADPRVRRLMAIDNIGPMTAHAMVAAIGDGTQFRTARDFVAWVGLTPTLDASALRIRLGHITKAGDRGLRRLFVLGASSGVHHARIRPEKASPWLKGVLSRRPVKVAVIAQAAKTARIAWAVLTSGDAYRSPAAA

SEQ ID NO: 60874 - protein, 408 aa, unidentified
MNAVGIDVSKGKSMVAALRPMGEVALLPQEFLHTEVGLEQMAYAIIALGEDTRVIMEATGRYHEPVAAALHEYGIYVCVLNPLFIKQSGGGSIRKVKTDKADAMKIAKYGLDNWVDLREYTPMDTVRQQLKLCSRQYNLYMKTVVSLQNNLISLTDKTFPGVNELFSSPERADGHQKWVDFVMTFYHCDCICRVSEKAFTERYQKWCKRKGYHFSAEKAQDVYLGSCGHFTTLPKNDNTKLLITTAAQQLLAGKMTLAALRTEMTRLAKQLPEYDIVRAMYGVGETTAVQLMAEIGDVRRFPRRSSIVGFAGVDPAVDQSGKHSAKSVPTTKRGSPHLRKTLYQIVCTYLKKSPVDEPVYQFLDKKRSEGKPYFVYMTAAQNKFLRIYYARVKECLEAFDAQQDTSQR

SEQ ID NO: 60875 - protein, 343 aa, unidentified
MQAVTTIGFDIAKSVFQVHGVDAAGRVIVRRQLKRRHVLAFFQKLPPCLVGIEACASSHHWSRELQAIGHTVRLMPPAYVKPYVKRQKNDMADAEAICEAVTRANMRFVPTKTPEQQSCLMLHRTRHLFIRQQIAVINSIRAHLAEFGIVAPVGRKGVTELLHIVADTSDKRVSEVARACLAALGTQLLSIKKQILEFDRMIMAWHRSNQTSKRLHYIPGVGPMLATALVASVADPRSFRSGRNFSAWIGLVPKQHSSGGKERLGSISKQGDRYLRGLFVAGALAVIRYAKIHGTGHRPWLTALLGRRPTKVAAIALANKIARMAWAMMAKGERYKNPVALAR

SEQ ID NO: 60876 - protein, 438 aa, unidentified
MEEAGDEPLFCERAAGIDIGKQVISVTIRVPSDTRRGGRQQETREFGTTRRQLLEMADWLRCWQVERAGMEATSDYWKPVYFLLEREGFDCLLYQASQVKALPGRPKTDRLDSAWLARITEQGSRAGSFVPPEDVRRLRTHTRYRRRLIQARTAEKARCEKLLEDAHLKLSSVISDIHGVSGRDMLRAIIAGERDPETLAQKARTRMRRKIAQLREALDCSFFTPDHAFVLQMMLGNIDHYTAQIAVLDQRIAILCEPYERQIAQLDGIPGFGVTSAQDLIGEIGVDMGAFPTAGHLCSWARLAPRVRESAGRRKGKNATGRGNPYIGGTLGEAAAGAGRTQTFLGAKYRRLCTRMPKKKAQGAIMRDQLGIAHALLSDPVAGYRDLGTGYYEQRERTRRRASSHVRSLERLGYKVTIEPLTPDADPETGELITRTAS

SEQ ID NO: 60877 - protein, 409 aa, unidentified
MGLYCGLDWATAHHDIVVINDNGKVVARGRVGNDAAGFAALLTLLVEAGDTATHPIPVGIETDRGLFVAALRETGRVIYPINPLAASRYRSRHSVSGAKSDATDAVLLANIIRTDAAAHRPLPADTELAQAIRVLARAQQDAVWARGQVSNQIRDLLKEFYPAALVAFADLDGGLARPDARTILAAAPTPTQAAKLTSPRLRRLLIKAGRQRYLDRDVERLRAIFTGTYLHQPPVVEDAMGIHLTALLGQFDAACAAADALAEAAITHFERHPDAEIITSFPGLGNLAGARVLAEIGDDRSRFTDARGLKAFAGSAPITRASGKKTVVLHRHIKNRRLNAVGPIWALASLRASPGARRHFDTRRAAGDWNHQAQRHLFNKFLGQLHHCLHTGQLYDEHRAFPPPLPLAA

SEQ ID NO: 60878 - protein, 431 aa, unidentified
MSSIFFQVWTKYLVMYIYIQSRIKRREKTVEKFPLNKTIKIMEVLRQNVGIDMAKDSFVATFTVLLKGQIVNHKRTKKFQNNINGFEEFYNWCKKLQEKITAVNFTMEATGIYYECLAYYLFEKKLTVHVLLPNKAKKFAESLNIKSKTDKIDSKILGQMGAERVLEKWELSSKIYRRLRTLTRERQQIVEVRTMVKNQLHAEKHSGDPIKTTLTRMKNHIKYLSNKIEVIEKEITNLVSKDDFISEKVKKITTTPGLSFITVVTVIAETQGFSNISSIKQLISYAGYDVRIRESGKWKGKSRISKKGNSHIRRALYMPSLSAIQHSKTYGAFYERLKEKKEIKLIAITAVQRKLLGLIYILWKNDTEYIEYYEMKKSQIRKNIISGNDEPKLSFCFLRSKKSSEGRRSLTTQDRLRYKESPKAFFLQMQK

SEQ ID NO: 60879 - protein, 329 aa, unidentified
MSKLSKKVIGVDVGSKFLTVSFNDDQNQDQIYNIGNNQRSILSFLKKICAKDYCFVIEATGNYSSRMLHLSLSNGFEASLINCMSVKHFSRMKNIITKTDAEDAKLIRLYGEMFRPEIYKAKSIEIEYLDQEIKLLNDLEEEKRRYGVKLKALRYNPQLNPDTEKHYERRLKQLDKEIREVELRLPQLQDEEFKEVKGLLQSVSGIGEKTSLQLMTATSGFRNFDSAGSLVKYFGLAPRIYQSGKKSYSPGKCRTSKTHIRSLLYVCSWTAMKHNTQCKALYERLLEKGKAKKLALIAVCNKLLRICFGVVKNKTAYQQNYQKNFKILT

SEQ ID NO: 60880 - protein, 352 aa, unidentified
MTVTIVETGVRARAITGGVDTHADAHVAAALDPIGGLLGVREFPATPAGYARLLGWLGGFGTVCLVGVEGTGSYGAGLARHIAAAGIRVVEVDRSDRQDRRRRGKSDPLDAVSAARAAQSGRAAGAPKGRDGQVEAIRALMVAKRSARSERTQTICQARALIVTGPDDLRARFARHAPADLAAELASLRPRPGSMVRYHTLLSLRELGRRAQFLDAQLARLDEFIVPLVTARAPGLLALYGVGPDTAAMLLVTAGDHPGRLRSEAAWAHLCGTAPLSASSGKVTRYRPGPGGDRQAGHALWRIVFTRMGSDAATRAYAGRRTKEGLSKKEIIRCLKRYVARQVYPHLRPDAG

SEQ ID NO: 60881 - protein, 323 aa, unidentified
MQGKVSFQEDAMPVVYAGVDVSKEWLDIHLHPLGESRRFSNDKTGIRQLKRLLARHRPKSIVMEATGKFHRPAHRSLWLDGFAVAVVDPLRARMFARACGYLAKTDRLDARFLALLAESLRPPADTPPSPHVEALQELVNARSAAKCDITALQNRSKTATTALLRGELNRLVRRLEQHVERLDKEIERRVGEDPQLYRKAEILTSIPGIGRVTALALMAGMDELGSCSGKQAAMLAGLAPIANDSGARTGRRSIRAGRPAPRRALYMAALSACRHNPALARFADTLKAAGKPAKVILVAVMRKLLVLANCLLSHDRLWTPNPP

SEQ ID NO: 60882 - protein, 353 aa, unidentified
MHLQVEFSLFCLMFKNKSMKVVYLGVDVSKKKLDLCLRSNGKDILYDVIPNDLSSIKSWLTRTFEKFFLSEDSLVVCAEHTGQYTYPLVCATKSIGVYLCLEDAAKIKYCHGIPRGKNDKIDACRIAMYAERYNDCLQPYTASELIIQKLKNLSTERSMLVADRAKYQSQLKDQVDYMEHSIYIAKCNRVEGIINTFTDYIAQIDLEIKELINQAPVIAHQMDLLMSVDGVGERVALKMIMETDAFTSFTDPRKFCCHAGVVPFVYVSGSSQRSKNRVSNRADKSIKHLLHMAALSVSQVKNSPLKKYYDRKVEEGKNKMSVLNAVRAKLVTIMFAVIRADAFFSRNYQNSLA

SEQ ID NO: 60883 - protein, 346 aa, unidentified
MDQIIRIGMDTSKHIFQLHGVDSAERPVLRRKLRRSQLLAFFAKLPPTVIGMEACGAAHYWARELRKVGHEARLMAPQHVKAYVKRNKNDGRDAEALCEAMSRPTMQFVPVKSEEQQAALMLAGVREQLIARRTQLCNAIRGYAAEFGLTAPKGLDKIEPLLAQIAQDKTVPAMARELLALQGKDYARLQIEIKAIEAKLMAWHRANATSRRLAQIPGVGPIGATALVMKVLDPRLFPSGRHFAAWIGLTPKDHSTAGKRRLGKITRAGDERLRSVLVAGATAVVQQAKIGRGRASPWLLALLKRKAPKHAAVALANKIARIAWKLMVTGESYDGARIPGTSALAA

SEQ ID NO: 60884 - protein, 348 aa, unidentified
MSQSKQYVGLDVSLKETSICVIDDADKIFWRGQVDSTPEAIASAIKQHAPHAVRIGLESGQLSSWLFHELKQAGLPVICVDARHAKAALSLKVNKTDANDAFGLAQIMRVGWYREVTVKGLDCQAVRALLVARAQIVSQITTLKNCVRGILKTFGRVLPKGLRSQFPARVRAAIDGHQVLGTIIEPTLRVLEAMRVQLRVYDKAVIQRARSDDTARQLMSAPGVGTVVALAYITGVEDPARFKRSSSVAAYFGMTPRRYQSGEVDHAGRISKCGDGMVRGLLFEAAKVLLSRSARPSALKTWGEALGKRIGAKKATVAVARKLAVILHRMWTTGTTFQWNAEAASSAA

SEQ ID NO: 60885 - protein, 405 aa, unidentified
MKKVIKVCGLDVHKDTIFACVKKGNYQSEVKKFSTMSCGLAELNHYLKGEQVSKVAMESTGIYWMPVWRALENDFELLLVNPYFIKQMPGRKTDVQDAQWIATLLDKQLLRGSVVPCKTIRILRAYLRRYAQLQGQTTRCLQQIEKQLSQCNIKIASLSSTIGSKTVIDIVESISKGNHAPEELLALVHGRIVKKHGEKVKQSLQGIIEEHDVFLLRQIYEDYRHIERQCNELLAQAQKIAETHYKEQLDLLQTLPGIKQLSAVIILSELGGNIKLFETAERLTGWCGLRPKNDESAGKIKSRSITKGNKYLRRILVQTAWAASRTKTCYLKTKFEQLSVRKSSKKALIAIARKQLVIIWNVLTKQEVYQEPKIKLSAQQISRKQKYYQEKLSKLQLLQDIEKAV

SEQ ID NO: 60886 - protein, 338 aa, unidentified
MNYVGIDHHRQYSHVTVMDPRGQVLRSDRVANLQAEIRRFLEGLEALEAVIETGRSSYTMVDVLEEMGMAVKIAHPHEVKAIARAQIKTDKRDSEVLAHLLRMNMVPEVYRRSPENRRAQRVLRQRAFYVSAMTALKNRVHAFLAQQKEEVRQEAARETNIFSDKGQKMLLGLDLSREEKSLLAALLKTHRHLETRIEESTALVDKLYDEIREAQLIRTIPGFGKYLAVLVAVEIADLNRFADAAHLHAYAGVIPSTHSSGDKTHHGKIVRAGNRWLRWAAVEAVWPAIRADFDLRRFYERLARNKGANKAKVATARRLLTIIFKVWTEGRNYIAYRR

SEQ ID NO: 60887 - protein, 427 aa, unidentified
MQYALPQVLPDVPAGGVCAGIDWATADHAVCVVDLAGRVTDRFPAAHDKAGIAAIITRLRRGKVTEVAIERGDGPLVDALLGAGMTVVVITSRQVKNLRSRFGAAGAKDDRFDAFVLADTLRTDRARLRPLVPGMPAAISLRMAVRARRDLVAHRVAAGNQLRAHLAVAFPAGTRLFHDLDSPISLAFLARSGSQDAAAGLDEQAIGAWLATIAVRGRPAPASELHARLQAAPPGATGTDGAARAGVTAALTAALTALSAQIKSLETQIAGQLAAHPDGPIFTSLPRPGTVRAARLLAEIGDCRSRFPDPESLAGLAGVAPVTRRSGTRIAHGFRWAVNRQLRDAVCDFAAGSRHASPRAAAIYDDARARGKDHPLAVRITARAWIYVIWRCWHDGVAYDPAKHNALRAILAGQAAQAAGPAPQEDQ

SEQ ID NO: 60888 - protein, 326 aa, unidentified
MQGKEASEQETKVKSNVGIDASKCWLDVHILPCGERRRVANSEVGVRQLKRWLLRHELALVVIEATGKWHRLVHRSLVASAIPVAVVDPFRVRMFAKAQGILAKTDRLDARVLAAFAAVMAPPLRPPAPQTMAELAELVVARASAVEAQTALKNQRGAAEGNFLKRQLERRIMRGDKDIECLEREILARIKADQGLARRYAILTSIPSFHFVVAATLIACLAELGSLTTKQVAMLAGLAPIADQSGKRDGVRVIWGGRKAVRRILYLAALSAVRFNPDMKAFRQRLKSVGKPAKLILIAVARKLVILANTLIHQDRTWQPNPVKIA

SEQ ID NO: 60889 - protein, 364 aa, unidentified
MQYIAFDSHKRYTLASVEELKDGMIFETRIEHERGNIRNFLTRCEPGSPVAVETIGNWYWIIDEIEAAGMVPKLVHSRKAKLMLAMVNKTDKLDARGLNRLQRTGTLPTVWIPPGVLRDKLELFRTWMVLSQQRTRLKNRIHATLSKYGLSIETASDAFGKRGREEILIHLRTLPSHTQYAAQRLLEQLGVVEEQIYLFEQRMREVFSSTQDLKIITSMPGVGFILGVVILSEIGDIGRFPSAEHFASYAGTTPRVHASGGKIRYGQMRSDVNRYLKWAFIESANTICLNRRRNPYSHVSRLYERIRGRRGHQKAIGAVARHLAEATYWILKKGEPYKEPHKSCSFRPREDKRGAVLSSMKLGI

SEQ ID NO: 60890 - protein, 425 aa, unidentified
MNSNTNQKINQVSEKTLVIGIDIAKRTHYACAVDERGRVLQKSFSFSQTREGFDTFYERIMALRATHEKSDVLVGFEPTGHYWMNLAAYLCAHGIPFIMVNPHHVNRSKELDDDLQTKNDQKDALVIARLMRDGRFSYPRILEGVEAELRNGATLHAKIQEDLNALQNRIIRWLDRFFPEFTQVFKNFGKMAYAALEKTPLPMDIQGKTPEELLFLYRQVDGMKSPQLPKAKQLVEVAQSSIGLTEGLVMARIEIATLLSQYQLMQAQLDELTAQLIELAKQMTDYAYLASVPGIGDVTIVELLSEVGSLTQYEHPRQLIKLAGLTLRENSSGQHKGQKRISKRGRRRLRALLFRVMMPLIRHNEAFKKLHEYYTTRTVNPLRKKQSMVVLCGKLLKILHALCKKKVQFDEQQMMKDLYCLQEAA

SEQ ID NO: 60891 - protein, 330 aa, unidentified
MEKITTVGLDIAKHVFQVHGIDGAGAIRIRRKLRREDVVGFFSALPPCLIGIEACATGHHWARVLIGLGHDVRLMPASYVKPYVKRQKNDATDAEAICEAVMRPTMRFVPVKSEEQQSVLMLHRVRELLIRQRTMLVNALRGHLAGVGMLIALVEEDDHDLIPPLARSALLPLIGQLREVHEKVSDMDRQIHAWHRSNELSRRLETIPGIGPITASAIAATVTDASLFKSGRQLSAWIGLVPRQNSSGGKERLGRISKQGDPYLRRLLVVGAHAVLRFSRNGKTAPTRWAAELLLKKPYNVAAVALANKMARIVWALMTTGRRFESTVAL

SEQ ID NO: 60892 - protein, 340 aa, unidentified
MLYCGVDLHAKSSNFCLVNRRGKRVAEGVVPSGRRGFTTLMASGKGEEIRLVLEASTRSRWAAVVLEGLGAEVIVVDPRKVRVIAETKHKTDRTDARILADLLRTEALPPALWRVPRGTRELREQIRLRWGLVRQRSSLLLRARSMLASVGVSLSKRALARDATWNRILKCREVTPQMKRLLEILRGSVEALSSAITEVESEYAPRLEDPDVQRLQGIPGVGPVVALTTLASLGDPRRFRDSRAAAAYTGLTPSERSSGGHQRRGHITKEGPSELRRVWIQAANAALRMRNHPLKAWAQKLIYRRGRAVAVVALARRMFRWAFALWRDGKSFDARLVTAS

SEQ ID NO: 60893 - protein, 320 aa, unidentified
MNPESCYVGIDVAKAQLDVAVRPTGESWSLSNDEAGIAQLVARLGGLSTVLVVLEATGGMELPLVAALAATKLPVVVVNPRQVRDFARATGKLAKTDTIDAQVLAHFGEAVRPTPRPLPDAQAQALGALLTRRRQIVGMLTAEKNRFSKASPSVRQGIQRHITWLEGEVSKLDKDLEDALRTSPLWREKEQLLRSVPGVGRVVSVTLLAELPELGSLDRRQIAALVGVAPLNRDSGTLRGRRMVWGGRARLRAALYMAALVATRYNPVIALFYHRLCSAGKAKKVALTACMRKLLTILNAMLKHRTPWGYATPVAWEACS

SEQ ID NO: 60894 - protein, 337 aa, unidentified
MRHCGIDVHAKTSELCEVSGQGKVLRRESFSSTPAAYRRRFEGMARARVVLEAGGSTPWIARLLEVLGHEVVVVNPRRLRLIAESTLKCDRVDAEILARLSRIDLELLRPVYQRSQEGQLLRTQLRVRSSLVKARAALINQIRGTLRAQGTRMVVCTAKSFVARWESHGVPKELRTVLEPLVGAIGEISERIEALELQLVEMSRSDELLERLQEMPGVGPLVSLAFLGWVDRADRFAKSRDVGACLGLRPSLRESGGKSRRGPISREGDREMRWLLVQAAHAALAVHRDSALKRWGEALVARAGKKKAVVAVARKLGVLMHRLWVTGESYQPFPQAR

SEQ ID NO: 60895 - protein, 337 aa, unidentified
MEYFAGLDVSMEETDVSVVDRDGKVILEARTPTAPKTIAAALAKGPAVERVLFETGRMAPMLFHGLTALGLPVVCVESRQAYQALRSLAAHKTDRNDARGLAHLARTGFFKPVHVKSLPSHAVRALLIARKKLVGQRVTLENQIRGLAVAFGVRLPRGLSPGFAEKAMAAGCGIPGLDGAMRGLLAARDAILKAIVAINSDMKSLERSSSACRRLMTIPGVGRLTALAFAAAIDDPDRFRRSRDVGAYLGLVPRRYQSGEIDYTGSISKCGDARLRTLLYEAANVMLTRYRGSLALKTWALDIARRSTMRKARVALARRLAVIMFAMLKHGAEFEPA

SEQ ID NO: 60896 - protein, 319 aa, unidentified
MQSKLTIGMDIGNAQVVVACHESAFAVLKMANAVPVLRRWLATLPAGSRLGLEATGGYHEPVAELAHSLGFTVYILNPKDVHHYARALGARGKTDRLDAQVIAAYVAEHNARLHAFVPLSADEKLLRELARRRATLVNAKSMLQQSLRVLPGFEREGRELLRAMGSFADRLERKLAEIAARSSERAALVKRLQTIDGVGTLTSIRCATLFTRVPFHSSDAVVAFFGLDPRPNDSGQHRGRRRLSKRGPSEDRRLLYNAAMSAIRTPAWRPLYLHLRNRGLASTEAIIIIARRIVRIAFAMYRNHSNFNPRLVPRPYCPA

SEQ ID NO: 60897 - protein, 342 aa, unidentified
MEYGAIDLHKRRSQIRILDGDGGVVLERKVDTSRSDLDRVFAARAAMRIVIESSTESEWVAQALEALGHDVIVVDPNYAPMYGSRSRRVKTDRRDAAALAEACRLGIYRRAHRASAAARDLRRRMRVRSLLVRQRSQTISALRALLRQEGLRVASGSAERILKRVDQIAVPGMLASVIAPLRAVITHLNTLLVGVDTALEERSIADPITQHLMTAPGVGPVVALTFQAVMDTPARFGGDAGRASAFLGLVPSEHSSAERHHKGAITKAGPRELRALLVQASWVVWRGRSAAGAALRAWAHALAARRGRRIAVVALARRLSRILYALWRDDQDFRASTIVPVA

SEQ ID NO: 60898 - protein, 335 aa, unidentified
MWHLGIDLHRHTVVIAAINDVGEVRPAVRFQCSESAEILSHCRQFHPFRAVIEATSTYRWLHELLSTAGTVVLAHPFRLRAMVQRRSKTDRLDAMLLAQLLRIDQIPLAYVPSERYQALRESTRQRSRLTHAQTQVKQAFRWLLARHNMNPPYKCPFGPRGRYWFARQDFGAVDNPIRDELLERLGHFDRQLAAMDARLAELRPEYPEVEALLDLYGVGLFSALVIASEFGDVTRFRTAKQAGAYTGLTPRVDQSGSHCYVGHISKQGSPWLRHILVEAAMKIVRDDVGLANFHHRIRKRSSAKIARVATARKLAEICWKRLRRWHREHAQVAAA

SEQ ID NO: 60899 - protein, 290 aa, unidentified
MKIVGCDFHPSYQQIAVLDTETGEVEEKKLMHAHGQAEKFYRELERPALIGMEATGNALWFELLLQKFGHQLWIGDAAKIRASYVRKQKTDKRDAGHILTLLTEQRFPRLWLADSHQRDIRQLLIHRHNLVGVRTRLKTELQHLALNQGVQKKRQLWNEKGRVLLSTLALEGWTRQRREDLLQLLAVVEPQIAQLDNAVEQAARASSQAVLLMSQPGVGPITALAFTVTIGEVARFPRSKQVASYLGLIPAEHSSGSKRRLGSISKQGCFSAHSAGGGGTIGRTPRSGLS

SEQ ID NO: 60900 - protein, 424 aa, unidentified
MKTNSDYAAYVGLDWADRVHQVCLRAAGSTRDEQSKLPHTPEALHAWAHGLRARFPAGQIAVAVEQSRGPVIYALSMHAHLALFPLNPAMAAKYREAAKAASGTKNDPLDASLQCELVRLHRDWLRPLAPLPAETRELLLLVEARRGLVEQRTALGHQLKAALKGYYPQALELVGHDLGTPLAWAFLRRWPTLAAVQRARPRTLRDFYHAHHVRSAERIEQRLAAVRHATALTNDAAVLATQPVLVAALVAQLAALQPAIDDYDERIAECFRRQADATLFASFPGAGPQLAPRLLVAFGPDRSRYASAQQLQQYSGIAPVMEASGETCITHWRWHCPKFLRQSFHEFARCSIGQSAWARAYYTLQLQRGKTDQQAFRALAYKWQRILFKCWQDRTPYDEAIYLAALRKHGSPLVPRLEALETAA

SEQ ID NO: 60901 - protein, 343 aa, unidentified
MQAVTTIGLDIAKSVFQVHGVDAEGKAVIRRRLKRRYVLAFFQKLPSCLVGIEACASSHHWSRELQALGHTVRLMPAAYVKPYVKRQKNDAADAEAICEAVTRANMRFVETKTPEQQSCLMLHRTRHLFIRQQTAVINAIRAHLAEFGIVAPVGRNGVAELLGVVADPSEKRVPEVARACLAALGAQLRVLKAQILEFDRMINAWHRSDETSKRLDEIPGVGPALATALVASVADPKAFRSGRDFSAWIGLVPKQHSSGGKDKLGNISKQGDRYLRSLFTAGALAVIRYAKIHGTKHRPWLTALLARRPTKVAAVALANKLARMAWAMMAKGECYKEPVALAA

SEQ ID NO: 60902 - protein, 350 aa, unidentified
MEEVSVIGIDLAKNVFVLCAQTASGEIAWRKRLKRRAFEQFMAATAPRCLVAFEACGGAHYWGRFLTALGFAVKMMAPRAVKAYRQGPHKNDWRDAEAAAEAGSRHPVRAVRVKSEAAQAVQVLVRLRALQIRQLVQTGNHLRGILNEFGIVLPKGHKRLREAIARLRQEDPASAALPASVRRTADRLCLQLAEQARRVTEATSELEAAIKDEEDCRQLRTVPGIGPINAAALSVALEAPQAFPNARAFAASLRLVPRQHQSADKQIMLGIGPLSANETRRHLVLAGQSLITMVRRFQQPPADKFLLWVYRLDRRKHRNVAAVAVAAKLARIAWALMAKDQIYQPRRATA

SEQ ID NO: 60903 - protein, 340 aa, unidentified
MEDVSVIGIDLAKSVFQVHGIDARGQVILRQRLSRAKLLPFFAMLPRCLVGMETCASANYWARELIALGHEVRLMPPQYVKPYVKRSKNDASDAEAICEAVTRPTMRFVGVKSPEQQSVMVLHRTRLILTRQRTQLGNVMRAHLAEFGIVAPIGRQGLDRLMAVIGDESDARLPQPARACLTMLVDQYRLVLEHLLETDRAIRADSRATELGRRLQEIPGVGPLVASALVAAVPDPHVFKSGRSLSAWLGLVPRQHSSGGKERLGSITKAGDTYLRRMLFVGAMAVIRYAERHGTRRPWLMKLLSRRHPRVAAIALANKIGRIAWALMTSGERYHEPAAA

SEQ ID NO: 60904 - protein, 320 aa, unidentified
MQTPSAVLNIGADVAKDAIVVACSEGSFPVREIANQRTAVLAFLKGLPAGSRIGVESTGTYHELFAEAAHQLGFLVFLLNPKDTHHYAKAVGLRGKTDRVDAELIARMVAHEHTKLHTWIPPTPQQREIDRLIKRRATLISLREAVAMSLHDLGEFTADLKALRTRFNQLIARIDLRVKALVEASPDRKQNFTRLCTISGVGPVVGIALVNTLERVPVKSADAFVAFTGLDPRPDDSGQHRGKRRLSKRGPAELRRLLYLAALSAIKTKPWRPLYEHYRARGLSSTAALVILARRIARTAWSIYTYKTEFDPARLTNPLT

SEQ ID NO: 60905 - protein, 344 aa, unidentified
MDTIGLDLHKRESQLCTGHDDGAVEERRIATTRERFTEVLGGRPRARILLEASTESEWVARHLASLGHEVIVADPNFAPMYATRSRRTKTDRRDARTLMEACRLGAYRVAHRLSDARRHVRAELAVREALVRTRTRYIALAKALVRRDGLRVPPSESHLVAQRITALELSASLAGELLPLFELLAPLNEQIAAADRRIAMLTNDDAAVGLLTTAPSIGPITAAAIVATIDDVTRFRSAHQFEAFLGVVPGERSSGEKRRVGRITKAGNARARYLLVEAGWRILRAKDTETAALRAWALGIAARRGKRVAVVALARRLAGILYAMWRDHRPYDAAQLRLPRSRAA

SEQ ID NO: 60906 - protein, 483 aa, unidentified
MAERKKNTFQRLKKGQLNRKERRDLERRLSTEAPGLEIVNRNVAGIDVGNESHYVAVPPSRDPQPVQEFGSWTADLERMADWLKMCGIETVVMQSTGVYWIALYDVLEKRGFQMCLANARHTKNLPGRKSDVQESQWLLKLHTYGLLRNSFRPPDEIRALRSLWRLRDRHVKEAARTVQHMQKSLITMNVQLSNTISDLSGTTGLAIIRAILTGERNPEKLAKLRDWRIKASEEEVARSLEGNWREDMLFELRQSVDAYDFIQKQVAECDQRLQTLMAELPMREAPAAVPAVRDGVKPPVRKKKSTRNKKNVPRFDLKAELQRVCGLDLTSIDGIDVMTAQTVVAELGTDFSRWKDEAHLTSWLGLAPCRDISGGKVLKQTTLRVKNRVAAALRGAANTLLHSDSYLGARFRSLRTRRGAPKAIKAMARYLACIIYRMFTRGQAFVDRGAQEYENSRAQRELAALQFKASAHGFRLVDVQHPA

SEQ ID NO: 60907 - protein, 355 aa, unidentified
MKYLGMDVHSKSTVWCLLDARGEVVREGVVETTEPGLSALVKELASEEEIVAGQEVGTMSYFVHDVLMAAGTKLLSFNAAQLRMIAASRKKTDRRDAYWIAKALGSGMYPHPVYIPTGEIRELRALLSRRQMLQAERNRWQYRARAALRGCGRKVRAGKHSLRRSLKAYLEVDCGLPGELRELLALCQRQEASLSLELRRVEVSLGERAHAIEAIARLKTIPGVGDLVATTIYAWVGEIGRFRDAKSLTAYAGLVPSVYQSAASQRSGGITKQGSKALRSVLVQAAHTLMNCCRGAEARPLQEIGARVRTSRGRRKIATVALARHLLRVAYYVLRDGTTYAPERLGGAGKRPQAA

SEQ ID NO: 60908 - protein, 329 aa, unidentified
MLYAGLDVHKNFCQAIVMTERGEVVKEAKIRNGKEEIARFFKRFKKQGISIAMEACYAYEPVYETLESLGIEAKLCHPLKTKAIAYAKVKTDKLDAKVLADLLRSNLLAEAYVPNIEIRKLRSLCRERRKIVAERTRWKNRIRHELVRRGVKPHFRNLWSKQGMLWLSGLGIESVNRALFMISCLNKALGEVDRAIDNLAKNFEEEIEILTSIPGIGKYAACVILAEIASIERFGDAEKLVSYAGLAPGIKQSGDYKKQGSITKQGSSHLRWILVECAHVHVTRFDTGITRFYKRIAARKGKQKAIVAAARKLCVAIYFMLKRKEKFRG

SEQ ID NO: 60909 - protein, 352 aa, unidentified
MQHFIGCDVHTRNQVVAWIEEETGEIRKRRLEHEGQEVKEFYAQFPPGTVVGIEATFPAYWFERLMGELGHELWVGDAARIRASEVRYQKTDARDAEGILDLLRSGRFPRLWVPSLDERDLRQLLVHRMKQVRARTQVKNQLQALAISQGVCRKRKLWSARGRAELEKLVLLPWAARRRKELLEWLDRLDEQVRELDRAVEEAGRARPEVALLRTHPGVGMVVGLAFVLSVGPVERFSNRRKLVSYWGLNPREDSSAGRQRLGSISKQGNTMMRWLLIEAAQTAARLDPQLRRTYQRLKHQRNSGVAKVAVARRLVVRLFWMLRTRHNYAQLVHMSGSPSSAVVPPQGGPKV

SEQ ID NO: 60910 - protein, 373 aa, unidentified
MPRYSTAFGMDVHLRSTTVCALDAETGEAVARRFRGNPWGEVAEWMSGFPGPSLAAYESGYLGFAPQRELAGLGVECVVAAVSKIPRSAADSASKNDSNDAARMAKAILSHDVTPVWVPSPEIEGLRDLAAAHDAATARLAAAKQRLLAFLARRGYVYGGTTPAGNPRKYWTYGFLRWLDGIRPADDGGIRALAALRNEVEAADETRKAVLAEYRAAVAAGPLSAEVEALQSIKGCGFVLAAAFASEVGDFSRFRSGRQVTAYFGLAPKQRSSADSVRLGGISGAGNALVRRLAVEGSWRYAQAGHQPKLMPKGSGVPLEIRMHGRKGSERLLRRREEMLERGMPQAKANAATAAELVRWLWALGMMCREAGE

SEQ ID NO: 60911 - protein, 356 aa, unidentified
MQTQVTKKIDFTGKNLFVGLDVHKKSWSVTIIVDGMEHRTFTQPPDPESLQKYLQRSFPGGNYHSAYEAGYCGYGIHRRLNGLGIKNMVINAADIPSTQKEKLHKRDPVDSRKLARGLETNTLHGIHVLDRDLEELRSLNRTRFYLMRDLRRSKNRIKSFLLYYDIPLPGEFDNNQWTLKFIAWLKQVKLQTPAGQDAFSHLITSYEHHRQQLLILSRIVRLRISQHDKELYDLLKTTSGIGPLTSSALITEIGDINRFSNIDDLGSYVGLVPRVRESGETTHTGGITFRCNNFLRVLLVEASWQAIRHDPALMQYYHHHLTGSKGHKVIIKVARKLLNRIRYVMKNRKPYVTGVA

SEQ ID NO: 60912 - protein, 415 aa, unidentified
MALKIVYKICCGIDVHKTFVVACIASTNDKGVTSYESHRFSTYTSGLKTLLQWLLDRNCKDVCMESTSKYWIPVYNILEKGCSIVLAHPKYVKAIRGKKTDKKDAKWIADLFKHDLVSGSFMPPADIRQLRDLMRYRFKLTCFKSSEKNRLQNCLTVSNIQLGNVVSDTFGKSAQAILDKILENPEDTSFDLEPLVFKSLKKKLPELRDAIDGYITPEQAGKLKIIKAHYESLESRKAELEELILALAAPYQQEFAILQTAPGISSDFTAIGIISEIGTNMEAFPSAKHLCSWAGLTPTNNESAGKKKSVRVSKAGCYIKPLLVQCANAVVKSSKHPEMRNRYLRLKKRRGHKKAIIAIARMLLTALYHMLKNGENYNAELYQKSDLLPVDREITVEQALMIARNQGYKIKSATA

SEQ ID NO: 60913 - protein, 451 aa, unidentified
MSRQRKTKVQTIQPVIHAHAAGADIGAREIYVAVPTALTAEPVRCFPTFTEDLRALVAWLQAFGIKTVAMEATSVYWIPLAELLEEAGLEVCLVNPRHVQNVPGRKTDVMDCQWLQYLHSVGLLRGAFRPAAEVRGVRALWRQRDALVRHASWHIQHIHKALDQMNLQVHHVLADITGQTGLAIVEAILQGERDPTVLAQHRDPRVKVSAATLGKALTGDYRAEHLFCLRQAFAGYQFVQQQLAELDAELEQQLEALAPPRPAPVPTTAAPKRKATGKCAPAFDACGLLARLHGVDLCAVPGINVLGAQTLWSELGGDLSAFPTVKHFTSWLGLCPDNRISGGKILAARTKPTTNRVTRALRLAAQALHHAHNELGEHYRRLRAKLGGAAAVTAMAHKLARILYVMLTRRVPYRPQLHAATGELHRARTLQRLTARAKDLGFQLVPTSAAA

SEQ ID NO: 60914 - protein, 355 aa, unidentified
MSQEKYIGMDVHQATISVAVMDAQGKLIMECLLETKAATIVEFVRGLQGPLSLAFEEGTSAAWLHDLLKPHVDRLVVCDPRKAALLKDGNKSDRIDARKLAELLRTNQLKPVYHGEHGVRTLKELGRSYLTLTQDVTRVMNRIKALYRSWAIPCSGTTVYAPRHRAEWLAKIGEPGVRVRAERLYQQLDVLQPVRQAARHDLLSESHKHAAVKLLRQIPSIGPIRAALLVALLQTPHRFRTKRQLWAYSGFAVETHDSGEYRCVRGKLQRNRERITVRGLNDNHNKDLKSLFKSAAISASTRPGPLHDFYAARIAKGMRPTMARLTLARKIVTITLTIWKKGVGFDPQQLHRQVA

SEQ ID NO: 60915 - protein, 382 aa, unidentified
MDRTCSWSRIIGLDLSKATFKGCILSGEGFTERKNFSGEMKRDESGYVLINNTIQAGDIVLMEAGSSTFNLARYLLKNSRADDVVVLNPANLRIIWDSQKKNDKADAMKIACIARDMRPEAWPRVTVPSEQEQSERSVIMHWVFLRKQETMLFNRFFALFNSLGYPEIDKPKLKSKSEFRVETINNLLSLNELAFTDAVMLEEQISVIQSQLNFMEDRLRTICLNHPQQALAWLSLPGIGLVNAATLIAYIGDGSRFTKPAQLLNYAGLTPKQNQSGTVDIKGRITKRGCTAIRRNVVQGAQVVMQLPATCEITKFAYRKKKECPFNGKVAVAVANRMLRTGLALLHHNDLYRPMIQDGYDKFERKLAWNKLQALVDHLASN

SEQ ID NO: 60916 - protein, 305 aa, unidentified
MIIAPGYIGIDISKTHLDIYDGAPHRIGNRPEAIASFLAGLEAPRLVLFEATGSYDRDLQAELVKADIAFARVNPLQARNFARSIGQLAKTDDIDARMLAAMAQALQPAPTAPADPERQDLGELHRRRAHLVAIRQQERTRLHTASPAIATDISDHIAWLGERIDRFDRQIASRIETSTRLAAAARLLRSIPGIGPVAATALLALLPELGQRSGKTIAALAGLAPINRDSGAWRGKRSIAGGRAEVRSALYMAAVTASRANPRLAVTYQAMIERNKAPKLALIAIARKLLVIANAILKTQMPFTQ

SEQ ID NO: 60917 - protein, 401 aa, unidentified
MESPIVSIDVSNGNSHYMCFIKNNKRFGKVKKIDHDIEGFKRLLEDIQKLEAETNEKVCAVFEATGVYTKPLERFLSKNSIKTYIINPLESARKRKEEIHNKKTDKLDPISISKVYYDKEEMMELKKKDETHNWLRKKNRLYEDQLNHLRKYKVTFQNQLSICFPGYLDLFKDGYSDIPMTILKKYPHPDLLKNKKAETVARYLEKNTCHTHKVSLEYALKIIEFAKKTYPGCEKDDVEVEIFKILLDKVIETQRECEKTLNEMITVASTLEEYRYILSIDGIGPNLAARIIAEIGDIEEFKSREALVAYAGLDPHIYQSGDQDGKHLKISKKGNKYLRCLLFLAVGCSIRGAKDNPVNRFYQKKKQQSNPLNSKAAKTACTAKLLKIIYGICKNKTTYER

SEQ ID NO: 60918 - protein, 370 aa, unidentified
MSVRRILAKTINTDLEYEAIGIDLAKNCVSVALLTTDGEVVCIDRLDYSELEKSAQVLCPTTFAMEPCTEMNYLVQKLEAWGHRCLVIGGKNVQNYVENHYSGQKTDLNDAQALAFLAQDTQLRTIKAKDVEQQKYASLTTLREQYIKQYRQTIVSLKGICQAWGLNISKGISGKARLKDLIENHAAFPKELKESLVDMVTHAQTAQKALNKITKTLEELAKSDKVCQLIQTIPGLGSICSCRLRATVGDIKRFKSPKDFPAYYGLVPRSIATGHNERKGKITHRGDRTMRSLMVQAAGSLVNMATKGKLKSKQLTKWILKKQKEKMPWGKLVCAVAAKLLRIVRAVLISNKPYNSKIAGVAKCSLPKGS

SEQ ID NO: 60919 - protein, 405 aa, unidentified
MKRDRQQKQAKPQVQRRQARQQSMNRKQRRELARKIEADDISLEIVHPDAAGIDIGNETHYVAVPPKRDTDPVRLFGCTTAELKAMGAWLKQCGIRTVAMQSTGVYWIPVYDILEEMGLEVYLVNARDTKNLPGKKTDVQESQWLMKLHTYGLLRNSFRPPQEIRMMRNYWRQRNDLVRSAGRHIQRMQKALTQMNVQLANVISDISGVTGQAIIKAILAGERDPGELASLCDPRIKASEEEVASSLEGNWQDDQLFMLKQEQDGYELCQRQMAECDARLEQYLKEREDRSAGANLPREKRKGRLRKKKGNAPRFNLREGLFRMCGTNLTQIDGIDVTTATTILSEAGYDMSKWATEDHFVSWLRLCPDNRISGGRVIGKGNLPTNNRLTLALKMAASTLRESKT

SEQ ID NO: 60920 - protein, 394 aa, unidentified
MKLVGIDVGKNSHHFCVMDKETGEFNVTPSSFPNNKEGFDFLINSIKPYSKKSILLGMEDTGHYHVALLKFLLSNGYTVALINPKTTDLTRKMEGGITKNDKLDTITICDVLDTPERKKQYRITKVDRFDLYEQRQLTRHHHNLKEELNVYCNRLQKSIDLVFPEFNTLFSSKYGIVYMNLLKTFGSAEAIASTDIRTIRKFFEIKGKGNRISLTPEKLKECAKNSIGISSEVETIQIKHLVSQITLIKEQIAEIDKKIEEFSITNNSPILSIPGISHFSGTSILAELGDIGNYSKPSQIIKFAGVAPYHYESSQYNAQHTAITKKGSKYLRKTLYQIILPVINNNPVFKKYYLLKISQGKGHRCAQGHCIRKLLRIIYHLLETGQSFDPALLR

SEQ ID NO: 60921 - protein, 405 aa, unidentified
MEIFCGIDWSEAAHDVAVVDETGRLLARRRIADDAAGFTALTELLAGYAGRPERVDVAIETGRGMLVAALRAAGHRVFAINPKAVDRYRDRHGVAGAKSDPGDARVLADILRTDRDRHRPLPADSDLAAAVGVLARAHQDAVWARVQDANRLRSLLREFFPAALTAFADLTTNTALAVLAAAPTPTAAARLSRANLTDLLRVAGRGTRPTEAVRLAEIFTVDQLRQPPVVEAAMGQAVRAIVRTLTAANQSISDLEAALAAAFDQHPDGEILRSLPGLGPILAARVLSEFGDDPTRFPDPASRRAYAGTAPITRASGRSRVVLARHVRNKRLADACYLWAFAALNRSPGARAYYDTRRAAGDRHNAALRRLASKLLGQLHHCLTTSRPYDEALAWPQPDTTPAAA

SEQ ID NO: 60922 - protein, 432 aa, unidentified
MAMEEGFERSQPQPQPQSWLEQPGFGGLDWASQKHSVVVVDSQGKVIEDFQIEQSALGWRKFREKLREYGSIAFAIETSQGAAVEQLLEAGMKVYPVNPKSAQAYRQRKAPSGVKDDRLDAWSLADALRIDGQDWRALRAEEPLIKELRLLCRDEVTLIEQRSAFVQQLRHALAEYFPAALEAFEDWTSVSAWMFLQRFPTPQALAQAGQRQWQKFLHSRRLWGREQGPRRMELFAHASECAGSQPTVNAKSLLALSLVQMLFSIEKQLALYRQRIEELFARHPDHDLFGSLPGAGNKLAPRLLSEIGEDRQRFSGDAQNLQCLAGSAPVTIRSGKTRKYWRVHQRWACDKHLRHALHLFAEQSLSRCVWAELYYKHHRQKNCSHANALRRLGHRWLKIIHKMWIERTPYNAELHHRNQLQHGSWIFQLQQS

SEQ ID NO: 60923 - protein, 364 aa, unidentified
MGNCIRVGCDWHDATMRLKVGVGRGAPEKLEYGNAKSGRQAMIEELKTRAKSLGGAKVYFAYEASALGFGLYDELTEAKMICYVLAPSRIERSPHQRRRKTDEKDAERLLDIVRGHVLAGNPMPAVWVPDAQTRDDREVVRARIDAVEKRTAIKAQVRTLLKRQGTASSFKGTRGRTKGYWAWLRYLAGSDQGLSAGARVHLKSLLRQAEALDQEVAALAETERYAEAVREMMQIRGVGVLTARVFLTERGDLSRFRNRKQIGASLGLVPSSHQSGEQDDRKGHITGQGSPRVRMILNQATWIWIRYDLEAKALYERIAAKNPKHKKIALAAMMRRLAVRLWHAGQEAQRRAGLFQRRPTEAAA

SEQ ID NO: 60924 - protein, 432 aa, unidentified
MTTHRLQTGIDFSQKKADFCLLFPDGRPLEQHRSFDNSLPGYSLAKALMIDALETYQFDGLDVSGEATGFLWLPFFNQLAADPDLEDYDLNLFLLNPRWVKWFKKCFPQDDKTDQKDSFYIADRTRTRRPDVTWSPQLDTLPLRFYTRLRFHLVQNLAREKCYFSAFLFLKASSYRRLKPFSDIFGVTSRRVLSEYATLDELAAIPVEDLAQTLHEMSGHHLPDPFDNAHKLHKVAVESFPLPHAVALPVHRILDLTLEHIRFLEGQIALVEDWITTEVQPHPTILKLATIPGVGPVFSCGNGAEIGETQRFLQGQKWDKKRKRYRPRNLRDAEDAVAKLAGLWWPRSDSGDFEAEDRRMAKTGNRYLRYYLIQAANLMRCHIPEYAEFYRRKYREASKHHHKRALVLTARKSVGLVVGLLHRNETYRPKEV

SEQ ID NO: 60925 - protein, 398 aa, unidentified
MIAVGIDVSKGKSTVAVLSGLGELLLSPRDYPHKEDSLNELCTWLHSLNDEVRIALEFTGYYHYSIRDKLIREGFFVSVVNPYLMKKFNDGSVRKGKSDKKDAIKIATYCVEKRNHLKPWNYLGKPYETLKFLSRQYHQMISLKTKQKVQLDNLFDLVMPDVKKVFLLTNRPTSCLALYDFVEKFQSWKVIKDMTYSTFEKRFLSYMKKKGYRPNASKAQRLYNIAQNSLLPREANYCTSLIFKQRIQLAKSTESATVAILKQMQELVKTLPEYELVHSFNGVGDILTPLLIAEIGDIRRFTSGKALNAYAGNDAPPFQSGTYLGTRRHISKRGSPFLRKVGYEVILALKISKPIQDPVYQFILKKQAEGKPKMVANMAGLNKFLRIYFARVMELFAI

SEQ ID NO: 60926 - protein, 346 aa, unidentified
MTIVEATRTVTGGIDTHGEVHVAAVLDEVGVLLGTRSFPAEPDGYSALLAWLSDFGAISKVGIEGTGSYGAGVARHLARAGIKVVEVDRQNRQARRHSGKSDPLDAVEAARAVLSGRAQGKAKSRDGSVEAIRVLVVAKRSARAARVKALTQMRQLTFSAPDQLQSRLKGLPITQLVAAAQGLRPTRSPDVVTAATKASLSMLAHRVADLEDEISDLDAMITPLLEETAPELLAVYGVGIDTAAALLVAAGDNPERLRSEAAWTHPCGVSPLEASSGKVTRHRLNRGGDRQANRALWHIVITRLASDPRTQAYMERRVKDGRSKREAIRMLKRYVAREVYRYLPRG

SEQ ID NO: 60927 - protein, 360 aa, unidentified
MDKHKYVALDVDSANIVAGVYDRKGVALMECCLRNNGQVISEFFKTMTGTVHVTFEEGTQAVWLYELIRPLVTEVIVCNPRENKLLKAGNKSDRIDVAKLGKLLRLGELRPVYQGPTAAQGLKQLVHGYAALVDDTTRVKNRLKALYRGRGLSCKGETIYGREQRQQWLLQLETKELQRRASYLFEELDCVLRLRAEAEKVMCRAARRHEAYKWISSVPGLGAIRTAQTLATAITPHRFRGKRQFWPYCGLAVVTRSSSDYEWVDGGARRKHKPIQTRGLNQNYNRTMKAVFKGAAVSALQQHPEFQEYYQRLCAQGTRPEMARLTVARKLAAIVLILWKKGELYEPKRLNQAAPGAGQQ

SEQ ID NO: 60928 - protein, 341 aa, unidentified
MMIATTKFFIGIDVSKPHFDVAVMAVLDHVKQEIRTARFDNTAPGIKLFEKWLKLQKTTFNADSLVVMENTGIYHRLIWSFCSRRNLPIHIGNAAHIKWSFGIARGKNDKIDSIRLCNYAFKEADELKATAALDPELMLLKDLVSARTKLLRQRAGISVSMKELGNINGKAYQKVVEKALKSAINGIARSIRDVEDQIKKIIMGNRDFKRNYKLLISIPGMGHVTAVYLIGCTGNFSGRPSGKELACYAGVAPFEQTSGISIKGKPKVHRMANKELKRLLHMCALSLIQHNQEFKAYYNRKKDEGKHSMSIINAVRNKIALRVAAVIKNQTSYKNNYNIAA

SEQ ID NO: 60929 - protein, 468 aa, unidentified
MSKRGRRNRKSDQGDARVRKFLEEVNLNAAGIDIGASRHWVAVPPDRTGDIVRSFGVHTRDLNRLADWLDACCVDTVAMESTGVYWIPLYEILESRGFEVVLANAQHVKNVPGRKTDVLDCQWIQQLHTYGLLRGSFRPSEEIVALRSLLRHRQKLLQGCAAHIQRMQKTLVLMNLQLPRVLTDITGVTGMAIIRDIVAGQTDPTVLARHRDKRCNASEQQFIEAMTGHYRAEQVFLLRQHLEMYDYHRTKIAECDLEIERQLADLQGRCDPPEQPLPPRRRRRSSTNEPDFDIRSPLHKMCSGVDLTQVPGIAPLGALTLIAELGTDMSRWPSARHFTSWLTLAPHNKVSGGKRLSSKTQPSANRAAAVFRMAAMANSRSDNAIGSYYRRLAFRIGTPKAITATARKLAVIVYSMLKHGTPYDPLGASAHPRKLAERRLRSITKTAAQLGYRLVPDPDSPATASAVS

SEQ ID NO: 60930 - protein, 382 aa, unidentified
MQTTATCNFEYTLERVLYMAIELDNNRWKLGFTIGFGQRPRERNVAARDTTGLEEEIQSAKRRFNLPENCRVLSCYEAGREGFWLHRFLLHAQIENLVVDAASMEIRRKRRRPKTDRIDLEKMLRMLIRYHAGDEKVWSVVRVPSVGAEDRRQLHRDRWALTGERNRHINRIKGLLATQGISLSVNRDLPKELNLVRKWDGSPLPPGLTARLLQEYERLQLVEQQMKVIEQEQRLALRQPDHPSVTMARALMRLKSIHIHTAWPLTMELFSWRQFQNSREIGALVGLDPVPHQSGETSRDKGMSKCGNARLRSLAVEFAWQWLIHQPDSELSHWYEKRFGKGSRRVRKIGIVALARKLLIALWRYLETGEIPKGAALKTITV

SEQ ID NO: 60931 - protein, 356 aa, unidentified
MTKVVTNFTNQTIYVGLDVHKRSWNAALYLNDQYLRNIHQPPSPQALYKFLQTTYPGAHYQCAYEGGKFGYWIQRQLSGKGIQCMVVNPADIPSTHKDEVHKSDPRDARAIAMALQCGQLRGIYIPGLQQEADRSLVRQRKKIWKDLVRCKNRIKGFLDYTGIVIPDKFVNCNWSLNFLHWLATIPFEYASNRVTLNYMLREAELLRKELLAVSNDIRKLMRSKEYKQRYYLLRTITGIGPLTAASLITEIGDMKRFPSFYELNSFIGLLPMEHSSGERELKTRLTIRRHRQLRSDLVECAWTAKRTDPALSLFYAQQLKRGKEPKLIIVKIARKLLSRIRYVWLNEKPYEKGIVK

SEQ ID NO: 60932 - protein, 389 aa, unidentified
MIYVGIDVAAEKHACCILTESGKVLKQFTFSNDMPGFEKFHKALLTPSETKIGLESTGVYGNNLAEFLRRNGYETHIFNPLLVKKSIQATTLRKTKTDKSDAKHIAQYTKEHSQPNPKISYHTSELKSLSRGRFSLVRERSKVKAQAKGLLVQLFPEFSQAFSDVFGAAASAVLKQLPSARMISQCPVDVLTNLLRTASHGRLGKVKAELLIDLAEHSVGIQSMALELQTQMLLQQIDLFTIQINRYEAAIKSEMETIQSPITTIPGIGCVLGAAILSEIGDIRRFTTPAKLQAYAGVDPSVGESGTSVSTPGRMVKHGSHYLRWALCQAARCVSLYDPIFAAYMKTKRDEGKHYCVACSHVAKKLTRVIYSILKNNTAYSLTYSQIGA

SEQ ID NO: 60933 - protein, 349 aa, unidentified
MRFYTKQHRHYCGIDLHARTMYVCVLDAAGQVLLHQNLPAKPEAFLEAIAPYREDLGVAVECIFTWYWLADLCAAEGIAFVLGHALYMKAIHGGKPKNDRIDALKIATLLRGGMLPQAYVYPAGMRATRDLLRRRLHLVRKRGQLLAHIQMTNHAYNLPAFGKRIAYPSNREGVAEHFEDRVVRKSIAVDLGLLERYDALITDLELYLVHQAKQHEPQGFQLLRSIPGIGKVLAMTILYEIHDIRRFDRVQEFASYARLVRCAKESAGKKHGTSGAKMGNVHLKWAFSEAAVLFVRHCPEGKKLLARWEKKHGKGKALSILAHKLGRAAYYVLLRQKAFDLEKFMTTIH

SEQ ID NO: 60934 - protein, 414 aa, unidentified
MDVLHERCAGVDISKKDAKACVRTPSTRRRGTFTTETTTWGSTTNAVPALRDHLLAAEVTLVVIEATSDYWKPFYYLLADELNVILVNARQAKNLPGRKTDVSDAAWLAQLGAHGLLRASFVPGQPVRELRDLTRARTQPTREHGRTVQRLEKLLEDTGIKLSAVASDIMGVSGRAMLEALIHGERDPQTLAELARRKLRNKIPQLTEALTGRFRAHHAFLTRLHLDHYDQLTDAIGQLDARLEEAMAPFRPALDLLGTIPGINRAVAEVISAETGGDMSRFASARHLASWAGVCPGHHESAGRTKSTKVRPGNPYLKGALGIAALGAARTKETYLQARYKRLTVRRGPMRALVAVEHSVITAIWHMLTDNVPYQKLGGTYSTQRDPERSTRRAISTLNQLGHTVTLNPLESAA

SEQ ID NO: 60935 - protein, 366 aa, unidentified
MKKVSTVAAKQSRNNSQQKLTIGLDLGDRNSWYCVVDEAGQIQLEQRVRTTAKALQEVFGAMPRSRIALEIGTHSPWISRLLSELEHEVMVANARKVRLIGESRKKDDRLDAQTLARLARIDPELLYPVKHRSAQAQADLMMIRARAGLVRARTGLVNTARGLAKSYGERLRSCNVRNMNAEKAEGLSPELQRALEPLLAAIEEVSTRICEYNERIETLAQASYPQVALLKQIKGVGTLIALTFLLTLEDPHRFPKSRDVGCYLGLQPGRRNSGQSEPQMHISKEGDPYLRTLLVQGAQHILGPFGIDCDLRRWGLKLAERGGRNGKKRAIVATARKLAVLLHHLWVSGEVYEPLRNRNCMTVAAA

SEQ ID NO: 60936 - protein, 400 aa, unidentified
MYSIGIDWADAKHDLCILAENGTVHSAFEISNDQHGFDLLRKRLGRLNAPFRINIERTDGLLVDWLVRNGHAVYLTPPVALHHRRTRRSKTDQSDAYLLAHLLRIGDTECRPLARRSDLVEYLRQLLRAYDSILQEQRRFGNRLIYLLKLYYPAALKAFCQPYRLIALTFLEQHPTPEAARLLTLDGLRQFLQAEKYHGKKLDIKVLELYDILQAPAPKADVQAGSVIHVQMLIPVLRHIYRSRRDLEKQIVDAFQGHPDAAMWLTIPGAQRLTAARLLAWIGDDRARFSTANVLQATAGTVPVTRRSGKSKSVEFRTACSHKIRKAVDDLSRQSVKKSSWARSYYQAQIERGHASARAYRALGNRWLSVIWKLWQTSTFYDEQVHMANRAMHSHLKPVR

SEQ ID NO: 60937 - protein, 320 aa, unidentified
MQTPSALLNIGADVAKDTIVVACSEGGLPVREVANQRSAVLAFLKSLPAGCRIGVESTGTYHELFAETAHQLGFLVFLLNPKDTRHYAKAVGLRGKTDRVDAELIARMIAHEHTKLHAWTPPTAQQREIDRLIKRRATLISLREAVEMSLHELGGFADELKALRKRFNQLIARLDLRAKALVEASPQRQQNFARLCTISGVGPVVGTALVNTLERVPVKSADAFVAFTGLDPRPDDSGQHRGKRRLSKRGPAELRRLLYLAALSAVKTKPWRSLYEHYRARGLSSTAALVILARRIARTAWSIYTYKTEFDPARLTRSLT

SEQ ID NO: 60938 - protein, 362 aa, unidentified
MTSIALGRSDVVVGVDTHKDEHVAVAIDGLGGRLGELSLAANPAGYAQLLVWADQLGAVAVFGVEGTGSYGSGLARFLRRHGRRIVEVCRPPRKGERRLSGKSDTIDAEHAAREVLAGKAKSTPKLADGIVEAIRLVKIARDSAVTAHSQAMITLKATLVTASDELRAGIEPLTDFRLIQACAVLDESGDIADPAIAMRHLLASLARRWFELHEEIKVHSRHLKKLTKTAAPELVAAFGIGPDIAAEMLVTAGDNTDRLPSDAALAKMCGACPIPASSGKTNGRHRLNRGGNRQANAALYRAIIVRMRWHPPTIAYVERRTAEGLSKREIIRCLKRYLAREIYRLLPPPGTCAPPASAAEAA

SEQ ID NO: 60939 - protein, 403 aa, unidentified
MQYTAGLDWGSVGHAACVIDEQGTVTARLDIQHTAEGLKKLLADLARIAPPQELPIAIERPSGLVVDTLVEAGHPVVPIHPNVLKACRPRYHAARCKSDPGDAYILADVLRTDGHRFRALRPASDEIKALRTMTRTRDDLVAERVVVANQLRSLLDAIWPGAVDIFADIDSPIALDFLDRYPTPASTRHLGPKRLAAFMARNAYCGRRSPEELLARLQSAPNGLAGEAEEEAKGYMVKALVAVLRTLVEQIRRVTATVEHAVAQLPAGQVVMSLPRAGKVNAAQILAELGDDPERFQTEDQLAAEAGVAPVTHESGKHRAVVFRFACNKRLRQALVTWADNSRHASPWANHVYALARAKGFRHPHAIRVLARAWVRVLWRCWRNNKPYEAALHGAAKPFLETA

SEQ ID NO: 60940 - protein, 429 aa, unidentified
MNYTQNEKIEQVTDAMLVIGIDIGSQTHYARAFDNRGRELTKRVFSFGNDIEGFNSFHQWAEKLKTENDKSAILIGCEPTGHYWFSFAKYATDHKMILVMVNPFSVKKIKELDDNSPKKTDAKDPKTIAKLVIDGRFSIPYMPEGIYAEIRDLEYSRDRIIKQHNISANRIQRWLAIHFPEYLGIYTRFDATSGLAVLEKAPLPKDIISLGVSGIRKIWHDNRMRGRGVTEDRAKTLVEAAHSSIGLDGGPGTRSELYMLLEEHKLWTSQLETVNKALEEAVLKVKNVEKLLAIKGVGIITIAGFIAEVGDIRRFKSPKQIQKYAGLELVENSSGKHKGRSRISKRGRRKLRKILYQVMIPLLASNKEFRQIYDYFVSRVKNPLKRRQAMMAVSCKLIRVFYAVLTKGVDYDRFKMMSDIHHEGDLIAA

SEQ ID NO: 60941 - protein, 351 aa, unidentified
MRTSQKITGIVTTIGIDIGKNAFHLVGFDQRGAIILQQKVSRSQIERRVANIPRCLIGMEACSGSHHIGRQLAEIGHDVRLIPAQYVKPFLKGHKNDYRDAEAIAEAVQRPTMHFVTIKTPEQMDLLALHRVRSRLVGRRTGVINQIRGFLIERGITVRQGPMPLRKALSEILSSDTGALSPRMVGLIADLAQDWRRLDERITAVSAEIEALAEQDDSCQRLMTVPGVGPIISSAVVAAIGNGTGFKQGRDFGAWLGLVPKQESTGDRTILGKISKRGNKYLRTLFVQAAHVVLERRPSAAMRGLWPWVEQASKRLHRNMLAIALANKLARIAWAVLARGGTYQPRITHAA

SEQ ID NO: 60942 - protein, 338 aa, unidentified
MQQQRQYVGIDLHRRRSVIVRMTEDGEVLETARIINDPVAMSLELAKAGPDPEVALEACYGWYWAADLLEANGASVHLVHPLGLHWDSRRVKNDERDATELAHRLRRRDLPESWIAPPEVRELRELVRYRAKLTALRTSAKAQVHAVMAKCGVVPAVPDMFTAKGQVLLDEMPIDGPYRYRVDSLRQLLERFEAELVVVEKQLHDCLSRHAGFKAIQAVHGVGPITGAIFVAEIGDVTRFASARHLCSWAGLTPTHRESDTKVQRGHITKQGSNLVRWAAVEAVTRYHGGPVIAPAFMRIQKRRGTMIARVAAARRLLTLVFYGLRDGEVRCLNKEAA

SEQ ID NO: 60943 - protein, 331 aa, unidentified
MFPVGIDISKNTLDLCKLYDGIKERIKTRNIQNNRHSVENILRWPRLQHCGPEDVHVVMEATGVYHERLATELHDAGFRVSLANPRRSREFVRGMGIMTKTDKVDAYMLACYAFLKKPHRWEPPAPEIRYLGALLRRRDVLLGDALREENRLEKYLSTDTPADIISSCRRMAQLMREEVSNIERQIKAHIKASPALRRDYTLLTSIKSVGPLLGMHMLVVLRSHNFASAEQAAAFLGVVPIEKRSGTSVWSRPRMSKIGPPQLRAKLYMSALCGKIYNKRMRNIYDEMCLRGKPKMVAIGALMRKLVHWCYGVLKTGTVFNDESLKQVMST

SEQ ID NO: 60944 - protein, 428 aa, unidentified
MSYRIAGIDVHKKMLAVVVSDVEIESEYQFERRMFSSNPEQLRSLAAWLVEQKAEEIVMESTAQYWKPVWETLERYWKPLCEKREGARRRSGTLHLAQALSNRGRRGRKRDFVDAERLVKRLVARELTLSFVPDTEQRLWRTVTRKKYQLRRDVVRLNNRLESLLEEAHIKLSSLVSDLLGVSARRMLKALADGETNPAALAALAHERLRATPEQLCDALGACTELKPVYRRLLKMTLEHLQILEQQIGQLDQELATLLHPHQDAVERLAEVPGFAVDSAQQIIAEVGPAAATFPSEKCLSSWVGACPGEEESAGVNYSHRSPKGNRHMRRLLNQTANAAVKAKGSIFEIIYRRCVPRLGHNQAIGVIAHRQCRLIWLILHQGTRYEERGPAVTKRSRYQRTWRMIRQLRNLGYRIELPNPQASQAPA

SEQ ID NO: 60945 - protein, 343 aa, unidentified
MDQFAGLDVSVKDTSVCIVDETGKIVREVKVASEPDALLTVLKNRTYHFKRIGLEAGPLSQWLYSALAEAELPVVCVETRHMQAVLKAQINKTDRNDARGIAQMMRVGLYRPVHVKTLRSQKLRMLLTHRKLMLSKAIAIENDLRGTLRNFGLKVGMVGTVKFEARIKELIENLPDLAVLVEPLLVVRRVLREQIGILHRRLLVIVRDDAVCRRLMTVPGVGPVVALTYRATVDVPARFRNSKAVGAVFGLTPSKYQSGEINRTGAISKCGDEMMRVMLYEAAQVMLTRTNKWSWLKAWAMKIARHRGMRKAIVALARRLAVILHRIWVDGTEFRWTREVAAA

SEQ ID NO: 60946 - protein, 337 aa, unidentified
MIVRIITYERSTLVNDEKYIGLDVHQATISVAVMDATGKVVMESILETKAATILEFFAGLRGTLQVTFEEGTWSVWLYDLLSPRVDKLVVCNPRKNALLKDGNKSDRIDACKLAELLRGNQLKQVYHGETGVRMLRELSRSYLTIVKDLSRVMNRLKAVYRSWAIPCAGRDVYYRRHRAQWLAKIREAGVRRRAERLYEQLDMLQHLRQQARRELLAEGRRHAITAKLRQIPYLGPIRSVLAVALMQTPHRFRTKRQLWAYSGLALETRTSADYRYVEGQLRRSKKLVSIRGLNKDHNHDLKGLFKGAGPWRVCAPDPSRICIKLHWLKASSQRWRA

SEQ ID NO: 60947 - protein, 355 aa, unidentified
MLRYVSPVAASLASFQSFAGVDLHKDTLTVCVINPASGEVQYQKLACKCRDQIVDYFGSLPRPSIVAIESVGFYRWLWDLLEPIADKLLLADATACRRLAGRRIKTDREDSNNVCDLLISGRLPIAYAPPAHVWELRDWTRQRNYLSRCHARCLHRVRSLMNLNNRPGPAGLTADGLARYLRGQGKLLGERHVTILWQAHDQLSLLERQMEQSERELIRLVEQPVFKNTFNLLDTMPGVGLVTAATVLAEIGDFARFPDRKAIVRYVGLNPRTFESADVQRGGRLSKAGPPDVRWVLQQASWTAIRSDPAIKKLWRNIAKRAGSKRAAVAVARHMLMWMWSMVRCNQPFRRTKAA

SEQ ID NO: 60948 - protein, 452 aa, unidentified
MAKQSHRRCDQLPVLHPDAAGIDVGASELFVAVGADRDPQPVRRFPTFTRDLHVLADWLQQCGVRSVAMESTSVYWIPIHQILEARGLEVCLVNAQHVKNVPGRKTDVSDCQWLQYLHSVGLLRASFRPPGAICAVRALWRHRGSLVQMAAEHIMHIQKALDQMNLQVHRVLTEITGLSGLRILDAILGGERDPLTLARLCHKRVKSSESTVAKSLEGDYRPEHIFALRQSLAAYRYYQQLVLETDQEIQRQMVELEAADNALAKMPKRTKRLPYQRQGHEPRVFDLRSELYRIFGVDLTNVPGISAMTSQTILCEVGTDVSRFRNASAFASWLGLCPEKKISGGKVLFTKSRRVRSRVAIALRLAARSLHHAKDYMGEFFRRICRKLGKPQAITATAHKLARIVYHLLSTREAYDQSVFHKCEEEALKRAEMRLRRQAAHLGFRIIPAAEG

SEQ ID NO: 60949 - protein, 407 aa, unidentified
MRCVEAGVVHDGYGVYLGLDVGKGEHHAVGLAPDGKRLHDAALPNTEARLRELFDKLARHGRVLVVVDQPASIGALPVAVARAAGHQVAYLPGLAMRRIADLHPGSAKTDARDAYVIADAARTLPHTLRRVDVGDEALAELEVLVGFDDDLAGEATRISNRIRGLLTQIHPALERVLGPKAHHKAVLELLSRCGGPAGLRKAGRRKLLSIAAVHAPRMGERLVEQIMTALDEQTVTVPGTQAAETILPRLADSLRDVLRQRDQVAKEVERMLDAHPLAPVLTSMPGIGVRTAARILLEVGDGSSFATPGHLAAYAGLAPVTRRSGSSIRGEHPPRGGNKHLKRAFFLAAFASLADPVSRAYYDRKRAEGKRHNAALICLARRRCDVLYAMLRDKIPYQPRPATPIAS

SEQ ID NO: 60950 - protein, 382 aa, unidentified
MDTLSNTVAAIDSEQQKAKLFVALELGQATWVVALHSPIADKISIYRIEGGDTDQLMALIEKKRVQAARRLGRAAQVVSCYEAGRDGFWLHRFLIRRGIDNRVLDSASILVDRRARRAKTDRLDARALLRVLMALVRGEEQVCRVVRVPSIAQEDERRLSRERERLLHERNSHIARIKGLLILHGVRDYRLIERDWKERLDAVRTTEGQALPARAKTEIERECRRLWLAKQMLAEVEREIEQMIAHDGAVAGKLIQVRGIGPTFASVLTHEVYYRSFDNRRQVGSYLGLVSIPWQSGSVRRDQGITRSGNARARRCAIELAWLWLRHQPGSALACWYRTRVGTMTGRMRRIALVALARKLIVALWRYLQNGIVPEGAVLKAA

SEQ ID NO: 60951 - protein, 412 aa, unidentified
MARRRVKNPKTSTTKRTKKKASPLSVRRAKRTATHKAGSKAHRGLAVKDSTPQTIVGIDLGDQFSHLHSLAAVSGEDLEQSRIRTTKEGFTARFGGVPRARIALETGTHSGWVARLLAELGHEVLVANARKVRLICDNDRKNDKLDAERLALLARAEPRLLHPIQPRGEAAQTGLVMLKARDTTVRARTVMINTVRGIVKSSGARIPKCSTDTFHKRVDEFLPKHLAAALQPLVAQIGALTATIRHYDDQVDQMAKEQFPESELLSQVEGVGALTALAFLLTVEDPRRFANGGKVAAYLGLVPRQDASCTIDKQLRITKSGNPFVRRLMVTSAHYILGPFAKDSDLRRWGLKLCERGGKNGKKRAVVAVARKLAVLLRHLWLTAQVYDPLHNSAKLNAAAKAAEATAMTAVG

SEQ ID NO: 60952 - protein, 343 aa, unidentified
MTYFVGLDVSQKITAICVVDDTGRRLWRGQCPTNPEQISILVRRHAGDDARIGIETGAMTPWLVHELRNLGLEVVCLDARHARAALEMQINKTDQNDAEGLAQIVRTGWYRSVHVKSFESHRARALLGARTQLIGMTTRLSNHIRGVLKTFGLLPGAMRGLPFDRKVEALILHRSDVALIVRPMLVAWRQVREQIAVFDKAIRVLVRSSSACRLLMSVPGIGVLSALAYVSTVEDPGRFSRSRSVGAHLGLTPRQYQSGEVDRSGRISKCGDTLARTLLYEAAVVILTRLKKASSLKDWGHAIAKRSGNGKARVAVARKLSVILHSVWRSGQPFRWPEHANAA

SEQ ID NO: 60953 - protein, 402 aa, unidentified
MESLPTESSDYESVQVFIGVDVGKDTHHAVAINRSGKRLFDKALPNDENKLRSLISDLKQHGQILLVVDQPATIGALPVAVARSEGVLVGYLPGLAMRRIADLHAGEAKTDARDAAIIAEAARTLPHALRTLKLADEQIAELSMLCGFDDDLAAQTTQASNRIRGLLTQIHPALERVLGPRLEHPAVLDLLQRYPSPEKLASLGEKKLAAQLCKLAPRLGKRLAADIAQALAEQTVVVPGTNAAAVVLPRLALQLITLRKQRDEVALEVEQRVIAHPLYPVLTSMPGVGVRTAARLLTEVACRAFASAAYLAAYAGLAPVTRRSGSSIRGEHPSRRGNKALKRALFLSAFAALRDPLSRAYYTRKMSQGKRHNQALIALARRRCDVLFAMMRDGTFYTPQGS

SEQ ID NO: 60954 - protein, 376 aa, unidentified
MNKCHSNTELSSHEGTRSQFNGGECAIKSAVGRMRPVCALGIDVHQDFYVVVEQVDGTNPKPPQRFPKRAFLRWAARLKENTGAEVHAVYEACGFGFSLQRQLSSLGVQCHVVCPQKLDEQNRRVKTDGLDAKALVLKLDRFVQGNRSSLALVRVPTEEEEQKRAIHRQREQLVKARKQLEAQGRSLMVNHGLEPVQSWWKPRAFAALPVPQWMKELLANSQPILVALQQKIASLTIQLQSSATPKQPRGLGLMTSVIIDREIGDWRRFSNRRQIGSYTGLCPGEYSSGNTRLQSCVTKHGNPRLRAALVELAWRLVRFQPNYKPIVKWRQILAKGALATGAARKKAIVAVARQLAVDLWRIKTGRLRAEELGLIN

SEQ ID NO: 60955 - protein, 334 aa, unidentified
MEQITTVGIDLAKSVFSLHGVDGAGRVVLRKTVRRDQLVATVAVLSPCLIGMEACSGAHEWGRRFQEHGHTVRLMAPKFVAPYRKSGKNDGNDAEAICEAVTRPSMRFVPVKSAEQQALLALHRVRQGFVVERTALINRLRGLMSEFGVVLPLRSVTVRRQAAAAAEVLPELARRAIGDLIEQLRALDERIGGYDREIEAQARLSEPAQRLMKIRGIGATTALAIVATVGNAREFKNGRQFAAWIGLVPGQYSTGGKSRLGHISKRGDAYLRNLLVQGARSVLNSAASHQDRMSRWILELQPRRGYYRTLVAIANKNARIAWALLAKNEPLRQA

SEQ ID NO: 60956 - protein, 344 aa, unidentified
MNYYAGIDVSLELSSVCIVDATGEIVKEAKVESHPDALLKFFKAFGLPLTVIGLEAGPLSQWLYAGLTKAGFVTSLMETRHVNAALSATTVKTDRRDARGISQLLRMGWFRPVHAKSAGSQEARALLVARKQLQHKLRDIELSLRGILRGFGLKVGKVTDRTFEARIRELVTGHPMLEQIAEAMLAARAALLEQFNTLHKAVLKIVRQDEVCRRFMTTPSVGAIVAITYKSALDDPGRIKKSKNAGPLFGLTPKRYQSGETDITGGISRVGDEMVRTALYEAANVLLSRVTRFSALKRWGLEVAKRRGMKRAKVAVARKLAVILHRMWIDGSTFRWTKTEAAFA

SEQ ID NO: 60957 - protein, 342 aa, unidentified
MKIIGCDFHPSFQQIAMVDTETGEHTEQRLTRGEAAEFYRGLSGKGIVGIEACGNTLWLERLLGELGHELRMGDAAKIRAMEVRKQKTDRRDAELLLTLLVQGRFPQVWVPSLEQRDTRQLLLHRHKLVSVRRQIKNQLQHLALNQGVQQKWKLWTQQGRELLEQLPLTGWTAKRRGDDLQLLDELNRSIAELDTAVQQAAAQDRIALLLQTHPGVGPITALAFVLTLGQIDRFAHSKKVVSYLGLNPAEHSSGGRQRMGSISKQGNPMLRSLLVEAGQSSARLVPELKRAYQRLKHRKHSGVAKVMVARKLAVRLYWMWRTQQPYTATRMQGSPSHFVGAR

SEQ ID NO: 60958 - protein, 371 aa, unidentified
MSVYVGIDVHRKRSQVAVIDAKGEVLANRNVPNGVEPILKVIGGLPPGTPAALEAAFGTGWLVELLEDYGFDPHLVHPLRCKAIASARLKNDKVDAAILGQLLRADLLPEAWIAPPPVRQLRALLRHRVQLVRLRTLLRNRIHAVLADHGHDRPAGCWSGPGRAWMASLQLPAVSREVVDDDLALIDALETVTGRLDWEIHQRARSGPRVKVLTQLPGVGPFTALVILAEVGDVSRFGSARKLASWAGLTPTVRGSDRVAHYGHIWKAGLGVAAVGAVRGGADRQAVPAVRRRLPGHRHTAGEEDRHHRGRPQAAHPRLAPAHRRRACRSHTTRRSIRAPDRDAVTGQEEVARLRASSKNTLSGATARSKI

SEQ ID NO: 60959 - protein, 328 aa, unidentified
MKTNLRFIGIDVSKDTLDIGIYSEEEKSTVIKNNKKAILKYFNTLLSNKNVSHVCIENTGKYSWVLMELLPELDCYFYVVNPLHLKRSLGLIRGKNDKIDAIRIAEFIKKNFQEIKPYIPQREEINLMQILLSERRFKVKQRKQLKTKNKENCILSNKTIAKTLTKKNDKLIKELTKQIIELEREIKQLISNDEQLKTLNKQLKSIPGVGDILCWNVLVKTNEFKTITDPRKLACYAGVAPFANTSGISIFGRNKVSNYADKGLKKILHLGALSAIRLENDLAYYYHRKVEEGKNKMLVLNAVRNKIIHIIFALIKNQEFYNNRLFMS

SEQ ID NO: 60960 - protein, 346 aa, unidentified
MVHYVGLDVSLKQTSICVVDQAGSVVREGVVDSDPEAIAAFVRSKAPGALRIGLETGPTTTWLWTELKRLGLPVICIDARHAKAVLKMQINKSDRNDAAGIARIMQTGWFKEVRVKDIDSHLVKALLVSRALLVKIKRDLENQIRGLLKNLGLVIGRAKFNVFAVRTEELIEDRPELVAVIRPLLAARKAIEEQVGALDRKVVKLARHDEQVRRFMTVPGVGPITALCFKATIDDPTRFKRSRSVGAYVGLTTRRHASGEVDWSGRISKCGDAMLRMYLFEAAGVLLTRVPKWSALKAWGMRLARRNGLRKAKVAVARKLAVILHRMWIDETEFNWSKKEATTSQG

SEQ ID NO: 60961 - protein, 457 aa, unidentified
MKNKPSSAQAKKRLTKHLEQINLYAAGIDIGSESHYVAIPEGLDDETVRCFSSNTGDLERLADWLVKIGIQTVAMESTGIYWIPLFETLEERGLEVLLVNARHVKNVSGRKTDVLDCQWIQQLHTYGLLAGAFRPPEQITALRAYMRQRETLIRYASSHIQHMQKALRLMNLLLDNVVTDITGKTGMTIIRAILKGEHDPSILADYRDHRCKKSEQEIAQSLQGHYREEHLFALRQSVELYDTYIAKIQACDEAIEHQLNGFDTQADPAALGKGKRRGGNPPNFDVRGELYRMSGVDLTAIDGISDVTALQVLSEIGTDMSRWRTEKHFSSWLGLSPGNKVSGGKILNSKTKPTTNRAAAALRIAALALANSKSALGAYYRRMRARHGAPKAITATAHKLARIIYSMLKYGTEYVDQGQDYYEQRYQDRVMRNLKRRAAQMGFTLIPSPDCNKVVFE

SEQ ID NO: 60962 - protein, 353 aa, unidentified
MTLYIGVDFHPHQQTVAWCDKQTGETRTFDLVHDLGKVREFYSSLPEPAIVGIEASTRARWFENMLFENGHKLFVGNPVLIRKRAVSRHKNDRRDAELILELLLRGEFPSIWRRPPESDQVIEMLCLRQSLVRQRTQVYNRLQALAHNAGLPKGRMRTLGFQALVKAVDMEEASSICRSHLFSVLERLNEKIVELEQWLKQKAETHTGPQLLMTQRGVGYLTALAAVHTIGDVSRFTRLSKQIASFAGLDPLERSSAGKTRFGRTSKAGSPLLRYQLGYAAHIAARSDPRLKNFYKRLAKKKPKAVAKTATARKLLVKLSIMLRDNITADEFDRRGTHSWQCPSGSGSEMTVV

SEQ ID NO: 60963 - protein, 343 aa, unidentified
MYYIGLDVHKKSISFCVKDVAGRVLSEGKIGSTRRELDAWIATLPQPRMMAMEATIFTGWIYDHLLPHAEKVKVAHPLMLRAIAAAKRKNDRIDAAKIADCLRCDFLPECHMASTEIRDRRRILRYRSLVLKQTVQMKNRVSGLLMETGVSYNKQRLHRIGYFDELMTTNEDVHDSIRPLLKLSRDMISRSQRLDYALISSLERDPLLKERLRRLRTVPGVGPITALTWALEIGDYTWFTSNKQAISYCGLCGDENSSADKVLRMPISKQRNKHIQRVLIEAAKMAIRISPELAMIRARELERGNRNRATLAVARKLVIYMLAVERRQQDWVPSEQFCRTTAA

SEQ ID NO: 60964 - protein, 341 aa, unidentified
MKKFIRTAVDLSKNYFQFHGLASEDGVLVSRKLKRSKVLEFYAQIEPCRVGMEACGSAHHWARELIAMGHEVVLIPPAYIKPYVKRGKNDVVDAAAICEAMARPDMRFVPVKSADDQAVLMLHKSRELLIKQRTMSVNALRGHLAEFGLVVAKGIGRVDELLALAQADARLPQIAKAMVTELAQHLEGLDQSIDAIDDDIAKAHKKNQRSCLIDEVPGIGTLIASVVAASVPDPSVFKSGRDFAAWLGLTPKQHSSGGKEKLGAITKQGNRYIRKMLVVGATSVLRVVGKRKGALADWINALRARKPERLAAVALANKLARICWAIMTTGESFRTETYVKA

SEQ ID NO: 60965 - protein, 343 aa, unidentified
MDYFAGLDVSVKETSVCIVDDAGKIVREARVASEPEALLQVLTNTIYRFKRVGLEAEPLSQWLYSVLAEAGLPVICVETRHMRAVLKAQINKTDRNDARGMAQMMRAGLYRPVHVKTLRSQKLRVLLTHRKLLQSKAIAIENELRASLRNFGLKVGMIGTMKFEARIRELVERLPDLAVLVEPLLIVRRVIREQLGILHRRLLAIVRDDDVCRRLMTIPGVGPVVALTYRVTVDVPARFRKSEAVGAVFGLTPAKYQSGENDRTGAISRCGDEMMRIMLYEAAQSMLVRTAKWSWLKAWAMKIARHRGMKKAIVALARRLAVIMHRMWVDGTEFRWTRELPVA

SEQ ID NO: 60966 - protein, 417 aa, unidentified
MTVNSLMQRRSAIKPDTLVVGIDVAKSNHVARTLVPGGAISRPFVFSNNREGFIALAAEIEARKPVPTSAVIVGLEPTGVYWLNLARWLVEQGYQVVQVSGLYVHRAKELTDNSRGTSDGKDALLIADLVAQGKYLGFVRPTGVLADLRQLVTLRQRLVQERTARYSLLHHSIELLFPEFRAVFRGVTGPGARRVLRHFPTPAAVLAHSADEMRRLLSADGRRRVNSTKLAQLRAVAEQSVGACEGTTGMQYALMDTLRELDSLDSRLHDVELEIGRLLAQIDETPILTSLVGPMTAAIILGETGGLRQYSCAVAVLKLAGLNLYQISSGQYRGDRHISRMGRSLLRQALYFAVLQHTHPGAPLYPYYAELLRRGKPKPVALVALCCRLVRLLYALVRDGRCFSPQPPENNQPSAAA

SEQ ID NO: 60967 - protein, 454 aa, unidentified
MALPFINDDGEQAMAARKQEVAVFPNAAEIDVGATSHWVAVPPHLADGPVREFGPMTTDLNALADWLLACGVDTVALESTGVYWIPVYEVLEQRGLKVWLVDARQLKYVPGRKSDIQDCQWLQKLMSLGLLRAAWRPDGEVCVVRAVARQREVLLTEQASWVQRMQKSLVQMNLQLTEVLTDVMGVTGQAIIRAIVAGERDAVVLAQHRNRRVKASKDDVIKALSGNWREEHLFVLGQSLAMYDDIARHLAGCDTKLQALLTERSRGGIELGKPPRAGSRTRAVFDLRQTLADWAGVDLTRINGLEVTSVMKILSEVGPDLSRFANVKHFCSWLGLCPATKISGGKVISASTKHSANRVRQTLKLAAMSLSRSQSALGAFYRRLCTRMGKPSANTAAAHKLARLVYFMLTRGEAFVDQGQQRYEEQQRERSVAALKRRAAALGFKVAPVAPAAT

SEQ ID NO: 60968 - protein, 343 aa, unidentified
MDHFAGLDVSVKETSVCIVDDTGKIVREVKVASEPEALLAVLKNPAYRFKRIGLEAGPLSQWLFSALAEAELPVICVETRHMQAVLKAQINKTDRNDARGIAQMIRVGLYRPVHVKTLRSQKLRMLLTHRKLLQSKAIAIENDLRATLRNFGLKVGMVGTVKFEARIKELVENQPDLASLVEPLLIVRRALREQIVILHRRLLAIVRDDAVCRRLMTVPGVGPVVALTYRVTVDVPARFRNSKAVGAVFGLTPSKYQSGESERTGRISKCGDEMMRMMLYEAAQVMLTRTIKWSWLKAWGMKIARHRGTKRAIVAVARRMAVVMHRMWVDGTEFRWTREVAAV

SEQ ID NO: 60969 - protein, 358 aa, unidentified
MVQSKGINFEGQNIYIGIDVHLHSWHVTVLTSGGYRRKHSQEASSSALFEHLKRHYPGGRYLAIYESGFSGFSTYYALTSLGIECVIAHAADIPTGQYENVMKTDAVDSEKLARALRDGSLKHTVYVPDREILDDRGMVRFRKLLQNQLAGYKSRVKHLLYCNGVSLPACFANSNTHWSRHFMRWLHEDVRLLSSTRHTLDLLLEQVERLRVDILGVTRRMRLLSQTERYAARMSLLLSIPGIGLINAITLLTELESPDRFHSQRSFAGYLGLVPTCHDSGEKKQHGELTFRGNKRLRVLMVEGAWVAIRHDAALAAAYGNYRKRMEPQEAIIRIARKLSNRVFRVLKTGKKYEYERY

SEQ ID NO: 60970 - protein, 391 aa, unidentified
MVCVGIDVAKDKHDCCILDSEGTTLVDCFTIPNNMDGFKSLLQTIQDCSQKSDKIKVGLEATGHYSYNILGFLLDNDLPVYVMNPLHTNLYRKSLSLRKTKTDRVDAKTIATMLLSDVDLKSYTDIAYHNEELKSLTRYRFDKVQERAKLKQSVSRLVTILFPELEQLVSSIHGTSIYALLREYPGAKQISEAHLTRLANILVKTSRGHYRKDKATHIRDAARTSIGSVMPAKSLELKHTIKLIQELTSEINEIEDAIRKIMDELKPPILSIPGMGFHSAAMILAEVGDFSNFNSPDKVLAYAGCSPSTYQSGKLTNCYAHMEKRGSRYLRYALYTATKYVCYWNPVFTEYLTKKQAEGKHYNVALSHATKKLVRLIYALQKSGKAYLAVT

SEQ ID NO: 60971 - protein, 308 aa, unidentified
MIMQNYVGCDISKQWLDFFDEASGRCQRIDNHADAIAAHVAGLHPGQDFVVMEATGVHDRLLRHALAKAGVAFSRHNPTHTHNYAKSTARRAKTDPLDARMLSGYGRRYHPEAEPAPREEDEHLQSLARYRDQLVDTRANLKKQLSEAFDEIVIAGFEEMITDFNTRIKALEARIAQVIRQNEGTARDNALMVSVPGVSKVTALSLLALLPELGQRSPKSIAALVGLAPFDNKSGKLRRRSQIQGGRARVRRALYMAALGAIRACDRFKAFYSTIAARSGSKKLAIIAVARKLLVVLNAIIRDQKAFA

SEQ ID NO: 60972 - protein, 324 aa, unidentified
MTFKVVRFICGGMDVHKNLIVATIGTTDRQTLITEYIQQSFSTFYSDLIRLKEWFISHDCYDVCMESTGKYWIPIYNVLETELNICLTHPKYVKAIKGKKTDKRDSKWICDLYKCDLVKHSFIPKKEIREMREIARYRCKLVYMRSSERNRYQNCLTVSNISLASVVSDPFGKTATNIMKELMQSEVIEDDKILKLIHKNCKDKDKILDSLQGYRIESDQRFKMDTVMNHIEYLDKQIQACEAELIKRAYPLRDYFQHITHIKGISALSAILIVSEIGTDMNQFESDKQLVNWAGLSPANNESANKKKSVRISKAGQYLKPLLV

SEQ ID NO: 60973 - protein, 369 aa, unidentified
MRSSVSLSAGPIHLGLDVSKNKFAVGILRWGEQVPDVETIINDEASVRRLIDRFGDRGQLRVCYEAGPTGFGLYRLLTSMGVACEVIAPALIPKAPGDRVKTDRRDCQRLARLHRAGELVAIRVPTEAEEAVRDLCRARADLVQDRTRTRHRLSKFLLRHDRVRRQDAWTVKHEQWLAGQRFDEAALQATYGHYRAVLAARDAELAALEADLARWYTQGPFTDAVARLAAYRGIARLGALTIASEVGDWRRFPTARTFMGFTGLVPCEYSSGESVHRGRITKAGNAHLRTQLIESAWAYQHRASLGVVLRRRQDGVDPATAARSWTAQQRLCARFRRLSARKTSRNIVTVAIARELAGFCWAEMTATEG

SEQ ID NO: 60974 - protein, 402 aa, unidentified
MDHLTTLSVPDPTGICGDCATLFVSLELSRSTWVATSLALGSRKMSKHTLVGGDARKLLDLLARLKNKAEQRMAAPVKIVAIQEVGLDGFWIHRLLETNGVESHVVDPASIAVPRRHRRAKTDAIDGETLLRTLMAWQRGEPRVCAMTMPPSPSEEDRRRVSRERAILLRERIRHTNRIRGLLFGQGITNYNPLHKNRREDLEELRTGDGRLVPAHLKAEILREIDRLELVLRQISEVEAERDEMLRPAQASSPAALLMRLKGIGAEFAGVLYLEGLFRHFENRRQLAAYAGLAPSPWKSGSVDHEQGISKAGNPRLRTTMIELAWMWVRYQPASALSCWFRSARWLRARPDPPHLDRSTRPQAAHCPLEIYQAWRDPGGCYREARLRHPGRPNHYREFHEA

SEQ ID NO: 60975 - protein, 404 aa, unidentified
MDRQRTVAGLDVHKDSIYLCVMGHDEAIIFQKTYGTLTPGLRQMCADMVAHGVTEAAMESTATYWVPVWNALCDSMSLKLVNPYFIKQLPGRKSDVKDAQWIAECLLKNLIKGSFVPDGVVQDMRKYNRRIFDLNDDMVYNTNKLDAALQRCGFRLSNYVTKVNGKSYRSCIAAIINGTTDPAELVKLVHGKTVNKHGREVIMAAVTADFHQADIDLIRQYKEMIDIIERQIKDCQSALTALCRKHFPTQYERLQTIPGVKERAATAIIAETGADMRHFPKSTNLVGWCGLRPRNDESNRKIKSNKITHGNKFLRKILIEIAWTASRTRNCFFSNFSYVQCTVRRKTKMKVQVAIARKILVAVWHMLSNDEDFIDVYLRGLAKEAEEHRQKQESIQRIELSMVN

SEQ ID NO: 60976 - protein, 405 aa, unidentified
MNAVGIDVSKGKSTVTIRRPGDVVVMSPRDIPHTQSAINDLIGLIRGLDGETKACMEHTGRYYEPVATWLSDAGIFVSAVNPVLIKDFGDDSLRTPKTDKADSQKIARYTLDRWAKLKQYGIMDKARNQLKTMNRQFGFYMNQKTAMKNNLIALLDQTYPGANDFFGSPARSNGSQKWVDFVHTYWHVDCVRSRSLDAFTEHYQNWCRRKGYNFSASKAEDIYRLSSDIIAVFPKDDSTKLLIRQAVAMLNSDSETVESLRLKMDEAASTLPEYPVVMAMNGVGPTLGPQLMAEIGDVTRFTHRGALTAFAGVDPGKDESGQHIRKSVPTTKKGSPYLRKTLFQIMDGLIKRSPVDDPVYAFMDKKRAQGKPYYVYMTAGANKFLRIYYGRVREYLSALAKAENI

SEQ ID NO: 60977 - protein, 330 aa, unidentified
MTWFVGLDVSVRETAVCVVDEAGKVVAERKVATEPDDLIELLRSISSEYGRIGLEAGPLSQWLVNGLAEAELPVVCVETRHMKALLKAQQINKSDRNDARGIAQMMRVGLFKPVHVKTLASQERRMLLTSRKLLQKKLLDVEADLRGTLRNFGLKVGVVTTNGFEGRIRDLVEDYPRLAAIAEPMLLVRRVLHQQFTVLPKMLLGVVREDPVCRRLMTAPGVGPVVALTYRAAVDQPQRFVHSKAVGAQAGLTPKRVQSGETDYDVGISKTGDVMLRSMLYEAAQSLLVHGGAACAGPASRWRVVWRSFCIACGSMGLTSAGATVPPPWP

SEQ ID NO: 60978 - protein, 331 aa, unidentified
MKNYFIGIDVSKKKLDVALHSIEGRLNCNHIVIENNGKGFKDVLTWFKKMKINHQEVLICMEHTGIYADRVVDFFEKKEIAYSLQSALHVKKSLGLVRGKSDKVDAFRLAEFCHEKRATIKESQKPSENIIVLKHLFTERRKLVSSQAQYKQIRSEIAMHQGKGFIKRKDRLIKDLQRSIDEIEKEMMEIIKSDPEIYCNFILLMSIIGIGMVNAIGTIIYTNNFKNFSDPRAYACYVGIAPFPYSSGTSIHKRKSVSKMGRLQLKADLTQAARSAILYDPQMKAYFKRKFNGKKGAESNYGTVLNAVKFKLVCRMFSVIRRQSAYVKFAF

SEQ ID NO: 60979 - protein, 425 aa, unidentified
MNSISNKKINQVTDQTLVVGMDIAKKKHYACFVDERGRVLKKSFPVPQSREGLEWLYQCIVEAMEEFEKTEVIVGIEPTGHYWLNLAYFLDEKGIPLVMTNPMHVKRSKELDDNLPTKHDAKDALVIARLVKDGRFSYPRILKGMEAELRVGATFRSKLVEEQGAIRNQMIRWLDRYFPEFSQVFPSFGKMALAVLEYTPFPSDLAGKELEEVLALYRQSEGLQSPQKPKAKKLMELAQHSIGVTEGQQMARIEIATLVRRYRQLEEEIEALTQQLTELVQTSVEYEWLKTVPGLGDATIVELLSEIGSFSHYQDPRQLIKLAGLTLREHSSGQHKGQKRISKRGRRRLRALLFRVMMPMIRHNEAFRQLHEYYTTRPDNPLRKKQSIVVLCGKLLKVLHAVCTKRQAFDVKRMMQDIFGLETAA

SEQ ID NO: 60980 - protein, 343 aa, unidentified
MDHFAGLDVSVKETSVCIVDETGKIVREVKVASEPEALLSVLKNPAYRFKRIGLEAGPLSQWLFSALAEAELPVVCVETRHMQAVLKAQINKTDRNDARGIAQMMRVGLYRPVHVKTLRSQKLRMLLTHRKLLQSKAIAIENDLRGTLRNFGLKVGMVGTVKFEARIKELVENLPDLAVLVEPLLVVRRVLREQFVILHRRLLAIVRDDEVCRRLMTTPGVGPVVALTYRATVDVPARFRKSKAVGAVFGLTCSKYQSGEIDRSGRISRCGDEMMRVMLYEAAQSMLHSKKWSWLKAWAMQIARRRGKKKAIVALARRLAVIMHRIWVDGTEFRWTREQAVAA

SEQ ID NO: 60981 - protein, 354 aa, unidentified
MGGACAPPELEIVGGLDIHRKQITFDYLDTVTGQVQCGQITPADRAHLRAWLARFHGRDDVAFAVEGCTGWRYVAEELAAAGVAAHLAEPADTAFARGRKRHAKTDKTDCRHLRALLAEGRLPECWIPPGHILECRALLETYHDLRAEHTAWVQRVHAVLFHQGAPALGEGTLRTEQGLAALRAAAAAHLSPAGQLQVATALEVIDALETRLHVLRHQLLDAARHLAGAKVLAARLYGVGPVTALAMTCWLAGAGRFSSSRKAVRFAGLDITVYSSDRKGPPGRLSRQGPPVLRWAVYEAGKTHARSSAPDHGYYAAVKDRQNGKRAALSEARKILRQACHILAELGDDALAAA

SEQ ID NO: 60982 - protein, 394 aa, unidentified
MGKSNIEFEQVIDRGCGLDVHRDTVVATVMGKGIKTETRTFGTTTSSLNELGLWLESLKVTDGAMESTGIYWKPVLHVLRTYPLDLIVVNARHIKNVPGRKTDKADSQWICKLLISGLLKGSFIPPENIQELRDLHRYKKKLIGTVASEKNRIIRVLEDANIKLSSVVSDTSGVTASYLIKGLIEGRKDLENLIAECYHRKLQASPEQIKEAITGRLTAHHAFILKSMQKHIVSVEEQIAEIDVEIEKYIKDFEKEIELLQTIPGVGKEGAIGIVAEIGVDMDVFPSEHHLASHSGMCPGNNESAGKKKSSRTRQGNKHLKATLTELAWEAIRTKKSYYKAKYESMVARRGKKRALIAIGHKILCASYHIIKNKEAFKELGYEYLAERKKEKQA

SEQ ID NO: 60983 - protein, 352 aa, unidentified
MLIIGCDFHPGFQQVAIFDNQTGEYQEKRLSHRVEAEQFYRSLAGQKVRVGMEACGHYPWFERLLAGLGMELWLGDAAKIRAAVVRKQKTDRRDAEHLQVLLREDRFPRIWVPTLEERDARQLLVHRHKQVQARTRTKNQLHALALSQGVQKKRKLWTEAGRAELEKLELLPYAAIRRQRLLETLDRLEAEIAALHRQVEQEVQQRPAAVRLMTHPGVGPVTALAMVLTLGPAERFASGRKVGSYFGLIPSEHSSGGRQQLGHISKQGSSFLRFLLVEAGQSAARYDAELGRFYRRLAKRKHRALAKVAVARKLATRLYLMLREDWNYAQLCKAVVQASPSHSVEERQKPTG

SEQ ID NO: 60984 - protein, 344 aa, unidentified
MIIIGCDFHPSWQQIAWVDTETGETSERKLVHASGEAEQFYRGLSGAVRVGLESTGNSHWFVDLLAGLGHEVWIGDAARIRAQQVRKQKTDRRDAAHILDLLMKDGFPRIWTPTREERDQRQLLIHRYKLVTLRARVKNELQHLAMNQGMQKGRSLWSREGQKALQELTLNHWAGERRSNLLDLLKNLDQKIGLLDSAVKAVVEQNERAQLLMTQPGVGPITSLAFVLTLGDVTRFQRGKQVASYLGLIPREYSSAGKQHLGSITKQGNRFLRMLLVEAAQVVVRYDPGFRKEYVHRCHQKPKAVAKVAAARKLAIRLYWMLRTHTAYPEVVRIQNSSRVALAE

SEQ ID NO: 60985 - protein, 399 aa, unidentified
MKNYIIVGVDMSDESLALEIAHNEVSLGRRSFGNDPDSWEAMVRHLKERARKADGASVVLAYEAGPHGMGLHDFLSERGIVCHMFAPTLLKHSAKSRKQKTDPKDAEGLLEVLRGHLLAGNKLPGVWIPDARLRDDREIVRGRLDAGAKTRQTRTQIQSLLKRYTVRKPQGVGRGWTQKHRAWLRGLCQGSSPLGIGARTRLSSHLRELEAGEKEESLLEQAVARLSQEERYRRTFEALDAEVGVGLLTAMVFLTELGDPERFGNRRQVAAYFGLIPSSNETGKRDDCKGHITRQGSGRVRWVICQAYHTEARTDPKEKARYERLVQRNPKRKKVAVVAGMRRKVIRLWHTALNVKRGAPPIRPPSRPPEGGKRQFALSASPRKYERRPPLVEERRHAV

SEQ ID NO: 60986 - protein, 332 aa, unidentified
MISAGIDVSAKALEVVINRNGAASSKPMTFNNDAKGHQALLKALKKRKVKRVCVEATGVYHLDLCVRLHDAAGIELMVLNPKAAKQYADVMMNRSKTDGVDAALLAGYAQHMPFSPWKKPDDAFLQVRACARRIEALTKQRTQAKNQLHALQATDTTPSFILEDVQLSITQADQQIDALRRRTLQLIEAHETMQKVMTLLLSVKGIAETSAIQLMGELLVLPEDMKAKQWVAMAGLDPRHHQSGSSINKKARISKVGNRYLRQALYMPALSAARHDKHINGYYRHLIENRGLKKIQAICAVMRKLLHAIHAMLKQQQPFDNTRFFDLSGATA

SEQ ID NO: 60987 - protein, 463 aa, unidentified
MRTIGIDLAITGTHKAVIVDERGNAIGGVIHFRTDPVELEAVLRRAWEGADEDEPLRVVMEPTGLAWLPVASYCIQRGITVYLVNTQQVSDLRKFYSKHARSDRISARVLARLPWVSPETLHPLDLADADHLSGQRWCKQQEELAQLITATKNRVQAWERAFWPGLEEVVGDLFAAWVCRWREVWYNPWPLQGVETKQLVAFLVEAGADPEAAESLAAGLQAVACRVVALFGRPQQGRPSPYVDYAALQDQVLRELRLLAYYEAEHQAVSRQVQRLYRQVHPGRELESIRGVGSDGAAVYVFFVGNVERFTSQKKFRGWSGLVPGSDQSGDAEKKGLRLTHAGPDLIKKYAYINAEVGRQWDPQLAAIYYDQMMHKGKHHVQAVCCCATHILDRVRAVLRDGRPYELRDVDGTPVTWQEARAIIAERYQVPEEVRQRNSKRARQARRDQQAEHKRKKRSRPGR

SEQ ID NO: 60988 - protein, 598 aa, unidentified
MASRCNQLLGPAWRGQSAARGCGGPPSPDRKTSPAAPPKGILAADHRERKRTYNLTAAPDLEVVESAVGYAKLRQRLVDLVAKYGRVHFHVRLDAAGLYADNLLAWLAAVTLDHASFTLSCGDTQRNKNYRVAVYGHQKSDPVEARACARYALTERPKSAAVVAPALLPLRQVAGRLQAVVRQRTRLINQLHQLLARTFPELAVLVGDLSTGWVLELLHRYPTARLLAQARSDDLQAVPYLPHDRIADLLARARDSIGSLSGAVADELARDQVRQVRDAQARQKRLEALLISAYRALPEPNHLDTIKGFGDVTAAVVTAFVLDINRFDTPGKLVNYFGVLPVEASSGVERDGTPRGPKRYKMSPRGNDLVRRYLWMAALSAAKHNPACRALYGRVRAKHPDRPSIAIGHVMRKLLHLTFAIWKTGRPFDPKHYPWDRATEATVGEGSRGETGQAAGHTPGEPAESVVTATCPITVADAKPTVETPPAGVWLDFGHLKRQLSMTRVLDHLGLTGRLKGSGPQRRCACPIHRGDGRGRTFSVNLDANVYQCFDARCGSQGDVIDLWAALHQRDLRSAALDLVHVFALEPAPTSGTEKRNG

SEQ ID NO: 60989 - protein, 345 aa, unidentified
MKITTIGLDLAKRVFQVHGVNGTGEVVVRKTLRRAQVLRFFEQLDPCLVGIEACGTSHHWAREIRRLGHEVRLMPPAYVKPYVKRGKTDASDAEAICEAVSRPTMRYVAIKSCEQQAALTVHRTRDLFVKQRTQLVNMIRGLLAEFGIEIRRGITHALSLAERIAAGEIPDIPPLAAKMIADLAGQVLNLQTQLREIERELLAWHRANDVARRLATIPGVGIICATAFAASVTDPHQFRSGRQFAAWLGLTPLQHSSGGKERLGRISKMGDKYLRRLLIVGMTSLVRRAKYKPDAVDPWLAALLLRKPARVVTVALANKAARVIWAIMSRGEIYRAPQTASAVVA

SEQ ID NO: 60990 - protein, 382 aa, unidentified
MKNIYSRVSCGGMDVHYKFSQVTFRDAAGRVVRRERLEHPQRQELAQQVRRWPKGLPVVLEASFGWGWLSDLMAEAGLEVHLSNCYKVEQMRKARGQVKTNKKDADLTALLPLEPSNWWEVWRAPRDVRDRREIMRFRGDLVALQTTVKNRIHALFHRHGIFHEFSDLFGGAGRKFLAQLCLHGSEYLSPAALTALRGQVRIIEHIRGQLAPLENTLRKQWETTPLIRRLQTIDGLGLILSHVMVSEIGQIERFRSQKALASYSLLAPCAHDTGAEETTPTPLGRHLGQRGNKTLKWAFIEAAHGAVRSGGKWRALFDRVTHGGKKDRSRGYIKVARELVKVVYVVWSKGVAYSPTPPVRPGADTRKSRSGTGQLCHPMVPA

SEQ ID NO: 60991 - protein, 410 aa, unidentified
MSVLGNALDPATVIVAVDPGKAFNRVWISDGSGLLVDPMSLPVSQEGVLGLELALGGRGGGEPVIAVEATGSLHRAWVSELERRHAGSVRVFAPSETTAARIQLGSGRFKSDDRDCAALTYLVRQGLGRRYHEQSAVEALRAVVRHRRGLVADRKVAQQRLHDQLNVLCPGLSAPAGHGRALALDTPTGLAVLACAAAFAGRPPKSRSLICRAPGRLTVATADYWAARWRQCLPPPADAAGRAQRLGRDLDRYRRLLVDITELDAQTSELLAATDGQVLTTLPGVASIRAAAFAAHSLPIERFPDAEHLYSATGLAPALYQSATLNRRGRISRQGLAEHRDALMGIAWGLSQQSPSFAGRDAELRARGMAPIQARVALARHACRLAYRLLRTQQPFDEQRYRRGRLSRER

SEQ ID NO: 60992 - protein, 388 aa, unidentified
MSQSSTLDIGWDVDTDSMAIASVAAEPGAEVTSLGTSGTRQGDIAQRVRQRHAKATHVVFVYDAGPCGSWLSRYLTHKGHHCWVVAPSLIPQTAGDRVQTDRRDAIQLARLMRSGELTPVDVPAVADDAIRDRSRAREDAIADRKAAQFRLNALFLRHDLRSTGRATWGPAPLRWLAAVVCATPAHHIVFQAYGRAVHEHTARLQRLVQALPAQVTAWRRHPVVEALEALRGVPCTVAVTLVTALGDLTRFATPRPLLTYLGLIPAAYSRGERRRQGASTQAGNTHARRALVEGAWAYRDPATGSRPRPRRREPPPQPIQALSGKAPVRRCQGYRRLIARGQHANPVVVAMARELAGFLGAMAQPVPVKPSSRQTIAMSPTLQTACHV

SEQ ID NO: 60993 - protein, 387 aa, unidentified
MHRPVRVQSANISGRQTVKEAITSYIGLDVHKSSIAIAAAQAGRSAPRFVGTTPPDLASLCKALTRCAKRESTLVVYEAGPCGYGWVRHLRAHGWRCEVISPAHIVRKTIEKHVKNDRLDALLLARESRAGNLTPIVVPDARDEAMRDLSRARSDATAARLRARLQLQAMLLRHGRAYHGKTSWTVSHERHLATINFEHAAQQLAFEEYRQAVKEAHERVERLTEALRLQCESWRMRGVVKALMCLRGIDFMAAVIFVAELGDLSRFAHPKALMKYLGLTPSEYSSGNSRHQGPITKTGNKHVRRVLVESAWTYRFNPRVSRPIEVRQEGQPKAIRDIAWRAQVRLAYRFRKLNAGRKMMQNKCCVAVARELAAFMWDIARQVKIPG

SEQ ID NO: 60994 - protein, 404 aa, unidentified
MTSTCGIDWSERHHDVAIVDADALVVARARVTNDAAGFGQLIQLLAAHASEPTAIEIAIETDKGLLIAALRAAGFAVFAINPRAVARYRERYGQAGGKSDPGDAVVLANILRTDRHAHRRLPADTELARTIKVAARQHQEAIWARQQAIGRLRSLLQEFYPQALATFPNLTHRAAAVILRAAPTPQAAQRLTPRRVAALLQQAGRRNDPGLAERISTTLRAPALRQPTPVEHALGVAATGLIEIITAMSSAIHALERELAQQFDQHTQAEIITSMPGLGPVLGARVLGELGDDPDRFADARGIRSFAGTAPITRASGRSRVVSSRRVCNRRLGDACHWWAFAALTKSPGARAHYDRRRARGDTHNAALRHLANKLIGKLWHCLQHGLVYDETTAWTDQPVRAAA

SEQ ID NO: 60995 - protein, 344 aa, unidentified
MIMIGIDPHKATHTAVAVDDHEIVVAELTVRASASQADRLCRWADRFDDRRWAVEAANGLGYLVAQQLVAAGETVFDVPPMLASRVRILGTGQAQKNDPNDARSVAVAALRSERLLQVRADDHTRVIRLLVKRHRDIARLRNKHCTRLHALLVEFIAGGIRSEITVAKARDLLEQFHIGDPVAHHRVLIANELIAEIARLDVAMKASKRRVAAAVAASGTHLTCIHGVGPIVAAMIIAHTGDIARFPTRGHYASYNATAPIEASSGPKARHRLNPRGNRQLNWAIHTAAITQLRYDTPGRRFYDRKVAEGKTTKEALRALKRRLSDVIYRHLAIDARRLEQQPR

SEQ ID NO: 60996 - protein, 486 aa, unidentified
MVSSLACLLSGGNGAPWVLFVSTRRENPLVTVNASPTRTTAVPGVVRVSVGIDAAITAKHHVSVRETSADGSVTMHRFVVPPTLTGLSQLSRRLARYPGVVAVAEPTSMTWLSLALSLSNGGGRLALVGTRHSARLRGAISGKNKSDVIDADVLARADEVFDLPPLVLPSPAELALRRAVTRRASAVIDANRCWRRLVSLARWAFPDVWIAFAGSLATAKAVLGRWPHLDQLACARRASLTAVVAEHTRSVADVPDRVEQIRSAARDWAQFWAGRLDLDALAWEVSEHLADLAAGNDRVDRAAEQATMYWERLYGDDALLVSLPGMGPVTAPAVRAFLGDGSRFDTAKAVANYVGITPSNWSSGTVNQPSRAITKEGPAALRLAFYLAGNAARRTDPQLAALYHRLMTRAGHCHSQATIAVARKLAERTWTVLTRGTPYRLQDPDGAPITSRAAKVLIAQQFTVPNDVRDRARAHTAATHRSKLTR

SEQ ID NO: 60997 - protein, 344 aa, unidentified
MVVQRTNVGLDVHARSVVACGLDRQTGEVFEQRLTPSHEEIAAWIRSLPGPAAAVYEAGPTGFGLARSLRAVGIDCEVAAPSKLMRPSGDRVKTDTRDARHLARLLMLGNVTAVAIPSREQEAARDLVRAREDCRGDLMSTRHRLSKLLLRQGIVYSGGKAWTGKHELWLRCQRFDDPALQLAYDTSFEAMLATIARRDRLDRAIEQMAADSEFTPVVSRLCCVRGVATLTAFGLAVEIGHWHRLTGRSIGAYLGLVPTEYSSGASRVQGGVTRTGNGHARRLLIEAAWHHRARYRPGATLRRRWDAASGHGHKFVGGHAACARVCSVSWRSRRWRKALRSSRL

SEQ ID NO: 60998 - protein, 363 aa, unidentified
MNEITTVGVDLAKEVIAVGAADRSGKSVFTRVFRREAFAAWAVQLPPCVFGLEACGAAHHWARWLASHGHTPHLMAAEFVRPFRKSRAAKNDRNDAEAVLTAVRQPNMRFVAVKSIEQQACLSWHRLRQGWSEERTALINRLRGLLGEFGVWRGRSAAVLIRALPVLENDEALPLMVRRLLTEARPHLARLDAAIARCEVEIKSHVKGNAVAQRLTAITGVGPLTAAATLATVTDARDFKNGRQFAAWQGLVPRQDSSGGHTRLGHITKRGDTYLRGLLTQGARSALQAALTKEPLRRTRLQAWIVQLHARVGYHKTLVAIANKHARMIWAILAKGEDYDPDAWRRWTRTAPSTPPAMCGVTP

SEQ ID NO: 60999 - protein, 354 aa, unidentified
MEKQYIGCDAHRRYSVFVVMDDKGQASKPVRVEHDRSELREYLRRLPAGSRVAIESTGGWYWLVDEIEAAGLKPQLANAYQAKQRMTGRNKTDKFDARGLAMELLTGTLPTVWIPPAELRDLRGLMRTRLALRSCSTQVKNRVSAALNRYGLKKPDEDGDLFTGRGRVHLNSHIQSLPEETREATLHEWILIDEIGEHIAALEKRIEQRIGQREDMRRLKTLPGVGRILGATLLLEIGDVNRFPSAPHLASYAGLVPTVHSSGGKTWHGKVPRSANLFLKWAFIEAANCIVVHQNKLKGRHVVNLYQRLKAAKGHGKAAVAVARHLAEASWWILTKQQSYREPNRAPIASSAHG

SEQ ID NO: 61000 - protein, 470 aa, unidentified
MPDNNRKESAAKKRQIEGLPVVRRNVAGIDLGSERHWACAPSVDGTAREIADFGATTPELIRLAEWLGARGVKSVAMESTGVYWIAPHEVLEGRGLEVLLVDTRQLARVPGRDKKTDPSDCEWIQRLHSCGLLRGSFRPAEQVCMLRTLERDKANLVAESGDWLRRMQKSLDQMNVRVHRAVSDIDGVTGMAILRAIAGGERDARQLAKLRDPRCRKSEEEIAEQLSGHWREDHLFTLRQALKMYDAIQQRIADYDQEILGRLAAMQREDFRDQPAPQVKNRKKAQAIKKRGEEPMREALFRMSGVDLTAIDAIGVQTVQVVLSEYGPDLSRFPSEKEFVSHATLAPRRPMSGGKPVRKKKRNSASTRVAAALRMAALSLRHSATALGAYYRRIARRVGADVAVFATARKLATLIYRALRWGQPYVDEGAEAYENRYQEIRMTALKAKAKELGYELLPSVQALVEGEVTG

SEQ ID NO: 61001 - protein, 351 aa, unidentified
MKTEQTALPKLFIGIDIHKRNWKVHCSTELFSGKSFSMSPSPKQLRSYVLKHFPDYEVVTAYEAGCCGYSAHRCFKSYGWCSLVVNPADIHRKGKERHTKTDRIDAQLISRELKDGRLDSIVVPDKHREELRSLFRRRNDLVKDIRRIKSYIKMQLLYFGIKVPQEFDNDHWSHNFRDWLDGLDFSFSTGKATLESRMRYFRFVDEELRLVSNQLRAYCRKHCKKDYYLLKSIPGIGGIIACGILCELGDLRRFNSIKHLAGYVGLAPDVHQSGDNYKTMSITRRAHRLIRSYFVEAAWQAIRADPVMQAYYRKHRGKNVKSIIIKVARKLLSRTLAVIKTNTPYTIGVIS

SEQ ID NO: 61002 - protein, 369 aa, unidentified
MFDYTKTVVGLDVHKESIVAAVLPPDSDRVALTTKFENTPVALKTFVERLRSRGALTFVYEAGPCGYQVHRDLTAQGQECVVIAPGLIPTRPGDKVKTDRRDAEKLAQLQRAGQLTAVNVPTRADEADRDLVRAREDVLSERLRARHRLGKFLLRHGLIWRETKAWGVKHRAWLKALRFELASQTRTFESYLRGLEEIEARMEGLDREVLALAENGTWNKLVANLRCLKGVDTMSAVTLAVEIRDFRRFASAREFMGYTGLVSREYSSGESVKRTRITKVGNAHVRRVLVESAWSYRQADRTGKTLLERRVGGSAEAVATARRAQERLCRKFRKMLGRGKPTQKAVIAAARELAGFVWHIGRLSQEVRG

SEQ ID NO: 61003 - protein, 386 aa, unidentified
MPVETDLSRSLTTLEQDSTLIAVIELSQKSWLVAGLVPGLSRQPLKKLDPVPEKVVQVLERWRSEAVKAGRRIDRITVAFEAGRDGLWLARWLRVRGIEAHVIHAASVAVSREHRRAKTDRLDTVLLMRGFLGWLRGEPKHCQMVAVPTLEEEDARRPGRERDSLVRERTRLVNRMKSTLARFGVRGFNPKLRRAAEKLCGLRTPEGVGLPARTLAELGRDMARVALVREQLKEVERQRLQRLAAPQPTPEKTMVLLLAKVIGIGIETADLLVHEVFCRNLRDRRAVARYAGLTGSPDESGSRRREKGLARAGNARVRKAMIQLAWRFTSFQKGSALVQWFEARTLAGKGTRKPMIVAVARKLLIALWRYATTGVVPEGIALRRGA

SEQ ID NO: 61004 - protein, 316 aa, unidentified
MNNDTEIIVGIDISKNKLDIQIQEDGQYFTCGNDIIDIEKLVEKMCSIHPTLIVLEATGGYEKGVVSALVEAKLPVAMVTPSWVRYFAKSSGTLAKTDKIDARMLVRYGRANHPPVVIIRTELQERLSVLMARRSQVSLALISEKNHLSTVMYPDVKALIEASIENLEQQILQLEEMIAEIIDQNPKLKNNEKIICSVPGAGKITAAILLADLPELGTLDHKKIAALVGVAPFNRDSGYYRGKRRIKGGRQSIRKVLYMAAMTAMRWNPVIKDFYERLLARGKAKNVAIVACMHKLLTIMNAMVRAQTLWRPVFTS

SEQ ID NO: 61005 - protein, 343 aa, unidentified
MKHYAGLDVSVKETCVCIVDGTGTVCREIKVPSHPQDLLRVLQDPTWRLERIGLEAGPLSQWLFEGLADAGLPVVCIETRHTKAFLKAQLNKTDRNDARGIAQMMRVHLYRPVHVKTLASQKRRALLTARKLLQDKAIAIENDIRGLLRNFGLKVGIIGAVKFQDRIRELIADRPDLAEIIEPLLAARRALREHFVALHQKLLAVVRNDGVCRRLMTVPGVGPVVALAFVATLDSPARFRTSKAVGPALGLTPVQHQSGETNRVGRISLCGDAMLRTLLVEAAQSMLMRVIKWSWLKAWAMNVARRRGGRRAVIALARRLAVVLHRIWTDGTEFRWTRDAQTA

SEQ ID NO: 61006 - protein, 395 aa, unidentified
MYSLFVGIDISKDSFSVAALDEKAKTVFSMNPLMNAEGFSDFLKMLSSHRKDFSTVVVALESTGPYHLNLYSFLLSKGITTIIVNPLIIANFNRLSLRKTKTDRKDAFTIARYLYLNRDSICKLTSSQVTTDLRDLARERESILKMVASMKNDIRRILQSTFPELEQAVDILCGTMLRFLKGFPSARLINQATCREVAEGFSQRGSGRRISMPYTRIIELAKSSVATTSPSKELILPGKIETLFHLTKRADEITKMLVELCKSIRQEEFSILTSIKGIAAKTAAPFLAELGDHQKFQSYKKMLAFSGLDPTTHQSGKFEGMSMISRRGNRHLRKVIYNMTFCVVRYSGPFRDYFFRRKQEGLPFKKAIMATAHKLVRAIFAMLKSGTCYRAAEVA

SEQ ID NO: 61007 - protein, 349 aa, unidentified
MKKCSTVSFEGQVIFIGIDVHKESWAVNLRHCHRELDKFSMNPSPETLAKHLRKNYPGAEYRSVYEAGFCGFWAHRRLCELGIQNIVINPADVPTSGKERDRKNDTVDSRKLARELENRTLEGIYVPPEDNLELRNLVRRETKLTGNITRVKNRIKGHVNFMGLKFGGWSGRSLKIMYADAEKRHDYALQSMLRELRFLREEKLHVIHDERQCLKRLRRDKIQGHLQSIPGVGFHTAVMLQAELWDLQRFENKDALSSYVGFAPRLVGSGAHEVLKSAGNRKKKQLHAILIQAAWRSVLHNLEMRARYGALLHKGANPQRAISIIAKKLLYALRAMWLQERDYVVSANE

SEQ ID NO: 61008 - protein, 305 aa, unidentified
MRNIGIDVAKLTLAVFVPECGGFEVNNSKDGFREILSKLNLDDVVGVESTGNYHHELAKFFLTKGIEVRELNPILTKQFIRATIRGRKTDKTDAEIIAKLLDNGEGHCMTLENIDNKLKKLFRARTKLVQKRASIKLQLQVVKPDMKIIVRSYKKLIKSFDIEVQKIEEEMNKFESKETEILESIPGISTKLARGILAEIGDIKRFDNKKKLVAFAGYDPKLTESGTSMHRTGKLTKRGSSHLRHALYLAAFANIRSKNVFADYYGKKKSEGKHHFKAITATSRKILEIIYALLQKGEKFRLDFS

SEQ ID NO: 61009 - protein, 358 aa, unidentified
MGEYIAFDSHKHYTWAEREDAETGVIRQGRVRHAPGAIRRYLAGCEAGTAVAVEATGNWYWIVGEIEQAGLRPRLVHPRKAKLMMGLINKTDKLDAHGLNRLQRNGTLPVVWIPPGELRDLRELTRTRLVLVRQRTRLKNRITATLAKYGVPPSEASDAYAKGARGELERRIGQLPPHARWVSEQLLAQVDFGGAQIGELEKRLRELVRMTPAMQWLQSLPGIGVILAATIALEIGEISRFPSAEHLASYAGTTPRVHASGGRVRYGRLRADVNQYLKWAFVEAANSVAVNQKACRERHVSQLYLRLRVRKGHSKAIGAVAHHLAEAAFHVLQGQKLYRDPAASGGGCARGGVSATVS

SEQ ID NO: 61010 - protein, 344 aa, unidentified
MKVTRVGFDIAKRVFQVHGVDEHEKVKAQKTLAREKVLEYFANLPPCLIGMEACGGAHYWGRELTKLGHTVKLMAAQFVIPYRKRGKNDANDAEAICEAVGRPNMHFVAIKSEEQQSVLMVHRARTLVVANRTAQVNQIRGLLGEFGLVVPKGVARLRRELPGILEDAENGLPALAREVLAGLLEQFRQFDTKVTAYDRQIRALAEASEPARRLMQVEAIGPQTATALVASMGDPQVFKSGRSYAASLGITPRQHSSGGIDRLGQITRQGDSYVRTLLVHGARAYLRVVDKKTDGKSAWARRLKERRHINVVAVALAAKHARIAWAMLAKGTEYRVVGAEEAAA

SEQ ID NO: 61011 - protein, 338 aa, unidentified
MPTDPTVLAYRLFVGVDIAAQTAMVATQRPGAKAGRSFTIEQTPEGYTSLLHQLQATGSVPGQVLVVMEATGSYWISLATRLVHEGFAVSVINPAQAHHFAKALLKRAKTDAIDAQTLAQLAMILQPEPWTPPPQIYYALQQRLAQRDDLLNLRQQVRNQLHALVQHPEVIAEVRARMESLLATFASQLTEVESEIAAALSQDSAWAAAATRLQSIKGVGWVTAAWTLVTTLNFTSCDPVDSLTAYAGLAPMPRQSGSSVWHRPSIGHTGNGRLRTAFYMATLSAAQHNPVIKAFYTRLREVGKPEKVARCAAARKLLHIAWAVVKKDQPFDPHYALG

SEQ ID NO: 61012 - protein, 357 aa, unidentified
MLALGDSALRKEADAMTFVGCDLHTRMQQVAVLDTGTGEVSERQLAHDGSAIEEFYAALPGPVTIGIESTGYAVWFHALMQRLGHTVLVGDAAKIRAMVVCKTKTDRRDALHILDLLRHDRFPTIWVPDPATRDLRALLTHRMRLVRIRTMVKNGLHAIALNYRLAGGSKLLRQAGLAQLQALALPPHTARRRDQSLELLAGLNTQIHELDDAITTAALAHPDAPRLITHPGVGALTALATVVVLGPVARFSDSKHVVSYVGLAPALNASADKYHLGHITKQGSTLLRFALGQAAAHAARMDADLKRTYFTLVHRRGRPKAKVAVARKLLVRLFIMLRDQIDYDEFRRRGRPAPASV

SEQ ID NO: 61013 - protein, 385 aa, unidentified
MQTPIDLNQSRIVLKQDNTLIAVIEMSLSSWLVAGIVPGVERQPLKKLAIDESALLKLLNRWREEAEKAGRKVERIAVAFEAGRDGFWLARWLRARGIEAHVIHASSVAVSREHRRAKTDRLDTELLKRAFLGWLRGERDHCKMVAIPTMEDEDTKRPNRERESLVGEQTRIVNRMKAALSRLGIRGFNPKLKKAAERLEDLRTPEDKPIPPNTLAELRRDMERRRLISDQIRQIEDARLERLERMPNEGPHAMVRLLARVIGVGIETADMLVQEVLSRTMRDRRAVARYAGLTGAPDESGAKRREKGLARSGNARVRRGMIQLAWRFLIFQKDSALAQWFRARTENARGTRKTMIVALARKLLIALWRLVTTGEVPPGVVLRAA

SEQ ID NO: 61014 - protein, 356 aa, unidentified
MPPITPEDATIKVVGGVDTHLDTHTAAVIDLVGRVLGTEQFPATMAGYTALLAWMREFGQLSQVGVEGTGAYGIGLARRLRDERVQVIEVDRPNRKTRRFQGKSDPIDAIAAAKAALAGERTGTPKQRDGRVEALRNLRVARRSAMDQRADTQRQIKTLIVTAPEELRARLRGLSVKQLITACANLRPDRADAAAPATAAKIALRSLARRHQQLSVEIADLDELLEPLVAAINPDLVAVAGVGTDVAGQLLVTAGENHQRITGETAFAMLCGVAPLPASSGKTRRHRLNRGGDRQANAALYRVVLCRLRWDPRTRAYAERRTKEGLSKKEIMRCLKRYIARELYQLISSNDLQITA

SEQ ID NO: 61015 - protein, 420 aa, unidentified
MTISNSIPADAVLVAIDIAKVRNEVLIEAPGDKRRRRLQVLNNRAEHDRLIEVLRAYGRPVICAFEATGNYHRPLAWRLAEAGFEVRLVSSLALARTREALHNSWDKNDPKDAQVMLHMLGIQATQRYHDPLRAGINDVQELSKTHEAIARAKTEIQHRILTHYLPLYFPEIDRFRGNSRSDWFFAFLDAFPTPASITMLTKEEFVKAAWDVVGRKVSKTQILMDIYETARTSIGLPLPLDAPAIRMFRMVVAEARSLIRQRNEIETQADELLRHSQDYQLLRQIPGIGPINALTIIAEAGDLRRFHHHRQFLKFCGLDLSTQQSGQYRGQTRLSKFGNARLRRTLWIAGQVAIRQRENGFRHKFERYIARDRDNPDLRRKAMTAITAKMARVVHAVVKGGSDYRPFVEGRVPGGRTSVS

SEQ ID NO: 61016 - protein, 335 aa, unidentified
MKTKFIHFAGIDVSKAKIDVCVIINTARSDLLHCIFEQTRKGFGELRKWLQKLIGKRTDQILICIENTGLYDDALLYFLTEQGYSVCLENAALIKKSIRDTRAKNDYLDARRIALYALRHCDEMELWEKPRQVIDKIKQLLAYRSNLVESLKRVKQAQKELEHFKWAKIKKTKTYAGGMKGLEKDIRQIEEDIWDLINNDKALLTMFTLLISIPAVGKITACHFICYTNEFKRVKSGKHLASYCGVVPFEQESGTFKKPARLSKQANKVLKRLIHLCAVTAIRLKGEFAQYYEKKIAEGKHVLQALNSIRNKLVLRIAAVIKNQKPYDEKYIYQP

SEQ ID NO: 61017 - protein, 354 aa, unidentified
MIIIGVDFHPEFQQIAWVDTDTGEFQEQRLQHREEAESFYRELAVRGVRVRVGMEASGHARWLERLLAELQFELWIGDAAEIRAKRVRKQKTDRQDAQLILKLMLKDDFPQIWVPSWENRDLRQLLWHRHRMVQARTRIMNQLQAVALNEGLRCKKRLWRERGRQQLESFRLAPWASRRRRDLLELLDRLSPTIAELTQAIEQEAEKCPEAQRLRTHPGVGALTALAFVLIIGEAQRFHCGKQIASYLGLVPLEDSSGNRRRLGHITKQGSSILRFLLVEAAQVTVRSIPEWRSKYFHLAMRRGRKIAKVAMARRLAIRLYWMWRKGWDYEQLTKFGSHAGQPGNRDGVPSNTE

SEQ ID NO: 61018 - protein, 360 aa, unidentified
MAKARTLVGLDVHATKIVAAVLDADSGELKCLTMSGETATAAAFCGALPAPVRVAYEAGPTGYGLAREFAKRGVECVVAAPSKIPRAAGERVKTDRRDAEHLVRLLAAGQLHPVRVPGAEEEALRDLVRARDTVRQDLMRCRHRLSKLLLRHGHRFDEGPTWTQRHRDWLAAVALEWPAAQATLLDAVGAIDALCHRREQLEREITAMLPSSAWATQIGRLRCLRGIDTLSAAGLCAEIGDFERFARAEQLMSYVGLVPSESTTGQQRRQGSITKTGSGHARRLLVEAAWHYRKHPKLGKALTERQDGQPAHATAVAWSAQKRLHRVWTRLEARAKRRTLIAVAVARELAGFCWAITQTE

SEQ ID NO: 61019 - protein, 360 aa, unidentified
MFTERTSVGLDVHARSVAAAAIDGVTGEVFRARLVPAPREVIGWIGALPGPAAAVYESGPTGFGLARELNAAGIRCQVAAASKLQRPAGDRVKTDARDALHLARLLRLDEIVAVRVPTQVEESARDLVRCREAARADLMRARHRLSKLLLRHGIVYSGGKAWTQAHDYWLLAQSFPLAGTQAAFDDAYQTVVLATARRDRLDIAITAMATDSQFTPVVNRLSCLRGISTLTAFSLAVEIGDWERFTGASIGAYLGLVPSEHSSGARRSQGPITKTGNTHARRLLVEAAWHHRKPYRPTAILRRRWAAAPPAVVARAQLGNHRLHQRWSAYAERAKRPVVANVAVARELAGWCWSLATLPQ

SEQ ID NO: 61020 - protein, 319 aa, unidentified
MRKSSIEFEQVIERGCGLDVHRDTVVATVMGKGIKTETRTFGTTTSSLKELGDWLESMRVTDGAMESTGIYWKPVLHILREYPINIMVVNARHIKNVPGRKTDKADSQWICKLLISGLLKGSFIPPENIQELRNLHRYKKKLIGTIASEKNRIIRILEDANIKLSSVVSDTSGVTANYLIKGLIEGRKDLDNLISECYHKKLQASPQQIKEAITGRLTAHHAFILKSMQKHIASLEAQIAEIDVEIEKYIKDFEKEIELLQTIPGVRKEGAIGIVAEIGVDMDVFPSEHHLASHSGMCPGNNQSAGKKKVQDHDKGTNI

SEQ ID NO: 61021 - protein, 388 aa, unidentified
MNVGADKSEPLTAIQTNLGAIFVSLELSRSSWLITSLSPGGGEKMSKHSVPGGDFAGLMERFAQLQEKARRRTGQSFRIIVVQEAGLDGFWIHRALQNEGIESYVVDAASIATPRRRRRAKTDKIDGETLVRALLAYKRGEPRVCAMVKVPTPSEEDRRHLCRERKALTAERVRHVNRIKGFLFSQGVSGYQPLRRDRRQRLEELQTGDGRAFPQHLKALINRELDRLELLLKQIKTVEAARDALLAVKQTAKPAPAAMLLDIKGIGPEFAAILWSEGLFRHFENRRQIAAYAGLAPTPWQSGAVDREQGVSKAGNPRLRTTLIQLAWLWLRNQPRSALSVWFHERVSRNGGRLRKTTIVALARKLLVALWKYVTAGVVIEGVTMKVA

SEQ ID NO: 61022 - protein, 475 aa, unidentified
MNLNGTKKKNQVSNANIFEQQELLKKIEVVRENLTASTWHELETKGKFDKNAKLSFICDDMLILGCDVGSETHYLRAIDTRGRELSKSAFSFSNNADGFSKAKEWAVKIAAEYDKKQIVLGLEPTGHYWFCLATWMISNGISVVQVNPYAVKQTKELEDNSQLKDDTKDPKLIANLVKDGNFGMPYLPEQLYADLRRLSMFRDQLNEDRIRSINRLHRELKIYFPEYKEALGKTEGTFSLELLKQAPFPDDLAALKEDGIRQIWHNAKLRGRGYSRAGEILEYAKASVGIREGKETGKLVVQWFVQKILELDEELALIETQINQKCLEIPHTDKVLEICGIGENTLSGMVAEMGDISRFDDVKEIQKLSGLGLVASSSGKHKGETRISHRGRKRLRYWLFQAAKSAVAHAEEFKKLHVYYTTREQNPLKKMQSLIAIACKLLRIIFTILKKGIKYDPRKMLKDIRRESRQESLAA

SEQ ID NO: 61023 - protein, 347 aa, unidentified
MYPFYLGIDLHLKRSYMVLMNAEGEVIDKRRLKNTEMASYISKNIPKETYAVMEATRNWPFFYDLLEKHVERVELAHAKGVRMIAEAAVKTDQIDASVLAHLARLNFLPIAYAAPKEIRDLRQHLRYREWLIDERRRAKNRIHAVLAGYNLASPVTDLFGRSGREWLKETVEKELRPISQKVVLETLSLIDQLDAQIKELGKDIPLPEDLKSQAELLMSMPGIGKLLSAVILAEIGDINRFNSPKALCNWAGLTPRVHKSDTVVRHGRISKQGSRYLRTAMVCAAMTACRISPRWYRVYENLARRIGRRGAKVAVGRRLLTVVYYMLKRNQPYEEDYEQRRTAEQGA

SEQ ID NO: 61024 - protein, 333 aa, unidentified
MTKKQVIVAIGIDVSKETLAVCERYEKKKRFYDLKNDRREIEKWTKKLKRSGYQGKIVMESTGRHHLPLAVALKNKDLDVRVINPLLSKKYASSSVHKVKTDKRDSEMLSQVALCEERLPETFHLEKREILLKKKISLVAMMDKELQKMKASVKEFNATAQELGFELTVCDREIMEAIKTLGKKKEELEKEIEMIMEENQSEEVERYSTIPGVSLYGATVFTLFFSTEHNLSPRQWISFSGLDISVRESGHWKGKGKLTKRGNCYLRKRLYQAAWGAIMHDDSFKSYYDLLRKEGRKYVEALTVIARKLVTIMFNLSLSKQAFDPSKLLFRTE

SEQ ID NO: 61025 - protein, 420 aa, unidentified
MKDWKEITHYAGFDWAREHHVVVIVDRAGETVADFEFEHSLEGWKSFGEKTAAWPNLAVAIETNQGAAVDQLLQRDYTVYPVNPVAAESYRKRKAPSGNKTDHVDGWGLADALRVDGQGWKALQPLDPLTQKLRLLCHDEVSLIQQRTLLVNQLQQALVEYYPAALEAFDDWTDSFTWAFVIEFPTPQGLVKAGKRRWEKFLHTHKLWRPQTSERRLGIFAQADQFKASDAIVEAKSQLAVSLCKLLRTLDQQLKQYRHQIEKLFKEHPDHDLFGSLPGAKKVLAPRLLAAIGNDPERYGSHQVLQAFAGTAPVNYQSGQVKKTKIRWACDKFLRHTVHLWSDCFRKASAWGQTYYGKKRAEGMSHACALRCLGQRLLKIVFRMLTDKKPYDAELHALNQKKHGSWVLTLVEKPTAKAGE

SEQ ID NO: 61026 - protein, 343 aa, unidentified
MQTITTIGLDIAKSVFQVHGVDAEGNVVIRRQLKRRYVLAFFQKLPPCLIGIEACASSHHWSRELQALGHTVRLMPPAYVKPYVKRHKNDSTDAEAICEAVTRPNMRFVATKAPEQQSCLTLHRTRHLFIRQQTSVINAIRAHLAEFGIVAPVGRNGVEQLLAVAADLNDKRLPEVARACVVALGAQLRMLKAQILEFDRMIRAWHRSSEMSMRLDDCPGVGPALATALVATVADPKAFRSGRNFSAWIGIVPKQHSSGGKDRLGSISKRGDRYLRGLFVAGALAVIRYAKIHGTKYRPWLTALLARRPTKVAAIALANKIARMAWAMMAKGERYKEPVALAA

SEQ ID NO: 61027 - protein, 316 aa, unidentified
MYLGIDVSKKTIDCCLIKEDSKRQKQFKNEQGGFEQLKQWLDDNHATSELECCCEATGTYYKQLALYLKNYYKISVENPRKIKGYAISELQRAKTDKQDAKLIAMYCQEKSHRLREWQPPEKDQQELEELTKYLDYLTRQRATEKNKLHESPEYITAHIKTTIDNLTVQIKAVKQQIKQFYKQHPEYGQHRKRLMTITGIGETAASVLLSTYKKHEFKTSKQFVAFIGLDPKPHESGTSVKGKSRISKIGKADTRKALFMPALVAYRSNAFPTLINRLKSKNKPLKVILVALMRKLAVIVFTLLENGEDFDKTRYA

SEQ ID NO: 61028 - protein, 400 aa, unidentified
MEVLHPRCAGLDVHKDIVVAAVRCVSEPKHQEVRSFPTTTAGLLALSSWVASHDCSHVAMEATGVYWKPVWHVLEGSFELVLANAQHIRNVPGRKTDVADATWIADLLAHGLIRASFVPPAPIQELRDLTRTRKQLVREVSQHTLRLQKVLEDANLKVASVLSNIVGRSGRAMLDALIAGETDPERLADLAQGTARKKRPQLVEALRGRITPHHRAMLKLHLQVIDALQAALREVDASVGKALEPIRLSAKLLTTMPGVSDIVANVVVSEIGTDMSRFPDAGHLVSWAGLCPRNDESAGKRRSTRVRNGAPWLKTTVRTKDTYLRAQFLRIKARRGAKKAILAVAASMLAACFFMLRDGVEYRDLGPDHFARHDKAKTIGRLVRRLQDLGCEVELKGHAA

SEQ ID NO: 61029 - protein, 460 aa, unidentified
MNRKKSKSKVDRTMPMVHPNAAAIDVGATMHMAAVGADCALEPVRSFGTFTADLDQLVEWLVECGVETVVMESTSVYWIPIFELLDARGFAVFLVNARDAKHVPGRKTDVSDAQWLQRLHSFGLLRASFRPKGQIAELRAYVRQRERLLEYAASHIQHMQKALTEMNLQLHHVVADITGATGLRIIRAILAGDRDPEALACLRHYSCHSSVETIAKALTGSYRAEHLFALDQALALYDAYHEKASACDVRIEAVLKELIIHRGRDHGSAPPASRRRNRTDQANALAFDVRAALFALLGKDITTIDGLGPYLSLKLIAECGDDLSSWPSAKHFTSWLGLAPSNKISGGKMLSSRTRRSGGRAAALLRLAAVTVGRTDTALGAFYRRLSSRIGKAKAVTATARKVAVLFYNAVRHGMEYVDPGASYYETRYRARVVDNLHRRAKAFGFVLRPVEPKAGAAVS

SEQ ID NO: 61030 - protein, 424 aa, unidentified
MGEEFRFFVGIDWGSETHQVCVVDAEGAKVLERPVTHDGEAITELVDRVLALGNSKPEAFAVAMEAPRGTMVEVFLDRGAAVFSINPKQVDRFRDRYTIGGAKDDRLDAYVLADSLRTDRPLYRRLALDDAAIVELRGLVRARGEVQEDVLRLGSRLREQLHRYYPQILELGSVYEDAWLWEVFELAPTPEQARHLQRAKVGAVLGRHRIRRVNADEVVRTLKKKPVPVAPGVVEAGRRHASLVIDRLRLALEQRRECDRGLEALLAGLSSVESGGDEDSSGQKAHRDAEILLSLVGVGVVNGATMLAEANRLLRDRDYQSMRVLTGTAPVRRQTGKQGKKGRPAPVHMRRACNPRLRDAVHHWANVATQHDPRAKQHYARLRAKGHSHGRALRGVADRLLAMLFAMLKRGELYDEARRVPAAA

SEQ ID NO: 61031 - protein, 347 aa, unidentified
MLIIGCDFHPGFQQVAIFDNRTGEIQEKQLQHRTEAEQFYGALAGQQVLVGMEACGHYPWFERLLAELGIELWFGDAARVRASVVRKQKTDRRDAEHLLDLLRQDRFPRIWVPSLEVRDVRQLLVHRHKQVQARTRTKNQLQAMALSCGVQKKYKLWTKAGRAELEQLPLLPYAAQRRKRLLEALDGLEAEIVELDRRVQDEAGQRPEAVRLMTHPGVGPVTALAMVLTLGPAERFESGKQVGSYFGLIPSEDSSGGKQRLGRISKQGSSFLRFLLVEAGQTAARYDPQLKRFYRRLAVRKNRGVAKVAVARKLATRLYLMLREEWTYAQLCQAVMQVSPSHSVAGE

SEQ ID NO: 61032 - protein, 391 aa, unidentified
MNYFLGVDIAKTNHVASLINNTGDVVLRAIKFTNSNDGFNKLLTTIQNKLGDLSNIEVAMKATGHYWLSLYSALTDNGFNVSVYNPYQIKSYRGVYNNRKQKNNVIDSILIADYLRVFGSSKSKLPQEDILSLKQLTRFRTNIVDNVFSLKTQAIALLDKVFPEYKKLFCDTFGTTSKQLLLNCPTPDDILKISTTKLANLLSKHSKGRFNKDTASHLKEVAKSSFGIKFTTDACSFEIKQLINQIIFLENQIDEVSKEIKDLYNKLDSHLLSVPGVGVNLAPIILSEIGDIHNFDKPSKLIAFAGTDPSENQSGNKASSNEKTSKRGSPYLRHAIYTASLVAISNEPELRAYYDKKISEGKHHFVALAGISRKLLTITVYSTNYSIIYTF

SEQ ID NO: 61033 - protein, 350 aa, unidentified
MLIIGCDYHPGFQQIAYVDSETGEFQERRLKHPEEAEKFYRTLWEQGVKVHVGMEASGHARWFERLLEELSFELWTGDAAKIRAKRVRKKKTDREDARHILELLLENRFPKIWVATWQNRDLRQLLWHRHRMVQTRTRIMNQLQAVAINEGVRYKKRLWREAGRKQLESLPLAPWASRRRKDLLEVLDRINPTIAELTRSIEEEAEKCPPARRLMTHPGVGALTAVAFVLIIGEAHRFDCGKQIAAYLGLVPEEDSSGERRRLGHISKQGNSLLRFLLVEAAQATARCDQRWRNQFFHLAQRRGRKIAKVAMARRLAVRLYWMWRREWNYEQLQSFGSHVGQPGHLHGVQ

SEQ ID NO: 61034 - protein, 409 aa, unidentified
MERAFERVCGLDVHKATIAACVRVPDGAGRRLQSVQTFGTTTTDLLALRDWLGTHAVTHVAMESTGVYWKPVYYVLEEHVTCLLVNAAHVKQVPGRKTDVQDCAWLAQLLEHGLLRGSFVPPAPIRELRDLTRYRKSLIQERAREANRVHKLLEDAGIKLATVARDVLGMSGRAMLEALVHGTTDPTVLAELARGRMRAKLPALRQALAGQFRPHHAFLATQILGHLDHLEATVATLSERIETLLAPFADAVQRLDTIPGVNQRTAEVLIAEIGADMSRFPSDRHLASWAGLCPGNHESAGKHKSGKTRKGNIWLRGALIEAALGATRTKHSAVAARYRRVLRHRGHKKAIVAVAHNLLVAAYHVLAHHTTYLELGADYYDRRHTQRVTRRAVQTLEQQGYRVTLEPAA

SEQ ID NO: 61035 - protein, 280 aa, unidentified
MQSYYVGLDVHSRESVFVVENEAGAIVARGSVPTTVNGLKHLRDSCSLPATTGIALETGTSAFFVARELARLELKPVVIDAHEVRRKAQRPEQKSDTRDALELCEGLRRGFYRSIVHVPSPAISDLRTTLSGRRHFIRIQTAEVNAVKRLLRGVGRNSGRRGSLRTDAHWQSLLAGDLVPEQLQEHVRHHYAVWRQAAERVRALDLSLGDSARERRDAVKRLETVPGVGPIVALTAIAVFAEVGRFESAKHAASYAGLVPSTFQSGERDAHGHITKRGSA

SEQ ID NO: 61036 - protein, 340 aa, unidentified
MNKSTTIGIDLAKTVFFVVVLDQRGKQARRKKLRRSELLPFLANYPEAMIAMEACSGAHYWAREMESLGHVVELLPAQHIKGYLRGQKNDYNDAEAIAEAAQHGRIRTVAVKSVEQQLDQSLHRLRQALVAEQTRLVNRARALCAEHGLIMPEGKHRFRHSLVALLEDAENGLPWRLRELLGRQYQLFLGLEDELAWYEREIKKQAAENETCQRLMSIPGYGPIVSSAFYGWMGSGQQFRSGRDVAAALGLVPKQYSTGGRAVLGGISKRGDKHLRALLVHGARAVARYAKRHDDRLSRWVCNLIERRGYNKAVVALANKLARIGWAVVTKEQAYAAIPV

SEQ ID NO: 61037 - protein, 348 aa, unidentified
MRFYHREHMYYCGVDLHARTMYIWILNQTGETVFHHNIRSCPEAFLKVIEPFREDICVAAECTFTWYWLADLCAEENIHFVLGHALYMKAINGAKTKSDKLDAEKIARILRGGTFPIAYVYPRKMRSTRDILRRRMHLTNKRSELLVHIENTNSQYNLDKFPKKLTYKSNREGVASRFEDSSACKTIEVDLHLLDCYDKLLRDLELYIVRTARCHDADTLHLLKTVPGIGKILSLVLLYEIHDINRFPSVQDFASYSRLIKPPRESAGKKYGSSNTKIGNVHLKWAFSEIACLFLKGNDRGQKHHNRLVSKHGKSKALSILSHELGRSIYFMLKRREPFDMDKFFNQR

SEQ ID NO: 61038 - protein, 414 aa, unidentified
MEPVYRCVAAIDVHKKMLAVVTRRQSGEHIEYRKRKFGTTRSEIEHLSAWLQSEGVSDVVMESTAQYWRPVWYGLEPHFRLHLTHPLKTRAPRGRKWDFRDAQRLGDRWCSGDLEKSFIPGAEQRSWRWLTRTRVDLKNKISVVRNQVEGLLEQGGIKLTAVASDVFGVSGWAMLEQIAQGVTDVDVLVGLARGALRRKEAQLKEALAGRLEPVYRLLLKQYMDQVRLLRQQVEEINQVLAEAMKDHLPVLHRLNQMPGVDLYAAQELLSEIGPGATAFASAEQFASWVGVCPGNQESAGVCSNHRSAKGNRYLRRLLCQIAWAAVHTKETFFAGLFARLKPRIEGKGAVWAVAHRIAKVIWLVLHNHVDYQEKGSAPPNERTLVRKFKRMLKEFGRLGLDVRALLDQQLSTTT

SEQ ID NO: 61039 - protein, 370 aa, unidentified
MQFIGVDLHTNKFTCCYRDGEGPLDGKGRKSTETFELTAQGVAQFSRTLTPQTYVLVEATITTFCFVRLIQPLVKEVVVANTYELKQISLARKNTDKVDADILCRIMKMQVLSGEKAVSAVSIPPVEIQELRGLFTDYRLFKKQTTQMKNRIHSVLKEKLYGFTQEEIFDQKSRKMLREMKDDPVLAFKLDLLFTQLEHLEMLIESLQDKIKEQAEPFMREIEILTSMKGVSVFIAIAIIADIIKVDRFKDSKSFTSYLRSAPRVANSNTTVSIRGTNKKGRKMSATLLSQSLNHVLDASPKLNRWYTRLTKHKKAGLVRTGLRRRVFAEIYQMLKKGEYHYGREAQKHEAKMLQYRNFLKKRKNSIKTA

SEQ ID NO: 61040 - protein, 369 aa, unidentified
MKKHKHYVGLDVHKDTIVVAIAEAGRGGEVRSYGTISNTLYAFERLIAKIGGESVELHMAYEAGPTGFVLYRWMMKRGIDCIVVAPSRIPQIAGPRQKTDHRDAVQLARLHRAGELTAIHVPDETDEAIRDLTRARLDAVTDRTRARNRLKGFLLRHGYRYSGTANWSEAHMRYLRDLELPSPIHKSVLEEYLLTIDQAVERVDRLEALIEVKAPQWRFYPAVQALMCLRGFQLTGATVLLAELGDVKRFCHPRQLMGFLGLVPRENTTGQARRLGSITKTGNVQARWILIEASHHAFHPPRVSAPLALRQSGQPEPYKALSWKAQSRLHKRGWHLLKRGLMKQKVVTALARELAGFVWALLSQVPSPA

SEQ ID NO: 61041 - protein, 317 aa, unidentified
MDAQDVFAGIDVSKENLEVCIRPQEERMCFAQSEDGWALMSQFLQSFSPRLVVLEATGGLERGAVATLAAQGLPVVVVNPRQVRHFAISKGILAKTDKIDARVIAQFAESIRPEIRPLKDLEAQELDSLATRRRQIVQMLAAEKNRLQSAAGWARGDIRMHIEWLEKRLEKIEKDMDRMIQKSPVWRVKGEILCSMKGVGPGLCRAVVSDLPELGTLKRQKISALVGVAPLNRDSGKFRGRRTTWGGRADIRSVLYMATVAAIRWNPIIRAFYERLLKAGKPPKVAIVACMRKLLTILNAMVRDQTPWQPPVAQKTV

SEQ ID NO: 61042 - protein, 318 aa, unidentified
MNVIGLDVSKDTIDATLITTKGSKDYIKISNSIDGFENLINWIKTKRIRKIAISMEATGIYYEQAAEYLSALYTVYVINPLKIKEYAKSQFSHTKTDKADSELIAEFTNRHLDKLTPFRPSENPILYKLVNLLQQLKEQQKETQNRLHTAKDIYIKSTHEAIIELLEEKIDQTSKRIEGMIKQKESLNIEYQNLQTIPAIGKETAVILLRHLTDKNFETANKFVAFAGLSPKIEQSGTSVNKKGRLSRYGHRQLKRALFMPALVAYRMNAFPQLVRNLEAAKKPKMIIIVALMRKLAKIAFYIHKTKKPFDKARHQTV

SEQ ID NO: 61043 - protein, 400 aa, unidentified
MISVGIDVSKEKSTVCILKPYGEIVSRPFEVSHVEKELSELATMLLRLDDEVRVIMEATGIYHLPVLSYLKEKGFFVAVINPFEMKEYRCQGLRRVKTDKQDAITISNYGIDHWYRLKDCEAEESVYGELKLLGRQYRHYMRMRVESVLELTHLLDYTMPGIKKLLKGWNETNGKDKLSDFAEEYWHYDNITRQSEEEFVDSYLEWAERKGYHRCQDKAIKIYALAKEGIPTVSSSTPSTKMLVQEAVRVLREVDNTLMTILTQMQTLAKSLPEYPVVRAMGGVGNVLAPKLIAEIGDVRRFHSGKALIAHAGIDAPPYQSGQFTGTERKISKRGSSSLRKIGYEVMRCLKTHKAPKDASVYEFILKKEKEGKSKRAAKIAGLNKFLRIYYARVMEVYQQ

SEQ ID NO: 61044 - protein, 342 aa, unidentified
MEVTTIGLDIAKSVFQVHGVDASGETVVRRQLRRGQVLRFFEKQPGCLVGIEACATAHHWGREITALGHQVRLMAPRYVKPYVKRGKNDAADAEAICEAVTRPTMRFVEIKTAEQQSVLMLHRTRQLFVRQRTTLINSLRAHLAELGIVAGVGRNGVERLLKVIDDGDDDRVPPAARQCLMALRHQLALVKQQILDADRRVLAWHRSSELSQRLDDIPGVGPLIATALVASVPDPHAFKSGRDLAAWIGLVPKQNSTGGKERLGHISKAGNRYLRMLLVVGALSVIRRAKQMGYTRRPWLAELMARRSTKVAAIALANKMARTAWAMMAHGTRYREPAPRAA

SEQ ID NO: 61045 - protein, 355 aa, unidentified
MDNRKYIGMDVHQATIVVAVRDTTGKLVMESILETKAATVLDFIRGLTGSLSVTLEEGTSAAWLYQLLQPHVAEVIVCDPRKNALLKVGNKNDRVDARKLSDLLRTGMLSPVYHGECGVRTLRELARSYLTLTKDLTRVMNRLKGLYRSWAIPCAGKKVYSRRNRSAWLEKLQPGGVRRRAEQLYQQLDSLMQIRGQARREMLAESRKHAASQWLGGIPRLGPIRVALLIALLQTPHRFRTKRQFWAYSGLALQTRISAEYRFQQGQLQTSKRLPAIRGLNANHNPDLKNVFKSAATHAGRGSDAWSDFYQNLLGGGMKPALARLTLARKMAAVVLKIWKKGERFDPEQLKPQSA

SEQ ID NO: 61046 - protein, 416 aa, unidentified
MSAIEWWVGFDWASKKHRACVLDGRGQVIGERDVDHAGEGLAAFCDWLIKQTASVPERIAVAIETPHGPVVETLLERGFAVYALNPKQLDRFRDRFTVAGAKDDSRDARVLADSLRTDTAAFRRLAVEDPLIIQLREWTRLREDLIQECNRLTNRLREQLWRYYPQALELTDDLGAAWFLALWQQAPTPAHAARLRPSSVQKLLQAHRIRRLDAAEVLGILRRKPLAVAPGAAEAARAHIRTLLPRLQLVNQQLHSAERQLDELCGQIQQQTESEPGQLLEQRDVAILRSCPGNGRIVLATLLAEAAEPLRCRDYHALRSLCGVAPVTRRSGKSCRVLRRHACNERLRNAAYHWARTAIQYDPVSRRRYRELRLHGHSHGRALRTIADRLLYVLCTLLQRQTLFDRHHVSPCPQAA

SEQ ID NO: 61047 - protein, 356 aa, unidentified
MGTLYLGVDLHVRTQMVCWMNTGDGELHQRELDHQHDDVRGFYTQLPRPAIVGVESCGYAVWFHRLVEETGHELRVGDARQIRQFAKRRQKNDRRDAALLLELLVKGDFPAVHRPSGKSREVLLLLRGRQRLVRMRTTLKNGLQAIALAHQLRLGFRLWTQKGQRQFAALALPEADGLQRLQMQSVLRTVEEQLAAAEQELERRAAGDARVERLRTHPGVGLLTALAVVHTLEPVERFQRAKEIAAYCGLDPMEHSSGETVRYGHISKQGNRLLRHTLVEAAMSAARCEEELGRFYRKLRGKRKAHGVAIVAVARKLVLRLYRMLRERKDYEEFRRQGRDAEVPGLPGVRREEQPH

SEQ ID NO: 61048 - protein, 343 aa, unidentified
MQTVSTIGLDIAKSVFQVHGVDANGLVVVRRQLKRRYVLAFFEKLAPCLVGIEACASSHYWSRQLQALGHNVRLMPPAYVKPYVKRQKNDMADAEAICEAVTRANMRFVPTKTPEQQSGLVLHRTRHLFIRQQTSLINAIRGHLAEFGVTAPVGRKGIEELLRVIADPSDKRVPDVVRACLAALGSQLLSLKKQILDFDRMIMAWHRSNQTSKRLNCIPGVGPLLATALVASVADPKVFRSGRNFSAWIGLVPKQHSSGGRARLGSISKQGDRYLRGLFVAGALAVIRYAKLHGTKYRPWVAALLARRPTKVAAIALANKLARMAWAMMARGERYNYPAALRV

SEQ ID NO: 61049 - protein, 351 aa, unidentified
MKILSLDLGKNKTVGCEYERESGQHRFQTAFSTRSGLQQMVKEIKPDRVVIEVCSIAGWVCDFLREMGIEVQVANTSDDAWRWRKVRKKNDRLDALKAAQLSAVNQLREVHVPRIEVRQWRALITFRQHLVRRRTKVKNHIRDLLLREGEILPPRQKCWTQMGMARLEAMARPLSELGLNEMWRGELDIELRQLRAAQQEIEVVEEQLDAIAAADPRVQLLRTIPGVGPRLSEAIVALLDRPERFRKASEVSAYIGMVPKELDSGETQRRGRITRQGSRLVRTLLVEVAWTGLRHNAWVRETYQRIHGGKKSRKKIAIVAVGRRLLVRCWAMLRDGTAWQWPESAAGAGTK

SEQ ID NO: 61050 - protein, 338 aa, unidentified
MRLYCGIDLHSNNSYPVVIDDRDLVIYQRRLQNNLELILQELSPYAEQLVGIAVESTFNWYWLVDGLMDAGYRVHLANPGAMQQYKGLKHADDRSDGRWLAHMLRMGALPEGYIYPREQRALRDLLRKRGRLVQQRTANLLSLKNLVHRNTGQRLAVRALRSMDFAELEPGQADPNRTLALEATRRVIECYDGEVQRLEQEILRQLKPDPLLPLLKTVAGVGEVLAPTIRLETGDIGRFASAGKYVSYCRSVGSQHLSNGKPKGKGNRKNGNPYLAWAYVEAAHFAIRYHGPVRRFYERKQARTHHVVALKAVAHKLARASYYVMRDQVPFEIGLAFG

SEQ ID NO: 61051 - protein, 388 aa, unidentified
MQVVADRAAAPTAIQTDLRAIFVSLELSRSTWLITSLSPGGGEKMSKHSVQAGDIAGLLRRFAQLKEKARARTGRDFPIITIQEAGLDGFWIHRVLQSEGIESHVVDPASIATSRRRRRAKTDKIDGETLVRTLLAYKRGEPRVCAMVKVPTPEEEDSRRLCRERKVLTAERVLHVNRIKGMLFCQGISGYEPLRRDRHERLEELRTGDGRPLPPHLKAQVNRELDRLELLLKQIKAVEAERDALLVAAHTPAAVPASMLLNIKGIGPEFAAVLWSEGLFRHFDNRRQVAAYAGLAPTPWQSGAVDREQGVSKAGNPRLRTTLIQLAWLWLRNQPHSALTLWFHERVNRNGGRLRKATIVALARKLLVALWKYVNAGVVIEGAAMTTA

SEQ ID NO: 61052 - protein, 329 aa, unidentified
MQHDAPNREIIIGIDTHKDTHVAVALNALGVRLGATIVPVNRVGYRCIDAWARSFGTVTAFGIEGTGSYGAGLARALREAGHVLVVNRPDRSTRRRNGKTDMLDAEAAARALLSGQASAEPKTGTSTVEMIRHIKIVRDAAVKAKTQAMQTLKSIIVLAPAELREQLEGIRGPITLVRHLASMRPSPLTSPLSSANTALRATARRWLALHQEIEGHDRDLDALVAATAPHLTTATGIANTTTAELLLLVGDNPERIRSEGAFAKLCGACPIPASSGRTNRHRLNRGGNRQANAALHRIVVTRMRLHQPTIDYVRRRTAKEGRSRRSCAA

SEQ ID NO: 61053 - protein, 428 aa, unidentified
MGAEQVAHGWAGIDVGKGHHWVCLIDEAGSTLWSSKVVNDEAAILDAIAEVLARAQQVSWAVDITGTSSALLLALLSAHGQAATYVPGRTVNQMSTAYAGEAKTDARDAYVIAETVRLRGDLTPVDVPATLVAELRLLVTHRTDLVADRVRMINRLRDVLSGYFPSLEREFDYATSRGAVVLLTGYQTPAAIRARGRARLTTWLRARKVRSAEQIATAAVKAANAQHTTVPGQDVAASIVAEIATALLELDQRIRVLDARIGDTFHAHPQAQIIESMPGIGTILGAELIAAAGDLSRYVDAGHLASAAGLVPVPRDSGRRTGNLHRPLRYSRKLRRVFYLSAQTSMMREGPNRDFYLKKRGQGHGHVQALIALARRRVDVLWALLRDNRVFELTPPTREKLPTPLDNIIENPPLGRPESIPRWAALSR

SEQ ID NO: 61054 - protein, 423 aa, unidentified
MDVIHESVAGLDVHKETVVACVRVADAGRVRRECQTFGTTTEQLLALLAWLQARQCGQVAMEATGVYWMPIWKVLSDGAFTLVVANAAHIKAVPGRKTDLNDAMWLADLVAFGLIRASFVPEEDVQELRTLMRTRKQIVREQIRHAQRIQKTLTEANIKLDSVVSDIMGVSGQRMIRALIEGVRNPAKLAALAHRGVKASPKQLYDALHGRLTDHHRFLLGLHLGQWESLEATLGAIDGEVEARLGRLDAGVKPGEATFSGLIGLLAGIPGVGTLAARTILSEIGRDMSRFPTAGHLVAWAGLCPGQNESAGRRKPSRLRKGAPWLKTMLVQCAWAAKRKKDSYHQAQFLRLRSRRGPQKAICAVAASILTATYHMLKNGTAHQDLGAGHFDKRSVASQAKHLVRKLAKLGYDVALQPTAKAA

SEQ ID NO: 61055 - protein, 397 aa, unidentified
MSFFVGIDWADTKHDICVLNAQGQIITEFIIPDDPSGYQRFQTYLQTLPSVKLLIERPNGRLVDFLLQNRWSVYVVPPSVSAASRPRRSKTDRADAYLLATLLKNNHPDCRPILRSSDLCDQLKQVVSAHDRLHRELQRLALQLRYQLKQYYPAILKVFRKPQQPLTYAFLKAFPDPQIFNQLPFADFQAFFVTQRYRYSERLESHWKIFQQEATLNRPTKGYQLATTATITLMTLIDQQLRQLKREMGLMLQQHPDAAWWQGFPAVGSLNAARLLAYVGDNRTVFADTDTLRARAGTVPITRRSGKRIAVHFRRDCSHPLRKAFYDLAMNSKKQSAWAKSYFQAQIARGHTRPRANRALANRWVGIVWKLWHTGAMYDETVHQANRQKGCAQQLAS

SEQ ID NO: 61056 - protein, 352 aa, unidentified
MNEKYVAMDVHKASVVIGVRDGEGKYIRESIVQTKATDLLEYVKGLSGTIHLTFEEGTQSAWLYDLLKPHVAECVVCNARKNKLLADGNKGDRIDVQKLSELLYLGSLRPVYHGDHGTRALKELAHCYESLVRDRTRVKNRLKAIYRGRGISCEGEAVYQAQKQEQWLARLAERGVRQRALSLYSQLASLNSQVAAVQGQMLAESRKHKAAAILRSVSTLGPISVAMIIATCDTPHRFRSKRQFWKYCGFAVVTKSSADHYFENGALRKRRKPALTRGLNQNYNRRLKRVFKSAATSGTQRGPFKPFYEQLLAKGIRPDLAKLTLARKIAAITLALWKKGERFDPKKLKVNS

SEQ ID NO: 61057 - protein, 483 aa, unidentified
MQAAGQHKKVKPAKAGVGGGEKRHSQLRNRKQRRELARKIEAKDISLEVKHPDAAGIDIGNEAHYVAVPPARDTDPVRRFGCVTAELKAMAGWLKQCGIRTVAMQSTGVYWIPVYDVLEEAGLEVFLVNARETKNLPGKKTDVQESQWLMQLHTYGLLRNSFRPGQEIRRMRNYWRQRNDWVQSAGRHMQRMQKTLTQMNVQLANVISDLSGVTGQAIIKAILAGERDGWKLAALRDGRIRASEEEIARSLEGNWQEDLLFVLKQEQEGYEFCQQQIAACDQRLEEYLKQRADRSEGAAAPDETRKHRRKKKRGNAPQFELREGLFRMTGVDLTRIDGIDVMTAMMVVSEAGWDMSKWQTERHFVSWLRLCPDNRISGDRVIGKGRLRTNNRLAGALKMAASSLRQSDTYLGAQFRRLRTRLGSPVGIKAMAAKLARLIYRMLRYGMEYVDRGAAFYEQQHQQRQIDSLKRKAEALGFKVIAA

SEQ ID NO: 61058 - protein, 391 aa, unidentified
MIYVGIDVAKDKHDCFITNSDGEVLFNVFTIANNLDGFNDLCQKIASVMEDVTKVKVGLEATGHYSYNLLGYLIDKGLPTYVINPLHTNLYRKSLSLRQTKTDKVDARTIASMLMSDVNLKSYSDTSYHNEELKSLTRYRFDKVKQRAKLKSSVSRLVCILFPELEKLVPTLHMASVYTMLSEFPDAKQVANAHLTRLTNLLSESSKGRYGKETAITFRNAARTSIGSNMPAKSLELKHTIKLIQELSSEIDEIENEIKLIMDEINSPILSIPGINYRMGAMIIAEIGDFNRFDSPDKILAYAGFSPSTYQSGQLDGAYSHMEKRGSRYLRYALYNAAKYVCNWDPTFAEYLAKKRAEGKHYNVAISHAVKKLIRVIYHLEKTNQQYIKAV

SEQ ID NO: 61059 - protein, 352 aa, unidentified
MARELNSVIAVIGIDIGKNSFHVVGLDERGAIVLRQKWSRGQVETRFANLPPCLIGMEACVGAHHLSRRLRALGHDARLMPAKYVRPYSKGQKNDFRDAEAIAEAVQRPTMKFVATKTADQLDLQALHRMRERLVRQRTGISNQIRAFLLERGVAVRQGLRFLRAELPGILATRSDALSPRMIHLIEDLAGDWRRLDERIEGLSGEINAIAGQDAGCERLMSVPGIGPIISSAMVAAVGAGDAFDKGRDFAAWLGLVPRQLSTGDRTILGKISKRGNRYLRVLFVQAAWVVLIRPKSWERYGLKPWIEAAKRRLHPNVLAIALANKLARIAWSVLARGRGFEARSITTAQPV

SEQ ID NO: 61060 - protein, 343 aa, unidentified
MKLSRVGIDLAKNVYQLHGVDRTGRTILKRRLKRHQWFKVLLEKTEPGCVIGMEACASAHHWGRELQSRSYTVKLIPPQFVKPYVKSNKSDAKDAEAICEAMSRPNMRFVTVKTVAQQDIQATHRIREELKVRRTAKGNQIRGLVAEYGLVAPKQLSSLRAAIPCWLEDAENGLTHYFRSLLHGLWDDLLMLDDRMCEMDKTIKRLAKDNEDCVRLQKLRGVGPMTSTAMVATVGDARQYRKSRQMAAGIGLTPRQNSSGDKHRLLGISKRGDVYLRTLMIHGARSVVTAAKNKDDPLSRWVTEIATRRHPNVAAVALANKNARMAWAILRNRTDYDPAFAMS

SEQ ID NO: 61061 - protein, 327 aa, unidentified
MYVCILNQAGETLLHRNMKTTPEAFLKAIAPYRPDIVVAVECLFTWYWLADLCADEEIPFVLGHALYMKAIHGGKAKNDKIDSHKIAVLLRGGMLPQAYVSPAEMRATRDLLRRRMHLAHKRGELLAHVQNTNSQYNLPALGKNIAYKANRDGVAERFADPAVQKSIEVALSLVSYYDELLRDVALTIVKTAKQHDANTLYRLQTVPGIGKILSLVLLYEIHHIDRFPRVQEFASYCRLVKCAKESNGKRSGTSGAKIGNAHLTWAFSEAAVLFLRENPAGQKFLARLEKKHDKGKALTILAHKLARAVYYMLKRKVAFDMKRFLND

SEQ ID NO: 61062 - protein, 347 aa, unidentified
MSEKILAIDLGHRTSKCGAEAVPGATVWRKRIPTTPAAVHDVIAESDPDVVVVEACSQAFWVHDVASAMGKECVVTAMNGPEFKWAAQRSKSDDADVDRLLSMRRMGRLQPVLVPAHDVREWRTAIRHRHALVRRQTRVRNRVRAVYRERAMALPEASSWTRAFLDELAKDARAFAKCGGELWRGVLHQELAQLTQLHKLILESERTLNRIGKAHPAVAELRRDGETGPRTAEALVAAIVDPLRFTRGKRVGCFAGLTPRRWQSGETDRQGRISGAGDGLLRAMLVEVSWRAIRRSDSWERRVFDQVSKGMKSRRKVAIVAVARKKLVRLWARWRDRELAQRAAAPS

SEQ ID NO: 61063 - protein, 381 aa, unidentified
MRTTYDKQHRADDRVLAVALELSKASWKVAMSDAQHNPRIKNADAQQPLERLEQVLTLIKDARARWTLPEDVRVVVLYESGQDGFWIQRALAARGIETLIIDPASLPVERKARRAKTDRLDARRLVEALLGWLRGEQQRFRVLRQPSVAQEDSRHWGREREQLQREMQQHRDRMVKLLVTQGCWEKLDRAFAQRLANGELRDWEGKPLGATLQARLQRELTRWQQARDQFRQLEQEQAERFSAQQQAQLTQLVQLRGVGPVSAQRLVLELFWRHFANARQLGACVGLVPQPYDSGTMRKDQGISKQGNRRVRALLVELAWMWLRYQPNSALSCWFASKVQGDSKRSRRVAIVALARRLLIALWRYLERGVPPEGSQLKAAA

SEQ ID NO: 61064 - protein, 368 aa, unidentified
MRYYAGLDISMKETAICVVDEEGKIVYEHIQVTDPEAIAKDLEKTKLNIVKVGLEIGSISRWLTLKLQDLGVNAIPIDTRLMNGILKITVNKTDENDARGIANAVRAGMYSEVHLRSDENVELSILLTTRQTLVEQRTKMMLTIRGHLKAVGVRPGPFSYKNAEERLSEYFESLAEPIRNSIKALLAMIEKLKGEIKTLEKLIDDKVKDNEDVQLLQTIDGVGPIVASAFVAAIDNPHRFKNCRAVPAYFGLTPRQYASGETQVMGRISKCGNAYVRSLLFEAANCILTRTTKWSKLRAWGLKIQRKHGYKKAAIAVARKLAIIMYRMLITKKSFIRGEPKPKKEKAPRASISMQSQMDGALAPAVNS

SEQ ID NO: 61065 - protein, 315 aa, unidentified
MYVGIDVAKTSLEIAEHSSGQQWSFSNDDSGISQAITHLQKLTPSLVVLEATGGIEVPVTAALAATGIPVVVVNPRQIRDFAKATGRLAKTDTLDARVMAHFAAAIHPTPRPIPDAQAQEFSAMLARRHQLVEMLTAEKNRLGTALKPVKTGIQDHISWLEQELDKINSELRRHIQQSPIWREKDNLLQSVPGVGPVLSVTLLTGLPELGILNRREIAALVGVAPLNRDSGNLKGKRTVWGGRAMVRATLYMGTLVATRYNPAIKIFYQRLCAAGKSKKVALTACMRKLLTILNAIIKNHTPWYYTNPKLIGPCH

SEQ ID NO: 61066 - protein, 392 aa, unidentified
MKFDYRSLEVFVGVDMAKQHHYALAVTTAGTEVFHRPVLNDQTASGKLIVDASKHGRVALVIDMPSSPAQLLLAVAREHDVPVAYVTGLQMRRAAELYAGQAKTDPRDAWVPTSLWRAGADVINQAGADAINQLVRARSPRVADRISTAVIKALEAQTVTLPGEDTWGEIIAGPVADLERIFEQRKQLRAQIEQVFLEHPLGQVLVTLCGFGPRTGARTLAEIGDPTRFKDGGRLAAYAGLAPVGRRSGKSINNAAASRRGNHRLKNAMFERHVPRRVRRHAARPEREGVLPTQTRRGKRPQRRRDLHRPPTLRPHPHHAHHQPGLPPPPIRKPGKSRLTKRQGHPHPTQDQHRELRRDRRATTCVVPVRVVRLVAMAGTLSTDETAIRARR

SEQ ID NO: 61067 - protein, 344 aa, unidentified
MEHFAGLDVSVKDTSVCIVDDTGKIIREVKAASEPEALLAALKSPAYHFKRIGLEAGPLSQWLFSALAEAELPVVCVETRHMQAVLKAQINKTDRNDARGIAQMMRTGLYRPVHVKTLRSQKLRMLLTHRQLLQAKAIAVENDLRGTLRNFGLKVGMVGKVKFEARIRELVENQPDLAVLVEPMLIVRRVLREQIVILHRRLLAIVRDDEVCRRLMTTPGVGPVVSLTYRATVDVPARFHKSKSVGVVFGLTCAKYQSGEIDRSGRISRCGDEMMRVMLYEAAQSMLRSKKWSWLKAWAMQIARRRGMKKAIVALARRLAVIMHRIWVDGTEFRWTREQAAAAA

SEQ ID NO: 61068 - protein, 409 aa, unidentified
MRYYLGVDWADQTHAVWVVDERGTKLTARTVPHTAEGLSAWGRELDEWRAHGIELWGAIERPEGRVVDFLLDHGVVVYPVNPKALDRARDRFRQSGAKDDPFDARVLADFLRTDHAHLRALHPSSAAAQELKLLTEDYHRQVRQQTRLVNQLTITLKAYYPRALEVAELTTALARQFLHAHPTPEAVTALTIRRWQRWARAHHLSETRTRELWDILQQPQLPVPPHVVRAKARLMRTLVAELATVVAAVREYREAIEDFFASQPTAQWVRTLPIGDQGITAPTLWARLGDAPERWESFRHLQAQAGAVPVTKRSGQQRVVHFRFACDTALRYVVDHVAFLSLRSCEWARAYYDQQRARGHSHRQALRALGAKWLKIIFVMWQRRASYDDQYHLASMARQQLRQPQKQIA

SEQ ID NO: 61069 - protein, 496 aa, unidentified
MGCCALEGGDAVSAIPIRNLMNCAAQPFRWRQQEELEMNPKRSKSRHGRKMPMVHPNAAAIDVGATMHMAAVRADRTPEPVRSFGTFTADLHRLVDWFTQCGVETVVMESTSVYWIPVFELLDARGFTVFLVNARDAKHVPGRKTDVSDAQWLQRLHSYGLLRASFRPKGQIAELRSYVRQRERLLEYAASHIQHMQKALTEMNLQLHHVVADITGATGLRIIRAILAGERDPQALAALRHYSCHSSAETIAKALTGSYRAEHLFALEQALALYTAYREKASACDVRIEAVLKELSIHRGRDHGAVPPPRRRHRTDQVNALAFDVRAALFALLGKDITAIDGLGAYLSLKLIAECGDDLSSWPSAKHFTSWLGLAPSNKVSGGKMLSSRTRRSGGRAAALLRLAAVAVGRTDTALGAFYRRLSSRIGKAKAVTATARKVAVLFYNAVRHGMEYVDPGASSYETRYRTRGVNNLHRRAKAFGFVLQPLEPKAGAAVS

SEQ ID NO: 61070 - protein, 360 aa, unidentified
MKVQRTSIGLDVHARSVVGCGLDGDTGEVFQRRLCPDHREVLEWVQGLPGPVAVTYEAGPTGFGLARALICAGVDCQVAAPSKLQRPSGDRVKTDARDAAHLARLLHLGQIVEVAIPSPAQEAARDLVRAREDCRGDLMGARHRISKLLLRQGIVYCGGQAWTGKHELWLRAQRFDAAGLQLAYDAAFDAMVCCVHRRDRLDEAIVGLAADSEFTPVVRRLGCLRGVSTLTAFGLAVEIGDWSRFSGRSIGAYLGLVPTEHSSGATRAQGELTKTGNTHARRLLVEAAWHHRAPYRPSRDLRRRWDSATSAARARGHAANHRLHTRWAGFDKRKKRPVVANAAIARELAGWCWSLAVLDG

SEQ ID NO: 61071 - protein, 415 aa, unidentified
MEQVYRRCCGVDVHKDSVVVCVLPAQGEEGRAVRKTYGTFRNDLIRLRVWLKQLKVTEAAMESTGVYWRPVWNVLENQGVRLLLVNPAQVKALQGRKSDGRDAQRIAEFLQDGRLDPSFVPPQEIRQLRLLLRHRTALLEQRNEVHNQIRDLFETASLKLSSVVSDLLGVTGRGIIEAMIRGEDSPEILSWKVRGSLRKKEKLVKESLKGYFQPFHRALLESLYKHYQFLTAEIENFQERVGRQMAPYSAQIELLATIPGVDRMVAWHLIAELGTDMTVFPDADHCASWAGLVPGENESAGQRKSTRCRKGNRVLRRVLTQSAWAASRCKTGYLPAFFRRLKARRGWGKAIIATAHKILLIVYNVLRDSAPYRELGDDYFDRLNPTRTANRLIRRLEALGLQVQIAPSQPPLSNA

SEQ ID NO: 61072 - protein, 281 aa, unidentified
MNNSRNKAEVILGVDTHMDTHVGVLLNAQGHQLGCLMVTTNTSGYERLVTWANSFGCLKRAGVEGTGTYGAGLASVLRKHGIEVFEVNRPDRSKRRLQGKSDPTYAESAARSVLSGSANAIAKTQSGAAEMMRVVSVARRSAVKAKTQAMNQLRSLLVSAPQDVRERLWKSKPADCAKGCARVRSLGTTELLHTLTTTLCLLAKRWLLLADEVEKLDAMLDALTHQHARRLREQFGVGPQTAAVLLSTAGDNPERLRNEASLAALCGVNPLPASSGKREFR

SEQ ID NO: 61073 - protein, 437 aa, unidentified
MADAEVTDQAAELVERVAAIDIAKASGMVCMRLPHPSREGRRTHEVWNVPASTIGILELGDRLVCQGVTRVVMEATGAYWKPFFFLLEARGLDCWLVNAREVKNVPGRPKTDKLDAVWLAKLTERGMLRPSFVPPKPVRQLRDLTRMRTVLIRERSRHKQRVEKILEDAQIKLSSVATDIFGVSGRSMIEALIAGERDPRALAEMARGCMVVKKAALAEALTGQFEDHHAFLCRTLLDSIDFLSGQIDALTVRTTQAVEELPCPDPSGGSRPGAGADLVAKLVTIPGVGVRTAQILLAELGPDMTVFPTADHLVSWAKFAPRTMQSGGKSTSGPTGKGNPWIKGAIGEAALSASRSNTFLGARYKRIVKRRGRKRALVAVGHSLLVVVWHLLNEPETPYTDLGSDYHQHLVDPTRRTRDLVRQLKALGHDVTLTSAA

SEQ ID NO: 61074 - protein, 344 aa, unidentified
MSQVCTIGLDIAKNKFQVHGEDARGKKIFNKQLRRNEVLSFFANLPVCLVGMEACGGSHYWARELIKSGHDVKLIPPRQVKPFVINNKTDAADARAICEVVRRPATRFVQVKTVEQQHLASLHRVRERLVGNRTALANQIRGFLQEAGIVIPQGIVNLRKALPTILSDNDERLCPASKIFFAEMQDELTFLDKKIENIETQINQLAKTNDVCERLMKIPGVGVLTATAVFAHMGEAKQFKNGRQFAACLGLTPKEYSSGGKQKLLGISKRGDTYIRKLLIQGARIICRWWNRKIAAKNEWRILWLQQVTQRRGKFVAAVAQANKTARIIWNILARGVEYNPICK

SEQ ID NO: 61075 - protein, 387 aa, unidentified
MPQPNDLSRSLVALNQNSTIIAVVEMSQSSWLVGGIVPGIERQPRKKLEPSPERLLALLYRWRDEAVRAGGNITRIALAFEAGRDGFWLARWLAARGVEAHVIHPSSVAVSRERRRAKTDRLDTELLKRGFLGWLRGERGHCSMVRVPTLAEEDAKRPNRERECLIKERTRLVNRMKGALARLGIRNFKPTLRNAAEHLAALYTPEGSPLPPNVAAELERDIARLGLVISQIKQVEAARRQRLEEQPESRPHAMVRLLARVVGIGIETADMLVNEVLSRPLRDRRAVARYAGLTGAPDESGAKRREQGLAKAGNARVRRGMIPLAWRFLRFQKDSALARWYQARTADRRAGTRKTMIVALARKLLIALWRFVTTGETLEGVVLRPAG

SEQ ID NO: 61076 - protein, 473 aa, unidentified
MACIHGVATRRNGKPGKCGAEAPLREIRLDVAGIDVGSRTNFVSCRPHGDGSPNVREFKTDTQSLNELADWLAAEGVRSVAMESTGVYWIALCQILMARGVEVNLVDARAVRGVPGRKTDVLDCQWLRQLHACGLLKGCFLPDDSTAALRSLQRMRQTLRRNQDDWLRRIQKQLDLMNVRVHRAVSDITGVTGMAIIRAILAGERDPLALARLRDRRCRKSQEGIARELTGDWREEHLANLEVAVGCHDHLAAQIAKVDRTLAGFLDRLRGEREAAGKPTCAAAPPHPAAAKGEAILKRGQEPVRQALAQTFGTDLTRIDGIGVEAAACAFMEMGPDIPSRFPAEDKFVAYLRLAPNLGISGGHPVRGKKARRRGSPPLKRILVTAAMALSNSDTPLGNYYRKTAFRKGAGVAAFATAAKIARRIYRALAFGVEHAVAGDELWRQADTTRRLARLARQAASLGLAIVPAPAPA

SEQ ID NO: 61077 - protein, 405 aa, unidentified
MDAISVGIDVSKGKSMVSAMRPLGEMVIKPYEVIHSEVELERLAYSLKELEGDLKVVMEATGGYHDPVAQVLHEVGLFVSVVNPKLIKGYGNNSLRKVKTDKADAKKIARYGLEYWDELREYTPIEAARVKLKAFSRQYNLYVKTKVSLKNNLISLLDQTFPGANTLFDSPTRKDGHQKWVDFVTIFWHASCISEMSEKTFIERYRKWCKRYGYHFSESKASDVYIESLGHIIMLPKNVNTKLLVTEAAKQLTAICETVEVFRSELLRLAEMLPEYPVVMGLFGVGDTIGPQLMAELGDVREFENRKQIVAFAGIDPGKNQSGKHDASSVPTSKRGSSPLRKTLFLAVRSYLLRSPADEPVYQFLARKRSEGKKYYVYMTAAANKFLRIYYARVKEYLETLNAEA

SEQ ID NO: 61078 - protein, 377 aa, unidentified
MKRVKFVGLDVHAETIAVAVAEQDGEVRSLGVIPNREESIRKLVKRLGAVEELRFCYEAGPTGYVVYWQLGALGAMCEVVAPTLVPMKSGDRVKTDRRDALKLARNYRAGELTPVWVPDAAHEALRDLVRAREAAKKDQLRAKHRLSKFLLRHGRRPPMGVKAWTLKYLAWIEREVHFLQPAQEATLLDYFQEVEHMAARMARLDLAIEEAVKLTPPKMRAVIEALQALRGIAQISAVTIVAELGEVSRFTRARQLMGYGGIVASEHSSGEKTRRGGITKTGNAHLRRVVVEAAWAYRHRPGVGGVLRKRQEVVSADVREIAWKAQHRLHTRYQKLTARGKNKGKVVTAVGRELLGFIWAIGVKVEALHKEPLRQAA

SEQ ID NO: 61079 - protein, 331 aa, unidentified
MNYSGIDLHSNNSVVTVIDEADRVVPEKRLPNDLTKILPFLTPWQSELTGVAVESTYNWYWLVDGLQAAGFVVHLANTTAIKKYDGLKHSGDETDARYLAHLLRLGILPPEARSVRDLARKRMQFVRSRTTHILAIENIAARQHGMRLSSAEVHRLTAEAIEQMGLPAEVALAMQANLAVIKTLSTQIKLVEERLEEKVQPRAEYALLKTVPGIGPILASVILLEVGSIERFASAGNFASYARCVDSQHMSNGKKKGEGNTKNGNKYLSWAFVEAANYALRFCVEAKRFCERKKAKTNSILARKALAHNLARARFHILKECKPFDMTRCFT

SEQ ID NO: 61080 - protein, 469 aa, unidentified
MAAEKKLWNRKERKELARQLQSANPGLEIVHPHAAGIDVGNQAHYVAVRPDRDPEPVRRFECFTADLYRLADWLKNCGVKTVAMQSTGVYWIPLYDILEERGFEVYLVNARHTKNLPGRKSDVQESQWLLKLHTYGLLNNSFQPSSEIRTLRTYWRQRTEHVAGAATCIQRMQKALTQMNLQLANVISDLSGLTGQRIVRAIIAGERDAQSLAGFRDPRVKASQEEIAKSLEGNWRPELIFLLQQEMAMYDTYQQRIAECDQQLHKHLASFADHAHQVRSQSAQGKAEGKKAKKPAAKNAPRFDLSSELERITGVDLTRIDGIDVMGSQTILSEIGLDMGRWKTEAHFASWLGLCPDNRTSGDKVLRRGTRHVVNRAALALRMAANSLLRSQSYLGAQYRRLRTKLGAPKAITAMAHRLARLVYRMLKYGQQFVDKGMEYYEQRYRNQQVQLLQKKAAKLGLQLVQAQT

SEQ ID NO: 61081 - protein, 343 aa, unidentified
MEYYVGLDVSLKQTSICVVNQTGSVVREGVVDSDPEAIAGFLRAQAPGAVRIGLETGPTATWLWTELKRLGLPVICIDARHAKAVLKMQINKSDRNDAVGIARIMQTGWFKEVRVKDLDSHAVRALLASRALLVKIKRDLENQVRGLLKNFGLVIGRAKFNVFAVRAEELIEGRPELVAAVRPLLDARQAIEQQVDDLDRKVQKLARHNAQVRRFMSVPGVGPVTALCFKATIDDPARFKRSRSVGAYVGLTTRRHASGELDWSGRISKCGDAMLRMYLFEAAGVLLTRVPKWSALKAWGTRLIKRIGLRKAKVAVARKLAVILHRMWIDGTEFSWSKKELAA

SEQ ID NO: 61082 - protein, 352 aa, unidentified
MDKGNRVDFTGQPIYIGMDVHKRNWSISIHTEHVEHKTFSQPPEVEKLVNYLHRTFPGATYHSVYEAGFSGFWIHDRLRAEGIQCMVVNPADVPTKDKERAGKADPVDCRKLARSLRNGDIKGIYVPSRVKVEDRNLVRTRQSMVRKQTRCKNQIKAILFFYGIVIPEDSHWSKRFINWIETIRMEKTSGDLALKAHLEELKHLRQIIATLNRAILALSRTEEYRFDVLLLKTVPGISTLTAMTLLTELCDISRFSSLDKLASYTGLTPVIRSSGETEHTVGITYRRNAILRAILVEASWVAVRKDPAMMMAFNKFALRMKKTNAIVHIARKLLNRIRYVLKNRQGYVPAVV

SEQ ID NO: 61083 - protein, 361 aa, unidentified
MDVVGVDVSTRSCSSSHLDGDGGIKQCLEFANDSSGWRVLEAALSPDSIVVLEAGTAAFPLHDYLKGKGHHVVTANPRRVRMIAASPSKTDRKDSLVLAQLYRLGYLPEAHIPSPEILRIRDLVRAAIDVGRELTRTKNRVHALLTRSGLRPEYRTARALFASEKRRRWLRSLRFGDHRDAVLQALLVQLEALEVQRRILHGEIAAIGTEVSEVDLLMSIKGVDTFLALVIHAEIGDVRRFLTADALCAYAGLVPRVRQSGDVVVHGRITKQGPSTLRWAVEMAARVAVRHDNPIGAKYRALRHRKKKAPVAKTAVAHKMLRMIHAMLTRGERCRWEDARATDVKVMKMRRRARARKVSAG

SEQ ID NO: 61084 - protein, 355 aa, unidentified
MTSSKYIGMDVHKESISIAVRNAAGKIAMESVIQTKASVILEFIDGLRGEVNVTFEEGTWSAWLYDLLKPHVTKLVVCDPRRNALLQEGNKNDRVDARKLAELLQNNQLRPVYHGDHGLRALKELVRSYLTINKDLSRVMTRVKAIYRSWGIPCSGTQVYSSSHRAEWLEKIREPGVRRRAEHYYQQLDALRLLRLEVRKDLLAESKKHHVWKRLRGVPSIGPIRAAVLLGIMQTAHRFRTKRQLWTYSGFGIEGRGSANHQVVNGQLQRKKKFIEIRGLNKNFNHHLKNLFNGAAVTASTKPGPFQEFYAALVAKGMRPEMARLTLARKIATIVLIVWKRGVCFDASHLKSQTA

SEQ ID NO: 61085 - protein, 356 aa, unidentified
MKNTKLNFSGQNIYVGIDVHKLSWDVTIIINGMKVKKLSMNPKPQELYNYLTKHYPQGEYYSVYEAGFSGFWSDRELRTLGINNIVVNPADVPTKSKERRTKTDRIDSGKLARELSVGHLDGIYIPEEKAEALRVLVRLRRQLVTDQTRQKNRIKSLLLFLGKRVPEEVEEKHWSKRYITALRNLSIKQPESKRALVELLDNLESLRNQIASVVKQLRVYVAKDKEVSKIITLLISIPGIGFVLAIILYSEIIDINRFGKLDELVTYVGLSPAVYSSGEKEINLGLSKQKNKYLRNFLIESSWVAVRRDPALQMAYGKLCRRMSGQRAIIRISKKLLSRIRCVWSNQQPYVFSVVK

SEQ ID NO: 61086 - protein, 406 aa, unidentified
MEVYTGIDWSENKHDVVFMNEAGAAFAQLTIQHTVEGFLELDEARKKLDVAPEGCLVCLETAHNLLIDFLWSRGYCHVYVIPPSVVKANRGRQGQSKARTDPSDAALIADILRTDRGRLQPWHPDSLLTRQMRAQVSWVRHLTRDVVRTSNRLRAALVRYYPAALHVFSHVRTQICLAFIRTYPTPQAAAALSFAEFEAFARAHGYPRPGVLRSNFARLQGPYPQPAPETVSVYQEEAVQLAALLLAEVQANKEAKHRLKTLFVQHPDAPIFASLPGAGDLLAPALLAKFGDDRQRFPTAASVQALAGTCPVTVSSGKRKSVRFRHACDRAFRDIVQKWAMCSISQSMWAAAYWQQTRPRCDSDSHAYRCLANRWLSIAWAIWQKREPYDESHHLQQRALRSKKRS

SEQ ID NO: 61087 - protein, 344 aa, unidentified
MDHFAGLDVSVKETSVCIVDDTGRIVREVKVASEPDALLAVLTNPAYHFKRIGLEAGPLSQWLFSALAEADLPVVCVETRHMQAVLKAQINKTDRNDARGIAQMMRVGLYRPVHVKTLRSQKLRMLLTHRKLLQSKAIAIENDLRGTLRNFGLKVGIVGKVKFEARIKELVENLPDLAALVEPLLIVRRVLREQIIILHRRLLAIVRDDEVCRRLMTTPGVGPVVALTYRATVDVPARFRRSKAVGAVFGLTCSKYQSGEIDRNGRISRCGDEMMRVMLYEAAQSMLRSKKWSWLKAWAMQIARRRGMKKAIVALARRLAVIMHRMWVDGTEFRWTREQAAAAA

SEQ ID NO: 61088 - protein, 369 aa, unidentified
MSTITLGVDLAKRVFSVCEMDAAGRVLRWHELRREAFAAWLGQQPAGAVVAMEACSGAHHWARRCLALGLQPKVIAAQFVGPFRKSRTTKNDRNDAEAIATAARQGNMRFVPVKSVEQQARLAWHRVREGYKAESLAIGNRLRGLLAEFGIVVATSDLALRRVPADLDAHDGLPGEFRELLRDLAAHWAKLRERIDACDARIDTHARQDARCIRLRSIVGIGPITADAVVATLGAATDFRNGRQLAAWLGLVPMQHSSGGRARLGTISCRGDAYLRTLLIQGARSSLQRAKAVATEKATPEKLWIRTLDRRMPFGKVLVAIANKHARQLWAMLAHDLDYDPDAHVKHPMARRLADQHTLTATACMNPHM

SEQ ID NO: 61089 - protein, 442 aa, unidentified
MPHATSSAPLEPDWAAFVGLDWGDEKHYWKLRDAHSQQSQEGVLQNTPEALDAWAAELNVRFGGRPIAVCLEQSRGAVVYQLSKYPHLILYPVHPTTSARFREAFYPSGAKSDPQDGDVLLDLVEHHRDRLRRLDPDTPETRLLQMLVEQRRAWVDEKTRHSNRLTGWLKIYFPQVLDWIDDIDSPLGCDLLDRWPTLEELQKSHPGTLHTFFVQHNCRSEKRMQDRIQAIYQATPAIRDTAMLEAGPAIVKQIVAVIRTLRANIDELDKRIASLVSTHPERALFEALPGVGPALLPRLIVAFGTKRERYTCADQLEAYSGIAPVTQQSGKSKWVHFRWACPKFLRQTLHEFAAHSIAKSVWARAFYDMQIAKGKGHHAAVRSLAFKWIRVLFACWKNHTPYDEQIYLRALQNNGSRLSQILATQLTWKTVGGFQKLCSENA

SEQ ID NO: 61090 - protein, 350 aa, unidentified
MLTYSSARDWWGSTAGLLTQLHGTDAKGKPILKKKISRKELPEFIAKLNPCNIYMEACGSSNYWGKKFEGFGHKVKLINPKYVKPFVKRNKNDANDAEGIAAAAMAPSMRFCDVKTETQQDMQSVHRIRSLLIQQRTALANQIRGLLAEYGTVITLGAASIRKKLPEILGDNPNNMSALILSCFLRLHENFKNLDKEIASYDEKIKALFKSNETCKRLETIPGIGVIGATILASVLGNGSLFKNGRHFAAFLGLVPKQHSSGGKERLLGISKGGDTYIRTTLIHGARSVLLWAKKKTDSKSMWLKQLKDRRGSNIAAVALANKIARTAWAITNDGSNYDANYKPKIFNAA

SEQ ID NO: 61091 - protein, 367 aa, unidentified
MKKVSTAATKQGRNISRQTLTIGLDLGDRNSWYCVLDEAGQIQLEQRVGTTAKAISEVFGALPRSRIALEIGTHSPWISRLLSELGHEVIVANARKVRLIGESRKKDDRLDAQTLARVARIDPQLLYPVKHRGAQAQADLMMIRARAGLVRARTGLVNTARGLAKSYGERLRSCNVRNLDPEKAEGLSPQLQRALEPLLAAIAEVSERIVEYNDRIEALAQTSYPQVDLLKQIKGVGTLIALTFLLTLEDPRRFQKSRDVGGYLGLQPGRRQSGESEPQMHISKEGDPYLRTLLVQGAQHILGPFGIDCDLRRWGLKLAERGGSNGKKRAIVATARKLAVLLHHLWVSGEVYEPLHNSRQMTDAVAA

SEQ ID NO: 61092 - protein, 400 aa, unidentified
MICVAGVDVHKTFFEVAYRDSNGEIKVIRVDNNARGLGKLIKLFKAVGVTDVYFESTGDYYYALYYTLKGAGIKPHVLNAYKVRRPEANKTDERDAVWLLKIGESKLFDDSYIPDERIQILRFLTRKKTKITDRMADLKREIGSILSRLGLNIKQLSGKLRARGRLKMLLNLISGKAKIDDVEDEVVRAIYEALTSEASGYYMLVVGVYLKELELLEREVRELDKAILSLIDSIKDKIEILMSVPGIGLDLAIKILAEIGEIDRFPSAKHLVSYAGLAPTAKNSGGRSRSGKPTKKSNKHLRRYMYLVAMGAVRSKNSVVRKWFDRLIGRGKHFKVAIIAVARRLLAIIWHLLMKGEKWFGEDFVKKLRKLPKIRKIKISLKKALEILEKAGYIIKPPNS

SEQ ID NO: 61093 - protein, 339 aa, unidentified
MQIRSVGIDLGKTTFHLVALGDNGKVLLKKKFTQKQLIAFTANMQTSLIGMEACSGAHFLGRALREQGHDVKLIPAQFVKSNKNDFIDAEAIAEAVDRQNMRFVPIKTDDQLDLQALHRVRDRLITRRTSVINQLRAFLLERGLVFAKSPAKLRERMPEILENAEEDLTPRMRNLLALLWNEWKDLEQQVVDLNQEVELIASSDAACQRLRQIPGIGPLVATAIVAAIGNGAAFHKGREFAAWMGLVPKQYSTGGKARLYGISKRGNSYLRKILIHGARAVVLRSKRDRIAMGAWMTSLETRAPRNVLIVATANKLARIAWAVLSSGQDYRAVQEPVAA

SEQ ID NO: 61094 - protein, 338 aa, unidentified
MGNITTIGLDLAKNVFQVHGIDADGNILVRRQLRRGEVLKFFQSLAAPCLVGMEACGTAHHWAREIASLGHTVKLMPPAYVKPYVKRGKTDAADAEAICEAVTRPTMRFVAIKSIEQQAALTMHKTRDLLVRQRTMLVNALRSHLAEFGIIANRGPAGVKVAVDALFQASDALPEAARCSLRGLVDQLRQLGAEIDRLEARILAWHRASDVSMRLATIPGIGPITASAIAAAVPDGTLFRSGRQFAAWLGLTPKAHSSGGKERQVGISKQGDGYIRRLLVVGATAVMRLARKENASRRWAAKLLERKPPKVAAVALANKTARIAWVVLARGESYVLPA

SEQ ID NO: 61095 - protein, 343 aa, unidentified
MQMITTVGLDIAKSVFQVHGIDAEDRVIIRRQLKRRYVQAFFQKLPPCLVGIEACASSHHWSRELKALGHTVRLMPPAYVKPYVKRQKNDAADAEAICEAVSRANMRFVATKTPEQQSCLMLHRTRHLFIRQQTAVINVIRAHLAEFGIVAPVGRKGVEALLDVVANPTDTRVPAIARACLAALGAQLRRLKEQILEFDRLIMAWHRSNEASKRLDAIPGVGPILATALVASVADPKVFRSGRNFSAWIGLVPKQHSSGGKDRLGHISKQGDRYLRSLFMAGALAVIRYAKIHGTKHRPWLTALLARRPVKVAAIALANKIARMAWAMMAKGERYKEPAALAA

SEQ ID NO: 61096 - protein, 350 aa, unidentified
MLIIGCDFHTRYQQIAMLNQVTGELTERRLEHENGEAEAFYRGLPQPVRVGIEATGPMHWFERLLSELGHELWIGDSARIRASEVRKQKTDQRDAALILDLLLSKRFPRIWVPTPAERDLRQLLWHRHKLVRMRTMVGNQLHFLAMSQGLCRKQKLFTKKGRAELVGLRLGPWASRRREELLKLLDGLDPAITELDHAVLQAARQREDAVRLMTHPGIGPNTALAFVLAVGPVSRFACSKKIVSYFGLNPSEESSGGRRRLGAISKQGNTMVRWLLIETAHLAVRQDTELRQDYQRLKFRRGHAVAKVAIARKLAVRLYWMLRSGAAYAQLVRRQGSPGGTLMEATPSLG

SEQ ID NO: 61097 - protein, 350 aa, unidentified
MLTIGLDTHLRTSTLCILDARGRQINTRTIRGHWSKTVDHIRKLGERFRVVFEASCGYGPLHDALVALPGAVRVVVAHPGRLRLIFRSKRKNDRVDAQKLAKLLYLDEAPEAHVPGIDVRAWRELIEFRRRSVDQRTRIKNGLRSLLRRHGVEVPRERRNLWTRDNLAWLKSIALPTSLSTLRRDLLLDELAHAESVLAKVTAELDAIAARHAGVKLLQTIPGVGPRTAEAFVAYVDDPHRFARISRVGAYFGLVPSQDSSAGVNRLGHITKQGPATARKLLVEAAWQVIRKDATMRAFFDRVTSGKPDRRKIALIAVAHKLCRCMLAMLRSGETWRATLIEPNVKGATN

SEQ ID NO: 61098 - protein, 320 aa, unidentified
MSILYVGIDLAKNVFAVHGVNEAGTAELRQPKVTRAKLHALIASLPPCVIGMEACSGAHHWARLFQAHGHTVRLMAPKFVAPYRMSGKQGKNDAADAMAICEAVQRPNMRFVPIKTEEQQSRLLVHRARQGFVQARTATINRIRGLMSEFGIVLPLKAEVVRCEARNLLEELPGYANTVIGDLLSEVAHLDERIKQYDAHIRSMARDCTLAQRLMQLTGVGETTSTALVAMIGNARDFDSGRQLAAWLGLVPGQYSSGGKTRLGRITKAGDSYIRSLLVLGARAVLNAAANKTDSLSRWAMQLRQRRGYWVSGQSSHLEH

SEQ ID NO: 61099 - protein, 379 aa, unidentified
MLSLGIDCAQLQHAFCLMDETGRILVEGSIPETNRGLADLSRLLEGHGTPTTVLMEASGNCWQNLHAQLHAFGWQPKALDPLRARRFAQLHSPRHKTDKADARSLALMGLGNERASVDSDAARTLAASLASAIDQRVMLLNQLHAILVVANPAIIACGWELDAARTLAVLRSYPTTFQLRRARTLARLRFGPRHRVGAKAAQALQTGSREALCGAINQAHPQQVCFLVEQIGAWSVQLSSLEAHLHALLPQAERLASIKGVGLRTALIVFARLPFRQLASAKQAAAHVGLHPPRFESNQRAWTRLSKQGDAIARTALYRVALPAITHNPRCASFYQQLRANGKTHKQALCAVAHKLIRIFYALVRDQVTYSPDLLPGGA

SEQ ID NO: 61100 - protein, 346 aa, unidentified
MMIIGCDFHPSWQQVSWLDTETGETGERKLVQASGDAERFYRQVAAPALIGMEATGNCHWLVDLLAELGHELWVGDAAQIRASYVRQQKTDKRDAAHLLKLLVEGRFPRIWMPSSAVRDLRQLLLHRYKLVIMRARVKNELQHLCLNQGVQRKHKLWSQAGQQILRELPLQPWAARRRDDLLKLMAMLDQQIAPLDQAVAEEAQGDKMALLLETQPGVGPITALAYVLTMGDVRRFPRGKQVASYLGLIPREHSSGGRQKLGAITKQGNRMLRMLLVEAAQAAVRYDPQFRKEYLHRCHQKPKAVAKVAAARKLAIRLYWMLRTQRPYPAVVRIESSPRVPLVGAS

SEQ ID NO: 61101 - protein, 412 aa, unidentified
MTAKDQFAAHVGLDWADKKHDVCVQFKNGDRIFHVIEHTPEALDIWLNELHQRVKGRIAIAVELKKGPVVYALQKYPFVTVFPIHALSLARYRQAFWPSGAKDDPQDAELALDLMLRYPHKIKAIEADNPDIRLLQQLVEQRRLLVEDKRRFVNRLINTLKQYYPQPLEWFSHRDSSLFCELIIRWPSLQQLKRARSDTVRHFMNAKGGPAVAYTEQRVASIASAIPLTTDKTVIEANALMATALASQIKLAGDLIRTYDERIESLFDTLPDAELFKSLPGMGPCMGPRMLAALGDNRDRFNSAEEIQNYAGITPVTERSGQKSWVHWRWQCAKFVRQTFVEWTAKTVNSSYWARLYYQGQREKGKSHQSAIRALAFKWIRIIYRCWKTKTRYDEAKYLLALEARKSPLLKP

SEQ ID NO: 61102 - protein, 400 aa, unidentified
MNPVVGLDVAKGESQVQEFSDKSKPYGKSFSMKHTREELDQFIGFLKEIEEVTGQVPMVILESTGHYHSPIVQCMEEHEILYILLNPIISYQAKKSSLRKVKTDVIDAYQLCVLYYKEDFEPHKNRGIQLLNLRNLSRQQEIVTNMYVEVKLHFHTILDQVFPEYRKVFGDLYSKVSLSMLKEYPTSEAILTAGESRLVESVMEFCPRRSGQWAREKAKKIMDSASRNPFQKVVYESHLINLRMYIDLLFHYQGHFSDLEGRIVALANEVEEYKIIQSIPGIGEKIAATIISEIGEIDRFNHPKKLVAFAGVDPSVHSSGKFTATINHITKRGSSRLRHSLYLAVLCGIRSSRNKKLKAFYDKKKSEGKPAKVAIVACINKLLHWIYALLKRKETFLDLA

SEQ ID NO: 61103 - protein, 370 aa, unidentified
MRKDTLYVGLDTDKKHIDIGLAEPLPKGEVRYWGKIANATTALERVRKRLQKDGRELVVCYEAGPCGYGLYRWLNGKAGVTCQVVAPSLTPRRAGVRVKTNRRDCLTLAKLLRAEELTAVWVPDAAHEAMRDLVRARGAAKEDLNRCRQRLGGFLLRQDIRYAGKPWTKKHRAWLGRLAFAEPAHRLLVGELLEALDQATARRDRLTDHIAELVASWSLAWLVEALQVLRGYQLINAATVVAEVGDPRRFGSPRQLMGYLGMGVSEYSTGERVRRGGITKTGNKRARTALIEAAWTYARPAKRPKAAAARQPAAVRAIADKARHRLSARYRKLIARGKLPAVAVTAIARESLGFIWAIARAAAPEAPRQR

SEQ ID NO: 61104 - protein, 381 aa, unidentified
MPMMPQQRRFRYIGLDVHRATIAVAIAEDDGSPPTSYGSIANEPAAIRKLMLRLGQPKDDVEVQLTVAYEAGPTGYVVQRQLSSLGVECAVVAPSLIPVRPGDKVKTDRRDALKLARLLRSGDLTPIWVPDAAHEALRNLVRARADAKADELRAKHRLSKFLLRQGRLQPPPKTRSWSRRYLHWLRQLQFEHVADHIVFADYLAVVAAATERVARLEVALRTSAQSSTQAHLIQALQAFRGIGFLSAVTIVAEAGSLRRFRTAPQFMAYAGTVPSESSTGSRQRRGHITKTGNSLLRHVLGEAAHHARHAPNLSDDLKRRQRQLPTAVVEHAWRAQLRLHTRYRQLCARVGPYRALTAIARELGGFIWGTAQLIDEVPAAA

SEQ ID NO: 61105 - protein, 410 aa, unidentified
MGLFCGIDWATEHHDVAVVDDDGRVVVRGRVSNDAAGFAQLLTLLAGAGDSAAHPIPVGIETDRGLWVATLRETGRVIYPINPLAASRYRARYAVSGAKSDATDAVLLANIVRTDPGAHRPLPADTEAAQAIRVLARAQQDAVWARQQVGNQIRDLLKDFYPAALTAFAGLSEGGLARRDARTILAAAPTPAQAAKLTPARLRRLLVKAGRQRHLDRDVERLREVFTDTYLHQPPTVENAMGIQLTALLRQFEAACTAAADLAEAAIAHFDQHLDAEIITSFPGLGKLAGARVLGEIGDDRTRFADPRGLKAFAGSAPITRASGKKTVVLHRHIKNRRLAAVGPIWALSSLRASPGARRHFDARRAAGDWNHQAQRHLFNKFLGQLHHCLQTGQLYDEHLAFPPPLLLAA

SEQ ID NO: 61106 - protein, 357 aa, unidentified
MTKCIMNGCDLHDKTMLLKISVDLEPPVTRTWDTDQRGRAAMIRYLQRHAKKNGADRIVFAYEACGFGFGLYDELTAAGIETYVLAPSKMARSPKHRQRKTDERDAQMILELLRGYILAGNELPSVWVPDAATRQDRELVRRRLTVAEDSSAAQTRIRWLLKGHDLKASPARPWTQAYWEWLEQLRRNVLPLSASGALGSLMRQVRWLEEEGDWLMEQVTALSRTPRYVAQVTALCRLKGVGVLTAMVFLTEMGDLNRFHNRRQVGAYLGLVPASYESGEDNDHKGHITRQGPSRVRKVLCQATWSRLRSEPSEQLAYDRIVTKNPKHKKIATVARMRVLAIRMWHAALSVPQAEVA

SEQ ID NO: 61107 - protein, 320 aa, unidentified
MESDVLVTIGVDTHADFHVGVALDQRGGLLGELTLANDEGGYRRLLRWARGFGELAGVGAESTGSYGAGLSQFLRSEGVRVLEVNRVSRQHRRRHGKHDAGDAEAAARAVLSGEATGEPKAADGHVEMLRALKIARRSAVKAKTQAANQLYALVSTAPERLKADLRKLAAPRLAQKALGWDPTPAATLSVVAGDNPESLKSEAAFANLCGAAPIPASSGKVVRHRLNPHGNREANRALHVVALNRLRRDPRTPGIRRQAHRRGQEQARDHPLFEAFHSPGGLPSAARLPGSRVEATEPNLFCLTLLRIGDSTLLTQIGAS

SEQ ID NO: 61108 - protein, 373 aa, unidentified
MIVIGTDTHKRTHTCGAVDAFTAAARGELTAAARKGSFGKLLRWARALDPERVWAIEDCRHVSGAFERFLIARGERIVRVAPKHMAGARRSSRERGKSDSIDAFSVARAALKEGIENLPGAHLDGAALDIRLLVDHREDLIAARTADQQRLRWHLHDLWPELEIPAGALDTNKWLGKISRRLARAQQATRVRIARELVRQITTRTTRIRELETELAALVESYAPQLLAERGCGPLTAAKLIGEIAGADRFATDAKLARTGGAAPIPASSGNTNRHRLDRGGNRQLNCALHRLAVNKANWDPDTAAFLARKQAQGQSRKEALRSLKRHLARRVWRLLRSAPTPNATLPPTHTPARPKARETIPGAAPHPMTCIS

SEQ ID NO: 61109 - protein, 413 aa, unidentified
MFKIFRKNCCGLDVHKTWIYACIGITDANGRTVYKQARFSSFTKGLNELAEWLAKYNCKDVCLESSGKFWIPVFNILEKTCFVTLAHPKYTKPQKGNKTDRKDAKWICDLFMCDMTKPSFIPGLEIRQLRDLMRYRTKLTNMKTSEKNRALNCLTVSNLKLDDVFSDVFGKSSTSIIQYLLEHPGESFDVRPFIHARCKTPVEEIQAAVEGAISVPQAIKLRQCLNHINEIEKHREEINLEIQALAEPFSPVLELLRTIPGLDTQPITAIAILSEIGPDMSVFPTSKHFISWAGCCPRNDRSARRTKSTRISRAGQSLKPLLVQIANALLRSKEHPEFKNRYRRIKANRGHKKAIIAICKMLLTAIWNVLSKVEPYSAKGYLEPKPAKEEKVLTQSQALDLLRKRGYTIIDSA

SEQ ID NO: 61110 - protein, 393 aa, unidentified
MKSNSSSVLQAHIANQTPPVDGEPYREFQPEGSFDRVRVSIRFGNRYHYNNRNKPMNNPLNHPSYFLGIDIGKETFTASLHHVASNTHQVFSGPMKTASRRILKWLHQQHVDATPMPMALEATGVYGERLCYELFAAGCTLYVLHPTDVRRSMKHPERKSDSDDSKQIAELIAERWRKLIVWSPNLEVVDRIKTLLAERRQIVKMTVQTKNALHAARFKRHRVRELEARDQARLDFLKTQRMAVEQQIEALFESDPQVKEAAAVLRSTPTVGRMLTACLIVVTNAGLRTTDSRKIASLAGIAPQPYESGNMKLNRRSSGHGDPEFRRILHMAARSGANHYEQYRAYRRKKLEEKKPALLIYNNISNRILHVACAVLASKQPFDPNFSTHRRGG

SEQ ID NO: 61111 - protein, 402 aa, unidentified
MNCVGIDVSKGKSMIAVMRPFGEVVVSPFEVRHTANELSELAGLLKSLDGETRVVMESTGNYHAPVAWLLHDAGLYVSVVNAMLVHDYGNNSLRRGKTDKKDAVKLANYGLDHWLTLPRYVPEEDTRLMLKTCYRQYQQYSKVQTMLKNNLISLLDTTFPDANRLFTSPPRADGSEKWVDFVATFWHCECVCGLSKKAFTAKYQKWCRKHGYNFSQDKALDIYASACGRFGVMPKTNTAKLLVEQAISQLQTTSAALAALKQEMQSLAASLPEYPVVMEMFGVGPTLGPQLMAEIGDVRRFHSKKALVAFAGIDAPPYQSGQIDVRSRSISKRGSASLRRTLFLVMGVLLQCAPMDEPVYQFMDKKRSEGKPYRVYMMASANKFLRIYYASVKSYLDSLEHD

SEQ ID NO: 61112 - protein, 315 aa, unidentified
MDDVPCFVGIDVAKAQLDIAVRPSGERWAVSNDADGVATLVEQLQPLHPTLIVLEATGGLERVATAALATAGLPVVVVNPRQARDFARATGQLAKTDALDARALAHFADVIRPTPRPLPDAQTQELRALLGRRQQLIGMRTAEQNRLAGTSGRLRQDIEAHIAWLNARIATLDDDLETMLRASPLWRANDDLLQSVPGIGPVCARTLLLELPELGTLTRQQIAALVGVAPLNCDSGTLRGRRTIWGGRAHVRTVLYMGTLVATRFNPQIKAFYQRLLAAGKIKKVALTACMHKLLTILNAMLKHRTSWKAQEVQN

SEQ ID NO: 61113 - protein, 340 aa, unidentified
MNATTYGLDVAKRVFQMYWVEAQTGEIVNRRFGRDELIEFLSKRPAGRVALEACGSGHWWARRIKALGHEVVLLHAKFIRPFVQTNKTDAADARAIWTAVQQPGMRTVATKTEDQQAMLSLHRMRALLVKFRTMQVNQLRGLLYEFGATFRAGRAAGLAEIRARMAQLEDALPGTMMYCLQDQLGRIDELQRDIDLLEKRIGVWQKQDVACRAIAEIPGIGRLTATALVATMGDVKTFKSGREFAAFLGLVPRQSGTGGKFRLGCMSKRGDPYLRTLLIHGARSVLYHTKAPTTWQKEIQARRPANVAAVALASKIARTAWAVLARGREYQRNYVSVKPA

SEQ ID NO: 61114 - protein, 388 aa, unidentified
MLQSNDLSRSFTTLNQDNTLIVVIEMSLSSWLVAGIVPGVERQPLKKLEPDEDQLLKLMNRWRHEALQAGHAIERVVVAYEAGRDGFWLARWLRERGVEAYVMHSSSIAVSREHRRAKTDRLDTELLMRAFLGWLRGERRHCSMAAIPTIEEEDAKRPNREHEKLVGDRTRIVNRMKSTLSRFGIRGFKPTLRKADEKLSELRTAEGTLLPENTHAELRRDMTRLRVVREQIKEIEQQRLRKLEAAAPAKKGHHAMVLLIARVIGIGIETADMLVNEILSRHLRDSKAVARYAGLTGSPDESGKRRREKGLARAGNARVRRGMIQLAWRFLRFQKDSVLAQWFRAPAADGRSGTRKTMIVALARKLLIALWGMATSGEIPEGVTFRAA

SEQ ID NO: 61115 - protein, 343 aa, unidentified
MKLHAIGIDLGKTVFHLVGLDSSGNVIVRKRCSRVQLLKYTANLRVQRIGMEACSGSHFLARALREQGHDARLIPAQYVKPYVKTNKSDYIDAEAIAEAVQRPTMRFVPIKTEEQLDLQTVHRVRERWVMRRTAVVNQIRGLLLERGVTLPKGRSQVDRALPDILADPALRLAGSFRVLLGQMQLELEQLSARIEQMDAVIQETAKDNEACQRLTAIPGIGPVTATALVAAIGNGAGFRRGKDLAAWVGMVPREYSTGGKQKLLGISKRGNSYLRRLFVQGARVVMQYRTKQAPGLSNWLSQLMARTHQNVAVVALANKLLRMAWAVLCKNETYRSPALATAP

SEQ ID NO: 61116 - protein, 311 aa, unidentified
MTMIERFVGIDVSKATLDVCIRPSGEAFAVDNDGAGIAGLIERLADGEPCLVVLEATGGLQDRAAAVAAAAGLYVAVVNPRQVRDFARATGRLAKTDKLDAAIIAAFAEAVKPEPRPLADAERQALIDRVGRRRQLVEMRAAEKIRRAQLSGGLRRGLDAHLAFLDAEIAELDRDISGLLRSSPAWRAQDDLLASVPGVGPIARSVFAAKVPELGQLNRRQIAALIGVAPFNRDSGQMRGRRTISGGRDDVRTVLYMATVAAIRCNPVIRAFHQRLTAAGKPPKLAITACMRKLFTILNAMVKTNTPWRTA

SEQ ID NO: 61117 - protein, 321 aa, unidentified
MGTDVFSGIDVSKDTLEVAMEPQGEKMSFAQTEDGLSLMADFIQSFSPCLVVLEATGGLERAAVATLAVRNLPVVVVNPRQVRDFAKAKGILAKTDKLDALVIAQFARAIRPEPKTLKTIEAQQLEAILSRRRQIVHMLTAEKNRLHSAPGWTRKDIRLHIAWLEKRLEKIEKELGEMIRKSPVWRVKGELLRTFKGVGPVLSQSLLSDLPELGSLNRKKIAALVGVAPLNRDSGKFRGRRMVWGGRAQIRPVLYMATVAAICSNPVIGAFHERLVKAGKAPKVAITACMRKVLTILNAMMKNQTPWRPLTQNMLDMKHSC

SEQ ID NO: 61118 - protein, 346 aa, unidentified
MKILKQIVGVDVAQKELVVAFGRLKGDLSVGILSSKVFTNNVKGFEKLLAWTKSLADTQCNVQYVMEATGVYHESFAYYLYDHGLAVSIVLPNKISNYFKTLEVKTITDSTSAEAITRFGLERNTQLWSRPKPIFKSLRQLTRERDQIVLMRTMVKNHLHAELAEAEPGKTSVERMEAQITMLNAQEREIKKEITKLAQDPQVKNGITVMSSIPGVALLTSATVLAETNGFELIRNKKQLASYAGFDVREKQSGTSVKGKPKISKRGNKYLRKCLYMPVLATIRSDQHYKSFYARLVERHGIKMKAAVAVQRKVLELMYTLYKKNERYDKNYESSQNGRKKERQVL

SEQ ID NO: 61119 - protein, 372 aa, unidentified
MSEITRGPMVRVGVDLAKQVIQVHGVDARGQRVVARAFKRDQFVAWCAQLPPGCMVAMEASSSAHHWARKLRALGLDARIMAAHLVTPYRMQGRSGKNDANDAAAVCEAASRPNMHFVPIKSVAQQSMLCVHRLREGLKADRTACINRIRGLLAEFGLVFAQSPKVLRAVLSDVIEDASNELATLARLSLQRALDQWRELDEHLAWCDERIAAHAKDEAAVKAAATLMGVGPVTASAVVATVGDFKQFKNGAQFGAWLGLVPRQHSSGGKHNLGSITKRGDNYLRTLLIQGAKSKSAVTTAHRRSDSISVWLTQLKERAGWQKAAVALANKNARILWAVMTKGEAFDPNHVSVKPAPPTRASTQPQPTAQPG

SEQ ID NO: 61120 - protein, 367 aa, unidentified
MKKISTAAVKATKNFSQPKRTIGLDLGDRSSWYCLLDEVGEVLLEQKLTTTPKAMREVFGAMPRCRIALETGMHSPWVSRILSELGHEVIVAHARNVRLIGESRKKDDRLDARTLARLARIDPQLLCPVKHRSAKAQADLTVIRARAGLVRARTALVNTARGLAKSYGERLRGCNVRNMNPEKAEGLSPELQTALEPLLAGIESLSERIREYNEGIEDLAQKRYPQVALLKQIKGVGTLIALTFLLTLEDPHRFRKSRDVGCHLGLQPGRRNSGQSEPQMHISKEGDPYLRTLLVQGAHHILGPFGADSDLRRWGLKLAERGGKSGKKRAVIATARKLAVLLHRLWVSGEAYEPLRNTRRLPMPAAA

SEQ ID NO: 61121 - protein, 317 aa, unidentified
MTYIGIDISKSWFDCFNSTTDTHHQYDNTVQGWNEFAGSLTDEAWAVMEASGPYYLGLASLLADRKIPVSVLNPLVIRRYSQMRLSRTKTDAKDAWLIAEYAAQQPLTRWNPPSWVNQTMRQMISVCQGLIRQRAMLLGQKEAFTNSPATDPLVIDVIDEQIHRISSALSTLEGRLRQLIVTHYQHCFDAVTSIPGIGPKTAVLLICLTDGFSKFDDARKLASYVGICPRIFNSGSSIKGRGSICKLGSSQLRKLLYMCTWTAKKCNPGCKQMYDRMKQAGKPERVIKIALAHKLLRQTYAVGTSGEHFAKEKALAA

SEQ ID NO: 61122 - protein, 353 aa, unidentified
MPVTSSPTAPLKYVVGIDIAKDTFVACFGRIDVHQQLRFGKEATFDNTSAGFAALLLWTAKQQATATPLWFVVEATGVYYEALAYFLSDNEQALSVLLPNKVKHFAQSTEQKSKTDQLDARLLCRLGLERALPAWQPPTPALRQLRALARERQSLKRRGARLKTQRHAYDHSYQPDTRTLERLAVRQQLLKQQLKAIDQDLADLLKAEPELARKLAHLTSVPGIGLTTAIVVVAETNGFVLIENERQLASYAGLDVVQRQSGLSAQATRISRRGNVHLRQALYLPAVSSLRYNPQQMAFYARLRARQPSGKPGVIAVMRKLLLLCFSLWKNDRPYDPHYHPAHMAEKEVAPTT

SEQ ID NO: 61123 - protein, 331 aa, unidentified
MKFNWFVGIDVSKNTLDITVLNGSQKILFKTIANNVKQFKSFLKDLKSEGVLISEALICMEHTGIYCTPVIDVAEKLSLNLWLENATQIKLSIGLQRGKNDKIDSARIAEYAFRNHDRSVLKKPEREAMKKLKELNLARTRLMMTTKSLQVLSKEKDHYKSKSTFSAYFKQSIAALKADLKKVETSIKEVIKSDERLTELFEIVCSVKGIGPVISLNMILTTNEFKDITEPKKYACYSGVAPFEHSSGTSVKGRPRVSKKANMHMKSILHMAALVAIQSNQEIKEFYERKVKEGKAKMNVINAVRNKLIHRVFACVRDNRKYEYIYTSPLA

SEQ ID NO: 61124 - protein, 345 aa, unidentified
MKHYTGLDVSVKETAVCIIDEAGKICREVKVSSHPDDLIVVLKDPRWHIERVGLEAGPLSQWLFETLAKAGVPTICIETRHTKAFLKAQPNKTDRNDARGIAQMMRVNLYKPVHVKTLTSQKRRALLTARQLLQEKAIAIENDIRGLLRNFGLKVGLAGKITFEERVCELVTGFPELAEIMDVLLSARTKLRDEFKKLHKKVLELTSRDEICRLLMTVPGVGPIVSLAFVSTIDIPQRFKNSKAVGPILGLTPKLNESGESKRIGRISCCGDAMMRSLLYEAAQTLLTLVKKWSWLKAWAMKIAKRAGKQKAIVALARRLAVIMHRMWSDGTEFCWTRNGLPAAA

SEQ ID NO: 61125 - protein, 404 aa, unidentified
MIFVGDDWSEDHHDVCLMDQAGKRLASRRLPEGLTGIRQLHELIAEHAEEPDQVVIGIETDRGLWAGALAAAGYQVFAVNPLAVARYRDRHHVSGAKSDASDAKLLADLVRTDRHNHRPIAGDSLDAEAIKVLARAHQSLIWARTRHTNAMRSALREYYPAALLAFEDLAHGDALGVLGRAPTPEQGAHLDLPAIQSALKRGGRKRNIAARARQIRAALRSEQLAAPAPVAAAFGATTRAAVGIIVELNRQIAELEAELATHFEAHPDADIYRSLPGLGVILGARVLGEFGDDPNRYTSAKSRRNYAGTSPLTVASGKKRAVLARHVRNRRLYDAIDHWALCALTSSPGARAYYDHHRAAGDVHHQALRALANRLVGILHGRLRHHTIYSEHTAWAHRQITQAA

SEQ ID NO: 61126 - protein, 350 aa, unidentified
MSTETIIAIDLGRHNSVACIYHRTTRHHSFRTLNTTPDDFTQLLARHPNSLVVIAACANAGWVHDLAVAAGHPVKVANTAAEAWKFTHLKRKTDRDDALRLAELEAIGQLPTVCLPDPPTRQRRMLIAFRQELVGRRVASQNRIRALFAGVGLPTPRGHRAWTEVGLSGIEQHARPLAECSPEELWRGMLELAVAEYRSLLTRIACVERKLDELAEADEQTKLLETIPGVGRRTAEAVAAHLGDARRFASGKQVGAYAGLVPRQYQSGVTDRKGKITRRGPALLRKLLVECAWCMLRYNRWAQKVYRDLTGGGASRKKPAIVALARKLLVRCWAMLRDGVPWRAEPATSS

SEQ ID NO: 61127 - protein, 341 aa, unidentified
MGMFAGLDVGGKRTAVCVVDEVGKIVFRGIVDTHPEMLAAALKHFDGKLAKVGLESGPFTPHLFRSLAAMGYPMVCMDARRAADAIKSRRIKSDKADAFALAEMLRTGWFSPVHVKSIDSHKIKTLLGARDQLVKVKRALGNQVRGLLRPFGIRLPSRVGAKKFAEAAYQATRNDPLMHASINALLEALASIDAQVAKLDDGLKELARRNEVAWRLMSVPGVGPVTALAFIAAIENVERFGRTRDIGTYLGLTERRYQSADTDVKMGISKQGDAMARHYLYEAANVLLTTVKKRFALRSWGLKLIRKLGPKRARVAVARKLAVLMGRMWKEGAHFEAAAAA

SEQ ID NO: 61128 - protein, 405 aa, unidentified
MKVYIGIDWSSQKHDIMYLNEEGGIIAYQTIPHTPLGFEAFDDQRMKLGVGVEDCLVGIETEHNLLIDFLSSRQYRQIYVIPPTTIKGSRGRFGASKANTDRSDAHLIADMLRTDRARLHVWHADSLLTQQIAALASLEQFLTHMIIQTNNRLRNVLWRYYPNAAIVFSALDLQISLEFICAFPTPQAAAQLTFEQFKVFARSHHYPQPSKLPACFARLQKPQPEARQQTVLAFQSEAVRLARLSFHAVQDKAATIREIQELFLEHPDYPIFSSLPGAGKILAPALLAKFGDDRLRYPTPQVLQSVAGTCPVTRASGKHKVVSFRYACDHEFRSVVQQWAKCSIDASVWAYTYFQSIRPHCDSLSHAYRRLANRWLEIAWRLWQDRVPYDEERHLRQHALRVKPN

SEQ ID NO: 61129 - protein, 375 aa, unidentified
MKHHETLVVGGVDAHADSHHAAALDERGALLGSASFPTTTDGYGELFRWLSSFGQLKLVAVESTGSYAAGLVRYLRSRAVRVREVNEPHPHTRRRLGKSDPLDAELAARAALSGKAGAIPKQTDGIVESIRQLRVARRGAVKARSAALAQLGDLLVTAPEPLRQRLSEPKTLRGTASHCRRLRPAVSELEHPSQAARFALRSLARRIRMLDEEIAALDRQLGRLVHSAAPRTTALFGISTGHAGQLLVSAGQNVERLRGEASFAALCGASPLPASSGKTSRHRLNYGGDRDANRTLHLIAVCRLRYCPRTRSYAKRRAAEGKSKAEILRCLKRYIARQTYHTLRADLAGVRQQQRPPATTIYCGAGPIGSTRPRT

SEQ ID NO: 61130 - protein, 371 aa, unidentified
MKKHSTFVGMDVHKNSIEIAIAQRGRNGEVRSYGKIDGTLNALDKVVRKLVSKGGRLHFVYEAGPCGYGIYRHLTAKGYDCSVVAPSRVPKKSGDRIKNDRRDACMLARLDRAGELTPVYVPCAEDEAIRDLTRAREDAKTDEKRSKQRLKSFLLRHNLRYAGTASWSKAHMRWLSDIKMDHPGQQIVLQEYIDTIGECSRRVQRLTDQIRQLVAQWRMAPIVKALQALRGVSLIVATTTVAEIGDLNRFENPTELMSYLGLVPSEHSSGQKTRRGSITKSGNGHVRRVLTEAAWAYRLPARVSRALLKRQEGLPEKVCDISWKAQVRLCSRYRQLWAKGKPRQVVVTAIARELCAFMWAIAGEIDIPSTT

SEQ ID NO: 61131 - protein, 389 aa, unidentified
MRSVKKRGPGPSSLLMTPDHAGNVVGIDPHKRTLSATVADARGGILGSAHFRVSGEGHRELEAWARQFGQIARWGVEGAASWGRHTAMFLAGRGHDVRDVCANRTPRSDRARQRGKSDTLDSERIARETLAHPLLPKAFKRTGADSGLDEQHQLLALWNNQRRSILTGRQHLVGEAEYLLCELPLELREQLPDTKAVRPRLAALARRNRRRRYDAPTRLRLQLLDSYRAQIKSLDGQERRVVAQLEALVRQSGSTLGELCGLSTRSVAELLVEVGDVRRFTEGGFARFNGSAPLPASTAEGPGEPIRHRYNPGGNRRINAILYRMAITQLRCEPRAQRVHEAARANGHTKKEDRRILKRHLSNVIYRRMIRDLAAADHAVLPAQPLLAA

SEQ ID NO: 61132 - protein, 402 aa, unidentified
MFKIFRNNCCGLDVHKTWIYACIGITDANGRTEYKQARFSSFSKGLHQLCVWLAKYNCNDVCMESTGKYWIPVFNILEQHKIRVTLSHPKYTKPMKGNKTDRKDAKWICDLYMCGMVKPSFIPPADIRELRDLVRYRFKLTCMITGEKNRAQNCLTVSNLKLDDVFSDVFGKSSRSITEQILQHPGEKFDVSPFVDSRCKTPIEEIQAAVDGNISKEQDVKLRQCLDHIDELQKHISEVEQEILRLSDKYEAALNLIRTVPGFDKNPMTAIQVLSEIGGDMSVFPTAKHLVSWAGCCPRNDKSDRKIKSTRISCAGSYFKPVLVQIANALIKSKKHFEFTTRYKRIKTRRGHKKAIIARCRMILTAIWHILTDLKPYTSDGFLESRPVKKEKFLQLHRHLIF

SEQ ID NO: 61133 - protein, 351 aa, unidentified
MKITTMGIDLAKSVFQIHGVDERGKAVLRRQLKRSEVLGFFANLPQCLIGMEACGSAHHWARKLIELGHEVKLMAPQFVKPYVKTNKNDRNDAEAICEAVARPNMRFVPVKTAQQQAVLALHRARAGVMKARNAQANQIRGLLGEFGIVLPQGIGHLRRRGPEILEDGDNGLPGLMRALLSRLLAQLAQLDQQVAALEREIVLWHRQNDDSRRVERIAGIGPLTASAYVASLGNAKGFKNGRHVAAWLGIVPRQDSTGGKPKLLGISKHGDVYLRTLLIHGARAVLRHHEHRPDQADSWLKRLMLRRGKNVAAVALANKNARIAWALLAHQREFRPDYVSTAPSRGTATHA

SEQ ID NO: 61134 - protein, 348 aa, unidentified
MNTTTIGIDLAKNVFAVHGVDERGKPVLRKTLRREQIVPFFARLQPCVVAMEACGTAHYWARKLESLGHSVRLMAPQFVKPYVKGNKHDAADAEAICEAASRPSMRFVPVKMPQAQATLALHRVRDGFIKARTAQANQLRGLLAEFGLVIPLGMVKLITQVKGIIADEANELPALMRALAQRLLSHLLELDRQVKEIDRQVQQLCRQSSICGRLEQIPGIGPVTATALEATVADNMKTFKNGRQFAAFLGLVPKQHSSGGKERLQGISKRGDSYLRRLLVHGARAVLHHTTNKPERSDSWLARLAARRNTNIACVAQANKTARIVWAMLVHEREFRDGFSANREPVPA

SEQ ID NO: 61135 - protein, 343 aa, unidentified
MKKGQNTRGYQRYMALDIHREYILVGAQNEEQVWVLTPRRVSTEKFPEWAKKNIRTGDIVVLETTTNVWTTYDIVAPLASRVLVANAAEVGEIANARVKTDKEDIKRLLKLLIGGIVPEVWVPPMPVRELRAFTSYRGRLVKTSTMIRNRLQSLLHKHNLKLSEAGLLDQTWWETQKNISRLEKLQIRQELALLQEVEKLKVAVDEELQRQSTSSTWGKPALQIMQLPGVGYIVAMTVLAAIGDISRFENAKQLVGYAGIGAGVHDSGKTHKEKKTLAPARKCRCHQEGTSRITLGNGGSGLAGGAHVSILEGRVRKTPASHAQTESGDCCDRTETASGAFEK

SEQ ID NO: 61136 - protein, 371 aa, unidentified
MGQSSKILYVGLDVHKDSIAVAYAPEDRGAEVVSLGSIGTRQCDIDKLIRKLQSKGATLVFGYEAGPCGYWLYRYLSRKGFTCQVVAPSLIPRKAGDRVKTDRRDAVTLARLMRSGDLTSIYVPGIEDEAIRDLSRGREDAMRDLKAAKYRLKAFLLRQDIRYEGRANWNAAHLRWLSEVVCPTPAQQIVFQEYVRAVTEQDERLRRLETELHEEVRSWRLYPVVEAIQALRGVELTGAVILVAELGDLTRFDNPRQLMSYLGLTPSEYSSGARRRQGGITKAGNTHARRALVEGAWAYRYPAKISRHLQLRLEKLPAEVQAIGWKAQVRLCKRYRQLTARGKHANQVVVAIAREMAAFAWAIARTVPLVH

SEQ ID NO: 61137 - protein, 465 aa, unidentified
MEKDSRFVGLDVHAETIAVAVGEPGGEVHSLGTIPNTPEAVRRLVKKLGPPETLRVCYEAGPTGYVLYRQLTALGVPCAVIAPTLVPVKAGDRVKTDRRDAEKLARSYRSGDLTPVWVPDPGHEALRDLVRAREAAKKDQLRARHRLGKFLLRQGRRAPRGSKAWGVKHRAWLQTIRFAHAAQDATLLDYLTEIDHAADRIVRLERAIATAADVAPAPVRAVIAGLQALRGIAKLSAVSVVTEVGTLSRFAKPRQLMGYSGAVASEHSSGPHRRRGGITKTGNAHLRRIVIEAAWAYRHRPAIGGTLRTRQEGLSEEVKALAWKAQHRLHGRYARLLAKGKAPTQVVTSPASSSGLSGPSACTSSTTRQAVRPPPPNAARTARTTTMTLLEQSGRRSGGTREGGSSALLRDRPLAGPATLVRGSSRRITTMTASSARSANIRVINRRCGHLDRRLLRSRETRRGR

SEQ ID NO: 61138 - protein, 355 aa, unidentified
MFNDSMLFIGIDLGDRMSDLILLDPEGELIEESRLPTSPASFQQKFSALPSARVALEVGAHSRWVSHLLEQLGHEVLVANARKLRAIYANPRKGDRTDAETLARLARLDPSLLSPIHHRSAQDQADLAVLRSRDAGVRSRTLLINHVRSVVKASGARLPSCSSDGFSKKVGPSIPEPLRPALLPLLDMIASVTQQIRAYDRQIETLCQAQYPETRSLQPVSGVGPLTALAFVLTLEDPSCFPKSRDLGPALGLVPRRDQSGDRDPQLGITKSGHAFLRRLLAGSAHYILGPFGPDCALRRWGLELADRGGKNAKKRALVAVARKLAVLLHHLWKTGQTYEPLYQSQRRREPRLAA

SEQ ID NO: 61139 - protein, 346 aa, unidentified
MTVARDIELIVGVDTHLDAHTAAVCDVRGRELAQVQVPATTAGYAQLLARVRSTAGGQRAAWAVEGTRHYGLGLARYLTGEGEDVAEIDCSRHMGKRRAGKSDAIDAVRAARELLARPWPAQMRSDGDREALRLLMVDRDNAVQSAKTARTALAAVLVTAPAPLRDQLRALPGERRVTQCAALTCPPGASRQARVVHQTLIHLAQRAAALAEAAADLKAQIAGLVEDMAPGLVAAEPGLGPVSAAQILLSWSHAGRIRSEAAFAMLSGTAPVPVSSGRTDRHRLNRLGDRQLNRAIHVIAVTRMRCHPATIAYIQRRHAEGKTDKEIRRCIKRYLARHLYRTLNST

SEQ ID NO: 61140 - protein, 369 aa, unidentified
MWMEAPVIGHRTSVGLDVHARSVVGCALDGDTGEVVERRLTPDYQDVLEWLRSLPGRVAVTYEAGPTGFGLARFLIAAGIVCLVAAPSKLQRPSGDRVKTDARDAAHLARLLHLGQIVDVTVPSAEQEAARDLVRAREDCRGDLMSSRHRVSKLLLRQGIIYSGGRTWTGKHETWPRGQRFDAAPLQLAYDTAVDTMLATVDRRNRLDDAIAELAADSAYTPVVTRLGCLRGVSTLTAFGLAAEIGDWERLTGRSIGAYLGLVPTEYSSGTSRSQGPITKTGNGHARRLLIEAAWHHRQPYRPGVDLRRRWDAASPAARARGQQANRRLHTRWCRFDARKKRPSSPTRRSLGSWLVLVIGRPRYLSTGP

SEQ ID NO: 61141 - protein, 410 aa, unidentified
MKVAGIDVHKKVLMVVVVDASAPEEKPARRRFVTMPSELHRLLTWLREQGVEEVVMESTAQYWRSVWLELESHLRLHLAQAFSNRAPRGRKHDFKDAERLVRRLIADELILSFVPSGEQRIWRSLTRMKLQLTRDRVRLQNQIECLLEEMRIKLSIVVSNLLGASGLRILHALANGETDPRKLAQLGGERLQCTEEQLVDALTGRAQPVHGAMLALQLQRLQLIDQQMERLNSMIAAAMKPHQDAVIRLAEVPGLGVDSAQQIIAEVGAQASTFASAAELTSWVETCPGRDESAEQNRSSRSAKGNKYLRRVLNQAAHAAAAKKGSHFQAVFRRLLPRLGYQSAIWAVAHRLCRLVWKILHEGVRFIEQGTEVGPREKKKRAQMLARALRKLGYEVTITPISQLAPKPAL

SEQ ID NO: 61142 - protein, 408 aa, unidentified
MRIIGLDIHRVFAEAVALEAGRLIRLGRIEMRRDRLAEFARSLTHDDHVVIEATGNATVVAEVLRPHAGRVVIANPQQVRLIAYAKIKTDRIDASVLARLYASGFLPEVWVPDERTQALRRQVTRRNQLVRQRTRLKNMVQSVLHAQLIPPCPTADLFGPKGRAWLVEQILPADERSAVERHMREYDRLGEDLDAVERDLARGALADEQTKRLMTIPGIHMVVAVGIMAAIGHIERFANPQQLVSYFGLNPSVHQSGNGPVHRGRITKRGRGHARGMLVEAAWVAARVPGPLRAFFLRIRARRGQHVAAVATARKLAVLIWHMLRRNEDYAWLRSALHARKIRDIELAAGHPARRGQRGAAYAYNLSTVRQRERRRVEQAEQAYERLVKGWTQHGPKVRTGAATEARQ

SEQ ID NO: 61143 - protein, 349 aa, unidentified
MSQTLSDAVAVIGIDIGKNSFHIVGLDRRGAIVLRQKWSRGQVEARLANLPPCLIGMEACVGAHHLSRKLKAFGHDARLMPAKYVRPYSKGQKNDFRDAEAIAEAVQRPTMRFVATKTTDQLDLQALHRVRERLVSQRTGIINQIRAFLLERGVAVRQGLRILRVELPRILAAPPDVLSTRMISVIEDLAQDWRRLDERIDHLSGEITALARQDVGCERLMSVPGVGPIISSAMVAAIGTGDVFSRGRDFAAWLGLVPKQISTGDRTILGKISKRGNRYLRVLFVQAAWVVLIKPQSWERHGLKSWIEAAKKRLHRNALAIALANKLARIAWSVLAHGRSFETSKLATA

SEQ ID NO: 61144 - protein, 320 aa, unidentified
MTYIGIDVSKDSFVAAYPAKSGYTTKTFPNTTSGVHRFIQTLPVESHCVMEATGNYSMLLLYLLQETNIPVSMENPQKIKNFSRAMLSVTKTDEIDAKLIAMYGEKMEPAPYKIPSESIIMLKQKRTVLRQLKKQLTMMINLQHSLSVLPKQDPTAKVVTEQTIKHLRKQISKMEEEITNLSNKEFKRQMDLLTSIKGIGENIASALIMATGGFTYFSSAKQISRFLGLCPTYQQSGTSVHVKGHINRNGDTHLRSQLYVIAFASIRFNSACRETYERLRDRGKSGKVAIVAVANKLIRQAFAVVSNNRPYIDGYVSTLP

SEQ ID NO: 61145 - protein, 375 aa, unidentified
MSDLSEAFVGLDTSKLRNAVAIAEGERSGEIRFLGEIDNTPAAIRKLVKKLAAKYERLTFCYEAGPTGYGLYRQIRELGHDCIVAAPSLIPKKPGDRVKTNRRDGVSLAKLLRAGELTAVWVPDRGHEAMRELTRARETAMMDLRRKRQQVSAFLLRQGMHYPAEKKTWTKAHMNWLASQKLAHVEERMVFEEMMLAVREAQDRLNRLEDAIRTAVPEWSLAEVVGALMAMRGMDLVAAATFLAEIGDLSRFQTPRELMAYLGLVPSEHSTGDTIKRGPITKTGNRRARRMLVECAWSYRHPPRVGRAKQEKVAAAPPAVRQIAWKAQCRLHNRYRSLIRKGKLKTVANTAVARELAGFLSAVSREITKAAAAAR

SEQ ID NO: 61146 - protein, 409 aa, unidentified
MNKVDIAPFEMFCGIDVGKTSNHIVALDRHGDKPLINRKVPQEEAEIRAALEEAGDFGLALVIVDQFGAFGRLVVGVVKSMDIPVAHMSPRRFRQVAETYGEDKFDEKDAYILADASRTTPRNIEFVGNRAESMAEIKVLSSRRDDIVEERTRCYNRLHDFIHQVSPPLEELFSKRKLHNDLEIRLIARYGGPIGFRQAGRARASTWAAELKYHCVDGPKKVEQVFDVLDRQTVMLPGAAVIEEQIRSIASRIIELLAEEKRLNLMIEQRAKMIPEVDLLQSIPGVGPVYAALIAVEIGDIGRFRDSNHLASYAGVAPRKEESGTSVHKRRKRKGGNRRLKNALMQSSQRSVQCDPLARAYYERKRAEGKKHLQALRALARHRVTVIFAMLNEGTFYEPPVEVDENGRG

SEQ ID NO: 61147 - protein, 332 aa, unidentified
MSCLRHPADAYLRLGRHQQHESESGSDTAGQAVFGGVDSHADTLHVAVISDNGSRLADAEFVTTAAGYAATLAFLDAHGHVIAIGVEGTSSYGACFTRAARSHGHPVVEVNRPDRAERRRTGKSDPIDAYAAARAALSGRASSSPKDDTVAGIRALHNAARSTVKARTAALNQITHILFAAPESIRAKYGQLKGTDRTDALARLRSAGDAVHIAVLTALKILARRVKALTAEHTALTKALDSEVTVHNPGSRATYGVGPDTAAQLLITEGGNPERRRTEASFAALGGAAPVPASSGKPTGTASHEAATGRPTPPSIASRWSVCQQTPAPANT

SEQ ID NO: 61148 - protein, 423 aa, unidentified
MSYRIAAIDVHKKKLAVVAADVDVEDEYQFERRWYGSNPEQLRVLSEWLREQQIEEVVMESTAQYWKPVWGALERYWKPRCQSRESAGRMSGTLHLAQALSNRGRRGRKKDFRDAERLVKRLVSQELVLSFVPDTEQRMWRTLTRTRYQRTRDKVRLQNQMEALLEEAHIKLSSLVSDLLGASARRMLKALADGETDPAALAALADQRLRATPAQLHDALGACTELNPVYRRLVKMTLEDLQLVEQQISQLDQEMASLLRPHQDAVERLAVVPGLGVDSVQQIIAEVGAKAATFPSAEKLSSWVGACPGEEESAGVNRSRHSPKGNRQMRRVLNQAANAAVKHKGSIFEIVYRRLVPRLGHNKTIGVIAHRLCYLIWIILHKGVRYEERGPSVSEKSRQRRTARMVRTLRILGYRVEPLANPA

SEQ ID NO: 61149 - protein, 439 aa, unidentified
MSDSTVFIGLDTHKKDHKAALFVPGSDAPQEGTIRNEPAQIERWVRRLQRKFPSQAIVVAYEAGVCGFDLQRRIRRPGVDCKVIAPSLIPIRPGQRVHTDRRDAAGIGRYLRDGQLTEVFAPNEQQEALRDLCRSREAAVEDLRRTRQRVLKFLLRRGLQYTGSKHWTQGHLAWLGGIRLEAPLAQEVLGGLLLEMEHRQERVAQGDRRLQAVAQEPEYRQAVGWLRCLQGVDTITAICLLAELYSFGRFPSPRQLMSYLGMTPSEDSSGLAVRKGPITKAGNRRVRRLLTEAAWHPRHRSTASKALRSRREGQPAWAIAIAQKAQERLHRRFGRLSQRGMPANKVVMAVAREMAGFVWALLQGPPSPGVPGALRESRKRRTVRLSPGAPGRGPAGGPPEGRPPVPVGRLAALGSLASVALSSARVAGAYAALPLAVKR

SEQ ID NO: 61150 - protein, 415 aa, unidentified
MALKIVYKICCGIDVHKTFVVACIASTDKQGVTSYESHRFSTYTKGLKNLLQWLLERNCKDVCMESTGKYWIPIYNILEKDCSIVLAHPKYVKAIRGKKTDKKDAKWIADLFKHDLVAGSFMPPADIRQLRDLMRYRFKLTCFKSSEKNRLQNCLTVSNIQLGNVVSDTFGKSAQAILDKILENPEDTSFDLEPLVFKSLKKKLPELRDAIDGYITPEQAGKLKIIKAHYESLESRKAELEELILALAAPYQQELAILQTAPGIRSDFTAIGIISEIGTNMEAFPSAKHLCSWAGLTPTNNESAGKKKSVRVSKAGCYIKPLLVQCANAVVKSSKHPEMRNRYLRLKKRRGHKKAIIAIARMLLTALYHMLKNGENYNAELYRKSDLPSVDREITVEQAILIAKKQGYKIKSATA

SEQ ID NO: 61151 - protein, 340 aa, unidentified
MEYFAGLDVSMEETHVCVVDRDGTIVHQAKVLSTPADLEAELARAPACCRIVFETGRMAPMTDHGLLERGLPVVCVESRQAYQALKSLATHKTDRNDARGLARLARTGFFKPVHVKSLPAHVVRSLIIARKKLVGQRVTLENQIRDLAIVFGVRLPRALSPAFIDQALRASEGINGLSVAMRGLVAARTAVLAAVAAIDADMKKMIRASDACRRLMTIPGVGQLTALAFSAAVDNPERFKRSRDIGAYLGLVPRSYQSGEVDYTGSISKCGDKRVRTLLYEAANVMLTRCKHPLKLRDWAFAIAKRSTMRKARIALARRLAIIMHAMLRDATEFNRRSRM

SEQ ID NO: 61152 - protein, 353 aa, unidentified
MPKSSSAEIAVIGIDIGKNSFHVVGHDKRGAIVLRRKFTRGQLETWLANLPPCLIGMEACVGAHHLARKLALLGHDARLMPAKYVRPYAKGQKNDFNDAEAIAEAVQRPTMKFVATKTADQLDLQALHRVRERLVSQRTGIVNQIRAFMLERGIPVRQGIRFLRTELPMILATRTDVLSPRMLRIIEGLADDWRRLDERIEGLSTEIGAIAFADPNCKRTMTVPGIGPIISSATVAAIGTGDMFSNGRDFGAWLGIVPKQMSTGDRTILGKISKRGNRYLRKLFVQAAWVVLVRPDSWERYGLQGWIAAAKKRLHHNVLAIALANKLARITWAVLAKGRDFEFVRTADAPRSA

SEQ ID NO: 61153 - protein, 418 aa, unidentified
MKVVFPTCCGVDVHKSFLVATIIKTPKESLQPSYQKKRFSTFNSDLNRFADWLHENDCLDVCMESTGKYWVPVFNILEKRGIRVIIANPKWVKAVKGNKDDTKDSKWIGDLFRIGLVKSSFIPAKDIRILRELTRYRYKLTSMKSSEKNRFQNAFTVCNVALDSVVSDMFGKSATAITDYLTSDEDFDPQHCVSLLHRSLKKKAEDVLSSIEGYEITLEQKCRIGIVRDHLHYIEKLIERVDICINTMVEKYDGAISLLRTIPGIDRSSAITVISEIGVDMAQFGSSKRLCCWAGLTPGNNESAGKKKSVRISRAGVYLKPVLVQAAHAAVKDKLNPYYALKYERIAKRRGKKRAIVAIARMILTAIYSMLSTGEIWNPVDLFKVDMPEHLKEQQLQKAMKQAVRFLEAQGLTVLDSA

SEQ ID NO: 61154 - protein, 351 aa, unidentified
MSQPASTTIAVMGIDIGKNSFHVVALDQRGAIVLRQRWSRGQVESRLANMPPCLIGMEACVGAHHLSRKLKGLGHDARLMPAKYVRPYSKGQKNDFRDAEAIAEAVQRPTMKFVATKTADQLDLQALHRVRERLVSQRTGIINQIRAFLLERGVAVRQGQRFLRAELPRILTTPPDVLSPRMLRVIEDLAGDWRRLDERIEGLSGEIEAIAHRDAGCERLMSVPGIGPIISSAMVAAIGRGDAFAKGRDFAAWLGLVPKQISTGDRTILGKISKRGNRYLRVLFVQAAWVVLIKPKSWERHGLKPWLEAARKRLHHNVLAIALANKLARIAWSVLANGRNFEAQRIPAVAQ

SEQ ID NO: 61155 - protein, 318 aa, unidentified
MTDKAATRQRVLGIDVSCHRVTLYDEATGRTHDIANDIDSLHDALAGYTGHALAVCEATGGHEDTLLAALHVLGIPAHRADAAKVKAYIRSFGKRAKTDAIDARWLARYALDRGATLPRWQPPVPAQAELAALVARRLDLVAIKTQESNRLKAPRSDLVAEHIRAHLDQLAEHIARLDARIAALVADQPDLAQRAQALRSVPGIGPVHAPLLLATLPELGTLGRRQAASLAGCAPHPRDSGTRAGPRHPAGGRRQIRPALFIAAMAAARGTNPLADFYRRLVATGKPKRLALAAVMRKIVTIANARLRDLPHPASQLT

SEQ ID NO: 61156 - protein, 344 aa, unidentified
MGEVSTIGLDIAKAVFQVHGVDGSGAVVIRKRISRVKVLEFFADLPACLIGIEACPSAHHWGRELAGLGHTVKLMPPSYVKAYLKRSKNDANDAEAICEAVTRPSMRFVPIKTKQQQTALMLHRTRQLLVRQRTMLSNALRGHLAELGIVSAKGRNGTTELLKIIADGADNRVAASARGILNVLARQYSALGAEIGSIDKGILTLHRSCEASRRLAEIPGIGPIVATALVAVIGDWRAFASGRNLAAWIGLVPKQHTTGGKDRLGSITKQGNRYLRWLLVVGAMAVVRYAKKHGTKNRPWLGQLMERRPTKVAAVALANKIARVAWAIMVHGDRYKEPKLLMAA

SEQ ID NO: 61157 - protein, 343 aa, unidentified
MQSISTIGLDIAKSVFQVHGVDAASQVVIRRQLKRRFVLSFFEKLSPCLVGIEACASSHYWSRELQALGHTVRLMPPAYVKPYVKRQKNDATDAEAICEAVTRSNMRFVPTKTVEQQSGLMLHRARHLFVRQQTAVINSIRAYLAEFGIVAPVGRRGVEQLLEVVADTADRRLPEVARACLAALGIQLRALKAQILEFDRRIIVWHRSSATSKRLDAIPGVGPALATALVASVADAKAFRSGRDFSAWVGLVPKQNSSGGKDKLGSISKQGDRYLRSLFTAGALAVIRYAKIHGTGHRPWLTELLARRPTKVAAIALANKIARMAWAMMARGERYREPAALAA

SEQ ID NO: 61158 - protein, 331 aa, unidentified
MRKRLGQVEGFVGVDISERWLDVHLLPSGEQAGFSRDRRGIARLVAWLASKGRLLVVVEATGGLERGLRAALAQAEIAVAVVNPRQVRDFARAAGLLAKTDRLDAYALALGACPRAALWAGPGGERLRPPPSPARAPADQALAALVLRRRQLAQLIEAERNRARRTEEPLVLASIEAHLGWLQAALAELEEQIAARLATNPVWCAKAGLLASVPGVGTVTVSTLIGLLPELGHLSGKAIASLVGVAPFARDSGLMKGRRTIWGGRHQVRAVLYMAALVAVRHNPALRAFYLRLVAAGKPKKLALTAAMRKLVVTLNAMLRDGTPWRAPQSA

SEQ ID NO: 61159 - protein, 322 aa, unidentified
MIIIGVDYHPSFQQIAFVDQETGECGERQLNHSDGEAEKFYRELQQRGVRVRVGMEATGHSRWFERLLAELGFEVWIGDAAEIKRQRVRKQKTDREDARLMRKLLLENRFPRIWVPSPENRDLRQLLWHRHRLVQMRTRIMNQLQAVAMNEGYRWKKKLFSAQGRALLEKLSLAPWASRRRKELLELLDQLDPKIAELTAAVEQEANKRPEVVLLMTHPGVGPITGLVYVLVIGTPERFPCGKKIGSYTGLIPCEDSSAGRQRLGHISKQGNTLLRFLLVEAAQAAARCNPDWRRKYLHLMMRREKRIAKVAMARKLAVRLY

SEQ ID NO: 61160 - protein, 412 aa, unidentified
MDVQYNLAGIDVHKRMLAVVVTNARDTELQFECRRFGTTLSELRHLLAWLQERAVQEVVMESTAQYWRPVWLALEGSCRLHLAQARSNRGPRGRKTDFRDAQRAVSRLLSGDLVLSYVPEVEQRYWRTLTRTKYQLTRDKVRLQSQLESLLEECQIKLSSVVSDLLGASGLRILRALAQGETDPARLAELGDKRLRASDAELKDALSGVPQRIHRQLLSLYLARFDLIESHMENLDGMIAEEMKAHQHAIVRLAELPGLGIDSAQQIIAEIGPKAAAFPSAAQLASWVGVCPGRQESAGVSSSDRSAKGNRSMRRLLNQLAHAAVRKEDCQLQIVFRRLSSRLGYAKAVWAIAHRLCRLIWKVLHEGVSYVEYGPTPTPLALKRRRQRLVTQLKKLGYQVQLLPITLDRSGV

SEQ ID NO: 61161 - protein, 407 aa, unidentified
MEVVYRCCCGIDVHKKVIVACLVNGGKQELREFGTTTSEIKTLANWLTESSCEMIAMESTGVFWKPLYNLFELMDLDAMIVNAAHMKALPGRKTDVKDAEWIADLLRHGLLKASYIPNREQRELREITRYRKSLTEERCREVNRLQKILEGANIKLDSVVKDITGKSARKLLQRIIDDDIPDSDEVSKLVHGRMRPKLDQIVASIEGITTPLQRKLLAQIIDHIDDLNRRIGELDKLVQEYMAEYEAAIEAIDEIPGIARRSAEVILAEIGLDMGRFPSAAHLCSWAGVCPGNYQSAGRRKHGKTTKGNKALKTILTQCAKSAKTVKSSYFFAQHQRISARRGKNRATLAVAHSMLIAIYHILKNKTAFHDLGSDYYDSFNRDRKINSYLKRLKALGWEPDAISNSA

SEQ ID NO: 61162 - protein, 428 aa, unidentified
MKRKAAVCLPFILTRGLLWFLPEQSRTNGRDTRVPEALQCKQFELANTPMKTELYVGLDVDKEWIVTAVAEWGRNGPVHDLGAISNDLHALEKLLARLRKRYGPDVRICACYEAGPWGFGIARRLHQLGVECTVVAPSLTPTRSGDRLKTDKRDARKLARLLRAGELTEIYIPEPTDEALRDLCRARSDAVDDRRRSRHRLKAFLLRHGYRYQGKSAWSTAHERYLRELVLPHPAMKVILEEYLISVQLASERIARTEAAMSDLLGKWRLEPAVRALMAMKGFQTVAAMIVVSELGALDRFTHPRQVMAYLGLVPSEKSSSDRRRQGSITKCGNAHARWLLVECAQHYAAPPKVSKELSRRQQNQSRAVRLISWKAQNRLHQRYVRLMARRLQRNKVIVAVARELCGFIWELLRSQECYHAPCPSGMN

SEQ ID NO: 61163 - protein, 326 aa, unidentified
MNSTDSVAAALPVLGLDVAKASVQAELRSSGNKVRFGFDNNLKGFAQLAGILKEHNVPKVWAGLEATGPYSHALALWLHGQAHRVSLLNPRRVKQYARSAGNRNKTDLLDAAIIADFVCAHEPAPWQPPTLEVAQLQALVRRREELSLMLQAEKNRLEGVAPNVRSSLERILATLSAEKARLEKLITQQIRSHPQLSRDHQLLCSIKGIGSLTAAILLAEMARPGQVERARQAAAHAGLVPRREQSGTSVRRNRGLGKEGNRYLRKALYMPALVAIKYNAPLRHFASRLRAAGKPKMSVVCAVMRKLIHIAFGVLKHQKPFNPSLA

SEQ ID NO: 61164 - protein, 425 aa, unidentified
MDAHAPAERRVTVGVDTHADVHVAAALDQLGRLLGTHAYPTTAAGYAALLRWAGRFGVVERIGIEGTGSDGAGLARWLCARGLAVVEVERPKRQTRRRRGKSDPQDAEAAARAVQAGTATARPKGGTGPVEMIRALQAVRRAAVKARTQAANQLHALVLTAPEELRTRLRRLSAAQLVATAAAFRPRRPLTTPTAATQWALKSVATRSRQLSAEIEALDAHLGQLVATAAPALVAVKGVGTDTAATLLVTAGDNPDRLRSEAAFAHLCGVAPIPASSGRTVRHRLNRGGDRQANRALHLLAVRRMGWDPATRAYTARRIAEGKSTPEILRCLKRYIARELYPLLAHNPTLPPPTLGTGGSRSEPATDPPSGERRSPAGPERSAGPRPQAGLTAAGGGAPETSLSPPRVASSGSSTRDRLTSIRAS

SEQ ID NO: 61165 - protein, 459 aa, unidentified
MTRKKKMELDIINPDAAGIDVGSRSHYAAVGQSLEDVKEFGVYAEDLTALCLWLLSFGITTVAMESTGDYWQNLYAELMKHGIDVILCNGKFTKHPKGKKTDVKDCRHIQKLHALGLLTSSFLPDETTEKLRTYCRQRKNLIASASGASRKMQKYLKFLNFRLDVVVKDVCGLTGLAIIEDICKGNLDPESLSSHRHYNCRKSKEEIAKALHSNNREDFLFGLKQEYQAYQFFQKQIVACDKEIDVFIKEELRKTPEKKKLKTTDKPYKRQNKNAISIKNFNQIAFQYFGGVDLMAIEGLSHATVLSIMSEIGPDGFYKFGTSKQFVSWARLAPNNKISGGKVLSSQIPKGSNRLKIALRQAANAIGNLKDTHLSDFFRRVAFRKGRQAAVSATARKLGVIIWTMVVKQVPYNPPSEYLFLDQKRKIAVAKRIMKNIVKFDLKPDDIGFGNSLIPNYNF

SEQ ID NO: 61166 - protein, 386 aa, unidentified
MDRFVGIDLHKNSFSVCVLDSEGCIESESAHRISPASLDAFRCGLSRSDTVCFEVSTSAWEMHDLLCDRVGRVIVANPMKTKLLCGGDPKTDKLDARRLAQLTQDKHIAEVWVPDHETREMREMVRFRQQLTNTKTRMGNIRLCRESLEAFKAADPYEALVGPKRSEARELMSQCAEDMEKVADAQLAKLDSVFTRWALSDTRALQLMRHPGVGPFVAAAYVSAMGDMTRFPNSKKAASYTGLVPRVHTSGETSYNGRITKAGRKELRHALVQAAWVAIRCDQELASFYRRIAKARGSGKAIVAVARKIAVRLYHLSVDGTCDGLMSEEKYTAKLARLISTHARPCAGGGTIIAAARKVAKQAYNTEEPDGGQAPTQALPITISSA

SEQ ID NO: 61167 - protein, 414 aa, unidentified
MIREKFLYIGCDLHKAQHTAVLVNCWNEHLKTITIDNKPSEFSTLWQKVQRVAIKYDLQPVYGLENAYGYGRSLAVWLIEKGAVVKDVNPSLAYDQRKSAPIMEKNDEHDAYSVATVLINQFHTLPDAKPEDAHWTLSQLVTRREVIVKEGVRLKNGLHAHLFTAYPSYHQFFSEIDGKTAMYFWKTYPSPMHLKDITAEDLLSELKSVVPGTRKNKAQLILECVQNDGDTLRDFQESRDFIVQSLARCLENQKVELSFIEAEIKRMLGHFPYKLTTLPGVDVVTAAKLIAEIGDISRFKNADKLARCAGIAPVTFSSSGNARDVSTRQGNRFLNGIFYFMAVTVIGVRPGTKQPFQPIFREYYERKMSEGKTPSQALVCIMRRLVNIVYGMMKTQSEYRPFVPNEKKPAKQNS

SEQ ID NO: 61168 - protein, 351 aa, unidentified
MIVIGIDPHKRTHTAAAVEQLTGELVDELTRPAREQGHGELVAWACSLADQRLWALEDCRHVSGQLERFLLARGERVVRVPPKLMAGMRRSARSRGKSDAIDALAVARAALREPSLPAAQLEGRSREIRLLFDHRDDLVGERTRIQQRLRWHLHELCPELELPAGALDRQVWLQRVARRLARLEQTTQVRIGRELVRRISELSRRANELERELEALVRSEAPSLLELIGCGTLTAAKLVGETAGASRFASDARLAMHAGVAPLDASSGDQRRHRLNRSGNRQLNCALHRLAVNQGRWHPGAAAYLERKQAEGKSRREALRCLKRHLARVVYKLLVDVNQPTAAPPAAFALT

SEQ ID NO: 61169 - protein, 422 aa, unidentified
MLGIGIDWAEEFHDIALGTQEKGVVEQFRIDHGPVGVATLIEHVARLEPDPAEVRVVLETRHGLLVEALVDAGFTVVPVNPDVVARRRGPARKKDDAEDARICCLLALDRHVALKTLIPHGENGGELRAIGRDDERAARDQRRLLNRLRADLQTTYPAALVLAGKDLGSPTVLRLLERWPTQPELAEASREELVTFARAGRHGWPDRFADRVAAALTAPSLPTRDYLVRAKAAGIRLGAVQLLALHEARRGWQARMAELLLGGPRTGRDHTVKDPDPGKAFPGGEIYLSMPGLGDLLAARVAGEIGEHIHQFDSPAGLQCYAGSAPVTRRSGKSDFVVARRLAHNHYLGAAVHQWAFCSLLRSAWAREFYDSKVAAGKSHHAALRALSNRWLEILWHCLTKGVLYDEAVHVANRNRALGHAA

SEQ ID NO: 61170 - protein, 314 aa, unidentified
MTFYLGIDVSSKTLDVAFFSPTDQPMRCEQYANNAAGAKKLLHAMAELDVEHIVLEATGGYENLILDALAVQYSTTRVASHRGTAFARSLGLFVKTDRVDAMMLARMAQTIPPQPYVPMGPAQRHLSALVKGRDQLIGQRDDNRRRIKQSESPIVTAALQRVNDLLAMEIKALEGQMHEAVHARADGRAEQLLQVPGIGKIAVATLLAFLPELGQRQNRQISALVGVAPYTKQSGRRDGPRQIMAGRPFVRRILYMAALAAIRSAKSPLRAHYQALVARGKPRKVAIVACMRKLLITLNAMVRDGTTWRGLEPA

SEQ ID NO: 61171 - protein, 422 aa, unidentified
MHTWSELTHLVGFDYASDHHDIIVVEKQTGAIVCDFPFDESAEGWQDFHQRLRPFPAVGVVIETSVGAVVERLLDANYTVFPINPKAACRYRERKAPSGVKTDRLDAWANADALRLEGGQWKPLSPEDPMIVELRQLTRDEVALIAQRTSLVNQLRQALHEYYPTALRAFDNWICPSSWSFIEWFPTSQNLAAAGPKKWKKFFHTVKLNDARKAEERIALFQHATDFCGSAPTTSAKSLLALTIVKLLRTLEAQLKTYRRRIQDLFEKHPDHDLFGSLPGPGGKIAARLLAETGSDRQRFDSAQSFQCYGGSAPVTYQSGKSRRVRMRRGCNKHLRTALHWLADLTREKCPWAEAYYQAKREQGMHHAAALRALGNRWAKILWKMWQTRTRYDADLHQRNQIAHGSWLLVPPKPAVTQSAVT

SEQ ID NO: 61172 - protein, 392 aa, unidentified
MRIVMGVDISKDKLNLCLLGADGEILDERKITNDLVGFEIVTGLYNEYKPEIIFEATGVYSKRFQYFLELNNLSYICINPLKAKKEMDTLRVTKNDRIDSKKLALLQLRRQYSFTKLEEKIYLELRRRYRFYQTITDDSVSAQNRLHKVLQETFSEIDKLFAGNELNLYRILEVFPHAELVTIQDVNAIATSISKVMNKRPEQVLQRAEKLKHLASKTAVSVAVDSYALEEVRYWANRILQLAQMKQAMLDEMYQVAESLDEVKVLESIPGIGLAGTLGLVAELGDIKRFSRPQKINAFLGLDIRFNDSGQLTTRGFITKRGNSAARKLLYRVTLSIIATSRAGNNTSVSDWYNRRSKNETHGKKKIIVGAMDRTLRLIHHLVSENELYSVS

SEQ ID NO: 61173 - protein, 335 aa, unidentified
MKYNSFIGVDISKLWVDISLITIEGEVVDLKCENTVPTLKKVFTKLFDSNDLLRENVLICAEYTGHYTNPLKVFCLQNDYNLWLESGAEIKLRSGVVRSKNDKVDALRIAEYAKRYIDKVKLQTIDDESLEELCFMSSERDMYIKERAKYKAQLKDLPGYINPKLFIARKKRFKKQIRSLSKVISQLDGYIQQLINKSDVLIRQFKQLQSIQGVGPKVALETIIATKGFKKFDNGRKYCCHIGVAPFSYQSGSSQRSKNKVSHRANKKLKTLYHMAALSAIHTNGEFKVYFERKVKEGKNKMTVLNAVRAKIVHRMFALIRDNREYEIFYTDSLA

SEQ ID NO: 61174 - protein, 344 aa, unidentified
MDNHTQYSGFAGVDLAKKVMQIHFVTGDGEITDKQVKRAEFLDFFRNRTKCLIGMEACGASQDWARKLEAMGHEVHLMSPKAVKPFVSGQKNDYNDAIGIYKAMFNGVRRVPVKSTEIRDLQTLRRIRSQVTKDKVKEINHVRGLLAEYGIVMGKSITAFNKGISSALESLKERGDVSPLVAEELRTTVEAIKAKIERQKKLDQEIEQLARGCKNYENFLKTPGVGPFTAAMLCVLLCDPAIFANGRQFAAYIGLAPRSRGSGGKNFIIGIPSKFNCDSESRAVFVECAQALARYKNKSPWVDGILRRKPKKVAVIAIANKLARQVWAMANKGESFKQMTILTA

SEQ ID NO: 61175 - protein, 377 aa, unidentified
MEDDSTTLYVGLDVHKESITVAYARGMGEVELLGKTGTTQADVDRLCRRLQSKARHVCVVYEAGPCGYGLYRQLVQRGFGCMVCAPSLIPKKPGERVKTDRRDAIKLVRSLRAGDLSSIYVPTVDDEAFRDLARTWVSAKDDLKRARQRVKAFLLLHGVRYTGRADWGPAHRRWVSAFAFESVWQQLAFEEQRRAIEDRLAQCARLEEALREAVLNWRFYPVVLALQAMRGVQFTMAVGVLAELGDLSRFAHPSQLMAWLGLTPSEHSSGEKRRQGSITKNGNSYARKLLIEAAWSYQHPARVSPEIQRRQEGIPKPIVDRAWEAQMRLCRRYRKLVARGKQKNIAVVAVARELAGFIWDISQLAMSLAVPHEGLTA

SEQ ID NO: 61176 - protein, 385 aa, unidentified
MANQNDLSRSLVALEQNNTIIAVIEMSLNYWLIAGIVPGVDRHPLKKLNVDEKALLQLLRQWRDEAAKAGHVITRMAVAFEAGRDGFWLARWLRARGVDAHVIHPTSVAVPREHRRAKTDRLDTELLKRAFLGWLRGEPEHCRMAAIPSLQEEDAKRPTRERENLVGERTRIINRTKACLVRFGIRNFKPTLSKAPERLNELCTPEGDLLPPNTLAELRRDMARLRFIIGQINEIEAARLLRLEQARVEGPTAMVRLLARVIGVGIETADMLVHEILSRDLRDRRAVARYAGLTGAPDESGSKRREKGLAKAGNARVRRGMIQLAWRFLLHQKDSALTQWYRARTASAGRKRKTMIVALARKLLIALWRLATTGEVPTRVVLRAA

SEQ ID NO: 61177 - protein, 404 aa, unidentified
MLFVGLDWAETHHDVAVMDESGQVMTARRVAEGLAGLTALHELLAAHGEDSAEVVVGTETDRGLFVGALVAAGYQVYAVNPLAVSRYRDRHRVSGAKSDAGDAKVLADLVRTDRHNHRPVAGDSELAEAVKVLARTHQSLVWTRRRQVNQLRSLLREFYPGALAAFGTEVGSRDALAVFQVAPTPTLGRGLSRAKLAAVLRRAGRQRGLEGRAAELQAALRTPQLQAPGVVAEAYGAAVKALVEVIGTLNRQLEQVGEQLERHFEIHPDAEIVRSLPGLGVVLGARVVAEFGDDPTRYANPKARKNYAGTAPITRASGKRQVVVARLARNRRLADACYLWAFSALTASPGARAYYDRLRAAGTTHQQALRALANRLVGILHGCLRHRTTYNEFQAWPATTQHAA

SEQ ID NO: 61178 - protein, 347 aa, unidentified
MRFYNRQHRHYCGIDLHVKTMYVCMLDTTGQVLVHRNVPSTPEALLAVVAPYRDDLVVAAECMFTWYWLADVCAAEGIPFVLGHALAMKAIHGGKAKNDKLDSFKIASLLRGGLLPQAYVYPAAMRATRDLIRRRLHLVRKRGQLLAHIQNTRAQYNLPAFGRRLAYPANRDGVREHFADPSVRKSIDVDLTLVAQYDTLITDLELTIVREAKRHDADAFHRLRSVPGIGKVLALTILYEIHDITRFDRVQEFASYARLVKCQKQSAGKTLGTSGAKMGNVHLKWAFSEAAVLFLRHTKNGKKLLAVIEKRHGKGKALSILAHKIGRAVFYMLSRGTVFSAEKFRAA

SEQ ID NO: 61179 - protein, 400 aa, unidentified
MISVGIDVSKGKSTVCILKPYGEIVASPFEVRHTESELNNLIQMIQRLDGEIRIVMEATGIYHLPMLSALQDQNFFVAVINPFEMKEYASRGLRRVKTDKQDSITIANYGIDNWYRLENHQGSDDVYSELKLLGRQYCHYMELHVKALLELTHMLDYTMPGVKKEFNSWNESNGKDKLSDFVERYWHFDNITAMTKEDFIEDYISWAAEKKYHQNRTKAATLYDLASDGIPTLPANTPSTKMLVLEAVRVLREIDSTLLKIITRMKELAKTLPEYETVRAMGGVGDVLAPKLIAEIGDIRRFHSGKALIAFAGIDAPPYESGQFVGTNRKISKRGSKLLRKIGYETMRVLKTHKAPEDDAVYRFILKKEAEGKSKRQAKIAGLNKFLRIYYARVSEVYKA

SEQ ID NO: 61180 - protein, 444 aa, unidentified
MLPILYRRVAGLDVHKKTVVATRMRVTDEDRAEWETQTFGTTTPDLLQLHDWLLEWQVSDAAMESTGDYWKPVYNVLEDTFELLVVNAKHVKHVPGRKTDVKDSEWLAELMMHGLLKASFIPSRPQRALRDMTRYRTTLVQERTRLVNRVQKLLEGANIKLSSVATDIMGMSARAMLAEIAAGRANARFLADLARGRLRAKIPQLEKALTGLVMPHHRFLLAKQLVHIDFLDEQIEEISAEIGRQLEAMSRLPEGSESETGRGPAEGCIAGEGQPPLSWLEAVALLDTIPGVDRRTAEKMLAEMGLDMSRFPTAGHLATWAGLAPGNHQSGGKRYSGRTTKGNKAMTTTMVMAAWAAVRTKDTFLKARYHRLAARRGKKRAIVAVAHSMLVSAWHMLTYEQAYQELGGDYFDERKKEAKVGYYIRRLEKLTGGSVNIAITPVAA

SEQ ID NO: 61181 - protein, 346 aa, unidentified
MSNDIGIKTIKTLGIDLAKDSFQIHGVNDLGQAIARKKLSRRKLMLFMINLPPCLVGMEACGGAHDWARKFRAMGHDVRLISPQFVKPYVKSNKNDAVDAEAICEAVQRPNMRFVPIKGIEQQDIQSLHRARSQAVSHRTAQVNQMRGFLMEYGVVVAKSVAALRKALPGILEDADNALSPMFRELLAGLQDELHRLDERIAGYDRQIQQLSTQSDACRCLMTIPGVGPMVATTLVAAVANAKAFKSGREMSAWLGLVPRQHSTGGKPKLLGISKRGDTYLRTMLIHGARSALRVAKKKQDRRSRWAVAVESRRGQNIAAVALANKIVRTAWVILSRGEEYKAATV

SEQ ID NO: 61182 - protein, 292 aa, unidentified
MNIKHFIGVDISKSTLDWAVCTAEGGIIYQSQSANSEEDIKATIKIIKALPNFEYLKSVCCMEHTGIYNVHLLSYLNKFHFPIWLENSLQIKRSGGVQRGKNDAIDAVRIAQYAFRFKDRIRVWQPPRQVIQQLAALSAVRHRLLIVRQQLQQPLNEQESFIESSLQKQLCKTCQASLKAINTDLEKIEKQVKEIRDKDDRLKELFEFITSVPGIGVVTASEVIVATNEFNNIAEPIKLACHAGVAPFEHQSGTSVRGKTSVTHHARKRLKSLFHLAAMSAVRVKGEIQDYY

SEQ ID NO: 61183 - protein, 346 aa, unidentified
MMIIGCDFHPSWQQVSWLETETGESGERKLVQASGDAERFYRQLPAPALIGMEATGNCHWLVDLLGELGHELWVGDAAQIRASCVRKQKTDRRDAEHIRILLQEGRFPRIWMPSAEVRDLRQLLLHRYKLVTMRARVKNELQHLCLNQGVQRKHKLWSQAGQKVLRELPLRPWAARRREDLLALLAMLDQQIEPLDRAVKEEAQRDKMALLLQTQPGVGAVTSLAYVLTMGDVSRFQRGKQVASYLGLIPREHSSGGRQKLGAISKQGNRMLRMLLVEAAQIAVRFDPGLRKEYLHRCHQKPKAVAKVAAARKLAVRLYWMLRTQKPYPEVVRIESSPRVPRVGAS

SEQ ID NO: 61184 - protein, 367 aa, unidentified
MALKIVYKICCGIDVHKTFVVACVASTSDKGITSYESHRFSTYTSGLKTLLQWLIDRNCKDVCMESTSKYWIPVYNILEKGCSIVLAHPKYVKAIRGKKTDKKDAKWIADLFKHDLVAGSFMPPSDIRQLRDLMRYRFKLTCFKSSEKNRLQNCLTVSNIQLGNVVSDTFGKSAQAILDKILENPADTSFDLEPLVFKSLKKKLPELRDAIDGYITPEQAGKLKVIKTHYEDLESRKAELEELILALAAPYQQELAILQTAPGISSDFTAIGIIFEIGTNMGAFPSAKHLCSWAGLTPTNNESAGKKKSVRVSKAGCYIKPLLVQCANAVIKSTKHPEMRNRYLRLKKRRGHKKAILPENRSSSSRA

SEQ ID NO: 61185 - protein, 315 aa, unidentified
MDTQVFVGIDVGKDVLFVAIRPFGDNLEIANREDGIADLVKRLRFLRPTLVVMEATAGYETPVAVAIYRAGIPVVISNPRLVRSFARATGHLAKTDKIDAGVIAHFAELIRPEPRRLEDPDEERLGRLVKRRKQLLRMIVMEKNRVAKGVPEVRKEIQKHLDWLAKDLERIDQALNDFIQSSPIWSAKNDLLQSVPGIGKVGAQAIISDLPELGTLNRKQIASLVGVAPLNRDSGNFKGRRSIWGGRAHIRTVLYMVAVVASRCNPVIKEFYERLCKAGKPKKVALTACIRRLLAILNAMMRNGTRWGEFKPAIA

SEQ ID NO: 61186 - protein, 322 aa, unidentified
MSKTAVGIDISKVKFDVALILPNKKFKHSKFDNNPQGFLKFITWLNAFELPHIHIAMEATGIYGDALACFLYDKGFIVSVVNPLRIKKYADENLQRTKNDKHDSKTIASFCLEKTLSPWQPAPAHVRELQALIRRLESLQNMLGQENNRLESLNSAVHDSIKTIISSLESEIVSIKLRIKQLIDNDPDLRNKKKLLETIPGIGESTIAQILGFIQIENFSSSKKLTAFIGLNPQERSSGTSLRGYIGLSKKGNSRLRKAFYMPAIVALRFNPIVNTFCERLKTNGKAKMCALGAAMRKLVCIVFGVLKSGLPFDPALAVNNA

SEQ ID NO: 61187 - protein, 365 aa, unidentified
MGVPTMAQAKTFVALDVHVSKTVAAIIDRDSGELRRQRLSGRAAEVAGFVAELPGPVRATYEAGPTGFALARRLEVAGVDCLVCAPGMIPRGPSDRVKTDQRDAERLVRLLIAGELHRVTVPSIEAEGLRDLVRAREDLRGDLMSARHRVSKLLLRHDVRFEGGQRNWTQPHLRWLSTVRFEQPGTQAAFDDYRGAVEALIIRRGELEAQIGEQLPGSPWAQTAKRLMCLRGIDTLTAAGLCAEIGDFGRFRHPEQLSSYLGVVPSEHSSGTKRRQGSITKSGSRHARRLLVEAAWHYRQPPRVSEPLRRRQAGVDPEIVALSWKTQRRLHRVWQRMEQRGKRRTIIAVAAARELAGFCWAVSTA

SEQ ID NO: 61188 - protein, 314 aa, unidentified
MNKNREEIRPADYVAIDISKSTLQIQDAKGSFCVANEPSGLQDLITALKAHSNPLAVFEATGGYERPLLDALRKAGIPMAMVNPARVRDFARSEGIRAKTDPIDARMILAFAKSKQIRPMAAPSAACVKLAALLDRRNHLTEQLAREKNRLQNSEAFIHRSIERMIRVLEKELAAIEKEIQALVDSDPGLKARAEIIQEVQGVGPVTAWTLLAYLGEIEDLSRNGVVAMAGVAPFNRDSGKLSGKRCIQGGRAKVRKCLYMAAHTAARCNPVIAAYVKGLRDRGKPYKCAIVAAMRKLLIHIQSLLKTARFSPC

SEQ ID NO: 61189 - protein, 413 aa, unidentified
MKDIVYRRCCGLDVHKDTIAACVRWIEDGGESRKENRVFGTTRQELEQMAAWMEQHQVRQVAMEATGVYWRPVWNVLEHRFEVKLANAQHIRNLPGKKTDRKDGEWIAKLLQYDLVPASFVPSTPIRELRDLSRTRVRLVQERVAVANRIQRILEDANVKLASVVTDVLGYSGRRMLAAMIDGQSDPAQLADLARTTLRRKIPRLRLALDGHVTEHHRFWLRQMMDHLDFLEGKIFVLEQEMDRRSRPYEGAIALWITIPGVRRLVAMALVAEIGVNVDQFPDAAHLASWAGLCPGNNESGGKRKSGKTRKGNIWLRRALCEAAWAASHTKNTYLAAQFRRLAARRGVKRATMAVAHSILVIAWQILKNRCPYQELGGDYFDRLRSAGLQRYYVKRLQQLGLTVAIEPKSASA

SEQ ID NO: 61190 - protein, 387 aa, unidentified
MYYVGIDIAKLNHFASVISSDGEVLIKPFKFTNDNDGFCKLLSALAPYECGSLIIGLESTAHYGDNLVEFLVSRRYQVCVINPIQTSTMRKNNIRKTKTDKVDTFIIAKTLMTQPHRFYTLEDIDMMHLKNLGRFRQKLVKDRTRIKIQLTAYVDRVFPELQYFFKAGLHQKGVYALLAEAPTPELISSMHLTHLTHLLEVASHGHFTKEQAKELRVLAQKSVGSSDKALSIQITQSVEQIVLLDSHVKQVESEMTEIMLGLDSVIMTIPGIGYINGGMILGEIGDIHRFAAPKQLLAFAGLDPTVYQSGNFNASHTRMSKRGSTALRYALINAAHNVVKNNATFKSYYDTKIAEGRTHYNALGHCAGKLVRVIHKMLSDDVAFNLG

SEQ ID NO: 61191 - protein, 355 aa, unidentified
MEEYIAFDSHKRYTLMEREDIQTGKTAHLRIEHAQGAILQSLLGREPGTPVAVEATGNWYWIVDEIELAGLEPKLVHPRKAKLMMGMINKTDKLDVHGLNRLQRNGTLPTVWIPPRGLRDLREITRGRMVMTSYRTRLKNRIQSTLSKYGWAGTDASDPYGKKARVQMIKAIQQLPPETSQMTAAFLNQLDFIQGQIAETEGRIRQLVRDTPEMELLRTLPGIGWILSAVVALEIGEIGRFASAERYASYAGTTPRVHASGDKIRYGRLRSDVNRYLKWAYVEAAHSVCLQRRTFPVRHASRLYERVRRRKGHPKAIGAVARHLAEATFHVLSRGEPYRDPAIRSIQGGVSAKMS

SEQ ID NO: 61192 - protein, 314 aa, unidentified
MDATRYVGIDVSAATLDVVVHEGTVTQVGNDAQGISAVVKQVQALPATLVVLEATGAYHRNVTSALVAAGVPVAVVNPRQVRDFARSMGQLAKTDRLDAGVLARFAAVVRPTPRPVPSEATLELAALLERRRQLVDMLVAEKNRLSVARKPVQPSVKQIIRALEKALESADEEIDRWIRQSPVWRAQEDLLRTVPGVGPQTARMLIAALPELGRLTRRQIAALVGVAPLACDSGTLRGQRHCWGGRAHLRAVLYMAAVSGARFNPILRALYRRLRAIGKPAKVALVACMRRLITILNAMVKTQQPWRTPALVTS

SEQ ID NO: 61193 - protein, 347 aa, unidentified
MLIIGCDFHPGFQQVAIFDNRTGEIQEKRLQHRAEAEQFYGALAGQEVRVGMEACGHYPWFERLLEEMGIELWLGDAARVRASVVRKQKTDRRDAEHLLDLLRQDRFPRIWVPSLEVRDVRQLLVHRHKQVQARTRTKNQLQAMALSCGVQKKRKLWTAAGRTELEQLPLLRYAAERRKRLLEALDGLEAEIGELERRVAEEAGQRPEAVRLMTHPGVGPVTALAMVLTLGPAERFGSGKQVGSYFGLIPSEESSGGRQRLGKISKQGSSFLRFLLVEAGQTAARYDPQLKRFYRRLAVRKNRSVAKVAVARKLATRLYLMLREDWTYAQLCQAVMQVSPSHSVAGE

SEQ ID NO: 61194 - protein, 369 aa, unidentified
MQDSTFIGLDVHKATISVAFAKGERGGEVRHWGTILHRPDHVRKLVEKLGADGCRLHFCYEAGPCGYGLHRQLVELGHDCIVVAPSLIPVKAGDRVKTDRRDAAMLAKLHRAGELTAVWVPDAAHEAMRDLVRARATAVRVAGKARQHLQGFLLRHGRIYPGKKGWTKAYRRWLTTVRFEHPAQQIVLQDYIHSVTDAEVRIERLTKQIADLLPCWSLAPVVEAVQAMRGVAFIVAVTVVAEVGDFNRFDNPRQLMAYLGLTPSEHSSGASVRRGGITKAGSGLARRALVEGAWSYRMQARVSRKLLDRAEGLPQAVRDIAWKGQLRMCQRYRRLMAAGKPKVVATTAIAREMVGFLWAIARTVRPAHA

SEQ ID NO: 61195 - protein, 383 aa, unidentified
MKKTQETLRIEDSIKEAILYIAFELSNSKWKLAFSDGSRIRHKAITAGNLAQLQVEIDLAKRKFKMIEDVRVVSCYEAGRDGFWIHRYLESQGIENLVVDSASLEVNRRKRRAKTDRIDVRKLLRMLLRYWGGEKQVWSVVRVPSETDEDARHLHRGLEDLNKERTMHRNRIKGFLVLHGIKVSNPSHKRFLEQLEKLRTWDGRQVPPDLKSTIIREYERLQMVEEQIRALEREKTERLKNPDTDSLQKVVKLASLYGIGSVSSWTFVMEFFGWRQFQNRKEVGALAGLTPTPYDSGKSLREQGISKAGNQRIRGLAVEIAWSWLRFQPQSNLSQWFMKRYANGGKRMRRIGIVAVARRLLIDLWRYLEYDKIPEGARLKSLA

SEQ ID NO: 61196 - protein, 350 aa, unidentified
MVVVGADVHKHSHTFVAVDEVGRKIGEKTVRAITAGHAEAVMWARERFGNEVVWAIEDCRHLSARLERDLLGFGQKVVRVPPKLMAQTRASARTRGKSDPIDALAVARGFLREPDLPVASHDEVSRELKLLVDRREVLVAQRTATINRLRWRVHELDPERAPVPASLDRAKHRQLLGAWLTTVPGLVAELARDELADITRLTEAINALAKRIGGRVREIAPVLLAMPGCGELTAAKLLGETAGVTRFKSEAAFARHAGVAPVPVWSGNTAGRVRMTRTGNRQLNAALHRIAVTQIRLDGLGQAYYRSRLAAGDSSTEALRCLKRRLARVVFHHLHTDHDTRTKPCQPAAA

SEQ ID NO: 61197 - protein, 422 aa, unidentified
MKVFNPADFAALIAIDWADRKHDVCELEHQNNKTTFTIISSKPEAINDWANALKQKYNGQLVAVACELKKGPLIYALNKFKHIVLFTINPSTVAKYRKAFTHSGAKDDPTDAAIQLEILQLHMPKLNVITPDTESIRSLAQLVEYRRKLVQDRVDLTNKITTTLKNYYPHVLDWFKEKDTLIFCDFLLRWPSLEQVKRARKHTLIDFFNQHNARYTAVNEKRIEEIKQAQVLTTDKAVVSPNLLLVECLAAQLKQLMVAIERFDSEIKSIYKHHKDRFIFDSLPGAGPQMAPRLLAAMGSNRERYQSSEEIQKYAGIAPVTERSGKKEWIHWRYSCTTFLRQTFVEWAGQSVRYSFWAKAYYQQQAAKGKPHNTIIRALAFKWIRILFRCWKTSTAYDESKYLEALKSKGSPLLKYAVESKF

SEQ ID NO: 61198 - protein, 317 aa, unidentified
MHMKKNALVGIDVSYKTFNAHFKGRSKEYGNDRRGWRKLAKEAPPNSVYAMEATGCYHYRLAAYLHSQGLRVIVLNAYFLKHWIMSQGSKAKTDKRDAEQIALYSMTREAKIKEWKPLSPLRARARVIVTLLAGLSKFKRSAGNMNHAIGLVVGKASDMLDVMDGVSNACRDREEALQTELAEIARKIFPKRFELLRTIPAIGDKTASILLVCCNGFEDFQTHRQLVSYLGLAPKVIESGTSVRGKSRISKTGNNYLRALMFMCSLGALRRCKPCRDLFERLVAAGKPKKLAIVAVMHRLAKIAFGVVQSGEPYRGG

SEQ ID NO: 61199 - protein, 351 aa, unidentified
MVVVGVGVHKRTHTFVAVDQVGRQVGQLTVDATAKGHAKALRWARAGFGNDLVWAIEDCRHLSARLERDLLTAGQSVVRVPPKMMALTRASARTRGKSDPIDALAVARAFLREPGLPVASHDEVSRELKLLVDRRETLVAQRTATINSLLWRVHELDPERAPKTRSLDLAKHQDLLRGWLLTQSGGVAELALDELSDIVAFTARAKELERRIAAIVEAIAPVLLAMPGCGRLTAAKLVGESAGITRFADEAKFARHAGVAPIPVWSGNTAGRVRMTRSGNRQLNAALHRIAVTQIRLDGGLGKIYYEKKKAEGMSTTEALRCLKRRLARTVFNHLIADHKTRQTACLPAAA

SEQ ID NO: 61200 - protein, 457 aa, unidentified
MTVNASPTRTTEVPGVVRVSVGIDAAITAKHHVSVRETTADGSVSMHRFVVPPTLTGLSELSRRLARYPGVVAVAEPTSMTWLPLALSLSSGGGRLALVGTRHSARLRGAISGKNKSDVIDADVLARADEVFDLPRLVLPSPAELALRRAVTRRASAVIDANRCWRRLVSLARWAFPDVWTAFAGSLATAKAVLGRWPHLDQLACARRASLTAVVAEHTRSVADVPDRVEQIRSAARDWAQFWAGRLDLDALAWEVSEHLTDLAAGNDRVDRAAEQATMYWERLYGDDALLVSLPGMGPVTAPAVRAFLGDGSRFDTAKAVANYVGITPSNWSSGTVNQPSRAITKEGPAALRLAFYLAGNAARRTDPQLAALYHRLMTRAGHCHSQATIAVARKLAERTWTVLTRGTPYRLQDPDGAPITSRAAKVLIAQQFTVPNEVRERARAHTAATHRSKLTR

SEQ ID NO: 61201 - protein, 352 aa, unidentified
MTSSLKHVGLDVHQATTVAAVRNDGGRVIARTILPTESGPLLEYFRGMAGTIRVALEEGTQAQWLYDLLTPVVAEVIVCDRRGESVNGSKADRADAEQLSDLLRRGALRPVYHAGSHRATIRELARCYQSLVDDSTRVMLRLKALFRARGIKTPGRTVYRSQQAWLRRLPDAGARFRAETLYAELDLLQRLRPQAKAALLREARRDPAWDLLQTVPYFGPVRVALILATMQTPWRFRTKRQLWAYAGLAVVTRTSAEYQLAGARPVRRPRRPMTRGLNRNHNPALKNLLKGAATAAATRAGPLQAFYQDMLQRGMRPELARVTLARKLAAVILHLWKTGDPYDARLLTVPAS

SEQ ID NO: 61202 - protein, 323 aa, unidentified
MSDKEGINNEAQSFVGFDVSKASVDALSLPDGEYQRFENTDCGLQQCLAWVQGKRHCLCVVEASGGYETALAGVLAAAGVPIAVVNPKHVRDFARGMGILAKSDRIDARVLALFAQKRRPPIRALPGEAQRRFIDLVDRRRQLVSMRAQEQTRLTQAKGRPRKSIQAHIKWLNAAIDDVDRNLNDTLRGCELWLVDSQLLDSVPGVGKVTICTLLARLPELGHLDRAAIAALVGVAPFVRESGQWRGRRFIWGGRAEVRSVLYMAVISAIRCNPVIKAFYKKLLAAGKAPKVALTACMRKLLTILNCMMRTRTPWNPPLAQNT

SEQ ID NO: 61203 - protein, 316 aa, unidentified
MAGGLYIGIDVSKDSLEVAFGCDGEVRQLANQDRAITALAAELKELGPELVVMEASGGYERMVAALLWEADLPVVVANPGQVRDFAKGMGQYAKTDRQDARIIARWAEVKQPPLRQLPDAQGRELSELLTRRRQLLEMLVAERQRLMQTVSQPIRKELSASIGSLQRRLEKIEAEIEQRIRKSDLWNRTRELLESVPGVGKLTSFMLVAELPELGTSDRRQLASLVGVAPYPRDSGKWHRPRLTHGGRAAVRSALYMAALSASRFNPVLAPFYQRLLSRGAAKKQALVAVIRRLLGILNAIVRDRTPWRLPCAVPA

SEQ ID NO: 61204 - protein, 420 aa, unidentified
MFYLILESHGGRCYGAAARILHSVVADVNRWSAPMQKLNDLNQSLAALEPDGTLIAVIEMSLSSWLVAGIVPGVERQPLKKLVVDESALLKLLHRWREEAEKAGRRIERIAVAFEAGRDGFWLARWLKARGIEAYVIHASSVAVSREHRRAKTDRLDTELLKRSFLGWLRGERDHCKMVEIPTMKDEDAKRPNREHDSLIGERSRIVNRMKAALVRLGIRGFNPKLKRATTRLDNLRTPEGEPIPPNALAELRRDMERRRLVNNQIRQIEEERLERIEKTPCDGPHVMVRLLARVMGVGIETADMLVHEVLSRNLRDRRAIARYAGLTGSPDESGRKRREKGLARSGNVRVRRGMIQLAWRFLLHQKTSALTKWFRSRTENARGTRKPMIVALARKLLIALWRLVREGIVPDGVVLRAAQ

SEQ ID NO: 61205 - protein, 442 aa, unidentified
MKKDTTQTHSAEVPAEPMVCWVGLDWADKKHCLVVRTTINGEPQQYLLEHKPEALDAWFLQLRQNHPSGRIAVAIEQSRGPVLYALMKYDFLAIYPVNPRCLADYRRAFKLSGAKDDPLDANLLCELVSLHPDRLRALAVEDIPTRQLRLLVEARRGFVHDSTMFSNRLGATLKGYYPLGLELVGEDLTTPMALDFLRRWPNLARLQAAKAGVLRAFFYAHNSRSEDRIKERLEAVRRAKPLTEDLALIAPLQLQMEQLVQQLRTLQRTIAAYDERIQVTFAQHSEAWLFKELPGAGQVLAPRLAAAFGTIRSNFASANDLLCFSGVAPVRKQSGGQERIQFRYARPIFLHQSIVEFAKCSLAKCAWANLLFQEALRQGKSRWAALRKVAFKWLRILWRCWQQHQAYDELTYLRSLQRDGVQLYRSLYQALPPQETAIVKNS

SEQ ID NO: 61206 - protein, 451 aa, unidentified
MSKQRNKVVSLPVIEPNAAGIDVGATEIFVAVPADRDPEPIRCFPTFTVDLERLADWLQQCQIRTVAMESTGVYWIPLFQILEKLKIDVRLVNAHHVKNVPGRKTDVSDCQWIQHLHSVGLLRGSFRPDDEICAIRSLWRHRDSLIQLATLHLQHMQKALDQMNLQIHHVISDLDGTTGVAIMDAILAGERDPLKLAQLRHPRIRASEETIMKSLVGDYREEHLFTLRQSLKAYRYYQELIQEVDAQVKQMMQRLRSKVAEGEEPPQGSKRRARKTPWRNEPSQLREDLYRAFGVDLTEIPGVNSLTAQMLLTEIGPNLDRFPTAAAFCSWLRLCPDPKISGGQVLSSRTRPTKNRAALALRVATQALHSSDCFLGDYFRRMKARMGTPKAMTATAHKLARIIYHMVTTQQPYDTTIFQEQEERRQHQKSARLHAQARELGFQLIPINVVP

SEQ ID NO: 61207 - protein, 341 aa, unidentified
MKQYAGIDVSLECSSVCVVDANGKILREAKVASEPVSLIAWFRSSGFELERIGLEAGPLSQWLFAAMKEAGLAVELLETRHVRDAFKAMPVKSDRNDARGIAQLMRLGWFRPVHCKSMDAQETRSLLTARKLVQSKLHDVENSLRGILRGFGLKVGKTTELGFAGRIEELVSGHPHLEMIARALLAVHAVLRKEFATFEKQTRKLARSDTRTRLLMSTPAVGPIVALTYASAIDDPGRFKSSKQVGAHFGLTPKRYQSGETDYTGRISKIGDNSVRTALYEAAHIMLTKPLKGCSALKSWAMRIAKRAGMNKAKVALARRLAVIMHRMLADGTPFNPTAAA

SEQ ID NO: 61208 - protein, 341 aa, unidentified
MEHVAIDLGGRESQVCVRDADGQILEEKRWPTRQLGAYLAGRPLSRVVVETCAEGFYVADLAGKHGHERRVVPATMVRALGVGERGLKSDKRDARKLSEVSCRIDLPSVHVPSAESRQLKTRLGMRNALLGARTMLINTVRGWLRAEAIAIPKSAEAFVRRVREVASATAPLPSYVERQLETIDALSQQIAESDKELAQLAKKHSVCPRLMSVPGIGPVTAAHFVAALDDPTRFKSAHDAEAYLGLTPGQDSSSGRERTTGITKAGPSSLRCCLVQAAWAAHRARGHHPMVDWALEVQKRRGKRIAIVAFARKLAGILFAIWRDGTLYNPLDGAQRVPQSA

SEQ ID NO: 61209 - protein, 311 aa, unidentified
MNNTIGIDISKDTLDAHRLADGQHKQFLNGKTGHAQLVKWIGKQSDPLIIFEATGAYHRQLERVLGTHIIPFVKVNPKQARRFAQASGKLAKTDRVDCEMLAKMGAALQLVPKPFTTENLYDLKELLSARRALIKDRTAAKARKATVINALIKQQLEKRLRQIKNDIAKIDALMLDVAREDQYMSERLDILFSIPGIGVITALMILVDMPEIGALNNKQVASLAGLAPMSQSSGKWMGKARIQGGRPNLRNAIFMPALVAIRHNADLKTKYDQLVAAGKEKKVAITAVMRKLLVLANALLRDNRKWAEKAA

SEQ ID NO: 61210 - protein, 397 aa, unidentified
MYIVGIDIAKRKHEAAVIDGEGAVIIKPFSFTNNCSGYNRLLAMLAKAKLPLDEVSFAMEATGHYWLALFTRLQKEGFRVQVINPVQTNSIRSFYIRQAKTDPRDALLIAEVIRFGHFSESTLHPENIYELRELCRGRHAIVSMQADIKRKVVALLDQVFPEYETAFTNLFSDTSMAILQTCPTPKELSEMPLEELCHLIEVSSRKRFRMVKAQELQELARNSFGFAMAGDVFSTMIRLYAKHLVFLKQQVQEMDRKIAEIMDTLDTPITTITGIGPTLGAYILSEIGDISRFSSAAKLAAYAGIDPTMRQSGEYNGVRNRMSKRGSPYLRHAIWLAASSAVLHDPALKLYFQKKRDEGKPYMASVGHACRKMVSIIYAVMRDNKAYTPYIPNEISA

SEQ ID NO: 61211 - protein, 365 aa, unidentified
MERKRKAVTRYVGIDLGKRTYEVAIVGKGGKVEKSNGLTCVAGRQKLYKKLHTQDKVALEAGNLAFIIAKELEAAVGCRVYVLNPSHLPLIYGSMKKTDKEDSLKLAHIVEDFPEERLPVVRIPSDQEMKRRKILAGYRRAQQSRSREINKLHALFLAQGITTVTRKDLSTSEQRRETIRMLTGLEREEADYVFQCLELHERRIEALFGQIKKESTGDEVIKRLQSVPGVGPMVSFAFVAHVGADRFENSGQVSNYLGLVPRVYMSGDTVRYGRITKRGNGYLRALLTQAAWALIRTKMGGNLKERFEYMTVEKSKSKKKAIVAIARRIAELLYTLMRDGTSHESRPFIREKKVIEELAQLAIGA

SEQ ID NO: 61212 - protein, 411 aa, unidentified
MIKENYMYVGIDLHKETHTAVIIDCYNQKLGEITFPNRPADFPKLVTKVKKCNTDGKEVVYGLENAYGYGRALAVWLIDKGYFVKDVNTAISHRQAKHRGAMYRKSDSDDAKAIALATLNMLDKLQDACPNDAYWSLGQLVHRRDNIMKQRTRLVNQLHEQLCIVYPSYKQFFNDISRPTALYFWEHYPSRKYLKGKSVEDLRAELVPVSHNKCSTKTCEKILDAVASDKVKNNNFQDARDMVTLSIVSDIQHYDKQLVEVDKMLEQMYKMLGCTLTTIPGVNVITAVKILAEIGDIKRFSNANKLAQFAGIAPLHLSSSGKGKDVATKQGNRRLQATIYFLAIQMVQVSSKGTPRNSVVRAYYEKRKAEGKTSQQALICISRRLISIIYGMLKHGTEYRMPVVESAGENR

SEQ ID NO: 61213 - protein, 373 aa, unidentified
MLIKIVRVAVITAFATFKQPYKDMKKFIIGIDFSKETVDASIVQKEQPETLIAYKKFRNNLKGVDGLIAWAKSKVAQDGEIIFCGENTGTYSTLFSDELTDRGFIIWIEHSMNIVRGMGDVRGKDDKTDSLRIASYAARFYDKMKPYVRPKDETRVLKTLLAKRDRLKSFLKAEITNTKENPLMLQDSNIASSINEFFKRIEESLRKELKELERMILDVVMSCSEYAKNFNILTSMKGIGLINAVALIVYTDNFTKFNFNHRKIATYWGGVPFKNESGTSVRRGTHVSPKCNSWLKALLTEATLCAIRYNSRIKAYHDRLMARGKAIGIVLNNCKNKMLKILVAMVRDSKIYSDMDVSKDPHTTTTTSSIVVC

SEQ ID NO: 61214 - protein, 314 aa, unidentified
MEKITVGIDVSKDRLDVAVRPSGERFAVSRTGAGLADLVARLKVLKPNLIVLEATGGFETVVVAALAAASLPVAVANPAQIRAFAKRPSASAKTDPIDAAVIAHFGEATGIVSRPLPDQATQQLADLVARRRQIIDMIGADRQREKRANPRIKKSIGRLVKSLERELSSVDTDIDDAVRGSPAWRDKEDLLSSVPCVGQVISRTLIAELPELGTLRHKQIAALVGVAPFTRQSGQWRGKSFIGGGRASVRTALFMGAMVARRHNPVLKAFYERLVAAGKPKKVALIAVARKLLIILNAIVRDGTPWKGTVAAVS

SEQ ID NO: 61215 - protein, 354 aa, unidentified
MKRTTKYVAFDVHQATTVASVREESGRVIARSVLPTDSGALTEFVRGMRGARHVTFEEGTQAQWLYELLAPLVDRVVVCDRRGAPRQGNKGDQVDADHLSELLRRGALRAVYHGSADRATLKELTRTYRNLIEDATRVMLRLKALFRARGIATAGTAVYDPRHRARWLAQLLEGGARFRAAALYAELDVLRTLRPKAKAVMVTEARRDPAWRVLRTIPFLGPVRVALLLATMQTPWRFRTKRHLWAYAGLAVVTRSSADYTLLAGAPVRRRRAPMTRGLNRNHNRVLKDVFKGAATAATARPGPLQDFYHRVLARGTREELARLTLTRKLAALTLRLWKTGERYDPTKLTTPAR

SEQ ID NO: 61216 - protein, 359 aa, unidentified
MIVIGIDPHMKTHTAVALDAATGRTLAERTVACSDAGHDELLTWARALPGDHYFAIEDCRHVSGRLERHLLPRGERVVRVPPKMMAGARHSARSWGKSDPIDAECVARAALREPGLPEASLNGPSHDVRLLADHRDTLVDERKRIQKRLRWNCHDLEIGLALPPRVLDRYVWLDRLQTALEALPESVRRRIALDQLRRCRDLTKEIRSLEREIAARMRQLAPALLEIPGCSAISAAQLVGQTAGASRFSGEAAFAMHVGVAPLLASSGQTNRHRLNRCGNRSLNSTIHMIALTQARMHPPAIAYMQRKQAGGMSYREALRCLKRQLARVVFKTMLRAERSEAGVVVRPRFGTGDVAVAV

SEQ ID NO: 61217 - protein, 401 aa, unidentified
MKYGVGIDVSKGKSTISILSIEGEVIEMPFDINHDIEDLEKLDKKLQMFSKEDLKIVLEQTGTYHLPILIYLLDKGYCVIAENALKIKKYLDRSLRKAKTDKKDSLKLAEYACDNWYKLKANFVEEEKYKELRFLSRQYFSLNSMKVQQKVDFSDLSDMLFPGYYQLLEECNFIVGLKIFEKFSDPKIIRKKKLETFLNDIEKIAQKIGQKRAGRNLAIKVYELAKKSVPSCPSNSSTQLILNKRVVALINLIETTNEIIAKMNEIDKTMDEYKEVRNMKGVGDRLAPLLIAEIGDIRRFKNAGSLIAYAGIDSPPYQSGKYEATNRHISKRGNKYLRKTGFEVMQSIKSFCRIDCEIYDYIVKKESEGKCKKSAKIAGLNKFLRQYYGILKRKYIELGTW

SEQ ID NO: 61218 - protein, 378 aa, unidentified
MRTVDRDVMEWMPPPDGITMCQGGDVCASHEWKRTSMEKVSLIGLDLAKRAFQAHGARADGGVAFRKKLSREKVLSFMAEQAPCVVAMEACGSAHHWARAIGDLGHEVRLIPPAYVKPFVKRQKNDAADAEAICEAASRPTMRFVAVKTEEQQARAMLFRTRDLLVRQRTQLINALRGHLSEHGMVVPQGPSHVKVIAKAVEEATASLPLLVVELSRVFLEQIEKLSEKITELEKATSNEAARGSMSRRLQTVPGVGPITAMAIETFAPPMCIFKRGRDFAAWLGLVPRQHSTGGKQILGKTSKIGQRDIRRLLIIGAMAVVRWASRKGAPEGSWLRRMLARKPRVLTAIALANKMARSIWAMLTKSEDYRAPAAVAL

SEQ ID NO: 61219 - protein, 359 aa, unidentified
MKKISQEGLINKLKLLVNELIILGVDVHKRSYHIAIWSVQRGLMTTLILPSSSAVLIKLITPFKKHIAQIVYEAGPTGFGLVRDLRARGFKADVIAPSRLPVLPGKQAKSDQKDCVNLSFLAANKLLQPIHIPSREEEAERQVMRLREQTIRKQRCIKQQIKSLLLQHGIEEPEGLENWSLKSLEVLRMLDLGEHLRFCLDTLLDELDWLKSQIATITKRINALAKRERHKTQVEHLRSIPGVGLITAMTYRTELLAPHRFKDGGQVARIIGLAPLVRQSGETSRGGSLMKSGNWRIRSILVEAAWRQIRSDEQAKKRFTRLLGNTGNNKKAIIGVARHLAICMWRISTRNEPYRQKAA

SEQ ID NO: 61220 - protein, 343 aa, unidentified
MDYFAGLDVSVKDTSVCIVDETGKIIREVKVASEPDALLQVLRNAGYHFKRIGLEAGPLSQWLFSALAEAGLPVICVETRHMRAVLKAQINKTDRNDARGIAQMMRVGLYRPVHVKTLRSQKLRMLLTHRKLLQSKAIAIENDLRATLRNFGLKVGMVGTAKFETRIKELIENLPDLILLVEPLLVVRRVLREQLDLLHRRLLAVVRDDAICRRLMTVPGVGPVVALTYRATVDVPARFRKSKSVGAVFGLTCSRDQSGERDRPGAISRCGDEMMRAMLYEAAQAMLLRSAKWSWLKAWAMQIARRRGMKRAIVALARRLAVIMHRIWVDGTEFRWTKEAAAA

SEQ ID NO: 61221 - protein, 355 aa, unidentified
MQKYKVSFKGQNIYVGIDVHLKTWHVTTLTESGYKYSFAQHADAKELFDRLNKKFPEAHFKSAYEAGFCGFSAHYALAEQGIENIVVNAADIPTTGKEKTMKTDAVDSEKIAWALKRDELKGIYVKDKRYMDDTNLIRLRQRFIMDLSRQKNRTKHLLYTQGVTYPERFRNSKTHWSRNFMKWLREEVELLSEQKLSLLLLCDQVENTRKAILKVTREIRRLSTTDRYKENYDLLFTVPGLGLITSMSMLTELDNDIMRFPNERSFVSMLGLIPTCHDSGEKKVSGEKTNRGNKHLGPLIVEASWVAIYRDYQLGAYYSNCCQIMKPHKAIIKVARKLACRTYAVLKTKTKYELS

SEQ ID NO: 61222 - protein, 382 aa, unidentified
MSSWTKRPPLLLDKLERLAVPADQILIGLEATSRYGENLYRFLESRGYQLCLLHPRQTHQFAQQRGLRAKTDKLDATTIARVLLSGEARRGYVPTDLIATYRELARLQTQLTEDVTRYRNEIHALLQGLFPEFSQVFADPCRPTALALLKLYPSAQAFVAAGVETLAARLHELAPRNYGLHTAQQLVSLAHHSVGSGIALSARTTSLKILCDQLEHTQTNLLQLEKELENLVKKDTGAKGLQSVPEFAGKTIAVLRAELGDVDRFACSSQAVAYAGLDIEVKQSGKSRGQAKLSKRGSGRIRRILYMAVVRCIRLKDSAFGAYYHHLVARGLPRRAAMMAVMRKMLMVAYRLLKTKEAYDPTKVFAQPVVQAPALEPQAAQP

SEQ ID NO: 61223 - protein, 320 aa, unidentified
MKTSDNVSVTVGIDVSKLNLDLHVSSGLYDSFRNDGSGFSGIKKLLSKFTVSLILLESTGGYENGIVCYLQRLGYDVVVVNPRFARDFARSLGRLAKTDKVDADLLSQFASVINSRGDRARFVRPLTDETRRHLADMVSRRRQLVDLITVERQRKSVSSQYASESIDAVISYLRSQLERVDADISAHVSLYYSDLSDLLTSFKGVGSATVGVLLGEVPELGKLNRRQISALIGVAPFNRDSGQMRGRRRISGGRSLVRNSLYMPTLSAIRFNPVIRDFYERLLKSGKSRKVAQVACMRRMVCILNAMLRDGSRFEPVMGN

SEQ ID NO: 61224 - protein, 356 aa, unidentified
MRRDYQKGKVFAIGRDVYIGIDVHKENWHITARVSGEEVFHGNMLSDYQCLRKFLERFKDCKVKVAYEAGPCGFGLYDKLTNDGIETIVVPPSLIPVESGNKVKTDKRDSRKLAKLLESNMLKKVYVLSEEDRANRELVRTRRQLMEHRGDVMRQIKSKLLFHDIKSPFPAKQGWTKQYVKWLRELHFEHEVVKVSFDTLIDLYEYLGSQLTRISKAIIALSQSDKYSHKVKLLRSVPGIGILIAMELLVELPDIERFKTADEIASYMGLTPSEYSTGQYVRQGRITRCGNTRARTCLVESSWHLIVKDLFWRGKYMKLKYRRGAKRAIIAIARNLIIRIRRILLNNEPYRVAVAA

SEQ ID NO: 61225 - protein, 360 aa, unidentified
MLYLGIDQHRKQLTVEDRNENGDRTVRRQVSTRWGSVRTFLQEYSQRAMPEGGFVVIVEVCGFNRWLVKLLAAYGCRQVILIQPEKRSKRKTDRRDASALAELLWVNRQRLLAGKGVQGIRRVAWPTDSEAADRQVTVLRQRLGQLRTRTINRIKHLLRKHNLEQECPTKGLDTLRGRKWLAQVTLEAVDRVEMDLLLAQWNLWDEQIEKIAQEIGKRQAEHPTAVVLATIPGCGAYSSLALACRIGSIERFPRPGSLANYWGLTPGCRNSGEVTDRLGAITKQGSAVARFILGQLVLHILRRDAWMRAWYGRIKRRRGSKIARVAVMRRLATIIWNMVQHHEAYVVGGPPRRNHKTPAV

SEQ ID NO: 61226 - protein, 347 aa, unidentified
MRSYVGLDVSQATTAICVVDEDGRTLAEGKVPTCPHAIAAFVRTQAPELIRIGLETGPLAVWLFGALRQDGLPVICLDARHAAAGLAMMANKTDRNDAAGLAQIVRTGWFRQVHVRSEASYIVRARLAARTTLVRQRCEVDNQIRGLLKTFGILVGKAPGGLRKRAAEIAGDELANQPELAQLVRMLLALRETLCDQIAQLDRQLTRQAKTIPVCRRFMTVPGVGVVVALSVWAAIDDPGRFAKSPSLGAYLGLTPRRHASGEVDRQGRITKRGDPVVRTHLYEAANVLLTRIDRFSALKAWGLKIAKRSGFKKAKVAVARKLAVILHRIWRDGTEFRWGREAPLAA

SEQ ID NO: 61227 - protein, 378 aa, unidentified
MLSEHIIWVGLDVGKRDTVCAIDWLDDNQELNRNKGLTSLAVKHITNTREGVKDFFTWLKANRKHIEERLHPQRKVVYRLVMESTGCYSYRLIKQLKAAKPDSYIALINPAKVPAFKKFNDIESKTDKLDAQCLARLGTTQKPDAMYEMPADYAGLKRLTRMNASLTKISTILKNQLTNLDDPGERQIFQNLLKSVEEQLDGLVVKIREYLRSHAALQERVTKLDSIPGIGMIIAATLIAEYGPEDRFQNIRQVVSFAGMNPKNKCSGTSVKSTRLSKQGAPVIRQMLYMATLTAQARIPILDALSKRLTNLTPMQKRCAVMRKLLMICWSVLCGTENYKEYQPSSKKLVPYEAPAATKRRIKRERKKRSLSPENDAD

SEQ ID NO: 61228 - protein, 348 aa, unidentified
MSQILSKVAVIGVDIGKNSFHVVGLDGDGALVLRQKWSRGQLEARLANMPRCLIGMEACVGAHHLSRKLKALGHDARLMPAKYVRPYSKGQKNDFRDAEAIAEAVQRPTMKFVATKTADQLDLQALHRVRERLVSQRTGIINQIRAFLLERGVAVRQGLRFLRAELPRILAEPPEVLSPRMARLIEGLAEDWRRLDERIDCLSGEITALARQDVGCERLVSVPGIGPIISSAMVAAIGTGEAFSKGRDFAAWLGLVPKQISTGDRTILGKISKRGNRYLRVLFVQAAWVVLIKPQSWERHGLKRWIEAAKKRLHRNVLAIALANKLARIAWSVLAHSRIFEARKLQAA

SEQ ID NO: 61229 - protein, 386 aa, unidentified
MQYPSDTSRCLAALDQDTTLIAVIEMSLSAWLVAGVVPGIERQPLKKLAADEHALLKLLHRWRCEAAKAGHKITRIAVAFEAGRDGFWLARWLRAHGIEAHVIHSSSVAVPREHRRAKTDRLDTEMLKRAFLGWLRGERDHCKTVAIPTLAEEDAKRPNREREGLVGEAGRLVNRMKAVFVRLGIRGFNPKLKKAAERLDALHTPEGEPIPPNTVAALRRDMERLRLVREQIRQIEAARQERLQSAPGEGAHAMVRLLASVRGIGIETADMLVQEVLSRELRDRRAAARYSGLTGSPDESGRRRREKGLAKAGNPRVRRGMIQLAWRFLMFQKNSALAQWFHLRTQNAPRTRKTMIVALARKLLIALWRFVREGVVPEGLLLRPVG

SEQ ID NO: 61230 - protein, 327 aa, unidentified
MAKRTTICAGIDTGKRKLDIALDGSSEQLQIDNTPEGYKTLLVWLRRHRVKRIGIEASGGYEQAVVAELRRRRFVVVVFQPAQVRAYAKFHLQRAKNDKIDAALIAACTVAVKTIHAPPDARLLPFAEHLTMLDQIGEDIARLKNRLETCRNPRFQQTWKEDIARLAKREKIEFKALVAAIREHRDLAERLDLIVSVDGIGLPTAVAILVRLPEIGRISREQAAALAGVAPYDDDSGDHAGVRHIDGGRERLRRAIYTAALPASCRGNPQLMALYRRLIAAGKEHKRALIACARKLLIFANTVVARGTPWDHERPPIASLTAVPQPG

SEQ ID NO: 61231 - protein, 416 aa, unidentified
MSVALPQALFFTGIDWASAEHAVCVLDAAGKITARFTIKHSAEGIASLVRRLARYGDPAGLPVAIERPSGRLAGLLLEAGHPVVPVSPNAIKTWREGEVLSGAKSDAGDAAVIAGYLRLRYHRLAPAAPYCDETRALRAAVRTREDLVQMRVAATNQLSALLEAHWPGARAVFADVESPISLEFLTRYPAPAAARHLGHKRMAAFLVKHGYSGRRPAAQLLARLHGAPAGTAGRALTEALQDAVLAVVAVLRALNGAVKDLDRSVAAHLGEHPDGPVFTSLPRPGQINAAQMLAEWGDCRPAYDGPDCVAALAGVTPVTKQSGKYRGVEFRWACNKRFRRAVTTFAGNSRHASPWAAQIYAEARAAGKDHPHATRILARAWIRVIWPCWVNGVPYDPARHRAAAALAGQTPSQPAA

SEQ ID NO: 61232 - protein, 400 aa, unidentified
MLSIGIDVSKGKSTVCGMKPGGEIVYIPFEVQHTREGMSELVSLLRGSGEEVRAVLESTGSYHCPVVAALLENGIFVSVVNSLRMKRFCSQSIRKVKTDQIDAMQIALYGLAYWQELQPTKLPEDTYRELQLLARQYYQMTSLLIKAKVDFNAICDQVLPGMQELMSDHAGRHKLSDFVLRYRHTTHILEMGETRFRKDYCKWAEKKGYRNCERMAAHIFATAQNGIPVLPNAPSTQIVITEAIRVLHTVEASRDAILTQMQALAKTLPEYSLVREMPCIGDTLAPRLIAEIGDVRRFHSKRALIAYAGIDAPPYQSGKFCANNRHISKRGNRYLRKTGYEVMQSYVMHKPANDPIFTFIEKKRGEGKSGKLAMVAGLNKFLRVYYGKVTELYRSLPAIE

SEQ ID NO: 61233 - protein, 328 aa, unidentified
MEREYIGIDLHKAFFQVCAITSTGERQWEQRWPTSDAGIAGLLTRCGRQSRIAVEASSPTWAFVDRLVEHVDAVHVVDSRKTRLKAGYAAKTDRLDARRLADALRRDSVVGIYYPPPAIRDLRELCRYRCHLARLQASLKQRIQALLLRHGVAVPVKRLFGTRGSVWLEALRVPGWGGASLTGLRHVLRDVRAQLVPVLTAIRAIAASDAIACALDARPGFGPVFSVTLRAEIGVITRFPDGPHLASYAGLVPRVERSGGRQWSGRITKAGSPWMRWVLIEAAIHQLRRQDDFGRWARQLAVRKGILKARVAVARALCDELVDAWPRG

SEQ ID NO: 61234 - protein, 345 aa, unidentified
MGNMYYIGLDVHKKTISYCVKDGSGRIHAEGKIPATRFDLDLWMKTLPQPWTVAMEATLFTGWIYDHLRPHAAAVKVTHPLMLRAIAAAKKKNDHIDANKIADGLRCDFLPECYMASTQIRERRRTLRYRNLLVHQTVQLKNRVSGLLMEAGVSYNKQKLHKVGYFRELLKTNQDIDESLRPLLQLCRETLVRLQKTESALIRSLARDRFLVERVERLMTIPAVGPITALTWALEVGEVSRFSSIKKAISYCGLCGAEKSSGEHIQRTPLSKQRNKHLQCVPVEAAKMAPRLSPELALLYDRERQKGNANRATLAVARKLVAYLVAIDRRQKDFLVVEKQNHAAA

SEQ ID NO: 61235 - protein, 367 aa, unidentified
MRTLYVGQDVHKETITVAVAEEGRNGEIRPYGTFANTPASVDKLIRRLTKPGCVLHFCYEAGCCGYGLHRQITAAGHLCDVIAPSMIPKKPGEHVKTDRRDAIKLARLLRAGELDAVWVPDAAHEAMRDLVRARAAANNNLKASKQQLHSFLLRHGRIYMGETSWTRTHYRWLAEQKFEHPAHQIVFQDYINAIHDEEKREGRLIKQIERLLPHWRMRPLVDALCLMKGLSLVASATVLSVTGDLRRFPTPTQFSGYTGLVPSEHSSGNSVKRHGITKAGNTELRRVLIQAAWCYRFPPRITKKKELKLTATDKAIRDVAWKAQVRLCGRYRQLITAGKLAPVACAAVARELATFIWEMGQIVPLTS

SEQ ID NO: 61236 - protein, 416 aa, unidentified
MDTMYERCCGLDIHKKTIEACFRSGKKKTHMSFGTTSAELRKLTIWLVENDCQSVAMESTGSYWKPIFNILELSGTDMEIIVVNARHMKNVPGRKTDVNDAEWIAELLQYGLLRPSFIPDREQRELRELSRYRKSLVEERAREINRLQKMLEGGNIKLTSVVSEVTGYSSRRLLDRLLRNDEPMTEEVISGLVHTSLAGKSKELETALDGLLSELQKELLIKVLDHIDDMSRRIADLDDFCRKQMKKYEDALDKLDEIPGIARRTAETILIETGLDMSRFPTAKHFARWAGLAPGNNESAGKRSNGRTTKGNPTLKSTLIQSAKEAARKKDSFFKARYQKIAARRGANRASVAVAHSMLIAIYHILKSGERFKDLGEDYYNQFNREKKKNYYLKKLTKLGVNLKEATLSISIQTAT

SEQ ID NO: 61237 - protein, 359 aa, unidentified
MNNKKYIGMDVHQASISVAVRDSAGKLVMESIIETKATTIREFIRGLGGSLSITFEEGTSAAWLYELLKPEVAEVLVCNPRQNALLRAGNKNDRVDARKLSDLLRAGLLSPVYHGENGVRTLRELARSYLTITKDLTRVMNRIKGLYRSWAIACAGKKVYAARHRGAWLEKIAETGVRRRAELLYEQLDALAKIRRETRRALLQESLQHSASKLLRQIPRLGPIRVALLIALLQTPHRFRTKRQLWAYCGLALQTQVSGEYRVSDGQLQRSKKSPALRGLNHNHNRDLKSLFKSAATQASASAKKDPLGEFYENLLAKGMKPAMARLTLARKMAAIVLRVWKKGESFDPAQLKCQSVCV

SEQ ID NO: 61238 - protein, 402 aa, unidentified
MADKRLWAGIDVGKEHHWVTVVDGSGSVVFSRKLANDEQPIRQAISEIDLLGTTVSWAVDLTTVYAALLLTVLADAGKTVRYLAGRAVWQASTVYRGGEAKTDAKDARVIADQARMRGEDLPVLHPEDTLISELRMLTGHRADLVADRTRTINRLRQQLVGVCPALERVAALTQDRGWVLLLTRYQRPKALRRVGVSRLTKTLTDAGARNAATIAQAAVAAAKAQTVALPGEDVAADLVAELAQGVITLDERIKTTDAAIEERFRRHHLAEVITSIPGMGFRLGAEFLAAVGDPALIGSADQLAAWAGLAPVSKDSGKRTGRLHTPQRYSRRLRRVMYMSALTAIRCDPASKAYYQRKRDQGKRAIPATICLARRRTNVLYALIRDNRTWQPESPPITKSAA

SEQ ID NO: 61239 - protein, 505 aa, unidentified
MVPGRVRKSLVTPRRLARLMAIPLRRIPALSHDRGRLSAMAFTLTEETAMPRSRRRTTRAATPPILTPNAAGIDIGATEIYGCVPLDRDPQPIRRFGTFTQDLQAVATWLTQCGVTSVAMESTGVYWIPLYQILESRGLEVCLVNARHVKNVPGRKTDVQDCQWLQYLHSVGLLRASFRPPETVCAVRSLLRHRDTLVQLAAVHTQHLQKALNQMNLQLHHVLSDITGVTGLAILDAILAGERDPGVLARHRDHRVKASRETIAKALVGDYRPEHLFTLRQSLGAYRYYQQLISECDGEVQALLATFASEIDPVAHPLPPATTTHRKPQGNAPRFDLRTELYRILGIDLTQVAGLNTTTIYTLFAELGADLGAFPSSKHFASWLGLCPDNRISGGKVLSVKTRHVKHRVAQALRMAAQSLYRSHSTLGAFFRRMRAKLGAPKAITATAHKLARILYHLITTREPYADSQLAQAEEQYRRRMESRLHAQARALGFQLVPVPGQSVS

SEQ ID NO: 61240 - protein, 408 aa, unidentified
MEVLYEHCAGLDVHKDSVVACVRIAEPGGATSEVRSFGTTTSELLKLSDWLEERGCTHVALEATGVYWKPVWHILEGNVELLLANAAHIRNVPGRKTDVNDATWIADLLAHGLLRGSFVPPPGIQEVRDLTRTRKQLMRELAQHTLRIQKTLEDANIKLTGTISDVLGLSGRAILDALVAGETDPERLAELVHRGIRAPRAKLVEALRGRVTAHHRFLLSLHLGQVDAIRAAVARLDEQLGKALGEASRMAELLTTMPGVADVVAHVIVGEIGTDMTRFPSAAHLVSWAGLCPRSDQSAGKRRSTRIRHGAPWLKTTLVQAAWAAVRKRDSYHRAQFLRLKARRGPGKAIVAVAASMLTAAYHMLRDGAEFHELGGNYFNQLNRDAAARRLTRRLEQLGFAVELRPAA

SEQ ID NO: 61241 - protein, 448 aa, unidentified
MFTMHYKRLLTLIDSVSSYLSVGLDVGADFTWMSIALPNGSFIGKPFKIVHSDPRSRDLAVAKIKEAQETYSLKSRCFLESTGIYHIPLLCFLRDKGFDCSVINPIITKNSTNINIRKLHNDKFDSKKAALVGLNVSLKTSIIPDDSVIDLRNLVRDYYYFKDLQSAVALKLTAELKVSFPAYAKVFSKVTTQSSLKLLSSYPLAEDMLAASKDDIVKIIRSTARFGEAYALRKYDTIIAAAQDAAVFGRALPSNAVRIRLYIDTYQEYQKHLDALLKALHETVDRLQDTLIYDQICLLQSLRGIGFLSAIVLIAEMGDFKLFSSPKKLYAYFGLDPAVKQSGKLNGDKVHMSKRGSSLARRVLHMVALNNVKVDKGSGTPVNPVVYDYYTRKCSGKKKTVAMGAVMHKICNIIFAMLRDNKPFEVITPEEHCRRFAAEHPDKIRKAA

SEQ ID NO: 61242 - protein, 364 aa, unidentified
MQKISTMQASEKNIFQGQLTIGLDLGDRSSAYCVLNEAGEIVLEHKLATTPEAMKQVFGSLPRSRIAMETGTHSPWVSRLLTALGHEVIVGHAQKVRLITKSRKKDDRLDARTLARLARIDPQLLSPVKHRSAQAQLHLTEIRARAVLVSARTALVNAARGLVKSYGERLRKCDTQQFLRETSGLSTGLREALEPLLREVESLNERIQEYDRRIVKMGKQTYPETALLKQVKGVGDLIATAYVLTIEDPHRFRKSRDAGCFVGLQPGRRNSGESEPQMRISKEGDEYLRTLLVQGAHYILGPFGKDSDLRRWGQKLSARGGKNAKKRAVVAVARKLAVLLHRLWVSGEVYEPLRNSQKAMSTAA

SEQ ID NO: 61243 - protein, 403 aa, unidentified
MGPHIRVAVDVGKSSHHVGIADPKGRILEEFSISHSQEGFAEFFSRVEHHQRKLGLPVAVAMEGYNGHARPLDRMIVEKGYKLYNVNNLKLARFREIFPGPAKTDSLDVRKILELFHLKDHLPLAKDVLERVREVPEVNQKLKRLTRRRKQLVKEKVRVMKRMQADLQAVCPELLGLTRKVDNLWFLRFLASRDDLEELAQLTPEEIREIRGIGVKYAGIIREWQRRAEFSPEVEYVGPMIVSDARRILELLSEIAALKEAIEKLCEESELARRLRSIPGFGVISAAELAGEIGTLKRFGSEASLALYLGMCPLDKQSGQTHGTRSPRQVNRRAKAAMMVAVAHHIWEVPESRAYYEKKRAEGKRHNQAVRALGRHMVRVMWSMLRQERDYKLRKAQEVSCLA

SEQ ID NO: 61244 - protein, 346 aa, unidentified
MAHYAAFDVSDKETAIHVLDEHGKLVWKGKRPSEPEALAAALRRHAPELVRVGLETGRLTPWLFHALKGLGVPVVCLDARHARAATALQRNKTDARDAETLAQLVRTGWFREARVKSWAAHAVRHLVGARAQLVGMATDLSNQIRSLLRTFGLRITGRAGGTFERKVREQITGSPEVAAVAEPLLAAWRAMRDQIAALDRKLIEAARGDATCRLLMTCPGVGVVVATSFAAAVEAPDHFRRSRAVGAYLGLTPRRHQSGESDHSAGVSKRGDKLLRSYLFEAAACLLIRVQRPSALKAWGVGLVQRLGFKRAAVAVARKLSVVLHAMWRENRPFQAWPTPAVAAAA

SEQ ID NO: 61245 - protein, 416 aa, unidentified
MSQRFFGFDVHKNFIVAAAVNAHQDVIVRPHKISSADLEDWVQKHLTQNDEVVIEAMSCSWVVYDLLVQYASRVVVAHPLHVKLIAASFVKTDKRDAIALARLLAANILPEVWVPPRHVRELRSLIYHRCNLIHRRSSAKCRLRGVYQQYRIVAPEGREAFEPEYWDKLDLPPVEKLRVRHISDDIQRLTRQLQETEAMISQLSVQEPWVKDVPYLVQLPGISFITAMTLLAAIGEIGRFPSAKKLVGYAGLGVRVYSSGETTKTGGITKQGRRELRYAMIEAAWNAIGNSPFWKQKYEQLARRMDNQKAATAIARKLLVVIWNVLTRHELDHEADLEVVGRSLWIWGSKNRLATSQGMKRIEFAGKQLNQMGIRLEKITYGSTVYKVPLAEPAETPGDPEKSERCPKQKESVNST

SEQ ID NO: 61246 - protein, 319 aa, unidentified
MNATAKVETYAGIDVSKTSLDVGIMGETQVERYSYDAAGIEAVVEVVQRHEPRCIVVEATGDLEKELVTALVVAGLPVAVVNPKRVRDFARAAGRLAKTDRLDALILAQFGQVFRPALYQAQNAAAEQMSAWVSRRKQLVEMLVAEKNRLKSTRDATVRQQIEAHIRWLEGEIAALSDKLNQLVAADPQRQATGVMLRSVPGVGQVVTVTLLAELPELGRLNRQQIAALVGVAPLNRDSGQRRGKRHVAGGRASVRRVLYMAAMTAVRCNPVIKPFYQRLLAAGKEKKVALVACMRKLVVIMNAMVRDRCAWMAYQVVP

SEQ ID NO: 61247 - protein, 348 aa, unidentified
MAIVGGFDIHRRQVTFDYLDTVTGQVRRGRISPACRETLRQWLERFGGRQDVTFAVEGCTGWLFVVEELQRAGIAALLAEPAETAHLRGRKRHAKTDKTDSRHLRMLVADGRVPLSWIPPRQVRELRALLQLYRDLAEEHTAWTQRIHATLFHQGVPSLAGQLGDQKVRARLAADGAAMGLSPAGAQAVAVALRRLDDLEAELHPVRAQITAFARRQAGCKALARELFGVGPLVAAVVWAFLGDTRRFSSSAQAVRHTGLDITVYSSDDKRTPGHLSHQGPPILRWALFEAGHQGSRRASPDHRYYADVAGRIDANRAALSVARKLARRSHHILRRLGDQAYTPVPGW

SEQ ID NO: 61248 - protein, 315 aa, unidentified
MTKPLPSVNVGVDVGKAQLDLYLLEREQASSVPNDEQAIASLLRRLARYRLERIVIEATGRLEQTFVRAALSEGLPIVVVSPLRIRRFAGAIGQLAKTDQIDARLIAQFAAAVKPIPRPASGDNAKLIKDLVVRRRQLTALRTMEKNRRQVMPDALKQSIDRIIKTLDQELAALELLIDHAVDQHAPSHLKRELLTSMPGIGNCVAATLIGDLPELGSLNRRQIAALTGVAPFNRDSGSLRGKRRIRGGRSHSRTALFLSAMVAIRFNPDVKRFYERLLAAGKHKKLALIACIRKIVIALNAMLRDNVPWRSAIA

SEQ ID NO: 61249 - protein, 323 aa, unidentified
MNKDIKYFGIDISYLVFDVTDSDGNYYQFKNNRSGFKKFTKLLDNQSHCVMESTGYYHYQLAYHLLESGIKVSVENALSVKRFIQMRLSKIKTDKSDSKLICEYAQKVDLKLWKGNTKDEKECLQITRALSVYTKQSTMLKNKLHGEDVLGDPSKAVVRSLKRSLKQLEKEMKALGDTLLVLVKQEHQDLLTRLKTIPGIGPKTAIMLVVLTGGFDRFTSAAELCSYAGLTPVIRQSGSSVKGRPRISKMGNQKLRNLLFMCSFNACKYNKACRDLYERIVAKGKSKKLALIAVCNKLLKQAFAIAKSGLIYDKEYKSTLLKN

SEQ ID NO: 61250 - protein, 423 aa, unidentified
MMKLKYSICCGLDVHKNVSVATIVITNADGISEYKQKSFSTFNSDIRKFHSWLIENNCYHVCMESTGKYWIPIFNYLENDIEVCLTHPKYVKAIKGKKTDKKDSKWIADLYKFDLVRCSFIPPKDFRQLREIARYRFKLVCMKSSEKNRIQNCMTVSNVGIASVLSDPFGKTATEIMSYLLTHTSDSIDERAIRKLIKKGAKAKSDEIIEAIRGYNIESDQAKKLELARSHLEYLDGMITQSEVELYVRMKPYYKFVELVSTMPGMTELSSTIVLAETGVDMSIFDDAKHLCSWCGLSPTNNESAGKKKSVWISKAGDYLKPMMVQCALAAIKSKKQPYFAIKYGRVKKRRGHKKAIIAIARMMIVCIYHMVSEEKPFNPIDYEELMSPKNQIERVILNENNVFAYLESLGYDSSKLVKRNDN

SEQ ID NO: 61251 - protein, 364 aa, unidentified
MKKFCIGIDIAKKTFDATAIFVESIDSLNEVGYRQFDNSTSGFRTLVSWAKKLCKQCNGKLSEDGLFCMETTGGYDRQICMYLHDKGQNVWRESALQIHRSSGFRRGKNDKADSRNISEYAAKHQDKLVLFSPDPTVIMELKEIVNYRATMVERLKEAKTRLSEKKFTTVIGESQTARAINKMSESEIKTLDEIIEKCNQEIERIINSDEDLKRNYLHMTSINGVGLVNAACIIAYSSNFKKITTPNKMSCYAGAHTFYDESGTSVHKKDPSKNVCCKMIKNNLRMAAKSAIIYNREIKAYADRLEKKGKPYSIVLNNVMNKLLHITYSLVRNDCDYEYNHELLRKLKTEELVLKTEPSLEAAL

SEQ ID NO: 61252 - protein, 312 aa, unidentified
MTQACAAGIDVGRDFLDVGLEPLGRVFRLANAPQSVDRLVERLRRAGVVRVVLESIGGYAARLVRALADAGFAVGVIDPKRIRALRIAEGKRAKTDRLDARLIARFALLMQDAARPVPSAKAFEVRALSTRRRQLVEMIAMEKVRLKQTLDEAVAASCRQIIALLSQERTKVEGLLQAQLLFDAAGARRSSLLQTIPGVGPAISMTLLADLPELGGLERKAVASLAGLAPHPNQSGTRTAQAHIGGGRPCVRAALYLAALSAVRSDNGFKREYQAMRQAGKPAKVALIAIARRIVVAANSMLKTDSPWEKHA

SEQ ID NO: 61253 - protein, 339 aa, unidentified
MRLYAAFDLHATNSYCAVIDEKRRKIFGRRLPNDPQVILDTIDAYRPDIAGVVVESTYNWYWLVDMLKDAGYPVYLANPAATKKYDGLKHADDKTDAFWLAHLLQQGILPTGYIYPRELRIVRDLLRNRARLVRQRSSLIVSLQNTMAAYRGRRLGANEIKRLRTDHVALFFADDEVLTLIGRANKESIDFLTRQILRIEKEVEERVGTIEGYRNLQTISGVGKILSLTIMLETGPIERFGKVGNYASYCRLVPATRVSNGKNKGAGNKRCGNKYLAWAFAEAAEFARRNDEHARMFFNRKAAKTNVMTAYAALSHKLARAAYYVMRDGVEFDPMKLFR

SEQ ID NO: 61254 - protein, 423 aa, unidentified
MEVMHKRVAGLDVHKETVVACVRLMVGRKATRECRTFATTTEGLLALLDWLRESRVTHVAMEATGVYWTPVWKILSEGEFELVVANAAHIKQVPGRKTDLNDAMWIADLQACGLIKASFVPEENVQELRSLTRTRKQLVREQTRHVQRIEKTLEEANIKLGAVISDLLGVSGRRMIEAMIAGERNPHRLAALAERTIKASPKALYDALHGRLREHHRFLLKLHLRQWDALDAALREIDRQVAWQLERMDAEAADGQPPFRELIDRLSAIPGVARLSATAILAEIGRDMGRFPTAGHLVAWAGLCPGQNESAGKRKPTRLRRGAPWLKTMLVQCAWAAKRAKNSYYMAQFHRLRGRRGPQKAICAVAASILTAIYHMLKSGAAHRDLGADYFDRRAPEAKAKRLVAQLAKLGFAAQLQPLVDAA

SEQ ID NO: 61255 - protein, 324 aa, unidentified
MTDAVLGIDVSKNTFDTNLGAGTKARSKSFANSPAGWHHLIAWLGEHKIGQVHACLEATGRHGLGIALALHEAGHVVSIVNPAQIRDFARTKLGRNKTDQVDAVHIREYAELFKPRPWTPPSPAMRRLCELQTIRAGAVAGLTEWKNRRGSGIMDDLALSLAKTTIQHFTSQLEAVDQAIAETIDNDVELSAKRDLLVSINGVGEALAGIVLAELPGPDILGSSAAVTAYAGLNPQQHQSGISVNRPVRISKIGNAVLRTALYMPALSAMRYNPAVAALADRLKAQGRLKGKQIVIAAMRKLLVLCFGVLKTGKEFDPAMAMGK

SEQ ID NO: 61256 - protein, 345 aa, unidentified
MKTMYYIGLDVHKKTIDYCVKDGSGGIYAAGSIRATRLELDMWMKTLPRPWTAAMEATIFTAWIYDHLQPHAAAVKVAHPLMLRAIAVAKKKNDRIDAKKIADCLRCDFLPECYMASTEIRERRRTLRYRNLLVRQAVQMKNKIAVLLMEAGVSYNKQKLHKVGYFRELLATNRDIDEGLKPLLRLCRETVVRLGKTESALVRSLQCDSLLVERVERLMTIPAVGPITALTWALEVGDVQRFSSIKKAISYCGLCGAERSSANITMRTPLSKQRNKHLQTVLIEAAKMAPRNSPDLAMIYDREKQKDNANRATLAVARKLVAYLVAVDRRQKDFLVVASENRTAA

SEQ ID NO: 61257 - protein, 333 aa, unidentified
MNKITLIGIDTAKAVFHLVGVDAHGHYTWRKQVSRARLLSSLAQLESCEVVLEACGASHHWARRIKALGHKVRLIAPQHVKPYRRGQKNDYRDAEAIISAALSPGMHFVGVKRVDQQAEQALHRVRSRLMSHRNAAANELRGLLGEYGQVFGRGFKPLREGARRFAETEEAHTLGLVELVNDVLEEIGVLQGRMDHYERLIEQRVQADETSQRLREELSGVGKLSASALRVKVADVRDFPNGRHFAAYIGLAPGHSGTGGKVHIGHIKRGHDRYLRQLLIHGARSALRHLGDKQDAQSRWLRGLLERRGFNIASVALAHKNARQAWAIMAREQ

SEQ ID NO: 61258 - protein, 440 aa, unidentified
MKKVTAFETVYEHAAGIDIGAEKIFVSPDGLDVVSFDTFTCGYYQCIEYLQQKAITDVAMEATGVYWIALYAMLESCGFKVCLVNPKETKQVKGRKTDVKDCQWIQKLFSAGILRQSFIPQEKYMEVRLLVRERIDIIEMGSTYVNKMQKSLELMNIKLKEVISQIHGASGIKMIRAILGGNRDKDYLLSLCDKRIVEKKGEAVLKALEGNYNDTYLFMLKQNLHMWEKHQEHVGIIDERIGQLLEQLSKDKELLATNSKPKPVRHHAPKIEGLHQMLMRLYGVNVSSISGINDYTLLRLIGETGVDMIRFPTPKHFVSWCGLSPKQHKSGKINKRVKATSCNKTGQIFKEITQSLMNSKYIAIGSFIRKIKARKDSAIAIKAGARKLAIAYYNALTKGIEYVEQGTKKYEEQIVKREKAVLHKLAKKYNMQIIEKQQAA

SEQ ID NO: 61259 - protein, 412 aa, unidentified
MELLHRRCCGLDVHKETVVACLRLVSDGKVTTEVRTFQTTTADLLRLSEWLAANECTHVAMEATGVYWKPVWRILDDGEFALVLANAAHVKNVPGRKTDINDAMWLAELLAHGLIRASFVPDAQTQEMRNLLRTRKQLVREQSSHVLRVQKTLEDANIKLDSVLTDLMGKSGRAIIEALIAGETNPVKLAGLADRRVKASSEEFREALRGRVMKHHRFLLRLHLNQIDALDVAMATLDAQVEANLGPFRTAVELIRSIPGIKNLGAHVIVSEIGIDMSRFPSAAHLISWACICPRNDESAGKRRSNRVRKGGTWLKTTLVQCAWAAVKKKDSYLQAQFYRIKARRGPKKAIMAVVASILTTIYHMLKDGTMYKDLGRNHFDRRSSDQQRNRLVKRLAELGYAVEIKPLAATA

SEQ ID NO: 61260 - protein, 476 aa, unidentified
MKKHKKTKPNPEAAKPLHEPKPDAAGIDLGATEIWVAVAPDRCQMPVRRFGAFTQDLLAILQWLLECGIRTVAMEATGVYWIPLYQLVADAGIEVCLVNARHVKNVPGRKSDVRDCQWLQYLHSVGLLMASFRPAQIICQTRSIYRFRQNLLTQVGQHLQHMQAALDQMNIKLHHVINDLSGQTGMAIIEAILNGERDPLRLAQYRDRRIKATQETIAKSLEGDWRSEHLFVLRLAWENGKQVQEQIKKCDQELMQYTRQLEAKTMVAQPIVPVKIMSLNVEPGVPELTPAPAVRPAKPRKKTSKNEPDGPWRENLHRFFGVDLTLIPAISVLTGITLMTELGNDLSAFKTVHHFCSWLCLCPDNETSAGKVLHKSTRRSQNRVRQALRMAASSLHHDKSYLGDKYRRLRAKLGAPKAITAMAHQIARIIWYLITHQVAFDMSIFAELEKANQKRHLNRLNSAAHQMGYQLTPIAA

SEQ ID NO: 61261 - protein, 469 aa, unidentified
MNNAKKKKRKNNGKQHNSLSQLEQINLHAAGIDIGAEEHYVAVPQGRDTEGEDIRHFNTFTVDLLSLADWLKKCKVDTVAMESTSVYWIPLFEILDSQGFDVKLVNPRFIKNAPGRKTDVLDCQWIQQLHTYGLLQGSFRPDDQICELRSYLRQRSMLISYASHHIQHMQKALEQMNIKLNHVITDITGATGIAIIRAIIAGERNPVKLARMRDPRCKNDESTIAKSLQGNWRSEHIFALRQAVELYDFYKNQIIACESRIQQHLETFDDRSDGKPLPKAPVKSGGCRNKFHFDAKTYLYRMTGVDVTRIEGIDTPTALTIISETGIGMNKWPTDKHFASWLALCPGSKISGGKVLSSRSRPCANRAAHAFRLAAYSLHKSNSALGAFLRRKKSHLGSPKAITATAHKIARIFYNMLKNGAEYVDLGQDYYERCYRDRMITNLKRKAKQFGYDLVNVKEHELLTTHLQI

SEQ ID NO: 61262 - protein, 442 aa, unidentified
MPTRKSTSLTVVPLPVQIALDRGDHEMHAAILSPGATRPVQEIFKTGAETLHGFIRRWQQAHPGHVLEVAFEHPAPGLLHALMDLPGVELYPMNPSQTARYREVLNSSRKKDDATDALVILELLKTHRQHFPKWEPESDEIRLLRLVVEGRRKAVNDRTEAVLGLISLLKTYYPQALELCGDDLAGPLSLAFLKRWPTLQALKQSSSATIRAFYYGHNVRREKNIETRLSLTEKAEPLTHDAPLLEACEMRLRMLLDQIRILNAHIAGYEKKIEALVSKQPQFAIVRSLPGAGLLIGARLIAALGSHKKNLPHAVNLACLSGIAPIIKRSGKSSSTQRRIARPLFLHQTFVEYAENSIKFSLWARAFYRLKRAHGKGRWGTIRALAYKWIRILHHCWTHDIPYDENRYIAQLRLKSSPLIPYLDQLLAAPNATLLADKPTEA

SEQ ID NO: 61263 - protein, 367 aa, unidentified
MKKVSTVAAKESSNFSQPKLTIGLDLGDRSSWYCVLDEQGELQGERKLSTTAKALREAFQRIPRSRIALETGTHSPWVSRLLSGLGHEVIVAHARNVRLIGESRRKDDRLDARTLARLARIDPQLLSPVRHRSARAQADLTLIRARAGLVRARTALVNTVRSLAKSYGERLRSCNVRNMDPEKAEGLSPELQAALAPLLRTIESLSAGIREYNQRIEALAEQSYPEVALLKQVKGVGTLIALTFLLTLEDPHRFRKSRDVGCYLGLQPGRRNSGQSEPQMHISKEGDPYLRTLLVQGAQHILGPFGVDCNLRRWGLKLAERGGKSGKKRAIIATARKLAVLLHRLWVSGEVYEPLHNSSSRAVLAVA

SEQ ID NO: 61264 - protein, 355 aa, unidentified
MRYMGIDVGKRRCVAVVKDECGSSLQEIRFLNSGDGVRQLLDAVKPEGDLVAVVEATCNAWVKIYDALMDNGVHVKLANPSKTRAIAEARIKSDRADASILADLLRGDLVAESYVPSKERRGQRALVRHRAALIKERTEVKNRIHSLLEKYDVDETLFSDLFSKCGREWLSKIKLSDTDRFILEGELMLLKSLEEQVDRVTRRIASEAYDEDDVKLLMTMPGIDFYSALLIISEIGSIDRFRDQWKLVSYAGLAPSLHQSGNTLYTGRITKRGSKWLRWILVQCAQTARLHDERLKRYYERVASKKGHQKAIVAVAKEMLCIIWFMLKRKEPYRGENKNLTNRKLIRMHRLAQEG

SEQ ID NO: 61265 - protein, 413 aa, unidentified
MKKGTTFVALDDSKRKLVVGILQPGAEEPEVREIPNEAKLLRRLFERLRREGPVAACYEAGVSGYDLDRQITGLGVACQVIAPALTPRRPGQRIKTDTRDAKKLVRLVRAGELTAIRVPAEAEEGVRDFVRCREDVRRDVGRWRHRVVKFLDRHGRRYVAGRNWTGRHWTWLRSQRFEIPARQRTLEVSLFTLEQALARQAELDREIEALAQSEPYREPVGWRRCFRGIDTLAAMILLVEIGDFHRFQRPRELMAYLGLGPSEHSSGERERRGALTKAGNTHARRAVVEAAWHYRHRPGLGRALARRSEGQPDACRGHAWRAQQRLHRRYRHLVGHGQRPPVAVAAVARELVGFLWAAMTHRPWWHKSGTSTRPATSHELPERRRPRLAGARLESPRASYATPGPADPDDSRF

SEQ ID NO: 61266 - protein, 402 aa, unidentified
MWYAGIDWSDQHHDVVVIDTDGRKVASRRFAHSAEGLADLTTFLRAQVQELDQLACIIETTQGLLIAALLEAGLAVYPVNPKTVDRRRSASGAKSDPIDAYLLAKTGRSDLMDLRRLTPDSALIQELKTLTRDQAALIESQTGLVNQLTACLKSSYPVALEFFTKLQQPSTLHFLQTYPTPEAAQQASLEQLTQTLKTVGHTRAQTVARAIWQRLQQPHLTADPITTRTKARLMLALVGQLRPLLGQIAAYDTEIECLFLMHADSQIFSSLPGAAQRLAPRLLAEWGDDRTRYTDCGSVQALAGTAPVAYQSGTYAKAHRRSACLKPLRNALQQFAWQSTKLEEWARAYYSRKRSEGKSHSMAVRALANVWVRIIFALWQSEQLYQTAVFEAARQQHTRKAA

SEQ ID NO: 61267 - protein, 398 aa, unidentified
MTESSDYESVQVFIGVDVGKDTHHAVAINRSGKRLFDKALPNDENKLRSLISDLKQHGQILLVVDQPATIGALPVAVARSEGVLVGYLPGLAMRRIAALHAGEAKTDARDAAIIAEAARTLPHALRTLKLADEQIAELSMLCGFDDDLAAQTTQASNRIRGLLTQIHPAPERVLGPRLEHPAVLDLLQRYPSPEKLASLGEKKLAAQLCKLAPRLGKRLAADIAQALAEQTVVVPGTNAAAVVLPRLALQLITLRKQRDEVALEVEQRVLAHPLYPVLTSMPGVGVRTAARLLTEVACRAFASAAHLAAYAGLAPVTRRSGSSIRGEHPSRRGNKALKRALFLSAFAALRDPLSRAYYTRKMSQGKRHNQVLIALARRRCDVLFAMMRDGTFYTPQGS

SEQ ID NO: 61268 - protein, 327 aa, unidentified
MYLCILNQRGDIVLQRNIRTHSEVFLKTIESYREDIAVAVECMFTWYWIADLCSQENIPFVLGHALYMKAIHGGKAKNDKIDAHKIAVLLRGGMIPMAYVYPQQMRSTRDLLRRRMHLTRKRAELLAHIQNTNYQYNLPDIEKKVTYKANREGVAERFPDESVKKSIELDLKLLDYYDQLLPRLEHEISLIAKAHDADSYFRIRSIPGIGRILGLVILYEIHDIHRFPRVQDFVSYCHLVKSAKESAGKRLGTSGKKIGNAHLKWAFSEAAVLFLRRNPEARKYREKLQKKHGKAKSMTILAHKLARATYYILKRKEVFHMNTFFEK

SEQ ID NO: 61269 - protein, 428 aa, unidentified
MNQPSNHDDTQNDYAAFIGIDWADRQHVFSLQEAGQTTKETGTLEQKPEVIGPWLAKLRERFGGRPVAIAVEQSRGALIHALLSYDFIVIYPLHPSTVAKFREAFKSSGAKSDPLDTDQILQILTKHRELLKALKPDTEETRLLARLVEDRRKAVDLRTSHVQALTAALKEYFPQALELVNGNLTSRLACDFLIKWPTFQGFQQAKPSTIKRFYYGHNIRSPEVMEKVLGLATTAQALSSDRAIVESGSRLSQMYAQLIQTLNPVIEHYDSRIEKVFHDHPEANLFNKLPGAGPALAPRLLSFFGTDRSRYEAAGNVQSFSGIAPVTKSSGKTRVVYFRHACPKFDRQTFHEFARLSLAKCQWARNYVDFYTAKGKTFHTIIRALAFKWIRILFRCWKNRTPYDETKYMDSLKKRGSIFATLHLEQKS

SEQ ID NO: 61270 - protein, 344 aa, unidentified
MNVITVGLDLAKNVFQVHGIDETGDVVVRRSLRRGQVKPFFGRLEPCLIGMEACGTSHFWARELRALGHEVRLMPPGYVKPYVKRGKTDASDAEAIAEAVSRPTMRFVAIKSPEQQSVLALHRTRDLLVRQRTQLINMIRAQLAEFGIVLAKSVQHALKLVDRLVEGAAPDIPALACKIVIALAEQIRALQVRIATLEEDMKTWFLGNELAKRLATIPGIGVITASALAASVTDPHRFTSARQFAASLGLTPKADSSAGRQRMGRISKMGDRYLRRLLVNGMTSQLQSARRKPEAHPWVSGLLASKPDKLVAVAMANKAARIAWVIMTRGEVYRARHRVSEGAA

SEQ ID NO: 61271 - protein, 438 aa, unidentified
MSNKVIFNLDELFISVGIDVGADFSWMSIALPNQQFVGKPYKILHNSIDSLTTAVSKIKEAEELYSLESRIFLESTGIYHYPLFCYLRDKGFNCSVINPIITKNSTNINIRKVHNDRFDSKKAALVGLKPDLKVSLMPSDLALNCRNLCREYYDLMDNRSAYVNKLQGELRMAFPQYLSIFSKVTINTSLTLLETYTSPSAFLEADKQEIIDIIKSTARFGLTYAQNKYNAIIQAATDANQFGYIIDSNIKRIRLYISFIRKYDEEINSILESLHELVDANEDADFVKQIHLIETFKGAGFLSAVSIMGEIGDFSAFSKPKQLFAYFGLDPAVKQSGKFEGTKVQMSKRGSAIARRVIHTLTLQSISISRNREAKNPVLREYYLKKCDSKPKLVAMGAVSHKVCNMIFAILRDNKPFKIIAPQEHIKQYNAAKCDIAA

SEQ ID NO: 61272 - protein, 354 aa, unidentified
MFNQSNSTVATMGIDIGKNSFHVVGLDQRGAIVLRQKWSRGQVEARLANMPPCLIGMEACVGAHHLSRKLQSLGHDARLMPAKYVRPYAKGQKNDFRDGETIAEAVQRPTMKFVATKTAEQLDLQALHRVRERLVGQRTGIINQIRAFLLDRGVAVRQGPRFLRTELPNILAKRSDVLSPRMMRIIEELAGDWHRLDERIEGLSTDIKALADQDPACERLMSVPGIGPIISSAMVAAIGNGAAFSKGRDFGAWLGLVPRQMSTGDRTILGKISKRGNRYLRVLFVQAAWVVLVRPKTWERHGLKPWIEAAKKRMHHNVLAIALANKLARIAWAVLNKERKFECVRTSAMASQSA

SEQ ID NO: 61273 - protein, 360 aa, unidentified
MAKAKSLVGLDVHATKIVAAVLDAETGELEMFVMGGDAAAAAGFCAGLPGPARVAYEAGPTGYGLARELIKRRVACVVAAPSKIPRASGDRVKTDRRDAEHLVRLLLAGKLHPVRVPGDEEEALRDLVRARESVRVDLMRSRHRLSKLLLRHGIRFDDGAAWTTRHREWLQTITLPWPAAQATMLDAQGAIDALVHRREQLEREILMMLPTSPWTVQVGRLRCLRGIDTLTAVGLCAEIGDFERFAKAEQLMNYLGLVPCENTTGQQRRLGSITKTGSGHARRLLVEAAWHYRPRPRIGKALTDRQHGQPPEAIAISWSAQRRLHRTWTRLEARAKRRTIIAVAAARELAGFCWAITQIE

SEQ ID NO: 61274 - protein, 403 aa, unidentified
MLAGIDWASEEHAVCVLDDEGRVVDRFAIAHSAQGFDRLTTRLARHGDPAGVPVAIERPDGRLVDRLLEIGHRVVPVKTNAIKAWREAEVLSGAKSDPGDAEVIADYLRQRRGRLRELLPFSAETRALRAVIRSRTDLVDQRVAAANQLAAVLDAFWPGAKAVFADIWSPIALDFLERYPTPASAARVGEARMAAFLTKHGYSGRRPPAELIERLRAAPAGIPAGPQAEARRDVVLAMVRVLRALVRAIKDLDRSVAAHLDEHPDAEIFRSLPRSGQINAAQMLAEWGDCREAFDSPEAVAALSGATPVTKKSGKHEAVHFRWACNKRFRNAMTTFADNSRRASPWAQAIYQAALDRGHDHPHAVRILARAWIRVIYRCWINHTTYDPERHGAITRMEQPSAA

SEQ ID NO: 61275 - protein, 424 aa, unidentified
MKVTYQICCGVDVHKSFLVATIVKTTGGIEPSYQKKRFSTFNNSILEFKQWLLDNGCHDICMESTGKYRVPVFNLLEDEINVVIANPKWVKAVKGNKDDAKDSKWIGDLFRLGLVKGSYIPCKKVRILREYTRYRYKLVSCRSSEKNRYQNALTVCNVALDSVVSDIFGKSSTSIIDYLLEQSGTSINHEEIASKLLRSLKSKEAAVIESVEGYQMTDAQKYRMRLVRAHMDYITAEINDVDKMIENMISSNPDFENAVQFLCTIPGVKRDSAITIISEIGTDMSQFSSSKRLCCWAGLTPGSNESAGKKKSVRITRAGVYLKPALVQCAHAAVKSDKSPYYKKKYESLVKRRGKKRAIIAIARMILTAIYQMLSTGEQWNPSDLYKIDMPVALVEKQKAKAIKQATKLLQREGILPPDEPLAS

SEQ ID NO: 61276 - protein, 451 aa, unidentified
MQHRTDKPSEPVALSVVNPRAAGLDIGSAEIWVAVPAERDPKPVRPFGTFTPDLYAPADWLAACGVTTVAMESTGVYWIPIYELLEARGFEVYLVNARHIKNVPGRKSDVQDCQWIQRLHSFGLLSKSFRPEDEMVVLRAYLRHRAELIEHRAAHIQHMQKALQQMNLQLTQVLKDITGLTGLQIIRAIVAGERDAVRLGQLRDPHCKHSSDQIAKALTGSYRAEHLFTLKQALSLYDAYTAQLTECDVEIERQFSALKPEHDEQLPPLDPSDKRDSHSKNGPSYDARSLLYQWLGVDLVALDGLNASSVTTLLSELGPDLEVFPTVKHFCSWLHLAPHNDISGGKVLRSRTLKAQNRAGQVFRLAARSVSRSQSAFGAYYRRLRAKHGPKIAIVATAHKIARAFYYMLKNRQPYLGPSAAQAEAREREREITRLSKKATKLGFTLVEAAA

SEQ ID NO: 61277 - protein, 417 aa, unidentified
MRVNEKIKRITAETLICGIDIGKTKCCARFCDYRGLEVYHKVWFDKTENFDVIGCNITSAMYETEKTDVIIAFEPTGHYWLNIDKYFKDCGQETVLMPTYTVKQGKEMHDQNPTKSDPKDALLIARLASEGKYVKPIERNELYQTIYSGYHIYEDISKEITRIRNKMHVWNDKYFPEIEKVYKIDSVGIKPIYENQLLPNEIKNMTLEEFTFLMTKNNSRANKKSIMKLKELCEKSNGINSDAFTKKEIKRLYERFIELLKELEEVEKELKEMVSKIDYVEKAVEIAGIGYMNMIGIIAETGDLNNYEHAKQVLKMSGLSLKESSSGQKKGKKHISKRGRAKLRRNLKQIGICLVGKNNFFLQLHNYYITEREHPLSKLVSINAIIRKFMYILMAIVKSGESFSEEKAIRESGIKFN

SEQ ID NO: 61278 - protein, 389 aa, unidentified
MQVAHQPEASSAIRSDLGAIFVSLELSRSTWLITSLSPGAGEKMSKHSVPAGDICALLARFSELKQKAFARTGKSFEIIVIQEAGLDGFWIHRVLQKEGIESHVVDPASIATSRRRRRAKTDRIDGEALLRALLAYKRGEPRVCAMVKAPAPEDEDRRRLCRERKVLIAERVQHVNRIKGLLFCQGVSGYEPLRRNRRQQLDALKTGDGRVLPDHLKAQISRELDRLELLLGQIKAVEAERDALFTAAKAAAPTPAPVTMLLEIKGIGPEFAAILWMEAFFRSFANQRQVAAYAGLTPTPWQSGSVDREQGVSKAGNPRLRTTLIQLAWLWLRHQPQSALALWFKERVTRNGGRLKKTAIVALARKLLVALWKYVTAGVVIEGAVMKSA

SEQ ID NO: 61279 - protein, 319 aa, unidentified
METKVTVGIDISKNTFDVALPTTTKDSYRHLKFSNNAEGFKKFSAHLTPNSACVMEASGVYYLQLAIYLHDQGMKVSVVNPLTIKRFSQMRLMRTKTDKRDSAIIAEYGKVENPIEWKPRAEHMLQMQQLQALQDSFIGQSTRLKNQQEAFAESGINNKIGAKILLKEIEHVTKQIELIEEELTKITLTFHQDLFQRLQTIKGIGKRAAMTLILITDGFERFENSKQLCAYVGLSPRIFESGTSVKGKVKICKMGMARMRKLLYLCAMRARTCNKACKEMFERLTERGKNGKLALIAIANKLLRQAFVIGKSQMIYKEF

SEQ ID NO: 61280 - protein, 343 aa, unidentified
MQAVTTIGLDIAKSVFQVHGVDAQGTIAIRRSLKRRQVLPFFKKLPPCLVGIEACATSHHWSRQLQALGHTVRLMPPAYVRPYVKSQKNDAADAEAICEAVMRPSMRFVETKTPEQQSCLMLHRTRHLFIRQQTAVINAIRAHLAEFGVVAPVGRNGVEELLDVIADPKDNRVPEVARECLAALGRQLHMLKAQILEFDRHIMAWHRSNETSKRLDAIPGVGPALATALVASVANPRAFRSGRDFSAWVGLVPKQNSSGGKEKLGNITKRGDRYLRSLFTAGALAVIRYAKIHGTKHRPWLTQLLARRPTKVAAIALANKIARMAWAMMAKGERYKEPVALAA

SEQ ID NO: 61281 - protein, 406 aa, unidentified
MLFVGDDWAEDHHDVEVQDEVGRRLGKAKLGEGIAGIARLHELIAEHLDQDAEAQQVVVGIETDRGPWVQALLAAGYRVWAINPLQVARYRERHSVSGAKSDAADAHTLADMVRTDRHQLRPIAGDSDLAEAIKVVARAHKTLIWERTRHTLRLRVALREFFPAALEAFAELSAAEALELLGRAPDPVSAARLTTAQITGALKRARRHHAADKAQAIRAALGAEHLTQPTVVATAFAATVRAQVAILAILNAEITRMQEQVEAHFGRHPEVEIYRSQPGLGQILGARVLAEFGDDPTRYADARSRKNYAATSPITRQSGKKQLVLARYVHNDRLIDALGRQAFAALIASPGARAYYDELRGRGVGHHAALRQLANRLVGILHGCLKTGTTYDEATAWSHRQEKAAA

SEQ ID NO: 61282 - protein, 298 aa, unidentified
MEVLFPRCAGLDVHRDTVAAAVRVQTGSGKARVEVRTFTTTGGSLGLLADWLAQNRVTIAGTESTGVYWKPVFHLLEDRFECWLLNAAHVRNVPGRKTDVADAVWIADLVAHGLVRASFVPPKPQRDLRDLTRARRTVVEEKTREVQRLEKLMTVLVAEVGLDMGRFPTAGHLASWAGICPGNHTSGGKRLSGRTRHGNKWLRTALTEAAHAAARSKNTYLASHHAQIRGRRGVLKAIGAPRHDILLAYWHIIASNTVYQDLGGGWHARRRRDPEGRKNTLVGELEKLGYTVAVISAA

SEQ ID NO: 61283 - protein, 350 aa, unidentified
MNVTTYGLDLAKRVFQVHWVEPETGELKRKALARSDVSVFFARRQPGVVAMEACGSAHHWGRRLRDLGHEVRLIAPQFTRPFVKTNKTDVADAEAIWEASQRPGMRYVALKSEEQQAVLSLHRIRAQLIKFRTMQANQVRGLLYEFGVVVPKGWRVLLAQAAPVLAEGARGLVPELVRRELWTQVEGLRMLTARVHELERQIGSWQRRERECRRIAQVPGVGELTATAVVAMVGDARTFRSGREFAAYLGLVPRQSGTGGRVRLLGISKRGDPYLRTLLIHGARAVVLRESRAERERDPWLKGLLTRRPKNVAIVALANKMARTIWALLAYGREFDRSWSRAHMPAAAYC

SEQ ID NO: 61284 - protein, 439 aa, unidentified
MTTPSLPVLDPTAAAIDVGSEQLHVSVAGARPQIFGTTTGQLHELRDWLKAQGARSVAMEATGIYWLCPYEVLEKAGLQVVVVNGKYVKNLPGRKTDMSDCQWQATLHAHGLLKPGFVPPAHIRRLQDYLRVRTDHITMAASHEQHMQKALDRMNLKIHEVISDLTGMSGRKMIEAIIGGQRDPVALVALCDPQVQKHKLERLRAALEGTWKEEHLFALRQAYELWQFYQQKIAECDQAIEKVLQEMAGPEDPARPAPPTMKRGGINAPEIRGLHSLLWRLCGHKDLTTLPGVADYVLLQLLAEVGTDLGKNWQTEKHFTAWLGLAPGSRQSGKRRGNQKRGRNRAGRLFCVIARSVGRSVDKALGGFYRRLKGRRGGLVANLALARKLAELFWRLMVHGISYVEQGLKKYEEKVLHTEQRLLQKLARKYNMVLQPKAA

SEQ ID NO: 61285 - protein, 451 aa, unidentified
MRAELLAKESGNLPHPGEAADKLDEVGPAPILGSLLGGCGPGCGGRGPPSEGRRRVIYAGVDIAKFDHVIGAVDETGAEAAKPMRFKNGEDGFERCVAWLESVAESEDDVFIGMEATGHYWMACFAYLSAAGYKVCVVNPMQVRAMRKLKGLAGVKNDRIDSWLIAETLRQGDYNETRLATDDVQALKRLTRYHQGLKQELATVKTQALCVLDAYFPEYAGVFSALFSDAFGAASLRVLAECPTPAEVGRRRASTIARLLSDGSRGRLGDGKAAQIKAAARSSVGIRLGERAASFQIKTMVTQVEFLNATIAKVEAEVAALLARVEPNITTIPGVSTATGAQIAAEIGDVGRFKNAAAVVKYAGLNSGVSESGTFSAQGVPITKHGSPYLRRALWLAANRARQYDPKLRAFYEKKRREGKPHRVAVTAVARKLCHVVYAVMRDREPYDPGK

SEQ ID NO: 61286 - protein, 384 aa, unidentified
MNKHSMIFIGLDTHKEFHEVAYCEEQRGASAVHYGRIPSSKVSVKKLIRQFESKYPGATIHVVYEAGPCGYWIYRLITSLGHCCYVVAPSLIPKKPGERIKTDRRDALKLVKLLKSEDLTPIYVPEPEDEAVRDLSRAREAAMKDLKEAKYQLKALLLRNNIRYEGTANWSKKHLRWLTELILPHPAQQIVLQEQLQTIEERIRRLERLDNELTHHVHQWRYYPVVKAIQAMRGVRLLVAVGVVAELGDLNRFDHPRKLMAYLGLVPSEHSSGGKRHLGAITKCGNGRARRLLIEGAHSYRYPANISTDIQLRQEGLPKDIVDIAWKAQLRLCKRYQRMSNKGKHYNLIITAIAREMAAYIWAIAKEVVLTPVNPKLRLSRVPA

SEQ ID NO: 61287 - protein, 387 aa, unidentified
MAKVIIGVDPHKRSATIEIINDREQAVGQGRFATDRDGYKAMLAAGRKHPDRLWAVEGCSGIGRHVAQRLVADGETVVDVPAKLSARARLFATGQGRKTDPVDARSVAVVALRTNGLRQVVVDDTTVALRLLVDRRDQLGRTRTEIVSRLHHLLLELVPGGAKKFLSAQQARAMLNTVRPRDVVGKTRRWLASELIHELVTIDKKIKVANAELTDLVASTGSRLQQLHGIGPSGAARLLGDIGDISRFASRAHFASWNGTAPIDASSGDQNRHRLSRAGNRRINRALHIMAIVQLRHDTEGRRYYRRKLDAGKTAMEALRALKRRLSDVVYKQMVADAKLHETGPGGHLGATLQSSAADPIPMASTSDKSLPGPATPQPKTPLMINT

SEQ ID NO: 61288 - protein, 358 aa, unidentified
MDGSKQQPKVTAGLDIGDKYSYLCLIDTASGAIMEEGRLRTSPETFKRRFASERPMRIAIEAGTHSPWVSRVLEECGHEVLVANPRKLRLIYANKRKTDEIDAENLARLARVDPRLLYPLKHRGEDSQAHLAIIRSRQALVDCRTQLVNHVRGAVKSFGARLPKCSARSFHKRASEHIPEALRPALGPILEVIASLTERIRDYERELETISKEHYPETELLRQVEGVGTLTALTFVLTVEDPYRFERSRSVGAYLGLVPASDRSGDRDPQKRISKEGDQMLRKLLVGSAHYILGPFGHDSDLKRHGEKIASRGGKNAKKRAVVAVARKLAVLLHSLWASAEVYEPLRNAHRSAGGQAA

SEQ ID NO: 61289 - protein, 350 aa, unidentified
MIIIGCDYHPGFQQIAFVDTETGDYGEQRLEHSEGAEKFYRDLAGQSKKVRVGMEASGHARWFERLLAELSIELWIGDASEIRAKRVRKQKTDRQDAQHILQLLMENRFPKIWIPSGENRDLRQLLWHRHRMVQMRTRIMNQLQAVALNEGLRCKKRLWRQHGREQLESFRLAPWASRRREDLLQLLDRLNPTIADLTQVIEQEVEKCPEARRLRTHPGVGALTALAFVLIIGRTERFQCGKQIAAYLGLVPLEDSSGNRRRLGHITKQGSSMLRFLLVEAAQVTARSNPEWRNKYFHLVMRRGRKIAKVAMARRLAIALYWMWRKGWDYEQLRKFGSHAGKLGTGDGVQ

SEQ ID NO: 61290 - protein, 367 aa, unidentified
MIVNEVAKNVEKIISIDTAKNSFQVLVVNHKTGKKKNTKVQRSKFVEYILKHGPCLIFMESCSASQHWARLFEGHGFTVKLIAAQHVKAFLRNKRVKNDERDAEAIYTCGIQPDTKFVRIKTVEEQTVALLHTLRKAAVSQRVELSNRIRGILAEFGIVVARGRGSFNSEIEAMFNECEKIHDVYLRSAISSLFEDYHRLEQREKELSEKIEALNKDNELVKIALTCPGIGSLTASAIVAEVGDASQFRNGREMAAWNGVVPSQHSTGGRSTLGGITKTGNRYLRALLAQCACTIIQNASRHIEQGKATHLDRFALRLKLNGKPAKKIMIAVANKIIRILWAMLTQRKTFENKANEISDTSAELQLA

SEQ ID NO: 61291 - protein, 299 aa, unidentified
MEYFAGLDVSLRSCALCIVDGRGKVVLERELPCEVDDIAACLAGVPHPIERVGFEAGTMSQHLFYGLTAAGFDVVCMEARQVNAALSAMRNKTDRNDARGIAQVLRTGWFSPVHMKSREAHGVRALLSTRKALLKKTMDLANEVRGLLKIFGIRLPKTVKHGSFDGIVRPLIEMDEVLAHALVPLLDARVILYQHFLELDRRVKRAATQDEVCMRMMSVPGVGPIAALTFKSAIDDPARFRRSRTVAAHFGLTPRRYQSGEHDNPGRISKAGDRDVRATLYAAANVTCHGIFPPYGIRV

SEQ ID NO: 61292 - protein, 411 aa, unidentified
MQQIYGRVAGLDVHRDNVVACFRRLGPRGGVVFEKERFGATTARLRELEAWLAERQVELVAMEATGVYWKPVYYALEAKFAVWLCNARHVKKVPGRKTDLTDAEWLADVAAHGMIRPSFVPPPPIRELRELTRYRKTQSAARAAEIQRLEKVLQDAGIKLTSVASRVLTQSGRAMIEALIAGERDGARLAELAMGKMRPKVPALTEALTGHFGSHHAVACGRILGHLDFLNASIQALSEQIDARTAAFASVYTSLLPVPGFDRLSIDVIIAETGADMSRFPTPGDLASWVGVCPGSHESAGKRRRVGTTKGNPWLRQALIESARAAARTKGSYFGAQYRQIARRRGPNKAAMAIAHSLIELVWHLLSTGEVYKDLGDDYFTSRQDPERRARRLVAQLEELGFKVTLEAAAA

SEQ ID NO: 61293 - protein, 412 aa, unidentified
MRVFCGIDWAEAHHDIALVDGEGTLIAKRRISDDAAGFTTLLTLLADAGDSADDPIPVAIETPRGLLVAALRATGRKVYPINPKAVDRYRDRYSVARKKSDAGDTFVLANVLRTDMAAHRPLPADSELAQAIAVLARAQQDAVWQRTCAHNKLRSLLREYYPALLAAFTNQRGGLLRPEARALLAAAPTPRAAATLSTTELTTLLRQAGRQRGIDTEAARIQAVLRTEYLHQLPLVEDAFGRQALALFRALDTACANAEELAAATIEHFDKHPDAEIITSLPGLGSLTGARVLAEIGDDRSRFTNARSLKAYAGAAPVTRASGKSLTVTHRRVKNQHLAAVGYVWAFAALTASPGARAHYDHRKTTGDRHTAAQRNLFNRLLGCLHHCLQTRQHYNEDIAFPTHTNSTKKTA

SEQ ID NO: 61294 - protein, 401 aa, unidentified
MKYVLALDVAKGKSMVMLSSDVGEVLLEPTEYTHNKSDFERIDSYISKLNIKDNLTVIMEATSIYHKAPERFFKENNYHVIVFNPLIGKEITNTIRKTKTDKQDCIKLTNLFWKGSIPNRNYTEDEIYTKLNELSRQYYHLDEGLTRHKNRYKELLHLCFPEFELCFKDGKIYDLTALNFIKEFPHAYIIKEKRVDALAYNMANTNNRHLNYYKRKANIIKEYAINSYPGVNENSKDVDNLKQLANIIIDITEQKDDVKNQMIELAKQTKNFDNIASIFGIADLSASLIIAELKDITRFNNIKQINASCGLDPTIVQSGKSINYHGPISKRGNRYARKILFNCSRNIVTISAKCDKENPIYVYYLKKKQEGKHYYACLTACSTKLIRIIYALCVNNSTQRN

SEQ ID NO: 61295 - protein, 384 aa, unidentified
MNADHATELHAEDAILAVSLELSAAQWKVALHDGFREQPAVHSVGALQAASRLQAVLDLIEQQKRKWSLPSHVRVVVSYEAGQDGFWILRSLRSRGIDCYMVDAASIPVERHKRRAKTDRLDAIKLVTNLRAWLHGERDRMRVVRAPSLQDEASRHLIRDRGQLQKEVMQHRDRMRKLLVTVGCWDEVDHRAFAKRLARGELTCHDGSPLPDELRERLLRESHRLELAEQQLKDLQRTLHDRLPEPVRERITWLKRLRGVGDIGASRLMLELFWRQFRNRRQLGACVGLVPQPYDSGQSRVDQGISKQGNRRVRVQLIEMAWGWLRYQPGSALTRWFNERTQGTGPNRRARRIAIVALARRLVIALWRYLTEGIIPDGAQFKLA

SEQ ID NO: 61296 - protein, 321 aa, unidentified
MITRIYVGIDMSKGWFDACISLDESVKVERYKNTPDGHDQFIKAVSPLAGTVHVCMEYTGGYEMPLAVACREASLKVSLIDGGKFSLYRKSFGRAKAKTDKQDARYLLRYAIDRKPEEWFPFPDEYRTLRELVRHRISLIESKSAWGCRAGHTVESPLVTAQRQTLKDVLALQIEAADKAIAEHVRNSPSLKADMDLITSIPGIGEVAGARILAETGPISNYSSAREYALAAGLCPIVIHSGQKTPPGKLPVYGNAHLRCALYFPAVSCKSHKIGVWKFMEKVQANADKAKMTVITAGMRKLAHIIFGVLTSRTKFDITLI

SEQ ID NO: 61297 - protein, 340 aa, unidentified
MDHYAGIDVSLESSSVCIVDAQGKIVKVAKVASEPEALIAWFVSQPILPARIGLEAGPLSQWLFAGLKSAGLAVELIETRHVRDAFKAMPVKTDRKDARGIAQLMRLGWFCPVHCKSLPAQEVRALLTARKLLQAKRHDLEMSLRGVLRGFGLKVGPTTPKTFEGRVRDLVAHHGTFGMIADALLKARTVLMQEFKAIEKRLYAFARGDTPTRRLMTMPGVGAMVALTFSSAIDDPGRFRSSRVVGAHFGLTPRKHQSGESDVTGRISKIGDHGVRVALYEAANVILTRAVKGSDLKNWALGIAKRAGMRKAKVALARKLAVVLHRMLADGTSFMPWAVW

SEQ ID NO: 61298 - protein, 395 aa, unidentified
MLAEKEVAAPAPSINTDPIFIAIEISRSKWVVGTHIPTSSKVSVHTVEWGDAAALLALVERLRSRAADILGTADVPVLCCYEAGYEGFWLYRRLAAAGLRVLVIDPSSLLVNRRAKRAKTDRIDAKAMIRALMAYNRGEDQVLSAVNVPSAEQEDHRRLVRERQSLVYDCTAHTNRIRGLLLTQGIVGFDPRASGAERQLDELMTGDGRSLGPRLKDEMRREIGRLRVVLEQLKDVSAERNAIALGKPSKTPHRDQGSADADAAMIASLARIKGVGPNDASVLVREAFWRKFNNRRELAAWSGLAPMPWASGTVSRDQGIAKTGPAIFRSHMLQIAWRWLHHQPQSRLSQWFNARTNGAAGRVRRVMIVALARKLLVALWRYATAGLVPTGAIIA

SEQ ID NO: 61299 - protein, 419 aa, unidentified
MEEDCLKVIYPICCGIDVHKTFLVGTIISTTDGVQPHYQKKRFSTYNSDLNRFADWLHSNNCLDVCMESTGKYWVPVYNILEERKIRVTIANPKWVKAVKGNKDDTKDSKWIGDLFRLGLVPGSFIPTKDIRILREFTRYSYKLTSMKSSEKNRFQNAFTVCNVALDSVVSDMFGKSATAITDYLISEDTFNPEYCVSLLKHSLKKKSESVLESIEGYSITQEQKLRIRIVRSHLNYIESLISQIDSAIDVMVAKHESLISLLCTIPGVDRNSAITIISEIGNDMSQFGSSKRLCCWAGLTPGNNESAGKKKSVRITRAGVYLKPALVQVAHAAVKAKDNSYYRLKYEQISKRRGKKRAIIAIARMILTAIYQMMSTGEVWNHTDLFKVDMPETLKEKQLSKAVKQATKFLEKQGLTVA

SEQ ID NO: 61300 - protein, 363 aa, unidentified
MKHGHQTAQNLQIEYEQLTTQELHKRYRYFIANDVHKKNTTYNVRDRMGTILDHGETATDYQDLHDRLEPYLDSALIVMEASTSYYKLYQAFLENGYDVVVANTIKIRSLFPKDDNIDARRLSDMLRLGSVPISFIPGPETQHLRKLVRTRHSLMQEKVRWNNRIQALIDLEGLRMPPFNAFTKTWTRALVTYLERPNASYELKHTFTHYTRVERHLEEISKEMLRYTVEHWREEYEFLQTIPGMGRITGCYVIADVLPIERFAVKKGQKSLRRYVGVVPAFSSSGDSVSQGRIPKGSSRKLLRWALVEAANAITRTKTKLAQFYKMKKKQKKCSGKAKIALAHKLSDIIYHVLTTKKPYVAS

SEQ ID NO: 61301 - protein, 337 aa, unidentified
MQKNKEYVGVDVSKESLDMVVYSTGETRSFGNDDAGIAKATTWLKQVNSAIIVMEATGGMEVSLYIALQEANLPVAVINPRQIRDFAKSMGILAKTDKVDAKVLARYAATIQPEARPLPDEEARQVNTLVTRRCQLVEMITAESNRATIIRDKTMKQRIHAHIDWLKQELAGIDKDISQMIKENPVWHAKDELLQSVPGVGPVLSATLIAELSELGILNRKKIAALVGVAPFNRDSGKHRGERSIWGGRCRVRQHLYMATLSAVRFNPTIRIFYERLLANGKEKKVALTACMHKLLIILNVMLKHNSYWSCNYAIFNNTCIPDAKTVAYSLRQRFAQ

SEQ ID NO: 61302 - protein, 433 aa, unidentified
MNASTTTPTTNFAAFIGIDWADKEHEIWLRPADGSPAKRSTLSQNPVAIQEWVSQLRQQFGGRLVALSIELSHGPLLAALLGVEFLVIYPINPKSLARYRQAFRPSGAKDDRSDAELLCEFLRHHYAQLKPWQLEDAQTRLLGGLTQVRRHWVDEVTGAVERLRANLKHYYPLILELFADGLAQPMVVHFLQRWPNLKSLQEASHTELRKFFYGHNSRSAQLLEGRLQLILQAKALTEDAGVLGIYQTDTLVIAELLSVLIKKISEIQKQITKLFAAHSDAFIFQSLPGAAQVLAPRLLMACGTQRERFAEAVALAQLSGIAPITVQSGQSEYQMFRFTAPHFMHQTFWEFAKCSIKYCLWAKAFVDRKIHNGMGFNAAVRALAFKWIRIIWRLWQNREAYDENKYLAGLRRAKTALIQPVTTSVSSLDSALL

SEQ ID NO: 61303 - protein, 344 aa, unidentified
MLLEPERLSGRRSRIDHKEGTGDMNEASEQWWIGIDVSKHWLDGCCLGAPANQQSSRWANDADGIGALLNALSGAPIGLVVLEASGGYETAVASKVAAAGMPVVVVNPKQVRDFARAKGILAKTDRIDAQVLAEFARVIRPAVRALPDEEQRELMELVDRRAQLVAMRAQERTRLATVQPVARESIAEHIRWLDERIGKLDIDLTHRLRTSEAWKVKVDLLKAVPGVGKVTLFTLLARLPELGQMNRRRIAALAGLAPMAADSGQYRGKRFVQGGRAEVRAVLYMATLTAKQHNPLIRALFERLIAAGKPFKVAMTACMRKLLTILNAMLKSQRHWNPLLHSNP

SEQ ID NO: 61304 - protein, 391 aa, unidentified
MERLMPHPNDLSRSLVALEQDATLIAVIEMGQSSWLIAGIVPGLERQPLKKLAADPDALLHLLLRWRNEAVEAGRNITRIAVAYEAGRDGFWLARWLRARQVEAHVIHPASVPVSREHRRAKTDRLDAELLKRAFLGWLRGEPKHCTMAAIPTLEDEDARRPSRERESLVGECTRIVNRVKAHLARLGIRGFRLTLARASEHLKSLRTPEGAAVPQHTLAELRRDLARLSFVKQQIKEIEASRTERLEATPGEGRNAMVHLLARVVGVGVETADMLVQEVFSRTLRDRKALARYAGLTGAPDESGRKRRERGLAKAGNARVRRGMIQLAWGHLLHQKGSPLAEWYRRRTADARGGTRKTMVVALARKLLIVLWRLATTGEAPAGLRLRPAA

SEQ ID NO: 61305 - protein, 355 aa, unidentified
MNSVRYVGLDVHRDTISVAVVDESGRLMMQSVLATRAAAILDFIHGVRGTLHVTLEEGTHSAWLYDLLVRRVAKLVVCNPRKNALLKSGSKSDAIDARKLADLLRADMLSAVYHGERSGLEVQHLARSYTLLTEDTTRVMGRLKAVFRGQAVACAGKKLYGKRHREDYLAQLGAGGLRRRAECLYQELDALQPLRRQAKRELIAECRKHAAAQWLQSVPFLGPIRAALLIGRVQTPHRFRGKRQFWTYCGLALETRDSGEYRVVNGQVERKHKPALIRGLNWNHNHEMKNLFKGAATTASIREGVFREFYLGLLAKGMRPEMARLTLARKIAAIALKIWKKGEAFDAEHLKLQAA

SEQ ID NO: 61306 - protein, 578 aa, unidentified
MTTTTVERIGVGIDTARYGHRVQFLREDRQPAAKGLTVTENREGYERLRRELERLRQCHPEARFHVHIDAAGQYAANLERFLRSLPLPIAISIGEPKRNKDYHKAMFPKRTSDDTESQAMARFAIVERPRETPPVPGEFLMLREVAGRLHGQIKDTTRAINRFHNLLARVFPELAALAPSLGAAWVLELTTKYPTPQRIAAARLDSIKSIPYLKPALAEAIHRAARDSVSSLEGVLAERLMQQIVAQIKQCRHNENVLEKLLADAFLALPHTGHQHVVTIPGIGPTTAAVLVAKIVSIERFATPENLAGYFGTFPEESTSGMDKKGQPIPSGTMRMSPKGCDLVRRYLWNAAKSAIRYNPPVCALYQRLRVRGKRGDVALGHCMRKLLHQVFAVWTSNRPFDPRHEAVRRAAHAACEVPVAELEAQLSGNAATPPAPTETAAGHNRARSLDRTVVTAAASHLEPVIIPPHGSEGTIDYPFLREQITFERVLSHIGVLAGLRGRNQRRGACPLCKSTARSFSVHLEKNVYQCFLPGCSSGNVLDFWAAYQRQPLHAAARSLAETFGLKTQRNTDHGANS

SEQ ID NO: 61307 - protein, 316 aa, unidentified
MEIFVGVDVSKERLDVGVWPEGVGVSSFWVRNDEGGIRELVGRLLELRPCLVVMEASGGYEGEVALGLKDAGLRVCVMNARKVRDFARASGVLAKTDRVDARVLAMYGWALRPEPRDLGDEETRRLRALVVRRRQVVEMLMGERNRLCRASYGVRGNIERVIGALEEALEEIEGEIRGLLEGNPNWREKWELLVSVPGVGFAVASVLLGCLRELGSLSRRKIASLVGVAPFSRDSGQRRGKRSVWGGRSYVRSTLYMATRVAVVHNPVIKAFYERLIQQGKPRKVAITACMRKLLTILNAIVRTGKPWNPKLATNP

SEQ ID NO: 61308 - protein, 317 aa, unidentified
MPHSEIFVGIDVAKAELVIHLHPAGTCWRVANDKAGLSGLGRRLGRLAKASTLRVGFEASGGYERPLARLLDRLGLAAYLLDPARVRSFARAERQIAKTDPLDAALIARCLAALHAGLTPCRHDPQASRLAEHVRLRDRAVGQIIQLNNQLETISEPFLQRLVKAQVAKLKAMILRIEKAIAQVIDASPGLVRRNQLLQSALGIGPINAASLLSRLPELGQLSSRQIAAMAGLAPFDRQSGNQTRKARCSGGRAAVRKSLYLAALVISRSRKGQLAATYQRLRNNGKPPKLAITAVMRKLLVTLNAMIKYDTPFHST

SEQ ID NO: 61309 - protein, 376 aa, unidentified
MKRIVYIGMDVHSTNFTFCSLEPKLGGEDKVFGCMQSEADVKNVLKYIEGLKKELGDDVEFLCGYEAGCLGFSLYHQLKKQGVECVILAPSTMMASKGKRIKTDARDAKRIAQCLAYGTYSSVYVPSSDDDAVKEYIRMREDHKIALKKLKQQINALCLRNGRQYTGTKWTLAHLRWLRETDWQEAVLKETLQEYLMTFEQMTNKLEALDRRIEELAQGEKYKERVKKLVCLLGVKTRTALASIVEVGDFCWFEKGSTYAAYLGLTPGESSSGDSVCRGGLSKAGNAHLRTLYIEAAQGVCKGRIGHKSKELKARQAGSSQEVIAYADQANERLRRKYYRLTHREKKRNVAVAAIARELACFIWGLMTNHTERRVA

SEQ ID NO: 61310 - protein, 347 aa, unidentified
MVHVGLDLSRTGLDVHVMDEAGTPLAVTTAVPDNGGLAVLAERIRGLGDGPVYAAIESMNGARFVHDQLELAGWQVEIADAQKVKGLAPLACKTDKIDAWVLAELCRRDLVPAIWLPSPTVRAERERARWRLHLVRHRTALKNRIHATLLTFGHPCPVSDLFGVGGRQLLARLELPEPWAGDVAAALHLIDELDHQIIESERALRRMGADHRYVPLLMTAPGVGWVLGYTIAAEIGDISRFASPTKLAGYTGPCPRVYQSGGKDHRGPLARNGPKYLRWALIEAATHAARHPVYAQRYRRTKARLGRQRGPKVAQVDLARRLSEAIWHMLSTNRPFAPAGAAESLAS

SEQ ID NO: 61311 - protein, 360 aa, unidentified
MTGTILAIDLGKFHSVACFYEVADGRHEFKRIETTPRGMHELLMERKVLKVVIEIGGQAGWVVDLCRGLGIEVEVANANGEAWRWRSVKDKSDRKDALKLGRMSVMNQLSLVHVPAKEVRQWRSLIQYRHTLVERRVAIRNSIHALLAVTGGEAVIRSWNERMVAELRKLARGLEKCGREELWRGQLGLELDAMEQVQQLIEQVEKKLDELAADEREQWGERVKLLKTIPGVGPRLAEMVVAWIDDPKRFSNGRQVGAYAGLTPRRYQSGECDRSGRISKAGSGRLRKLLVQVAWGMLRYNARGRETFERLCKGQKTRRKQAAVALARKILVWCWAMLRDGKAWQEDHRPVGAASTSVEI

SEQ ID NO: 61312 - protein, 343 aa, unidentified
MNGLYYIGLDVHKKMIAYCVKDVAGAVIDRGIVAANRATLSQWALSLQHSWIGAMEATLFTGWIYDFLKPYAVELKVAHPEMLKAISASKKKNDRDDAERIADLLRCNLLPECQMASAEIRELRRVLRYRNLMVRVAVRMKNKTAGLLMELGAEYNKKRLHTKKYFAGLLEKMDDVPDSVVDLLKLSRSSQEVFEGAQKRLIKELRENEEIKERVERLMSIPGIGEVTALTWTLEIGDPMRFVSIRQAISYCGFCSAQRESAGKEKRGPLSKKRNKHLQTILVEAAKLAPRRNPDLAEIYIRECERGNRNRATLAVARKLVAYLLAVDKRQTTFITKKHDIVT

SEQ ID NO: 61313 - protein, 341 aa, unidentified
MNTLYIGTDISQTSFVGAAWCDGKAQLFGTYANDDAGFAAFSERVEQVRQTSQATTVHLILEPTGGYELKLALYAYGVGWLVSKPTPRQLRQWAQGMNFRTKTDQVDAKMLAEYGFRNQPAPQALMARAVRELDYLLRRRQDLEKTLRMERNRLANAQVHPDLPTTVLRNIEQTIGLLETQHQAIEQAIDHLVKGDATLRQQKRDLLSIPGVGPKNVLPLLVLLARFHALTQGKGTAKQLTAFLGLDVQFGDSGTSVHKRPVISKQGDRAGRTLLYMGALGGVRGHNVLRIFYQLLLSRGKAKKLALVACARKILTWAWAVFGSNTPFDPARFPHLTALPI

SEQ ID NO: 61314 - protein, 356 aa, unidentified
MTSTTKYIGMDVHKESVSIAVRNAGGKIAMESVIEAKANTILEFIDGLRGEVHVTFEEGTWSEWLYDLLKPHVRKLVVCDPRRNALLKEGNQNDRVDARKLAELLQNNQLRPVYHADHGLRAMKELVRSYLTITKDLSRVMTRVKAIYRSWGIPCSGTQVYSSSHRSEWLEKICEPGVRRRAEHYYQQLDALRLLRLEVRKDLLAESKKHAIWKRLRQIPSIGPIRAAVLLGIVQTAQRFRTKRQLWTYSGLGIEGHSSADHQVINGQLQRRKKPIEIRGLNKNCNHHLKNLFKGAAIVASTKPGPFQEFYTALVAKGIRPEMARLTLARKIATIVLIVWKRGVCFDANHLKPQTA

SEQ ID NO: 61315 - protein, 318 aa, unidentified
MEHDSTLYVGLDVHKDSITVAYAIGSGEVELLGKIGTTQADVERLCKRLQSKARCVSIVYEAGPCGYGLYRQLVQKEFQCMVCAPSLIPRKPGEHIKTDRRDAVKLVRSLRAGDLSAVYVPSIDDEAFRDLARAWVIAKDDLKRARQRVKAFLLSHGVRYTGSADWGPAHRRWLSAYSFDSAWQQFAFEELRRAIEDRLAQCDRLESALREAVVNWRFYPAVLGLQAMRGVQFTTAVGMLAELGDLSRFVHPRQLMAWLGVTPSEHSSGGKRRQGSITKSGNSYARKLLVEAAWSYRHPARVSPDIQRRHEKVCLNRL

SEQ ID NO: 61316 - protein, 476 aa, unidentified
MSHSNKPAAKKSRPAAQKRTKRGKKKGFCFQDRPIIEPNAAGVDVGAREMYVAIPPDRDKEPVRVFPTFTADLEALADWLVDRGVTTVAMESTGVYWIALYQVLADRGLRPCLVNPRHMRNVPGRRTDWHECQWLQYLHSAGLLRPAFRPQQDVCAVRTLLRHRHEFVQMVSQHIQHMQKALTQMNFQVQHVIGDITGVTGKAIVDAILAGERDPDQLARLRHPRIQADEATLRKSLEGDWRAEHLFTLRQSRHMYDTYRQQIEACDQEIAKRLGEFEARVDMGAKPLPKLQGPSRKRRTKRTGDFRFDVRQEAYRLFGVDVTRIPGLDGMAIPLFSEVGRDLAVQFPTAGEFASWSGLCPDNDKTGGRVVWKGVRKINNRAGQMFRMAASSLHHSRSPLGDLLRRMKAKLGPQAGITATAHKIAIIFYTLVSKQVEYDDSAWAERDKQRQQRFEQKLRRQARQLGYELVPVQQAA

SEQ ID NO: 61317 - protein, 288 aa, unidentified
MANDVAGIQTLVQRVRAQAPTLIVLEATGGYERAAVAALAAAQLPLVVANPRQVRDFARATGQLAKIDRIDAGILALFAERVRPGPRALPDDAAQALDALLTRRRQVLEMLIAERNRLEHAAPTVRRGITQHIRWLERQLRDVDRDLDNTIQSSPVWRAKEDLLRSTPGVGPILSRTLIGELPELGTLPRKQIAALVGVAPLARDSGTLKHKRLVWGGRAPVRAALFMAALVGTRHNPVLRTFYRRLLAAGKPKKVALTACMRKLLTILNAMTRTNTAWRHFDPSPSS

SEQ ID NO: 61318 - protein, 489 aa, unidentified
MSKASQQQQGKKDATLNAKAPQRKAKGRHRPQGEGIQRRSQLTITNPDAAGIDIGSQVHYVAVPEERTERAVRSFGAYTAQLEELANWLKECAVKTVAMESTGVYWIALYQKLEEAGFEVLLVDARQAKHVPGRKSDVQDCQWLQQLHTYGLLRAAFRPEDSICRLRTLQRHRKNLVECAGMWVQHMQKALNEMNLHLHHVLSDISGYSGLAILEAILAGERDPRKLASLADYRVKKSQAQIEAALTGDYRPELLFVLNQSLQGYRQIQQQLAQCELRIEQQLAQIADCTNPSQDCGPRQQGPESAGGKRGKIKPKEALEASLAAHLKRILGVDLTTIPGLNVLAILTLISEIGTNMAKWRNEKAFVSWLGLSPNNTISGQRVLSSRTRKVVNRAATTLRLAAMVLGHTNTPLGSFYRRKRAQLGAPKAITATARKLGCLIYRLIKNGQAYQAPDLHVYELKYKDQILNSLRKRANSFGFDLVEVPKAA

SEQ ID NO: 61319 - protein, 455 aa, unidentified
MTRSRRSTPKIKSLDELKVVHPHAAGLDIGAREIWASVPASSTADPVRVFGTFTVDLQALADWLIACGIDTVAMESTGVYWIPVFELLEARGLKVYLVNSWHLKHVPGRKSDVLDCQWIQQLHSLGLLRASFRPDAEMTALRAYLRHRAALLQHRAPHVLHMQKALQQMNVQLPLVLSDIMGETGQKILRAIVAGERDPLKLAQLRHPSCKSPEDEIAKALTGTWQPEHLFALKQSLEIVDFFTHQLTDCDAELERQFAAVKPRWEVPVELPSLPKAKPGSRSKNQPAYPARAELYRITGVDLVAVEGISASLAQTIISEVGTDMSRFPSEKHFCSWLGLTPHHEISGGKILRNHTLKTDNRAGQAFRQAAACVIRSQSAFGAFYRRKKAQLGPMQALVATAHKIARTVYHLLKDKTPYHDLGAEKYEQQFREREVAHLRKQAVKLGFTLTLADA

SEQ ID NO: 61320 - protein, 366 aa, unidentified
MKQQHQDSEVTIGLDLGERRHRFCALGGRGEVVEEGSLLNDRASLARLTGRYRGALAVMEAGTHSPWVSRYLEGLGWEVIVSNPRKVRAIYQHERKSDQRDALMLARIGRMDRALLYPVRHGSEQAQQDLLRIKLRDSLVRARVALINSVRFSLKSLGYAVCNPSSERFHKVAMERLPERVQQMIAPSVQALAELSTRIAVLEREINVVARTKYPQTLWLQQVPGVGALTALYFVLKIEDPQRFENVRDVGAYAGLCPRRDQSGGSDPQLRISKRGDPYLRRLLVSAAQYILGPFGPQSALRAYGLMLAADGSARARKQDVVAVARKLAVLLLSLWKNRSHYEAFPHWQTIEDKRSGTIAMHRVEA

SEQ ID NO: 61321 - protein, 421 aa, unidentified
MDQERTYSRAAGIDLGKRGMSVCIRIPARGNTVDLEQLTYTTMTSQILALRDRLAAARVQIVAMEATGDYWRPVYWILDGTLPGVEILLVNPAHVKILKGRKTDRADAAFLARQAAAGNLRGSFIPPPPVREVRDLTRRRTTLATLRGSEVQRLEKTLEDTGIKLSSVISNLIGASGRAILRALIEGTREPAALAQLAHHGIKAGRAELTEALTGHFTEHHGYLVADHLEEIDHYTGKIRALDERIAQLLDDPDKHQDLNNLATIPGIDTTGAQIIVSELGHDMSAFPTPGHLASWLGVVGGHNESAGIKRRARRGEGNSPMRRILGIAAFTVMGHKGTYLNARYHRLRGHMDSRKAQVAIMHDITIAIWFILHDKTPYRELGPDYFARRDPDKVTRRIHALARSIGATIQIHTTPTPATP

SEQ ID NO: 61322 - protein, 387 aa, unidentified
MSKKIVVPSYLAAMDRAEADPSAARFWVGLDVGYKNTAVCVLDCDGAIVHQVSMKSSATEIGRYLRKNFKSHVTLIGIESGGLTPHLTTKLRAQGVQVVVLDARQVHRVLSVKRNKTDTNDARGIAEITRTGREYLTEVYVKSNLCFEIRAYLTMRDRLVKQRRETEAMIRGLVRVYGGRIEGGTETAASYRSRAIDQMCLIADTEGVDLRPRVLPLLDLCEGFYVEANRIERELELLAASNPVCRRFMEIPGVGTITAVSFYSAIEDPTRFRHVDDVAAYLGLTPRVYQSGESLTHGGISKMGNQLTRTHLVGAATVMLSNTRSFSTLKDWGLKLSKRIGFNKAKVALARKLAIIMFSLWRDGTHFMAKAADVPAHRALMQSRLPA

SEQ ID NO: 61323 - protein, 360 aa, unidentified
MKLDAALDTSATTTAICVVNSRDGAIVLETTVPTNPKAIFRALEPFLPRLHLVGHEATGWSAWLQRELEARGVPMVLLETHHTARMLEAQRNKTDKNDARGLAQIVRSGWFKPVHAKSDASNRMKLLLAHRRTLKRKLMDIENEIRQSLKMFGLMVGRRVQRASFETRVTALVADDPLLGSTTACMLRCWAALWTEYKRLHTLLVQVVGRDELCRRFCGIPGVGPVAALTFKAAIDDPARFAKSKIVGAHFGLTPKREQSGTSVDHDGHISRRGDGEVRTALYEAANAMMTRSQKHCAVKAWGLRLAAKRGHKRALVAVARKLAVIMHRMWLDGSEFRFSASDQPAGKERNPAPAAPACA

SEQ ID NO: 61324 - protein, 370 aa, unidentified
MSVRRILAKTIDTDLEYEAIGIDLAKNCVSAALLTTDGEVVCIDRLDYSELEKSAQALSPTTFAMEPCTEMNYLVQKLEAWGHRCLVIGGKNVQNYVENHYSGQKTDLNDAQALAFLAQDKQLRTIKAKDIEQQKYASLTTLREQYIKQYRQTIVSLKGICQAWGLNISKGISGKAQLKDLIENHAAFPEELRESLVDMVTHAQTTQKVLNKITKTLEVLAKNDKVCQLIQTIPGLGTICSCRLRATIGDIKRFKNPKDFPAYYGLVPRSIATGHNEKKGKITHRGDRTMRSLMVQGAGCVIRLATCGKLKSKQLTKWILKKQKEKMPWGKLVCAVAAKLLRTVRAILISSKPYNPKIAGVAKCSLSKGS

SEQ ID NO: 61325 - protein, 344 aa, unidentified
MFYAGIDAHMKSSTIWIVDRKGRKVSSSTVMTSAEGFAAGLGRWVRRGLKAAVEASGITPWVCQLLKDLGVRVVVVNPNRVRLIAESRKKADRVDAETLAELLRLGGLPEVHQPSLEARRLRTELSVRRQLVRQRTGLINQARGLLRGWGVMLPVRFFQSRGGWKDLQAKRLPEYLRSLLETMKGVYEQLTQAIRQVEMTLKQREHSDERVARLETIPGVGRVSALTLVAAVDKIARFGRAKQLTAYNGIVPTVRSSGEREQQGSITRQGRSEVRAVWIQAAHSLVRSRGPGARPLQKWFWKVARRRGVRTAIVALARKMLSLAFYLLRDGTRYEPLRLRHAAA

SEQ ID NO: 61326 - protein, 428 aa, unidentified
MQSDSSTTSLYVGIDIGKNVHCYGGYAGGELHLIQPRQEVRNNQSGYDSFRNWLQAQVTSHQYAPIVVGLEPTGIYHEAWSYAIQKDFNHAIDFRFLNPYQTRQKRRQLQNGRKKKTDPIDVEAIAYCLRDGQGNPPCLPEPQTLRFDLWAAEFRQAYREHQRLQLSILTQWDRLWPGVLVDVKAFQKAHPHLKSPKPLVLSRPLERQLVRFLLAENPNPYYWRSFSAEALHHFLHEKGPHCGPITAQRVFDLAHEALLPPKHLAESLAERLQNDFQHFLQLAERLVQLQQQAETLVPQSPAAVLTTVPGIGAYLAAQYLAYVVDPQRFDHADQIWSLAGFDVQQDDSGDRRRMGRLTRRGDPAFRAVLFAIGLNTSQYCPAVAKARQQALKHGKKHIGAIIHAAHKANRMCFYLLLHQVAYDPKVAH

SEQ ID NO: 61327 - protein, 343 aa, unidentified
MKHTKYYLGLDVHKERTSYCVRDRRGNILTEAETATLYSELEPQLKPYLTASMIGLEASTSYYTLYQQFLKHGYNIKVANTVQLRQLIAKNDKLDAKRLSEMLRLGTFPTSYIPDETMQHLRSLVQVRHALMQEHVRCNARIQAFLDKNGVVMPPQKAFTKKWTTALQTHLNEHTSCIELQLEYDHYQFLEYKLNQIEHEMQKYVKTHWKQEYTLIQTITGFGPILACYVIAHVHPIERFASDRKLRRYAGVIPVFKESGEHTSKGKIPKGTSRKQLRWALVQAANTAGKTDTPLGRYYRKKKKQKKLSGIAKIAVASSMVDIIYKVLTTKQPYQGIMRLTPV

SEQ ID NO: 61328 - protein, 371 aa, unidentified
MNALAVGWDVHRRFSQVSLQELIADGELRVVERRRLDHGDRAAMAAWLATLPAATPVAMEGAFGWQWVADWLTELGLTPHLGHPPAIRVLAKNEAKADRVDADRLARFWLRGIFPQSYLATPEVRQLRERLRHRQALVRLRTEVKNRIQALLHRGGVLHGLSDLFGKRGRALLAELALPEASRAVLDDGLALLDALERQIAALEAWMRAHLEQDAIVRLLCTIPGIGLVLAHVIRAEIGQLAERFASAKRLASYAGLAPLSDDSADRHGRRHIGQACNRTLRWALIEAAGIALHSADCPAKFHKLYDRLSHHGRVNKNQSRVAVARELCELVYVIWKKGEPYRDPTSPASTLSKPPRRRAKRPAAARASRP

SEQ ID NO: 61329 - protein, 412 aa, unidentified
MAEETFRWFAGIDWGSATHQACLLDEAGTVVGERAFAHGGAGLAALCDWLVSIAGDPGTVAVAIEVPHGPVVDALLDRGFAVHAINPKQLERLRDRVSLAGAKDDRRDARVAAGGLRTDPHLFRPVEAGDPAVIALREWSRLADELQQERVRLSNRIRQQLWRYYPQLLEVSDDVTAEWVLDLWTLAPTPTKAARLREATLARLLQRHRIRRVDAERVLAILRQRAITVAEGVTEAAVLHLRSLVARLRLANREFHQAERKLNELCATLRESPPAAEGAPHDAAILSSLPGVGTVTLATLLSEAAGPISRRDYAALRTLSGVAPVTKRSGKSCLVTMRYAAQVRLRNAVFHWARVAVLNDPKCRTRYAALRARGHSYGRALRSVADRLLGMACVLLQRQVLFDPDYGSSAAA

SEQ ID NO: 61330 - protein, 412 aa, unidentified
MDVIYTHCCGLDVHKKTVVACLITSAEGLEPVKESRTFRTMTADLLALADWLQQAGCTHVAMESTGVYWRPVYNLLEGQCELLVVNAQHIKAVPGRKTDVKDASWIAELLRHGLLRGSFIPSKPQRQLREFTRYRSTLVQDHARTLNRLQAVLEDANLKLASVVTDIYGVSARAMLEAILAGQRDVEALADLARGRLRAKRDQLKEALEGRVTAHHSFLLSEHLSTLEYLDEAIERVSGEIDQHLTAEQEAIALLDTIPGVGQRAAEILIAEIGTDMSRFPSAKHLASWAGMCPGNHESGGKRLSGKTRKGSRWLRQILVEIAHVASKTKNTYLAAQYRRIAARRGKKRALIAVGHTVLTIVYTLLTRKQPYQDLGTAYFDQREQHRVERRLVRRLERLGYEVALQPRALAS

SEQ ID NO: 61331 - protein, 382 aa, unidentified
MPSSRNPAPTSDGPDTVFLALELSGTSWLVALHAPDADKVERHRLASGQARDLLDLIARIRSRVQRRLGTVPRVSCCYEAGRDGFWLHRLLEREGIASHVMDPTSLQVDRRARRAKTDRLDAEALLRALMAWSRGERRVCSMVRPPSPEQEDARRPSREREALLKERIRRVNRIKGLCAAQGVYDYEPIQADRRERLAQLVTGDGRPLPRELAAEIGRQLEQLELVLRRLAEVEAVRDQRAAAARAEPGSKLGALLRLRGIGPELATVLQMEVFYRHFASRRDVAAYAGLAPSPFASGGRQREQGIAKAGNPRARKALVELAWLWLRHQPESALARWFHGRVGAAGGRVRRIAIVALARRLLVALWRYVETGVVPTEAQVKA

SEQ ID NO: 61332 - protein, 347 aa, unidentified
MNERTANVERLAIDLAKNVFQLAGEDARGQVVFEERLKSREAFSAFLRQLGSRVTVLMETGPGAQAWARELQGRGVRVRILPAQRVAEHRSGAKNDRNDCRAILRADRDDTIQPVVVKSTEALAMQALHRVRSGYLRRKTAITNQIRGLLLEHGIAAPQGVAALATRVPRILEDATQPVPALLRELVGELWAEAVHLSARVEALSARLETAAREDPLARRLMRVPGIGPITATALVAKEAHPERFPNARQFAAYFGLVPEQHSSGPRVRLGRMCKRGDGYIRSLTIQGAHTVLRQLRDDRQDPDSRRLRRWNERHGRKGAAVRLANRNLRIAWALLRREDDYRRTPA

SEQ ID NO: 61333 - protein, 318 aa, unidentified
MMSHDLWFVGIDVSKDTLDLAFVRGEEEMTCQVANSPTGWAELVAVCKKRCVDRIVLEATGAYERRAVAELLAAALPVVVINPRQARDFVKATGRLAKTDRLDALGLARFAEAIRPPIRPMPDEKTAELQEKLARHRQLVHMHTAESNRLAQAYSKPVRRSIEAVVKIIEQQLEAIDQDIDQRIEECPAWQDKDRILQSVPGIGRHTTRTLLCSLPELGQCSRQQIAFLVGVAPLNRDSGKMRGMRSIYGGRGQVRQALYMATLAATRFNPLIREHYQHLLGLGKRKKVAIVACMRKLLCIVNAMLREHETWNPKASP

SEQ ID NO: 61334 - protein, 370 aa, unidentified
MGNASTLHVGLDVHKDSIAVAYAPAESGTAPVPFGTIGTRQCDIDALIRKLQSKGAGLVFVYEAGPCGYWLYRYLTKQGLACFVVAPSLIPRKPGDRVKTDKRDALTLARLARSGDLTPVYVPAVPDEAIRDLARAREDALHDLNAARFRLKALLLRHDIRYTGRANWSAEHLRWLARLVFPTAAQQIVFQEYVRTVTERTELLQRLEAELLEHAQTWRLAPVVSALQALRGVQFTVAITTIAELGDLTRFDTPRQLMSYLGLTPSEYSSGERRRLGGITKAGNGHARRVLMEAAKAYRHRAKVSEAIQARQQALPAAIRDIAWRAQVRLCGRYRRLLARGKHPNTVAAAIARELAAFMWAIAKAQPLAA

SEQ ID NO: 61335 - protein, 403 aa, unidentified
MNAVGIDVSKGKSMVAILRPYGELVEAPFEVKHTSSEIQSLIQTVQSIDGESRIVMEHTGRYYEPLFCQLAGAGLFVTAVNPKLIKDCGTNSLRKVKSDKADAIKIAKYALDSWSDLKQYSVMDEIRKQLKTMNRQLDFYMKHKTSMKNNFIGLLDQTFPGVNNYFSSPAREDGSQKWVDFATTYWHVDCVRNMSRSAFISHYQNWCKRKEYNFSQSKAEEIYEAAKELVPVLPKDDVTKFIVKQAAGQLADASERVAQLKVKMDETASKLPEYPIVMAMYGVGSSLGPQLMAEIGDVSRFTHKGALTAFAGVDPGVNESGTYEQKSVPVSKRGSAPLRKALFQVMDCLIKHMPQDDPVYLFMDKKRTEGKPYYVYMTAGANKFLRIYYGRVKEYLLSLKQPE

SEQ ID NO: 61336 - protein, 456 aa, unidentified
MNQKRSKPKIDRTMPTVHPNAAAIDVGATMHMAAVRADRTPEPVRSFGTFTTDLHRLVNWFKECGVETVVMESTSVYWIPIFELLDARGFSVFLVNARDAKHVPGRKTDVSDAQWLQRLHSYGLLRASFRPKGQIAELRAYVRQRERLLEYAASHIQHMQKALTEMNLQLHHVVADITGTTGMRIIRAILAGEHDPKVLARLRHYSCHSSIETIEKALTGNYRAEHLFALEQALTLYDAYHGKVSACDVRIEAVLKELSVRRGRKSGSLPSSHRRTDQANGLAFDARAALFTLLGKDITQIDGLGPYLSLKLIAECGDDLSAWPSAKHFTSWLCLAPSNKISGGKVLSSRTRRGSRAAALLRLAAVTVGRTDTALGAFYRRLSARIGKAKAVTATARKIAVLFYNAVRYGMEYVDPGASFYETRYRKRVVDNLRRRAKSFGFVLQPFEPTPSVPVS

SEQ ID NO: 61337 - protein, 336 aa, unidentified
MRKDVVVGIDVSAKTLDVSVEEVDGAIFAVKSFENSPAEHDKLCRWLTKDGRKARVVLEATGVYSLLLSLALNDAQGIDVMVANPKAVKDFAGALMQRSKSDRKDAQSIREFAKRMPFVPWNPPSVEILELQLISRRIVAMSVDKAREGNRLHAMKTRGKTSQFVINDIEVNQRHLQRRIECLLKEALRHIESHPELHRAFKRITSVKGIADVSAVQILGELLVLPKDMTIGEWVAHSGLDPREYVSGKSVKRSTRISKVGNVNLRRALYMPALVAVQWEPQVKAYYEKLLSRGKKKLVALVAVMRKLLHAIYGMLKHDTDFCGEKFYATPEPTDH

SEQ ID NO: 61338 - protein, 427 aa, unidentified
MSAHVNTPTPIVWERYIAIDLHKHYLMVGGINAQQQVVLTPRKITLDRWLDWAQANLRSTDAVVIEATTNAWHIYDQLVPLVGRVVVAHPPKVKQIAAARVKTDKHDVLILAQLLRADLIPEVWVPPPHVRDLRALISHRQRLLRARTMGRNRLHSLIHRYNLTPPPGDLFAAKQRHWWVSLDLTLTERLRVDQDLATLDHLAQHIATVEAELHRLSTTAVWADQVPYLVQLPGIGLITAMILLSAIGDVTRFGAAQQLVGYAGLGAGVHSSGKTHRTGRITKEGRRELRWVLVEAAQTASRTHPYWQAEFQRLARRIGEKKAIVALARKLLVVIWHVLHGQSVDQRADAERVAFKLMVWSWKLTDEQRGGLTSRQFIRAHLIRLGIGNDLSHITRGGTKRAVASVEEVLALRPELRSSSAGGGTNN

SEQ ID NO: 61339 - protein, 355 aa, unidentified
MGGCPLRPGSLKTVGELGAPPVILSNPNSRQGRKARSPIRQGRVDMESIIVGIDVSKDRLDVAVRPSGEVFVAERNAAGLELLVARLRELSPRIVALEATGGFETVVAATLGAAGLPIVIVNPAQIRDFAKAIGQRAKTDPIDAAVIAHFAEATKPEPRPLPDQATRLLADLVARRRQIIEMIVAERQRERRITIPRLKKSILRLLKALEKELATVDTDIDDAVRGSPAWREMEDLLASVPGVGPAIARTLIAELPELGQLGRKEIAALAGLAPFTRQSGQWRGRSFIGGGRKTVRSAVFMGAMVAKKYNPVLKAFFDRLVAAGKPKMVALIAVARKLLTILNAILRDRRPWQIA

SEQ ID NO: 61340 - protein, 384 aa, unidentified
MRTDQAAMLHSEVLVLAVSLELAAAKCKIALHDGRRDNPAVHTVAEPQAASRLQAALALIAHHKEKWALPTDVRVVVSYEAGQDAFWICRALRALGIECHVVDPASIPVERHKRRAKTDRLDAIKLVINLRAWLRGERDRMRVIRVPSQQDEASRHLMRDRGQLQKEVLQHRDRMRKLLATLGCWDEVDSRKFAGRLARSEVRCHDGAPLPPEFHERLVRECERLALAEEQLAALEKSRQASLPEPARVRVDHLTRLNGIGTVGGSRLVLELFWREFSNRRQVGACVGLVPQPYDSGESQVDQGISKQGNRRVRALLIEMAWSWIRYQPASALTQWFNQRTQSTGANRRARKIAIVAVARRLAIALWRYLKDGVIPTGAQLRPV

SEQ ID NO: 61341 - protein, 360 aa, unidentified
MKYAIGVDLHKETAVIAVLDGEGKIVEQKIFSTKCKQMIRDYFSSYGLQCEVAFESVGFYQWFWELVKPVVGKLHLGDPVGIRARAGRKAKTDKNDALIIAEMLLEGKIPEAYVPEEPYASLRKLVRFRCSIARNLAHARKALRWICLKTNLPGPSILTSDRAQKWLLSQDQKFSDTDRKSGRLHIDIIKNTEYALADIEREIEDYIKKVPELHARWLLLRSIPGIGPIAAAVIISETADILRFSNAGQICCYAGLAPRVSQSGETIRHGHISKQGPPILRWVLQQAAWVAIRCSIEAKKIFNRISRKAGRKKAVTAMARKLLVYAWSVCKRNQPFKWEIKGDTQNIIRKNIIGEWCYQI

SEQ ID NO: 61342 - protein, 344 aa, unidentified
MKKLLKQVAGIDVAQQELVVSFGRMYDDLVPEIYANKTFANTDKGFESMAQWVNKMADPEAAVHYVMEATGVYHEKLAYYLAAKGHPLSIILPNKISNYLRTLEVKTITDKTASVGVARFGLERKLDTWQQPKPIFKRLRQLTRERDQLVQTRTTIKNHLHAEQAGADPNKSSLSRIKKQIALLDKQEREIIEEMRSLLKQDEQVKQSVKLICSLPGVGFLTAAIVLAETNGFELIRNKRQLTSYAGLDVKEKLSGTSVKGKPSLSKKGNKYLRKAMHFPALAAIRHDERFKAIFIRLVARQGVKMKAVAAIQRKLLEMIYTLYKNNTAYNKDYLSSNQPLATP

SEQ ID NO: 61343 - protein, 341 aa, unidentified
MEQYVGLDVSMEETSVCVMDVTGAVVWEGEVASTPAALVRALHRHAPRAVRVGLETGPLSTWLWHELRAAGVGVVCIDARHAQAALSMRINKTDRNDASGLAQLVRMGWYREVRVKGLPAHANGALLASRALLVTQRCELENQIRGLLKNFGLRMRATTGPAFAQSAAALADKQPMLRQVVTALLAIWSSLRLQIVALTRAVQRQVSDDAVCRRLMTMPGVGPMTALAFRTAIDDPARFRHSASVGAYIGLTPRRYASGEIDRMGRISRCGDPLLRSYLYEAANIMLGRVRKANPLKSWGTKLARRAGFKKARVALARKMAVVLHRMWRDGTDFGAPLVPA

SEQ ID NO: 61344 - protein, 414 aa, unidentified
MESLYTCCAGLDVHKQTVVACLLRPDGDGERTEIQTFGTATASLEDLRDWLRAAGCTHVAMEATGSFWKPVHNILDGHVEILVVNASHMHALPGRKTDVRDAEWIATLLKHGLLRASFIPSREQRELRDLTRTRTSLTDERSAAINRIQQVLEDANIKVAGVATDIMGKSGRDILAALLEGAMSPTEMAELARGRMRSKREALEKALRGRMSDHHRMLIALHLEHIDLLDEQIERLSAEIAGRLRPHEAALLRLETISGVGRRTAEILAAEMGLDMSRFPTAGHLASWAGMCPGVHESAGKRKSGKRRAGNKALRRALTEAAQAAARTKKADRTYLRGQYRRLVVRCGKKKAAVAVGHTILRIAHHLLREEETYQEGVLVQLDEHRRARVQRRALDQLKALGYDVTITPKAPAA

SEQ ID NO: 61345 - protein, 308 aa, unidentified
MDNFYFIGVDVSKKKLDFCVLFEGKVLREEQVSNHQQAVARLIGELKNDLEMDNEQFLICAEHTGQYTFPLVCACKSVECKLWLENPSQIKYSSGMQRGKNDKVDAKRIAIYASRFGDKVKYYDRPTEEIERLKQLERERALYVTDLAKYKGQMYDQKDFMPAALYRKKTKRMKGLIQELQAAIDAITAEMEKIIGSTEVLARQMELLMSIDGVGKVVALNVIIETEAFSRFDNPRKFCCHAGVAPFSYTSGSSQHSKNKVSHRANKNIKKLLHMAAVSVTHRKEGELKAYYMRKVEEQNVGNQCVTC

SEQ ID NO: 61346 - protein, 313 aa, unidentified
MLYVGIDVAKNKHDVTALNVRGKTVLKPLTFSNNKAGFELLDLSLRQLNQDCLIALENTGHYAFNLLNFLHEQGYKVYTYTPLLIKEFAKSLSLRKTKTDKKDAHGIALKLLSDPNREQFQHDNRQVELKILTRHIHRLKKKQSDWKVQYTRCLDIIFPELDKIVGKHSEYTYQLLTRYPNPQKRIEAGFDKLIEIKRLTASKIQDILSVAPRSIGTTSPAREFEIIKHYKRLIDKAETCVNDLMAEFNSVITTVTGIENRLGAVILAEIRNIHAFDNPAQLQAFAGLDSSIYQSGQIDLAGRMIKRGSPHLR

SEQ ID NO: 61347 - protein, 483 aa, unidentified
MPNASQTMKKHKKTKPKPKEAKPLHEPVANAAGIDLGATEIWAAVPPERCQLSIRRFGAFTQDLKALVAWLVECGIRTVAMEATGVYWIPLHQLLSDANVEVYLVNARHVKNVPGRKSDVRDCQWLQYLHSVGLLRASYRPDQAVCETRTIFRYRQNLLKQGGENLQHMQAALDQMNIKLHYVIDDLSGQTGQAIIEAILNGEREPLRLAKYRHKRIKASEETIAKSLEGDWRREHLFVLRMAWQNGKHVQEQIKKCDQELMEYARQLAASTVVAQPSRPLKSFCLKAEPGLTPLNSAAALRPAKPRRKTSKNEPDGPWREELHRFFGVDLTLIPSIGVLSGITLMTELGNDLSAFKKSHHFSSWLCLCPDNETSASKVLHRSTRRSQNRVRQALRMAASSLHHDKSYLGDKYRRLRARLGAPKAITAMAHQLARIIWHMLTYRVAFDIGIFAAQEKDNQTRRLKHLQSNARQMGYQLTPIPA

SEQ ID NO: 61348 - protein, 356 aa, unidentified
MSYDVKYIGMDVHKEAVVIAVLNDSGKLVMETIVETKASSILQFIHGLRGELHVTWEEGTWAAWLYDLLQPQVPHIVVCNPRRNALLKEGSKSDKVDAQKLADLLRTGMLRPVYHGENGLRTLRELARSYQTISKDLTRVMNRMKALYRGWGIPCAGTQVYAARSREEWLSKLPQVGVRRRAELLYQQLDGLQALRREVRPEFLAEGRKHKAAKLLRQIPCIGPIRAARLIALMQTPRRFRSKRQLWTYSGLGIETHDSAQYRFVSGQLQRSRKPQQLRGLNRNHNHEMKEIFKSAATRASCSRGPFHDFYAALLAKGMRPEMARLTLARKIAAITLTLWKKEERFDVEQLKTQAA

SEQ ID NO: 61349 - protein, 320 aa, unidentified
MAATEVFVGIDVSRDSLEIATRPTGDCWHVGNDPAGISALVARLRAVGPGLIVLEATGGLEVAVLAALGSVGLPVVAVNPRQVRNFAKAIGKLAKTDVLDAQVLAHFAEAVRPAVRPLPDAATRELSALVTRRRQLVEMLTAEENRRKTAASAIRVDIQEHIAWLRKRLHGVDRELGQAIRSSSLWREQEDVLRSVPGIGPVVSATLLADLPELGTLGRKQIAALVGLAPLNRDSGTLRGKRTIWGGRATVRAALYMGALVGSRCNPVLSAMYTRLVAAGKTKKLALTACMHKLLTILNAMLKHHTPWARPTAASVHTTS

SEQ ID NO: 61350 - protein, 344 aa, unidentified
MPHSIKDPHRVPPPEAPCCPNGSVVGIDISKDYFDACFEGQHRRYAYSLEGIEAFMSETACLGKARFVMEATGNYFYKLALALVEAGRKSDVVNAYRVSAFGKSRLQRHKNDKADARLIDDFAVANREAMMLWQPESQTIAALRQLRTVRRQLQKTATVYENQLHALLQLPESQQSQDALQICKQMIAHCQKQLNLIGKQMQALSDDELKKNDELLDTIAGIGRESALMLLILTGNFTKFRSAKAFADYIGIAPTHYESGTSVKGRGSISKMGDARARQVLYLAAMSAVRHNVACRVFYVRLRQTGRAHKHAVVAVANKLIRQAFAVIRQQAPFETRGAWSVST

SEQ ID NO: 61351 - protein, 364 aa, unidentified
MNNNDTESSELSSHEGTRRQFSGSKAVIKLGIDVHQDFYVVVMQEGGTNPKPAQCFQKESFLHWVAKLKQEAAEVHAVYEACGFGFGLQRQLSALGIQCQVVCPQKLDEGNKRVKTDGLDAKALCLKLDRFVQGNRDALAIVRIPTQEEEQKRAIHRQREQLVKARKQLEAQGRSLMVNHGVEPTTSWWKPRTFALLQVPAWMKELLANSQPILVALQEKIRGLTQQLQAAAGTSQPRGMGALSSVVIDREIGNWTRFKSRRQVGSYTGLCPGEYSSGNTRLQSCVTKHGNPRLRAALVETAWRLVRFQPNYRPVLKWRETLRKGALATKAARKKAIVAVARQLAVDLWRIRSGRVEAEALGLS

SEQ ID NO: 61352 - protein, 311 aa, unidentified
MNSEAYVGVDVSKDLLDIKVLPSNEAQQFSNDDSGIKKLIKFLKKIDPALIVFESTGGLEMPAVSSLIENHLPVVIINPRQVRDFAKATGRLAKTDLIDADTIACFARDIRPEVRPLKDEHTQLLSALNARRRQIVDMLVAEKNRLYTAPKSNRKSIQAHIQWLERSLKDINKDIDKMIKKSPMWRENDKILQSFRGVGPVVSASLLCDLPELGSLNRKKIAALVGVAPLNCDSGRFRGRRRIKGGRANVRRKLYMAAVASIRHNPMMKDFYDRLIDAGKPPKLVLTACMRKILTILNAMMKNRTYWIASY

SEQ ID NO: 61353 - protein, 336 aa, unidentified
MNNMEACGVEVSARELVVARKGKAGVQLMRFANTAAGHRQLLRALTRGGQRVRVVLEATGLYALDLALLLSAQEQVQLMVANPRAVRHFAQAMMQRSKNDQLDAVVLLEFAERMPFTPWVRPAENTLALWAIARRLQALTKLCTAEKNRAHAMGLSEAIPAMVRRDIARSLQFHQRAMKKLRQQALQCIAADAQLQQRYQLLRSVPGLGEISAVQTLAELLLLPADRDVRQWVAYAGLDPREYSSGTSVRKYTRISKVGNAHLRRALYMPALVASRVEPHLRGFYEHLLARGKRKRQALLAVARKLLHAIYGMFRSLRPYDGTRVYLPPCFAEKSS

SEQ ID NO: 61354 - protein, 385 aa, unidentified
MAPPRMPEAVIGLDVGKLSHWACVATRDGEILLSAPVANREGDLDSLFGRFPDALVVVDQSRNIGALALARARAAGMSAAYLPGLAAHGAARLFAGDAKTDERDAMVIAKTALGIPDALLPVRDPGPTVAAARALAAQRNFLNCENTRSKNRLRSILLESCPAFEALVDQSDGPQLRLMASLGGAWSVADAGPRRAAALTRGAARGKIEALVRSTASSTRPDAAAIAAEDRAVRLLARRISENSAEIDVITAEISALLEGDDTYRCLLTVPGIGPKTASELAISIDIEDFPSHDRLASYCGLAPRNRQSGTSISSVTASRQGNKRLKNLLIFSCNCLTRTEGRWGDYYARCRERGMPHGKALKALARKRLKVIYAIMRDRVPYAA

SEQ ID NO: 61355 - protein, 341 aa, unidentified
MGRSIGVDLHKNCFTVCYMSKGSQDLSEYKVSPEGITRFKDSLKKTDEVAVESTGNTGYFAREIKAKVKRVAIINPTQFKIISHSIKKTDEHDAMIIAKYLSKGLIPEVRMRTEEQARISSLIGTRDKFVKLRTAMKNKVHNILNANGIVTKKEMFSSEKALDKVCQLDLDIEYIFELEIVVNQIKSLNKSVDAISKELNDRGKKLKGHKNLTSIKGIGDTNATILLSTIGNIEDFADDKKLAAYLGIVPRVSISNETSHYGRITKMGNKIARTALVQSTLIAIRYNPYLRSFYERLKAKKGSGKAIIATSRKLLTIIYRTLKNDWVFEDFSNYKLAASSG

SEQ ID NO: 61356 - protein, 394 aa, unidentified
MTATYTHSIPAGTLVLHVAFELGANQWKLGFSTGLGVAVRLRTIGAGNLAVLRREIELAKKKFRLTDDVPVCSCYEAGRDGFWLHRWLVEQGIGNIIVDAASIEVNRRYRRRKTDSLDAAKLVAMLIRHHAGEKLWSVVRVPSREDEERRHLHRDLEEMKAETTQHRNRIRGLLAGVGARVAEINSNFLEMLPTLQTADGREIPGELRARLLREFERLQFVEQQIRSLERQRNQKLRDGDDQEYVVKARKLMGLRAIGPHSAWVFVLELFGWRRVNNRRQLASLVGLTPTPYDSGEDEREQGISKAGNRRLRTLLVEIGWCWLQYQKSSALSQWYQKRFAGGSKRQKKIGIVALARKLLIALWKYLQRGEMPEGAVLVDWRAKLVGLGAQPLPV

SEQ ID NO: 61357 - protein, 396 aa, unidentified
MRNDVTIYVGIDFSKEKFNACLLMDQGVMGESEFPNTKTGYLKLTKWVKNTSELGRSFDSSLVLFCGEHTGTCSIGLCEYLYAKGMKIWLESALKIKYGSGLKRIKDDKADAEMIAYYAKRFYEPGSCALFEPDSADLKTLRTLYQFRNRVVCDRVAIGNRISSGAFDCSTLVRNRMVKHHKEAQKDEKDIEKEMVKLMETSEELASNYQILISFKGIGPITAAALIIYTSNFKKFDNPRKFACYCGIAPFGKQSGTSINTKPHVSRFAHIGIKAAMVQACKSAMQHNAVIKAYAQRLYAKGKHEGIVMNNVKNKVMHIIFKMIQTQTLWEQEYQQKHMKECKAIPGKNGIGATEAAPIINATLKTSSSVVECTFLEEHSFQKNCKKTSSFSCVET

SEQ ID NO: 61358 - protein, 343 aa, unidentified
MNPTTIGLDIAKNVFQAHGVDQNGKVVVRKRFSRAKVLEFFANLPPCLIGMEACPGAHYWARELMKLGHAVKLMAAQYVKAYVKGNKNDGNDAAAICEAVSRPGMRFVAINTEAQQDTQMLHRIRSRLVAERTALINQVRGLLGEYGIVFAQGPSQVRRGLAVLLAEEDPRLSGMARELLADLNGQLLALDERIANYDARVKAACATDERSAKLAELPGIGTLTATALAAAVNDGKQFDNGRQMAASLGLTPREHSSGGKQRLMGITKRGDTYLRTLLIHGARTVLRHAEGKTDRLSRWALAVQARRGANVAAVALANKLARIAWAVLARDRIYRADWAEQSV

SEQ ID NO: 61359 - protein, 355 aa, unidentified
MDKIKTNFAGQTVYVGMDVHKASWNLGIHLNDMFVKNVHQKPNPAIMYNYLKQHYPNARYKAAYEAGKFGFWIQRQLTNLGIECLVVNPADIPKSQKDSLQKTDPRDARNLGLRLQTGVLRSIHIPEEQQEADRVLFRHRKRIWKDLTRCKNRIKGLLAFSGIDIPEQYDNANWSKNFIVWLKALDCLQKSRRTALNYMIAQMEFLRKELLKISCDIRAMMREQRYKTNYYLLRTIPGVGPLTAASILVEIGDVKRFETFYHLNSFVGLLPMEHSSGESESKGILTVRKHRQLRSDLVESAWTAKRTDPAMALYFQEQIKRKDSKVVIIKIARKLLNRIRYVLINQTSYEYGVVK

SEQ ID NO: 61360 - protein, 349 aa, unidentified
MRFYNQSHRFYCGVDLHARTLALCILDAAGATVLQKTISAASDAFLKTIAPFRDGLAVACECMFAWYWLADLCHEEQIPFVLGHALYMKAIHGGKAKTDQIDAHKIAVLLRGGMLPQAYVYPKGMRATRDLLRRRTFLVRRRAEALVHLTNTNSQYNLPPFPKKLAYAQNREELDIPQRFADPSVRKNVEVDLALIDAYDAHIGDLELYLARTAKVDDPQAFHRLRSVPGIGKVLALILLYEIHDIRRFPEVGQFLSYARLVRCAHESAGKKQGTGGNKIGNAHLKWAFGEAACLLLRESEQAKKWLARREKKHGKARALGALAARLGRTVYHLLRQREVFDAKRFFAS

SEQ ID NO: 61361 - protein, 331 aa, unidentified
MTNAAVSDTPAVAAGEFIGVDVAKAKFDWNTHGSAVSHSASNDAVGFEVLWQDLRDRQINLIVVEATGGLENALIGFLIGQGLSVSRVNPRAAREFARSQGHLAKTDAIDAKALSHYAHTLAHKANQAGIRFVPVPEQVEALRVLIVRRHQLLDMRTAERNRRAGAMRVLRKSIDAVILTLNEQIAALNDDIHTHLKEHFQELDGRLESIKGVAQTTSATLIAFMPELGTVGSRRAAKLAGLAPLNNDSGKQRGKRSIWGGRSIVRCALYMATLAAVRFNPVIKAFYVRLVGAGKPKKVALTACSHKLLRILNAMARSGQAWNPEIHGLPA

SEQ ID NO: 61362 - protein, 403 aa, unidentified
MNAVGIDVSKGKSMVAVLQPGGKLLARPFEVLHTKSGIQKLISFVHSLGGDTRIVMEHTGRYYEPLLQRLAASDLFVTAVNPKLIKDFGNNTLRKVKTDKADAKKIARYALDNWCDLRQHTGMDTTRTQLKTLNRQFAFCMKQKTACKNNLIALIDQVYPGANTYFESPARADGSQKWVDYVRAFWHVDYVCSMSLSTFTERYRKWCHRHGYNFQPDKPRLLMEKAKDLIAMLPMDKTTKMLVQTSIAQLNVLSKTVEALRTQMVALAEQLPEYPVVIDMNGVGPTLASQLIAEIGDITRFPRRGSLTAFAGVDPGAKQSGTMQLKSNKTSKAGSPHLRRALFQIVSGLLMRSPDDAVYNFMDKKRSEGKPYYVYMTAGANKFLRIYYGRVNEYLANLSKEQE

SEQ ID NO: 61363 - protein, 342 aa, unidentified
MDEYDGRQFVGIDLHRQRSVFVRQSESGEQLAAVRIINDPVAWKLQLELAGCDPEVVLEATYGWYWAVDVLQACGARVHLAHPLGVKGFRYRRVKNDVRDAADLADLLRMGRLPEAWIAPPQTRELRELVRYRAKLVAIRSGLKAQIHAVLAKAGVLIAVSDLFGVTGRQRLAKVPLGHAYAQRIRSLLELIDILDGHEARFAALIAERLGPHRGYQAIQQVPGIGTTLAAVFVAEIGDVHRFTDAAHLCSWAGLTPRHRESDTLVHRGHITKQGSRAIRWAAIEAVSRHQTTAKIWADKQRIEARRGRNIAKVAAARKLLTLVYYGLRDGHIRALDRAKTA

SEQ ID NO: 61364 - protein, 361 aa, unidentified
MTQAKTWVGLDVHVSGTIAVVLDGDSGELRRRRLSGRGEEIAAFVAGLPGPVRATYEAGPTGFALARRLAFAGVDCLVCAPGLIPRGPSDRIKTDQRDAERLVRLLVAGELHRVAVPTVEEEALRDLVRAREDLRGDLMRARHRLAKLLLRHDVRFDGPERNWTHAHLRWLSTVRFDRPGSQRAFADYLGGVEALLVRRGQLEADIAELLPGSPWAQTARRLMCLRGIDTLTAAGLCAEIGDFARFHHPEQVMSYLGVTPSEHSSGSHRRLGPITKSGSQHARRLLVEAAWHYRRAPGVSTNLRRRQADADPRIVALSWKAQRRLHHVWSRMEQRGKRRTIIAVACARELAGFCWAVATTD

SEQ ID NO: 61365 - protein, 337 aa, unidentified
MIYIGIDVSKDSFVVAYSSEKGGKTRTFKNSTKGIHEFIHTISKEEHHCVMEATGNYSALLVYLLSKAGVTTSLENPLKIKNFARVMLSTVKTDEVDARLIALYGEKMNPAPYKLRSDAILSLQQKRTVIRQLKKQLIATKNLKGSLDVLPFVDSKCKNSVTKTISFLEKQVKDLEEDLASVAHSVYEKQMSLLTSIKGIGFTLAAALIMATGGFTYFDNAKQFTRYLGLSPTYQQSGTSVNLKGHINRNGDSSLRSQLYICAMSSLRCNYECKACFDRLRANGKPGKVAVVAVANKLIRQAFAVVKQETPYVDGFVSVKKSTPTTLAVSELDKSNT

SEQ ID NO: 61366 - protein, 402 aa, unidentified
MNAVGIDVSKGKSMVAIMRPFGEIVSTPFEIKHTSSDINSLVKLIKSIEGESRIVMEHTGRYYEVLAHQLSEANLFVSAINPKLIKDFDNDSLRKVKTDKADSVKIARYALDKWQNLKQYSVMDELRNQLKTMNRQFGFYMKHKTAMKNNLIGILDQTYPGVNTYFDSPARSDGSQKWVDFASTYWHVDCVRKMSINAFIDHYENWCKRKKYNFSQSKAEEIYGKAKELVPVLPKDDITKLIIKQAVDQLNSASITVESLRTLMNETASKLPEYPVVMAMKGVGTSLGPQLMAEIGDVSRFTHKGAITAFAGVDPGVNESGSYEQKSVPTSKRGSSDLRKTLFQVMDVLIKTHPQDDPVYQFLDKKRAQKKPYYVYMTAGANKFLRIYYGRVKEYLSSLPES

SEQ ID NO: 61367 - protein, 430 aa, unidentified
MKSNTQNAKIKAITETTLVLGIDVGSETHYARAFDYRGIEYSKKPFKFSNDEAGFVTFKAWILDIKEKHGKDKVVPGMEPTGHYWFNLGKFLQDNEMKPVLVNPHHVKKSKELDDNNPTKNDRKDPKVIAGLVREGRYMIPYLPEGVYADLRTASNMRFQLQAELTRIQNRISRWFNIYFPEYKTVYGQPDAKSGMLILKVAPLPEDIMTLGIDGVNQIWRDAKVRAVGKARAKTLIEAAEHSVGSKEGEISARMEIRMLLEDYESRNTRLQEVVALIEELVKKIPMAEKLLEIKGVGIKTVSGFLAEVGDISRFNNPKELQKLAGLALVENSSGKHKGETTISRRGRKRLRYLLFEVAMSLVSKNPEFRELHSYYTTRKLNPLKKMQSLMAVAAKLLRVFFAMLTKGVDYDPKKLVGDIKRPAVYLQVA

SEQ ID NO: 61368 - protein, 348 aa, unidentified
MTSLKHRKVMEKYFIGIDFAKEKFDVVVLQQGRLCDKGEHGQFPNNANGVGMLEKWLRKTCGKDVAMHSVVCGENTGVYSVTAAKRLVMDGYTVCLESALRIKRSLGLTRGKNDKKDARSIAEYAARHRDRLTPYQIPSEASEALKTLFTQRRLFVRQKGDLQRRNRELAGLYKGNPLLDKMLTSDKKVIMAIDAEIEKIERQMKAIIHDNADMLRVYNILTSMKGVALVNAVALIVYTDNFRRFDFDARRICSFWGVAPFANQSGTSLNSTPHVSRYADSYLKSLLSQAALCAMRFCPAINQYAQRLKQKGKHIAIIQNNCKNKMLHILVAMVKNETCYGENKKITA

SEQ ID NO: 61369 - protein, 348 aa, unidentified
MRFYTKQHKYYCGIDLHARSMYICILDQEGKTALHRNRKASPEAFLKAIEPYREDIVVAVECMFVWYWLADLCAKEKIPFVLGHALYMKAIHGGKSKNDKIDSKKIATLLRGGNIPVAYVYPRKMRSTRDLLRRRNHLMRKRSELLAHIQNTNSQYNLPEFGRKLAYKANRGGVAEHFPDPSVRKSIEVDLKLLDFYDQLLSNLELYIVKKAKADDVYSWYRLRSIPGVGKILGLILLYEIHDINRFPTVQDFVSYCRLVKCPRESAGKKFGTKNSKIGNGHLKWAFSEAACLFLRGNEQAQHYHARLVSKYGKGKALSILAHKIGRAVYFMLKRKEPFSMNVFFQQT

SEQ ID NO: 61370 - protein, 388 aa, unidentified
MRVIADRTETPSAIRSDLGAIFVSMELSRSTWLITSLSPGGGEKMSKHGMPAGDIGALRARFSELRRKALARSGKSFPIIVIQEAGLDGFWVHRALENEGIESHVVDPASIATSRRRRRAKTDRIDGEALLRALLAHKRGEPRVCAMVKAPTPEDEDRRRLCRERKVLTNERILHVNRIKGLLFSQGVSGYEPLRRDRRRRLDELKTGDGRPLPPHLKAQIIRELDRLELLLEQIKAVEAERDTLLAARQAVTPAPATMLLDIKGIGLEFAAVLWSEGLFRHFDNRRQVAAYAGLAPTPWQSGSVDREQGVSKAGNPRLRTTLIQLAWLWLRHQPQSALALWFKERVSRNGGRLKKTTIVALARKLLVALWKYVTAGVVIEGAVMKAA

SEQ ID NO: 61371 - protein, 439 aa, unidentified
MIDKIHPGYAAIDIGQEKIFIACAGDSQVRSFCTFSGDLQLAAAHLKQHEVSKVAMEATGVYWIPIHDLLQSQGLEVTVFNGAHARNMPGRKSDVLDCQWHAMLHSHGLLTPCFIPTDEIRQLRCFYRLRDDHVSIGASHIQHMQKALDLMNVRLHTVISQIHGVSGLRVIRAILAGQRDPVALSELCDMMILKHKRQEVIKSLEGDWREHHLFALRQALEGYEFCHGQAVACDKEIEALLKRINQDKPPASRDPQVKVKPIRHNAPQIDGLHKLLITMTDGRDVTRLPGFTALGFMKLLGETGTDLSRWPTFKHFTSWARLAPGSNQSGKKRKRTRRGKTAVGQIFREAVMSLARSKYVALGATYRRIKARRGPAVAVTAIARKLAELYYKLMTKGLDYVEQGIETYEAKYKEQTLRYLKKTAGKLGFSLTPATQNPE

SEQ ID NO: 61372 - protein, 381 aa, unidentified
MTTAATHHANGNTTEATLFVAFELSEKTWRLGFTTGHGQKPRERSVPARDHQRVLDEIAQAKHRLGLPETAPVVSCYEAGREGFWLHRLLLAQGITNHVVDSSAIEVSRRQRRAKSDGLDVRKLLSMLMRYEQGERKVWHVIKVPSMEAEDQRHLHRDLETLKQERASTTTRIKGLLSSYGIRVTSMTKLPEQLDALRLWDGSPIPPGLRRRVLRVYAHHTFLSEQIAEVEAQRRAQLQTSSDASIDKVRQLIQLKGIGINGSWLLVMEFFGWRELKHRREVGGLAGLTPTPYQSGESAREQGITKSGNRHVRWMTTELAWSWLRYQPDSALSVWFRERFGGGGKRLRRIGIVAVARKLLIARWRFLEKGVLPEGAVLKEA

SEQ ID NO: 61373 - protein, 354 aa, unidentified
MADEIAVVGGIDTHTDLHQAAVIDSIGRHLATKRFETTPEGYRRLLDWLRSHGEVLAVGVEGTGAYGAEIARFLTANGVAVVEVDRPDRKARRDNGKSDPIDAYGAATAVLSGRAGGTPKARNGIVEAIRALRVVRKSAVKARTQTINQIRTLIVTAPSVVRDKLRGLSTRELIDTLARSRPAGELDDPACAVKTVLRRLARRYQALDEEIKDADKEIGPLVTKAAPRLIALPGLGPETAGQLLTSAGDNPDRLRSEAAFAHLCGAAPVPASSGRTNRHRLNRGGDRQANNALHTIVLVRMKYDQRTRDYVARRTAEGMVKKDVIRCLKRFIAREIYRHLPHVIHTTKPLPQTA

SEQ ID NO: 61374 - protein, 338 aa, unidentified
MKTHVGVDLHQRFCYLTAVNASGKVCKQGQVANEGSALRAWLRPLPGPRQVVVEASGFWPAFARAVAPELERLVMVHPQRVKAIASAKLKNDRVDWATLAHLSRCDLLPAAWMADEATQQLRLLVRLRITLGRQRARAKNQLQAVLHQEGFKKPVADVFGKRGRAWLKGLELSGAARLVVDTWLREVDHLDVELAEQTRELERLARADARARFLETIPGIGPYAAMVIVAEIGDVERFQNKRALASYAGLTPLVRESAGKSKRGGITHQGSNTLRWIMLQVAQVAARYSPGARIYYAGLRQRKPAQVARIALARKLLTVVWALLHHGVCYDEQLFIRG

SEQ ID NO: 61375 - protein, 391 aa, unidentified
MVCVGIDVAKDKHDCCILDSDGMVRADCFTIPNNMDGFKQLLQTIRDCTKKSDKIKVGLEATGHYSYNILGFLLDNGLPTYVINPLHTNLYRKSLSLRKTKTDRVDARTIATMLLSDVDLKSYTDIAYHNEDLKLLTRYRFDKVQERAKLKQSVSRLATILFPELEQLVSSIHGTSIYALLGEYPGAKQISEVHLTKLTNLLTTASKGRYGKEKAIQIREAARTSIGSVMPAKSLELKHTIKLIQELASEINEIEDSIQKIIDELNPPILSIPGMGVNSAAVILAEIGDFSNFSSPDKILAYAGCSPSTYQSGKLTNCYAHMEKRGSRYLRHALYNATKYVCYWNPVFAEYLAKKRAEGKHYNVALSHAMKKLVRLIYALQKSGKAYLATA

SEQ ID NO: 61376 - protein, 347 aa, unidentified
MSRKATIAVAQTIGIDTGKNTLHLIGLDDQGAVVLREKVARGRIAARLANAPQCLIGIEAGMATHYVARELSALGHDVKQVPPAYAKPFRQGHKNDFRDAYAIAEAVQRPSTRCVPVKTDDQLDLQALHRVRSRLIGQRTAVINQIRGFLLEHGISVRQGLRFLRQELPDILARRSDVLSSRMIRTIEDLSGDWRRLDERIEHVTEEIEVLAHGSESCRQLMTVPGIGPIIASAMVAAIGNGAAFAKGRDFAAWLGLVPKQMSTGDRTILGRISKRGNRYLRTLFMQGARVILLRPKNWTKHSFGPWLEAATKRLHHSVLATALANKLARIAWTVLAQARSYEARVN

SEQ ID NO: 61377 - protein, 332 aa, unidentified
MAMTVLQSIIGVDVAKAEVVVCHIETDELKIVPNNKTELRAWLKSLPVDSAIAIEATNIYHLDTVNLAHGMGHKVYVIDGYRLNHYRKSTGGRAKTDASDARLLARYLKNEQADLRAWNPPPKIYTKLQSLLRRRAALVKMRVGLSQSWAGEPLLKASSKNVSACLARHERLIEKRILDAVTEAGLLHQIKRCQAVEGIGFLTAVALTMAFQRGEFESADAYIAFLGMDLRVSDSGQMSGRRSLSKKGDSEIRRLLHNAASAGIKSNAWKPLYEGYLGRGLKTTQALVIIARKLARIAFSLMKNLSEYQSKAVLGLPPTIESPTKKQRHPRP

SEQ ID NO: 61378 - protein, 402 aa, unidentified
MIFINCLGIDIGKSESVVAHYKDEVLVKEMVIQNNQNGYRYLKNYIKHLDSLFILFESTGIYSRGMKRFCEIHKIDYLEMNPLEAKFKMSSLRSWKTDKSDAHKLALLAFRMKDSKVQRHPEEIYFELRERARFHLEMEINQNRLKVELVETLHQTFPGLEKLFTNRYSKIALNIAKAFPHPDFVSTLTHDELVEKVLHSTDKGISVNKAHKYVQKLIEIKNNSFPNVDKSSFLLQKVQYLCDKLLIGIEEMKEFDQEMIDLAENTTEFENIISIPGIGELTAALLIGELGNIREFKTNKQLNAFVGIDIKRYQSGTSKSRDTINKRGNKKARRLLYLIIMNIIRGRNHYQSHIVDYYYKLREQPHGKTHKTAVIASINRLLKTIHYLIVNNKLYDYQKAPH

SEQ ID NO: 61379 - protein, 360 aa, unidentified
MLGQRTSVGLDVHARSVVACGLDRETGAVVERRLTPDHREIVGWIEGLPGPVAVTYEAGPTGFFLARALEAAGVSCQVAAPSKLIRPVGDRVKTDARDAVHLARLLHLGQVTAVTIPTAEQEAARDLVRAREDCRGDLMTARHRISKLLLRQGIVYYDGKNWTGRHELWLRKQRFDNPALQLTYDAAFDAMTACVDRRERLEAAIEAMAADSEFTPVVQRLGCIRGIATLTAFGLATEIGDWHRLTGRTIGAYLGLVPSEYSSGDSRVQGSVTKTGNGHARRLLVEAAWHHRSPYRPGTMLRRRWELASPAARARGQAANRRLHQRWIDFDLRRKRSVVANMAVARELAGWCWSLAVLQE

SEQ ID NO: 61380 - protein, 401 aa, unidentified
MYKTCGLDVHKDTVFCGVFDGKRHHVVKEYSTLTSSITSLGEYLKSEAIEDVALESTGMYWIPVWNILEEMGFNLTLVNPYLIKQMPGRKSDVKDAQWIATLLHKGLVRSSLIPCKEIRELRTYSRKYVRLQQRQTSILQEMERNLEMCGIRITSFVSNISGKSVMKVIHALIEGESDPEVLAGYIHGRIVNKHKIKTIVESLKGHITPQHRFQLELSLEEYELLCRQRDRCEEEMSRLCYQHYPEELALLQTIPGISLLSAMIVIAETGADMKAFENSGKFAGWTGLRPRNDESAGKFKSTATTKGNRYLRAILVQIAWAATRTKGSFFKEKFTRLCLRKNRKKALIAIARKLAVLIWNVLYYQEVYNLQKLIVYEPGKVQAKMDYHQKEFRRLENLLKN

SEQ ID NO: 61381 - protein, 316 aa, unidentified
MVPSPLFVGIDVAKATLDIVVRPTAETWSASNNATGIDALVLRLGALAPTLIVLEATGGYQGPLVAALVAAALPVVVVNPRHIRAFAQAVGILAKTDRIDARVIAHFAEAVKPAPRPLPDAETQELRALLVRRRQLVEMVSAERARLDTVPPSIQDAIQAHIAWLTTQIAGLDDALTRASQTHPVWQAKDDVLQSIPGVGPVLARTMLGQVPELGTLGPKPLAALIGVAPFNRDSGTLRGRRPVYGGRAEVRAVLYMGALVATRHNPVIKTFYERLLAAGKAKKVALTACMHKLLTIMNAMVRDLKPWQPQEVPSA

SEQ ID NO: 61382 - protein, 427 aa, unidentified
MQYALPLVLPDVPAGGVCAGIDWATADHAVCVVDLAGRVTDRFSAAHDKAGITAIITRLRRSKVTEVAIERGDGPLVDALLGAGLTVVVITSRQVKNLRSRFGAAGAKDDRFDSFVLADTLRTDRARLRPLVPDTPATISLRMAVRARRDLVRHRVAACNQLRAHLAVAFPAGTRLFHDLDSPISLAFLARFGSQDAAAGLDEQAIGAWLATIAVRGRPAPASVLHARLQAAPPGATGADGAAQACITAALTATLTALSAQIKTLETQIAGQLAAHPDRHIFTSLPRPGTVRAARLLAEIGDCRSRFPDPESLAGLAGVAPVTRRSGTRIAHGFRWAVNRQLRDALCDFAADSRHASPWAAAIYDDARARGKDHPLAVRITARAWSYVIWRCWHDGTGYDPAKHNALQAVLARHAAQAAGAAQQEDQ

SEQ ID NO: 61383 - protein, 310 aa, unidentified
MEPIIVGIDVSKDRLDIAVRPGGEAFVVERNAAGLERLVVRLRELSPHLVALEATGGFETIVAAALAGAQLPVVVVNPAQVRAFAKAIGQRAKTDPIDAAVIARFAEATKPQVRPLPDEATQVLADLVARRRQIVEMIGAERQREKRMTRRSLKADIAQLIKTLEKALAKLDRELDDVVRGSPVWRDKEDLLASVPGVGPVIARTLMAELPELGTLSRRQVAALAGLAPYTRQSGRWRGKSFIGGGRTAVRTALFMGAFVAMRFNPTLKVFFHRLVAAGKPKIVALIAVARKLLTILNAIVRDNRPWQIA

SEQ ID NO: 61384 - protein, 350 aa, unidentified
MNYYAGMDVSLEETAVCVVDETGRIVKELRAASDPHALVAALREVGLPLERIGMEACSMTAWLHDELVAAELPAICIETRQANAAMKTMPNKTDRNDARALAQIMRTGWFRQVHVKSRQCRLWRSLLVARRTVLNEMRSIENVVRAILREGGLKLGTPARNAFADKARDMTSGDGEVMALIEPLLAVLATMLREFDRLTKRVLDIVKGEETCRRLMSAPGVGPITALAFRATIDRPDRFQHSQDVGAHLGLTPSRYQSGETDIQGRISRCGDEIARTALYEAAHCLLVRSKKWSSLRAWGMNVAKRRGMARARVAVARKLAVILHRMWTDATPFRFGKEPGAKAGQAAMA

SEQ ID NO: 61385 - protein, 346 aa, unidentified
MRIIGCDLHARQQTLSMLDTESGEVTEKTLAHEGDAVRVFYAALAKPVLVGLEATGSMFWFLRLLEELGIEYRVGHPAAIRKAETRKQKHDRRDAELIRRLLVENRFPRIWLPTPEQRDLRTLLQHRHQLVRMRVMTQNGLQGLALSQGLRRGSKLWSQAGQQELQGLGLAGFAATRREQLQQLRQELSQRLRQLDQAVSEQAEQRAGTRLLLSHPGVGPITALATEVFLGDARRFPNAKAVASYVGMIPSEHSSGGKQRNGSLSKQGNPLLRLLWVEAARAAARKDARLKQFYRKKLVQKGLGKAVVATARKLGIRLWIMMRDQIDYTEFCRRAEQRCPHAGMPE

SEQ ID NO: 61386 - protein, 457 aa, unidentified
MKKQDNYLAMPIVHQQVAGIDIGSQFHVVAVGDDPKEHVKQFGVSTKELFRLAQWLTEHEVKHVAMEATGGYEKPLVNVLQESGFDVLVTAGANTKNYRRFKSDTSDAIHIRTLHSLGLLPPIFLPDEFSTLIRPLVRLRRTLVEDAADYIRRIQKALRAGNIRLDAVLTDTNSVSGLRVIAAICQGQEDPVELAGLVDSGCKKKPVEIIELLRGNWNGAMRFEVRSNYRLYLNLQNEITELDKELDRHFTDHTNGLEQPKAVADPTVGRVKLRQSRNTPRLPIEQYAHKLLGVDLSNIPGFGRDALLTFMAEVGESIRKFHSAKAFAKWLGFTPNNKASGGKVLSKKTLKNKSTLPNTFRMVANSLGNMKKPNPLTAFFQKIAYKAGRIKAITATARKLAVVVYKMLTTKEAYDPGKLVRDGEQVRQQQIRQMKKKLLKFGITGADLGLFTNLGEA

SEQ ID NO: 61387 - protein, 319 aa, unidentified
MSDPLPHSEIFVGIDISKKTLDWCVGPALEHGQVPNTTAGRKKLVKTLTKLAPTLVVFEATGGYERGLADALEETEFPWTMVNPRMVRDFARADGRLAKTDKLDAEILARYAKQMQPPVRPRPDAAVRDLNAWVTRRRQLIDSIHAETCRLGTATPIVQPSIRKVLRLVEKELRKVEAQIEKLIRSNPALNERVKLMQTQKGVGVVIASTLAAQMPELGQLNRKEIAALAGLAPFNRDSGQWRGKRMIGGGRAGVRAALWMGALVGSRYNPEIRSFYQRLLANGKPKKVALTACMRKLLTILNAVVRDGLNEENRAKAA

SEQ ID NO: 61388 - protein, 337 aa, unidentified
MNGTTVGLDLAKNVFHIVSLNGEGREVLKKRLTRAQVLRYFANTPRCVVAMEACASSHYFARELKKLGHEPKLIPPQYVKAYVRGQKNDYNDARAIAEAARVPTMRLVTVKTTEQQDLQALTRLREGTLRSRTALVNRLRGLLAEYGIVRGTGVSTMHRALPELLADATNGLSERFRRLLKQGHTELIDLDRHIDTLTAELKAAAREDDAAKRLQTIPGFGPIVAAVFAASLGDGRQFPNGRAASAAVGLVPRQHSSGGKPVLLGISKRGDRYLRSLLVHGARAVLRAAQNKDDRLSRWVTHLRETRGMNKATVALANKLTRVGWAVLAHKSVYQPA

SEQ ID NO: 61389 - protein, 365 aa, unidentified
MFVAGLDAHTRYVIVVVVDRMGELVLKSTRVRMGDAERLLTVLAPYRPLDAVMETSSAWPWLHEVLTGAGIQFVLAHARRLRAIAEANYKSDDIDAELLARMRLARLIPEVFPTPAAQREWATLLRHRATLVAHRTALVNRLHGQLHTRGLHLERGRLLTRAGRRWLRTEAWSHLSAEQRAVARSHLRVIAGLRPLIGAVDRRIAGVAVAIPEARLLMTIPGIGPQRALVVCAEALPVGRFRTPGHLASYAGLVPRSKQSGERPVRHGGIPAGVNRWLRGALVRAVVSHVQHQPASTLTAYYQTQKARVGWPVARVAAARKLARVIHAMLRTGTPWTTPSTTPSTTGSLGPNGVSSTNRMPHPTA

SEQ ID NO: 61390 - protein, 352 aa, unidentified
MAMLADSVEVARRRRHPQAHPHRRGPRRGRRPELGRPDRGPTPDGYRQLLELADQHHGQRVWAIEGTGGYGAGLTRFLAAHAEQVVELDRPKRAARRHGAKSDPLDATRAAREALGRDQLAQPRATGPRAALSVRLAARRSAVQAAGDAQRQLHALVIAAPPALQERLRAVRSTRQLVAVCARMRVHTDWDVETSSTAATLRSLARRSRELTTEAADHRQAILVLVRAWRPDLLTRPGVGPIVAATVLCAWSHPRRCRSDAAFAMLGGAAPIPASSGQTVRVRLNRSGDRQLNQALYTVVLTRLRTDPATRAYADRRRAQGKTNREIKRCLVRYVARQLYRLLESQPTLDAT

SEQ ID NO: 61391 - protein, 412 aa, unidentified
MKRIRDRVAGLDIHRDTVVACCRVVDPDGSVHVAKQSFATTRKGLSELATFLADASVETVAMEATGVYWRSPYYALEGLFPELWLCNAAHVKNVPGRKTDLSDAEWLADVAAHGMVRPSFVPPPEIRELRELTRYRKTQADARAREIQRLEKALQDAGLKITSVASAVWSMSSREIIEALIAGERDPKVLAQMAKGRMRAKIGELEEALAGHFGAHHAILCRQIIDHIDFLDGSITALTEEIPTRLVPFEAAVALVTSIPGIARTTAEVNVAETGADMSRLPTPGQLCARAGVAPASYESAGKRRPAGTRHGSEWLRRALIEAARAGARTKGSYYSAQYARIARRRGPNKAAVAVANSMLFTIWHLLSSGQLFEDPGADYFERRHDPAVEAKRLALRIEALGFDVSLIEKAA

SEQ ID NO: 61392 - protein, 371 aa, unidentified
MSDFSKFAGLDVHKETIAVAVADAHGGEVRYLGEISNTPEEIVKLVRRLRKEGGALSFCYEAGPCGYGLHRQLRELGQACQVVAPSLIPRKPGDRVKTDRRDSLTLARLLRAGELTPVWVPDEAQESLRDLTRAREDAKHLQRMAKQRLMAFLLRHGKPYRGKKNWTKAHFRWLETVKFDQPVQQIVFQEYVDTIQVMTSRVATFDGQIEAAGAGSAFAKQIEGYMALRGINRLTATTIVAEIGDLRRFPNAPQLMKYLGVVPSEHSSGATRSRGGITKTGNGHVRRVLVESAWTYRHPARKTAHLQRRAEQTPEAVQAIAWEAQKRLCARYRMHEARGKLQVQICTAIARELTGYIWAIGQVLPPPQAQA

SEQ ID NO: 61393 - protein, 416 aa, unidentified
MQKILGISCGLDVHKDIIEGCILEVNGTGEPDAKYETFTTMRGDIMRLREWLVEHGCPNVAMESTGVYWKPIYEILEDAEGINLCLVNAQHMHNVPGRKRDKDDAEWISSLYMCGLLNKSFVPEKGIRSLQEHTRYYVKLTQENTRLVNRIEKLLQTHGFKLSSVLSSIVGVSGRRILKLLCEQGTVSVADVGNALARGVKKSAEEIAYAVNGKLTQSSQNLLRIMLDGLNACDEQLAAVRHSIQCVAEPYARGVTILSTIPGLDELSASYLIGEIGVDMSRFNKGASSLCKWAGLSPRDDESAGKIKSNKILKGNPYVKSILCQCAWAATKTRNTRLSNWYWRNVKRLGEKKAIIAVARKLLVYAFHMLSTGELYDKRLDVADTKKLKIIKLASAKQQIKMLEKTLSNESLVTNT

SEQ ID NO: 61394 - protein, 369 aa, unidentified
MKQVIMCGVDMHDNNLVCRIGVGPGAATTHRVRNTEAGRRRLFKRLKQMGTSAGCGRMVLAYEASSQGFGLYDDCRDAGIACFILAPTKMRKSGEDRKKKNDEHDAELLLEVLRGHVLAGNGLPSIWIPDDTTRADRETVRARLDVGHKVTGVKAQVQMLLKRHRIRKPAETGDSWSVPHRRWLAGLAASGDGWVVLATLLRQLAALETEVAVLDGAVEALSRTPRYAATASALVNELVGVGLLTAMVFLTEMGDLSRFQNRRQVGAYLGLVPSSHDSGESDRKGHITRAGSSRVRRVLCQATWSRVKHDPTEVVTYQRLVARNPKHKKIAVVAVMRRLGIAMWHVGLAVQQQAGVFPAGEAGRRDAAG

SEQ ID NO: 61395 - protein, 319 aa, unidentified
MNSASFIGVDVAQRTLDIAVGEHTTVQHIANTQQAIEAWLQQLPSGCRIALESTGSLHLRLVRCAIAAGHTVYVPNPRDLAHYACSLGRRAKTDRLDAQLIARYLQREHEQLHPYCLPSASQTEFDELIGRRHQVVRAQVSLRLSFAGCAHTPLPALRDVLTDLQNLTEQIDERMQQLIDQDERLAQAARHLRTIVGFGPLLSASLAHALRRRTFRNADSFVAYLGYDPRVRESGQWRGRRFLSKRGSPELRRLLFVGAMSACRSDTWKAFYQRYRDRGLSSTAALVILARKLARTAFSMLKYDQDFSSERIQHCCVHP

SEQ ID NO: 61396 - protein, 400 aa, unidentified
MISVGIDVSKGKSTVCILKPYGEIVSKPFNITHTQKDLSELSSMLFRLNDEVKIVMEATGIYHLPVLTYLQEKGFFVSVINPYLMKSYRNESLRKAKTDKIDSRIIANYGIDHWFKMKEFQTSGEIYEELKLLGQQYRHYMKLHLLSLAELTHLLDLTMPGIKNLLASWNETNRKDKRSDFVERFWHYDVITSMSEQEFTEEYILWAKEKKYVPSQEKAKVIYTLAQESIPTLPSETSSIKMLVTEAVRVLKEVDATLGLILSRMQEIAKTLPEYSVVREMGGVGNTLAPKLIAEIGDVRRFRNGKALVAFAGIDPPPYESGQFVGCNRKISKRGSASLRKVGYETMRSLKMHSRPEDPVYRYVVKKESEGKSKKSAKIAGLNKFLRIYYARVTELYKNI

SEQ ID NO: 61397 - protein, 483 aa, unidentified
MKAKQQEKDKKAICRPTQNNWHEMNRKQRREMTRKIQSEDLSLEVVHPDAAGIDIGNESHYVAVPPTRDSQPVRRFGCTTAKLKEMAVWLKQCAIRTIALQSTGVYWIAVYDILEEAGFEVYLVNARETKNLPGRKSDVQESQWLMKLHTYGLLRNSFRPSQEIRTMRTYWRQRNDLVRSAGRHIQRMQKALTQMNIQLANVLSDVSGMTGQAIVKAILAGERDPYQLAALRNWRVKASEEEIARSLEGNWQEDLLFVLQQEQDGYEFCQRQMAECDQRLQQYLQQQKDRSHGASLPEEKRKERLRKKKKGNAPQFDLRAELFRVTGTDLTQIDGIDVTTTMTILSEAGWDMSKWKTEHHFVSWLRLCPDNRISGDKIIGKGRLPTNNRVTNALRMAASTLRLSNTYLGAQFRRLRTKLGAPVAIKAMAAKLARLVYRMLRYGMTFIDRGAEFYDAQHRKLQINYLKRKAANFGFQIIEAPAV

SEQ ID NO: 61398 - protein, 316 aa, unidentified
MPESPMFVGIDVAQAELEVALRPSAERWAVSNDEAGVATLVARLQALRPVLIVLEATGGLEVLVTSALAAAEWPVVVVNPRQARDFAKATGPLAKTDALDARALAHVAEAVRPALRPLPDAQTRALSAQLTRRRQLVEMLTAETNRVARAPGAIRADMQAHIIWLEQRLADLDTDIGRAIRATPLWREHDDLLPSTPGVGPVLSRTLLADLPELGTLSRQQMAALVGVAPLNRDSGTLRGKRTVWGGRALVRSVLYMGTLVAVRHNPVLKTFYQRLCTAGKAPKVALTACMRKLMTILHAMMKHHTPWRKNYAPSS

SEQ ID NO: 61399 - protein, 392 aa, unidentified
MQAPHVSTPIIKDISTIFVAIELSMRSWLVTMYCPDRDKMSRHKLEGGDHGGLLALIDRMRERAARALGVTPAVVSCYEAGYDGFWLHRLLMAAGITNHVFDPASIAVDQRARRVKTDRIDGEKMLRTLMAYRRGEPRVVRIVRVPAPEQEDVRRATRERVRLTKEQTAHTNRIKALLRLLGMAVGNPRRRDFLSWLAKQRDCRGEGVPPRMLTEIKHEHARLMLVREQLDELSQASAEADISAEADPTPAAAQMAQCSQLLLRIKSLGPAFATTLTNEVFYKDFRNRREVASYFGLTPSPWQSGGIDREQGISKAGNPRARETAIELAWLWLRHQPHSALTQEYRRRTLDASKRIKRIAIVTLARKLMVALWRYLTTGLVPGGAMLKAAKT

SEQ ID NO: 61400 - protein, 376 aa, unidentified
MQVKTLSKSLFTLDSAETVQYINGYLPVGCDLAKFSIQIYCYNFKSKKFSSKALTRDGFTKFLQESDKPLLVAFESGSSCHYWARQCIKYNHKVRLITTRFVASVKDMNKDDPHDAKLIYRACFADGCKEIGVKTEQEQLLNMILRLRDQILKDRVKMTNLWKAAIHEIGEPVRCGIKEFRQHAHDLADDPDHVRDDSKEFLGMINEFASSHMDDCDAKVAKIDEYITKVAREDEACKLLMTIPAVKEFSAFCLMVSLCNLDNFKNGSYYASLMGYAPRHRGTGGSNYTIKAAPVGHKTVKKCYFFIAMAMYRKIKKQDKFENCWLHRMVKEKSGKVAICAIANKLCCTAYSMLKNKQPFDMDEFKGIYKEQKVEP

SEQ ID NO: 61401 - protein, 349 aa, unidentified
MTEQRRSYAGECVYVGVDVHKETYTVTCVCHKQIVKTATVQAEPASLAASLRRWFPGATLASAYEAGFSAFVLHRALTTAGITNIVVNPASIAVAANDKVKTDRRDSKRLAVDLADGRLRGIYVPTEEEELARLLPRTRAQLVEHRATLARQIKAKLHQFGLIAPSSRRMLSHRYLREIESWTLPPELRASLKLLAEQWRFVTRQLIEMRRLLREQATAQAVIDKVYRSVPGIGEVVARTLATELGDMTRFANERALFSYTGLTPSEYSSGASVQRGHISRQGSSRVRHLLVETAWRALPYDAVLQTMFERIAATRGKKRAIVALARRLIGRIRACFRQGTMYAVGTLA

SEQ ID NO: 61402 - protein, 340 aa, unidentified
MTFVGCDLHTRMQQVAVLDTRTGEVSERQLAHDGNAIEEFYAALPGPVTIGIESTGYATWFHTLMQRLGHTLLVGDAAKIRAMVVRKTKTDRRDALHILDLLRHDRFPTTWVPDPATRDLRALLTHRMRLVRIRTMVKNGLHAIALNYGLTRGSKLLRQTGLAQLHALALPPHTAQRRDQSLELLAGLNAQIRELDDAITTAALAHPDGPRLITHPGVGALTALATIVVLGPAARFHDSKHVVSYVGLAPALNASADKHHLGHITKQGSTLLRFALGQAAAHAARMDTDLKRTYFTLVHRRGRPKAKVAVARKLLVRLFIMLRDQIDYDEFRRRGRTAPA

SEQ ID NO: 61403 - protein, 348 aa, unidentified
MMVVLGVDAHKRTHTIVAADEAGARLGEVTVAATASGHLKALRWAARWDERRWALEDCRHLSRRLEAELLSAGEVVVRVPPKMMAGVRRSARTRGKSDPIDALAVARAAIREPGLPVARLEGPAREIRLLVDYREGLVRERTGLQNRLRWRLHELDPEVDPAPGSLDRYVALDGLWDALDAHCGVVAELARREITRIRDLTAEINQLELDIAARVGEVAPSLLEVPGCGALTAAKLVGEAADITRFRDRNAYAMWAGVAPIPVWSSNTERFRLNRGGNRQTNAALHRIAITQMRIHPDARRLITKHLSAGKTKTEALRILKRRLADVVYRTMIKDTKQLSQAAPARAA

SEQ ID NO: 61404 - protein, 420 aa, unidentified
MMNNQRIVYVGIDIAKVKNDVLVEYPNGDRKRMKVLNRLDDFQAFVSYLQSFDGPCQIGLEATGNYHRAIAYFLEKNNFRVNLISSVALSRTREALHNSWDKNDPKDAQVMIHMLKAGVQQVYFDPVHHGFNDHQELSKTHFEISREKTKVQHSILTHYLPLYFPEAEKYFYSSRAEWFSTMLYHFPCPNSIQKLSKEEFVEKAWDLAGRKVSKRAFLEDFYNTACRSIAIPVEEDSSAIAMFRLILQQHIHLCRKRQEIEDQAHEKLKGDHRYQLLRSLPGVGPIIALTILAETGDFKRFKHHRQYLKFCGFDLSTHQSGQFRGQSKLSKRGNRYLRCAFWMAATIAIRMRENTFRRKYHRYIRKDPDNSDLKRKAYTAAAVKMARVVYGMMRSESVYRPYFEEAIPSGRIPSVAAVEA

SEQ ID NO: 61405 - protein, 382 aa, unidentified
MDIIHDRRAGLDVHKKTVVVCVRHVTPEGAVAKQTRTFGTMTADLLELADWLKAQDVRHAAMESTGVYWKPVWHILEATVELTLVNARHMRQVPGRKTDVKDAEWIAQRLQHGLLSPSFVPPEPIRELRDLTRQRAQLIAEKSSVVNRIHKTFEDADIKLAAVATDILGASGRAMLAQLIRGETDPERLAAEARGTLKKKADALRKAWPGRVTEHHRFLLGMLWDHLVHLEDLIERCSVRITEAMRPFEPAEARLMTIPGVGRQAAEVIVAEIGADMSRFPTAGHLASWAGLCPGNNTSAERRESGRTTKGSPWLRTTLVQVAWAASHTKKTIFGATYRKLARRLGKKKALVAVARKLLLLAYLLLKVQVDYQEPLQTEVAA

SEQ ID NO: 61406 - protein, 389 aa, unidentified
MYVVGIDISKYKHDCCIIDSDGVIVQGPFSFSNDRGGFNDLLEILHSIPASEEIRIGFEATAHYALNLKLFLEEAHYSFMEFNPVLLSKFNKSQTLRRTKTDAIDCLSIARWLMTVNYKPHPVGFYHSFSLKSLTRLRDSLVRERSYYLVKITNILDLTFPEFKPFFNDRFSATALYLLENYGTAEKISHMNSQSYENLRKISYGKFSPQQFIKLKNLARNTIGEGNDIFTMQLESLLKLYKQSVTEIDTLESRITELILQINPKYLSIPGIGPLSAAVIYSEYGDFSKFDSPAQMLSYAGLEPGYYQSGTSKHKGHMVKRGSSYLRYTLMNLCAPLTRFNYVFAEYYDKKRAEGKPHRVACSHVIKKLIRIMFYLEKNDVDFDPSLLR

SEQ ID NO: 61407 - protein, 320 aa, unidentified
MDAVLGIDIGKAKFHVTLLFDDATRRRKACANSPAGCAELLAWMARHGAGRVHACLEATGAYGELLATTLVDAGHQVSILNPAIIHHYAKSRLSRAKTDPVDADVIADYAAKEHPPLWIPLPREVRDLQALVRRLDALIGMQTDERNRAQAGALTPAVQQSIETVLAHLETQIATVRQQIRQHMDQHPGLRAQRDLLTSIPGIGEATAALLLAELFNKAFTSARQAAAFAGVVPRPHDSGLHEGRRVMCKLGPGRLRKGLYFPAIAAIRFNPSLQPLARRLRGAGKPPMLIIGAAMRKLIHLAFGVLKSGRAYDPELAKA

SEQ ID NO: 61408 - protein, 329 aa, unidentified
MNYLGIDVAKAKLDCCLLLKDNRRKSKVVPNSEEGFKQLIAWCKKQGVLPAGLHVVMESTSCYHEPVAYALFQTGMRVSLLNPARVREFAKSQGILSKNDGLDAFAIARFGASSTPELWQPPAPEVIHLKALLARLETIEQDLQREMNRREKTDFTNTPDDVLASLMEHIAYLEQARDKLSKKIDRHIDQHPDLKKDRALLQSIPGVGSKVSTIMLASLRQSQFTCAEQSAAYLGLVPIQRQSGSSVKGRSRLSKNGPARVRAKLYMAAIAAKTHNPHIRDLAQRMALRGKCNMSIIGAAMRKLVHLCFGVLKNQLPYQPNYSSNGLTW

SEQ ID NO: 61409 - protein, 322 aa, unidentified
MHTFHLGIDVAKAKLDCALRTPAGKIRHKVVPNGPEGFKSLRVWLTKHGAESAHVCMEATGIYWEAVALYLAGFEAFTVSAINPAQIKAFGASQLVRTKTDKVDASLIAQFCHERRPEPWQAPPASVQTLRALVLRLDALQNMRTQEANRLEVARAAVQAGISAHLQWLDDEIARLIKAIRQHIDDDPSLRDKRRLLESIPGIGERTIAVILAYDIGPEHFANARQAAAFAGLDPRQHESGSSVRGRTRMSKIGHSFLRKALYMPAVVALYRTHWGRAMNQRLAANGKPPMVMIGAMMRKLIHVAFGVLKSGKPFNPQLHNA

SEQ ID NO: 61410 - protein, 358 aa, unidentified
MDKIKNSKLDCTGQPVYVGLDVHKKSWSVSVFSRYGEYKSFTQPPQVDTLVSYLKRHFPGGEYHSVYEAGYCGFWIHDQLKERGINCTVVNPADVPTKQKEEQHKRDRVDCRKLARGLCNGEMEGIYVPSRQMREDRTLVRTRQALVKKRTRCKNQIKGMLSFYGIHLTDEQTFAPWSGRFIKWIESIRMERDSGNTALKAHLEELAYLRQLIATVNRAILKLAGSAEYAIPVKVLKSAPGISTLTAMILLTELCDMARFASLDSLCNYVGLIPAIKRSGETEYVRGITPRRNAHLRWILIEAAWVAVRKDPALMMAFTEYCKRMRKNRAIVKIARKLLNRIRYILKHQTPYVPCIAK

SEQ ID NO: 61411 - protein, 349 aa, unidentified
MKESSAVSFEGQVIYCGIDVHKNSWSVNLRHCHRELKKFSMNPDPEELSKFLKKHYPGAEYRSVYEAGFSGFWAHRKLCKLGIKNIVINPADVPTSGKERDRKNDAIDSRKLARELENRTLEAIYVPSEENLELRNLVRRETKLTGNIVRIKNRIRSHCYFLGLTFPGWSGRSLKIIQEEAQKRYDYALLSDLRELRFLREEKLRVIHDEQICLKRLKRNEIQKHLQSIPGVGFRTAVILQAELWDLTRFQDKNALSSYVGLAPRLVGSGEHEEIRSAGNRKKKELHYILIEAAWRAIAFDTGMRAKYGSLVHKGTSPQRAISIIAKKLLYCIRAVWVQEREYIKPGTE

SEQ ID NO: 61412 - protein, 419 aa, unidentified
MFKILRKNCCGLDVHKTWIFACIGITDPHGITHYKQARFSSFSKGLRELVDWLALYSCKEVCMESAGKYWIPVFNILEKSCLVTLAHPKYTKPQKGNKTDRKDARWICDLFMCDMIKPSFIPPPDIRHLRDLARYRVKLTNCLAGEKNRAQNCLTVSNLKLDDVFADVFGKSARSITEHILAHPGEHFDVTPFVDGRCKHPIEEIQAAVDGAVSMEQAVKLRECLNHIDELQNHRLRIEEEMIALSAPHAATLKLLRTLPGFDSNPLTAIAVLGEIGGDMSVFPTAKNLCSWAGCCPRNDQSGGKIKSTRISRAGTFLKPLLVQIANALIRSRKHPEFAQRYRRIKARRGHKKAIIAICRMLLTAIWNMLSKLLPYSSDGFLEPIQTNPNKTLTVSQAIHLLRSKGFCIQDDAPALTSG

SEQ ID NO: 61413 - protein, 419 aa, unidentified
MKVEYGNVAEDAVWAGVDTHAATNWLSVVDARGSELFSGEFATDPEGYRKLCDEIRRLGSPVAAGVECTGTYGAGLVRAMAAYGIASYEVITPGRPRRGPGCDKDDAADALRAAKQALSGENLAVPKSQDGWVEEVRNMTVAREELVKQCTSLANLALATVRKGPDEIRARLERLGTAKMMGVLAGWDEAEADPICDAVMFSLAALGRVWAEARRSARLLEERIERTLKAGNPALASMYGCGPISAAMLAIAAGDNPERMGSEASFAALCGVSPIRASSGKVERHRLNRGGNRNANKALHIIAMHRMRTDPRTTEYIERRRAEGLSDREIRRCVKRYIAREAYRLIMHPYDVPIEGKGPEMRAERIASGVSQKDAAIALGVTASTLCDLELGHHQFRELALRYRQWIDDGFPLEAGIAS

SEQ ID NO: 61414 - protein, 342 aa, unidentified
MKIMTGIDLHSNNALCGLMDEKGRRVLHKKLPCDLAAILQVLQPYKARIAQVAVESTYNWYWLVDGLEDHGYPVVLANPARMKQYDGLKHTDDVSDAFFLCELMRLGILPTSHLYNRQTRPVRDLLRRRMLLVQLRTSLILSFKSLNERTLGQRVPLGLVKAMSIEAAQARFTAPADQLLSGEQIGLMGQFQESIAKIEKHILATTKEWPTFQRVQDVPGIGRILGLTIALETGDPKRFASAGNFASYCRCVKSLRQSNSKKKGENNRKCGNRYLAWAFVEAAHFACRHDERCRRFYDRKKQQTNPVVATKALACKLAKASWHVMHDDAPYDPQRVFGGGNP

SEQ ID NO: 61415 - protein, 338 aa, unidentified
MTTPIKMLAIDLAKGSFQVCAIGQDGAVLYNRVLSRIRLAALLADQQSCIVAMEACATSHYWGRVAQSHGHEVRLVPAAYVKPFVKRQKNDKADAEAIAEAASRPTMRFVAVKSAETQGRAVAFRTHQCLVRQRTQLINALRGHLAEFGLVAPKGPASLKVLADALADESSVLPDPVREMGSIYLDQIARLTDVIDRLADELEAATKTDSQLRRLCTIPGIGPVTAGAVSAFAPDLDTFDSGRNFAAWLGLVPRQRSTGGKTRLGSVSKMGQTDIRRLLIVGAMSVVRWVVRKGGSANRWLAALVMRKPKMVAAVALANKMARMIWAPTTKEQDYRMA

SEQ ID NO: 61416 - protein, 364 aa, unidentified
MYNSENLIKNNTTIGIDISKEFFDIYVYESGKTMRFNNNKRGIKLFIKYITPLNPTIVAMEYTGGLERNLFFALQDNNIPCCCVKPVNIKNFSKTIDAKAKTDLISAKLIAHYTKILKPAPQPKPDNNLLMLKDLASRHLQLTEFLVSEKNRLSSSTFAKTKSQINKSIKLFEKLIEDNRKQLKELICSNPELKAKVDLLDSMPGIGEHSAMMLSVLLPELGKISGRQIASLCGVAPFVNQSGKYQGKAFIRGGRDKVRKILYVVALVAINHNPLIKDYYKRLINKGKPAKVAIVACMRKIVRILNAMLRNNLPFNADYYKSNIREQNEYNKIILTKNTGIKEEVECLVLSDIDLREPEFKNIT

SEQ ID NO: 61417 - protein, 468 aa, unidentified
MPALVALRGSPPVLASHARRLIRTSPKWLIEARRHAAWPLYRREGHRVSKSQIVVGFDCGEDGHSAVLLDAAGEFEERFGVANERGQIQELLAELLLAVRPDKRLVVVVESKRSHGRIVSDVAVELGCDLRQVNTVALNHYRDLEGQPRKDDEWDAYLAARMVFQKMGGCREATEVTEEERALSRLTRTHKRLVDDRRKHLARLRAVLLELAPEMLHSSWEGPQPGRKAMLYLLERWPGFEGLERAQLRSIEKILRQCRYGSRATHVAKLIREVARGISIAGEERHAFTLELDLLVRQIRFCDEAKDRLRAEIVQRVEQHPVGQKLLGMDGNGPVITGVLVSELLPVARASTEPKSATYAGVTPLSRKSGKSLKSDKLTQGVNQRVLHALYTSSVVAIKHSAIDRAYYQKKLRGYKGHPKPHVAAFIALSRQRHKVIYKLMTTEARYDKEVLIAAHLARLDQEGTAAA

SEQ ID NO: 61418 - protein, 420 aa, unidentified
MEEITEEPAELVERVAALDIGKASLVCCVRVPHESRPGARRQEVRTYDTVTPALLEMRDWLICQGVTRVVMEATSAYWKPPFYLLEDDIECWVVNARDVKNVPGRPKTDKLDAVWLCKLAERGMLRPSFIPGRAGRQLRDLTRYRRTLTQERTREKQRAEKLLEDAQVKLSSVISDIFGASGRDMLAALIAGQRNPHALADLARKRMRAKTSVLRQALTGQFTGHHAFLLAMMLGRVDALTAQIDQLTTRIEKAIAPFAAQVAQLDEIPGIGVTTAQEILAETGTDMSRFPTPGHLVSWAKFAPKARQSAGRSKAAATGKGNPWLGGTIGEAAIGAARTRTFLAARYKRVVKRRGKKRALVAVGNSILVIVWHLLSDPDAHFTDLGPDWHDRLAPQRRKRQLITELERLSGQKVTLTNAA

SEQ ID NO: 61419 - protein, 361 aa, unidentified
MHRIANAKQPVTGGVDTHADTNVVGVVDQVGRVLGAEEFPATTAGYRMTLAWMRGHGKLVKVGVEGTGSYGAGLARHLAAEGVEVVEVIRPNRQARRRRGKSDTADAVAAALAALNGEASGGPKARDGAVESIRALRVVRRGAVKARTQAANQLRDLIVTAPARLRERLAPLPIAGRVELAARFRPGDLTDPAEGTKAAMATVARRHQALEAEIGGLDAALEALVEHVAPERFLTKQGVATQVASTLLTTVGDNPDRLRTEASFAALCGASPVDASSGKQRRHRLNRGGDRQANSALWRVALVRMAHDPRTKAYVARRTAEGKTTKEIIRCLKRYIAREVYKVLTRQVQTPMQIASDHAAA

SEQ ID NO: 61420 - protein, 313 aa, unidentified
MDHVIGIDVSKARLDVYDLGDGRRLAVGNDAAGITGLAAQLGLGAGKLVVMEASGGYERQPQRLLSEQGLRVAIVNAARVRDFARASGRLAKTDRVDAEVIARYGAFARPAPTPLVTGARQALAELLAYRRQLIAEITARSQQLGHLVTPTLRQRAAAALDRLRAERREVTQLIGQTIAADRALAAPAALLHSMPGVGPVLVATLLAELPELGSLDRRQIASLVGVAPIAKDSGTKLGRRLIRGGRRDVRPPLYMAALVASRSNPTLRATYVRLVDHGKPPKLALVALMRRMLTTLNAMLRTATPWRQLPTPA

SEQ ID NO: 61421 - protein, 409 aa, unidentified
METVIERCCGLDVHQGSVVACIIVTDQRRKPRREIRTFGTMTKDLQALCKWLEAEGITHVAMESTGIYWRPVYNLLHGSFALILANAHHIKTVPGRKTDVKDAEWIANLLRHGLINASYVPIPEIAELRDLTRYRRKLVGTASAERNRTLKLLETANIKLASVAADVFGVSGLAMLRALASGASTAEETADLARGRMRRKLAPLAAALDGRVTEHHRFLLTVALGRLDAIERDIALLDERIAAKVAPYDRQIALLMQIPGVDRLSAIAVIAEVGVDLSHWATARKLAAWAGLCPGNYESAGRAKGSGIRRGNVHLKAALYVAASAAARQRGSYLKDKYHRLRARRGARRAGVAIAHKIIVSAWHILTREVPYQDLGDTYLDRLAEHRVTRNLVRRLQGLGYQVTLNRAG

SEQ ID NO: 61422 - protein, 415 aa, unidentified
MDWRLELLLVGDDWAEEHHDVELQDETGRRLGRAKLPEGVAGVARLHAMIGEHLGEHGEPAQVVIGIETDRGPWVQALIAAGYQIYAINPLQVARYRERHGVSGAKSDTGDAHTLADMVRTDRHQLRPVAGDSDLSEAAKVVTRAHKTLIWERTRHTLRLRSSLREFFPAALVAFDDLTAPDALELLAKAPDPASAARLSTAKITAALKRARRHHVAAKAEAIAAALGDGHLGQPAVVTAAYAAAARAQVAILTTLNAEIETMEEQVEAHFGKHPDAEIYLSQPGLGLVLGARVLAEFGDDKTRYADARARKNYAGTSPITRQSGKKKVVLARYVHNDRLVDALGLQAFTSLRASPGARVYYDQLRARGVGHRAALRQLGNRLVGVLHGCLKSSTNYDEATAWPNHAQQAEQAAA

SEQ ID NO: 61423 - protein, 429 aa, unidentified
MTNPQSTPEVVVWVAIDVAKDRHEALIEAPGWKSRKKFRVQNSAEEFRAFAEFLHGLALPVRIGFEPTGNYHRALAYFLHSEGFHLELISSVALARTREAMHNSWDKNDPKDAQVILHLLKGRLTQHYHDPMVHHLNDLQELSKTHHHVSLEKTRTQHRLLTHYLPLYFPEIARYHSSSRSEWLWNLLIEFPTPRSITQLARGEFVRKAWNLVGRKVAKERILIDIYMTAQSSVGIPAEENSQAVAMLRFVLRQLLTLCQLRATIEERADDLLSSNEDYQRLRRIPGIGPISALTILAEAGDLRRFSHHRQFLKFCGFDLATEQSGQFRGLSRLSKRGNARLRAVFWMAASVAVRMRENSFRAKFERYTRSDPGSADRKRKAYVAVAAKIARVTYALIRSGADYRCFHEVAVPGGRTRSARAVEAIPTS

SEQ ID NO: 61424 - protein, 341 aa, unidentified
MSIITVGIDLAKNVFAVHGVDEAGRAALVKPKVSREQLLALIVQLPPCVIGMEACSGAHHWARQFRRYGHSVKLMAPKFVTPYRMSGKRGKNDAADAAAICEAVTRPNMRFVPVKEEHQQIILCLHRTRQGFVEERTALYNRLRGLIAEFGIVLPQKVTCLRREIGAHLEDLPGYANQCIGDLLAHADRLDERVADYDRIIAQAAREDARSKRLMQLRGVGPTTASAMLASIGGGHDFANGRQVAAWIGLTPGQYSSGGKARLGRITKAGDPYLRSLLVMGARAVLASLGDKQDHFSRWARNLQQRRGYWRAVVAIAAKNARLAWAVLKYGEDFRLTARAA

SEQ ID NO: 61425 - protein, 354 aa, unidentified
MKRTSKHVALDVHQATTVASVREESGRVIARTILPTEDGPMVEFFRGMRGTIHVAFEEGTQAQWLHDLLEPLVHRVVVCDRRGEARRGNKGDQVDADALSELLRRGSLRAVYHGSAERATLKELTRAYQNLVEDATRVMLRLKALFRARGIPAPGKRVYHPGERAAWLARLTNRGARYRAETLYAQLDPLRALHPRVKAAMVAEARRDPAWKILQAIPFYGPVRVAQLLATMQTPWRFRTKRNLWAYAGLAVVTHTSAEYELVGGRPVRRRRAPLTRGLNQNYNRGLKNVFKGAATAATAQPGPFQDFYQGLLARGMREELARVTLTRKLAAVTLRLWKKGERFDPTQLTVQAR

SEQ ID NO: 61426 - protein, 457 aa, unidentified
MQSFYIGSDVSKGYADFVILDSKKQQVMKNFQLDDTFEGQSHLYDILNRFLTAHPGATLFAAVESTGGYENNWYNTLVKFQGTLNIQTSRLNPLGVMYNSKADLKRNNTDKISAQSIAEYLITHPEKVTYQQEDQTASLRKQWVFIKMLTRQSTQLLNQLESLLYTANTELLAYCKNGMPGWVLKLLLKYPTASRLSKARVPAVSQIPYVTSKRAQELVISAKRSVASASDQITEKLVSATAKQILNLKKTIDEQIKFMVKECSISEVDILKTFTGISDSSAIGLILEIQTVERFKTVKKLASFFGIHPVYKTSGDGSSGFRMSKKGRKEPRKILFMVALTAIRSNPLIRSIYLERTEKGMEKMAAIGLCMHKILRIIYGMLKHGKSFDPQIDLNNRQRSFKKKPAGKKDESRRFQDYDSKSPISRRQSKKRLERKPSHSVNNTKFGIDTPVPEFVS

SEQ ID NO: 61427 - protein, 337 aa, unidentified
MKKNYQVFIGIDVSKGKLDYCVVSDPSSTHHHFGIVANNEKGIKQLITSLKKKFISEEMIICLENTGVYSMPICYWAQHFKIDYWVVPALEIKKAKGITRGKNDKADSKDIASYCITHLHLVKLTTLPQNDFIELRLLLAEREKLVKAIGMFKMTKESQGFLPKELLKITFAHNKKTTEVLQKQLNSIEKIIQALIDNNPTFKEQQKLLETIPGVGKQTSTNLIAITYAFTAFKDWRKFACYCGVAPFEYKSGSSIKGRTRVSHLANKKIKAILNMAALTAKKNDTEMKAYYEKKVKEGKNKMLVLNSIRCKIISRAFAVVQRNTPFVNVNKFKTAA

SEQ ID NO: 61428 - protein, 403 aa, unidentified
MNAVGIDVSKGKSMVTILRPFGEIVPSPFEIKHTSSDILSLIKLIHSIEGESRIVMEHTGHYYEVLAQQFSAAGLFVSAVNPKLVKNFNNDSLRKVKSDKADSIKIARYALDKWQNLKPYSIVDELRTQLKAMNRQFHFYVKQKTAMKNNLINLIDQTYPNANTYFNSPPRSDGSQKWVDFVYTYWHVDCVRKMSLNSFVKHYQNWCKQKKYIFNKSKAEEIYTQSTELVPVFPKNEITKRIIRQAIAQLNSTSATVETIRILMNETASKLPEYPIVMQFKGIGPSFGPQLMAESGDITRFTHKGALTAFAGVDPGVNESGSYAQKSVPTSKRGSSNLRKTLFQVMDVLIKTMPQDDPVYQFMDRKRAQGKPYYVYMTAGANKFLRIYYGRVKEYLCILSESS

SEQ ID NO: 61429 - protein, 410 aa, unidentified
MEVLYQRCCGLDVHKETVVACLRVVSGDEVIREVRTFETTTASLMALSEWLAENGCTHVAMEATGVYWKPVWHILDDGDFQLILANAAHVKNVPGRKTDVNDATWLADLLAHGLIRASFVPDTQTQELRTLLRTRKQLVREKSSHILRVQKMLEDANIKLDSVITDVMGMSGRAMIEALIAGESNPAKLARLANYRLRASQEKLREALRGRVTKHHRFLLRLHLNQIDALDASIVMIDEQVEAGIAPFRAAVGQVMTIPGIRDIGAQVIVSEIGTDMSRFPSEGHLISWAGLCPRNDESAGKRRSNRLRKGAPWLKTTLVQCAWAAVRKKGSYLQAQFLRLKTRRGPKKAIMAVAASILTAIYHMLKHGTLYQDLGSNHFQNRSKGQQTKRLVKRLADLGYNVALTPLAS

SEQ ID NO: 61430 - protein, 426 aa, unidentified
MRVMYDRVAAIDVHKDMVKVAIRVPGAKRGTRKTDVLEFRTFYGVLQAMARELRRRDVTHVVMEASGVYTDPVYYALRELDFTEVMVINPAHAKALKGHKTDAKDAIRLLDLYECGLLSGSYMPSEDLREVRDLARYRMKTVQARTSEIQRLQKTLETAGIKLSSVLSDVTGASATAMIEALISGERRGSVMAGLAQTRLRTAGKMADLSMALAGRFTDHHALMCRLHRDRITIFDDAVKDLDAKIAPLVARYAREAELLKTLPGFGDVVVAGWLGAIGPAPHQHFATASRLASWATICPGNYMSAKKSKGGRTGDGGAYIKPLLIQAAWGAVRVPGRLQARFHRLVRKFGGPRNKGARKRAITAIAHTLLKIAYGVLKTGKPYADLGADFYTRRESPDARQDYLIRQLQKLNPGSIITITPAEAA

SEQ ID NO: 61431 - protein, 358 aa, unidentified
MYPFYLGIDLHLKRTYMVLMNQSGQVIDERRISNNEIEEYLVEIVPKNTHAVMEATRNWAFMYDQLSQHVERVDLAHPKELKAISAAAVKADHIDAKVLANLARMDFLPTAYAAPKDIRDLRMYNRHRDQLVRMCTQVKNRIHAILASYNLAAPVSDLFGVEGGEYLEEAMETKLRTAAKRVIQDQLVLINQLSEQIGAIEAETTLSPEQKQMVRLLKTVPGIGKVTATTIMAEIGDIHRFHSAKALCNWAGLTPKIHSSDVIVRHGRISKQGSSLLRGAMTRAATVASRSSKRWYVVHENLLPRCGKVAAKVAVARRLLTVVFYMLKRMEPYQEDYGRNIQGTGEPVALHGSLKPTR

SEQ ID NO: 61432 - protein, 371 aa, unidentified
MNTIVYVGMDVHKESYTLCCYCYDTDLVEYRQTIPADYRLVLKYMERVRNRYEGDVTFVCGYEAGCVGYSLYHQLTGHAVDCKILAPTTMAITNTNRVKTDRKDAANIARCLAFHTYSEVYVPDEQDNQVKEYIRMRDDQKLALKKVKQQILAFVLRQGKRFDGGKTYWTIRHMKWLYGLELAPLDKETLSEYLITYEYLVEKIERLDRRIEELASEERYREKVKKLGCFMGLQTHTALSMLVEIGDFERFAKAQKFAGFLGLVPSEDSSADDINRYGITKAGNRHLRRLMVEAAQCYTRGTVGHKSVALKKRQEGCSPEVIAYADKANERLRRRFYRLTLHNGVNRNKAATAIARELSCFIWGMMTDNVA

SEQ ID NO: 61433 - protein, 351 aa, unidentified
MSHKTAATVAHTIGIDTGKNTLHLIGLDDQGAIVLREKIARGRIAARLANVPRCLIGIEAGMATHYVARELSALGHDVKQVPPAYSKPFRQGHKNDFRDAHAIAEAVQRPSTRCVPVKTDDQLDLQALHRVRSRLVGQRTAVINQIRGFLLEHGIAVRQGLRFLRQQLPDILAKRSDVLSPRMIRIMEDLSGDWRRLDERIEHITKEIEVLAGTDVNCGQLMTVPGIGPIIASATVAAIGNGAAFARGRDFAAWLGLVPKQMSTGDRTILGRITKRGNRYLRMLFVQGARAILLRPKSWVKHSFGPWLTTAARRLHRNILTIALANKLARIALSVLIQGRSYETRIVPAAA

SEQ ID NO: 61434 - protein, 438 aa, unidentified
MWRNSQWLLSIFQKGALPMKVVYQTCCGVDVHKSFLVATIIKTTSGVQPSYHKKRFSTFNNSILAFKKWLLDNSCRDVCMESTGKYWIPVFNLLEDELNVTIANPKWVKAVKGNKDDTKDSKWIGDLFRLGLVPGSYIPCKPIRILREFTRYRYKLTSCRSSEKNRFQNALTVCNVALDSVVSDIFGKSATSVIDYLLQQSTASINHEEISSRLLRSLKKKSESVIESIEGYQMTDAQKYRMRLVHAHMDYITSTLADIDSMIDSLVEPYENAVQLLCTIPGVDRKSAITIISEIGTDMAQFSNSKRLCCWAGLTPGNNESAGKKKSVRITRAGVYLKPALVQVAHAAVKSNQSPYYKAKYERIMKRRGKKRAIIAVARMILTAVYHMLSTGEAWNPTDLYKIDMPEPLKNKQKEKAVRQAMKLLIAEGLINKSQPAS

SEQ ID NO: 61435 - protein, 368 aa, unidentified
MSNHSHYKVGCDAHKHYSLFSVLDARGNLVQRTRVNHEPGAIRSFLSRFPPGTPVALETVGNWYWIVDEIEEAGCLPLLAHAAKAKSMMGHVHKTDKLDAAGLATLLHLGTLPAVWIPPGDLRDERELPRTRMAFSKVRTMLKNRIHSTLAKYALSLDTDSDIFIAKWRPQLLQLLQHLPAETHRCVAQELELLDLLQAHIHQLEERILERVELTPAIQLLMSIPGPAEILSIVIDRELGSIQRFPAPKHLASYSGLVPRVKASGGKVHYGRMIKQANNYLKWAFIEAANVVVRQRHHANWRGKYVVRLFERTRQRKGHAVAVGATARYLAEAAFWVLKKGEPYREPVPRRPAGRTSPASPKQGQARA

SEQ ID NO: 61436 - protein, 344 aa, unidentified
MQNMYYIGLDVHKRTISYCVKDGSGTIHAEGTIVATRFDLDRWMKTLPQPWTAAMEATVFTSWIYDHLQPHATALKVAHPLMLRAIAAAKKKNDRIDANKICDCLRCDFLPECYMASTAIRERRRTLRYRNLLVRQMVQMKNKISGLLMEAGVNYNKQRLHKAGYFRELLATNPDIDEGLCSLLRLCRETVVRLEKTESALVRSLERDSLLMERVERLMTIPAVGPITALTWALEVGDVKRFSSIKKAISYCGLCGAEKSSANTMQRTPLSKQRNKHLQTTLIEAAKMAPRNSPELAMLYEKEKQKGNANRATLAVARKLVAYLLAVDRGQRNFQVVETNCIAA

SEQ ID NO: 61437 - protein, 409 aa, unidentified
MRLFVGLDVSSFDIKACILNGEGKKLDFFSVNNDLPGATALKERVLQCIANQEIETFKIGLESTSVYSFHPSMFLHYDEDLQRFGAKVFLMNPKQIANFKKSYSDMDKTDEIDAFVIADYLRFGRNQMSIVKESQYVALQQLTRSRYQLVRMLTKEKQHFLQHLSYKCNTFSQEVDSSIFGNAMMELFLEKFSLEELADMPLEELAEFLQTKGKNRFGDPKCVASTIQRAVRSSYRLDKVVEDSIDVLLGTSIAVIRTYQQQIKEIEKSIKRIMAGLTQTLESIPGIGPVFAAGIIAEIGQIERFDDETKVAKYAGLYWRTHQSGRFTAENTSLSRNGNHYLRYYLVEAANSVRRHVSDYQEYYVKKYNEVPKHQHKRALVLTARKFVRLVDALLRNHQLFTPERCVKV

SEQ ID NO: 61438 - protein, 456 aa, unidentified
MVSSSQSEAQFQTIHPNAAGIDIGADRHWVSVPPGRDQECIRSFGCFTPELNALADWLKQCGIETVAMESTGVYWIPLFQILETRGFEVRLVNAHHVKTVPGRKSDGLDCQWLQRLHSCGLLTGSFRPNDQVCQLRSYIRYRDTLVTSASTHVLRMQKALTEMNVQLHRVISDITGSTGMRILRAIAAGERNPEALAAMRDTRIKASQSEIAAALTGDYRTEQGFILQQELHLYDTYQRQITACDVEIERLLNDFTDQVDMDASPPPKSTQRRTKKPGSNTPEFDLHTHLYRMSGVDFTQVPGLGTLNVLIILSEVGLDSSRFPSAKHFSSWLGLCPGNRITGGKVKSSKTRPVVNRAAHAFRMAAQAVSRSQSAVGAFYRRMKSRLGGPKAITATAHKLARIFYQLWSRRQSYVDPSLEVYEQQYKARTLKQLQQKAQSLGFDLVPQPIADAVVS

SEQ ID NO: 61439 - protein, 341 aa, unidentified
MKLYGGIDLHSNNSVINLIDENSQVILRKRIGNSLEAIVSLLEPYRDDLAGLVVESTYNWYWLVDGLMDAGFEVRLANTAAIQQYSGLKHGDDDSDANWLANMLRLDILPEGYIYPKEERMLRDLLRKRLQLVQQKTQNLLSIQGLYDRHLNRRLNSNKIKRLSMEQLSEDFPDANICMAVNGNLAILQCLTVQIKTIEASLKQQLKLRDEFINLTSIEGIGLILALTIMLETGSISRFEKVGNYASYCRCVNGARYSNGKKKSNTNTKNGNKYLAWAFIEAANFAIRFNDTVKRYYQRKLAKTNVVVAKKAVAHKLARACFYVLRDQVEFDVNKAFGYSR

SEQ ID NO: 61440 - protein, 421 aa, unidentified
MPYKVAGIDVHKRMLHVVVSDVQVDGEYDFTRRVFGSLPEALRSLAAWLVEQQVEEVVMESTAQYWKPVWGTLERYWKPICQTREGALATSGTLHLALALSNRGRRGRKKDFRDAERLVKRLVAHELTLSFVPDVEQRLWRTIVRTKYQLTRNRVQLQNRLEALLEEAHIKLSSLVSDLLGASARRMLEAIAGGEINRETLAALADRGLRATQEQLQDALGVCQELNPVYRRLIKMVLDEVASIDKRIDQLNQEMASLLRPHEDQVKRLAEVPGLGVDSAQQIIAEVGATAATFPSEKHLSSWVGACPGDEESAEVNHSRRSPQGNRHMRRILNQAANAAAKHKGSIFQILYGRYVPRLGHNQTIGIIAHKLCRLVWKILHRGIRYEERGPEVSKASKQKRTRKMILQLRRLGYRIEPSPS

SEQ ID NO: 61441 - protein, 333 aa, unidentified
MNYVGIDVGSKELVMAACVKGTFRNTKIFENTAQGHKLIIKQFSKLKGNTQVCIEATGIYHFDLAIALSRAKNSEVMVLNPKVSHSFAKVLMKRSKTDAIDAEILATYCERMPFESWQCPADELISLRAISRRIAALSKLKSQTKNQRHALTATGGTPNVVIEHTDDLIIILESQISSLRSSAMALILACDELADAYRLITSIKGIAQASGIQILSELMLLPKDMNQKQWVAHAGLDPRHFESGSSVSKKPRLSKAGNKYIRQALYMPALVATRHEPHIKAYYTHLIDDNGLKKVQAVCAVMRKLLHAIHGMFKAKQIFDGRRFYAFPSQAQT

SEQ ID NO: 61442 - protein, 413 aa, unidentified
MHTRFFGFDVHQEFTQIAMLEGDQLTQLGRIPTTPAALREFAETLSTQDQVVLEATTNTYAIVQLLQQHAGRVVVSNPLQTRAIADAKIKTDKVDAETLVRLLAGGWLPEVWVPDADTQALRQQVAYRIGLVRQRTRVKCRVHSILSRNLIASCPRSDLFGKGGRQWLLEQALPQLPIHEQAVVTASLREFDTVSAELATIERTLAGGALPRPEVRRLMTIPGIDVIAALAIMAAVGNVQRFRTPSKLVAYLGLDPRVRQSGSGPVKYGRISKRGPGHARAALVEAAWAAVKSPGPLRVFYHRVRNRRGGQIAVVATARKLVVLAWHLLAREQDYAFVRPSLVAKKWRALELQAGHPPRRGERGAAYAYYLKPLRDQEREIGVQAERAYTLLTQHWQPRRATQDAGAANGKRL

SEQ ID NO: 61443 - protein, 337 aa, unidentified
MTVQVVGIDIAKHIFHVHGINGDGNVAVHKQLRRLEVLRYFANMPRCLIGMEACGSSNYWARCFQKLGHEVRLMAPQFVKPYVKSNKNDWLDAEAICEAVTRPTMRFVPVKSAEQQAVMALHRAREILIRSKVAMSNQILGLLLEFGIVVPGMRQLTSTLAELSSDCENELPPVFRHLLEAMRRHFCEINDRANELERQILAWHRQDDRSRRLSTIPGVGPITASALAVSVTDPMSFKNGRQLAAWIGLVPKQHSTGGRARLLGISKRGDAYLRRLLVHGARAVLRRRAQCPDGPESWAAKLARRRHHNIAIVAIANKNARAAWALLHNGTVFTPAA

SEQ ID NO: 61444 - protein, 351 aa, unidentified
MLIIGVDYHPSFQQISFLDQETGECGDRELNHSEGEAERFYRELKQRGANVRVGMEATGHARWFERLLAELGFELWIGDPAEIKTKRVRKQKTDREDAQLLLQLLLENRFPKIWVPSPENRDLRQLLWHRHRLVQMRTRIMNQLQAVAMNEGYRWKKKLFSEKGRTLLEKLPLAPWASRRRKELLELLDQLDPKIAELTAAVEREAQQRPEVVRLMTHPGVGPLTGLAYVLVIGTPDRFPCGKKIGSYTGLIPSEDSSAGHQRLGHITKQGNALLRYLLGEAAQAAARCNPDWRRRYVHLMIRRQKRIAKVAMARKLAVRLYWMWRNKWQYAQLVEFGSNAGKLGTVHGVK

SEQ ID NO: 61445 - protein, 403 aa, unidentified
MVFVGVDWAESHHDVCLLDEQGKVLGKRRIPEGLEGVRRLHELIAEHFEEPDQVVVGIETDRGLLVQALLAAGYQVYAVNPLAVSRYRDRHTTSRAKSDAGDAKLLADLVRTDRHNHRPIAGDTELAAAVQVLARAHQNLVWSRQRQVNQLRNTLREFYPGALEAFGTDLASVDAIAILEQAPTPAQGRSFSQAKITSALRKAGRERNLEAKAAEIQTRLRTPQLEVPPLLAQAYGRSVAASVRLLRQMNQELATLERELAAHFEMHPDAEIYLSLPGLGFVLGARALAEFGDDRTRFVDPKARKNYAGNAPITKASGKYKVVLARVARNRRLADACHLWAFSALTRSPGARRYYDQLRARGKTHQQALRALANRLVGILHGCLASRELYREDVAWPTLEVAA

SEQ ID NO: 61446 - protein, 371 aa, unidentified
MATHTTSRPGPVAPRSPERREIAPGQVIVGIDTHKDAHVAVAIDHLGRRLGTLSFANTLAGFDELIAWVSALGAPAIVGIEGAGSYGVRLARWLRALGVPTREVGRPPRLARRAGKSDPRDAEIAARAVAAGTALGTPKHADGPVEAIRVLRIARRSAMKARVQARNQLQGLVATAPEPLHGRLARLGAQGMVEASARLRPGAGSSDPAILATTIALRALARRALSLEAEIADLDAELARLVAARAPGLVALQGIGTDTAGALLVAAGDNPDRLCSESSFAALCGASPLDASSGMQRRHRLNRGGDRLANSALWRIVMVRMSYDTRTRAYVARRTAEGRTVAEIIRCLKRYVAREVYRVLVPALEEGVAPG

SEQ ID NO: 61447 - protein, 413 aa, unidentified
MVEVLYERCCGLDVHQKTVVACLITPGRGGQPHKELRTFGTLTADLLALADWLRAADCTQVAMEATGVYWQPIWNLLEDAFTLLLVNARHIKAVPGRKTDVKDCEWLADLLRHGLVRASFVPARPQRELRELTRYRTALVRERTAEVNRLHKTLERANLKLGAVASKVLGLSGRQIVTALLAGTTDPAVLADLAQGKLRAKRPQLERALVGTPGEHQRFLLARQLAHIDFLDETLAEVSAEIAERLRPFDGAIERLDAIPGVGRYTAEVLLAEIGPDMSRFPSAAHLASWAGMCPGNYESAGKRQKGKTRKGNKWLRAALLEAGHAAARTQGTYLAAQYHRLVPRLGKKKAAVAVGHSILVAVYYLLQRGTTYAELGGNYFDARNREHVERRLVRRLEKLGFAVTLTPKDPAA

SEQ ID NO: 61448 - protein, 354 aa, unidentified
MPSNAETAVARTIGIDTGKNTLHMIGLDEKGAIVLREKVSRTRIAARFVNLPPCLVGIEAGMASHYVARELVGLGHEVKQVPPAYCKPFRQSHKNDFRDAHAVAEAVERPSTRCVPIKTDGQLDLQALHRLRSRLIGNRTAAINQTRGFLLEHGIPVRQGHHFLRQQLPQILATRTDVLSPRMVRIIGDLMTDWKYLDERIEGVTDEIEALAHADEGCQQLITVPGIGPIISSAMVAAIGNGAAFCKGRDFAAWLGLVPKQRSTGDRTILGRITKRGNRYLRMLFIQGARAVLLRPASWAKHSFGSWLTAATRRLHRNVLAVALANKLARIAWTVLAQGRRYEARVETRVEAAA

SEQ ID NO: 61449 - protein, 353 aa, unidentified
MTNGSSLNETMGLDLSDKTGVYVVLDHEGEVCREGKVALTRQALSRAFGGGSPCLVAIEVGTHSPWVSRELALLGHEVVIGNPRQVKLISQNKKKSDREDALLLARLARLDRRLLRPVQHRGEQAQADLAMLRARSLLVAGRTSLINSVRGMVKTTGLRLPRCSAESFAARAQPHLPRELVPALEPLLAEIASLTARIKQITHAIEHAAAERYPETQQLRQVPGVGLICSLTYVLTLEEPQRFRRSRAAGAYLGLVPRQRQSGEQQPQMHITKAGDVALRSVLVQSAQYILGRYGPDSDLRRWGLKLAGEGNKARRKKAVIAVTRKLAVLLHHLWSTGQVYEPLRQTDLQTVG

SEQ ID NO: 61450 - protein, 268 aa, unidentified
MNSLNAQSQLTVLGIDLAKSSFQLHGVDAGGGSVIKKTLSRNKLVQFIAQLPPCTIGIEACGGANHWVRVFEQFGHTVKMMAPQFVKPYVKSNKSDAADAVAICEAVQRPSMRFVPAKSIEQQDLQSLHRIRSQAVARRTAQANQIRGLLMEYGLVLPRGIAYIRKAIPSILEDAENELTVLFRELLADLYREMVETKLEAICAQNTECQRLLSILGVGLLSATALVAAIGDINVFKSGRELAAWLGLVPRQHSTGGKPALLGRACPV

SEQ ID NO: 61451 - protein, 338 aa, unidentified
MTIVMGLDQHRAQITAEWLDTETGEITRKRISPAHRDGVRQFCEPFRDQELEVGLEATTGWRFVADELAAVGAVVHLAEPAETAARRGTKKRAKSDRADARHIRELLMIDRLPESWIPPAHLLDLRAQVRLRHTLSHQRGEWQQRIQSVLYHHGCPQRGELLTLAGREWLAMQPLSPAGREQITVALAIIDALDIQLAPMNARLRAFARHQPGCKTLLSQFGVGELTAVTILAELGDARRFSSSRDAVRFAGLDITVHQSDQRRAPGHLSRQGPPALRWALFEASMCAARKCSPDYDYYSQAAERIGSNRARLSVARKILKRSYHLLRELGDEAIAPI

SEQ ID NO: 61452 - protein, 345 aa, unidentified
MEPMYYIGLDVHKRKISYWVKDSGGKVYAEGSLPATRIDLDLWMKTLPQPWSGAMEATMFTGWIYDHLKPHAAALKVAHPLMLRAIAAAKKKNDRIDANKICDCLRCDFLPECYMASTAVRERRRTLRYRNLLVRQMVQMKIKISSLLMEAGVSYNKQRLHKAGYFRELLATNPDIDEGLCSLLRLCRETVVRLQRTESALVRSLERDSLLMERVERLMTIPAVGPITALTWALEVGDVQRFSSIKKAISYCGLCGAEKSSANTVQRTPLSKQRNKHLQTTLIEAAKMAPRNSSELAMLYDKEKQKGNANRATLAVARKLVAYLMAVDRRQRDFQMVETSSDIAA

SEQ ID NO: 61453 - protein, 430 aa, unidentified
MKGGDLVKNFMSTLFVGIDVSSKINVLCALDFQGNKLLNLRALNNQPGAESILDSIITCLNSNSLKYVVIALESTSFYSTHIANFLSSNEELLFFKPLVYCLNPKSVANYRKSFVDMDKTDPLDAFVIADFARCGRITSEPWRGAQFLALQRLSRHRLHLVECVTREKAYMVSNIYLKFSELAVLDKDEQPFSNTYGVTSAAVLTEFLSLDDITYLSIEDLVAFVSAKGKNRFSDPYETAKLLQKAARDSYRLDKVLYEPLNTSIASSFNVIKAFDDEIKTIDKAITKAIKGINTTEYQSLISIPGIGPVLASGILAEIGTITSFDTHNALAKYAGLTWRVNQSGNYSADDTRMTKTGNKYLRYYLIEAANSVKNHVPEYKDFYLKKYSEVTTHQHKRALALTSRKLVRLIFGLLTKNQIYSSGKVGEVQ

SEQ ID NO: 61454 - protein, 414 aa, unidentified
MSNHTASWTYVGLDVHADTITVAVAEGSGRARGRGVGTIPNRPDSIRKAMKKLGEAKSLRVCYEAGPTGYALYWQLHKMGIACEVIAPTLVPVRAGDRIKTDKRDALKLAQTYRAGELTPIFVPDAEHEALRDLVRAREAAKKDQLRARHRLGKFLLRLGRRRDTQSQAWGQVHWRWLDSQVFDHTAQEETFQDYKNEVEHATERVARLDKALDRAVEQAPPRMQELVLALQSLRGVATLTAVTVVSEVGSFARFPSAQKFMAYLGLVPSEHSSGGSRHQGGITKTGNAHLRRVLGESAFCGRLRPRRSPSLKRRQQGQSQAIVDMAWEAQKRLYQKHGRMRIRAKSHQVTVTAMSRELAGFVWAVGRQRETEMNKEDLPVERLKEAGKHPHGKEQSSKHLCDRHGRAELAPLV

SEQ ID NO: 61455 - protein, 377 aa, unidentified
MKHDTENEMTIGIDLGDQHGHFCALDNTGEILEEGRLKTSKAAFEQRFKTASPMRIAIEASTHSPWVSSLLKEAGHEVIVANPRKLRMIFQSDCKNDRFDASQLARVARLDPKLLYPVEHRRHQARVDQEIIKVRDSMVRARTRLVNHVRSTIKSFGGRLVGCGPTTFGRRAARQVPRQLRSALIPILRMIEHHNASVKKFDRLIESMGREQYPETTILRQVNGVGAITALSFVLTLDDPTRFKNSRSVGAFLGLRPKQDQSGERNPELRITKAGNRDLRRLLVQCAQYMIGPFGTDSDLRRFGQAMAARGGKVAKRRAVVAVARKLSVLLHRLWVTGEVYEPLRTAKRSEAKRRVGTSKQVPVLDKDAALVSVTAD

SEQ ID NO: 61456 - protein, 343 aa, unidentified
MKLIRVGVDLAKNVFQVHGVGRKEKAVWRRRLTRENRVKALLETVEPGCEIGMESCGGAHHWARKLQEKGFTVKLIAPQFVNPYVKSNKNDANDAEAICEAMSRPGMRFVAVKSVEQQDIQAVHRIRSGLIEQRTAKANQIRGLVAEYGLIAPKQLSHLRVALPLWLEDGQNGLTDRFRRLLNALWGDLLALDARVKELDREIVLIAQSNPLAKRLEQLRGIGPISATALAAAVGDGTQFANGRQMAAALGLTPRQHSSGGKERLLGISKRGDAYLRTLLIHGARSVVRTTKGKTDRLSVWITRLAQRRHPNVAAVALANKTARMAWAMLKNGTDYEPNRLAV

SEQ ID NO: 61457 - protein, 336 aa, unidentified
MALYCGIDLHSNNHWLTVIDETDKRLLEKRLPNDLSATLKALAPYRKHLAAVAVESTFNWYWLVDGLMAQGLEVKLVNTAAVKQYEGLKYADDRHDAFWLAHLMRLDILPTGYIYPKEQRAVRDLLRRRMGLVHVASTHLISVQSAIWRHTGLTVSTNQIRKPDFVMPPIDPHAALGAQSALTLYRAVQREIDAIEATVLSQAQLAPEFAILQSMSGIGKILGMTVMFETGRIERFAGPGEYASYSRCVKSERSSNGKKKGEGNAKSGNKYLSWAFSEAAHFAVRYDPLAKRFYDRKRAQKNGIVAIRAVAHKLCRAAYFMLRDQVPFDAQRLFAH

SEQ ID NO: 61458 - protein, 400 aa, unidentified
MRTVFGIDVSKASSEVAILINGEKVHGYTIPNDAIGFNQPLGDLKTLHLPEIVFEATGVYSRRLQAFFEDNSYAYTRLNPLESKKQLDSLRVRKTDKIDAEKLATSQFILNRKPSYVQEALYQELRDLSHFYQNLTEDIVCAKNRLHKVLQITFPELENILSAPTGEQYWNLVMTFPCNSFVLESDDAALTAIIRQSTAKRISEKRVTYLVDKLTKLANQSYCAVKKTSPVIEEVKYYAGELLRLSEHRQVVLDDMVALAQPLPEYEILLSIPGIAETTATSIIGELGDIRQFHSANQINAFIVIDLRHYESGDFLAKEHITKRGNPYARKIFFKCIHNIASASHTNPCHIADFYEKRKRQSTIASTKPHAIASIHRLIRTMYYLITHNKLYDYSLTQNR

SEQ ID NO: 61459 - protein, 355 aa, unidentified
MTRTVYCGVDFHARMQTVAYCDSTDGEIHRAQLDHRKDDVRQFYTQFTGEVIVGLEAGGYSSWFEAMLEEIGHTVWMGHATEIRRRANWRQKNDRRDAELILEIMLRGDFPRIHRHTPESVEVLRMLRYRSRLVRMRTSIGNSLQAIAISCGLSEKSRMLGRARQKQLQTAHMSPALKHQTEDLITLLVPLNERIDRVDRWLKQKATTDYRVKLLMTHPGVGVLTGLAVVHTLEPFSRFTRQRAVAAYAGLEPMERSSAEKQRYLGISKAGSRLLRFLLCEAAQVAARFDDELKQFYERLAKRRGKPKATVAVGRKLLIRCWIMLRDNIEYGEFRSRGVEARLARNRSRPSVPAE

SEQ ID NO: 61460 - protein, 473 aa, unidentified
MSLERRALGKKAGMPQKKRNEFRLGSRTRIRVQEVIPVSKSRPYSLVSVKRVEVGVLAVDHRGQACVVGIDVAKLELIGVLRWPDGSFQRPWQIANPGEVGLLVEKLKELSILCPLTVAMESSGTYGDAVRQALGDAQIAVRRVSAKAVKDQAETFDGVPSQHDGKDAAIIADLCGRGKGKPWVMDQGDAVDQEIRYWVRQADWAQRVKQMWGGKVEALLARHWPEVTRLIPGSGATLCKALLYWGSPAALAADPRAAAKLRSFGGHYLADEKIAAIIASAKTTNGVRTNAWAIREIQELAGELTARRKQISDCKRHLRALTKNHKTILAQTPAVGLITACVLWMCLGDPRDYGSAAAYRKAMGLNLVERSSGQYKGQLRISKRGQRLTRKWMYFGALRWMRDAAVKRWTLPKKARDGGKGARAMVGVMRRLALAAWHVAVSGEEFDAGRLFPGAVKRPLDAVKARMMEASVK

SEQ ID NO: 61461 - protein, 403 aa, unidentified
MEGPLISLDVSKGKSNYRFFENGTDRKGKKGVIRHDIQGFDSIRDEAEKMEERLGIKPSVIFESTGVYSDVVEKYFTDKGFDVYVISPLLSASMRKEGVRPAKNDSLDTLSIAKVFYSKDDLRKCSGNDKKAERLREMSYELDMMNRRIRPMKCQFLRLLDKVWPCLDEVSDYSSRFMLDFIIAFGHPENIKTVKGVLSVIRKSEMGTAGRKDKIAQDLFDYCHTHLSAVSKDSSYVELLKRMAIELKAMAKKKSELIDRMAEEARNKDEFARLLTIPAVAKTTALKIMARVGDISRFRNAEALVAYCGLDPRVYQSGKMTGEHRTITKKGDCILRSTLFLAVKLMVMLYPDTKVARFVAAKAKNGLSYKQAVVAGSAKLARIIYSMLTHHENYVEFNADIVA

SEQ ID NO: 61462 - protein, 319 aa, unidentified
MLPHPTPFATHLVGIDVSKDWLDIAFDDTKVERVDNTPAALQRLARRLVKAGLTTAGLEPTGGYERLAVAVLREAGLTVLQVDSWRCRQFAKACGQRAKSDPLDARIIRAFMLHHPCRPFPEPSQAQSDLTAWVREITRAEADIRRLENRKAHPTLAAITARLDAEIAALRETVAAAEQAIEALIAADPAMDAKAKIITSVPGIANKTARVLLAEAPELGQFTPRQAGAIGGCAPYRNDSGKARRPAHIEAGRRALKRACYLAAFAAIHWNPWAKQLYADLKARGKPAKVALIAIARKLLTILNAMIRDNKPWRDPKTA

SEQ ID NO: 61463 - protein, 356 aa, unidentified
MKNSKLDFTGQTISVGIDTHKKNMVITPRCQGMQLRTISMDPEPEQLVRYLHKNYPNARYESVYEAGFSGYWMDRKLREAGIKNIIVNPADVPTKQKEKRKKTDKIDSRKLARELSAGNLEGIYIPSEEHEAIRALSRLRKQITKDQTRLKCRIKSLLNFVGITLPENSELKHWSGKFIKYLSEIEFKHKAMKITLERLLESLINGRQILLGIVKNLREIVKENAEMKKITGYLQSVPGIGFITAITLYTEIMEIKRFGKFDELSSYVGFSPSTDSSGEKDKVIGLSKQQNKYLRNMLIESSWLAIRKDPALLQAYGSLVRRMSKQKAIIRIAKKLLSRIMYVWRNEKHYVCAVVS

SEQ ID NO: 61464 - protein, 387 aa, unidentified
MVGTMLLEEEDGSINQETRNFGTFKRDRREMCDWLKSHDVELVVMESTGIYWKSIYTSLEKAEIVTYVVNARHVKNVPGRKTDVSDSQWLAALARMGLLKSSFIPINDLRELRIISRQRMKLNGTLASEKNRLSKVLDDAGIRLGGVVTDIDGVSAREIIDGIILGTPVEEMMNFVRGRLKSKTDDLKACLDEELSPRHIFLLKKLQNHIQFLKSEIEAFDTYLFAAMSPYQKQWEILQTVPGVDKVAAAILIIEIGIDMERFGSSEQLSSWAGMCPGNNESAGKRKSGKTRKGNQAIRSILCEIANAARRTKCQFKGKYESLVIRRGHKRTIIALGHKMLRVIFVMLKNIKPYFDPDINYEELMVGRNAPRWLQALKKFGYLPQTA

SEQ ID NO: 61465 - protein, 455 aa, unidentified
MNRQGFLGIDVSKGYADFMLMDNSKSVIEQSFRLNDTRKDHKQLGELIEGWLASGLETIFCGVESTGGYENNWYHYLQGLGQSKAVKVTRLNAKGVKGISDAALKRTITDQVSAENIATYLVCFPEKVSYSGNLKEHDSFFKDGRSYYNFIQMLQKQKVQISNQLEKLLYEHFNEMLIYCRHGLPVWLLKMLSKYPSATRVKKAGVANLQKIKGISAGKAASILKKTEDSIRQSSDTISHAIASMAEEILYKEEQLQGHKYKLSKGFADNEDVKLLQSMDGIAIDSAVALMIEIERVDRFVMCKKLCSFFGTHPTFKQSGDGTWGSHMSKKGRPAVRKILYMSALTAIRRNPSLKQLYARNRSKGFNHYQAIGVVMHKMLRIIYGILRNKTPYNIETDNLNKQKSQEKEQQKKEIEKQQKKQNKRDLFRFQSPSLDAPISRRSADKIKKQMTSQT

SEQ ID NO: 61466 - protein, 348 aa, unidentified
MLADELDYVLGVDTHRDEHVIAVVTAPTGAVVAGASAPTNVRGYRELVRVAQQHAPGRRAWAIEGTGSFGAGLCRYLQARGETVLEISRIPRGERRLRGKDDALDATRSARAALASDTLALPRRGERREALRLLLVARRSAVDVRREALTQLRAVIVTSAEPLRQELRRLPEGKLLDRCSRFRQTSKASPGELATRIVLRSLARRIQAATEEAKQLEREILTHVRALAPVLLDEPGVGPIVAAQLIVAWSHPGRLRSEACFARLAGVAPVPASSGQTTRHRLSRGGDRQLNRALHTIVLHRRQHDPATRNYITRRLAEGKSRRDATRLLKRYLARHLYRLLQQEPAMA

SEQ ID NO: 61467 - protein, 483 aa, unidentified
MKSKSEEQNKRATSHPTQHHWHEMNRKQRREMMRKMQTEDLSLEVIHPDAAGIDIGNESHYVAVPPGRDSQSVREFGCTTAELKAMAAWLKQCRIRTVAMQSTGVYWVAVYDILEQAGLEVYLVNARDTKNLPGRKSDVQESQWLMKLHTYGLLRNSFRPSQEIRVMRTYWRQRNDLVQSAGRHILRMQKALTQMNLQLANVLTDISGATGQAIIKTILAGERNPHKLAEFRDPRVKASEEQIAQSLEGNWQEDLLFVLKQEHEGYQFCQKQMAECDRQLEQYLQQREDRSHGAPLPEEKRKGRLKKKRANKPQFDLREGLFRMTGTDLTRMDGIDVMTATTVISEAGYDMSKWENENHFVSWLRLCPDNRISGNKIIGKGRLPTNNPISIALKLAASTLRESKTYLGAQFRRLRTRLGAPIAIKAMAAKLARLVYRMLRYGMKYVDQGAAFYELRHRELQIKRLKAKAEKLGYRVTPIPAAA

SEQ ID NO: 61468 - protein, 358 aa, unidentified
MVDKDTEAAVVGGVDTHKDLHVAAVVDQNNKVLGTQYFSTTRQGYRQMLAWMTSFGTLKRIGVECTGTYGSGLLRYFQNAGLEVLEVTAPDRMERRKRGKSDTIDAECAAHAAFSGIRTVTPKTRDGMIESLRVLKTCRKTAISARRVALQIIHSNIISAPDELREQLRNMTRMQLIRTLGSWRPDASEYRNVTNVYRISLKSLARRYLELHDEIADLDVMIAAIVDELAPELIKRNAIGYESASQLLITAGDNPQRLRSESGFAALCGVSPVPVSSGKTNRYRLNRGGDRAANSALHIIAIGRLRTDAKTKEYVARRVAEGHTKMEAIRCLKRYISREVYTLLRNQNRRINSIPITA

SEQ ID NO: 61469 - protein, 339 aa, unidentified
MQITVVGLDIAKHVFQAHAADADGRAVAQVKLRRAQVLDYFRGLPPCLVGLEACATAHHWARELIALGHTVRLMPPAYVKAYVKRNKTDAADAEAIAEALTRPTMRFVPVKSVDQQSMLMLHRVRELLVRQRTMLATALRAHLAEFGIIAPQGIHRIQKLAAQVHDPAVPPPAREALKLLVAQLASTWRQIDEIEKKLVALHRTEAVSRRLASIPGVGPITAMAIASTVPDPTMFRSGREFAAWLGLTPKSHSSGGKDKLGRISKRGDRYIRHLLYIGAGNAIRFAKARAATGEAWIRALQARRPPKVVIIALANKMARIAWALMMRGESFRSPAAAAG

SEQ ID NO: 61470 - protein, 350 aa, unidentified
MKILALDLGKDKSVGCEFTSETGEHTFVTIRTCPSEVAQLFEQIRPDRVVIEIGPLAGWVADIVRSMSIELQVANPNHEAWRWRKVKAKTDRLDAHKLARLSAMNQLPLVHVPPIGERQWRSMIAYRQALVARRTDIKNRIRAILEMQGLKSLRDGKSAWSDQSLAALRLVAQPLTQVELQDVWKGILWTELQELEAVGQHITAVEAKLDSIGEVNERVRRLQKIPGVGKRMAETVVAFIGDPHRFKNGKQVGCYVGLTPRPLDSGKKKRSGGISGEGNRHLRSMLIEVSWLGLHWNPWMREVYERIHRGSKARKKIAIVAVARRLLVRCWAMLRDGTDWRQPEPTAQAA

SEQ ID NO: 61471 - protein, 424 aa, unidentified
MKVTYQTCCGVDVHKSFLVATSVKTTGGIEPSYQKKRFSTFNSSILEFKQWLLDNDCHDVCMESTGKYWVPVFNLLEDEINVVIANPKWVKAVKGNKDDTKDSKWIGDLFRLGLVKGSYIPCKIVRILREYTRYRYKLVSCRSSEKNRYQNTLTVCNVALDSVVSDIFGKSSMSIIDYLLEQSGTSINHEEIASKLLRSLKSKEDAVIESVEGYQMTDAQKYRVRLVRAHMDYTTAEINDVDKMIENMIFSNPDFENAVQFLCTIPGVKRDSAITIISEIGTDMSQFGGSKRLCCWAGLTPGSNESAGKKKSVRITRAGVYLKPALVQCAHAAVKSDKSPYYKKKYESLVKRRGKKRAIIAIARMILTAIYQMLSTGEQWNPSDLYKIDMPVALVEKQKAKAIKQAKKLLQREGILPPDEPLAS

SEQ ID NO: 61472 - protein, 342 aa, unidentified
MQIAVLGIDLGKNSCSVVGLDTSGRVVLRRRLQRDGVVKLAAGLPSCLMAMEACCGAHHLGRKLRDQGHQVRLMSPEYVRPYVKAQKNDDRDAEAIAEAATRPTMRFVELKSEEQLDMQSLHRARDRLVGERTALINQLRAFLLERGITVPQGRRKLELSLETLLAADQALVSPRTRLLIKDLRAEWCELDRRIQAFDEEFAHQARTDETARLLSTIPGIGPLNATALAAAIGRAETFERGRDLAAWLGLVPKQMTTGGKPKLLGISKRGNVYLRKMLIHGARAVLPTLSKSETRLGEWLRGLLARAHVNTVIVALAAKLARIVCAVLRSGQQFEIKATAMS

SEQ ID NO: 61473 - protein, 462 aa, unidentified
MSKNTPETQSLSIKNAIAPPIPKHLEHINVWSAGIDIGATSHFVAVPEGCDEKPVREFKTFTTGLNELTEWLKQCGIKTVAMESTGVYWIPVYELLEEKGFEVKLVDARQVKNVSGRKTDVLDCQWIQQLHTYGLLNGAFRPDDEVCELRAYIRQRSMLVKSASRHIQQMQKALTQMNLQLHHVISDITGDTGMTIIRAINKGERDPVVLVEHRDRRCKSSIDDIKAALTGNYRAEHLFCLKQSLELYDLFQEKIQACDNEIELKMAKFATDSRVVDVPASELNPSKKKASKNAPDFNLGREMHRLTGVDLLAVPGINTVTAMQLMGEIGLDMTRWNNAKQFASWLGLCPGNKVSGGKRLSGKTKPSNNRAAATLRMAASTLYRSPTAIGAYLRRLKAHKGPMKAITATAHKLAKIIYNMLRHGTEYMEAGQQYYEEQYRDRSIRNLKKRAAEFGLNLVEMI

SEQ ID NO: 61474 - protein, 480 aa, unidentified
MNIKAKKAKVQPLSKKSVINVLSQDEIKKKVQVIEQELKASTWRELETKGKFEKNDKLSFISEEMLIVGCDIGSETHYIRAIDTRGRELSKGAFEFSNSSEGFASAKAWVLKLAAKNDKKQIVLGLEPTGHYWFAIAAWMVSNGISVVQVNPYAVKQSKEIEDNSQLKDDRKDPKIIANLVKDGNYGMPYLPEDIYADMRRLSMFRDQLTEDRIRNINRLHREMKIYFPEYMDAFGKIDGAFTLEILKVAPIPSDIVELDEEGLKSLWHEAKLRGRGYSRARVIVDYAKKSVGLTGGTDAGRESIKWFVEQIIQLDEQLAEIENVLYQKCMEIPHSENILEINGVGENILAGILAEMGDISRFDDVKEIQKLSGMGLVACSSGKHKGQTKISHKGRKRLRYWLFQATKSAVAHAVEFKQLHAYYTTRSMNPLKKMQSLVVIACKILRVIYTILNTGMKYDPERMLRDIRYPQCNTVQAAA

SEQ ID NO: 61475 - protein, 341 aa, unidentified
MYPFYLGIDLHLKRTYVVLMDAEGEVIDERRLPNVEMAGYLEQHVPQETYAVLEATRNWPFMYDLLTEHVERVELAHPKEVKAIANAAVKTDRIDAGVLAHLARMNYLPTAYAAPKEVRDLRLYTRHRSWLIGHRTQAKNRLQAVLASYNLVSPVSDLFGVKGREFLNEIIGELRPAAQRVITDNLTLIDRLDEQIKELEQETPLTEEQAHNVQLLMSMPGVGKVTALTILAEIGHISRFRSSKALCNWAGLTPRVRKSDAIVRHGKISKQGSAYLRSAMGQAAMVASRFSPRWYRVYERLAKRCGKRCARVAVARRLLTVIYYMLKRNQPYQEDYHRRGA

SEQ ID NO: 61476 - protein, 446 aa, unidentified
MTTRTVGIDLAIRGLHVAHVLDGDGQSLGSPIRFRAEVKDLEQLVARVRAGLGPSDVVQVVMEPTGMSWFPVALWLQKAGCVIIRVKGKRVKALRRYLSEHVKSDLSDADLLGRIPRFGQHGLVPQHIPSAAQHALGRLTKQRRRYTEEICSIRRRVRDLIRWAHPSLEHALPELSTQVSRAILLHYLNPRKMTRLGAGRLAAFIRANVGGNHPVHGDFAENVALRLIAAARETSQLYRDDEVDYDLLQLEISQEIQRWEGLREHIKALDEQIERLYRDLDPSAHLRSIPGIGPLLGPSLLGVVHDWTRFGSQRRLRGFCGLFPKRNESGGVTRPGQKIGKGGSNRAKRDLILAADVARTVDPGLAQVYYRMMVDKGKHHRQALCAVATRLVNRIHMVLKQGRPYELRDLDGRPITVAEAKALIESHFTVPRELRQARTRCRRATG

SEQ ID NO: 61477 - protein, 387 aa, unidentified
MQKPHDNSKVCRAAFVQDSTLVVVIEMSLTSWLVAGMIPGVDREPLKKIAPNPEELLQLLYRWRDEAIKAGKEITRIAVAYETGRDSFWLARWLRARGIDAHVIHATSVAISREHRRAKTDRIDTAMLRRGFLGWLRGEPGHCSLAIVPTVAEEDAKRPHRERESLVQERTSTVNRMKSILIQFGVRNFNPVLRKASERLDAVRTPEGIPLPPNAAAALRRHMERLRVIKEQIKAIERTRLQRLQRDPADKMNAMVFLLVRIIGFGVETAEQLVHEILFRDLRDRKAVARYAGLTGSPDESGSKRREKGLSRSGNGRVRTILIQLSWRLLKLQPGSELVLWYQKRTADAKGSRKPMIVAFARKLIIALWRYVNTGLLPEGFELKPAA

SEQ ID NO: 61478 - protein, 344 aa, unidentified
MMTHFVGLDVSQKMTAICVVDNAGRRLWRGQCPTTPEQIAAMVRRHAGDDSRIGIETGAMTPWLVHELRALGLEVICLDARHARAALKMQINKTDQNDAEGLAQIVRTGWFRSVHVKSFDSHRARELLGARAQLVGMTTRLSNHIRGVLKTFGLLPGAMRGLRFDRKVEVLLEDRSDVAPIVRPMLAAWRQLREQISAFDKAIRVLVRSNSPCRLLMSVPGIGVLSALAYVSTVEDPARFSQSRSVGAHLGLTPRQYQSGDVDRSGRISKCGDTLARTLLYEAAVVIMTRVKKASELKDWALAIAKRSGIGKARVALARKLSVILHSVWRSGKPFRWAEAAITA

SEQ ID NO: 61479 - protein, 411 aa, unidentified
MEVLVERCAGLDVHMRSVSACVRTPGPGRSRRSEVRTFLTFDASLGELAGWLLDEGVTAVAMEATGVYWKPVWDVLEDVGLDVKLVNPQHIKAVPGRKTDVRDAQWIAQLLECGLLNASFVPPREIRELRDLTRYRRRLVESRARETMRLAKLLEGAHVKLSSVVSDLTGVTSRLILAALCDGERDPEVLAELAQRKLRRKIPELRQAVPGRFNEHYAFMVREVLVQIDELDAAIHRIDQRVEEVVAPFAWARDLLSTIPGIKTRNAEIIIAEIGVDMTRFPTPEHLASWAGVCPGNRQSGGRQRSGATRQGNPWLQSALIEAAWSASRTRNCSMQTRFWRIARRRGVNKAAMAVAHHVLIVVWHLLAERATYHELGPDYLARYDDPTRRQRHLVHQLEQLGLHVTVEPAA

SEQ ID NO: 61480 - protein, 405 aa, unidentified
MKAYIGIDLGTRSVAAFCPADQQKASRSTFSFETSISDFQRLLGWVKERGITNPVFIMEASGIYWVALYAWLLLQRLDVALIRPTAPRHYAQLQNKRTKNDSVDARTIAEYGANQKVQGETNRLDCFESREAARYLSTLVADLAKLKNRLHRHFAVVFPEYRKIFKNPAATVALALFEAYPTPAAIVAAGAKKLAKLKVGLRRLGPKRSEKLLKLAETSVGSAATRPFHTIKLQSLIRSCRQLQAEKAKMEAWIEANINPKAFESLTSFPGCAMSTATRIAAEIGDPKRFPSADKVVAFAGITPRERQTGDAGKKKAEGREPSWKMSKQGNRNLRLAIYQVTLVAIQRDPRLKAYYEKKVQGDGTRPGKKRKVALGHCMRKVLVILWTIWRKEEKYQADKLATAA

SEQ ID NO: 61481 - protein, 389 aa, unidentified
MYYVGLDVHAKRSSMCILDANGKLVKRLEVKGAWPRLLEVVDQQVPKPFTICYEASCGYGYLYDQLAKRAERVSVGHPGQIRLIFRSKKKHDRVDAGKLAKLLYLDEVPVVHVPGVDVRAWRGLINYRRKLVARRAAVKTQVRALLRGLGVVVGVKGGLWTKRGIKWLTTELALASAADRVRRDVLGDDLAHLEAKVATVEKELDRIARGHPGVTLLRTIPGVGPRTAEAFVAHVDDVSRFARVKQVGSYFGLVPCQDASADRNRLGHITKDGPAQARWLVAEAAWQGRRRSPKIRGYFDRVMRGDPQRKKIALVATAHHLTRVMAAMLRSGEVWRDEAADETAPQAPQAPQAPQAPQAPQAPQALATQDKPAAAAAKTKKKTKTADKE

SEQ ID NO: 61482 - protein, 328 aa, unidentified
MKLQHIIGTDLSKESIDLSSHELQTHLRIENSFNGFRQMLKWLRDQKISYSNVMIVMEHTGLYSYHMEAFLHEHQISFTKVSALAIKRSLGLVRGKNDKIDAQRIARYGFEKKDVLVVAGKPNKVIQRLGMLHSTRDRLVKHRASLICAIKEYKSILKQSDLIIKSQLSLVKSFTEQIKKIEAEISELITKEQPVNQNFQLLKTIKGVGEVVATAAIIKTRNFTRFSNARKFACYCGTAPFEHSSGKSIRRKTRISHLADKEMKTLLDQSAKSAIQYDKELKSFYQRRIAIGKSKKSTINIVRNKILTRMFAVIKRQTPFIENYLQTA

SEQ ID NO: 61483 - protein, 363 aa, unidentified
MMKQNIIFGIDVSSKSSTVCVVIDRIKQGETFKITNDSFGYQDLLDRLNQYLITPLVVFEATGVYSLSLQAFLEDYHIKYLKLNPLKAKKLMDNNLRHNKTDKVDAYRLALIQFNAPQKLRAPQPKEYHELQNASRYYEELTQALIINKNQLHRNLQSTFPQIESILSTSSGRVYWTIVSLFPHAQYVLNHNENQVFQSLLAISGIGRQRAHYLTTRLYALARQAYPYDNESSITIRAIQRNIANLLSLSAERDNVINYMEKLAMQANARSLNIYESIPGIAKTTAVRLVAELGDLSRFDTSAQIDAFVGIDPGRYQSGEKDSHLGITKHGNHLARKILYRTITQMETVKATQPCHITVSVQN

SEQ ID NO: 61484 - protein, 346 aa, unidentified
MMIIGCDFHPSWQQVCWLDTETGDTGERKLVHADGDAERFYRSVSEPALIGMEATGNSHWFVDLLAEMGHELWVGDAAQIRASYVRQQKTDKRDAAHILKLLAEGRFPRIWMPSSEVRDLRQLLLHRYKLVIIRTRVKNELQHLCLNQGVQRKRKLWSEAGQKLLRELPLRPWAARRREDLLRLMAMLEQQIDPLDAAVKAEAQRDKMALLLQTQPGVGPVTSLAYVLTMGDVSHFPRGKQVASYLGLIPREHSSGGRQKLGSITKQGNRMLRMLLVEAAQTTVRLDPGFRKQYLHRCHQKPKAVAKVAAARKLAVRLYWMLRTQTKYPEIVRIESSPGLALVGES

SEQ ID NO: 61485 - protein, 420 aa, unidentified
MKYARVPRPDAPPGALSAGIDWASADHAVCIVDAAGAVVSRFSVAHTAEGLKTLVSRLARAGSAEVAIERGDGPVVDALLAAGVTVVVITPRQIKNLRSRYGSAGNKDDRFDAYVLADVLRTDRARLRPLIPDTPATVTLRQACRARKDLVRHRVAVGNQLRAHLLCAFPAAAGLFCKLHSAISLAFLARFDCQDRADWLSDKRLAAWLKAASYSGRTGPAGLYQRLTSAPRGATGEAGAASAQVTRALTAVLASLNTQIKALDAQIAAQLASHADGHIFTSLPRSGTVRAARLLTEIGDCRARFPDPQALICLAGAAPSTRQSGKHKAVTFRWAVSKQLRDAVCDFADGSRHASPWAAQIYNDAIARGKDHPHAVRILARAWLYVIWECWHNGTAYDPARHRGLQRLLAAQDTGADQAA

SEQ ID NO: 61486 - protein, 344 aa, unidentified
MDHFAGLDVSVKETSVCIVDETGKIVREVKVASEPEALLAVLKNSSYHFKRIGLEAGPLSQWLFSALAEAELPVVCVETRHMQAVLKAQINKTDRNDARGIAQMMRVGLYRPVHVKTVRSQRLRMLLTHRKLLLSKAIDIENDLRGTLRNFGLKVGMVRTVKFEARIKELVENLPDLAGLVEPLLVVRRVLREQIEILHRRLLTIVRDDEVCQRLMTVPGVGPVVALTYRATVDVPARFRKSKSVGAVFGLTCSKYQSGEIDRSGRISRCGDEMMRVMLYEAAQVMLTRTNKWSWLKAWAMKIARHRGMKKAIVALARRLAVILHRIWVDGTEFRWIREQAVAA

SEQ ID NO: 61487 - protein, 417 aa, unidentified
MARRLRLEPEDIIVGLDLAGEQHQAAICRMEGERLTRFRVPHSLVGFDDLLMRARLLASQSSGRRVFAFEATGHVWEALAHYLEARGEEYVIVNPLATFRLREARQMNRHKTDISDAEQIAELVRNDLVTETKLEAGPYLELRRSWGEYARLREERARLKTLLSHQLYGVFPELRSVWTDLLAPGCLAVLRLGLTPQEIGAMPVNDFIRRAKAASRGRRLWRFKLMAVHERAQRTVVPAAALGPLARELARLAERVDLLSDQIDALALEIQKVLAVVKESRYLLSIPGLAWSSAAGILAHVGSIDKYRHGRQLIKLAGTNPSRHDTGQRIGRKQGMTHRGRSGLRQVLYMATLSCLQHNPRIRAHFDRLIQRPDRPLARMQAFGACMNKLLLYAFAVMKRRETFDAEHAWKGAALVA

SEQ ID NO: 61488 - protein, 333 aa, unidentified
MKKQVFWGIDISKSVLDVCIEKDGKELLNFQVENSPSKIRMAFSHHMAQQQVHWEECVFCMENTGIYGAHLLSYLCKNADRVYVVNPLHLKKSMGLVRGKNDRIDARRIAHFIAKNHKDLRPHQMPDEIIEQMRMLMSKRKQYKRILQGLHQSTAELKIFGNKKMASMLAKAERQMIKNLENAIKKTESQITAMITTNAELSELRKRICSVPGVGPVLSAALIVATNGFKRLNRARQLACYAGVAPFEYSSGSSIYRRPKLSVMADKTLKKLLHLAAMSVIRLPGELREYFLRKVAQGKNKMLVLNAIRNKIILRVCAVIKNGKNYSPPLLLS

SEQ ID NO: 61489 - protein, 344 aa, unidentified
MSEVSIIGLDISKHVFHAHGVDGRGRAVFSKRIRRGRLLDFFAAQPSCTVALEACGGAHHWARQLAQLGHEVRLIPPAYVKPFVKRQKNDAIDAEAICEAAQRPSMRFVAVKSEEQQAAGLVFRTRDLLVRQRTQLINAIRGHLTEYGWVAPKGPSHVAMLADLIDEGEMADSLPGAARVMFRVMLDLLTGLSSKIADLDKEIARRAREDEVSRRLMTVPGIGPISATAIAALAPPAESFAKGRDFAAWLGLTPLQRSTGGKQKLGAISKMGERTLRRLLIIGSSAVVKQASKRGAPRGSWLEQMLARKPRMLVTVALANKMARIVWALLVKQETYRAPVAAGA

SEQ ID NO: 61490 - protein, 344 aa, unidentified
MEYYAGLDVSLRSCAVCIVDTKGKVVLERELACEVTDISDWLRKFAHPIERVGFEAGTMSQHLFFGLQAEGFDVVCMEARQVNAALSAMRNKTDKNDARGIAQILRTGWFSPVHMKSREAHGLRALLSSRKALLNKTIDLSNEVRGLLKIFGLRLPKTVSHGSFDDIVRPMIQMDDVLIHALIPLLDARVALYQHYLELDRRVKRAASHDEVCMRLMTVPGVGPICALTFKAAVDDPSRFKCSRTVAAHFGLTPRRYQSGESDNPGRISRAGDRDVRSTLYSAANAMLMRTMAASQLKSWGMRLMRTKGRRRAVVAVARKLAVLLHRMWIESTEFRLEGVEGIK

SEQ ID NO: 61491 - protein, 396 aa, unidentified
MYFLGIDIGKNNHVASLIGEDGRPVFRAFSFSNTTEGGESLLAKLSSHGVGSGELAVGLEATGHYWLAVYSFLRDKGYKLHVINPIQTDGWRKGVEIRKRKTDVIDSLLIAELVRYGDFIEARLPQEAILSLRNLTRFRSYLVDSISDLKRKVICVLDQVFPEYQSMFSNVFGTTSKEILLQFSSPAELESVSADTLAELLAGLSRKKLGMGKAEELGRAASTSFGVTFCRDSFTFQLRLLIEQIKYIESQVKDTEAEIKRIMGTLCSPITTVPGVGKTLGAVTLGEIGDINKFDHASKLVAFAGIDASVNQSGEFEGSRNRMSKRGSPYLRRALYLASVVAVTGKNPDPVLQSFYQKKMAEGKHHSTCIGAVSRKLCYVIYSVLKENRPFEVRTM

SEQ ID NO: 61492 - protein, 409 aa, unidentified
MKMAGIDVHKKVLMVVVVDTSALQEKPARRRFVTLPSELQRFRIWLQEQGVEEAVMESTAQYWRSVWLELEPHMHLHLAQAFSNRAPRGRKHDFKDAERLVRRLIADELILSFVPNGEQRIWRSLTRMKVQLTRDRVRLQNQMECLLEEMRIKLSIVVSNLLGASGLRILHALAQGETDPKKLAELGDERLHCTEEQLVDALTGRVQPMHRGMLALQLQRLQLIDQQMAQLNHMIAQAMKSHQDAVIRLAEVPGLGVDSAQQIIAEVGAQASTFSSAAELAAWVGTCPGKEESAEQNQSSRSAKGNKYLRRVLNQAAHAAVAKKGCHFQVVFRRLMPRLGYKSAIWAVAHRLCRVVWKILHEGVRFIEQGREVGPREKKQRAQLLARALRKLGYEVTITPINQLAPKPA

SEQ ID NO: 61493 - protein, 364 aa, unidentified
MNKCHLNTELSSHEGTRCQFNGGTGAIKLGIDVHRDFYVVVVQEGGSNPKPPQRFRKEAFLHWATKLKSRATEVHAVYEACGFGFSLQRQLSALSIHCYVVCPQKLDEHNKRVKTDGLDAKALVLKLDRFVQGNRAALAMVRVPSKEEEQKRAIHRQREQLVKTRMQLEAQGRTLMVNHGIEPVKNWWKGRTFAALQLPAWMKELLGNSQPILLALQEKISALTLQLQVAAASKQARGLGAMTSVIIDREIGDWNRFSNRRQIASYTGLCPGEYSSGNSRLQSCVTKHGNPRLRAALVELAWRLVRFQPSYKPILKWRRLLAKGALATGAARKKAVVAVARQLAVDLWRVRTGRCKPEALGLVI

SEQ ID NO: 61494 - protein, 424 aa, unidentified
MKNTAAKKRKQVPEGYLVVGIDPHKKRHAAVAITQDFTTQAKFKVDNTREGLETMLDRARAEMVKSCCRGVIFAIETGGHYWRNIAYYLDERGIPFRFINQYTLKRRREGKDLNRRKNDYRDSEVAAQLLCTGEFVESVIPQGVYAELRTSHNAYQRLVKEKTRITNLVKGLLDMLFPEFTQIFKDPCGLTALSVLSTCPIPGVIAGMMEDEFVATIETHHKGRRLMRKKLRALHHSARRSIGIHAGACSASFEVGFLVDKLELIRQQIRIMEGMLVKLVDETEEGKYLLSIRGLNYIAVSGLLAELGCFKLYRSAKQMIKMAGSNPTESESAGKRRLKTPMSKQGRPLLRYCAWTAVIPMLRFNPDFYAWAKQRRERPAHANPLNGREIVGAALNRLLRLAFALVKNQTYYQDTRLALIPVAV

SEQ ID NO: 61495 - protein, 412 aa, unidentified
MKDLLEISCGLDIHKEKIVACILTGPLGKPTHSEIREFTTLIPDMLALRDWIISENCHHIAMESTGIYWIPIYEILEDTFSGDITLLVVNARHMKNVPGKKTDMRDSEWISTLLRAGLLNASFIPEKRIREFRDLNRYRKSIIRDITSQKNRVEKFLQSSGFRLSSFISDIFGASGRNIILHLMEHGQIDKISLDSYLKTKTRKRIDEILMSVNGTLSEHQKSFLKILMCHYDSMKEHLIEIETHLQEDMLPFALQIEQLNTIYGISTTASCAIIAEIGTDMKPFKTAEHICSWAGLCPGNNESAGKRKSTSITKGNPYIKSMLCEIAWVIAGKRNTYLSAWYWRIKQKKGARKAIVALARKLLVIIYTMLKQGTNFDENCFEVRRKNCEQKQLSRYIRELEKHGYTVEAQV

SEQ ID NO: 61496 - protein, 339 aa, unidentified
MKLYSAIDLHSSNNQLAIINENMERVFNKKLPNDMPLILGALKPYQEAITGIVVESTYNWYWLVDALTEAGYPVHLANPAAIQRYSGLKYADDTHDAFWLAKLLKLGILPEGYIYPQHTRPLRDLLRKRSHLVRLRTSLVISLQNIITRSCGTTVRSNAIKKLTRDDVSIHLPNHEDLMLSGAVSKETIDFMTRQITRIESCIVQKVHLSEPYTNLLTIPGVGKILALTIMLETGPISRFAKVGNYVSYCRKVASTWLSNEKVKGAGNKKNGNKYLAWAFSEAATYARRYHSASRNFYNRKRSHSNGMIAHNALAHKLARAAYYIMRANVAFMEAKLYT

SEQ ID NO: 61497 - protein, 349 aa, unidentified
MNTTVPPLASIGIDIGKEVFHLVGFGTDGKIAFRRKIRRLALVETFKKLPQSIIGLEACLSAHFVSRALRRLGHEPRIIPAIYVKPFVKGQKNDYNDAEAIAEAALRPNLRAVREKSQDQLDLQACHRVRSRLVSRRTATINQIRAFLIEQGIAVRAGSRALRNSLFEILKNREDEMSPRMSDLIVGLYEDWLWLDERIETITKEIEEISQREGNCVRLMSVPGVGPLISTAVVAAIGTGEAFDRGRDFGAWLGLVPRQYSTGGRSILGGISKRGSRYLRTLFIQAAKVLLMRPQNWRKFSFGAWLTNAAPRMHRNKLATALANKLARIAWSVLNTGKAFDTHLQLEAI

SEQ ID NO: 61498 - protein, 304 aa, unidentified
MNGIGIDVSKRQLDIGTTDGETLQVGNNRSGFSELDVWLKKRPTRQIVLEATGGYEQPVLDFLHKAGHPVVRANALRARKLAQGLGQIAKTDRLDAYALAQMAALVKLPPYQPLQSWQQKMREFVRARRQAMDALTIARQQQEMVLDRELRRLLQGNITRLQTLVERLGKQIVEQVGQQPQLKMLKSMKGVGPVLQAVLASYLPELGRITGKRIASLVGVAPMSHDSGTMRGKRSIHGGRAEIRQVLYMAAMSAMRHEPRLRDFYQSLRARGKEGKVAIVAVMRKMLVILNARVRDAESELVPA

SEQ ID NO: 61499 - protein, 416 aa, unidentified
MNAAGIDVSSRKSTVAVLRPFGEVVKLPFDIVHSAEGFASLIRQLKSIEGETRIVMEHTGRYHEPVAQILHEAGFYVSAVNPLLIREYGGNSLRRVKTDKADAMKIARYALDNWGELRDYTPMDTIRYDLKTLNRQFQLASKQKTAASNNLIALLEQSFPGVRKCFDSPVRKDGTQKWVDFIYTFWHADCVRKQSLNAFTERYRKWCKRHGYFFKQSNAAEVYDLAKSVITLVPKGPVAKVLVQEAASQLTSISRSVETYRAEMNRLASMLPEYPVVMGLYGVGESFGPQLMAEIGDVRRFERKQALVAFAGIDPMPNQSGEKNVRSNKSSKRGSPYLRKTLFSIMMCLLQTAPVDEPVFQFLDRKRSEGKPYYVYMTAGANKFLRRYYAKVRDYLATLDGLPPADMDSTGLPQTR

SEQ ID NO: 61500 - protein, 383 aa, unidentified
MRHGGILIEANDSEGEAMKKHTTNNQSLSADVSACSTVAVDLAKRVFQVAGEDALGMVIFEERIKSREAFQVFLRELPPSVTVLVETGPGAQAWARLLQMQGNCVRILPAQLVASHRSGSKNDRNDALAILRAGRDCKISAVPIKSAAALAMQALHRARQGYVRRRTAVGNQMRGLLLEHGVAMAQGEVAISQLVPRILEDATQPLPDLLRELIAELLGEWGHLGDRVNVLTGRLEAAAKEDETAKRLMTVRGVGPIIATALIAKQTEPERFANARLFAAYFGLVPSQHSSGEKTRLGKMSKQGDAYLRSLTIQGAHAVLRQIRPDSEQPDDKRLQRWINRLGRKEAAVRLANRNLRILWVLLQNDQIYRRQPGNGQEATMSH

SEQ ID NO: 61501 - protein, 343 aa, unidentified
MTRFVGLDVSQKMTVICVVDDAGRRLWRGQCPTVSEQITVLVRRHAGDDARIGIETGAMTPWLVHELRNLGLEVVCLDARHARAALKMQINKTDQNDAEGLAQIVRTGWYRSVHVKSFESHRARALLGARIQLIGMTTRLSNHIRGVLKTFGLLPGAIRGLPFDRKVVALLLDRSDVALIVRPMLVAWRQLREQIAVFDKAIRALVKSNSACRLLMSVPGIGVLSALAYVSTVENPARFVRSRSVGAHLGLTPRQYQSGEVDRSGRISRCGDTLARTLLYEAAVVILSRVKRASSLKDWARAIAKRSGNGKARVALARKLSVILHSVWRSGQPFRWSEHASAA

SEQ ID NO: 61502 - protein, 311 aa, unidentified
MRITIGIDISKDTLDAYQLPDNQHIQVANDKTGHKTLSRWIGAYNQPLVVFEATGAYHRNLEAALTASDTAFAKVNPLQARRFAEATGRLAKTDRVDATGLAKMGAVLELKGHKPRSEALLILRELITARRALVKDKVAAKTRLQTITQNLLKNQINARLKQIDIQIRQVDVAIAQKVAQDEALSQKLGILISIPGIAEATAFSMLIEMPELGTLEGKQAASLAGLAPISRQSGKWQGKERIQGGRTFLRRAIYMPALVATRYNPDLKAKYDQLIGAGKPGKVAITAIMRKLLITANALLRDGRKWSAIRP

SEQ ID NO: 61503 - protein, 327 aa, unidentified
MRQHKSLTERVKTTVAFDVCKAVLDVHVRADGKTLSVPNTHGGLDLIALQLADYEVSLILMESTGGYEDVAACHFQSLGYDVAVINPRHARNFARAMGKAAKTDRIDAAILADFAAVIDSRPDRERYIKSVTDEERKCLSRMVARRRQVVDLITTEKQRLSHADDYARGSINDVIHFLKSQLKEINKDISRHTKKNFSGLSKLLSEIPGIGDQSVGILIGDVPELGQVSNRQLSAVIGVAPFNHDSGTMRGKRCISGGRKDVRNVLYMGVLSATRFNPVIKAFYDGLINRGKPKKVAFIACMHKLLRIMNAMVRDGTSFNPDLHIAG

SEQ ID NO: 61504 - protein, 362 aa, unidentified
MVQTPNIAGWRTAMGYYAGIEVSLELSSVCVVDSAGKIVKETKIASDPESLVLFFQGLGFLVERIGIEAGPLSQWLHAGLTKAGFETVLLETRHVKAALSAMTVKTDRKDARGIAQLIRMGWFRSVHCKSPGSQEVRALLVARKQLLGKLLDVEFSIRGILRGFGLRMGLVTRKSFEPRVRELCAGQAMLEQIAAAMLAARSALQTEYARLHKAMLSIVRGDEICRRLMTAPGVGPLVAITFKTAVDDPTRIKKSKAVGALFGLTPRKYQSGETDVTGGISRVGDEMVRTALYEAANVLLSRVTRFSALKRWGMDVAKRRGTKRAKVALARKIGVILHRMWVDSASFRWTKEAGGAGRLACA

SEQ ID NO: 61505 - protein, 346 aa, unidentified
MKVLLKQTVGIDVAQKELVVSLGRMDEQITVEVYAYKVFPNTRKGFSSLVSWVNKQTSITTEVRYVMEATGVYHESLAYYLCSVQKQVSIVLPNKISNYVRTLDIRTITDKSASQAIARFGLERQLEVWQPPLKIFNDLRQLCREREQLVQERTMLKNQLHAERISATSSEKSVKRTNKRIALIDTQEKEIQEEIAKLIKKDEVLAEKMKIISSIPGVGNLTAVTIIAETNGFELIKNKRQLVSYAGLDVREKTSGTSVKSKPRISKRGNRNLRKVMHFPALAAIRTNERFRDIFLRLVSRHGIKMKAIVAIQRKILELTFILWKNNSYYNSEYAYQILPTEVISM

SEQ ID NO: 61506 - protein, 354 aa, unidentified
MKKIFIGIDFSKEKFDATLIKADGLKESAPSVHEVFDNKVSGYRRLVRWVKAHAETLMAEAWLFCGENTGGYSIGLSNYLYASGYDMWLESAYKIKHSSGIQRVKNDKADSRAIAEYAMRNYDKMIIHKPLSASLTCLREVFLYRHSLVRQKVSLQVRRDEKRLTQEKSDVRAFMSFTSKHLITEVNKAIAKCDQKIKEIIASDDELREIFDIITSMPGIGVQNATCLMVYTDNFQKFDLDSRKIACYYGIAPFGRQSGTSVNSRPQVSPFANRRIKSLLSQAALAAIKFDINVHSYYQRLIERGKHPLLIHNNIKNKMLHILVAMVRDRVKYNPDNVYRKSNEVSLAHQVLNI

SEQ ID NO: 61507 - protein, 337 aa, unidentified
MHEDKIFIGADVSKLTIDFTLLLNDQVEHQCVENTVAALSSYLKAVKRRFKVKDASIYLGIENIGRYSWPALRAFSCGELKLHLLSPLHLSKSQGLVRGKSDLVDSQRIARFLKKNLDELSLYQKPREVIEELSLLLARRNKLQKLIKAESATIEEMGQVSKGRVRSFIIADSKKSVLALRKRLQMVELQIENLIAEDQDLKHKVKLLMSIPGVGKILSWYLLVKTNEFKNFDDPRKLACFAGVATFQHTSGTSVRGRTRVSSFADKTLKRILHLAALRVTQMKGELGEYYRRKVEEGKNKMAVINALRNKIIHRIMAVIREDRPYQIREKNTLLVS

SEQ ID NO: 61508 - protein, 310 aa, unidentified
METKVFVGVDVSKDKLDVAIGSQKDIITFINDQQGVDALLKELRRIDTKLTVFESTGGYELLAASCLAEAGLPVVIVNPRQVRNFAKATGILAKTDAIDARVIVRFAEAVKPDIRPLKDRATSDLTALVTRRRQIVEMIVAESNRLKLANKRNTKDIQDHIRWLEKRLDKVETDIGKTIQNSPIWRCKDDILRSVPGIGPVTSAILICDLPELGVLSPKKIAMLAGLAPLNCDSGKFKGRRRIWGGRAAVRSSLYMATLAAIRCNPPIRGFYQRLMAAGKCHKVAATACMRKLLIIVNAMLRDQTLWQQN

SEQ ID NO: 61509 - protein, 278 aa, unidentified
MYYIGLDVHKKTISYCVKDAAGRVHHEGKIGSTRRELDGWIRTMPQPRMIAMEATKATIFTGWIYDHLLPHAEKVKVAHPLMLRAIAAAKKKNDKIDAGKIADCLRCDFLPECHMASTEIRNRRRTLRYRNLLIKQMVQMKNRVSGLLMETGVSYNKQRLHKVGYFAELLTTNEEVNESIRPLLKLSREMICRSQKPDYALVSSLERDPLLKERLRTVPGVGPITALTWALEIGDYTRFTSIKQAISYCGLCGDEKSSTDKVMRMPIPSNGTSTSREC

SEQ ID NO: 61510 - protein, 357 aa, unidentified
MLSSNVKYIGLDVHKEAIAIAVLNGAGKLVMESIVEAKASTVLDFLHGLRGELHVTLEEGTWAAWLYDLLKPHVAEVVVCNPRRNALLKEGSKSDKIDARKLAELLRSGMLRAVYHGENGLGTLRELTRGYLTISKDLRRVMSRLKALYRSWGIPCSGSQVYAPRHREQWLSKITQPGVRRRAELLYQQLDGLSVVRHTVRGELLAESRKHHAVKVLRQIPLIGPLRAALLLALMQTPHRFRSKRQLWTYSGLAVETHDSAQHRYVDGQLQRSRKPQQIRGLNQNHNHEMKEIFKSTAMSASRCAGPLQDFYEGLLAKGMKPDMARLTLARKIAAITLTLWKKGERFDAEHLKSQAA

SEQ ID NO: 61511 - protein, 398 aa, unidentified
MHHSYSVYLGLDVGKGEHHAVGLDINGERLHDAPLPNTEPKLRAMFDKLAAHGPILVVVDQPATIGALPVAVARACGHEVAYLPGLAMRRIADLYPGNAKTDARDAYVIADAARTLPHTLRQLNVGDEALAELDVLVGFDDDLAAEATRVSNRIRGLLTGIHPALERVLGPKISHLAVLEILSRCGGPIGIRKAGRRKLASIATKHAPRMGTKLVEDILTALDEQTVTVAGTAAADKILPRLADSLKTVLQQRKTVASEVEEILDAHPLAQVLTSMPGIGVRTAARILLEIGDASGFKSSGHLAAYAGIAPVTHRSGTSIKGEHPARTGNRRLKRAFFLAAFAALSDPTSRAYYQRKRDEGKKHNAALICLARRRCDVLYAMLRNKTYYRAPTTAAAA

SEQ ID NO: 61512 - protein, 362 aa, unidentified
MRIIGCDLHARQQVLAMLDTVTGEVVIVTLKHEGDNVREFYSSLPRPVRVGIEATGSMQWFLNLMEELRIECRVGHPARIRACEPRKQKHDRRDAELILKLLAEDRFPAIWLPSKEVQDLRALLRHRHQWVRMRTRVQNALQSIALANGLRRGTALWSQDGQSRIAALPLAPHTAYRRSELQAMYEKFEAEIEKLNQRVEEQACGRAGARLLMTHPGVGPITALATEVFLGDPARFADSKALASYVGMIPREYSSGPRQRLGGLSKQGNPLLRFLWGEAGAHAARKDPELQRFYRRKLVQKGLGKASVAVARKLGIRLWIMLRDQIEYSEFCRRGQKQQKSSDACAGMPETRYGAKSHRPVD

SEQ ID NO: 61513 - protein, 421 aa, unidentified
MGFIGGDLQERFVERIRGVDAARLLAVPIDVGKASAAAMVCDFWGEVVTPPFTFPLTGPGVAVLASAVAKAEALRDAVWVRAGLEQAGHYHWTLLARLPQVGIEVVLLNPAQVKENRNQSLLRSLKSDATDLGAMAELLVRGKGRPAVPLDDAMATQAALVAHRARKVKARSTVKNHIHASLDLVFPGLSGCFSDLLDTKLGRLLLDEQMGPDRIRRLGTDRLRAFCAHRGVMVQRGKATEIVEAAKGALSLAPQVGQVHADVLASDVALLGTLDRAIAAAEEGLGEVLGRTPAGILTTMPWVSIVRASSYGAALGDPSRFRTAAQVYRSSGLVPRLYESAGRRRSHTSISREGKVELRAAIIELGRALRQGDPDFARYAEELAARGKPSGIIACAVGHRANRVAFALVRDQVPFDPTRWR

SEQ ID NO: 61514 - protein, 378 aa, unidentified
MQAAQDRGYELKPVVYMAMELSNSKWKLGFGNGSKIRRKSIDARDRQRLLEEVSLAKEKLKLPADARVVCCFEAGRDGHWIYRWLEGEGFEVLEIDSSSIETARGRKHVKTDGIDVEKLLDLLIRHHCLGLRKAFAVVRVPSRSAEAAQRLHREDEYLLKQRTRISNRIGALLVTQGVTALRLGAGFAVRLDGVKLWNGEGLTVELKSELLRLEAQHAVFAEQLREMERAYAEELSADTPVAEYRRRLERLKSLGPKSSRLLAAEVFGWRRFDNAKQVGAMSGLTPTPSQSGDTQTEQGISKAGNRRVRRTMIELAWLWLRWQPDSALSQWFTRRFAHGGKRMRRIGIVALARKLLIALWRYVEHGVIPAGAILKPQS

SEQ ID NO: 61515 - protein, 342 aa, unidentified
MLVLGIDVGKRELFVQLQDTTGSSLGQRGPVANTPAGLQQLSDWVRKWTEPAALHVVMEATNVYWERCAHYFQSLGCVVSVVNPAQIKYFARSVLRRGKTDAMDAELIARYGVVMHPGSWTPPSTALSDLKQLTREREAVLVRRTQEQNHLQALQDAHRASETVVKLTQQRLTLMIQQVVEIEAAIRALIEADELLSQQLKLLLSVPGFAFVAAATIVAETVGFAHLETGREISAAAGMAPSPHQSGSKRGQGRISKTGNARLRRIAYLSALGASKSHSRMRTYYRHLRDTGKPAKVALVALGRKLLITGLAVVKSGRPYQDDFCRSQDGAGPTPTTAQPKT

SEQ ID NO: 61516 - protein, 341 aa, unidentified
MQIHSVGIDLGKTTFHLVALGAAGKVLVKKKFTQLQLLTFTANMQTSLMGLEACSGAHFLGRALRAQGHDVKLIPAQFVKPFVKSDKNDFIDAEAIAEAVERKNMRFVPIKTDDQLDLQTIHRVRDRLISRRTAVINQLRAFLLERGMVFAKTPAKLRAAMADVLENADADLTPQMRNLIGMLWDEWKLVEQQITALTDDLEKIADADAGCARIRQIPGIGPVVATAIVAAIGNGAAFRKGREFAAWLGIVPRQYSTGGKAKLFGISKRGNVYLRKILIHGARAAVLRIKRDRAPIGAWLDALDSRAPKNVVVVAMANKLARIAWAVLSSGNDYRPAAVPA

SEQ ID NO: 61517 - protein, 450 aa, unidentified
MPDAITGDRPELKPVNIGAAAIDIGSKMHVAAVNPTCTDVPVRAFGTFTQDLHDMADWFKACGVTSVAMESTGVYWIPAYEILEQHGFEVILVNARYAKNVPGRKTDVSDAAWLRQLHSYGLLRGSFRPDAEIATLRAYLRQRERLVEYAAAHIQHMQKALMEMNLQLHHVVSDITGATGMRIIRAIVAGERNPAVLATYRDVRCHSSIETIRAALVGNNRDEHLFALTQSLELYDTYQAKMLDCDRKLEALIAALSDKGAKPVGKLSRPRVKTKQVNTPSFDVRAALYGVLGVDLTEIHGLGPSLALKLIGECGTDLRAWPTAKHFTSWLCLAPGDKVSGGKVLSSRTRRSSNRAAALLRRAATTIGRSDTALGAFYRRLSSRTGKAKAVTATARKIAVLFYNTLRHGMTYRDPGADHYEEQYRSRLLANLKRRAKSLGFVFASCSMQH

SEQ ID NO: 61518 - protein, 345 aa, unidentified
MKNISMIGVDLAKNVFQVHGVDAAGKVLVRRQLRRRQMEKFLAALPVGVVVGMEACGGAHHWGRLVQKLGHQARLMPAGYVKPYVKRNKNDGRDAEGVCEAMGRPTMRFVPVKSVESQAMQVLHRTRRLLVRQRTMAANALRSALSEFGIVAAQGLKGLRSLMEELEGEASGIPDMARMALLVLARQWEALNVEIDKLETQIVGAAKTDAVARRLMTIPGLGPLGATAILAAVSDARVFKSGRDFAAWLGLTPRQFGSGGKQRSGGISKQGDRTLRTLLTLGATAHLKCERGRGPRDPWLRALLARRPFKVAAVAYAAKMARIIWAMLVSGEPYRAFGQRRKAVV

SEQ ID NO: 61519 - protein, 356 aa, unidentified
MEPIKTDCIGCDAHRRYSVFVVMDEKGHTGKETRVEHSRELYRHFLNILPPGSPIALETIGNWYWMIEEMERAGHQPILAHAKKAKLMMGLTNKTDKLDARGLAVLLRNGTLPSVWIPPGQLRDQRELPRMRMVFGRIRTMLKNRIQSTLAKYGIQIDEVSDLFGVRGRGLLQNRLKELPQETQHSIQQHLTLLDGVLEQIEGTEKRIKQVIKETSQMQLLMSLPGVGPILTIVIALEIGDIARFPDAPHLASYAGTVPQVKSSGGKTYYGRVRPDVNRYLKWGFIEAANSIVVHQERMTHRHVVQLYHRVMKRKGHPKAIVAVARHLAEATYWMLTRNEAYREPSTSRSISPTQK

SEQ ID NO: 61520 - protein, 371 aa, unidentified
MKKDSTIKFIGLDVHSKTISVAIADEGRKGEVRHYGTIENTFEAIDKVIKSLTETGVELRFIYEAGPCGFALYRYLTGNGFKCIVTAPGLIPKRSSVRIKNDRRDAMTLARLYRAGELTGIYVPEPEDEAVRDLARARDDARVAERKAKQRLNSFLLRYNLIYPGKTKWNRTYFNWLGSVGMKYPAQKVALQEYIEAANECTGRVARLSEQIRLAVEEWRMAPMVKALQALRGVSLICATVTVAELGDLSRFQNPKELMAYLGLVPSEHSSGETIRRGGITKTGNGHARRVLVEGAWTYKHHARITPPLIKRQRGLSRSIIQISWKAQVRLCARYRKMVARKKPNNVVVIAIARELAAFMWAIAQEVKAAA

SEQ ID NO: 61521 - protein, 394 aa, unidentified
MPELFVGIDVAKDTSSAQGIDSNGIGQFSLTFTMDSEGFMQLWKAIAEHSKDLSEVRAAVESTACYHINLYSFLTAKGVSTVVINPLLIANFAKLSLRKTKTDKKDAMSIAQFLLVNRDTISQLTMSQDLQDFRDIARERESVGSMLTAHKVEIKRLLQSTFPELERIGDLSTKVMQDFILEFPSARLVKMATVKALQKKLQRKWVGTKLTYTAEDLMQAAKQSVATISPAKELILQGKVRTLQHLQERYAELTKILTEYCKSTMLEDFEIMTSIDGIDKRTATTFLAEIGCIGNYASHKKLIAFAGIDPTVYQSGKFEGASRISKRGNRHLRRVIWLMTTCVIQHNTTFKTYYMKKRSEGQPFKKAVFATAHKLIRMIFAMLSQRTMFREVCI

SEQ ID NO: 61522 - protein, 319 aa, unidentified
MHCIGVDVSKQELVTFDGTQERVFPNTHGLPEFGRFLKGSGGVLVVFEPTSTYSRRLETLCRTQRVWCCPLNPRVVPHLRQVGKGRSKTDSSDAELLYRYGIERGHSEAVQLGNDSLAESIQARLACYRVAQKARVACQGVVEALSQDPATPKELLAELKAEIADLKVKENHHLVAAERLVEGDAQAGQRLVALLSIPGVGPITALTLLSLFRKYMDANRRQIVALAGLDPIQFQSGTSVRGKSRISKRGNREVRKRLYEATLSAVRYNPSVHAIYRRLKEQGKPEKVARIAAARKLLLIAHAIYKSGDTYCHSSEKGA

SEQ ID NO: 61523 - protein, 360 aa, unidentified
MTASRHAECLPIATTPRSLSASTISTGIFSTVPTAPSPPTRGLRPAVFRKKSSRKQLLEFFATFHPCTVVMEACAGAHWMARKIGAFGHIVKLISPHFVRPFVKSNKNDFVDAEAICEAASRPSMRFVTPKTESQQTLLALHRVRQAFVRDRVRTTNQMHGFLLEFGISLPVGHAVVKRLPSVLAEHPLPPRLVLILEQLHAHFKYLSEQIRAIEKEIERQLADDPIGQRLLTIPGVGPVTASLLASELGDGKQYRCSRDFSASVGLVPRQYSTGGRSNLLGISKRGDKNLRHLLVQCARAFMLRLDKQHGRIADWTRAMLARRHSSVVACALASKLARVAWAMVTHDAVFERQASVTGA

SEQ ID NO: 61524 - protein, 331 aa, unidentified
MKNYQLAVGIDVSKKTLDVFIHNHSKHRVFDNTRSGYLSLVKWVGKFSENEKPILYCFEHTGNYSLKLAIFMQTNGLDYVQENPIVIKRSSGLVRTKSDRVDAQMIARYAWLHREELECSSIRDEALLELGRLLSLRDQLVRNRTALMGTLEELTGLLSSPSTDISCKSLKHTIAYLSKQILKLEKQIDQLLKREEELGKNYKLLTSLKGVGRILACQLIYHTCNFARFSSWRQFSSYCGTAPFEHSSGTSVFKRAKSHPMSDRKMKSLLSMASVSAIQHDGELREYYQRKVAEGKPKMVALNNVRNKLLSRAFAVIKRGTPYVDLCKYTA

SEQ ID NO: 61525 - protein, 346 aa, unidentified
MEHYVGLDVSLKLTAICIVDQTGKIEREGVVASDPETITAFIKSYAPRVARVGLEAGATSTWLWTELNKIGLPVICIDARHAKAILKMQINKSDRNDAVGIARIMQCGWFKEVRVKDLDSHAIKAVLVSRALLVKIKRDLENQIRGLLKNLGLVIGRAKMNVFAMRAAELAETRPELAAAVEPLLKAREAVERQIADLDRKVMRLARNDAQVRRFMTAPGVGPITALCFLATIDDPTRFKRSRSVGAYVGLTTRRYASGEIDWTGRISKCGDAMLRSYLYEAANVLLTRVAKWSTLKAWGIRLAKRSGLRKAKVAVARKLAVILHRMWIEGTEFKWSSKEAANQPA

SEQ ID NO: 61526 - protein, 410 aa, unidentified
MIKENFIYVGIDLHKETHTAVMIDCYNQKLGEITFPNRPADFPKLVAKVKKCNTDGKTIVFGLENAYGYGRALAVWLIDKGYLVKDVNTAISHRQAKHRGAMYRKSDSDDAEAIALATLNMLDKLPDAYPNDAYWSLGQLVHRRDNIMKQRTRLVNQLHEQLCIAYPSYKQFFNDISRPTALYFWEHYPSRKYLKGKSVEDLRAELVPVSHNKCSTKTCEKILDAVASDKVKNNAYQDARDMVTLSIVSDLQHYDKQLAEVDKMLEQMYKMLGCTLTTIPGVNVITAVKILAEIGDIKRFSNANKLAQFAGIAPLHLSSSGKGKDVATKQGNRRLQATIYFLAIQMVQVSSKGTPRNSVVRAYYEKRKAEGKTSQQALICISRRLISIIYGMLKHGTEYRMPVVESAGEK

SEQ ID NO: 61527 - protein, 407 aa, unidentified
MPEKEEMPTRFVGLDVHKHYLVAAIVDADKNEVVPLRRVPFVQLDDWVRKNLTPQDAVVLEMTTNTFQLYDDLLPHVHSVTVVHPPNVALITRAHVMTDKIAARTLARLHAAGLLPSVWVPPADVRDHRAIVAQRSKMMRLATQARNRLHAVLHRHHIVPPEGNLFAPDNQAWWLSLDISVLERVRVQSDLATLQLARQQIDLLEEAMATLAAQDERTVLLVQLPGIGLITAITLLAAIGDIRRFPTANHLVGYAGLAGRVHDSGQRHWGGGITKAGRRDLRAAMVESAHVASRSHAHWQAELARLEPRLGRNKAIVAIARKLLVAVWHVLTKGEADRYTIAESTARKMLKHAYRLGRENRPGQSAGEYVREQLDRLGVGADLTAVPQGRQRAVSMPPSSLKEAAEN

SEQ ID NO: 61528 - protein, 362 aa, unidentified
MRPKSRRLAVRKPNTSHPSVTIGLDVSDRWTHLCALDAEGQCIERMRVATRESALVEACAGYPRSRVVLEVGPHSPWVSRMLARLQYEVVVANPRRVKLIGRADRKTDRIDAETLARLGRMDPELLHPIAHRGEQAQKDLALLRVRDGLVRARTQLIQRGRGLAKALGVRLPASTATGFAKRVREAGSGDVFPGMEELLTAIEQLCVSIRKLEHEIERLGAERYPETRRLRQVAGVGPITSLAYVLTIEDPRRFARSRDVGAYLGLTPRQRESGEARPELAISKRGDEFMRRLLIEAAHYTLGPFGPDSELRRFGLRLVGQGGKRAKKRAVVAVARKLAVLLHRLWVTAEVYRPLQPAQRAA

SEQ ID NO: 61529 - protein, 319 aa, unidentified
MKTTSSARIANTERNVGIDVGKSTLDVLILEPDIYLQEPNSPDGIKRLVSKLSRYKLSRIVVEATGGYERHLVEACAEKALPIIIVQPMQVRQFARAQGLQAKTDKLDARLIAQFGAIMKPEPRPIASKKVRYIKDLLSRKRQLNETRTQELNRYHKAPTTLMPSHNRLLKLVDKEIAWINDKLAKEVAEVTEWQRTYEILSSVPGIGDGVAFTLLGELPELGALSSREVGALCGLAPYNRDSGSMKGRRRIKGGRAPIRTVLYMAMLSAIQHNKIMKTFYQKLVAQGKHKKVALTACMRKMMTILNAMVRDNQEWQTH

SEQ ID NO: 61530 - protein, 391 aa, unidentified
MSMYFIGIDISKYKHDCCIISAADQKVVSKVTIKNNKAGFNELLTIIHSLANPADIRIGFESTAHYALNLELFLENSLLTFMEVNPVLISEYKKSKTLRRTKTDSVDCESIARWLMTVEYKPHSKGFYHAYSLKPLTRLRDKLIRQRSFYLVKITNVLDHTFPEFKPFFNERLSKTALYLLENYGSAEKMARMNSASYEKLRSVSRGKFSPQQFLRLKELAANTVGVNNSIFDVELNSLLSLYKSLVKEIDTIEKEINKLIEEVHPHYMSVPGIGPLSAAVIYSEYGDISNFTNPGQMLAFAGIEPGINESGTESHGGKMVKRGSSQLRYTLINCCLPLIRFDMTFATYYAKKRGEGKPHRVAITHVAKKLIRVIYALESQDIDFNAQRLR

SEQ ID NO: 61531 - protein, 314 aa, unidentified
MSTSYVGLDLSEQYLDVASTTGHQWRFTYDAPGLDRLLDALRPIAPALVVMEATGGLEHSVAAELAAAGLKVAVVNPRQVRDFARATGRLAKTDQIDAQVLARFAERVEPEARALPDAEHRALEALVARRRQLSDMLIQERNRLRRANSVVRPDIEVHIAFLEGRLDEANTAMRQTIEASTAWRVRDELLRSTPGIGPVVSATIVAELPELGRLSHKQIAALVGVAPFNCDSGTMRGNRVIYGGRTTLRGALYMATLSAVRHNAVLKAHYEQLVARGKAKKVALVACMRRLLIWLNAMARDGVAWNAEIHLQPA

SEQ ID NO: 61532 - protein, 353 aa, unidentified
MMELLSTIETKEEETEMKITTIGLDLAKSVFHVVCFDEQHQEVSKRMLRRAQVRAYFAQREPCRVAMEACAGAHYWGRELEQLGHSVKLIPPQFVKPYVKGNKNDYNDARAIAEAATRPGMRFVGIKTVEQQDIQALHRLREQRVKERTALCNQLRALVAEYGIVMNRGVAAVRSGIPLLLEDAENGLSEAFRALLARGYEQLVEIEAHIDYYTHQVHAHSRQNEQTRRLQTLPGYGPIVASVFASVVGDGSAFRRGRDVSASLGLVPRQHSSGGKEVLLGISKRGDKYLRSLLIHGARSVVLHARNKEDALSRWVNRIRERRGTNKAAVALANKLARMGWALLRNETVYRPA

SEQ ID NO: 61533 - protein, 362 aa, unidentified
MADGIRWVGLDVHARETTIAVFDQGTGELSTRRAVARPHELLERLMEIPVPARMVYEAGPTGYGLARRARAVGIEMRVCAPGRTDRAPTDRIKTDKRDAIRLARRLAAGELTFVTVPSVEHEQLRDLVRCRDDIRADLMRARHRLGKFLLRREIYYEQPGEPWGRKHRNWLASLRFADPASRLTMADYMHAHDVLIARRDRIEAELEQLAGESIFATTIARLRCLRGISTLSALGICAEIGEFERFDHPDSLAAYLGIVPSENTTGQQRRQGAITKAGSTHARRLLIEAAYHYQRVTANGEKIQRRQEGQPAHIVNIAWRAQRRLSARWRQLKHQRHKPNGVVAVAIARELAGFCWEIALAD

SEQ ID NO: 61534 - protein, 362 aa, unidentified
MWVLLRLPRFKGAIHADESMQTITTIGFDIAKSVFQVHGVDAAGEVVIRRQLKRRYVLAFFEKLPPCLVGIEACASSHYWSRELQALGHSVRLMPPAYVKPYVKRQKNDMADAEAICEAVTRANMRFVPTKTREQQSCLMLHRTRHLFIRQQTAVINSIRAHLAEFGIVAPVGRKGVTELLHVVADPSDKRVPEVARACLAALGTQLLSLKQQILEFDRLIMAWHRSNQTSKRLHYIPGVGPMLATALVASVADPRTFRSGRNFSAWVGLVPKQHSSGGKDRLGSISKQGDRYLRSLFVAGALAVIRYAKIHGTGHRPWLTALLARRPTKVAAIALANKIARMAWAMMAKGERYKQPVALAA

SEQ ID NO: 61535 - protein, 358 aa, unidentified
MIRLTKKQKWFKQKNLTKKDKIYVGLDVHKKSISVAIWLNGQIGLTFNASADYARLIKQLRPIQKAIKLVVYEAGPTGYGLARTMEKAKIPVQVISPANTPRPSKRRSKTDRLDCCELAEFAAKGLLKPVTIPTEQEEADRQLQRLRDQLVSKRRRIRQQIKSFLLQHSIAEPDGLQGWSFAAIDKLQSLPLNTALRFTLDMYLEEMAQIRIYLEHTEAELQALSQQKRHHRAIKILRSHPGVGPVTAWAFRLEIFRPDRFDQGTEVAGFLGLAPRISQSGQTTREGPIVKTGRPQLRSKLIEASWVWIRYDAQARKVYNRLSSNTGNANKAIVAMARRLAIRLWKMLCDDQLYRPAG

SEQ ID NO: 61536 - protein, 402 aa, unidentified
MNAVGIDVSKGKSMVAVMRPFGEVVVSPFEVQHSESELNKLAKLLKSLNGETRVVMESTGNYHIPVVQVLTDAELYVSVVNAILVHNYGNNSLRRTKTDKKDALKLANYALDHWLSLPGYFSEEAVRQTLKSYYRQYEKYAKLRTVLKNNLISLLDQTFPEVNRLFSSSPRADGSEKWIDFISYFWHCKCVCELTENMFTLRYQKWCKKHGYHFSKKKAQDIYSFSSERIGVMPKVTASKVLVEQAVLQLQASSAALATLRQQMDEMAASLPEYHIVMQMFGVGSILGAQLMAEIGDVRRFHSKRALVAFAGIDAPPYQSGQMNIQSRSISKRGSSSLRRTLFLVMSVILKCSPVDEPVYQFMDKKRAEGKPYRVYMIASSNKFLRIYYARVKAHLELIDAS

SEQ ID NO: 61537 - protein, 382 aa, unidentified
MQPNDTVNPTILLSIELSASTWLVAARVPGSEKPHLHRINGGDTAALLAFVSSLRGRVARRLGATTAVVCCFEAGRDGFWLHRLLTAHGVANYVLEPTSILVNRRARRAKTDRLDAEGMLRVLAAYLRGDRQACSMVRVPTPEEEDAKRMHRERESLVQERLRIENRIEALLFTQGIRKRPSLRSWERDLAVLRTGDGRKMPSHLRVELDRLRRRLVMTLELIREVEAERDEAAETKPQDETCRKIAALCRVRGIGENFAAVLTREVFYRSFDNRRQIASYVGITPMPHQSGGMDRDRRISRAGNPRARTTMIQLAWLWLRYQPGSELAEWFRKRVGTLAGRTRRIAIVALARKLLIALWRYVETGVVPAGVEIRTETVVAA

SEQ ID NO: 61538 - protein, 368 aa, unidentified
MTKRSTFIGLDVHKESIAVAIAESGRFGEVRVYGTVGGEIEALEKVRRTLRAPGRTLHFVYEAGPCGFTIFRHLTRLGEDCAVVSPSMTPKRAGDRVKTDRRDAVTLARLHRAGELRPIYVPNESDEALRDLVRAREDAVEVTREAKQRLKAFVLRHGLRYRGCTGWTIPYRRWLAGLTMPEPAPQIALQEYLATVEEAEQRVSRLTAQLQQLVPSWRWAPVVDALQALRGVSFITATGLVAEIGDVRRFTRAPELMAYLGLVPSERSSGPATRRGHITKAGNPHARRLLAEAAWAYRSIPRIGRVMQQRQEHLAPAVRALAWKAQLRLCGRFRRLSARGKPRVVIATAIARELTGFVWAVAREVPAP

SEQ ID NO: 61539 - protein, 341 aa, unidentified
MYLIGVDYHPSFQTIAFLIEETGECDERELNHSNGEAERFYRELKQSGIRVRVGMEATGYSRWFERLLAELGFELWIGDPAQIKAKRVKKQKTDRNDARLLLRLMREDNFPQIWVPSPENRDLRQLLWHRHRLVQMRTRIMNQLQALAMNENKCWKNKLWGAWGRTELEKLPLGFWASRRRQELLELLDRMNPKIEELTAAVEQEAKKRPDALRLMTHPGVGPLTALAYVLIIGTPARFPRGKQIGTYVGMIPSEDSSGGKQRLGHISKQGSSLLRFLLVEAAQAATRTHPEWRRRYVHLAMRRHRSIANKRGVRGQITALFGANGEVRSKTGPQRVCAHP

SEQ ID NO: 61540 - protein, 412 aa, unidentified
MTATNQFAAHVGLDWADKKHDVCVQFKNGERVFHVIEHTAEALDVWLTELHQKVKGRIAIALELKKGPVVYALQKYPFITVFPVHALSLARYRQAFSPSGAKDDPQDAELVLELMLRYSQKIKAIEPDNADIRLLQQLVEQRRQLVEDKRRFVNRLINTLKQYYPQPLEWFSHRGSLLLCELLIRWPSLQQLKRARHDTIRNFLNAKGGRAMALTEQRVVSIDNAIPLTTDPSVIEANALMATALATQIKVVSEIIKTYDERIETLFDTLPDSGLFKSLPGMGPCMGPRMLAALGDNRDRFNSAEEIQNYAGIAPVTERSGQKSWVHWRWLCAKFVRQTFVEWAAKTVNSSYWARLYYQGLREKGKSHQSAIRALAFKWIRIIYRCWKTRTQYDEAKYLLALEARRSPLLKP

SEQ ID NO: 61541 - protein, 398 aa, unidentified
MNHYFLGIDIAKTNHVASLIGADGSVVIRAIKFKNSNEGYTKLLNTIQNKLNDLSNINIAMEATGHYWLSLYSALVDDGFNVSVYNPYQIKSYRGAYNNRKQKNDIIDSIIIADYLRVFGMKDSKLPQEDLMALKQFTRFRSNIVENVSSIKVQVIGLLDKVFPEYKDFFCDVFGVTSKQILLNCPTPDDIIRISTTKLANLLSKNSRGKFGKDDALNMKEVAKSSFGIKFTTDACSFEIKQLINQVIFLESQLEDVDKQISELYNKLDSHLLSVPGIGIKLAPTILAEIGDINNFDKPSKLIAFAGVDPSENQSGNKLSTNNKLSKRGSPYLRHAIYTASLVAISNEPKLRSYYDKKINEGKHHFVALAGISRKLLTIIYYILKEDRDYISYDEKHN

SEQ ID NO: 61542 - protein, 416 aa, unidentified
MKNQETLFFAGIDWSRNFHQVCVIDHQGSIIGEASFEHSGRGLFEMTQWIREISGSEVCNISVAIEVNHGPVVESLIEQNFRVCSINPKQLDRFRDRFSPSGAKDDRKDALVLASALRTDSHHFHLIESQDTEVMFIRELNRKRAELVEQRTRLINQFRELIWRYYPQFAALLGDRVRIWHLELWKLVPCPDSVKGKRISTVQNLLKRHKVRRIDAEEVLHILRAEKINVSAATRDACVNRLGSIVELLELLERQIKETEASINKEIETLDSKLKTDSEGPTDIEILRSVPGAGPVVLATIIGETWELLQRRDFEALRCFGGTAPITRQSGRTKQVVRRKAVCRSLCDAFHVLGGSAARSDPVSMTKYKALRAKGHGHFRSARTVCDRILSVVRVLLKKRELFDKEFKKPWHDAAA

SEQ ID NO: 61543 - protein, 350 aa, unidentified
MGARAAALPPLKPEQLLESYLEFTSRGMVEVLSLPIVLRSEAMSIFVGIDVGKATLDLACHPRGPGGRFDNSPQGHRALLEALAPQAVQHIAIEATGGYERGILDALAQAGYCVTRLASHRATAYARALGHFAKSDALDARILARMAAHVTPQPYQAPSPERAELAELLRCRLQLVGQRDDNRRRLAQTRLAAARHALQAMIDAAKVQIADLDKRIATATTAAAPASRLREVPGVGPVTAATLLAYLPELGRLSRQQIAALVGVAPYIDQSGRRDGPRRVRAGRWIVRRALYMATWSAIRAKGSALGERYRALRARGKVAKVALVACMRSFITAINAMVRDQVGWRSTAP

SEQ ID NO: 61544 - protein, 483 aa, unidentified
MATQHKNKYKPAVMPGPVEIPDAEHELVIERVAAIDVAKAAGKVCVRLPGKSGRRFSRVWDVPARTGAIGELAEQLIETGIEKVTVESTSDYWRIWYYLLEAAGLSVQLVNARDVKNVPGRPKTDKLDAVWLAKLTEKGLLRPSFVPPAEIRRLRDYTRLRADLTRDRTRYWQRLEKLLEDALIKISSVASTLVTLSTRDMIEALIAGERDPYRLAELARGKMKAKRSELIAALDGRFDEHHAELARMLLSQIDALNTQIDTLSARIEALIAELPDDTGAIDHGTGGDAPGASTGTDLAAEPNTGGANPIRVDPAIDAQCVLSTVERLDEIPGISAGNAQNILAEIGTDMSRFPTPKHLVSWAKLCPRTIQSGPVTRAGKTGKGNPYLKGALGEAATAAAKTNTFLGQRYRRLVKRRGKLKALVAVARSILVIIWHLLVNPATRFHDLGPDYYTNRIVTERRLRNYVAQLAAMGYRVTIEPAA

SEQ ID NO: 61545 - protein, 496 aa, unidentified
MKAKACKAKGKHSHSSKRGAEIAARRGAEGMEIVNPHAGGIDCGAQEHYVAVPPQSVEPGEPVVRCFSAFTEGLDALVEWLKACGVTTVAIESTGVYWIALCQKLEAAGIEVYLVNARHVRHVPGRKTDVKDCQWLQRLHSFGLLSASFRPEDMICRLRSLQRHRLNLVSTAGAEIQHMQKALQQMNLHLHHVVSDITGVSGLRIIEAILAGQRDAVQLAKLRDHRVYKSTLAQMQAALVGDYRPEHLFVLGQSLQAYRFYQARTQECDLEIERQLQQLTQRFESSSALGAELSQPEALDEADAPSQNRQPAKRKVKRKPQANEPKIDLADYLRRICGVDLTQVVGLNVLSVLLIVSEIGVDMSKWRSAKAFSAWLGLCPRNKISGRKVLDTRTCKVISRVATTLRLAAQSVGRTDTALGIFYRRKKGHLGPAKATTATARKLACLVYHLLKYKEQYREPDPNTYQLKVQKSILVKIQKQAATLGFKLLPTALVPA

SEQ ID NO: 61546 - protein, 405 aa, unidentified
MKQPTTLHYAGIDWATRTHAVCVVDQTGAIRARFEVPNTGKSFAGLIKRLGKLGVAGVAIERPDGPLVEAMLDQGLRVVVVTPRQVKALRSRYGASGAKSDPADAYLLADVLRTDGHRLAPLTHDSDPTTVLRALSRTRKDLQEARVALCNQLTAQLERCFPGAIGLFADLHTPIAIAFLRRYPTSHTAARLTQAKLAAFLRRLHYPGRTPVEVLLGRIQTAPAAGISPAEAAGRAVCVLALLDAIQVAARQERELEAEIVERLEVHTDAAIFTSLPKAGHGVRAAALLGELGDVRARFPDNDCLAALGGAAPVTITSGKRRIVKFRWACDKKLRNAIIDFADDSRHASPWAAKVYADALARTGRHQHAVRILARAWIRVIWRIWQDGVAYDPAKHRGAVRLLAA

SEQ ID NO: 61547 - protein, 350 aa, unidentified
MEQISRIGMDTSKHLFQLHGVDAAEKPVLRRTLRRRDMITFFERLAPTRVAIEACGASHHWARLLRGFGHEVQLIAPQLVKPYVKRGKNDAADAEALCEAMSRPTMRFVPVKTVEQQAALMLVKLRDRLIRNRTQLVNAIRGYAAEFGIAGAKGIAHVTTLLARLQADVTLPALARELFAMQAGEYAQVQAKIAVVEAKLLAWHRADPCSQRLAGVPGIGPIGATMLTMKTPAPQAFRSGRQFAAWIGLTPKDHSTAGKARPGVITRAGDEGLRSVLVVGATALIRRVREGRCRDGDRFAAWVGKLLERKPPKLVAVALANKLARVAWKLMITGEAYAVRPASTGAASAL

SEQ ID NO: 61548 - protein, 403 aa, unidentified
MKHVIAFDISMGKSYMVIYNAQKQCVFEGNIKHSKPDFHILHDRIQKLTNECGQPPKIVFEATGVYSRQLERFMQKNQYVYSLLNPLEAKLQCDSLRIHKTDRSDAHQLALTHFTASRREKTITDTRFSQLKSLSRFYDELDDELSTVRNRMHKVLQLTFPELEQIFTTKSDLFLNFVQLFPHPDLVLDLAKTTMKNRIRANTKKNISIRVAEKKATEILEAAKVSYPAVDADDVLCEQLKIYAERYQNLLGQKEQCISKMVQIAEQHAEYSIILSLPGIGSNTAVRLIAEIGDITRFTNHKQLNAYAGIDIRRFQSGKTFYKDKINKRGNKHLRKLLFLIIQNMLKQRRHGRNHIVEYYDKLKTQPYNKRHKVASIACVNKLLKLLFYLITHNMHYDYRLTS

SEQ ID NO: 61549 - protein, 344 aa, unidentified
MQQIQTIGIDLAKNVFQVHGVDESDEVVVVRQLRRNQVIPFFEKLEPCLVGMEACATGHHWARELIKLGHDVRLIPPVYVKAYVKRSKNDAADAAAICEAVTRPSMRFVPVKTEEQQAALAVHRVRDLLMRQRTQLLNALRAHMAELGIIAETGREGGAKLVEIVADARSTGVLPTEMVDALSALIDQIFSLQEQIDELNRCIKRQHRTSDVAKRLEGIPGIGPITATAMAASVTDPGQFKSGRDLAAWIGLVPKQHSTGGKARLGGISKQGDRYLRRLLVGGGTSVVKLAKIFPWRYPWVAKLLERKPAKLVAVAVANKLARVAWAVMNSGGTYRPQVRGARP

SEQ ID NO: 61550 - protein, 344 aa, unidentified
MDHFAGLDVSVKETSVCIVDDMGRIVKEVKVASEPQALLKVLGNPAYRFKRIGLEAGPLSQWLFSGLAEAGLAVVCVETRHMQAVLKAQINKTDRNDARGIAQMMRVGLYRSVHVKTLRSQKLRMLLTHRKLLQSKAIAIDNDLRGTLRNFGLKVGMVGTVRFEARIRELVENQSDLAALIEPLLIVRRTLREQVVILHRRLLAIVRDDEVCRRLMTIPGVGPVVSLTYRATVDVPARFRKSKSVGAVFGLTCSRYQSGEIDWSGRISRCGDEMMRVMLYEAAQSMMRSKKWSWLKAWAMQIARRRGMKKAIVALARRLAVIMHRIWVDGTEFRWTREQAAAAA

SEQ ID NO: 61551 - protein, 426 aa, unidentified
MRFFGLDVHLDFCEVAVVQDGKVSRVGRIDSTPEAIREFAAGLNGSDQVVLEASCGAMMIARLLEESDVGGVVVCNAAETRAISHARVKSDRFDAAMLAKLLSAGMLKAVWVPDEATSSLRRRVARRAGLVRARTRVKNEVHAVLARCLLGRPPVSDLFGKKGRVWLTEQELPGEEAETVASCLRHIDFLGEEIAALDREIARQSLAFPGFQRLLTIPGVDVGTAAAVIAAVGDITRFPSAGQLVAYLGLDPKVRQSGSEPARYGHISKRGDPQARSMLVEAAWISIRSPGPLRAFGERVRARRGAQIAAVAVARKLVVLCWHLLSKDQDYAFARPSLTRQKTRRLELAAGAPQLPRGRKKGAPVSGANASQRAAERELQHQAELAYRRLIDDWRTTAPKGGAGATPGRASQKPKEGKAARQATSP

SEQ ID NO: 61552 - protein, 327 aa, unidentified
MNKPICWVGVDVGKEELWVAVVGRRVRRFSHTAAGVRALVQFCRQVATGDVLHVCMEATGIYSYSLAVRLWAWSDLRVSILNPAQITAFARAQLRRTKTDAVDAQVILAFARSQTPLAWTAEPAALRELTQLVREADAIRETQTQWSNRKQSHDWSPDLPPVVKHADKVVLRALQRQLARLEEAITALWKRDPQLRRQVNLLCSIPGIAELSAVRLLAYGQRTFTTHSAKQLTAHAGLAPRHRLSGTSVHGKSHLAKQGNAPLRRALYMPALSACRYNPALIPVYQRLLTVGKPGKLALAACMRRLLLIARAILRDNRPFDPAYNRR

SEQ ID NO: 61553 - protein, 292 aa, unidentified
MTTTLQDYFVGIDVSKDRLDVAVLGQRPLIQVANTKKGIAEFTKRMGQLNPKLIVVEATGGDEEALVLSLYQAGLPVALVSPQRVRQYARARGLLAKTDSLDAFNLAEYGKNIQPRLFVAKSEEGRRLSALVGRRRQLGDMLKAEKNRLRTVHVELKSSLQTVIACLKVEVKRLDGEIRQFMNEHEDFKEQEKLLRSAKSIGPVTAATLLADLPELGKLDRKQIAALVGVAPMNQDSGKKRGYRKTKGGRPEVRSVLYMAVLSGIRYKPVIKAQYEQLVKRGRRKRWQSPRA

SEQ ID NO: 61554 - protein, 336 aa, unidentified
MNKYIGIDIHQDKCHATVQDEDGMTVRQGYFRNSPSGFKDFFDGIEKAKVVIEACDAWQPVYDWLAERDFNVKLAHPHKTRIIAEVKIKTDCRDSEALADLVRADLIPEVHVPCDEMRELRGIAKQRGKLVQEKSKYKNRIKAQLRKRGIEYREKSLWTKSGKQWLRNLEINAVDDFLEVLETLNERISKLEGEIEEIAGGMEEARLLMTIPGVSYYTALTIIAEIATIERFPSPGHLCSYAGLTPSVKQSGSKEVHGSIQGGRPLLRWILYQAAHNHIQSAPNSHVTKFYKRLKQRKPEKVAKTAAARKLTKVIYWMLKLKEEFHPEGFDPRKSR

SEQ ID NO: 61555 - protein, 405 aa, unidentified
MVTSIDRYDEVDVFVGLDVGKGEHYAVALDRVGKRLFDKALPNDERRLRGVLDQLSTHGLILLVVDQPATIGTLPVAVAQASGALVGYLPGLAMRRIADLHPGEAKTDARDAAIIAETARTMPHTLRSIQVADEQVAELSMLCGFDNDLAGQITQVSNRIRGLLTQIHPALERVIGPRLDHPAMLDLLQHYPSPATMKTAGEKRLGNRLLKNAPRKGRVWAAEVTLALGEQTVVVTGTAAAALVLPRLAEQLAGLRRQRDEIAAEVEKIVDAHPLQPVLTSMPGVGVRTAARLLTEVTTKAFPTAGHLAAYAGLAPVTRRSGSSIRGEHPSKRGNKTLKRTMFLSAFAALPDPESRAYYDRTIAQGKRHNQALIALARRRSDVLYAMLRDGTLYEGRTTPPALAA

SEQ ID NO: 61556 - protein, 402 aa, unidentified
MEKFAGIDWASEEHALCVVDEAGARLREQTVAHAEDGIADLCRELAGLGVERVAIERPDGILVDRLLEAGITVIAVHPNQAKAARGRYSVARGKSDRFDAFVLAELGRTDAHRLRAIVPDGDETRALRALTRTREGLVGVRVELANQLRAQLQAFWPGALIFADVDSPISLAFLRRYPSPADAGTLGPRRLGAFLARHGYPGRRAPEELLARMRSAPAGRAGVAEAEARRAAVLGLVAALDPIVTQIRELTSQIRGAFAEHPDAQIFAPLFRDPKTAICPATLIAELGDSRERYPTEAALAADAGQSPVAVESGKRRSASFRRACDKRLRGSWSVLADSTRKWHPWARQVYADAIARGQDHPHALRTLGRAWARVLWRCWQDRIPYDPARHGNLNRLLAAGG

SEQ ID NO: 61557 - protein, 439 aa, unidentified
MFCIMEKIRKNVAGIDIGAGKVFTAVEGQPVVSHFTFTEDFMLLRDYLLKHKVETVAMEATGVYWVILYEILEESGIDVWLVDGRQTKQVPGRKTDVKDCQWIQELHSFGLLNRCLVVDSDVKELRHYMRLRDDHISSSAMHINHMQKALTLMNIRLKEVLSQIHGASGIAIIEAILTGERDKNVLANLCHQSILKNKKELILKALNGRYTEAGLFALKQAYDGYKFYLHQIEECDKRINVVMNRIGQSGSGQDQKKKRKEIRYHKPAVEKLAPNLINIFDGKDATVISGITDYTWMKLLSEIGRDLTKWPTEKHFTSWLGLSPGQKDSGKKKRNARKKGIPVAGQIFRTIAQGLINSKTIAIGSFGRRLRGRKGPGIAIKAMARKIAILYWRVMVKGFDFAEQGIKNYEQQILANKFKALNKLAKELNYQISENAHVA

SEQ ID NO: 61558 - protein, 402 aa, unidentified
MKTTKQYLRFCGIDMAKHKHVACIIDRDGQYILKPRTIRNNTDGFENILNCLKQTGRAKSVLIGMEATGHYWYSLHDYLVRNGYDVAVLNPIQTAQQARQAIRKCKTDKHDAFHIANLLRTGQYKPAVVPDELAMTCRQVTRLRYRIVKQGAMIKQLVNSRLHPAWPEYEGLFSNKFGTTSMKLLQTASTPKELMELDYDDLEEMIRKASRGRFGPAQTQKVLDSAINSVGMQRGQYGMSTGIKYLLEQIEALEPVRKKMDAEIEHLASQLPEYLFTLPGATELTIVSLYGEVSPIETFKKPSQLVAFAGLDPKVYQSGQYDAPVRKISKRGSPYLRRSLWQMAYRALCTEGDLRDYWRKKQRQKKHHLVAVTAVANKLCHVVWRIMTDQRDYIPKGYNQKS

SEQ ID NO: 61559 - protein, 314 aa, unidentified
MNPTLYIGCDAHKSACTFCAIDEDGKTVWQGERPTTREGFENIRDKFSGHEIKLVLEALGFVWQIVDMLSELGIETYVCNPNQNPLIGFSRKKTDPEDARKLAELLRIGYLKCIYIPTKQQREFRILARERNSMVRTRVRFINQGKSAAYDHQVERRNRLIELVSEEIELLNGEISEAAAPREDVRLLMTTPGLAEYGASLVAGEICAIDRFSRSRQYLAYCGLVPSIRQSGGKTRMGSTRKDSNSRLRWIYVQAAWHAVRRDPEMTDYFNRKAREKGKKKAIVIIAKKLAARNYWMLKRKMPYREVSAVKTVG

SEQ ID NO: 61560 - protein, 359 aa, unidentified
MNMYLGIDLHKKSSVWVMMDEKRNVVWHDNFASHPLDISAGIKKIPAPLAEVKVAIEPVCGWRWVTKQLEEAGLEVHIANPGKVRLIAESKQKTDFNDARTLADLLRAGMFPESYRVADEIYDLRVVVRERYFLISKRTDVKNRIHGVATTQGLHLVSGGNPVNKRGKKWAEESKDETLKELHEVIEELNVHIDLLTKKIEKTAKELPQAKLLMTMPGVGTITALTVIAEVGDFSRFSDPKKLASFAGLVPRQRSSGEKVRLGSITHLGSKYLRTAMVETAMRIRPGYAPELQNFVDTVKIGSSPKRARVALARKMLTIMWMMIRKNVEYDPLVFQKNRLSPSSSAIRKESYLDAILGA

SEQ ID NO: 61561 - protein, 345 aa, unidentified
MKIVGCDLHTRYQQVAMLDQETGELIERRLEHESGEARAFYAALSAAVRVGIEATGHTRWFERMLGELGHELWIGDAAEIRATVVRKQKTDARDAAHLLDLLLTNRFPRIWRPSLEERDLRQLVWHRQKLVWMRNAVGNQLHALAMGEGVCRKKKLFTQKGRAELESLALGPWASYRRQELLRMLDELDRSLLQLDHAVQKQAEQNPEAVRLMTHPGVGPVTSLAFVLTLGPVGRFQRSKQVASYLGLNPREHSSGGKQRLGSISKQGNPMMRSLLVEAGHTAARLDAELRQDYQRLKLRRGSGVAKVAIARKLAVRMYWMLRSPANYAQMVRMQGSPRGTLVGQ

SEQ ID NO: 61562 - protein, 358 aa, unidentified
MPSVGAIVVTNNEEDIHVSEVTIIGVDLAKQVFQVHGARADGSVAFRKKLSRAQFMPFLAKHPQCTIAMEACATAHGWGREIGQLGHEVKLIPPQYVKAYVKRQKNDKADAEAITEAASRPTMRFVEVKTVEQQSRAMLFRSRKMFIGQRTQSINALRGHLAEYGVIGPKSKAGLKKLIAALDAENNGLPNLVCGTARMYLEHIDTLSTKISDLTKQLESVSKSSGTVRRLKTMPGVGLQTALAIEAFAPDMSCFKRGRDFAAWLGLVPLQRSTGGKDRLGKISKMGQKDIRSLLITGAMSVITAATRFGVRKGSWLAKMLDRKPKMLVAITLANRMARAIWAMLTKQENYRNPEAMA

SEQ ID NO: 61563 - protein, 339 aa, unidentified
MKITTVGLDLAKNVFHVVCFNERNKEVKKRMLRRKQILEFFTQLAPCQVSMEACAGSHYWGRQLRGLGHDVKLIPPQHVKPYLRGNKNDYNDARAIAEAAARPGMPFVGIKTVEEQDMQAIHRMRSQCMRDRTALSNSIRGLLGEYGIVFPKGVATLRKKIPEILEDADNGLSVLFRNLLARRYEQLVELEAYIAFYTKELEAISQQDDACLRLQTVPGFGPIVASAYRSVIGDGRSYARGRGVAASVGLVPRQHSSGGKHVLLGISKRGDKYLRKQLIHGARSVVLQAASKDDPLSRWVNRIRKERGWNKAVVALANKMARMGWAILRHGTTYQAPTI

SEQ ID NO: 61564 - protein, 332 aa, unidentified
MENFFIGVDVSKKTLDCVLYDVEMSKMKGEYHLKTTNDKDGCAEILKWMRQVKATKKTSIFCMEHTGRYSYTFAENLAEKRLQFCMVPAIRIKGSFANARGKSDKVDAIRIAQYAYRYRDELKPTSLKDNDVVKLRDLMNDRKMLVKDMASRKNIISEYKDSPREGRYKRAKESLELMKKQLKEVEKEIIDLIKSNPSMEKSYNLLISITGISLVNAANIIIFTDNFQSFTDSRKFAAYCGVAPFEYTSGTSVNKGVHVSKLANRTLKADLSMAARCAIAYDTELKTYYKRKREEGKSFGCILNAVKFKLIGRMFAVVKRGTPYVNTQKYAA

SEQ ID NO: 61565 - protein, 443 aa, unidentified
MSNRKPVFELAHPNAAGIDIGASSHFVAVPPDRDDQPMREFPSFTEDLGRLADWLSECGVDTVAMESTGVYWIPLFELLESHGFTVYLVNARHVKNVSGRKSDVLDCQWLQQLMSFGLLSGAFRPKGDFCALRCVARQRAMPLTYQSRHVQHMQKALTQMNLQLGQVISDVVGETGQKIIRAILAGERDGQALAQLENNHIRASEADIAKAPQGSWREEHLFALKQAVALYDAYAGQLAECDRQLEKMLAALAAHEGQPKPAKRKGGKGKNAPAFDMRTYLFQLCGVDLTRIDGIDVTTAFKVLTEVGADLSRFKDAKHFASWLGLCPGTKISGGKVISAATKPTANRAAQALKLAAANLRSSQSALGAYYRRLCARMDKPRAVTACAHKLARLIYTMVTKGEEYVDQGQDQYEERHRERVVKLLAKKAEQLGLQLVPAAENA

SEQ ID NO: 61566 - protein, 346 aa, unidentified
MVNKSCGLDIHKCFLIATILSRSGEKKQERFQRNEDGILALKNWVLSEKCDVVACESTSDFWVPIYDSLIKHLPVIVGNARDMKAFTHKKTDKVDSEFIAKLALNNMVQSSRVFPKNHRDFRSNIRLRHELVQKRTDIKNEAHSILAPEMFNLKDVLTDIFGKNGRNILSGITSGKSIDEIIECLSPYVRKKSSQIREILNKEISQSAVFRLQICLELIKYLDVEIESLEKEIFSYAYSIHKREMEILMSVPGIGELGAATLIAEIGNFKDFSTGDKLASWLGVVPNVYQSADKFYNGRITKRGSKEARWILTQIAQSASRKKNSKLKNFLTGKRSLLDMQNQLLH

SEQ ID NO: 61567 - protein, 327 aa, unidentified
MRNTFVGIDIAKAELVACLIAGEGVKPRTKTFKNTACGHRALVTWATKGSSPEEVHFCMEATGCYHMDVATFLAEQRVFVSVVEPRRIKHFGVGMGLKNKTDKADSFVIARYAQVQKPSAWHLVDPIRRQIDCLSRRMRQLSKARNQESNRLQNTRLHELVVSQIHENIKRFQEQEAAISKEILKLLSEAPKLKKLTDVLQRVKGIGVKTAIAFACLIDPDQFESAKQVAVFAGLNPVLRQSGTINRKTSISKAGQSGFRSAFYFPTIIAMKSLQPLSELARRLKQKGLKPKQVIAACMRKLLMICYGIAKNLTRGLEVYNVPQPKT

SEQ ID NO: 61568 - protein, 367 aa, unidentified
MSDTIVAYQSFIGVDLHKNTVTLAAVRPDGTPIDRVKIPTKCRERIENWLLTRPRPSRMAVEAVGFVEWFIDEYRPCVDRIDIADATELANRRGKRRKNDPNDARDIAQRLARGECPLGYIADDELMQLRKLGRHWHQLSRLLSRTKHSMRSMLLAANVAGPKLDGPAAQKWILAFGHLLKPVQQQAFVNFLDIIQLVERQRARLHLQITFANRADRFRAIVELLKSVPGIDEIWACIIAAEIGPFDRFPNADALEFWAGMTADLKESAGRTQSGNITKAGSRSLRWALCKAALTLCRSDKKQEAVRQRLIRRIGKPKANVAMGRRLLRILYAMIRDGKPYARGPATKHNLGANRARMARKKRKEAA

SEQ ID NO: 61569 - protein, 505 aa, unidentified
MVPGRVRKPLVTPRRFSRLTAIPLRRVPALPHDRGRLPAMAFTLTEETAMPRGRRQTTRAATPPVLNPNAAGIDIGATEIYVCVPLERDPQPIRRFGTFTQDLLAVATWLTQCGVTSVAMESTGVYWIPLYQILEARGLEVCLVNARHVKNVPGRKTDVQDCQWLQYLHAVGLLRASFRPPETFCAVRSLLRHRDNLVRLAAVHTQHLQKALNQMNLQLHHVLSDITGVTGLAILDALLAGERDPHVLAGHRDHRIKASAETIAKALVGDYRREHLFTLRQSLGAYRHYQQLISECDREVQGLLATFESVSDPAVSPLSPATTTHRKPQGNAPRFDLRTELYRILGIDLTQVAGLNTATVYTLFAELGSDLGKFPSAKHFASWLGLCPDNRISGGKVLSVQTRHVKHRVAQALRMAAQSLYRSHSALGAFFRRMRAKLGAPKAITATAHKLARIVYHLLTTREPYAESQLAKHEGMYRKRLESRLYAQARALGFQLVPAAGQSVS

SEQ ID NO: 61570 - protein, 353 aa, unidentified
MDRYIGIDAHLQSCTHAVMGPSGRRLKEQVVETNGKALREFMQSIAGDKHICLEEGELSQWLYELFLPLAKEVVVVQPEKRKGSKSDSLDAWGLAELLRTRRAATVVYKGRGTYSALKEAVHAHRAITRDVTRSKNRLRAVFRARGISGFGQEVYEPKLRRPWLQQLSVARQRRAQLYAEQLDHLVAIAEQVDSWLQEEANGCPIIKILTTAPGIGLVRATQTVATVVTPHRFRTKRQFWSYCGLAVVRISSSDWAPKGDGGFRPKRKGLTRGLNRNRNPLLKEVFKGAALTVIQQMPDNPLAQNYRRLVEEERDDPALARLTLARQIAAIVLAMWKKQEVYDPTRYVCSKTV

SEQ ID NO: 61571 - protein, 343 aa, unidentified
MEHYAGIDVSLELSSVCVVDATGQIVREAKLASEPEALIGWLRGLGLELARVGLEAGPLSQWLFAAMHEADLPVELLETRHVRDAFKAMPVKTDRKDARGIVQLLRLGWFRPVHCKSASAQETRALLTARKLLQSKYHDVEMSLRGVLRGFGLKVGRTTPRSFAARIRELVEGHATLTAIVEALLAARETLGAQLCGLEKRLRNQAREDERAQLLMTVPGVGVIVALTFAAAVDDPGRFRSSKTVGAHFGLTPKKYQSGEKDVTGRISKIGDAGVRTALYEAAHVILTRPVKGSELKSWAARIAKRAGMSKAKVALARKLAVVMHRMLVDGTSFAAERAAVAA

SEQ ID NO: 61572 - protein, 417 aa, unidentified
MKEEFTFYVGVDWGVEFHQACILDAHGEKICQRRIEHSGPGMLEFCDFLQALTNGEASALAVAIEVPRGPIVEALLEHNYAVFSINPKQLDRFRDRHTVAGAKDDRRDALVAADSLRTDQHCFRRVRPEHPDVIRLRELSRTEETLGIDLRRCVNQLSQLLLRYFPQLLRLCSTPDEPWLWALLELAPTPQQAAKLTEKRLKQLLAKYRIRRWTAEKVGEILTAPPLPLAAGSAEAISEHALLLLPQLRLLHLQRKQVADRTQQLLDQMATSTKDFPMSQEHRDIPVLLSLPGVGRIITATMLAEGSHILSLRDYHALRAHAGIAPVTKQSGKSRQVLMRYRCNQRLRNAFYHWARTSIQHDPRSKHHYARLRQVGHDHGRALRGVADRLLAMLIAMLKSGQTYDPNRRSTANLAAA

SEQ ID NO: 61573 - protein, 336 aa, unidentified
MGVDLHHDSFVVCVRSGQGQQWQRWAMSEMGDFVKHLGKQDAVAVEATGNTRWFCRQMGERVERIVVVNPHQFRVISQSVKKTDRRDAALLAEYLEKDLLPEVRVKTDQQSEVAQMAASRDQLVKMRTMLKNQVHGLLRSHGVLVNKQQLASRKGRMQLREVELPAMAMLQQEVLLEQITAVSKGIGQLQKSLREAAQKLPGYDNLISIKGIGELSSAILLSAIGRVQDFSDAGKLAAYFGMVPRVEQSNQRQHRGRITRQGNKLARTTLVQCALVAKRYSPFLQGFYKRIQQRRGTGKAIVATARKLLTIVYYTLKNHWVFDDFGAFALAESPSH

SEQ ID NO: 61574 - protein, 401 aa, unidentified
MAAQRDTAWVGIDIGKTHHWACVVDAEGKALLSVKVANDEAEIEALLAKTGSLAMQLIWAVDIIGAPSALLLALLARAGQSVRYASGRVVAAMSAAYAGEGKTDAKDAYVIAETARLRRDLSVIDTGTDLVRKLAVLTGHREDLIADRVRMINRLRDLMTSVFPSLERAFDYSSHKGALVLLTSYATPDRIRRVGQTRLTGWLRNRNVRGAADVAARATAAAKAQTVVLPGQDMTASIITELATGILALDDRLKVLDAQIQMTFDEHPHARIIQSMPGFGPFLGASLLVGANDLRAFPSAGHLAAAAGLVPVPNDSGRRTGNLHRPLRYSRRLRHVFYLSAQTSMMRAGPNRDYYLKKRAQGATHSQAVIALARRRIDVLWALLRENRTWTAAPPALAQAA

SEQ ID NO: 61575 - protein, 371 aa, unidentified
MGKHRLAFVAFDSAKNKHAVAIADGGRGAEVRYLGEIDNSPDAVRKLVAKLTRQYERLHFCYEAGPTGYGLHRQLTELGHVCDVVAPTMIPKRSGDRVKTNRRDSVALVKLLRAGELRAIWVPDSVHEAVRDLTRARETAMVDLKTKRQQLLSFLLRHARSFPDARNWTKTYERWLAKQTFAHPAQQIVFQDQLEAITTAQARLAALEQQLREIVPTWTMAPVVAAYQALRGVSFLVAITFVAEVGDVRRFATPQQLMAFLGLVPSERTTGDTVRRGSITKTGNHRARRVLIEGAWTYRFSARVGETLRTRLKDLPSSVRAIAWKAQVRLCARYRRLSARGKKTPVVTTAIARELSAFLWAIGQQVAPQTG

SEQ ID NO: 61576 - protein, 429 aa, unidentified
MNGVDTTRLESFRQLRKEIRGSNEHLIVGIDVAKDNHHAFFGTARGKTLLKRLVFNNNLQGYEKLSTYVEAAKVKNNLNKVVFGLEPTANYHKPLGEHLIKCGFDVVLVAGTAVKRNRELLDGRWDKHDTKDAANVADLVSQGKCLFYEYPIMPLRELRNLLSFKRRLKKQEHGTRVRIRNHLLAQYFPELDPYFSRMSSCSLSVVKWCLEPSLIAGLEYEEFLRLVAPGKRTIKQREHVKLIWEKAFESIGCNAGETVQFEAKMMVEELQHVRESISEVEEKIEEICLNFPEYKYLLTIPGFGKDISSKVLGAIGNPFRFDNAKQVIKLSGWDLNANRSGKSSGYATAVISKKGKADLRYALYQAALVASSRNQHFVAYFTEKLRQRSRERGIKTKMRVKLAAKLLVIAWTLMKKQELFNPEYLKVTL

SEQ ID NO: 61577 - protein, 352 aa, unidentified
MEIIALDAHKRYSQVCVQKQNGQFLCEKRINHGRGAIKQFLVGWTAGTNVAVETVGNWYWIVDEIESAGMNPQLVHAHKAKLMLGSINKTDKLDARGLNRLQQTGTLPTVWIPTCEIRDSRELPRTRMVFANLRTRLKNRIHSVIDKYGLHTDFEGISDIFGGRGRGQMALTIKQLPSETHYTMRCLLRQLDMVEGQIRRIEKRMKKVFSKTEQVKRLMTLPGIGFILAVAIANEIGDISRFSTPQRLASYAGTVPRVHSSGGHTRYGKLRSDVNHYLKWAYSEAGNSTAVNHKRFPFRHTSKLYKRIRERKNHAKAVGAVGRHLAEASFWVLTRNEDYKEPEMKSASPTAV

SEQ ID NO: 61578 - protein, 340 aa, unidentified
MDNIGLDLHQRETQLCILTAEGEIVEQRIRTSRERISEVLGERGAARILLEASTESEWVAQHLESLGHEVIVADPNFAPMYATRSRRVKTDRRDARTLAEACRLGAYRPAHRVSPQRRHLRAELAVREVLVRTRTRFVQVVRALVRRDGLRVPSCEPEHIGAKVAALPLAPRTSAELAPLVALLEPLSAQIAAADRRLAALAAADPVVTRLQTAPGIGPLTAVAFVATLDVVGRFATAHQVAAYLGLTPRERSSGEQQHRGRISKTGDPRMRWLLVEAGWRLLRSTQPAAAPLRAWAERIAARRGRSIAVVALARRLAGILYAMWRDETEYRAAAIKAVA

SEQ ID NO: 61579 - protein, 394 aa, unidentified
MKPIITCDVSKNKSHIRGYLDPETPLEKAFKIQHVKSGFKEIKSLAEKLKSLTGDYPVFVLEDTGVYSECVKRYVESIGLDLYSISPLESAKQRKAKIRVTKTDPLDCDNIAKVYYSRSLRKSNNTNQNIRNLARSKESLTKQIITQKCNISRYLDLIRPCIENFFGNFDKKWLYVVIKQYGHPDVLKRRTVDQIASLLMHQANKRKLNAYRIAHKLKDYALEVVSGIQNNDETITQLVNSIKRLDQLTLERDVINSKLNEKVKKYPIYEVIKHLPCVGENLLLSLSSELLNIDNYKSSKQLVAYAGLDPSILQSGKENGEHYSITKKGNGLLRSKLYLLVKLMLSNKKDNVVTRFYLKKKNSGLPSKAAVIASCRKLLTVIYGMNKNKTFILQ

SEQ ID NO: 61580 - protein, 395 aa, unidentified
MNKKVHYIGLDVHKETMAVSIAPQATTEVRRYGIIGGTLAAVDKLVKQLSREGVELRVVYEAGPCGFVLCRHLRSRGIHCDLVSPSLIPRKASDRVKTDLRDADQLARLYRAGELTAIHIPDQEDEAVRDLIRARSAVVDDLRKARNRLKGFLLRLGFRYTGKSSWNEAHKRYLSGLVMPQAPQQIAFQEYIHALDDAGERLERLTQAVEDALAGWKWEPVVRALMSLRGVQVLTAMTLVAEVGDFSRFSDARSLMHFLGLTPSEHTSSDKRVQGGITKCGNAHCRRVLTEAAWQYRLKPKVSEAIQKRQEHQSKAVRLIAWKAQERLHKRFQQLAVRKKSVVAATAIARELAGFVWAIACQVKAADQPAAPEIIRTCRGKVYRLDPEKKLAQAQ

SEQ ID NO: 61581 - protein, 456 aa, unidentified
MQAYYLGIDVSKGYADFVILDVCKKTVEPNFQLDDTFDGHCKLYEILSRFRQEHPEGMLSAAVESTGGYENNWLHSLMKFQATLSMRSARLNPLGVNANSKASLNRLITDKISARNVAEYMIAHPEKISYQQDDYFGSMRKLWGFFNMLTKQKTQLLNQLEFLLYSANPEVMAYCKEKIPCWMLETLKRYPTAQKLSEAMPESLAAIPYVSSRRAKELIDNAKRSVASTSDTVTEELIVDTVGQIAHLKKILQMQEKKMSALCTLPEVALLKSFKGIGITSAIGLLIEIQAIERFASVKKLAAFFGLHPVFKSSGDSAGGFHMSKQGRKEPRRILFMVAMASISSNSHIRGIYEEHTQKGMKGMAALGLCMHKILRIIYGMLKHSRPYDPQIDLTNRAKVCQEERAAGEDKNRRYQDLDSRAPISRRQRKNRMEKELSHSDNLTKCGIMAPCPSHS

SEQ ID NO: 61582 - protein, 536 aa, unidentified
MADKKRNTQRKHIRSEGAYSLDEIRSLTMDDGTRVITSADGDIKRPVCAGIDVHKEILMAAVCKTDPKTLNAVFYVRQFKSTNSDIRTMGAWFQSHGVQDVCMESTGKYWIPVFNILEQCGQRPVLTHPKYVKQAKGQKTDFRDAVHIASMFRMDLVVASFIPPADIRDLRELCRYRLKLTYMRTSEKNRFQNSMTVSKVRLDCVFSDPFGKSASSIMEYLIMTEPEDVSDKQILSMVDRRVKASGEDILDSIHGYEFIGIQRDKLKVINLHLGQINECIRLIDEKLDYFRQKYSRIIRHLATMVGVTEESALYILGEIGTDMSVWRDDASLASWAGLSPANNASAGKKKSTRTGDGGHYLKPLLVQCALAAAKSTKKDPSFHCKYETLKKRRGHKKAIIATARKMLVAIYHMIRDDADFLPVDHEEVLHSTKKQKGLNLDNVIAFLKEQGADDDTLRLVERQCGAQEMDAAEEMESVSSAEKKQSVSGSAATSQPIQESVNGSPVLISGSQKGHALNHHSKEPAVATATAQNELL

SEQ ID NO: 61583 - protein, 380 aa, unidentified
MPDVSSAAPIEVSTWVAIDQHKLSLVAATLPASGGQPEVVRLENTERAIRRFIERLGGGDGLAVAYEAGPGGYELHRLLSSIGVACDVIAPSLVPVRAGDRVKTDRRDAKKLVRLYRAGELSFVAPPSPAQEGLRDLVRARDDLRCARTAARHRVVKALLRHGHIYRDGKAWTIRHRAWVASRRLEDELAQSALEHMSAHLAALDAQIAAVDQQLEQVATAEPWADPVGWLCCFRGISTRTALGLLAEIGDFRRFGHPRELMSYLGLTPSEYSSGEQQHRGHITKSGNRHARRLLVEAAWHYRHHPRTSARAANLAGHVPPEVSAHAWQAQVRLHHRYRVLGEHGKRSTVANVAVARELTGFIWATMTRTPLREQERTAA

SEQ ID NO: 61584 - protein, 417 aa, unidentified
MQSARNTLPEEPANGVTSGIDWARDDHAMSVVDARGREISRRTVKHSAAGLRELTDALTRAGAREAAIERPDGPVIDALLEAGIIVVVISPNQVKNLRGRYGSAGNKDDRFDAFVLADTLRTDRARLRPLTPDSPATTALRRACRARKDLVGHRVAVANQLRAHLRNTLPGAVGLFQDIDSPVSLAFLARFGTQDRADWLTPARLGKWLASTGYSGRTEPAVLHARLTAAPRGITGPDATAQAGITGALHAVLVTLTEQIKVLSAQIGSQLAAHADSHIFTSLPRSGTVRAARLLAEIGDCRARFPTPEALACLAGAAPSTRQSGKIRAVTFRWACDKQLRDAVTDFAGDSRRASPWAASLYNKARARGHDHPHAVRILARAWLFVIWHCWQDHTAYDPARHKALQRILNQDQLIAA

SEQ ID NO: 61585 - protein, 418 aa, unidentified
MKSMEITAVGIDVSKSKSTVAIRRPGGVIVACPFDISHSSHDLEKLVSILKTTGGDIRVVMEHTSNYWKPIALTLKNAGFYVSVVNAMLIHDFSDNSIRKLKTDRADSLKIANYALTFWNQLPPFNDEDETRLVLKEQSRMYERLASTATSLRNGLIALADQTFPSIDQAFGHAIKNADGHEKWVDFFSIYWHRDCVLRLSIEKFTESYRKWCLRRNYKFRTNTAHKLYALAQDAVPTLPKNNGTKALVLQACKSLNAVCEAKQSTQEEMNRLASLLPEYEVVMQMEGTGPITGPALMAEIGDVRRFKNKKALVAFAGIDAPPFQSGNFESKSRHVSKRGSPHLRRTVFLVANIILTLSHKDNSVFCFMDKKRAEGKHYYVYTIAGSAKFLRIYYARVSEYLRTQEPPAAAICLDCKD

SEQ ID NO: 61586 - protein, 397 aa, unidentified
MIPESGNSVSPHFRNNDSEGFQSAKEWALRIAAGHDKRQIVLGLEPTGHYWFCLATWMVSNGISVVQVNPYAVKQTKEVEDNSQLKDDRKDPKLIANLVKDGNFGMPYLQEKLYAELRRLSMFREQLNEDRIRSINRMHREMKIYFPEYKDALGKVDGAFSLELLKQAPFPDDLIAIGADGIRQIWHDAKLRGRGYGRAGEILQYAEESVGIKDGAAAGKTAVKWFVRKILELDAELAVIENQINQKCQEIPYAVNILEIAGIGENTLSGILAEMGDISRFDDVKEIQKLSGLGLVACSSGKHKGETRISHRGRKRLRYWLFQAAKSAVAHAEEFKELHTYYTTRADNPLKKMQSLIVIACKLLRIIYTILKNGTAYDPKKMLMDIRHPEKKEAVAA

SEQ ID NO: 61587 - protein, 386 aa, unidentified
MKLVGIDIAKYEHAAFIMEASTGESLCDPFFFKNNKEGFKKLYTELNKYSKNELLIGMEDTGHYNFAIESSLLAEGYKVALINPITTKSLRKASLKSVKSDKEDALLITKALLDKAYYRIISIQDEKLKEAKELTRYRTQLTLEMNRKKNVLQRHIDIVFPEFNTLFNNEYTITYLNILRKYSDAYTIAHTDIRSLRKCFKYCNSFSAEELKELASNSVGIHDVSISFIIQSVISSIDLINSQIEELDKKIEELAITQASSITSIPGISIITGTSILAELGDISKYSNAGKVIKFAGVNPYISESGKFSADKPAITKKGSKYLRTTLYRVIIPVIRHNPAFNNYYHLKRNQGKGHLCALGHCVRKLLRIIYHLETNNLSFDINSLK

SEQ ID NO: 61588 - protein, 344 aa, unidentified
MSIIGGLDIHRKQLTFDCLDTTTGQVTRGQVSPADREHLRGWLGRFAGCGDVAFAFEGCTGWRYVAEELAAAGIEAHLAEPADTASARGRKRRAKTDKTDSRHLRQLLAEGRLPECWVPPAQVLEARALLETYHDLRREHTAWVQRIHAVFFHQGAPALGEIMRTAAGLDAVRAAAAAHLPAAGQQQVAVALAMMACLEEQLDVLRRRLLGIARHMKGPRALADQLYGAGPLTALALTCWLGGAGRFSSARKAVRFAGLDITVYSSDGKRTPGRLSRQGPPVLRWAVYEAGKTHARGAAPDHAYYAAVKDRKNSKRAALSEARKIIRRACHILSDLGDDAFAAA

SEQ ID NO: 61589 - protein, 415 aa, unidentified
MALKIVYKICCGIDVHKTFVVACIASTNDKGVTSYESHRFSTYTSGLKTLLQWLIDRNCKDVCMESTGKYWIPVYNILEKGCSIVLAHPKYVKAIRGKKTDKKDAKWIADLFKHNLVAGSFMPPSDIRQLRDLMRYRFKLTCFKSSEKNRLQNCLTVSNIQLGNVVSDTFGKSAQAILDKILENPADTSFDLEPLVFKSLKKKLPELRDAIDGYITPEQAGKLKVIKTHYEDLESRKAELEELILALAAPYQQELSILQTSPGISSDFTAIGIISEIGTNMEAFPSAKHLCSWAGLTPTNNESAGKKKSVRVSKAGCYIKPLLVQCANAVIKSTKHPEMRNRYLRLKKRRGHKKAIIAIARMLLTALYHMLKNGENYNPELYRKTDLPPAGREITIEQALMLIRNQGYKIKSATT

SEQ ID NO: 61590 - protein, 411 aa, unidentified
MPKIVYPICCGIDVHKSFVVACIAATNEQLVTTYKSKRFSTFTGDLRRLAVWMGENKCRDVCMESSGKYWIPIFNILEPTCHVVLAHPKYVKAIKGKKTDKRDAKWIADIFKHDLINGSFIPPADIRQLRDLVRYRFKLTNYTTGEKNRTQNCLTVSNLKLDDVFTDVFGKSASAITSKILENPNESFNVTPFVDRRCKKPIEEIQAAVDGMMCANQAEKLRIIRSHMESLEICKANLESEILTVAEKYLPQINLVLTVPGIQSFAAVAIIGEIGVDMSVFETSRHLCSWAGLAPQNDQSAGKKKTTRISRAGVYIKPLLVQCALCAIRNKKHPEIANRYNAIKKRRGHKKAIIAIARMLLTAIYNILKKNEPYNAELYRKADNPPVQREVTVEQAIFILQRQGYLVTAEK

SEQ ID NO: 61591 - protein, 342 aa, unidentified
MNRVYVGLDLGSSNFHQVAIEESGAVTHNSVFATSEANLVKACSGLHGEIHVHLEAGELAPWASEIIRPLVHRVVCSHPQTNAWIARDRDKSDRIDAYKLASLLRLNEFKEVRYPQEQLRRDFKAVVQHYDELTQQQARLKTKIKARLRMQGVIRRGEQVFSVRGRKAVLAEVKSPVVRTAIQQLYALLDQSLASQAEARRLMLRAAQALPEISIIRTAPGIGPIGACRFSAYVHSPQRFSSTRKLWKYCRLSVSHRSSNGKPLRRPRIDRSGCGRLKDVSRKAFEAALRRKDNNGFQRAYYRALAQTHDATHARLTVQRKIVSTLRAMWINQTPYSDQMTP

SEQ ID NO: 61592 - protein, 359 aa, unidentified
MSTVPVFVGLDYHQSTIQVCVLNGGGTVLLNRACENRWPAVVAAVLTVGTPVRVALEACTGASDLAQELVDQAGWSVDLAHTTYVSRMKRQPDKTDYSDARMLADLTRVGYLPRVWLPPVYIRDMRRLVSLRDSLVSQRRNLKLRLTSLLRDHRVTLPHSRWTRAWLKAVAAPETLPAVGHLIAVEILDQLPDVMARIRRVEQQMELFTQGDTVITYLRTLACVGPVTSWVMRAFIVDVTRFKNGKQLAHYCGLSPGNASSGQRVADTGLVNSGNTLLRATLIELGQRLARTQARWKAFRARLRAGGKSHCVIIAAIANRFVRAAYYPWKQTHLSLSAPPPPPTQCVLDTATGEVSSSR

SEQ ID NO: 61593 - protein, 341 aa, unidentified
MSELYAGLDLHSGNTYIGLIEKGTMKRVFEKRVRNNLEEVVWTLAPYREEIRGIAVESTFNWYWLVDGLNEAGYGCVHLANPAAIQQYKGLKYADDRHDAFWLAQMLSLGILPEGYIYPREERPVRDLLRKRSFLVKQRTAHIISLQSMIERNTGVHMNANALRKVKAEDIKQILKEDHLVLLGTTSLETIDFLGKSIKEIEKTVKKTVKTRDAFEKLHMVPGIGDILAMTIMLEVGDISRFARVGDFSSYCRCVPTGRFSNGKNKGKGNVKNGNRYLAWAFIEAAYLSMRQSPKIAGYYKKKASRTHKMVAVKTIASKLARACYYILRDGVDFKEEMLFC

SEQ ID NO: 61594 - protein, 339 aa, unidentified
MKLYSGMDLHSNTTHIAIMDEKRQRLIDRKVRNDPELILRFLEPYRASLEGIVVESTYNWYWLVDTLRDQAYRVHLAHPVANQQYHGLKHSDDRHDAFWLAELLSLGVLKEGYIYPRELRSVRDLLRKRLQLVGYRTAMILSVKHVIHRNRGIIVEASQIKRLGKEGWAEILKGDEALWLAARSSKEAMDCLTQQIQGIERWVLRRVKLEEPFSRLLSLPGVGEILGMTILLETGPMERFPKVSQYASYGRLVSSQWTSNDKVKGRGNVRNGNRYLAWAYSEASDHARRHDPLCRAFYNRKLNQRGHRVAHKALAHKLARAAYFILRDHEVYREEKMFS

SEQ ID NO: 61595 - protein, 347 aa, unidentified
MRSINNLFMQVYGIDLSKEKFDVNFFDTDGKEKNKTVKNGLTAISKFLSKVPEGSVLCAENTGSYGDMLVFLCNQYSVKIALVPGYTVKHSLGLIKGKSDPIDAARLREYGERFFDKLTFKKYQSESVSELRQLYSLRSQLVKSRKKLRTGEHARENMPMQSISVNRVLQAALNALDEQIKAVEKEMALIIKSDAQLSENYELAVSVMGVGPVIATDLIIKTGNFKTIDTARKAASYAGVCPFPNASGNMVGKSRTSPFADKELKALLYMGAKSAVKHNKECNLYYQKKQQEGKPHYLIMNNAMNKLLRTIYSVVSNKTPYRRDYICLDPREREINKNDNGSKKIVA

SEQ ID NO: 61596 - protein, 333 aa, unidentified
MVEGTKGSHHKEGSKKMSKNSTVCAGIDTGKYKLDVAIDESADQLQVDNSPAGYRCLSAWLRQRRVERIGIEASGGYEQAVVSFLRADGFVVIVFQPVQVRAYAKFVLQHAKNDNIDAALIARCTAAATDIHEPPDARLAPLAQRLTMIEQLTQDVAQVKTRREACWDQRIREFWKQEIDRFKRLLQAELKQLVAAIREHRDLSTRLDLIASVDGIGLRTAVAILVRMPEIGRVSREQAAAIAGLAPYDDDSGQRRGLRHIKGGRQRLRQSLYAATLPAAFYWNTQLKALYKRLIAAGKTHKLVLVACARKLLIFVNTVVARGTPWTSAPATT

SEQ ID NO: 61597 - protein, 394 aa, unidentified
MFNPLKVRLMRAVCGLDVHKDSVYLCILNEDGELIEKVFGVLTFQLQQMRDLLLAHHVDEVSMESTSIYWIPIWRILAPHFLLRLVNPYFIKQLPGHKSDVADAEWIAECTMKNLVSGSFVPPEDIQQLRQYDRRIFDLDEEIVRKLSKLDAVMQRCNIRLSNYVSNVDCKSYKDVVRKISEGVTDPEVLIDEIHGRIIKHHGRETILASLTGIISQAEIDVLRQLREELDLAEEHKQECLERMLKICQEKYPDELRRLQTIPGVKERTATSLIAEIGTDMSKFETANHLAAWSGLRPRNDESNKKFKSRRITHGNVYLRKNIIQCAWAASRTKSCFFSRFSYHQTQVRKKNKMKVIVAVARKLLVAVWHVIHDETDYVDFQQKQDRQLSATNG

SEQ ID NO: 61598 - protein, 454 aa, unidentified
MNNNGFLGLDISKGYADLYVINSDKIPVEAAFRLYDVQDGHQRIEELIDKWFEKQSFETLYCGVESTGGYENNWINLLQELAIKRPLKIARLNAKGVKSLSDAALKRTITDSVSAENIAMYLVDFRHKIKWIDDPQSFKKYTDGRRHNTFIRMLKKQRIQLSNQLEKLLYQELSPILTYCGHGAPGWLLNLLLKHSSVAAINKAGVKGLSKIKGITTEKAEAILNKTRESKHCTSAHISSVIKGTIKQMLHLDETIKEEKNKLIAEYSDSEEVKLLTSISGLGNQSAVEILIEIENIHRFEDAKKLSAYFGLHPVFKQSGDGKWGNHMSKKGRSEIRAVLFMSSLTAIRYSDLFKNIYSNARAKGKNHFNAMGVVMHKLLRVIYGVLKNKIAFSQAIDAKNVENAELKQQAEKEKSKEQKREQVQKLERYNRAELDHSPISKRHAKKRKVLQVT

SEQ ID NO: 61599 - protein, 348 aa, unidentified
MKTKHPIIIGIDTHKATHVAVAIDTQGARLAALSIPANTKGYLELERWSCGLGSVQAFGIEGTGSYGAGLSRSLLSQEHNVVEVTRPNGQLRYTHGKTDSLDAEGAARSVLAGQATSRPKTQTGSSEMIRHLKIARDTAVKSRSQAMVTLKTLIINAPADLREVLDQIKGKVALIRHIAAFRPGEIHNTLASAKAAMRALARRWLFLHEEILGHDKELERLVTKRAPDLLASHGIATMTVAEMLILVGDDPTRIRSEAAFAKLCGVCPIPASSGKTHRFRLNRGGNRQANAALYRVAIVRMRSHEPTLVKKRTKDGKSKSEIIRCLKRYIAREIYNKLCVLKSMEIAT

SEQ ID NO: 61600 - protein, 351 aa, unidentified
MNYVGIDWAYGRAAFCAMREGGEIAAEGLIPADEDGLARLVLKLGAEASGCVEMMSGAVWVRDRLQSAGWEMKVAHARKVRDVAPLACKTDKVDARVLAELCRRDLVPELWVPSIEDRALRERLRRRMHLVKIRTSARNRIFGLLTQFGLRISNARLRKPDAMELLRRRGVPEVWRASIAELLELGAEMDRRIDPIDRELGPIARADQRAQLLATMPGIGPLLSLTFAAEIGEVSRFPSPGKLIGYAGLAPRVSQSGERAAIGALSKAGSRTLRWAAVEAANQAWRSSNPWHAHYLRISARHGKNPAKSAVARKLLIAAWHMLSRDEPFKPHRPAAARTLPRRTPPCFLTA

SEQ ID NO: 61601 - protein, 351 aa, unidentified
MIFVGLDLHKRYITACALDGLGHLVVEERRLATDLTILLAWLGRLTGPVTVVLEATLYWAWLEQQLTAAGYAVQVAHPYQVKLIWHARTKTDPIDARKLAELARVHLLPAIWIPDAATRAQRQLLRGRACLVRQRTVLKNRIHAYLTGENLRAPVVDLYGRAGRAWLETIVLPPVVRRYVDLLLENLDLLSTQILALDKYLQRHVRQDAVAQRLQTIPGVGTFGALLLQAEIGPIARFRSAQELAAYAGLVPSTHSSGGRTQHGHVGRGSPWLKWILIEILQTLKLAPGPVGAHYQKLLRAKGKPKATVAAARKFCTYLYWMLKEEWSYSEWLRQHDRPEVRPVQPLGSVA

SEQ ID NO: 61602 - protein, 393 aa, unidentified
MRAIGIDIASETHTVAIVNETSEVLLKATEFTEDAEGYRKLFELLGEPRDCLIAIEATGHYWQNLFAALATAGFPVALLNPLRTRRFAEVDLERTKTDAIDAVGIARFAAQKRPPATSLPDSATLELRELVRLRDRLSQDLIDRKNQLHRLVDLGFPEFTRYVKTLASELATTILHAYPTAAAFPTTPRQLSKLCYDERHRVGAELAGALVGAAKVSVGRHHGEPYRRQVRYACEDLDVLRRRLRDLDGDIEQTLKTHEVGTLLTTIDGIGPLTSARLIAELGDPAKFRDGAALASYVGVVPGLNHSGKHKPKRAGITRMGHATLRRSLWMPVLTAVHKNPWLRAFYRRLRSDGKLPKVALVAAMRKLLHAVHSVAKNRRPFVPVLAMAEVAR

SEQ ID NO: 61603 - protein, 360 aa, unidentified
MFSERTSVGLDVHARSVAAAAIDSVTGELFQTRLTPAHDHVREWVLSLPGPVAVAYEAGPTGFGLYRSLIESGIRCEVVAPSKLQRPAGDRVKTDAKDAVHLARLLRIDEITPVSVPTLEQEAARDLVRAREDVRRDLMGARHRLSKLLLRHGIVYSGGKAWTGKHDAWLRTQRFAMPSTQMTFDAGYDTVLTTSARRNRLDQAIKAIATDSDFTPVVRRLACLRGISMLTAFALAVEIGDWHRFTGNTIGSFVGLVPSEHSSGASRVQGPITKTGNHHLRRLLIEAAWHHRPRYAPGAVMRARWDLAPAAARARGDLGNRRLHGRWVGFDARSKRSVIANTAIARELAGWCWSLAILED

SEQ ID NO: 61604 - protein, 446 aa, unidentified
MEVVFPYCAGLDVHKKRVTACRLVSDSTGQAPEGVAELQTFGTMTHELLALADWLVEAGVTHVAMESTGEYWKPVYNLLEGIVTIFLVNASHVKNVPGRKTDPADARWLAKLMRYGLLQASFIPPIAQRDLRDLTRYRTKLVQERAREVNRVQGVLERANIKLASVASDVLGVSGRAMLEALIAGQADPATMAALAKRRMRSKIPALEQALTGTIRDHHRRLLMLQLRHIDFLDAQIEALNSAIEGCVTTLSQEAGVDMAPPAPAPAEVPAPTGPRPPLTFTRAVELLDTIPGINQRGAEMIIAEIGIDMARFGTASRLAAWSGVAPGNNESAGKQRSGKTRKGNQVLRAGLTQLAHGAVRTKGTYVSALYRRLAARRGKRRAILAVAHSIMVSVFHMLSRNEPYRELGASYFDERRRHYTVDRLLSRIEHLGYRVHLEPVAAPAA

SEQ ID NO: 61605 - protein, 287 aa, unidentified
MRSIALDVHRDFCEVAIKDGTKLRSGGRIKTSVAALELFAQSLAPDDQVALEASGPALAIKRVIEPHVARVVVANTKRVRAIAEAKVKTDKVDARTLCELLDAGFLPGVFSPDEWTRSLRRRLQRRSKLVRARTRAKNELHAVLARNLKGRPPMSDVFGKAGRAWLGALELPPDERETVEGCLRQVDFLDAEVGLIERELAGQALSSEEIRRLMTVPGVSLVSAATFVAVVGDVTRFATPKKLVSYVGLDPRVRQSGEAPARHGHISKQGPGEARHMLCEAAWVVLL

SEQ ID NO: 61606 - protein, 353 aa, unidentified
MEQFIGCDAHKKFSVFASIDEKGEYGRTIRVGHERKEFRQYLQELPRGSKIALETSGCYYWIVDEMAQAGHIPQLAHALTAKRRMEGRHKTNERDARGLAMLLRNGTLPVVWIPPSELRDEREMLRWRMRLSGMRSGIKNRIHGVLQRYNVDIAVSDLFGNLGRVELLSRLNELPQYSRQSVVEQLRMVDSIETQITDCEKILEGMLSSRAERDLLDTLPGVGKILSAVLALEIGDVGRFGGPDRLVSYAGLVPAARESADWKRQDRCPRDCNVYLKWAYVEAANVISMHCKKWADRHVAQLYERVKKRSRMHGKATTAVARHLAEASYWILQKQQTYKEPRLQRQALSSTHG

SEQ ID NO: 61607 - protein, 347 aa, unidentified
MKITRIGLDLAKNVFQVFGVDAQDKRVLSRQLKRKDMQVFFQALPACLIGMEACASAHYWAWVLTEMGHTVKLIAPQFVKPYVKGNKNDANDAEAICEAVSRPGMRFVPVKTIEQLHIQARHRVRSELIKQRTAKANQIRGLLAEYGIVIGLGVRCLRHHLPEILEEAENRLQEDFRLLLTGLRDDLVYLDERIKTEDKAIATLANAHASARRLQQLRGVGPLVATALIAALGDGRQFRNGRQASAWVGLVPGQHSSGGKQTLLGISKRGDTYLRTLLIHGARAALRAARSKTDPLSLWLQGLCARRNPNVAAVALANKTMRLAWVLLRREEDYDPLHGHARPAQPA

SEQ ID NO: 61608 - protein, 348 aa, unidentified
MQSKSQIRSIGIDLGKTTFHLVALGSRCQVVVRKKFSRSQLLVYTANLPSSLIGMEAGVGSHFLGRALREQGHEVRLMPAQFVRPFVKSNKNDYRDAEAIAEAVERENMRFVPIQTEDQIDLQALHRVRERLVSRRTSVINQIRAFLLERGISFAKGPARLRREIPEILENADEKLSTRMRRLLDFLWQEWKHLQLQIESLSEDLEKIANSDAACARLQQIPGVGPLVATAVVSAIGNGAAFHKGREFAAWLGLVPGQWSTGGKTKLLGISKRGNPYLRKMFIHGARAAVLRVQREGSYLGQWMGGLESRAPRNVVIVATANKLARISWAVLSSGENYRPRPALAVAS

SEQ ID NO: 61609 - protein, 419 aa, unidentified
MKSTKANKVKKINAKTVIAALDIGKNVQYGYFRAPNGNDVKPFAFYNSKKSYKAFWQKLCQFKNKEELEQIVIGFESTGPYAEPLFHFLRKKDVELVQVNPVHTKRVKELTGNSPNKTDKKDPRVIADVISLGHALTLVVPEGAAAHLRRLTQARERALKQRTATINQLQDLIFVIFPEFLSIMKGISTKTASYLIRHHPSADSICAMGVEALSAKIKQISRGRLGDERAQKLVAAAKNSVGINEGKESILLEIEHLNGSIENVNRFIDRLERQMADNLQHIAYSGSILSIKGIGTVTAAGLVGEVADFNKFETISEVMKLAGLDLYEISSGRHRGQRRISKRGRPLMRKLLFFAAINTVKAKGIMHDKYQQMLARGMLKIKALVAISRKLLGLIFAVVRDNSQYVQNYNGKYHYKLAA

SEQ ID NO: 61610 - protein, 376 aa, unidentified
MKDDSTVYVGLDVHKESITVAYAIDAGEVESLGKIGTTQTEIDRLCKRLQSKASHVRVVYEAGPCGYGLYRQLVQRGFESMVCAPSLIPKKPGERVKTDRRDAAKLVRSLRAGDLSAVYVPDVEDEAFRDLARAWAAVKEDLRQARQRLKSFLLAHGVGYTGRANWSESHRRWLCEYSFANAWQQLAFEEHKRTIEDRLVQCGRLETALRDAVVSWRFYPVVLALQAMRGVQFVTAVGMVSELGDLSRFTHPRQLMAWLGVTPSEHSSGSKRRQGSITKTGNSYARKLLVEAAWSYRHMARVAPEIQRRHEGLPKEIIERAWDAQLRLCRRYRKLVARGKNANIAVVAVARELAGFIWDIARLAMALALPHGVQSA

SEQ ID NO: 61611 - protein, 363 aa, unidentified
MVESTTVTVGLDVHARSVRLAAVRADELLEERTLPYDEEAVERALRRWPAVRCCYEAGPTGFGLYRHLVGRGIECAVVAPGLVPQRPGDRVKTDPRDARKLARLLAGGLLESIHVPAPELEAARDLVRAREDARLDRMRDRQRLSKFCLRHGRLLPTSAWTVVRRKWLSEQRFEHAAEQITFDTYLHAVDLVDARIGKLEQAIRETAEQGPWRELVARLRCLRGIDTLTALALVAEIGDFSRFKCAEEFMAFVGLVPSEHSSGERRRQGSITKVGNSHVRRLLVESAWHARRRPKVGYELARRQRGQEAVVIERAWRCQQRLYQRWQRMAGRGKPQQKIVVACARELAGFVWAIATDQPLRTT

SEQ ID NO: 61612 - protein, 455 aa, unidentified
MQVTYTYCAGLDIHKKTVVACASVPDPQGQPQTIIRTFSTMTADLLALGDWLHSLAVTAVAMESTGEFWKPVYNLLEGQFELLVVNAQHIKNVPGRKTDVKDAEWLADLLRHGLLHSSFIPPRSQRDLRDLTRQRTNLVQDRATVVNRLQKALEWANLKLSAVVSDVTGVSARAMLAAIVAGETAPAELAELARGRLRAKRDLLEQALTGRVREHHRFIIAEHLIQFDNLDEQIGRFDAQISAYLDQVSAPPPAAAGASDAAPASSPPAADPASPAPAAEPPSPAPAALTWNAALVLADAVPGIGLRLAQDILAETGIDMTRFPSAAHFASWAKLCPGHNESAGKRFSGATGHGNRWLRTKLVQAAWAAVKVRDSYFAACFHRLAGRRGVKRAIIAVAHRILIALYHVLAKQEAFRDLGATYYDARSQAQLIKRTERRFAQLGLKVTVEPWPPAA

SEQ ID NO: 61613 - protein, 419 aa, unidentified
MESSRSKVCGIDVHKRFLIATILERNGPKKTKKFSNNLEQLLELKEWIITEQCQAVAFESTGEYWISLYDILQGDVEIIVANSYHIKWIPGKKTDTIDSEWIAELALNDLISPSRILSKDKRDTRALTRLREKLVNERTDHKNRVHKVLDSACIRLSVFFKDLFGKSGLKILKCILSGVPPEEIARKLPKRLQGRSDAILDAIRTQLSVQQLIQLQTSVTMIELLTEKIKELEQIILNDLKKDRRKLQILMSIPGIGTVGATTILAEIGDVNDFSSPDKLTKWAGITPRVYQSANKLHTGSITKQGSKHLRWILVEIAHSCIRTRNTAFRIFFERIFNRSGYKKAIVALARKILKLVWHLLTNDEFYEEKNTLVAKSSHLPISSEMESFSVSAAIELLVKAGFQVINGEEHSDKRVLGT

SEQ ID NO: 61614 - protein, 427 aa, unidentified
MTYRVAAIDVHKKMLAIVVADVGGEGEYQFERRKFGAAPDQLHLLALWLVEREVEEAVMESTAQYWKPVWGALERYWKPARQNREGSTKLSGSLHLCQAKSNRGPRGRKNDFADGERMIKRLVAQELVLSFVPDPEQRLWRTVTRRKYQITRDRVRFQNQLESLLEQAHIKLSSWVSDLLGASGRRILQAIAGGETDPAALAALADKRLRATPEELRDALGACAQLHEVYRQLLKMALEELQLMDKQIEQLDQQAWKLLARHQDAVQRVAEVPGFGVDSAIQMIAEVGPEAAAFESAKAMSSWVGVCPGDEESAGESKNTRSPKGNRNMRRLLNQAAHAAVKTKGSIFEVTFQRLLPRLKYKGAIWAIAHRLCRLLWKILHQGIRYEERGPAVSAKSKRTRTARMIRELQKLGYRVEGNTLPVENPA

SEQ ID NO: 61615 - protein, 407 aa, unidentified
MGMFVGVDWGCGSHAVCVIDAKGQVLDRFEAGHDREGLAALILRLIKHGEPGGIAIAIERPSGLLVDALVEAGFVVMPIHPNVVKACRPRYRAVSAKSDPGDAYILADILRTDGHRLTALKPQSDAIKALRGLVRGRDDLVGSRVVLSNQLRALLDSFWPGAAAIFADVASPIALAFIERYPTPESAARLGRGRLAGFLAQHQYCGRRSPEALLDRLHAAAGGRAGEAESEAKGELVRALARTLQSLVAEIARLTSRIEHAVAQLPDGKIVMSFPRAGRICAAQILAELGDVRERFQSEDQLAAEAGLAPVTYQSGKSRGVGWRWACNKRLRAAITCFADNSRHQSPWAADVYKRARARGCDHPHAIRILGRAWARVLWRAWTNGEPYDPAKHNRAKPFLAAASHTG

SEQ ID NO: 61616 - protein, 454 aa, unidentified
MSQRKKRSKKFQVTDLPRHLQHVNLNAAGIDIGSDRHWVAVPEGRDEVSVREFGAFTTDLVALADWLAQCGITTVAMEATGVYWIPLFELLERRGFEVKLVDARRVKNVPGRKSDVLDCQWLQQLHTYGLLAGAFRPADQLCILRGYMRQREMLVQASSMHIQHMQKALQQMNLLLHNVVSDITGVTGMKILKAIIAGERNPKALAKHRDARCRHSAATIAKSLVGNYREEHLFALTQAVSLYETYQTKIADCEAAVARHLSSQPQRTDDEPPASQKRSQAKDFMRAEVDMRAQLFKLTGVDLFSIAGLGADTLLTLAGEVGFDMTAWKSEKHFTSWLAVCPGTKKSGGKILTSKTRRSSNRAAAAFRIAASTLLRSKTALGAFYRRLRARIGAPAAITATARKIAVLYYSLLKNGTTFVETGQAAYEQKYQQRRFKGMQKQALAMGYQLVPIN

SEQ ID NO: 61617 - protein, 365 aa, unidentified
MSEIITYVGIDAHKRDLHVAMLGEAARTPVTWVVENEPKAVERLHRKLEREAPGRVQVCYEAGPCGYALQRQLTKGPVTCVVIAPALMPRKPGDRVKTDRRDARRLAELLRAGLLTEVRPPTPAEEAVRDLCRARDDARDDVQRARHRLGKLLLRRGLHWAGKNWTKAHRQWITTIQWEHAAERAVVDDYLLAIAQVERRLEDLDAQLAATAQTEPYREPVAWLRCFRGIDTLTAMLMLAELHDFRRFPSPRALMAYLGLVPSEDSSGDRHRRGRITKTGNTLVRRVLIEASWHYQHRPGVGVGLAARRKGQPAGVIAIADKAQHRLCRRFRRLAAKDKPAGKVVVAVARELTGFIWAALQPVAA

SEQ ID NO: 61618 - protein, 343 aa, unidentified
MEHYVGLDVSLKQTSICVVNQVGSIVQEGVVDSEPEAIAAFVRSKSPGAIRIGLETGPTATWLWTELKQLGLPVICIDARHAKAVLKMQINKSDRNDAAGIARIMQTGWFKEVRVKGPDSHSVRALLASRALLVKIKRDLENQIRGLLKNVGLVIGRAKFNVFAVRAEELIADRPELIAVVGPLLKARQAIEQQTNDLNRKVLKLARYDAQVRRFMTVPGVGPITALCFKATIDDPARFKRSRSVGAYVGLTARRHASGEIDWTGRISKCGDAMLRSYLFEAAGVLLTRVPKWSALKAWGMRLAKRNGLRKAKVAVARKLAVILHRMWVEGTEFTWSKKEVAA

SEQ ID NO: 61619 - protein, 428 aa, unidentified
MLNKLDRLQQFQDLRGTIRGSDSILIIGVDVAKDKHYAFFGTSNGRTLWKKLIFDNSIQGFNKLLSMTQDLSIQHSLNARVFGLEPTATYHKPLAEHLIKKGEQVVYVSNVAAKNNRALLDGRWDKNDTKDAANVADLVGQGRCQYYDLAEDSLRELRSLLAYRAKLKKQEHALRMRIRNSLLAQYFPELDKQMSQGGQDGLILDIIAHDFAPARIAALPFEVFRQQYQMEKRHLIQEQRLRTIWEISQSSVGCALPASAAWEGRMLVEQLRQIRQTKRELEKQLKEVGQTFPAYAYLLSIPGFGPIVSAMTLAAIGDAHRYTSRKQVLRLAGLDLSASRSGKSSNNAIPVVSKQGKAGLRYALVQAAQIASYKDDVIRSYFTGLLKGRELERGIKLKMRVKLAAKMLVIAWTLMKRNEYFDSGYFRT

SEQ ID NO: 61620 - protein, 417 aa, unidentified
MSRLLLRPLGRCVGLDVHLEFIEIAICEEGKVFSAGRVPSTPDGLKTLTDSLDLADRVALEVTGSSREIVRLLEPHVRKIIVVSPGDTGISQARAKTDKLDARTLAKLLWTGELEAVWMPPEWTARMRRRLARREQLVRARSRVKNELHAVLMRRLKGRPPVSDLFGVKGRQWLRSLELPEEEDETVKAGLRHIEFLDTEIEQVEQLIAKEALQSPQVKRLLTVPGVNVICAAIFLAAVGDIRRFKDSRKVVAYLGLDPRVYQSGSGPARGGRISKQGSPRARWALVEAARSVAQQPGPMHAFYERIRARRGHNAAVVAVARKLAVLFYYMLCRQEDYAHQQPSLTARKLRMLEVKAGAPTLKGKPTGVFATRERMRDAERALAQQAEASYKRSIADWRATSPHKKAAGASVTAERA

SEQ ID NO: 61621 - protein, 337 aa, unidentified
MDYFAGLDISMDETHVCVVDREGMVIHEGKSASLAEAIADELAKAPSCRRIVFETGRMAPILFHRLSQLGLPVVCIESRQAYQTLKSLATHKTDRNDARGLAHLARTGFFKPVHVKSLSAHAVRSLIIARKKLVGQRVTLENQIRGLAVVFGIRLPRALTAAFIDRALKASEGVAGLSAAIRGLIAARTAVMTAVAAIDADMRRMTKASEACRRLMTIPGVGQLTALAFVAEIDDPSRIRRSRDVGAYLGLVPRRYQSGEVDYVGGISKCGDRRMRTLLYEAANVMLTRYKGQLKLKDWAFTIAKRSTMRKARIALARRLAIIMHAMLRDGTEFVAA

SEQ ID NO: 61622 - protein, 361 aa, unidentified
MSIATTFVGLDYHQDSVQICILDSHGNVLTNRSVENDEAVIHRVATRYGQPKRVAIEACCGAANLAEELVTRRNLPVQLAHPGYVARMKRSPDKSDLSDAHLLADLTRVNYLPKVWLAPQATRELRRLMRHRGQLVRRRTNTKLRIRALLRENRLKWTVARAWSKPWLAWLSDHAALPDSDRWLLEDHLEELKSLTTRIKAVEKRITEATADDPVVDKLMALAGVGLVTAVTLRAEVGRFERFDTGKQLARFCGVTPRNASSGARQADAGLIKAANPAIRGVLIELAHRLIRMTDEPWAQRAARMLQRGKPKNVVVAAIANRWVRWLHHELRRNESTLTESTSAQAQQKGAAPSDSTAAST

SEQ ID NO: 61623 - protein, 444 aa, unidentified
MIRKVMDAIYQSVGGLDVHEETVMACRRRLISDGQAESEVEIFRTTSAGLRALSDWLAEWNVTQVAMESTGVYWIPVWNVLEGRFKLTLENAHRLKKVPGRKDDISDAEWIAQCMQCGLLRGSFVPPSEVRQWRQLTRHRTKLVDQRTSVINRLHSVLEQGNIKLSNVATDIMGVSGRAMIKAMSKGENDPARLAAMAKGKLQAKYEQLVEALDGQLNENQRWMLGRLLEQVGSLEKEIDAYSERIKELMAPYQSQLERLDTIGGVGERSAENILAEIGPDMDPFPSDDDLVSWGALCPGRNESGGKQGSRKTPKGNKWLKRTLVEAGWAATHEKDGYLAALYKRLAPRRGKKRAIIAVARTILQSAWHILKEGVEYKELGGDHFDRLNEEKSTKYFVKRLEKFGYEVALKPKQAEKAPVEEKPKRIKKSVVERKPMKGKEATT

SEQ ID NO: 61624 - protein, 391 aa, unidentified
MRFVGIDIASATHVVSAVGEDGTVLLKPVSFGEDAAGYTLLWEKLGGAKDTLVTLEATGHYWKNLFAALATRGFEVALINPLRSRRFAQEDLERNKTDSIDSLGLARFGAQKQPAVTRVPDAAHDELRELVRLRDRLVQDFGNCTRRLHRVVDLGFPEFKRCVKQLDSRLSTGLLQAYPTAKAFQEASVGEVAGLRYDERHRVGDALAKQLIELAQHSVGAHHGPAYQVQVRYLCEDLDVLRKRLGDIDDDIAEQLAAHEVGTLLTTIDGIGPTTAARLVAELGNPADFATAAALAAYVGVIPGLKQSGKRQGKRANLSPIGHARLRRALWMPTLVAVQRNPWVRAYYQRLRANGKPPKVALIASMRKLLIAVHVVARTRKPFVPLVEGTS

SEQ ID NO: 61625 - protein, 493 aa, unidentified
MAICPPLSGAWRRDDAPARGETGGGRQRLRLDEADSEPARPMQAEPSPEERELKGLAAAPVTALASRPRSSGSPAKRRAGRRSSTKLADLSSQGFPCDTPTRSEGAMKPGAKERSAMRNVALDLGARKSSYCEVAQGEVVRRATVTAIDSLKSLLGPDQPPATVAIEACREAWHVHDLLTSWDNHVLLVDTTRSKQMGIGQHRRKTDRIDAEVLARAVEKGGIPLAHVLSPHRRELRRQLGVRRALVTTRAELVTTIRGLIREQGEKLARCTTGYFVERVRQAHLSESLLALLEPLLKTLETIDDQLTGVEAELGKLCALEPVIQQLCTAPGVGPIVAASFVSVVDDAQRFRRAHHLESYLGLVPSEDSSGGRRRVGAISKQGNSYLRALLVQASWALLCNANPDDPLRRWGESVAQRRGRRIAVIAIARRLAGVLWALWRDGTVYDPDVLGSRSARGLRSAAEQIQFQAEALQRASRKSSYRKLQQEVPTNS

SEQ ID NO: 61626 - protein, 364 aa, unidentified
MKKLTTAATNWIGKQERLTIGLDLGDRSSHYCVLDESGRIVTESKTATSPKAMEAVFGGMTRSRIALETGMHSPWVSRLLSQHGHEVIVAHARNVRLIGESRKKDDRLDAQTLARLARIDPELLCPVKHRSAKAQADLSLIRARAGLVRARTALVNTARGLAKSYGQWLRGCNVRNMNPEKAEALSPELQVALQPLLAGIEAVSEQIGEYNERIEKLAQESYPEVKLLKQVKGVGTLIALTFLLTLEDQHRFSKSRDVGCYLGLQPGRRNSGQSEPQMHISKEGDPYLRTLLVQGAQHILGPFGPDCDLRRWGLKLAERGGRNRKKRAIIATARKLAVLLHHLWVSGEVYEPLHNNRTAIAVAA

SEQ ID NO: 61627 - protein, 378 aa, unidentified
MNRIIKIGMDVHTTNYTLCIFEPSFEHDGTVHCITQVKPEIKKIIHVIETFKKKHENEELNIVCGYEAGCLGYSLYHELKEKGVECVILAPTTMKTEKGGRKLKNDYRDAKMIAECLAYGGYSAVHVPTDLDNSVKEFIRMRDDIKENLKSIKQQIIAFLTRNGKQFNGKSYWTRKHIDWINTISFSEPLLQDTLKEYMIEYNHLCDRVETLDKQIEEVSLKEEYVEKVQQLQCLIGIKTHTALSLIVETSDFNRFKKGNMYSAYLGLIPGDDSSGGHEKKLGITKAGNNHLRKLLVEAAQGYTRGKVGFKSKDLKARQEKCSSEVVAYADKANERLRRKYYRMILRGKKYNVAKTAIARELACFIWGIMTDHIDLCS

SEQ ID NO: 61628 - protein, 414 aa, unidentified
MMDVVHPRCAGVDISKRDAKVCVRIQGVGNRPTASTVTTWGAVTSQILALREHLVEQKITCVVMEATSDYWRPFYYLLEEHFQVMLVNARDVRNVPGRKSDVSDAAWLADLGAHGLVRASFVPPEPIRALRDLTRARTVIAQERTREIHRLEKLLEDAGIKLSSVATDITGVSGRLMLAALIDGHDDPAVIADLAKRRLRSKIPALTEALTGHFTTHHAFMARLFLDRIDAHTADIERLSTRIDEAMAPFQAARELLCSIPGISRTIAEVFVAETGAEMSVFPTAGHLASWAGTAPGKNESAGRVKSTKTRPGNRYLKGALGTAALAASRAKGTYFSAKYKRIAAHRGPMKALVAVEHAILIAAWNMLTNGEFYRDPGADYFTRHVPAKTKARAIGQLESLGYRVTLRPLADTA

SEQ ID NO: 61629 - protein, 322 aa, unidentified
MAKHITICAGIDTGKRKLDVAIEGRGEQLQVENTPEGHEVLLAWLRQHRVKRVGIEASGGYEQPVVAELRRKRFVVVVFQPAQVRAYAKFHLQRAKNDKIDAALIAACTAAVRKIHLAPDARLLPFAEQLTMIDQIGEDIARLKNRIESCRNAQIKEVWKEDIARLEKREKVELKALIASIRKHSDLAKRLDLINSIDGIGPPTAVAILVRMPEIGQITREQAVALAGLAPYDDDSGDQVGVRHIEGGRKRLRRALFAASLAASFRWNKQLIQLYQRLTAAGKEHKRALVACARKMLIFANTVVARGTPWCDEPPVGSSSVS

SEQ ID NO: 61630 - protein, 344 aa, unidentified
MNIASIGIDLGKTTFHLVALGERNKILLRRKFSRSQLLAYTANLPASLIGLEACAGAHFMGAALGEQGHQVRLIPAQFVKPYRKSNKNDFIDAEAIAEAVTKQNMRFVQIKTQEQLDWQAMHRVRDRLVQRRTALINEIRGFLLERGLTFAARPIYLRKNLPTVIEDAEQKLSPRLRWLLDRLWQEWKQTEMDIKAITDEIERISKDDARCRRLRQIPGFGPLVSTATVAAIGNGAAFRRGRDFAAWVGVVPRQYSTGGKQKLFGISKRGNIYLRRMLIHGARAVLLRVKYDTGGFGQWVHRLAQRAPRNKVVVAIANKLARMAWAVLSSGKDYRHQPLQLAAA

SEQ ID NO: 61631 - protein, 373 aa, unidentified
MPKYSTAFGMDAHLRSTTVCALDADTGEAVTRRFPGNPWGEIAGWMDGFPGPSLAAYESGYLGFAPQRELAGLGVECVVAAVSKIPRSAADSASKNDRNDAARMAKAILAHDISPVWVPSPEVEGIRDLAGAYDGATARLATAKQRLLAFLARRGFVYGGTTPAGNPRKYWTYDFLRWLDKVRPEDDGGVRALAALRNEVEAAAEARADLLSEYRAAVDASPIAAEVAALQSIKGCAFALAAAFSAEVGDFTRFRSGRQVTAYFGLAPSQRSSGDSVRLGGISGAGNALVRKLAVEGSWCYAAARHQPKLMPRDTGVPLEIRMHGRKGSERLLRRREEMLARGMPAAKANAATAAELVRWLWALGMMCREGAE

SEQ ID NO: 61632 - protein, 348 aa, unidentified
MALTIVETRAVTGGVDTHADTHVAAALDPVGGLLGVREFPATTAGYAGLLGWLGGFGTVCLVGIEGTGSYGAGLARHITAAGIRIVEVDRSDRQDRRRQGKSDPLDAVSAARAAQSGRARGAPKGRDGAVEAIRALMVAKRSAAGERTRTINQARALILTGPDDLRARLTRHAPAALVTALASMRPRPGDTVGYATRIALRDLGRRAQFLDSQIERLDELIVPLVTARAPGLLALYGIGPNTAALLLIAAGDHPGRLRSEAAWAHLCGVAPIPASSGKTIRHRLNPGGDRQANHALWRIVFTRLGSHPATRAYAERRTGEGKSKAEIIRCLKRYVAREVYPHLRPQAG

SEQ ID NO: 61633 - protein, 423 aa, unidentified
MEVMYRRVAGLDVHKETVVGCVRAMVGRKTTRECRTFATTTEGLLALLGWLTESQCRHIAMEATGVYWKPVWNILSDGDFSLILANAAHIKQVPGRKTDMNDAMWIADLLACGLIKASFVPAADIQELRGLMRTRKQFVREQTRQVQRLEKTLEEANIKLGAAISDLIGVSGRRMIEAMIAGECDPQRLASLAERNLKASPQALHDALHGRLREHHRFLLKLHLQQWDALDRAIRQIDRQVAWQIERSDAAAVDDQPAFCQLILRLSAIPGVSRLSAIAILAEIGRDMSRFPTAAHLVAWAGLCPGQNESAGKRKSSRLRKGAPWLKTMLVQCAWAAKRAKDSYYMAQFHRLRSRRGPQKAICAVAASILTAVYHMLKSGLPHRDLGADYFDRRSPQAQAKRLVSQLARLGFKAQLQPLPAAA

SEQ ID NO: 61634 - protein, 412 aa, unidentified
MAEETFRWFAGIDWGSATHQACLLDEVGTVVGERAFAHGGAGLAALCDWLISMAGDPGSVAVAIEVPHGPVVDALLDRGFAVHAINPKQLERLRDRVSLAGAKDDRRDARVAAGGLRTDPHLFRPIEAGDPAVIALREWSRLAEELQQERTRLSNRIRQQLWRYYPQLLEVSDDVTAEWVLDLWTLAPTPAKAARLRKATLARLLQEHRIRRVDAEQVLGLLRQPAIPVAEGVTEAAVLHLRSLVARLRLASREFHQAERKLDELCTALKEDTIASGDAPRDAAVLSSLPGVGPVTLATLLTEAAGPLARRDYAALRTLSGVAPVTKRSGKSCIVVMRYAAQVRLRNAVFHWARVAVLNDRRCRGRYEALRARGHSYGRALRGGGDRLLGVACVLLRRGMLFDPDYGSSASA

SEQ ID NO: 61635 - protein, 393 aa, unidentified
MICVGIDVAKDKHDCFILSSEGEVLADVFTISNNAEGFDTLLQTIHRCARPEDKIKVGLEATGHYSYNILGFLLDKGLHTFVINPLHTNLYRKSLSLRKTKTDRVDARTIAAMLMSDVDLKSYTDTAYHNEELKSLTRYRFDKVKERAKLKQSVSRLVTILFPELEKLVPTLHMASVYALLSEFPGAKQIARAHLTHLKALLNDASKGRYGRDMATELRDAARCSVGSVMPAKSLELQHTIRLIRELNTEIEDIESAIQTIMEEMQSPITTIPGIGFRMGAMILAEIGDFSRFDSPDKILAYAGMSPSTYQSGQLSLSGAYSHMEKRGSRYLRYALYNATKYVCLWDPTFEAYLAKKRAEGKHYNVALSHAAKKLVRLIYAMEKSRQPYNSVA

SEQ ID NO: 61636 - protein, 406 aa, unidentified
MVSSPKRSMKFIGIDIASEKHVVAVIDAEGAVLVKPTRFTEDVSGYEKLLELIGPAEGALVALEATGHYWQNLFATLVASGFAVALLNPLQTRRFAEVDMPRAKTDAVDALSIAKFAAEKRPTPTALPDGATLELRELVRLRDRYVQDLGDRVRQLHRALDLTFPEFTRLVSGLDSELATSLLTRCQTAMQFATQPLRQLSRLVYDGRRQVGEELAKQLIHTARVSVGKHHGPAYRRQVQEFCADIATFRTRIGDLEDDIHGTLKRHETAMLLTTINGIGETTAARLVAELGDITKFESADALAAFVGVVPAVSHSGKRTPLHAPLACFGHSRLRAKLWMPTLVAVKRNPWLRAFYERLIARGKLPKVALTAALRKLLHAIYSVAKSRKPFVPMLPQNASKVSHVA

SEQ ID NO: 61637 - protein, 347 aa, unidentified
MNQIIRIGMDTSKHFFQLHGVDAAELPALRRKLRRKEMLAFFAKLPPTVIGMEACGASHYWARELGQLGHTVKLIAPQHVKPYIKRNKNDGRDAEGLCEAMSRPTMQFVPAKTAEQQAALMLAGMRERLVAQRTQLSNAIRGYAAEFGLIATKGLDKIVPLLADIAADEALPVLARELFAMHGREYAQLQAELKTIEARLMAWHRANPDSRRLAQIPGIGPISATALVMKAPDPRAFPSGRHFAAWIGLTPKDHSTAGKTRLGKITRAGDERLRSVLVAGATAVIQQVRRGRGRSSPPWLLALLARKPPKLAAVALANKNARIAWKLMTTGESYDGARMPGVSALAA

SEQ ID NO: 61638 - protein, 339 aa, unidentified
MQIHSVGIDLGKTTFHLVALGPAGKVLVRKKFTQKQLLKYTANLQTSLIGVEACSGAHFLGRALRKQGHDVRLIAAQFVKPFVKSNKNDFVDAEAIAEAVERKNMRFVPIKTDDQLDLQAIHRVRDRLISRRTAVINQLRAFLLERGMVSAQKPAKLKAAMADILENAEADLTPLMRTLIDTLWGEWKLVEQQIEELNDELERISASDTGCTRIRKIPGIGPVVATAIVAAIGNGAAFRKGREFAAWLGIVPRQYSTGGKAKLLGISKRGNIYLRKILIHGARAAVLRIKRDRAPIGAWLDALDHRAPKNVVVVAMANKLARIAWAVLSSGNEYKPVAA

SEQ ID NO: 61639 - protein, 355 aa, unidentified
MLNTKYIGMDIHKETISIAVMNAAGKVVMECVIETKANTVLQFIHGLRGDLHVTFEEGTWAAWLYDLLKPHVTEVLVCDPRKNALLKQGSKSDKIDARKLAELLRLNHLKPVYHGEHGVRTLKELARSYLTITQDLTRVRNRLKALYRSWAIPCSGTQVYAPRHRSEWLGKITEAGVRRRAEHFYQQFDALRPLRQEVRRDLLTEGQKHKAWKLLRQIPGIGAIRATLLIALIQTPHRFRTKRQLWNYSGLGLETYDSAQYCVVEGQLQRSKKPMTLRGLNKNHNHDLKAIFKGAALEATSGAGPFHDFYEAMLAKGRKPSMARLTLARKIAAIALIVWKKEVSFDAKHLKQQAA

SEQ ID NO: 61640 - protein, 345 aa, unidentified
MDSMYYIGLDVHKKTISYCVKDASGQVHQEGKVGATRCELDTWMRTLPRPWTVAMEATIFTGWIYDHLLPHAAGVKVAHPVMLRAIALAKKKNDCMDASKIADCLRCDFLPECHMVSSEIRDRRRTLRYRHLLVRQMVQMKNRVSGLLMETGVGYNKQRLHKVGYFRELLSTNEEVNESIRPLLKLSRETIVRLQKTEYALVSSLQRDPLLADRIQRLRTVPGVGPITALTWALEMGEISRFRSIKQAISYCGLCGDEKSSAEKVLRTPLSKQRNKHIQRALVEAAKLAPRQDHQLALVYETEKQKGNANRATLAVARKMVAYLLAVDRAERDFVPVEDHRGAAA

SEQ ID NO: 61641 - protein, 309 aa, unidentified
MTTSSYVGIDVSKARLDVAVLGEKQEKQVDNTQKGIDELVSWMLKFQPELIVVEATGGYQRAVVEALFHAGFSVAVANPARVRQFARACGLLAKTDKLDAQVLAVFGQRVQPRRYEGKSEAEKQLSALLVRRKQVEEMLKAEQNRLRTISPSLRGSVERIIAILKEEKKRLDEQIRELMNEQQAWQEQTEILKSAPGVGPVTTATLLADLPELGKMDRKRIAALVGVAPMNYDSGRKRGYRKTKGGRTDVRSVLYMSTLVATRYNPVIQAQYQQLLKRGKLKKVALTACMRKFLTILNAMVRDRQPFHM

SEQ ID NO: 61642 - protein, 359 aa, unidentified
MMIELLKYSVGVDVSKEKFDACLSVIDITQRVKVKASRNFDNSPSGIKQFILWIIKHKKEDIQLVIVMEATGVYYERIALNLHEQEFNVIVVLPNKAKKYIQSIGYKSKNDKIDAKALAQMGAEQRLALWQPYSEKTYELRSLTRQNEDLQKERTVILNRIEAQNYAQRQNKFVLRQLRSILKLIDKQIDRVKSEVEKCISADPCLKEKVENINTLKGVGILTIATVIAETNGFLLFNNQRQLVSYAGYDVVENQSGKKAGKTKISKKGNSHIRRALHFPAFNVVRYNPSSFGQLYQRAYASSGRKMKGYVAVQRKLLVIIYTLWKKNEAYDVEYEPSANDEQKPLFSLCSDGVKKVPA

SEQ ID NO: 61643 - protein, 381 aa, unidentified
MAQKTRFVGLDVAKSKVDACIRSEGLRLSAPSTPEGRAGLVAWVRANRVGRAVMEASGGYERGWAEALRAAGVEVRIVDPKRVRHFAKAAGRLAKNDPIDADTIAWFAEAFPDHQAQPHDPARDEIDRLVAARTALKDAEDRIKQQGEHRPPAVVAKALAAIAKTIRAELRKVEGAIAANIKANPGFARRAEIIASVPGLAAQTAAGVIAWLPELGHVTNEAAAALIGAAPYDDDSGGRKGQRHIKGGRRKLRNLLYMPVMGAATRHNPMLKAHYQRLRARGKEGRSDRLHAQADRHPQHHARARSDLEPAGSSRPMSAAAPGRRTAHCADRMHVQKTGERTGSRPKPPKAGAQRASLEPGRAPGYSNHHSCSPARGRGLG

SEQ ID NO: 61644 - protein, 335 aa, unidentified
MSRSYLGIDVHKKWCVFTEIDSKGRVLRQSRFGNTFEEVSTFASSLNSKVHLVLEPVLNYLWLLDQFEPYAGSVHVATPFKVRVIAESKSKTDKYDSRMLAELLRTNFLPGSWVPPGEIRLMRGLIRQRYHLVKSVVMNKNCIRHLLFQHGIDLRVFNIASPKARLEFRSLYLPDVTRQTIDQCLKIIAMLDDQVVEINKRIWERVKGNPTVELLQTIPGIGKLRSAVIYAEAGDVTRFHSAKALASYTGLTPTVRSSGDSVWTGGITRFGSRPLRHALVEASINAVRKSPELNRMFCRILYRSNVQKARVAIARKLAVIIYAMLTRREPFRMAA

SEQ ID NO: 61645 - protein, 393 aa, unidentified
MKNNNNQATLAIATSDQTALPIEAIADNDVLYIAFELSSKEWKLALTDGRRQVRMVTMESGKLDRLRDEIRRGKVRFGLKQECRVLSCYEAGRDGFWLHRFLQSAGVENAVVDSASIEVNRRKRRAKTDRLDARKLVSMLMRYHGGESKLWSVVRVPSVEDEDARQLHRELEQLKKQTVAHRTRIASLLCTQGVSVKIGKHFIEHLEQARQYDGQELPQHLIRRIKLEYELLRAIQSQILAVEAERRKLLKQSKSERIEKVRRLQQLCGVGINGAWLLVMEFFGWRVFDNRRQVGGAAGLTGTPYNSGGSSRDQGISKAGNRRIRWIMAELAWGWLRFQPDSALSRWYTDKYANGNSRLRRIGITAVARRLLIDLWRFIEQGTVPRGAVFKSA

SEQ ID NO: 61646 - protein, 468 aa, unidentified
MKPREARPGIGMSQLHFAFLCVDCAKDRSKIMMADFYGRVLVEPTTVDHDQAGFEAALQKVRDATTRHGIKDLIAVVERTGRYHGPIHRALAKAGIEVRVVHPYITKQYRQPADPGYKTDDTDLSAIHRAAVNGFGLLEHEPEPIFVELQLLARHRRLLVEKNVVLRQQMLEHLQSYMPGYSRYFMDVFDSELLLWVAKNIGSAAQIVEVGIEGLPQQLRKANTATHKPTLQKIVAWARSAPSAEEPAALHRRFFIDLDADRLAKLQHIRAIESELVGVLCQTRYVLLLGIPGINVVSAAEVAGEMGPIKNYIKARSISARAGLYPSRYQSDQVDRCDGLLVRHANRDLRQAILIIADNLIRCNDHFGVLAQGWRSKNVDARDIRVRVGGNARCANQPASGKQVIGWLGQPLSSISLGAGQRWFLGGLVFEPVFRPRLGGRRPNGLVAGWVPRSFRAECAARGRRPIQ

SEQ ID NO: 61647 - protein, 423 aa, unidentified
MEVLYPRCAGLDVHKDSVVACVRLASGSEVTRHLATYGTTTSALLDLSEWLASYGVTHVAMEATGVYWKPVWHALSGSALPLELTEGEIKDDAFELVLVNAMHIKKVPGRKTDIKDAEWIADLLAHGLVRGSFVPPTPVQDLRVLTRTRKQLTREKAQHVQRVQKTLEDANIKLASVVSDITGKSGRAILDALAKGTTNPHELAALATTRLRTSREALVAALRGNVRKPHQFLLRLHLQQIDALDAAIASIDEEVGERLEPFRHATALLTTMPGIGDVVAQALVSEIGADMQRFPSASHLVSWAGMCPGQDESAGKQRSRRMRKGATWLKTMLVQAAWAAIKRKNSYLNALFHRIKRRHGGKKAIMAVAASMLRAAYYMLRDGTEYRDLGPDHFNTIDTEKTTKTLLKRLAALGVEVEVKAAA

SEQ ID NO: 61648 - protein, 345 aa, unidentified
MLIIGCDFHPGFQQLAMFDKQTGEISYRRLRTPEEAGAFFRSLEEKALVGLESCGFSQWFERQVEETGHELWVGDAAQIRASVVRQQKTDQRDAEHMVHLLVENRFPRLWVPSAAERDVRQLLVHRHQRVRMRTQVKNQLHAIALNQGLRKQRQLWSAAGREQLEKLALPPYTARRRDELLRQLDQLDEQIAALDQVVRAEAGKRPEVVRLMTHPGVGPQTALAFVLTMGEVARFARAKQVSSYLGLIPREHSSGGKQRLGHISKQGSPFLRFLLVEAAQSAARWDPELKRAYVRLGMRRSRAQAKVAIARRLATRLYWMLRQGWSYAQLSSSGAGKPESSRGAE

SEQ ID NO: 61649 - protein, 380 aa, unidentified
MPPTTLYLGLDVHKDSIAIAIAQPGSKGEIRLLGTITNDLHAIEKALGRIRKAHPGSQLEVAYEAGPCGFVIARRLKQLKVPCLVAAPSLIPKQPGAPFKTDQRDARALARLLRAGELTAVYVPEPTDEAIRDLCRARTDAVDDLRRCRHRLKGFLLRHGFRYQGKANWSQPHMRYLRELVLPHPAMKTILEEYLQGIDAAHDRVERIEASMLTLLETWRLKPAVQALMAFRGFQLVAAMVTVSELGDIHRFDHPRQLMTYLGLVPTESSSGPRQRQGAISRCGNSHQRWLLTECAEHYAIPPKISKELSRRQQGQPASVRALSWKAQNRLHLRFTRLLARRLQRNKAKVAVARELCGFIWALLRTQECYRQRLGAAVKP

SEQ ID NO: 61650 - protein, 381 aa, unidentified
MKKNSTGMQNRKQVKQAVTAPWKTGSKRKQQLTIGLDLGDKTSRYCALDEDGEVLFERSVATTKKGLTQVFGALGRCRVALEVGTHSPWVSGLLKSLGHELIVANARQVKLITQSSRKNDKLDAQSLARLARVDPQLLRPIQHRSEEAQQHLMMIRVRAVLVEARTKLVNSARGFAKAAGERLPNCDTDVLEVERLEGLPASLRQVLKRLLEEVESLTEQIHACDEEIEQIAREKYPETARLQQISGVGTLIALAFVLTIDDPARFRKSREVGCYVGMRPKSRESGESQPQLGISKEGDVYLRKLLVQGAHYILGRRGPDTDLKRWGLKLCARGGKNAKKRVAVARKLGILLHRLWVTGEAYEPLRNSQSRTTAQAKQQAA

SEQ ID NO: 61651 - protein, 342 aa, unidentified
MEDHTTIAVDLSKSVFEIAVSQLPGRVSERKRLSRGQVVKFFANRPPATVLLEACGSAHHWARQIEPLGHRVLLLPPHQTRRYVLRDKTDGADANALLEAHRNEQIFPVPVKTLHQQALAALHRIRSGWMGARVARLNAIRGILRELGLFIPLGAKHVLPGLGTFLADSQQPIPGEFHSTLLALVAEIRTLDFNIRDAEKQLAATAANSPDATRYLTIPGIGLITATALVAFVGPLQRFRSGRRFASSLGLVPREFSSGLRRHLGSITKRGDPYLRTLLIHGARSVLLAASRVKRPDRLQAWALSVLHRRGYNRAAVALANKLARILWAVSVHQTDYQSSAA

SEQ ID NO: 61652 - protein, 347 aa, unidentified
MLIFRQLPAPSRGDPIRHWYRASPLRVTLRLVIYQKRLPNDLPTILEQLAPHHAEIQGLVVESTYNWYWLVDGLMDADYRVHLANPAAIQQYSGLKYSDDHSDARWLGHLLRLGVLPEGYIYPKADRAVRDLLRKRAHFVRQHTSNVLSVQNIMVRNTGSRCSVKRLHELTKKELNGLLPEAEQALAVTSSLGVLDGLGQQIKTLEKAVTQCLKHTPSYEQLLTVDGIGTILAQTIALETGHIGRFPSVGNYASYCRCVDSTKISNGKRKGKGNVKNGNPYLAWAYMEAAQFAIRFNPRAQRFYQRKLAQSNNNTILARKSVAHKLSRACYYIMRDLVPFEAMKAFG

SEQ ID NO: 61653 - protein, 328 aa, unidentified
MKAFIGIDVGKEKLDISWLRDVVKSKKKTKIFKNNPKGYQELVAWLIKNTNLEAQDIVITTEPTGVYSEPLMYFLYEQGFILLHVNPGKAKQYASSLGLVHKTDKSDATMLARYGHDQQHSLLSWQPEPVEARELKVMTRRLEALEQDLRREENRYEAVGFSGASTRVTQSIEDMIAVLKTEMGKLKNDIDEHIDRHPQLKKNRQLLQSIKGVGEVISRMMVSLMACKQFKNAKQLACYLGLIPKLNESGKRAGKTTLSKEGPGYIRAKLYMAAVVAVQHNPDIKAQNKRLVEQGKTKMQAIGAAMRKLTHICFGVVKNQTEYQPQAI

SEQ ID NO: 61654 - protein, 416 aa, unidentified
MSEPKPSYAAFVGIDWADQEHAVCLMEGERHQLHQLPHKPETIDAWARDLEHRFGGRPVAVCLEQSRGPLIYALMKYTFFVLFPVNPKQLARFREALAPSGAKDDPSDAWLLAELVRHHHPRLRPWHPDDAPTRRIRLLAESRRRFVDDRTRLGNRLKALLKEYFPFALTLCGGHVYADSFLRLLARWPSLKALQRARPQTVARVLFAGRKRPDDEAERLAAIRQTVALVKDPALIEARSMATQALVAQLRTLNRAIAAHDAQLEAAMSKHPQAAVFRSLPAAGEAMAPRLLAALGSQPDRYDSAAAVQQHSGIAPVTQKSGKTCSVRRRRACPKFLRQTFHEYAQHSLKNSAWARAYYRLQRERGKKHHPAIRALAFKWIRIIFRCWHDKTPYDESRYLESLRRRNVPLLAYLDP

SEQ ID NO: 61655 - protein, 405 aa, unidentified
MAAVMIGVDPHKASHTATAIGLAEEPLGQVRIRASESQVELLVAWAAAWPDRTWAVEGATGLGNLLAQQLVAAGERVLDVQPKLAARVRLLEAGNTNKNDPNDARSVAVAALRSAARREVIAEDHAAVLKVWSKRYRDLGRARTQVACRFHAVLADLVPGGFAGEITAGQAAGLLARITPSDPAALARCELAAEFLADLRRLDTQIRGTRDKITAAVRASGTTLTQIFGVGPVIAAAVIGAVGDVSRFADRDRFAAYNGTAPIEVSSGGRKIHRLSLRGNRRLNHAIHMAAVTQIRYKHSPGRAYFDRKIAEGKTGKEALRALKRQISDVIYARLQADAAHRTPAEAEGPGGQSGNGSVSSAASSHPRRRLFGQATPGPQPSLRPTSTARRAAQATTFKPSRRSP

SEQ ID NO: 61656 - protein, 412 aa, unidentified
MKIAGIDVHKKVLMVVVVDASTPEEKPERRRFTTMPSELHRLLLWLREQGVEEAVMESTAQYWRSVGLELEPHMRLHLAQAFSNRAPRGRKHDFKDAERLVRRLIANELILSFVPDGEQRIWRSMTRMKLQLTRDRVRLQNQMECLLEEMRIKLSIVVSNLLGASGLRILQALAQGETDPKQLAQLGDERLQCTEEQLVDALTGRAQPLHRAMLGLQLERLQLIDWQIAKLNSMIAQAMKPHQEAVIRLAEVPGLGVDSAPQVIAEVGAQASRFPAAAALTSWVGTCPGKDESAEENHSSRSAKGNKYLRRVLNQAAHAAVTKKGSYFQAVFRRLLPRLGYQSAIWAVAHRLCRVVWKILHEGVRFIEQGREPDPRAKKKRAQMLARALRKLGYEVAITPINPVTATNGLQM

SEQ ID NO: 61657 - protein, 378 aa, unidentified
MNRIIKIGMDVHTTNYTLCIFEPSFEHDGTVHCITQVKPEVKNIIHVIETFKKKHENEELNIVCGYEAGCLGYSLYHELKEKGIECVILAPTTMKTEKGGRKLKNDYRDAKMIAECLAYGGYSAVHVPTELDNSVKEFIRMRDDIKENLKSIKQQIIAFLTRNGKQFNGKSYWTRKHIDWINTVSFSEPLLQDTLKEYMIEYNHLCDRVETLDRQIEEISLKEEYVEKVQQLQCLIGIKTHTALSLIVETSDFNRFKKGNMYSAYLGLIPGDDSSGGQENKLGITKAGNSHLRKLLVEAAQGYTRGKVGFKSKVLKSRQEKCSSEVVAYADRANERLRRKYYRMTLRGKRYNVAKTAIARELACFVWGIMTDHIDLCS

SEQ ID NO: 61658 - protein, 349 aa, unidentified
MRTKPQPNAATYGVDIGKKIFHVVALDADGHPVQRAKFSRETLLRFFEAANTALIGMKACAGSQWLARKLTALGHNAKIIPAKFVKPYVKSNKSDTIDAEAIAEAVTCPTMRFVQVRSEAQVDLQALHRIRDRLIRNRTGLMNQARAFCIEYGLAMRTGAGGFHADIRRHLANDQNDLTSAMRNLLTDLLDDLAHIEKRVAKLTKEIEAIAHSDETVRRLLTIPRIGALGATALVAAVGDGRQFRKARDMAAWLGLVPAEHSSGGKQTLLGISKRGNGYVRRLIIHGARSCFLHLHREIHALGRWLSALQERTHRIKAVVALANKLTRIAWAILTRPGDNYLRTKGAAA

SEQ ID NO: 61659 - protein, 349 aa, unidentified
MSIVGGLDIHRKQITFDYLDTATGEVRRGQIAPADREHLAGWLAGRFTGGTADFAVEGCTGWRYVAEELAAAGAVAHVAEPADTAALRGRRRHAKTDKTDSRHLRVLLAEGRLPECWVPPPHILECRALLETYHDLRAEHTAWVQRIHAVLFRQGARQLGKQGLGTGEGPAMVRSLAAAQLSPAGQLQVTVALDMLQVLEGHLDALRRRIIEAARRLAGARELHARLYGAGPATALALRCWLGGAGRFSSARKAVRFAGLDVTVYSSAGKRSPGHLSRQGPEVLRWCVYEAGKTHAHRCAPDHAYYAAVKDRIDGKRAALSEARKIIRQAVHILAALGDDALTMDPAPG

SEQ ID NO: 61660 - protein, 387 aa, unidentified
MAVVVIGVDPAKRSNTIEVIDSAETVLLTARFENTREDYRRMLTLVKRWPDRTWAVEGATGVGLGLAQRLVSDGERVVDVPSKLSTRVRAIDTGHGRKNDPTDAHAVAVVGLRTTGLREVTVDDEAVVMRLLSQRRRDLVRSRTQAVNRLHQALMQLIPAGARKKLTADKAKTLLATVRPRDAAGKARRQLAADLIDDVAVLDRKLDAVDKRIVEAVKASDTTLTDIVGVGPVTAAAILGEVGDVARFTTSDRFASYTGTAPLEVSSGDVVRHRLSRAGNRRLNNALHVVALSNKRYDPRGKAYYQRKLAAGKGKKGSLRCLKRRLSDVVFRTLVEDRARANPGGQMGATLTASAVDQIPKANTSDKPQPGFVAEATPTRRPAKAAS

SEQ ID NO: 61661 - protein, 404 aa, unidentified
MNAIGVDVSKGKSMVAVMRPMGEIVHKPFELIHDDYNLKCFAVGVASMGSDTRVIMEATGRYHEPLATVLGALGLFVCILNPILIKKSGAGSVRKVKSDKKDALKIAKYGLDNWNDLREHKPMDTTRQQLKLFSRQYDMHMKTATALQNNLISLLDKTFPGANKIFDSPARSDGHQKWVDFVMDFWHCDLISDISQDAFAEHYKEWCKQRGYKFSQSKAKAVYEASCGHFTTLPKNENTKLLVTSAVEGLMAVMKQRAVIKNEVIRLSKLLPEYDCVLEMYGVGEITAAQLMAELGDIRNFANRGAIVAFAGIDPEINQSGSQNRESNKCSKRGSPHLRKTLFQVVSTYLKRSPADEPVYQFLDKKRREGKPFYVYMTAAANKFLRIYHARVKNFLNSLENNPE

SEQ ID NO: 61662 - protein, 395 aa, unidentified
MFIVGIDVAKRSHEVCMITSDGQTVQRPFSIRNNCTGYNLMLEKIRKHTNIKSQIVFAMESTAHYWLALFTRLRKDGYHVILLNPIQTSAMRDMFIRKIKTDAKDSFIIAELIRFGRYAESNVAQDRLLALKELCRNRFYLVDMAGDLKRKLIALIDRVFPEYEAQFDTIFCKSSVALLKKYPTPQRLSNAHLDKLTELLWNSSNGHFGEWKARELKELARNSFGVEDCDGAYSTLILLMLDQIQSLSGKADALEKEISRLFQSFDTTVTTIPGVGPIIGAVILSEVGDISRFSSADKLAAYIGVDPSVNQSGEFQAAHAHMSKRGSPYLRRCIWMASQVAVQRDPMFHAYYEKKAAEGLKYMTIIGHVTRKMTAVVFAILRDHKVYEPILSTAA

SEQ ID NO: 61663 - protein, 345 aa, unidentified
MQPMYYIGLDVHKQKISYCVKDSSGKISSEGWIPATHFDLDRWMKTLPQPWSAAMEATMFSGWIYDHLKPHAATLKVAHPLMLRAIAAAKKKNDRIDAHKICDCLRCDFLPESYMAPTAIRERRRTLRYRNLLVRQMVQMKIKISTLLMEAGVSYNKRKLHQAGYFRELLATNPEIPEGLRSLLRLCRETVVRLSKTENALVSSLQEDPLLLHRVERLMSIPAIGPITALTWALEIGEVQRFSSIKKAISYCGLCGDEQRSANSVQRTPISKQRNKHLQTTLIEAAKMAPRYSPTLALLYDREKQKGNANRATLAVARKLVAYLVAIDRGQTHFLVLDQEIPTAA

SEQ ID NO: 61664 - protein, 377 aa, unidentified
MHSENIAAYVGLDVHKETLAVAIAAPERLGEVRYYGTINNEAQAVRRLFQKLQGLYGNILSCYEAGPCGFGLYHQLTAMNIKCQVIAPSRIPKSPTDRIKNDHRDAISLARLLRAGELTPVWIPDLTHEAMRDLIRARAAAKRDSRVARQRILSMLLRTDKHYAGKHWTGKHRTWLANQSFSQPSQQIAFQHYCQSLEQIEDRILQLDQEISRLLPEWSLCNLVCQLQALKGVGQLIAITLVAELGDFSRFSNPKQLMAFLGLVPGEYSSGNSIRPRGITKVGNSELRRLLYEAAWSYRTPAKVGAWLIYYRPDSVTQYSKDIAWKAQQRLCSRYRSLTAKGKKSQVAITAGARELTGFMWDIALAAQSSFSQQKQN

SEQ ID NO: 61665 - protein, 325 aa, unidentified
MTRIICGVDISSQSLDARIGREGAFAQFPNTTDGIHALRAFCQAHQVELAAMEATGGYEQLAFAGLSEQGLPVAILNPRSVRQFAQSMGSLEKTDRIDSGMIAWYAEVKKSQPVCLAPKSQQQLRALVTRLRQLTDARTAQFNQQRLVTDRTVQKLFARLLDEISRQIHVLEKKIAALLDKDPLWRELNLAFRTIKGVADRTVARLMAEMPEIGVLSNKSISKLGGLAPLAKDSGQHQGKRLVRGGRASVREILFVVASVVARYEPDFIAFQQRLRAAGKPPKVVRIALAHKLLVRLNAKARQVRQRMQVLESNPMAVPAASPAY

SEQ ID NO: 61666 - protein, 468 aa, unidentified
MGHNRSRSRQPGGKKFKHPSLLKRINRNAAGIDCGSETHYVAVPPERDPEAVRSFKTFTNDLHRLADWLEACKIKTVAMESTGVYWIPIFEILEERGLEVVLVNARHVKNVPGRKTDVLDCQWIQELHSVGLLRGSFRPAAEIASLRAYLRHREKLVQSAASHIQRMQKALVQMNLQLHNVISDITGVTGMRILRDIVAGVTDPMALAAHRDHRCRASQDEIAASLTGNYRAEHLFVLRQHLKLFDTFQRQIQACDSEIESLLHKLAARQRKPETPIPSPRCKLRFYDNEPRFEIRDPLYRLAGADLTQIDSIGPYTALKLITEIGTDMSRWPTHKHFTSWLTLAPKNKITGGRLISSRTQPSANRAATVLRMCAMVVGRTSTALGAYYRRIAYRIGKPKAITATARKLAILVYRTLKGELDYADPGASAYEEQHRERTLRNVRNRAKRLGFGLVDLETGELLQGAVS

SEQ ID NO: 61667 - protein, 398 aa, unidentified
MLGKTKEEVAMPSQKKNNRTVGVVHEVCCGVDVHKRSISACLTFSDEKGEEQSELAEFQTFTDDLIRFKEWLLERGCPVVAMESTGSYWMPVHNILEGSFQVIVVNARHMKNVPGRKTDIADSIWLSGLLRYGLLKGAFIPPKHQRQWRDLTRMRKNYREDLGDLKRRVHKLFQEANIKMDSVVSDLFGATGRNLMKVLVSKGSAPTLSEIESGVMGSLREKCQELYRSVQGYFEEHHRFLLALLLETIEKLESQIEILDVRIRQSMGTVEGKIEKLKEIPGISEISAHAIVSEIGPDLEAFPSAEALASWCGLSPGNNQSGGKRFSGRSRVRNNRLKTIMVEVAWPAIKKKGSYYKAKYYALKSRLGPQQSHNSGSSPNPQGRLPGFKARQSLQRPR

SEQ ID NO: 61668 - protein, 453 aa, unidentified
MAQRNRSIPLKPGKSRAALTITHPNTAGIDIGSASHFVAVPPDRDDEPVREFPSFTVDLNALADWLDACRVDTVAMESTGVYWIPLFELLESRGFTVLLVNARHVKNVSGRKSDVLDCQWLQQLMTYGLLSGAFRPADQVCVLRSLWRQRAMLLKSQAQHVQHMQKALTQMNIQLANVISDVVGETGQKILRAIVAGERDGRVLGSMKNVRIRASVDEIAKSLQGNWRAEHLFSLKQALDAFDFVGTQLTECDREIEQQLQSLQAHDGEPAKGKKRGRARNAPKFDLRTQLFRMCGVDLTRIDGIDVTTALAVISETGADMSRFPTDSHFASWMGLCPGTKITGGKVMSGKTKRCANRAAQALRLAAAALRTSQSALGAYFRRMCSRMDKPKAVTAAAHKLARLIYTMLTKGEEYTDQGQDYYEERYRERVLRQLSQRANKMGMKLVAAEQPA

SEQ ID NO: 61669 - protein, 354 aa, unidentified
MSQKFDSVIAVMGIDIGKNSFHVVGHDARGAVVLRQKWSRGQVEARLASIPSCLIGMEACVGAHHLSRKLASLGHDARLMPAKYVRPYSKGQKNDFNDAEAIAEAVQRPTMKFVATKTAEQLDLQALHRVRERLVSQRTGIINQIRAFMLERGIAVRQGIAFLRSELPTILATRTDALSPRMLRVIEELAGDWRRLDQRIEGLTGEIAALAHQDQACSRLMTVPGIGPIISSAMVAAIGTGDVFSKGRDFGAWLGLVPKQISTGDRTILGKISKRGNRYLRVLFVQAAWVVLVKIKDWERYGLKSWIEAAKKRLHHNVLAIALANKLARIAWAVLAKGRAFELTRTDDASVRPA

SEQ ID NO: 61670 - protein, 408 aa, unidentified
MGRAAEVVAPSSSLRTDGGCPVAQINDLSRCLTAFDPISTLVVVVEMSKANWLVGGVVPGVERQPLKKLEPDATTLLRLIERWRNEAARAGRPISRIALAYEAGLDGFWPARWLIARGIESHVIHSASVAVSRERKRAKTDRLDVAMLMRVFLGWLRGERGHCGMVMIPTIEEEAARRPSRERENLVNERSRITNRMKSALTRLGIRGFKPHLRRAPERLAGLRTAEGTSLPANVIEEFRRDMARLALVREQIGSIEKARAERLERAPDTGPHAMVRLLARVVGIGIETADMLVREILSRKLRDRRAVARYAGLTGSPDESGLKRRERGLAKAGNARVRRGLIQLAWRFLMFQKDSALARWYRKRTDGPSGARKTTMIVALARKLLIALWRLVTIGEVPDGVELRLAA

SEQ ID NO: 61671 - protein, 340 aa, unidentified
MGEVTTIGLDLAKHVFQVHGVDAEGATVLRKQLRRAQVLAFFSRLPPCVVGLEACATAHYWARELRALGHEVRLMPAQYVKAYIKRNKHDAADAEAICEAVQRPTMRFVPVKTAEQQATALLHRGREQLVRQRTMLVNALRAHLAEFGIVAAQGLRNVGELIAIVRDDGDTRLPDVARQVLQVLANQIEQIETAVVALERQLLAWHKTNPVSQRLASIPGIGPIIATAIAATVADPKVFRSGREFAAWLGLVPRQNSTGGKIRLGGITKRGNRYLRRLLINGASANLLRSKATKADPWVIGLRRRRPPLVVAVALANKTARIAWAVMLREKDYQPRAMAA

SEQ ID NO: 61672 - protein, 341 aa, unidentified
MQITTIGLDIAKNVFQVHGIDAAEKVVVRKQLRRGQMMKFFAALPPCLIGMEACATAHYWARELTKLGHEVRLMPAKDVKAYVKRNKNDAADAEAICEAVRRPTMRFVRAKSAEQQGRLMQHRARDLLLRQRTQTINALRAHLAELGIAAAQGREGLKQLLTIIADEGDERVPIDARASLIVLAAQLQALQTMIGSIEKRLVVQHRANEASKRLESVPGIGLIGASAIAATVTDPKAFRSGRDFAAWIGLVPRQDSTGGKQKLGPISKQGDRYLRRILVVGAHSVLRRAKQSPEKYPWLTQLLARRPFKVVAIALANKMARIAWALLASGGRYRAPRLAAA

SEQ ID NO: 61673 - protein, 392 aa, unidentified
MYIIGIDIGKNHHEASIVSPKGRQIGHSLRFATTHKGADSLISFIFKNIGDSPCVFGMEATGHYWYPIYSFLKFKGYTIYVINPIQSDSLRKMYIRQTKNDSIDSFLIAEVIRFGQFEATSMADENILAMRQLYRYRDSVVSSRTEIKLRISTIMEQIFPEYEKQFSSLWLGTSMGILEKYLTPENIQNAPIDELFEIIKDKSHNKLTIKKSVSIKDAAADTFGIKIAQDAFAFQLKQLIDRLNFLNEQLEALDHEILSYYEKFDCYLHTIPGIGMIAAATILAEIGDIHRFKNSSALVTFAGIDPTVRQSGEFNSIHNHMSKRGSPYLRHAIFLAATTCSFHNSPLNAYYKKKREQGKHHLTATGAVARKLTTVIYAVLRNGKPYEPKSFC

SEQ ID NO: 61674 - protein, 404 aa, unidentified
MWYVGLDWADTHHDVEVQDEAGLRVGARRFAHSHDGLHELKAFLLGIAASPEDLACIVETNHGLLITFLLEVGIPVYPVNPKTANQLRKAAGAKTDRIDAHLLAKLARLDLAELRRLEPDSATVAELKTLTRDQDALIQTQTRLVNQLTACLKEYYPAALHLFAKLQQRSTLVFLQAYPTPQAALAASVEEITATLRTGKHTNPTQAAPKIVEELHRPQLVANPVIVRTKSRLMLSLVKQLLVVIQEIKSYDEAIRPLFLSHDDQELWSSLPRAGKRLAPRLLAEWGDDRSRYADAASVQTLAGTAPVPFESGNYAKAHKRFACVKPLRNALYQFAWQSTQHEAWARDYYQRKRAQGKTHSMAVRALANVWVRIIYAMWVSKTSYQTATFEAARHAHAPRQHVA

SEQ ID NO: 61675 - protein, 418 aa, unidentified
MGKRKNRVCGADVHKDIIVATILNSDNTEFQGKFGTTSMELGRFRDWLIAHNCEQVAFEATGVYWFPVYDALSPSIDTIVANPWMIKGIPRNKSDTLDSKWIADNCLDGKIKRSRVLPKDDRDLRTLTRARSAYTKTRTQLRNRIHKYLALCGITLSSYISDIFGKSGRHILDGLIESKDIDTILDSIPSGKVKKKRELIKASLGKGLDDVSRMLVKDTLELLHHLEEKVNDTSLVILGRLQERAKDLAIVMSVPGIGFVSASIILAEIGDYHDFQTSEQLVKWCGLAPGLNESAGKKRPCGITKQGSKSLRTILVEIAQVVAKMSNNKLSRFFHRLRARKNYNLAITALARKLISIIFHLLINQELYQENNCTTVKTKPIKKDLLCLSKEEQLKDGVAAIVDAFYHLKKKSSLEGGG

SEQ ID NO: 61676 - protein, 359 aa, unidentified
MEAQVKKIDFTDQNIYVGFDAHLNSWKVTVMAEDIVYKTFTQPPKPEVLYNYLKNNFPGGTYHSAYEAGFCGYWIHDKLLSFGIKSIVVNPADIPTTDKERVQKEDKRDSRKIARSLSTGTLMPIYIPSIQTQRDRSLLRTRAMLVKDLARYKNRIKSFLYFYGISIDDSFSNPQSHWSNRFMLWLECIEIDGGSGKEALQVLISECKNLRASILEVTRQIRRLSQTTAYTEQVILLKSVPGIGLLTAMTILTELESIDRFNNLDKMCGYIGLIPSTKSSGEKERTGDITPRGHSVLRTAIIESSWTAIRNDPSLMKSYLSYCKRMESNKAIIKIAKKLLSRIRFVLANKKPYVCLIEK

SEQ ID NO: 61677 - protein, 341 aa, unidentified
MQITTIGLDIAKNVFQVHGIDGAEKVIVRKQLRRGQVMAFFEALAPCVVGMEACATSHYWARELTKLGHEVRLMPAKDVKAYVKRNKNDAADAEAICEAVRRPTMRFVRIKSAEQQGQLMLHRARDLLMRQRTQVINALRAHLAEFGITAAQGREGIKELLAIVAQEEGSRLPSDAHASLTVLAAQLQAVQTMIGSLEKRIVAQHRSNEASKRLETIPGIGVIGATTIAAVVPDPKVFRSGRDFAAWIGIVPRQDSTGGKQKLGPISKQGDQYLRRILIVGAHAVLRRARQQPEKYPWLTQLLARRPFKVVAVALANKMARVAWALLAKGGTYRAPQLVAA

SEQ ID NO: 61678 - protein, 351 aa, unidentified
MKVTTIGIDLAKSVFQIHGIDERGNVVLRRQLRRAQMVLFFSKLETCLIGLEACGSSHYWARKLAALGHTVRLMAPQFVKPYRKNDKNDGNDAAAVCEAVGRPSMRFVPVKSPEQQAELSVHRVRQRLMRQRTALINQLRGLLAEYGLVLAQGATHVRSQLPALLENSSDSLPPLALELFRDLYEELCQLEQRLADYDRRVERLYRGNPLCQKLGELDGIGALTATAFVATVAHAAQFHNGRQCAAWLGLTPKQDSSGGKTRLLGISKRGDVYLRTLLVHGARSIMRHTPKRDDPKSRWVEQLRKRRGENIAAVALAAKHARILWALMVRSEPSAQLIAAHSIEPPAPPNL

SEQ ID NO: 61679 - protein, 364 aa, unidentified
MKEEKRRFVGIDLGKREYTMAIIGRNGKMNIYCGQTHSRGRQALYQRLEKSDKVALEAGNLAFIMASEIQERIGSEVRVLNSAKLPFIWDAPTKTDKEDAMKLAHLIEERRDEKLPIVPLPSEKEMERRKTIASYSREVRRRVSLLNQLHAMFVHQGHTTVVKKDIATDKKRRETINVLKGLEREEAEWILKYLQLHDERIKELKDRIKKEASQDEDMKNLQTIPGVGPIVSYAFTAHVGDGSRFSKSAQVSNFIGFVPRLDYSGDTRRQGHITKHGNGYLRGLLVQSAWTMVLCKKQSSLRDRFICLTKYGGKGKKKTIVSIGRRLTELMYAVLRNKSHFEPRMWDGKKEFFADIKELKKLSA

SEQ ID NO: 61680 - protein, 341 aa, unidentified
MKTLTHVGVDLHQRFCYLTAVDASGKKLKQSQVVNEGAALRAWLRQVPGPRQVVVEASGFWPAFARAVAPEADQLVMVHPQRTKAIASARLKNDKVDSETLAHLSRADLLPEAWRANERTQQTRLLTRLRITLGQQRAKAKNQLQAVLHQEGFLKPVSDVFGKKGRLWLAGLALSPAGRVVVEVWLKVVDQMDEAIAAQTKALEKMAAADARARWLQTVPGIGPYSAMVILGEVGEIERFGSKRALASYAGLTPSVRESAGKRKRGGIGHHGSGTLRWIMLQVAQVACRCSPAARAWYGRMKQRKPAQVALIALARKRLTAVWALLSHGVCFDEKVFARQD

SEQ ID NO: 61681 - protein, 392 aa, unidentified
MYIVGIDIGKNHHEASIVSPEGKQIGRSLRFATTHKGADSLMSFIFKNIGNSPCVFGMEATGHYWYPIYSFLKAKGYTICVINPIQSDSLRKMYIRQTKNDSIDSFLIAEVIRFGQFGTTSMADENILAMRQLCRYRDSVISSRTEIKLRIGTIMEQIFPEYEKQFSSLWVSTSMGILEKYLTPENIENAPIDELFEIIKDKSHNRLTKAKAISIKEAAADTFGIKIAQDAFSFQLKQLIDRMNFLDKQIEALDIEIMKYYEQFDCYLHTIPGIGIIGAATILAEIGDISRFKNSSALVAFASIDPTVRQSGEFNSTHNHMSKRGSPYLRHAIFLAATTCSFHNSPLNAYYKKKRDQGKHHLTATRAVARKLTTVICAVLRDSKPYEPKKFC

SEQ ID NO: 61682 - protein, 352 aa, unidentified
MSEHSKEVIIRVLGIDLAKRSFHLFGVDGDGRQVLSKKLTRARLSEFVANLPPCTVAMEACGSAHHWARRFRSYGHEVRLIAPQFVKAFVKSNKNDAADAEAICEAAQRPNMRFVAVKTIEQQDIQAVHRMRSLAVDRRTAQINQIRGLLLEYGIEVAQGRPAMQRRLPEILEDADNGLSERFRTELHGLAEELRHLNERVAHYDAQIDAIAHGDRQARDLMTIPGIGPKGATALLAAVGEDATLFGNGRGLAAWIGLVPRQHSTGGRDRLLGISKRGDVYLRNLLIHGARAVLRTLEHKDDRTSRWAKALKARRHTNVAIVAMANKMARVAYAVMTTGKPYDPAIGSVATD

SEQ ID NO: 61683 - protein, 391 aa, unidentified
MICVGIDVAKDKHDCVILNSEGIVLADVFTIPNNLEGFNALLDKLRACSTTQDSIKVGLEATGHYSYNILGFLLDNGLSSYVLNPLRTNLYRKSLSLRKTKTDRVDARTIAAMLLSDVGLKPYTDTAYHNEELKSLTRYRFDKVKKRAKLKQSVSRLVCILFPELEQLVPALHMASVYALLSEFPGARQIADAHLTRLKTLLADASKGRYGRDMAVELRDAAICSIGSSIPAKSLELQHTIRLIRELDAEIEEIEAAIQAIMEELHSPITTIPGIGFRMGAMILAEIGDFSRFDSPDKLLAYAGMSPSTYQSGQLKNCYPHMEKRGSRYLRYALYNAAKYVCHWDPAFAAYLAKKRAEGKHYNVALSHAAKKLVRLIFALEKSRQPYCPVI

SEQ ID NO: 61684 - protein, 392 aa, unidentified
MTYFIGLDLSKYKHDCFIMNENGEAIRDSFSFENNAEGFNTLLDVLNSLDSNQEKRIGFESTGHYGSNLKMFLERNGYSFMEFNSLLVHRFFNAESLRKTKNDKVDAQKIALYLSTREYKPNPNSSYHLSCLKSLTRLRESLIDERSLQLVRMTNILDKMFPEFKPLFDKQGLKASSAIYLLENYVTPSKMANMTKASYDKMKSELRRPISYAKFCKIRDLAKESVGNEDEILSFELNLTLELFKELDKKVKDTEDKILKEFTSLKCHIQTIKGIGDMTAASILAEYESIDRFDNPGQLAAFAGIEPSENQSGTHDGKGKMVKHGSSHLRRYLINAAERMLTHNPILYEYYLKKRDEGKVHNVALSHVARRLTRIIFYLEKNDTDFDINKMR

SEQ ID NO: 61685 - protein, 407 aa, unidentified
MDVLIERACGLDVHKKSITACVMTPEGKEIKTFRTHTVFLLDLIDWIKQHRCTHVAMESTGVYWKPIVNLLEAEEIQFLVVNAQHIKAVPGRKTDVKDAEWICNLLRHGLLKPSYIPDRNQRELRELVRYRRSLIQERSREHNRVQKVLEGANIKLAAVVSDIMGVSSRDMMGAMIEGEEDPEKLAAFARRTLKKKKEELELALRGNMSAHQRIMLKTMLTHVDFLNEQILELDTEVAKRLDPFQQDIERLDTIPGIGRRTAEQILAEVGTDVGSRFPSAPNLCSWAGLVPGQNESAGKRKSSKTRKGNKYLRAALIEVAHSVCRSDNYLGAQYRRIAARKGRHRAAVAVAHSIMTIVYYVLTRKEDYKDLGSHYFEQRQQEAIVRQAVRKLENLGFQVALFNSEAS

SEQ ID NO: 61686 - protein, 352 aa, unidentified
MNRYIGLDAHKQTCTFGVITDKGKQLKTAVVETNGEALVEFVRLIPGRRHLCLEEGTQSQWLAEILSPHVHELAVIWAEKKRGNKNDALDAFGLAERMRTGLLGAPIFKPPRAFTPLRDLARCYVKVTSDVVRTKNRIKSFYRSRGQQTGSKNAVYAPGRREELRNQLPPGTRQAVEFLCEQLDSQEETKAEAQKAMVAEARKHVITRKLETAPGLGPVRAAQLLAVVVSPGRFRTSRQFWSYCGLAVVMRSSSDWVQAPTGQWVRSDVTRTRGLNRNFNRTAKAIFKAAATTVISQMPNDPLYADYRRLLEQGTKPNLAKLTIARKVAAITLAMWKREEVYNPKKYRQQEA

SEQ ID NO: 61687 - protein, 409 aa, unidentified
MDQMLERVAGLDVHKKTVTVCVRVPGARGARRQEVRTFGTTVPELLALREWLETQGVTHAAMESTGVYWKPVFYILEEAVTCLLANAAHIARVPGRKTDVQDCVWIAQLVEHGLVRGSFVPPAPIRDLRDLTRARKALSHDRTRAANRLHKVLEDAGIKLASVANDVLGVSGRAMLEALVGGTTDPTVLADLARGKLRAKLPALRHALTGRFRSHHAFLVGQLLAQLDFLEEALAQVSAQIDEVIAPFQAELERLDTIPGVNRRTAEVFVAEVGVDMRQFPTAKHLASWAGLCPGNRESAGKHKSGTTRKGDRWLRTALVEAALSASRATDSALAARYRRVMRHRGHKKAVIAVAHAILTSAYHVLARQIPYHDLGPDYYDHRHAERVRRRAIAALERQGYRVTLQPAA

SEQ ID NO: 61688 - protein, 419 aa, unidentified
MTKAKSKLEIVNPNASGIDIGSAVHYVCVPEGRDKQRVQKFGCFTADLHNLARWLKKCKVTTVAMESTGVYWISLFQILESYEFEVKLVNARHVKNVPGRKSDVQDCQWLQQLHSYGLLRGSFRPDNQMCVLRSYVRQRKKLTESASTHVLRMQKALIQMNIQLHKVISNITGVTGMKIIEAIIEGERNPEKLAEFRSSNIKNDKATIAKALTGDYREEHLFVLKQELELYNIYQEKIAECDENIENYYKTFETKFCGNKQCSKIKNRSTKNRPNFSIHEELHRVTGMDFTKVPGLDALSIQTIISETGINHNKWPTEKHFSSWLGLSPANKITGEKVFSTRTCRVINRAANAFRMAAHCVSRSNSGIGAYCRRLKKRLGAPKAITATARKLACIFYSMLKHGQEYVEKGIDYYEKLYK

SEQ ID NO: 61689 - protein, 418 aa, unidentified
MDVLYERCCGIDVHKQTAVACVVVPGAPGPPTKEVRTFGTTTEELLSLGDWLAECGVTHVAMESTGVYWKPLWNLLEDRFTLLLANAQHVKQVPGRKTDVRDCEWLADLLRHGLLRASFVPERPQRELRELTRYRTALIRERAAEVNRLQKTLEGANLKLGDVASNVLGVSGRAMLQALVAGTTAPEALAELAKGRLREKRPALERALRGRLGRHQRFLLAEQLCHIDTLDESIARVSAEIAERLRPFEAELARLDGIPGVGRRTAEVLLAEIGTDMTRFPTAGHLASWAGLCPGNRQSAGKRLSGKTRDGNRWLRAALTEAAQAVARTRGTYLAAQYRRLAARRGKHKAAVAVAHTILVIAYHLLAKGVGYADLGGNYFDERDRQLVERRLVRRPEMLGYEVTLAPRAPADPPVAVA

SEQ ID NO: 61690 - protein, 368 aa, unidentified
MKKETITSDGISGASLVNDVNRVLNLGLDMHYRQVTVAMQEDGGRIKAAGKMGHADFLNWVPKKLEEGWEIYSCYEAGASGYWLHRELEKLGVKNLVVVPKAMGQGGKKQKTDQRDAGELCDSLDRYLRGQKKALSEVAVPTEEQEEKRALIRYHRQIMADRGRCEARGKGLLCAQGIQVRGRWWRGDSWLELTSDPRLKDWMKEQLVGWRNKILSTDEEQSALRERIAALAPAILPKGVGAYSAAVLHYELRGFEHFKNRRQVGSITGLCPGVHLSDGRGKEGSINRCGIGIVRWTLVEMVWRLMIWQPQYPPVRRLAAGLVKSKRARKRLVVQAARRLAIDLWRLSTGQTTPEKLGLVMQSNATGN

SEQ ID NO: 61691 - protein, 349 aa, unidentified
MTEQRRSSAGECVDVGVDVHKETYMVTCVCHQQIVKTATVQAEPAGLAASLLRWFPGATLYSAYEAGFSAFVLHRVLTTAGITHIVVNPASIAVAANDKVKTDRRDAKKLAIDLADGRLRGIYIPTKAEELARLLPRTRAQIVEHRATIARQIKAKLHQFGLIAPSSRRMISNRYLRELAAWSLAPELRVSLTLLAEQWRFATRQLIEIRRLLQEQAAAQAELEKVYRSVPGIGAVVARTLATELGDMTRFANERALFSYTGLTPSEYSSGASVRRGHISRQGSGRVRHLLIETAWRALPRDIVLQEIFDRIAATRGKKRAIVAIARRLTGRIRACFRQGTTYAVGTYA

SEQ ID NO: 61692 - protein, 398 aa, unidentified
MTESSDYESVQVFIGVDVGKDTHHAVAINRSGKRLFDKALPNDENKLRSLISDLKQHGQILLVVDQPATIGALPVAVARSEGVLVGYLPGLAMRRIAALHAGEAKTDARDAAIIAEAARTLPHALRTLKLADEQIAELSMLCGFDDDLAAQTTQASNRIRGLLTQIHPALERVLGPRLEHPAVLDLLQRYPSPEKLASLGEKKLAAQLCKLAPRLGKRLAADIAQALAEQTVVVPGTNAAAVVLPRLALQLITLRKQRDEVALEVEQRVLAHPLYPVLTSMPGVGVRTAARLLTEVACRAFASAAHLAAYAGLAPVTRRSGSSIRGEHPSRRGNKALKRALFLSAFAALRDPLSRAYYTRKMSQGKRHNQALIALARRRCDVLFAMMRDGTFYTPQGS

SEQ ID NO: 61693 - protein, 444 aa, unidentified
MMSRKHKTHLRGERGQAFADKIRGIASEQILCVSLDISKYFHLVMIHNALGEIVRPSFEIDIFRTGFEQLCQAVDQAIEQTQAQVVLVGMEPTGHYFENLARHLLARPQPVTLINSYAVKQNRQQQMMGREKTDPIDAAAIGDLLRRGEGSPYRPLSGVYLQLQQLDRVRLAKVKIRTMLKNQIIGHLDRIFPGLVLIGDEAKSRYTPLFATDLWDCQTLQNLIRVCPDPSQLAAMSNSELIAAFHSHNFKMGPKTAAKIISYAQKVLVPHPELIAIRAELLHHDLLLLAAVEARITVLEERLCALLAQTPYQIWTQLKGLSQVQVASLAAAIGNPNHYSRAKQVFRRSGLVSGRNDTGVRQREGQGSPIVKTGDVYLRRALMDAVYSLIPHQPLLGRYYAQLKFTKPKLVARVATARRATGILWATQRDQQAATLILKRGALM

SEQ ID NO: 61694 - protein, 382 aa, unidentified
MKQATRFVGLDVHAESIAVAVAESGRKGEVRSLGRVPNRLESVRKLIQKLGGPKGLQVCYEAGPTGYALYWQLTKLGVECEVIAPSLIPTKPGERVKTDRRDAEKLARCYRAGELTTVWVPDPDHEALRDLVRAREAAKKDQLRARNRLGKFLLRAGVRSPNDTKAWGSVHMEWLRRLRFDHAAQQATMVDYLGEIDHVAARIQRLEEAIDEAVKDAPPMMREVIGALQALRGFAKLAATTIAVEIGCFTRFERAKQLMGYVGSTPSEYSTGGSRRLGAITKTGNAPVRRVLYEVAWAYRHRPALGTALKRRQRGLPTDIVEVAWKAQHRLHRRYAALVAKAKPHCKVITAIGRELLGFVWAIATRVEQAYANKEGVDRAAA

SEQ ID NO: 61695 - protein, 351 aa, unidentified
MTMLAEVVDAVVGGDTHRDTHALEMLAPNGTTIAALAISNDDDGFAEAIAWIAGNVPGPRVVAGLEGTRSYGIGLARAVAAAGLIVVEVQAPRRADRRHRGKSDPIDAHLAGLQVLRMPAGELPAPRADGDREALRILLSARRELTMARTRQINRLRALLPGGDDTDRDLSRDTLTGARLQAIARRRARASDTTEQSVRRAEARRLANAIRAAAAELAANKRHLAGLVRGLAPALLDKTGVGPVSAAQAIVSWSHRGRCRSDAAFAALAGASPLQASSGRTTRHRLNRGGDRQLNRALHDITLTRWRADPRTHDYIARRRAAGKNDTEIRRALKRYVARELYRALQASPAA

SEQ ID NO: 61696 - protein, 412 aa, unidentified
MQDILTCAMGLDIHRDVIVACLAKGELGTDPEIEIRSFSTLIPEMRKLRDWVLEAECRYVAMESTGIYWQPIYEMLEPCFDGQINILVVNARHMKNVPGRKTDMRDAQWIATLLRAGLLKGSFIPDKTFRELRHLTRYRKSIVRDITAQKNRIDKFLQSSGFRFTAFLSDAFGASGRNIIRHLMEYGNISREALDRCLKTQTRKRIDEILIALNGSLSEHQRGFLRMIFWHLEALEQHRHTVEDAITKEITKHEEALSLLCSIPGIDVTAAAAIIAEIGTDMSAFPDSQHICSWAGLSPGNNESAGKRKSAHINKGNPYLKSMLCEVGWVISGKRSLYLSGWYWRIKQRKGAKRATIALARKLLALIYTMLKTGSPYNEDCFEIRRKQSERKRASRMVNELQKLGYFVVAPG

SEQ ID NO: 61697 - protein, 419 aa, unidentified
MSFKILKNNCCGLDVHKTWIFACIGITDSHRRTEYKQARFSSFTKGLQELCDWLAKYNCTDVCMESTGKYWIPVFNVLEKNNIWVTLSHPKYTKPQKGNKTDRKDAKWICDLYMCGMVKPSFIPPADIRQLRDLVRYRFKLTCMITSEKNRAHNCLTISNFKLDEVFSDIFGKSSRSITEQILQHPGETFDVAQFVDGRCKTPIEEIQAAVDGAISTEQAVKLRQCLNHIDELEKHQAEIEREIFRLSDKYEEVLNLIRTVPGFDKNPMTAIQVLSEIGGDMSVSPTAKNLVSWAGCCPRNDQSNQKIKSTRISRAGSYFKPVLVQVANALIKSKKHPEFTTRYRRIKARRGHKKAIIAICRMILTAIWHILTDLNPYTTEGFLESRPVNDSKILTTSQALNLLKQRGYVIKDDIVSVP

SEQ ID NO: 61698 - protein, 342 aa, unidentified
MKNMMIGVDLAKNVFQVHGALRTGEVQFRKKLTRKQFPAFMAQQKPGMVIFEACGSAHFWAREVEAYGHQVKLIAPQYVRPFVKRQKNDAADAEAIVIAARQPEMRFVDPKTVEQQSCAAVFRGRERLVHQRTADVNALRALLYEHGYVFPVGMSHLNRMTALVEDETVNLHALIRAECLDLLVQIAEKTARIIERTTKLKTLATQSDRARRLQTMPGVGPLTAIAVEAFGPDMAQFKTGRDFAAWLGLVPKQHSSGGKERLGRMTKAGQADIRRLLIIGAMSRLNWLGQRTIVEGSWLSRMLTRKPKMLVAIALANKMARQIWAMLTKNEDYRDPAMAVVA

SEQ ID NO: 61699 - protein, 348 aa, unidentified
MAHFVGLDVSVKETSVCVVDDAGKVILEQKVLTEPEDIIALLTSLGATFGRIGIEAGPLSQWLVNALTAAELPVICVETRHMKALLTAQQINKTDRNDARGIAQMMRVGLFKPVHVKTLVAQEQRMLLTSRKLLQRKLLDVESDLRGTLRNFGLKVGVVSGGRYEARVRELVAGFPRLAAIAEPLLSVRRVMRQQLAVLHKMLLDTVRDDPVCRRLMTAPGVGAVVALIYRATVDQPQRFVHSRAVGAHVGLTPKRYQSGEIDYDGGVSKCGDALLRTMLYEAAHSLLTHSRKWSWLKAWGVRVAQRRGMRRAIVAVARRLAVVLHRMWVDGSEFRWSKDSAAVPAVA

SEQ ID NO: 61700 - protein, 411 aa, unidentified
MEVIVERCAFLDVHRDTVMACARTPDGRGGRREDVTEFGTTTSQLLALADWLAGRRVTLVGMEATGVYWKPVHWVLEASVPEVWVINARHMRNLPGRKTDVADAVWGASLLEHGLVRPSFIPPEPFRALRDLTRYRKSVTEERARESQRLHKVLEDAGVKLSSVASAVLTKSGRAMIDALIDGQRDPTVLAELAKGRMRSKIPQLQDAMAGRFNEHHALLCRAMLARIDQADTTIATLTARIDELLGPYEAAVTLLVTIPGVARRSAQVILAEIGADMSRFPTAGHLASWAGMCPGNNESAGKHRSGRTRHGSKWLRKSLIEAAQAAGRSKDTYLAAQYAQIRSRRGSQRAAVAVGHSILVIAWHLLTTGEPYNELGGDYFDKRRNSAARQRRLVAQLEAMGHRVTLEPAA

SEQ ID NO: 61701 - protein, 359 aa, unidentified
MKKSSTAKAAINKNFKQKLTIGLDLGDRSSWYCVLDEAGEVMSEQKLGTTPKAMKEVFSAMPRSRIALETGTHSPWVSRLLSELGHEVIVAHARNVRLIGESRRKDDRLDARTLARLARIDPQLLSPVKHRSAQAQADLTVIRARASLVRARTALVNTARGLTKSYGERMRGCNPRNMDAEKAQSLSHELQAALGPLLQALESLSERITEYNQRIEAIAQQSYPQTALLKQIKGVGTLIALTYMLTLEDPHRFRKSRDAGCYLGLQPGRRNSGQSEPQMHISKEGDPYLRTLLVQGAHHILGPFGADSDLRRWGLKLAEQKRAIIATARKLAVLLHRLWVSGEAYEPLRNTKPTRLAAA

SEQ ID NO: 61702 - protein, 526 aa, unidentified
MAKSKRNKRRQHIQKVKGRRFTDEIRNFDLEKVLVIPIECGKNSHKALVANYFGDILYDSFEFANSITGVKMFDSIIQDVSSSINAQKVVLGIESTGHYYENLYRSLITLGYDVAIVNPCSVYAQRTGQLNWCKTDDIDLCAIGQVLIDNQATETKLAEGLYYNLKHLARLRRDEVTKRARLKIQIKTLCDHIFPGLQKSKIFSDFWGKASILLLENYPTPNSIIRLGVKRLARFFKKHNTKLGLTTAQRLINLAQNSLTSEVSNIYAHLFNLKFKIADLRSADEKIRKLNVELAQHLVKTPGILLLSIRKINVPSAAEFLGEVGPLSQAGNAKKIIARAGLNPSRFQTAEYERADNPITKRGSNPLRNASLTIAHNLVGDDPHLVNQPANPYFRGFFDHLVNDEGKDKRLAKVACANKFIRIAWAMMTQKKLFCPPTWNQDRVADDPLAKLEKFLIENNAKDILEDAVHIAKEQLPVNYSSYVQQKENDIDSPVSSLTFEQERDPVTFPGPISSSLELEEVKPVV

SEQ ID NO: 61703 - protein, 345 aa, unidentified
MEPMYYIGLDVHKRKISYCVKDGSGRIHCEGSIPATRFDLDRWMKALPQPWSAAMEATMFSGWIYDHLKPHAAALKVAHPLMLRAIALAKKKNDRVDASKICDCLRCDFLPECYMAPTAIRERRRILRYRHLLVRQMVQTKNKIAMLLMEAGISYNKQRLHKAGYFRELLASTPDIDEGLRSLLRMCRETVVRLAKTESALVRSLAHDRLLVHRVERLMSIPAIGPITALTWALEIGDVLRFSSIKKAISYCGLCGDEKSSGNTVQRTPLSKQRNKHLQYTLIEAAKMAPRHSPTLAMLYDKEKQKGNANRATLAVARKLVAYLMAVDRGQTHFLVLDNEVPTAA

SEQ ID NO: 61704 - protein, 388 aa, unidentified
MEQVIIGVDPHKLSATIEVVDQHEQRLGSGRFTTDRAGYAAMRSYAKTWPQRVWAVEGSNGAGRPLAQRLLEDGERVVDVPAKLAARVRLFDTGHNRKTDAHDAHAVAAVAVRTSTLRVLQFDGELEALRMLTDRREALTRRRVQTVDRLQALLAELLPGQAKRDITTGQAKTMLASVRPRDIAGKTRRRIAAEELAELISVEAKIKKATAELKTIVLARGSRLMDLHGVGPVVAARTLADVGDVTRFADRNRFASWTGTAPLDASSGEQNRHRLSRAGNRRMNHMIHIAAISQIRLDTEGRAYYRRKRAEGKKSLEAIRCLKRRISDAIYRQLLEDAQRSAVEDVGASPGGHCRASQESSAVDLPLHIDTSDQPLPGPAEKTLRRTG

SEQ ID NO: 61705 - protein, 349 aa, unidentified
MDRTTYGLDIAKSVMQLHWVEAETGEIGRKKLARARLAEYFAQLQPVRVVMEACGSAHHWARVLGKLGHEVELLPAAQVRPFVRSNKDDAADARAIWLAAQQSDIRRVPQKSTEQQAVLALHRTRSHWISVRTATVNALRGLLYEFGVVLRGGRRAGLKALAEQRAQIDEQVPQIMRGLVDGQLQTLNQVQQRVEQLEHEIAAVQKQLAKAGDLRRVPGIGVLGSTALAATLGDGKAWRSGREFSASLGLVPAHSGTGGKVRTGRISKRGDPYLRTLLIHGARSVIEHAKDKPQWLQQMLARRPPNVVAVALANKMARTAWALVAHGRAYQGDWQSARPGCSTAQAAAA

SEQ ID NO: 61706 - protein, 323 aa, unidentified
MPTKANKKRRSFIGIDVSKKLLEVGVHQSDFRFRCPNDPKNFPLLISELISLRPVRIVLEATGGLERPLLQALQAVGLPVVVVNPRQVRDFAKALGLLAKTDRLDARVLAHFAAAIKPPLRPLKSQDETELDALMGRRTQLSDMLTAEKNRRGSAATETTRDDIEEHIEWLEDRLKELDEKLKQQLQCSSVWQQKDKVLQSVKGIGFVTSMSLLAECPELGQLNRHQIAKLAGVAPLNRDSGQQRGSRHIWGGRAQVRRKLYMATLAAIRSNPVIKAFYQRLLDRNKLKKVAIVACMRKLLTIINVMVRENKVWNVKDQPVSA

SEQ ID NO: 61707 - protein, 412 aa, unidentified
MDVLYPRCCGLDVHKKTVVACCILSTKGRKPVKETRTFRTMTTDLLALADWLQEQGCSHVAMESTGVSWRPVSNLLEGQCELLVVNAQHIKAVPGRKTDVKDAAWLAELLRHGLLRGSFIPSKPQRQLRELTRYRSTLVQERARTLNRLQAVLEDANLKLASVVTDINGVSARAMLEAILAGQRDVEILADLARGRLRAKRDQLKEALEGRVTAHHSFLLTEHLSTLEYVDEAIERVSREIDQRLTVDQEAIVLLDTIPGVGQRAAEILIAEIGTDMSRFPSAKHLASWAGMCPGNHESGGKRLSGKTRKGNRWLRQVLVEIAHVASKTQNTSLAAQYKRIAARRGKKRALIAVGHTILTIVYMMLTRKQPYQDLGAAYFDQREQERVERRLVHRLERLGYEVSLQPRALAS

SEQ ID NO: 61708 - protein, 339 aa, unidentified
MGPTCVLLNPNGCLGPEPEPTRMGWKMMPQEPAYVAVDVSKATLEIGEPELDRTWSLSNEPKGWRKLIAWIEKLGRPVVVGLEPSGGYERGLVEALLEAGIDVRWCDPARVRALAKALGAPAKTDRIDVGMIRRFLSQTGGRPVRRDRERDALRASLSARRAAQEAAQALEAQAQALPEGPARQALAALAAQARLTMKAQERAAIALIRASQALCPTWRRLQTAPGVGPLVAAELLAHMPELGAVGGKAIAKLAGLAPFIRRSGQWQGRAVCSGGRPRPRQLLYLAVITCLRGSSQTKAAYQHLVAAGKPPKLAITACMRRLLVTLNAMIRDQADWRPA

SEQ ID NO: 61709 - protein, 355 aa, unidentified
MSIVAHNHPFVIGVDTHARNHVLAVLTATGQQVDSARFPTSEAGMARAIAWAARRTGGDLATLWVIEGTATYGAQLTRAVAGAGYEVLEAPRMNARAHRGVGKSDPLDARRIAEVALPLEENQLRHPRRGEGERAALRVLVAARDHMTGERTAAVNALTALVRAVDLGAEARRPLSNRQIVEFSRWRIREEPLAAATSRAEAVRLARRIVALDEELATNHDSIDTLVRATPAARLLDKTGVGPITAAVCLTAWSHHGRVRSEAAFACLAGANPIPASSGNTVRHRLNRGGDRRLNRALHIATITRMTHDPATREYVQRRRTEGRTTKEIQRCLKRYLARQIYRHLNAARALPLPT

SEQ ID NO: 61710 - protein, 376 aa, unidentified
MERGSLMLNTTTFVGLDVHARSIKAVALDAMTGEVRSATFAYDAAAVAEWVGSLDPAAKCVYESGVTGFDLQKKLTALGVDCVVGAVSKMIKPSADRKRKNDRNDAEFLARMLSVGNVVEVCVPDDECEAARDLVRALDDAREDLKRCKQRLSKFLMRHGYAFSETTPTGRRKGNWTAAHWAWIRSIEFPEKADDEVLAYYIDTVRQAMENKKRLEKLVEAEASKPRWKKRVDSLRCLKGVDAMTAADIVFEAGEFSRFKNARSFAAWLGLTPSEHSSGESARQGGITKAGNKHLRRVLVEAAWHYISASPHPKDLAKGQAPDPAARRHAAKGIRRLVKRREEMLGRGVHKNKANVATARELACWCWAVGRMVENG

SEQ ID NO: 61711 - protein, 390 aa, unidentified
MNKDTVKPLVNQGTEIDYRGYIGIDVHKDTIVVAVALPGRHNASYRCKICNTPKAVDRLLNQMSKEFDGEVLLWGYEAGPCGHGLYRQITAFGHDCQIVAPSLLPKKASDRIKTDRRDAVKLAQSLRSGETTAIWVPDEGHEAIRDLTRARDDMKSMERKARQQLGGFLLRHEKVWPTGKTRWTKGHFNWLEALKFDQPMLQVVLQEYIDTVKQAQQRVVDLTDQMHKVLMNWSMAPVIQALVCLRGIDVLSAMVIVAELGDLRRFESPRQLMAYLGLVPSEHSSGSRRRQGAITRTGNRHARRMLVECAWSYRFPARMTMHLKRKSQSAPVWAKGIGWKAQKRLCTRYRRLIENGKNVKLTCVAIARELAGFIWDIACRQMDKLHPITV

SEQ ID NO: 61712 - protein, 341 aa, unidentified
MMIIGCDFHPRFQQIAYVDLETGEFFERRLSHPEEAERFYRSLAGTQVRIGLEATGNFGWFRRLINELGYEFLLGDPSAIRAASPRRQKTDKRDARHILRLLQEDRFPVVWQPPAENEQLRQLLLHRCRLVRLRTRITNQLDSMAKNEGLVGSRSWSAERRRRIEALPLSGWYLRRRTDLLDLLDELEKRIEPLEKAVGEAAENNQQACLLMTHPGVGPIVSLVYVLTIGDWKRFPRSKDLASYLGLIPAEQSSADKRRLGHISKQGNTLLRWLLVQAAIGAQRSDPSWHRLYLRLSLNKHHGVAKVAIAHKMAVRLYWMLRSGQNYKQVMERGSHAGQPV

SEQ ID NO: 61713 - protein, 414 aa, unidentified
MNGNRKVEGIKGVKVFAGIDVGKEAHYLSLIEKDGMVKAAGIRIDNNREGFEEMLKLLEKAGGKETVAVGFEPTGHYWKAAGYYLQEKGYRPYLVNPFHVRLSKELRDNRQRKTDKKDSQLIAHLVREGKYMNSRLLAGEYEDLRRLTIVREKIVQEMIRCQVRLKAALDEYLPEYEKCFCKLTIKTSLELLKRFGLTGLRSEAKEEEVAKAIVMISRQRISASRAAGIVATLKGSIGVKEGLSGAEVELRTWIRQIEGYREDLNNLEERIKTILIKTEEAKYLMSIKGVGVITAAIVLGQTGSFANYSNAKKLEKLAGLDLVENSSGNRIGQKSISKRGRDLFRHALYRIALVAIAKSKEIKWLYEYKINELKKKKMIAITDITVKLLRIMFALVKNKSMYDGRLVLQAMPCS

SEQ ID NO: 61714 - protein, 348 aa, unidentified
MVLIGSDFHPSWQQVSWLNRETGEAGDRKLVHEPGAVEKFYRQFPAGTRIGMEATGNCQWFLELLVRLGHEVLVGDAAKIRASDARQQKHDKRDARLLLQLLDEGRFPQIWVPSREQKDLRQLLIHRYKLVRIRVQVKNALQHLAMNQGVLKKRRLWSAAGQRVLCELPLAPWASRRREDLLKMKSELDSKIDLLDQAVTAAAEKDEKARLLMTQPGVGPITSMAFVLTMGDVARFPRGKQVASYLGLIPREYSSGGRQRLGSISKQGNAFLRMMLVEAAQCVVRCDPEFRNEYLHRCHSKAKGVAKVAAARKLAIRLYWMLRSNTRYPEIVRIESSSRVPLVVPQAG

SEQ ID NO: 61715 - protein, 409 aa, unidentified
MTSNPLNVIVGVDTHADTHHVAIVTEHGKHLADKEFLAVGSGYRKIFDFITQFGTVISVGIEGTGSYGAELSRVLTNEGLTVQEVNRPNRQARRLRGKSDPIDAYQAAESVLADRGTSTPKAKNGPVECLRVLRTARVSAMKARTIAINQIKGILVSAPEQLRSKYRGMSTVQLISSLEHSRPAGILIEPEYATAMTLKNLATRYRNLDREISQADDHLAEILAAHAPMLCDLPGVGTEVASQLLVTMGDNPERIGNQAQFAALTGTAPIPASSGKTTRHRLSHGGDRAANAAIHHVVVSRMATDQRTKDYIARRTEEGKTKKEIMRCLKRYVSREIYGQLTNPKPAPVISDLRPTRLQLALTLQTAAREFNTWPGTLSRIERGLSRDDDLAREYRNWLATKTPTQKMS

SEQ ID NO: 61716 - protein, 407 aa, unidentified
MEVLYPRCAGLDVHAGSVTACVRVATGSEVTRHHDTMPTTTRGLLALGEWLTAHGCTHVAMEATGVYWKPVWHVLEANFTLILANAMHIRNVPGRKSDMNDATWMADLLAHGLIRSRFVPPAPIQQLRDLTRTRKQLMREMTRHIQRIQKTLEDANLKITHVMSNIVGTSGRAILDALVAGETDPERLADLTRGRLKATRVELVHALHGRVADHHRFMMKLHLTQIDALDAAVHDIDTRVGDALGPFRAAVSLLTTMPGLSDTTARVLVAEIGTDMTRFPSASHLISWAGLCPRLDESAGKRRSTRTRQATPWLKTTLVTAAWAATRKKNTYLRAQFLRIQSRRGAKKAILAVASSMLTATYYMLRDGVEYHDLGGQYFVHRDKEQMAKRLIDRLRNLGIAVEVKVA

SEQ ID NO: 61717 - protein, 401 aa, unidentified
MNAVGIDVSKGKSMVCVMRPFGEVVLEPFEVLHTAQNLNDLAGKLKALDGETRVVMEATGNYHKPVAFVLHDAGLFVSVVNPVLIHDYDNNSLRRVKTDRKDAVKIANYTLDKWTRLRQYLPEDDTRLALKNCYRQYQQAVAVRTMLKNNLISSLVLPFPDANKLFSSPAKSNGCEKWVDFIGDFWHSECVSSLSSDAFAKKYLKWCQKHGYNFTRSKSDTIYACAVNAASLPKSPTSKLLIQQQVAQLKAVSQSVAAFQQEMLRLSQQLPEFDTVMEMYGVGPSLGPQLMAEIGDVRRFSSKKLLIAFAGIEPQPNDSGKIVGNDSGISKVGSAVLRRTLFLIMTVILKTQPQDEPVFQFMNKKRSEGKPYKVYMMASANKFLRIYYARVKAVMDSKHSK

SEQ ID NO: 61718 - protein, 341 aa, unidentified
MHDVTLIGIDLGKHVFHLHGQDRAGNALLRKKFSRKQLIIFLGNLHPCTVVMEACAGAHWMARKLSELGHQVKLISPLFVRPFVKGNKNDFVDAEAICEAASRPSMRFVTPKTESRQSLSALHRVRDSLVRDRVKTINQIHGFLLEFGVSLPTGSAVIRRLPAVLAEHVLPPQMIALLERLHAHFKYLSEQVDQLDKEQARQLADDDLGQRLLTIPSVGPVTASALTAEMGDGKQFGCSRDFAASVGLVPRQYSTGGKPNLLGITKRGDKNLRRLLVQCAKSYMRRLGSQTGPLADWVRSLLTRRHPNVVACALASKLARIAWAIATRHTTFAAEPLFKPI

SEQ ID NO: 61719 - protein, 359 aa, unidentified
MSGEQGAERCVVGGVDTHKDLHVAAVVDERDRVLATASFAATRQGYRRMLAWMRSFGAVRRVGVESTGSYGAGLLRFLQQAGIEVLEVTTPDAHDRRRRGKNDDLDAQSAAHAAFAGRRTVTPRSRDGMTEALRVLSACRKTAVAARRVALQVIHNTIVCAPDGLREALRRMTRTQLVRTLAAWRPDLTGYRDVEAAYRIGLKSLARRHLELHDEIADLDAMIGAIVDELAPELVARNSIGRNGAAQLLLTAGDNPERLRSEAGFAALCGVSPVPASSGKTVRHRLNRGGDRAANSALHIIAIGRLRTDARTKDYVARRMAEGHSKLEAIRCLKRYIAREVFTLITQRQRAINQTRIVA

SEQ ID NO: 61720 - protein, 421 aa, unidentified
MTKDLFNINNRVLVAIDVAKARNDVLVELPNGTRKKLKVANMAKDYQEFIQFLKSFDLPCEVGLEATANYHRNIAYQLQIAGFKVHLISALAAARTREALHNSWDKNDPKDAQVILHLLKTNIVQKYCDPLIHKFHDIQEISKTYHQISLRKVKVQHSIVNHYLTLYFPEAEKYLHSTRAKWFSSLLLRFPTPSSIIKYSFEEFVKAAWDTSGRKVSKMNWLEDFYFTAKNSIGLPVSEDSQSINMFRIVLKEHQALCQTQKEIEDTAENYLKDNPDYHYLKSIPGIGPIIALTVLAEGGDLRRFNHHRQFLKFCGFDLCTHQSGIFRGQSKLSKYGNAKLRYVFWLAATVALRMRENSFRTKYENYIKRDPLNADLKRKAYTAVAAKMARVAYSVVKTQTNYRCYHESVIPSGGIASVGP

SEQ ID NO: 61721 - protein, 414 aa, unidentified
MHPGSSFANFGALDWAKQNHHAVIVNPPGQIVAEFSFAHTLEGWQQWRQQAARFAPLAVAIETSQGTVVDQLLQTPDCTIYPLNPKAARAYRDRKAPSGTKSDHLDAWSFADALRVDFSNWKPLLAQGPLLEQLRLLCRDEMALIEERTALVNQLQAALYEYYPAALAAFDDWVCPGAWAFVEAFPTPQTLVSAGKRRWEKFLHTHKLYRAQTYQKRLEIFSQATDFCASSALTQAKSRLAVTRAKQLRVLQTQLEDYRQQIEKLFAQHSDHDLFGSLPGAGSKIAPRLLCELGEDRHRFEAPEILQCHAGTAPISYQSGPIHKVQVRWHCNKALRHTVYLWADLSRHACPWADTYYRSLRKRGKSHACALRCLGQRWLKILWKMWQTRTCYNAELHQQNQLRHGSWVLQLQTS

SEQ ID NO: 61722 - protein, 351 aa, unidentified
MERYLGADVHAASVTFCVLDASGKQVRRDVVETNGKALVGYLQQLAGNLHLCLEEGEWSQWLYEILSPQVAELVVYRSEWKPGQKSDAIDAHGLAEKLRTGRIDRPVFKDGRLFTALRDRARIYTMITRDVARVKSRLKSFFRSRGLPCTGEAVYKPETRAQRARALPPATREVVELLGRELEQLAALKAEAEVGMLRESHRHPIARILETAPGLGPIRVAQMLPIVVTPHRFRTKRQFWAYCGFSVVTRSSSDWVRDQDRWVRARVAQTRGLNFNHNHLLKAIFKGAATTVIAHSGSSPLREGYDRQLENGTKPNLAKLTVARQIAAIVLAMWKTEAPYDPGRIHSLARG

SEQ ID NO: 61723 - protein, 420 aa, unidentified
MSNKVIFNLDELFISVGIDVGADFSWMSIALPNQQFVGKPYKILHNSIDSLTTAVSKIKEAEELYSLESRIFLESTGIYHYPLFCYLRDKGFNCSVINPIITKNSTNINIRKVHNDRFDSKKAALVGLKPDLKVSLMPSDLALNCRNLCREYYDLMDNRSAYVNKLQGELRMAFPQYLGIFSKVTINTSLTLLETYTSPSAFLKADKQEIIDIIKSTARFGLTYAQNKYNAIIQAATDANQFGYIIDSNIKRIRLYISFIRKYDEEINSILESLHELVDANEDSDFVKQIHLIETFKGAGFLSAVSIMGEIGDFSAFSKPKQLFAYFGLDPSVKQSGKFEGTKVQMSKRGSAIARRVIHTLTLQSISISRNREAKNPVLREYYLKKCDSKPKLVAMGAVSHKVCNMIFAILRDNKPSPAE

SEQ ID NO: 61724 - protein, 316 aa, unidentified
MDGTNQVSIGIDVAKATLDLHLLPTGQTHNLPNTKAGHKQLRKLLPDPAACLIVLEATGGYEREVVADLLDAGYRVAVINPKRARDFARALGLVAKTDRIDARVLALFAQKMQPTPDEKTPEKQAEIQQLVARRRQLIDLRTQESNRWHVTRAKAARKSIQTMLNTLEAQVRDIEKAIEAIVEADDDWRNKTQLVESVPGLGGVTATTVVADVPELGKLNRQQISALVGLAPFNRDSGALQGKRSISGGRKSVRCVLYMAALAAKRCNPVIKAFAQRLAQHGKPHKVVITACMRKLLVILNSIIKSGRPWNPQFAS

SEQ ID NO: 61725 - protein, 411 aa, unidentified
MKIAGIDVHKKVLMVVVIETTSPEEKPERRRFTTLPGDLSRLSSWLRAQDVQEAVMESTAQYWRTVWLELEPHMLLHLAHAFSNRAPRGRKHDFKDAERLVRRLFADELILSFVPNGEQRIWRNLTRMKMQLTRDRIRLQSQMECLLEEMRIKLSSVVTDLLGASGLRILRALAAGETEAKRLAALGDNRLKCTEEQLLDALRGSSQPMHREMLALQLERLQLIDTQIAKLNNLIAQGMKPHQEAVIRLAEVPGLGVDSAQQIIAEVGVQAGTFSSAAELTSWVGTCPGKDESAEQNHSSRSAKGNKYLRRVLNQAAHAAVKKRGSYFQVVFRRLLPRLGYQSAIWAIAHRLCRVVWKILHEGVRFIEKGSEPDPQTKKKRARMLVQALRRLGYDVAITATHLATQNAMQL

SEQ ID NO: 61726 - protein, 415 aa, unidentified
MDTMYERCCGLDIHKKTIEACFRSGKKTHMSFGTTSAELRKLTIWLVENDCQSVAMESTGSYWKPIFNILELSGTDMEIIVVNARHMKNVPGRKTDVNDAEWIAELLQYGLLRPSFIPDREQRELRELSRYRKSLVGERAREINRLQKMLEGGNIKLTSVVSEVTGYSSRRLLDRLLRNDEPMTEEVISGLVHTSLAGKSKELETALDGLLSELQKELLIKVLDHIDDMSRRIADLDDFCRKQMKKYEDALDKLDEIPGIARRTAETILIETGLDMSRFPTAKHFARWAGLAPRNNESAGKRSNGRTTKGNPTLKSTLIQSAKEAARKKDSFFKARYQKIAARRGANRASVAVAHSMLIAIYHILKSGERFKDLGEDYYNQFNKEKKKKYYLKKLTKLGVNLKEATLSISIQAAT

SEQ ID NO: 61727 - protein, 342 aa, unidentified
MQISTIGLDIAKNVFQVHGIDAAEKVVVRKRLRRRQVLEFFKALPRCLIGMEACATAQYWARELTKLGHEVRLMPAKDVKAYVKRNKNDAADAEAICEAVRRPTMRFVRIKSAEQQGQLMQHRTRDVLIRQRTQIINALRAHLAELGLVAAQGNAGVNELRAIVTDEQDTRLPIDARASVIVLAAQLEALESVIGAIEKRIKMQHRSSEASQRVEAIPGIGVIGASAIVATVADPTIFRSGRDFAAWIGLVPRQDSTGGKQKLGPISKQGDRYLRRILVVGAIAVLRRAQENPGKYPWLTQLLARRPFKVVAVALANKMARMAWALLAHGGTYRAPELAETA

SEQ ID NO: 61728 - protein, 335 aa, unidentified
MWFIGLDVHWRTSTVCILDEHGRRVKSKTIRGSWEKLLKELAEVDKPFAICYEASCGYGCLYDRLRGIARRVVVAHPGQLRLIFRSKRKNDRVDAEKLAKLLFLDEVPPVYVPSVEMRSWRQLIEHRRRLIDKRGRSKNGIRSLLRSHGLRPTRRLWTGAGRAWLEAVAFPTPMATVQRDLLVGELSHFDGQVGQVTKVLDGIGKQHPGVALLETIPGVGPRTAEAVVAYMDDPDRFGQNHKVASYFGLVPSQDASAGVNRLGHITKQGPPTVRKLLVEASWQAIRRCPPVRAYFERIAGGKADRRKIAVVATAHYLLRCMYAMLQTGEVWRHAG

SEQ ID NO: 61729 - protein, 335 aa, unidentified
MHYLYYVGLDVSKETFDASLVAFEDANEMAHRKFANSRKGICSCLHWVEKRHGIRLDDVIFCAEDMGSYISEMAVCASDRTLNFNFSLISPLVIKYSMGIARGKTDRVDARRIAEYAITHYRKIALYLPAEKELCQLRTWLILRAHLAKQRVAKLVLLEKLDYKEKFADVSIQRSMLQEEIAYAETHMKTIEREMKELIDAASNICRNSKLLTSIKGVGPITAIVMLCSTLNFTKITDHRKFACYCGLAPFEHSSGTSVRGGCHTSSMANRDIKVQLNRSALIAIRCDPQLKAYYERKVAEGKHKFSVLNAVRAKIAARCFAVVRRGTPYVALQI

SEQ ID NO: 61730 - protein, 359 aa, unidentified
METQSNKIDFSNQNIYVGFDVHLKSWKVTILTEKVAVKTFSQDPNPELLFQYLNRNFPGGIYHSAYEAGFCGYWIHNKLLSLGVNSIVVNPADIPTTNKERVQKEDKRDSRKIARSLRNGDLKPIYVPGLKTLEDRGLLRARSTMGKDLTRFKNRIKSFLHFHGINFPESFSKPQSHWSKKFIIWLESLELTEESGKITLSSLIHQSKNLRAAILDLTKQIQKLSCTKTYQDEVILLRSLPGIGILTAMIILTELETILRFSNLDKLCCYIGLVPSTSSSGEKEKTGDITPRGHSVLRNAIIESSWIAIRHDPVLLKSYLDYCKRMDPNKAIVRIAKKLLSRIKFVLKNKQPYVFSWVN

SEQ ID NO: 61731 - protein, 410 aa, unidentified
MLFVGDDWAEDHHDVEVQDESGCRLGKARLPEGIAGISLLHGMIAQYLPEDADPESVVIGIETDRGPWVAALVMAGYQVFAINPRQVARFKERYGSSGAKSDAADAHALADMVRIERHQLRAIAGDSAESEAIRVVARAHQGLIWERTRHTLRLRSGLREFFPAALEAFADLAAPEALELLGKAPDPTTAAALTSTQIIAALKRARRRGDLAAKAEVLQTALRREHLTQPTILTQAYGATVRAQVAILATLAEQIKHLEEGVEAHFGRHPDAEIYLSQPGMGMIIGARVLGEFGDDPTRYANAKSRKNYAGTSPITRQSGKSRIVLARFVHNDRLIDALQRQAFSALTVSPGARAYYDELRARQMGHHAALRQLANRLVGILHGCLKTATTYDEATAWPTHTNKDQQEAA

SEQ ID NO: 61732 - protein, 309 aa, unidentified
MLTAEADKCKTKVVVNTAAGVQALLAWCAKHGAQPAQLHAILEPTGLYHEQAATALPQVRVSLVNPAQARDFAKALALRSKNDALDSYVLARYGQTLSPALWHPAPLHARQLRALLTRREALSKDLLRELNRKAKSQFSPSAPLVDGSIDKAIAFLREQIKQIERAIDQHIDNHPDLKQDCELLNSIPAIGPQAGNAILAVMHNRHIDSAQSLAAYLGVVPVQRQSGSSLNSCARLSKAGPSQVRATLYMAALVGTRHNPHIRALYQRLLKAGKSKKAALGAAMRKLVHLCFGVLKNRIPYQPNYAMNG

SEQ ID NO: 61733 - protein, 374 aa, unidentified
MTYIGVDLHKANMAVVCCDAKGELICKERIACKCIGKIEEFFAQPHLHPCNVAIESVGFYHWLFDLLEGKVENLILSNPVETKKYSWNEPKTDFRDARKLALLLASGEFERNRSLSCYVPDKTLRTFRELTRYRHNLVCRHTSLVNSAHRIFLKNNLAGPRILNGKSLELFLSRFGDKFSLYHREFLMQISENLFYNERQIKEAEEKIQPFLHMDRFKQLYEILTSIPGIGDTVSATLISEIGDFSRFDHPDRLASYAGLCPRVFTSDKTVRYGKITKKGSVFIRKALINAAWVSIREDAKPRRIFNRVCKRAGRKKAVVAIARKLLVWIWYLVAENEKWEAVSTRPDSLTNNKSGVTLMRLLKCTQQRVNSQA

SEQ ID NO: 61734 - protein, 457 aa, unidentified
MCVQRDDVMEMINPNAAGIDVGSEEHWVAVPADRDEQPVRSFGCFTADLYALADWLEQCGIETVAMESTGVYWISLFQVLEARGFEVKLVNARHLKNVPGRKTDVLDCQWIQRLHSYGLLSGSFRPEDQVCVLRSYWRHRDSLVSYASAHIQHMQKALIQMNLQLHKVITDITGVTGMRIIRAILEGERDPIKLARMKDHRIKSGIKQIAKALEGDYRPEHLFALKQALELYDTYRDKIDVCDREIEECLARFNSKIDSDQATGAKLNRKNKNQPTFDLRSHLYRITGVDFTAIDGFDVLIAQTIISEVGLDPSTFPTDKHFSSWLCLCPDNRITGGRLKSSKTRKNANRAANAFRLAAQSLARSPSALGAFYRRMRARLGAPQANTATAHKLARIFYYMWKNGVPYHDRGADYYEQTYRDRILRNLKKKARALGYNINLQPIAKQEVTETIAAVVS

SEQ ID NO: 61735 - protein, 372 aa, unidentified
MTQSNILFVGMDVHKESIVISLADDDRSEVRRYGSIGGTLDDFKKMLRKLVATGKELFFCYEAGPCGYELYRSITSQGHQCIVVAPSLIPKKPGDKVKTDRRDADNLARLLRSGDLTAVYVPNAEDEAIRDLSRAREDAVLVLKSAKQRLKSFLLRHNIRFNGTANWSEKHLRWLAEDVNIPLPAQKIVFQEYVNSVTEGNERVKRLDKEILYHTKQWRLYPVVECLMALRGVRMVVAVTIMAELGDLTRFDSPKQLMSFLGLTPSEHSSGDKKKKGAITKSGNQHARRVLVEAGWAYRFPAKVSKEMQKRQEHLPLSIRDIAWKAQLRLTRRFRTMADNGKIRNVIVVAMAREIAAFMWAIAQETSITPRD

SEQ ID NO: 61736 - protein, 491 aa, unidentified
MRPAPDPENRHRTAKAAKNAKRTKNTSFHILLCECYRIKPVLKVLKVPIDKKAVSPSNGSELMSEMVYHRKETAMTVNSLMQKRSAIKPDTLIVGVDLAKFHHVARTLVPGGAIGRPLEFSNSREGFLALSAEIEARRPTPASAVIVGLESTGVYWINLARWLTEHGCQVVQVSGLYVHRAKELTDNSRGTSDGKDALLIADLVAQGKYLGFVRHAGVLADLRQLVGLRQRLVHERAARYNLLHQSVDLLFPEFVTVFRDVTGLSARRVLRCFPTPAAALAHPPDEMRRLLSEDGRVRVSVAKLALLQAAAQQSIGAREGTAGMEYALNDTLQQLDSFDARVRQVEAEIGRLLPQVDETPILTSLVGQMTAAIILGETGGLKQYRCAAAVLKLAGLNLYQISSGQYCGNRHISQMGRPLLRQALYFAVLQHTHPGTPLYPYYAELLRRGKPKPVALIALCCRLVRLLYALVRDGRCYSAQPPEKNRQTLAV

SEQ ID NO: 61737 - protein, 421 aa, unidentified
MRAFGLDVHRDFCEVAIAEGGVVRSVGRIATRVESLGLFAASLAASDVVALEATTGADKIVALLQAQGIRVVVANTRRLSSITEAKAKTDRLDARTLARLLVSGLLDEVWTPDERTRTMRRLTNRRERLVRARTRAKNEAHGVLGRNLCERPPVTDAFGKGGRRWLARLELPVDERLTLDGCLRQVDFLDAEIAALEGEIATQALAWPEVLRLMSVPGVNVLTAATFMAAIGDIDRFSSPRKLVSYLGLDPRVRQSGSAPARHGRISKAGASEPRHVLGEVAWKVTLTPGPLRAFFERVRARRGPQVAATATARKLTVLFWHLLSRREDYAFARPAMTRNKVRRLELLAGAPPQKGRKGIAGGKSKAVFDAERELSRQAEAAYQRLVSDWKTSGPAKADAGATPGRASRRPSKGIAARQTP

SEQ ID NO: 61738 - protein, 356 aa, unidentified
MSIYVGIDVHKRFCQAALMDEDGAILHELKFENTIEGAHRLVNLARSVNPHVKAVLEPSANYWLKIYDKLEDEGVEVKLSNPSRTKAIAEARVKMDKIDAKMLAYLLRGDLVAESYVPTKKNRERRSLIRHRASLMRMRTEIKNRTHAILDKHDLPYDYTDLFGKQGTEWLRNLQLPTPDHQILQSNLQILETLNAELQKADIQIAKDAATEDQAKLLMSMPGVDYYAAMILLSEIGDVKRFASPEKLASWVGLAPQVHQSGETQWTGHITKKGSKRARWILTQCAQSARQHDPRMREFYMRIEQKHGSSKAIVAVARKMLAIMHVMLTRNEPYRGENRQLTEQKHKRLERIADIA

SEQ ID NO: 61739 - protein, 370 aa, unidentified
MGNGSKVFVGLDVHKDSISVGVAQSGQQSARFVGKILHDVPKLLKQLEQVASPGSMAIVYEAGPTGYGLQRALTDRGYDCQIIAPSLIPRRTGERVKTDRRDCLRLAELARAGELKAIWVPQPADEAIRNLARAREDAVNLRTQARHQLKAFLLRAGVTYSGKTTWTKTHARWLATLSFAYASDQIAFTEYCQTVSGADARVQRLTAALSQAIAGWRFEPVVRALQALRGLDEVAAIGLVAEIGDIDRFAHPRQLMGYLGLVPTEASSGERVRKGAITKTGNAHARRLLTEAAWNYRFTPRVGYRAQRRQEGLSEAICAQAWKAQLRLTTRFARLRARNLQINKVCVAVARELAGFIWAIAHTATHPATP

SEQ ID NO: 61740 - protein, 507 aa, unidentified
MNSIYCNADPTLLKLFERAGNLRKVLCAPLDFAKETHAVMFCNGMGDVLKKAFYVPNSPAGVECLVQELTATCHHRGIALKHAFFGGEDTPSYAENFTAQLRQRGYLVARVNAFDAKRQRENLQASNDELDLHGIAHCLLKGRARVLAQAPQLHHQLRLLVRERDFLVHSLTALLNRLHPHVDRLFPGFLNPKLSGIVPHQPACWWLLSQRFSAPSLVRRDRTKLIEGLQKFNITHAEETVDQLQAYAAKVLPPQKELLPASQVALERLVEVAQSLQHQIELLEPEMATLLLQSPGARLTTIPGLGLALSAGLAAELCVLGAIPPLAKLCSYGGIIPATQQSGGPDQAPRQALTFPHCNYRLKSYLLQAGEHMAQVRDTDAWRLRQQAEAENQHTLRVLGKHAAGVIRCLLLGERAYLPARLYDPASSAEDRARYYQQYWPKLMVKWRGLAPLPKVFDPAQPLGRWRQMAQEVYALSLPLSGSSNQKTNKQAKDNHDVTDPALLEES

SEQ ID NO: 61741 - protein, 316 aa, unidentified
MSHAATPVSRFIGCDVGKTAIVVFDAASARMSSIANEPRALFDFAASLDPACFVVCEATGGYEGDLLAVLIAAGVPAHRADARKVKAFIRSFGTLGKTDAIDARALARYAKDRHAELPLWQARDRHRLRLQALVLTRRDLVRDRLAYANRAGAPGAENTRGYLEALIESFDAQIAAIEADIEALTAQCEPIARALNTLVAIKGVGDKTAAALIALMPELGSLDRRKAAALAGLAPHPKQSGDAEGYRRTRGGRPEVKRILFMAALSARKHNPNLKAFYERLVQAGKKPLVAITAIMRKLVVIANAKLKAANALQLS

SEQ ID NO: 61742 - protein, 435 aa, unidentified
MNKKEAEKPEEYAALIGLDWAAEKHDICIWDAATGKSRHQVIEHTPEALAEWLAELQACYPGRRLALCLEQSRGALMYALMGHAFLDLYPINPVTLARYREAFAPSRAKDDPGDARLLAEILRMHRDKLAVWKPDDEQTRTLGFLNEERRKAVNLRVKLGLRLQAALKLYFPQALQWAGTDSSAPMACDWLLKWPTLDALRRARPQTVRAFFYAHNCRSAAHIESVLAALPAAKPLTTDAAVLAVQPLTVQMLAKQIRLLHGSIAEYERQIAALFRPHPDAFLFESLPGAGEVIAPRLLTAFGTDRSRHPTAQDIQTYAGVAPVVERSGKSCWTHWRWNCPKFLRQTFHEYAKNSIPYSAWARAYYEQQKKRGKGHNAAIRSLAFKWIRIIHRCWLTRTPYDEGLYLQALERRGSPLCALIAAPAREARKNQKYD

SEQ ID NO: 61743 - protein, 431 aa, unidentified
MLKINPLSTLYVGIDVSSKSNYVCALDFYKNKYINSSFANNQPGAEELAKKILECLKEHPDLNTIVAALESTSVYSIHIANFLSSCEELMHFKPYVFVLNPKCTANYKKSYIGLGKSDPIDAFVIADYARAGNIETEPWRGSQFLALKRLTRHRLHLVECMTREKTYLVSNLYLKFSELQMLEGDDQPFCDIYGATSSSVLTEYLSPEEIIDSSEEDLISFLAQKSRNRIKDISKTAELLRKAARDSYRLDKALYEPLNVSIASSFNCIETFKKEIKLIDIAIEREIRGLNPNAFIILQSIDGIGPVFAGGIVAEIGDISAFHSSDALAKYAGLMWKSNQSGDFDGEDTPMSKAGNRYLRYYLGEAANSMRKHNVEYGAYYRKKYNEVPKHQHKRALALTSRKFVRLVYGLLARNQLYSGVSLDTSIKDSN

SEQ ID NO: 61744 - protein, 344 aa, unidentified
MVTFGVDAHKRTHTIVAVDDRGRPLGQITVGTTSHDHLGLLRWAARFGAERRWAVEDCRHLSRRLERDLLSAGEWIVRVPPKLMAHARDSARTYGKSDPIDALAVARAVQREPDLPVARLDGPDRELRLLVDHRESLVAERTRLICRLRWHLHELDPAWEPKARSLDAQRTLDEVQARLQDQAGVVARLARELANRCAELTAVINALEKEIAQLAEQLAPALLALPGCGPLTAAKIIGETAGVDRFKSRDAYARYTGTAPLPVWSSNKARHRLSRTGNRQLNAALHRIALTQARWHPPAKALIDRRKNGGNSGREAIRILKRRLSDAVFQALVHDQTDALMPAA

SEQ ID NO: 61745 - protein, 429 aa, unidentified
MNNTQNKKIEQVKETTMIVGIDVGSEKHYFRAFNWRGIELTRKPIAFSNSMEGFNSFYNTIVELMQKSELEEALVGIEPTGHYWFALGQFMGEKDIKFVMVNPHHVHKTKELDDNSPSKNDRKDPRVIAGLVRDGRYFYSYMPTGVYAELRNASNRRFVLVEEQTRAKNRLQKWIAVYFPEYKGIYTHIDAKGGMLVLKKAPTPEEIVRLGVEGIIKIWKDAKLRGNGHKKAMLILAAAMRSIGLKAGLTEARMEIQDLIEDYELQTKRLERVNDLIKGLCQQVRYADKLLEIKGIGITTVAGFIAEVGDITRFDSTKELQKLAGLELVADSSGKHNGKTKISKRGRKRLRYLLFEAAISVVGKNEEFKEIHRYYTTREKNPLKKMQSLIAVACKLIRVFHAILTKGIRYDASKMLKDIRHPGEQLKAA

SEQ ID NO: 61746 - protein, 342 aa, unidentified
MQITTVGLDLAKNIFQLHAIDGDGSVVLRKRLRRAQVLTFFADLPGCVVGLEACGSAHFWARELIALGHDVRIIPPSYVKPFVRRGKNDVADAEAICEAVQRPNMRFVPVKSEDQQSALMLHKARNLIQRQRTMLINALRAHMAELGIVAAQGPSRVADLVAIIEDDADETIPRLAKAALRPMVAQLRACETSARELEGEIRAWHRDNEASRRLATIPGLGEITASAIAATVPDASFFRSGREFAAWLGLTPRQKSSGGKDRLGRTTKQGNRHIRSLLVIGATSLLRYWRGKLGAEAAWVNRLLERRPPRLVTVALANKLARIVWAVLVRGETYRRPSAAAA

SEQ ID NO: 61747 - protein, 363 aa, unidentified
MSKSRCGTKYIGFDIDSKNTVACAVQQGRKDVFQSFPTDTRRMQKYLRQLGRDGSPLHLTFEISGEAGYRHDALRPYVESLTVSNPNKMTWIFRTSRKNDRIDARKQAVLLSIDEVPKVHIPVLEVRQWRATIQHRRLLVNRRTAVKNRIRALLKAHGLAQPPHRGSWWKRANQRWMEQLTQDWSEVSGETLWRVQLKNLLEELTLLGGQLKQVTSYLDQYLDRHPGGVLLMSIPGVGPRTAEAVLAYTDDIRRFLRSKQYCAYFGLTPKLDESGLRRRLGHISKEGPSVVRWLLVESAWRVVARVPAFQAFYERVQAGQPNRRKVAVVAVARKLLAIMRAMLQSGELFNESLVAAVPAKSRR

SEQ ID NO: 61748 - protein, 319 aa, unidentified
MNNIILGIDISKATFDVALLLDGKVKTKKFNNTPKGFPELRQWLASKSICAANVCMEATGGYEASLAEYLYDNGFKVSVVNPARIKGFAISRLSRVKTDKADCELIAYFCEAMKPDLWQPIPKHIQELQQWIRRLDSLIANKTQESNRIKGAASKVISHIQRHIDFLNTEIKDVEQLIANHIKEHKDLEDKNGLLASIPGIGDKTIAIVLAFLSTENFDSAKQVVAFVGLNPKPRQSGSSVRGVSRISKTGDADLRKAFYMPAVVSVKYNPIIKDFYHRLINDGKPKMVAIIASMRKLLHIIYGVLKTKTPFNVNIRTI

SEQ ID NO: 61749 - protein, 385 aa, unidentified
MKESKKQIRRFGTMTRDLLELSLWLQQLGGTHVAMESTGVYWKPAWNLLAGQFELLLVNAQHIKQVPGRKTDIRDCEWIADLLQHGLLRGSYVPEQEQRDLRDLTRYRVRLNEDKVRLANRIQKTLEDANIKLASVATDVLGASGRTMLQAIASGEDDPEKLAQMARKGLRKKLPQLRLALQGRIRDHHRFLLRQLLEELRFTEEKINELDQRIQQCMLPHHHAISLWTSMPGVRVTTAWSLVAEIGTNPEQFPLGSNLASWAGMCPGNNESAGRRKSGKARRGNRCLRRALNQAAWAAARTKNTYLAARFHRLAARRGSKRAIVVIGHKILVLAHYMLQHNTPFRELGAEYFQRLRTPSLSQSLVRRLQRLGFQPTLTPAQQVG

SEQ ID NO: 61750 - protein, 294 aa, unidentified
MSTSGRAAYVGIDVSKATLDVAILPTGEHFVVGNDEAGIDELLGKLAEVSDALVVLEASGGFERPVAAALAASGVALFVVNPRQARDFAKATGRLAKTARLDAFVLARFAQAIRPAPRAIPDAEAREFQEILARRRQIIRMMTAEKNRLGATSSKAVRGRIEAHIRWLEKELSRTDGDLDETIANSPTFKENEALLRSVPGVGPVLCRTLLAELPELGSLSPRELSALVGVAPLNRDSGTLRGRRTVWGGRARVREALYMGALIASRFNPAIKEFYERLLATGKPPRRWLWWRA

SEQ ID NO: 61751 - protein, 344 aa, unidentified
MTSIDYIGLDIHKKTISFCAKAQDGTILDQGTIVARRDTLLAWAKARPRPWIGAMEATLFTGWIYDLLKPLAQELKVAHPAMLKAITAAKKKNDKVDARTIADLLRCNLLPECYMAPCAIRDLRRVLRYRNLVVRQATRMKNRLAGLLMETGTPYNKERLHGRAYFSELLGSLREVPRSVVELLQLSRGQLEFFATIQRRLLKGLGQNPDLSERVARLQTIPGVGEIMALSWALEVGEVKRLPSIAQAASYCGLTSAQHNSAGKEQRGPISKQRNKHLQTILIEAAKLAPRHNPQLAVVHERELKRGDRNQATLAVARKLVAYLMAVDKSGKPFAMRASGEEAA

SEQ ID NO: 61752 - protein, 475 aa, unidentified
MNIKGSKKKNQVLSVNIFEQQEIIAKAEAIKAELKASTWHELETKGKFDKNDKLSFVSDDMLILGCDIGSETHYVRAIDTRGRELSKSAFGFSNTAEGFESMLDWSTKLAAANDKKQIVLGLEPTGHYWFCLTTWLVAKGISVVQVNPYAVKQTKEVEDNSQLKDDKKDPKLIANLVKDGNFGMPYLPEKLYADIRRLSMFRDQLNEDRIRNLNRLHREMKIYFPEYKDAFGKIDGAFSLELLKAAPFPDELAALGTEGMKQIWHEAKLRGRGYANASSILEYARKSVGIKDGADAGRQAVKWFVSRIIELDEQLSDIEDQLNQRCNEIPYAKNILAISGIGENILSGIIAEMGDISRFDNVKEIQKLSGLGLVACSSGKHIGETKISHRGRKRLRYWLFQAAKSAVAHSEEFKELHVYYTTRKQNPLKKMQSLIVIACKILRVIFTILTKGTTYDPKKLLGDIVRPDQSILQAA

SEQ ID NO: 61753 - protein, 327 aa, unidentified
MEAYDGPQIVGMDLHRRRSVLVRMTGDGRRLGTAKITNSPAELRREIARAGSCPKVLEATSGWYWAADVLQAAGAEVHLAHPLGVKAFSYRRVKNDEKDAADLADLLRMGWLAEAWIAPAEIRELRELTRYRIKVVRLRASCKDQVHAVLAKLGIQVTCSDVFGTWGNLWLDGLALPQPYAGKVASLRSLVAQLTGEIGLLDTVIASLLEHHDGYHALQSLPGIGPVLAAVITAEIGDIARFRHPARLCCWAGLTPRHRQSDVKVTRGHITKQGSPILRWALIEAIQRLPAGTPVRQARDRIIARRGSQARNNAKVAAARYLLTCVY

SEQ ID NO: 61754 - protein, 423 aa, unidentified
MKLEWFAGVDWGSQRHHVCVLDAEGKVLGERAFEHGGAGLSAMADWLLSLTAGQAGEVGVALETPRGPVVESLMERGFVVHAINPKQLDRFRDRFSPAGAKDDRRDARVLASALRTDPHCLRRLESTDPTIVELREWSRLSEDLTRERTRLANRMREQLWRYYPQFLAAVGDDIAVPWALDLWQRLPTPRAAQRVRETTLARLLEKHRIRRIDAPALRRQLRAEAVKVAPGAAEAAVAHVQLVVERLVLVHQQKVHARRQLDRLVRRLAESAPADDSNASEETERRGPKGRADATILLSLPGIGTGVLATLFAEANDVLQRRDYAALRCLCGVAPVTRRSGRSMVVTRRLAAHDRLREAAFHWARVAAQRDPVSHGKYRALRARGHGHARALRSVADRLLHVACAMLRDGTCFDPHRAKTVTP

SEQ ID NO: 61755 - protein, 355 aa, unidentified
MQKYKVSFKGQNIYVGIDVHLKTWHVTTLTESGCKYSFAQHADAKELFDRLNKKFPEAHFKSAYEAGFCGFSVHYALMGYGFENIVVHAADIPTTSKEKALKTDAVDSEKIAWALKRDELTGIYIKDKQYMDDTNLMRLRQRFIMDLSRQKNRTKHLLYTQGVTYPERFRNNRTHWSRNFMKWLREEVEFLSEQKLSLMLLCEQVENTRMAILKVTREIRRLSTTDRYKENYDLLTSVPGFGLTTSMSMLTELDNDIMRFPNERSFVAILGLIPTCHDSGDKKVSGEKINRGNKHLGPLIVEASWVAIQRDLELSAYYSKCCQSMKPHKAIIKVARKLACRAYAVLKTKTRYALP

SEQ ID NO: 61756 - protein, 385 aa, unidentified
MGTQTFIPRDYDVFAGLDVDKKSISVTFTDHQGFLKSLNMPYKVEHLVNYVRKHYPDKKVAFAYEAGPTGYGLYDGLEAQAYPCLIASPSMIPKAPGQRVKTNRLDSRGISENLRGGQLKGIHVPTPLYRELRHLTQLRDTLVSEMVRMKQRIKSLLLMEGLAFPPAPAGSQWSFLVKKKLRELPCSTTVRFKLDRLLDSLEFDEKQVLKSTREIRRFCQTDPELSQCIEYLRTLPGIGWIVASQLLARVGDWRQIKNIRQLPAFLGLVPTENSTGERTERGSITHTGDGRLRSKLIQASWSAIRQDGELREFFRIVAKKHPRHLGSRVAIVAVAHKLSVRASVVLMKQRPYEVRQKVQSAPLTQEETVPQGTTRRLAVPGETNS

SEQ ID NO: 61757 - protein, 355 aa, unidentified
MYGLKHQKEKRSMDHFAGLDVSVKKTSVCIVDDMGKIVREVKVASEPEALLAVLKNPAYQFKRIGLEAGPLSQWLYSALAEAGMPVICVETRHMRAVLKAQINKTDRNDARGMAQMMRVGLYRPVHVKTLRSQKLRMLLTHRQLLLSKAIALENDLRGTLRNFGLKVGMVGKVKFEARIRELVETLPDLAVLVEPMLIVRRVLREQIVILHRRLLAVVRDDEVCQRLMTTPGVGPVVSLTYRATVDIPARFRKSKSVGAVFGLTCAKYQSGEVDWDGRISRCGDEMMRTMLYEAAQAMMRSKKWSWLKAWAMQIARRRGIKKAIVALARRLAVILHRIWVDGTEFRWTREQAVAA

SEQ ID NO: 61758 - protein, 382 aa, unidentified
MESVSIIGLDLAKNIFQAHGNDARGAKQFSKKLRRDELLGFFAGQGPTVVAMEACASSHYWGREIRALGHQVKLIPAQHVKPFVKRGKNDAADAEAICEAAVRPSMSFVAIKSQEKQSHAMLIHIRDLLVRQRTQLINNVRGNCAETGVIAGVGNKGFEELKAQILATKAATDKAKADEQAKSEAELKSGLGKSGLGKRALNALAEAKALKAMIDTLANDLLAQLLEVIHVLNEHIDRLDKVIGSIARNDKSLKALRSIPGVGPITALAIKALGPDPTLFESGRDYSAWMGLVPSQNSSGGKERLGKITKKGNRTLRRLLVICAGAHITSVMRDRTKPDPWLKAMLVRHPRMKVITAMANKLARIIWAVQVKGGVYQAPKPV

SEQ ID NO: 61759 - protein, 345 aa, unidentified
MKQISVIGLDLAKNVFQVHGVNAAGETVLQKKLTRGQMVKFFAKLSPCLVGMESCGGAHYWHGELSRFGHDVHMMAPAFVKPYLKSNKNDRNDAEAICEAVQRPNMRFVTPKTPEQQSILHLHHGRQLLVDQRVALGNHMRGVLLEYGISLPQGFKALLQQLPEILEDAENNLPMQTRHLLATLKVQYDRLLDSEDQLKQALNAWHQQNETSQRLETIPGVGLQTATALAATIGEGKDFKNGRQLSAYLGLVPRQHSSGGRDKLLGISKRGDGYLRKLLIHGARAVIRHVRRRISLGQPGGNPWVEQLLVRCHPNEVAVALANKMARISWVLLSRNETYRSMPAG

SEQ ID NO: 61760 - protein, 339 aa, unidentified
MKLYVGDDLHANNNFLALVDGKGKRVNQEKLPNDLFVIRDFLEPYQKDIVGIVVESTFNWYWLVDGLMDSGYKLHLANPSAIQQYSGLKHSDDKHDAFWLAQMLRLGILPEGYIYPREERPIRDLLRKRRHLVRLRNSLLLSLQNIISRNCGVQFRANEVKRLKEDRVSPLLESNEDLALAGKTSKEMIDQLTRQIYRIETSIVQRVELKESYRYLLTIPGVGKILALTIMLETGPIGRFADVGHYASYCRKVSSRWTSNEKTKGKGNRKNGNKYLAWAFSEAAEFARRYDAQARDYYTRKMRKTNFMVAHSALAHKLARAAYYLMKEQVAFMPEKLFS

SEQ ID NO: 61761 - protein, 411 aa, unidentified
MRLFAGDDWAEDHHDVEVMDEAGKVLAKRRLPEGVAGIAQLHELIGRHVPGDAEDAEVVIGIETDRGPWVAALVAAGYVVFPVNPLQASRYRERHGVSGAKSDQGDSHMLADMVRTDSHQLRPAAGDSPEAGGIKVVARTHKTLIWERTRGVQRLRYQLREYFPAALEAFEDLDARDTLELLGKAPDPARAAKLTRAQVAAALKRARRRDIAGKTDAILAALRGEHLGQPAALTAAYAATARSLVAVITTLNEQVKILEGQVEDHFGRHPDAEIYQSQPGLGAILGARVLGEFGDDPHRYAGAKSRKNYGGTSPITRASGKKKVVAARFVHNDRLIDALMSWAFSSLNASPGARAFYDEQRAKGLEHNDALRRLANRLVGILHGCLKTRTLYDEATAWGHRENLPQSSVAA

SEQ ID NO: 61762 - protein, 401 aa, unidentified
MKKQTYVCGLDVHKDNVYAAIYNGKDRSDVQVFGTFTDQLNKLAAWLEHNEVKRVALESTGVYWVPVWNILEEKGFQMTLVNPWFIKQMPGRKSDVKDAQWIATLLYKDMLRKSYVPVKQIRVLRNYSRQYVKLQWNASRVLQELAKQLEICNIRLTSVFTKTDSLSIMRVIRKLIAGHTDVEELMTCISPVILKKKGHLVRQSLQGCISEDGRFILELFMQQYDLLNQQLCKIEEQMLEICNEHYKEELRLLQTIPGIKEQSAMQIISETGGDMQSFESSSKMVGWAGLRPTNDESAGKVKSTKITKGNRYLKRILIQTSWGASRTKGSAFKVKFEQLSKRISRKKALVAISRKQLTVIWNVLTKKEAYINDYDAVATAQQMEAQLIYHQRMVDRLKNLQ

SEQ ID NO: 61763 - protein, 315 aa, unidentified
MTKQLPAVNVGADVGKSQLDLYLLERDRALTVPNEEQAIASLLRSLRRYRIESIVIEATGRLEQPFVRAALAQGLPVIVVSPLKIRRFAEAIGQLAKTDAIDARLIAQFAATVKPVARPPSDANAQAIKDLVVRRRQLITLRTMEKNRRQVMPQDLKSSIDRIIKTLDRELKRLEQLIDHAVDQHAPSRHKRELLTSMPSIGNSVATTLIGDLPELGSLNRREIASLTGVAPFNRDSGKLRGKRRIRGGRAHSRTALYLSAMVAIRFNPDIKRFYERLLAAGKHKKVALTACIRKIVTVLNAMIRDNSPWQPAMT

SEQ ID NO: 61764 - protein, 325 aa, unidentified
MILEAKVATRPEALKEIFGRMPRSRIALETGTHSPWISRLLSELGHEAIVAHARDVRLIGESRRKDDEIDARTLARLARIDPELLSPIRHRSAEAQADLSVIRARYALVRARTALICAARGLTKSFGERIRGRNPKAFRPEMGQTLSPQLRVALTPLLHALETMTEQIREYDDQIEKLGEEKYPEVALLKQVKGIGTLIALTYILTLEDPRRFRKSRDAACYVGLQPGRRNSGQSEPQLHITREGDSYLRMVLVQGAQHILGPFGEDSDLRRWGLKLAERGGKNAKKRAIVAVARKLAVLLHHLWISCEAYEPLHNTRKRRLAAA

SEQ ID NO: 61765 - protein, 383 aa, unidentified
MRTVCGLYVHKDSVYLCILSSTGEIYEKKFGVLTTELIEMRDLMLSHHVLEVGMESTSVYWVPIWRVLEPHFKLKLINPYFIKQLPGHKSDVKDAQWIAECMLKELVNGSFVPPERIQQLRQYDRRIYDLDDEIIRKLAKLDAAVQRCNIRLSNYVSNTDSVSYKAVIDKICEGVTDPNVLVEEIHGRIINHHGKETIIASLTGSITECDIDIMRQLKAEIDLAEQHKQECMDKMLAICENEYSTQLHNLQTIPGVKMRAATSLIAEIGTDMSHFETANHLASWSGLKPRNDQSNKTIKSRRITYGNRYLRRTIIQCSWGASRTKNCFFSRFSYHQTQVRKKNRMKVQVAIARKMLICAWHILKDGVSYKDFNNIIEASVTNG

SEQ ID NO: 61766 - protein, 463 aa, unidentified
MKHNPKREREAKKEHVSISLLERIQPDAAGIDCGQHSHFVAVPPERDPQPVREFRTFTAELHRLADWLAQCGVKTVAMESTGVYWIPLYEILEQRGFEVVLVNARDVHNVPGRKSDVKDCEWLRELHSVGLLRASFRPDAAIVPLRAYLRQRETLVQESSTRILRMQKALTEMNVMLHVVVTDITGQTGLRIVRSILAGGRDPERLAQHRDPRCRASHADIVAALTGNYRAEHLFALKQNFAAYEFLLKQIAECDSEIEALLSRLADRQPPPAAPLPDARRKQVSKHAPAFDVRGPLHRLTGGADLSQIDSIGPHAALQLIAEIGTDMRRWPSEKHFTSWLTLAPSNKISGGRLLSSRTRPSANRAAAILRRCAMSLTRTSTALGAFYRRLAARIGKAKAITAAARKLAVLIYRVLSGNLVYDDPGATAYHQLHHARELKSLRKRARLLGFQLVDQTTGEVTV

SEQ ID NO: 61767 - protein, 344 aa, unidentified
MKHCKRLSIDLAKGVFQICGLNSNNKTLFNRKTTRAKLLIDVINSKPDTIIMESCYSATYWGRLFESHGFKVKLIPAQHVKPFVKGNKNDKHDALAIAEASMRPNIHFVPIKTVEQQDIQCLHRVRQRLISYRTGLTNQIRGLLSDYGIIFAKGHHAILSSLPLLIEDMECDLSFTIRELLNDLLEELKGRNAQINKAEDKIKNLSSKQKGFTNLMDMPGIGLINASALVSAIGDAKQFSSARGFAAFLGLVPKHEQSGTKLVNKGISKNGNRYLRTLLVHGARTIVSRYKNSDDPLKQFAMKIKEKRGKHKAYVAVAHKMSRIIWAMLTKDQAYNPDYILTRK

SEQ ID NO: 61768 - protein, 342 aa, unidentified
MRIIGCDLHAAQQTIAMLDRATGEIIERTLTHEGTTVRDFYAGLPPPVVVGIAATGSMRWFLRLMEDLGVTCVVGDPARVRQTETRRQKHDRRDAALLLQLLTEDRFPAIWMPPAELGELRELVRHRDQWVRMRTRVKNALQGLALAHGLRRGAGLWTRRGQATLAALPLAPYASDRRSALQALHEHLTTQFDELELRVGEQARERPQARRLMTHPGVGPVTALATDVYLGDPSRFADAKALASYVGLIPREYSSGDRQRLGKLTKQGNPLLRCLWCEAAIHAVRRDAALGRFYRRKLQQKGLGKARVAVARKLGIRLWILLRDQIDYAEFCRRAPSPAAAR

SEQ ID NO: 61769 - protein, 450 aa, unidentified
MSNGNGVSRGDRNRNARLDRLRALVPVTNAIVGIDLADKKQMVVVCDHDSKVLARRTYRCRAWDLGTALDWAHERAAAKGFAGMTVSCEPTGHRWRVLAQLAADRSMPFVCVQPAVSSWSRRAEDLTHDKTDEKDAVLIARLTAQLRCYEPEPVDETWGRLRHLGARREQLITESSGQVQQMRGLLECVWPAALECAQQPFRSRTWIAALTVIVDRDGGQFDRTRRLGLARFEQAVLREISKRGGQKPCRRIARSVFAALADPAGVIAHRAGALERVQLLLEDWRTAHHRLADTEQRMTGVLDELGLTGLVTSITGISAVGAAAILAQTGDPHRFATARALVKHAGLAPREKLSGTFTGRTKLTGQGRPGLRLAAWRAVWGAQRANPVYGARYRHLTTREHNRLKPTQAQTVIAAAILRHLHAVISTGQAWDPSIATHGTRSAIRTTAAA

SEQ ID NO: 61770 - protein, 404 aa, unidentified
MQVVHTRCAGLDVHKKSVYACVICRQGDGKNREIRSFGTMTADLLRLADWLREHQVSHVAMEATGVYWRPIWAVLQGHFELLLVNPHHIKVIPGRKTDTKDCEWIADLLQHGLVRGSFVPPTDIQDLRDLTRYRTELKQAQATVANRIQKLLEQANIKLSSVASNTLGVSGRSMIEAIIAGEDNPEHLAALAKRRLKGKIPELRLALQGYVRDHHRFLLGEFLDEWNALAERISRIEQEIDRRITPYEHAVTLWKSIPGMDRVTACNLVAELGVNMAQFPSAQHLTAWAGLCPGNNESAGKRMSGTTRPGNKWLRRTLCQSAWAVTRKKDCYLSSQFRRLAARRGVKRAVMAVAHSMLIIAYTMLKTGHTYHDLGGNYLEQTNKEHLQNYFGFQLSTLSTNPGF

SEQ ID NO: 61771 - protein, 384 aa, unidentified
MNKNSIVFIGLDTHKEFFEVAHELEGRDEHVIHDGRISSAKASVIKMVRDFQSKYPQATLHFVYEAGPCGYWIYRLLTSLGHCCYVVAPSLLPKKPGERVKTDRKDAMKLAHLLKINDVPIIYVPEAEDEAVRDLSRARQTATNDLNHARLQLKGFLLRNNIRYDGTANWSAKHIRWLNELILPHPAQHIVLQEMLHTIDERMRRLARLVNELEHQVKQWRYYPVVKAIQAMRGIRFLVAASLIAELGDLRRFDTPRKLMKYLGLTPKEESSGDHRRLGKITKCGNGRARRLLIEGAHAYKHPPKVSTEIQKRQEMLSKEVIDIAWQAQLRLCRRYQRLIHRGKHRNLVVTAIAREMIAYIWAISREIAIAPIDVAKRKSRVPA

SEQ ID NO: 61772 - protein, 458 aa, unidentified
MAKRPKKKTKNVKTLHVIKLNAAGIDIGATEIYIAVPGDRDNKPVRHFDTFTADLHAAAKWLKSCDIDSIAMESTGVYWIPVFQILESYGFDVVLVNARHVKNVPGRKTDVQDCQWLQYLHSVGLLRGSYRPPQEVCAVRSLLRHRDGLIKTASSHILHMQKALTQMNLQIHNVISDITGVTGLAIIDAVLSGERNPQKLASLKDGRIKATKDTIAKSLNGDYLPEHVFTLKQSLQVYRHYQKMITECDQEIENHLNNFDSRIDVDKKPPPRATSTSRRGKRNEPNFDLRAHMYRIIGTDLTQIEGISAVTAHVFFSEVGCEVSKFPKAGNFVSWLNLCPNNKITGGKVLSSRTLPGKNRLAKALQMSAMSLWRSQSYLGNYYRRKRAKNGAPSAITDTAHKLARIIYHLVKTGKQFDESVFYVQEEAHQKRTLGNLTKRVKRMGFQLVECETGSLVT

SEQ ID NO: 61773 - protein, 416 aa, unidentified
MKKVQNTRGYERYMALDIHREYILVGAWNQEKDWVLTPRRVSTEKFPEWAKKNIRAGDIVVLETTTNVWATYDIVVPLASRVLVANAAEVEEIAKARVKTDKEDIKKLLKLLIGGIVPEVWVPPMEVRELRAFISYRGRLVKTSAMIRNRLQSLLHKHNLKLSETGLLDQTWWEAQKDISPLEKMQIRQELALLQEVEKLKAAVDEELQRQSTGAVWGKPALQLMQLPGVGFVVAMTVLSAIGDISRFESARKLVGYAGIGAGVHDSGKTHKDKKITKKGRRELRWAMVEAAWRAVGMSPFWKAEYEKYLSRLRKKNQAIVVIARKLLVAIWHVLSKEETDIHASEEDLAYKMLLLSWSLKEDTRMGLTYKQFAKYALMQLGVETDITRFVRRDVPRRLAPRAEVLARMTELGLTA

SEQ ID NO: 61774 - protein, 415 aa, unidentified
MALKIVYQICCGIDVHKTFVVACIASTNKQGVTTYKRHRFSTFTQGLKELLQWLLDNHCKDVCMESTGKYWIPVYNVLENDCTIVLAHPKYVKAIRGKKTDKKDAKWIADLFKHDLVAGSFMPPADIRQLRDLMRYRYKLTCFMSSEKNRFQNCLTVSNIQLASVVSDTFGKSSQRILDKILENPHDTSFDIESLIHGSMKKKLPELELAIDGFITPEQAGKLKIIKKHFEDLESRKAELEELILALASPYQQELDLILTAPSFKNTFTAIGIISEIGVNMEAFPSAKHLCSWAGLTPTNNESAGKKKSVRVSKAGCYIKPLLVQCANSVVKSEKHPEIRNRYLRLRKRRGHKKAIIAIARMLLTALYNMLKNKEPYNSELYRKSDILPVNREITVEQAILMAQFQGYKIKSATE

SEQ ID NO: 61775 - protein, 415 aa, unidentified
MISVGVDVSKGKSTVCILKPYGEVVSSPFEIHHVEKDMEDLDNLLSKLDGEVRIVMEATGIYHLPVVTFLHDKGYFVSVVNPFAMKKYAKDNSIRGAKTDRLDSIMIANYGIEKWFKLQRYEGTEETYAELKLLGRRYRYYMELHVKALQELTHVLDYVLPGIKKMFNSWNEANGKDKLSDFVERFWHFDLITSMSLEKFTEEYIAWAREKKYHRSRSKAEAVYELASSGIPTLSSSTPSTKMLVQEAVSVLRAVDSSLSLILTRMQELAKSLPEYSVVREMGGVGNVLAVKLIAEIGDVRKLHNAKALIAWAGIDPPPYESGQFIGSKRRITKRGSSTLRKVGYEVMRVLKSHSAPKDDAVYNYILKKENIMKMNFGHIRWWKKQKRSYKSRMLGIIIFLEKTVLSMKHIVFED

SEQ ID NO: 61776 - protein, 363 aa, unidentified
MKKNSITRQSPRQASKASRGPITIGMDLGDKTSRYCVWNEQGVAGEGSVATTRKGMTEKFGGGSRMRIAMEVGTHSPWVSRLLTALGHEVIVANARQVRLIAESTRKDDKLDARMLARLAQIDPELLRPIRHRSEKAQQDLLAIRVRATLVDARTSLVNAARGFAKASGERLPACDADSLDVETIAALPAGLQQRLRPLLEQIESLTVKIKEADQQLEQIARIEYPETMLLRQINGVGVLIALTFVLTVEDSARFEKSRDVGCYVGLRPKRSESGQSRPELRITKEGDRYLRTMLVQGAHVILGRRGPDTDLKRWGLKLAARGGKNQKKRAVVAVARKLAILLHRLWVTAEVYQPLRRQPVAA

SEQ ID NO: 61777 - protein, 339 aa, unidentified
MAQVTTLGVDIAKNGVCIHGVDAHGHVIVKKRLARQKVLPFVAQLPPCLVGMEASGGAHYWAREFTKRGHTVKLLSPQFVKPYVQSQKNDPNDAAGICEAVARPRMRGVPVKSVAQQDIQALHRIRERQIKARTALINQIRGLLMEYGIVIPQRASQVRHKLPFVLEDAENGLTITAREWLQALAEELQALDQRLAATDHRIEQVFEADEACQRLAQLGGIGPLTATALVAAVGDATGFKNGRQFAAWLGLVPRQHSTGGKTTLLGITKGGNRYLRMLLIHGARAVLRVVDRKTDAWSRWLQGVQGRRGTNCASVAQANKTARVAWALLAKGDRYRRAA

SEQ ID NO: 61778 - protein, 341 aa, unidentified
MDKELYFGVDVSKKTLDLAYYDGETIDWKNAHIQVSNDDAGFKKIGSWVAKVGKDFDTFLFCMEYTGLYNQNFRLWLESKEYIYGMVEPRKMHRFEPDLDDDQRSLDRIKTDELDAFRIAIYCEQNHKKILRNPSKLPSPVYFKLKRLLAERKQNTKQSTLYKQQLHDICAYDTDLSVERKKLLLKDMKENQKAIDKEIDSYMNEDASISKNYDLLTSIPGIGRIIALETIVLTENFTAISNPRKYACYIGIAPFKKESGTSVRKRTSVSKKGFSEAKADLSIAVLSAIKNNPSIRDYWIRKRKEKCGGIVLNAVKFKLVLRMFAVIKRGTPYVETDAYKN

SEQ ID NO: 61779 - protein, 484 aa, unidentified
MVHETVFTRKMLPENVKQKPSTMKLFLGGDVSKGYTDWVILSEKKQRVLENFQLDDTYAGHCKLYSALEAYFDKHAGLEMYAALESTGGYENNWYNTLKSYQKVFNLKVARINPLGVNYNRRAGMKRNVTDAISAISIAEYMINHPENIAYDQDEKWKTLCRHWNFVEMQKAQKTQTINQLETILYCSNPALLRFKKDNLPNWLLELIIKCPTADKLAKARPENLAKIPYLTLKRSKELVAEAKQNIASATDRNAELLVSQIALQIKAFDQNIKSQMRLIEQEMSCHEIEVLKSFKGIDTTSAIGLMLEIKAVERFPAVKGISCYFGLHPKFKQSGDKVIGIRMSKQGSKNMRKILFNIAKGAITYNPLIKEIYEKKVSQGMSKMAAIGVCMHKILRIIYGMLKKKQAYDPLIDKQNCERSKDKQQEKQQQENANIDKSRRYQKFDVKAPISRKQTKKRKEHDLSQCEITSQSAGSTCSSGTKL

SEQ ID NO: 61780 - protein, 339 aa, unidentified
MQVTTIGLDLAKNVFQVHGITENEKVAFNRPLRRAQLLPFFSKIEPCLIGMEACSSAHHWARELTKLAHDVRLIPPIYVKPYVKRGKSDAIDAEAICEAVTRPTMRFVAIKTVEQQSLLSLHRARDLLVRQRTQLINGLRGMVAEFGIYIARGLARVIEFAGGILAGEVLDLPEIANEVIHNLSEHLMALHRRVRWYEDRLKLVAKDDARVRLLRTIPGVGAVTASAIIASIGDGHQFSNGREFAAWLGLTPANKSSGGKEKLGRITKMGDQYLRSLLVVGMTSLVRQTKSHPERASKWLTSLLERKPARVATVAMANKTARIVWAVLTRNEPYTPHTV

SEQ ID NO: 61781 - protein, 317 aa, unidentified
MSEELFVGIDVSKATLDIAILPTKESWSVPNTENGIGELVDRLRQLPAPTLVLMEATGGLERQALATIAAAGLPAMAINPRNVRDFAKSVGLLAKTDAIDAHVLALFADRIRPQWRPLPDEDTQALEALLLRRRQVVDMITAEKNRLGATPSIRVKKDISEHINWLERQLRITDRDLDKTIKNTPVWKETVDLLKSVPGVGRVMIATLLSQLPELGTLDRKQIAALVGVAPFNRDSGTLRGRRSIWGGRASVRGVLYMSTLAATRCNPAIRAFYERLRAAGKLPKVALVACMRKLLTILNAMLRGRTAWNQPLEVSP

SEQ ID NO: 61782 - protein, 360 aa, unidentified
MTIAEESAARRVVGGVDTHKDLHVAAVVDDQDRVLATHCFATTRQGYRQMLAWMRSFGAVQRVGIESTGSYGAGLLRFLQQASVEVLEVTTPDKHDRRRRGKNDDLDAQNAAHAAFAGKRTVTPKSRDGMIEALRVLNACRKTAVAARRIALQMIHNTVVCAPDSLRDVLRSMTRMQLVRTLAAWRPDLTRYRDVESAYRISLKSLARRYLELHDEIADLDVMIGAIVDELAPNLVARNSIGHAGAAQLLLTAGDNPERLRSEAGFAALCGVSPVPASSGKTVRHRLNRGGDRAANSALHIIAIGRLRTDARTKVYVAKRIAEGHSKLEAIRCLKRYIAREVFTLIVQRQSEINRTRIAA

SEQ ID NO: 61783 - protein, 323 aa, unidentified
MFYLGVDVAKKKLDCMLLDTSTGKMKSKSVANTPVGFAELVEWLKKNKAVDPHIVMEPTGMYHEAAALALADAGLVVSLINPAQLRAFAQGLGIKNKTDKEDSAVLARFGAAQNPEPWQPPSPSARRLKALLRRRDAVADDLQRERNRQEANDFSSVPEAVSDSIKESIAFLEAELKRLEKMIATHINDDPDLRNKKKLLETIPGVGPRVATHMTTLFAGRTFERAEQLAAYLGLVPVMWESGSSVRGRPHMSKAGPAYLRKVLYLPAVGARRWNPHIKALNDRLLAKGKSKMAAIGAAMRKLAHLCFGVVHSGKPYDPKFAM

SEQ ID NO: 61784 - protein, 416 aa, unidentified
MGRHFLSFLNQHFNKEVQQCLCFFVGIDVSKDYSSAQGLGREGKKLFYLEFAMDGGGFSQFLKMLKTHSEDLSRVTVGMESTGCYHINLFAFLCSEGIVCVVINPLLISNFARLSLRKTKTDKKDALTIAQFLLAHRSKLSQVSYSQNSQDLKDFARERESLAVMIAGLKNDVRRLLKMSFPELEHRRKLFTETMLRFLIKFPSARTIRTAKPKEISKALIHAEGKRKRVGISAEEIIKLAKVSVASNSVAKELILSEKIETLLYLEEKKQRITEVLVEACRSMRVDELDIITSVDGISTITGSTFLAELGDIETFRSYKHVIAFAGLDPSIHQSGQYEGISRLSKRGNRHLRRVIFLMTLCAVRSHNIFREYFLKRKEEGLPPKKAILATAHKLLRVLFAMLTSKSYFRKEVVEV

SEQ ID NO: 61785 - protein, 342 aa, unidentified
MTIVTVGIDLAKNVFAVHGVDAAGKPALVRPSVARSNLLELIATLPPCLIGMEACSGAHHWAREFEKLGHTVRLMAPKFVAPYRLSGKRGKNDAADAAAICEAVTRPQMRFVPHKSIEQQGQLMVHRTRQGFVEQRTATLNRIRGLLSELGLVLPLKAATVRREALARLEELPGWANTVIGDLLSEVTRLDERITEYDRHIALMARHSTQAQQLMQLGGIGQTTAMALISTVGNGHDFACGRSFSAWLGLVPGQYSSGGKQRLGRITKAGDAYLRSLLVMGARAVLAAAMNTRTPKQDPISRWARSLAERRGYWRAVVAIAAKNARMCWAVLQRGDAFKMPA

SEQ ID NO: 61786 - protein, 354 aa, unidentified
MSKVLNAAIAVVGIDIGKNAFHVVGHDERGAIVLHQKWSRGQVAERFANLPPCLVGMEACVGAHHLSRKLKALGHDARLMPAKYVRPYSKGQKNDFRDAEAIAEAVQRPTMKFVAAKTADQLDLQALHRVRERLVSQRTGIINQIRAFLLERGVAVRQGLRFLRAELPHILATPPDVLSPRMVRVIEDLAGDWRRLDERVESLSHEIEAVARQDAGCERLMSVPGIGPIISSAMVAAIGTGDGFSKGRDFAAWLGLVPKQMSTGDRTILGKISKRGNRYLRVLFVQAAWVVLIKPKSWERHGLKPWIEAAKKRLHRNVLAIALANKLARIAWSVLARDRAFEVSKLDETAAQPA

SEQ ID NO: 61787 - protein, 427 aa, unidentified
MAYRIAGIDVHKKVLAVVVADVECAGEYEFERRRFGSNPEQLQLLSEWLIEQRVEEVVMESTAQYWQPVWGALERYWRPTCQKQEGAGAMSGKLHLAQAQSNRGRRGRKKDFPDAERLVKRLVAEELVLSFVPDPEQRLWRAVTRRKLQMTRLHVRMQNQLESLLEEAHIKLSGFVTDLLGVSARRMLQALADGETNPAALAALADKRLRATPAQLCDALGACTELNPVYRRLIKMALEELQFLEQQMGQLDQEIANLLRPHEDAVKRLAEVPGLGVDSAQQIIAEVGPMATSFASHKQLCSWVGVCPGDNESAGVNHSHRSPKGNRQLRRVLNQAANAAARTKGSIFEIVYHRQVPRMGHNQAIGVIAHRLCQLIWILLHRNVRYEERGPAVTETSKRKRTARMIRELRALGYRVEALNLQTAASM

SEQ ID NO: 61788 - protein, 315 aa, unidentified
MSAQAVVGVDVAKRTFDACITDASKPTTYANSKRGITSFIKSLQLLVAPFVVMEATGSYQRTLTRMLAAAGVTYSVVNPRTIRHFAKAGNILAKTDRIDARVITLYGERMGPRVTIPPTEAAIRLKALVGRRRTLVDFAADEKKRAKTIEPFLRDDIQEMIASLQQKIAALDRQIKQLVQGCESWAAQAQLLDTVPGVGKVLISTLLAALPELGLLPHKQIAALVGVAPYNDDSGQHVGDRRCWGGRAHVRAALYMATISAIRCNPVIKAYYHQLKDRGKKSKVAIVACMHKLLRILNAMLRDNEPWQTESTQTA

SEQ ID NO: 61789 - protein, 382 aa, unidentified
MRFYTQQHPFYCGIDLHARTMYLCILDQAGETLLHRNMPATPEALLKAIAPYREQIVLAAECLFTWYWLADLCADHGIPFVLGHALYMKPIHGGKAKNDKIDAHKIAVLLRGGMLPQAYVSPAEMRATRDLLRRRMHLARKRGELLAHVQNTNSQYNLPAIGKKIAYKANRDGVAERFADPAVQKSIEVDLALSTYYDELLRDVERTIVTTAKHHDAQTLYLLQTVPGIGKILRLVLLYEIHDLARFPRVQDFASSCRLGKCARESAGKRSGTSGSKIGNAHLKWAFSEAAVLCLRDNPAAQKLLARFEKKHGKGKALTILAHQLARAVYDMWQRQTAFALDTCLHGEGRGVGALNAELDSHGMHLLRHARYGVHHCVAARS

SEQ ID NO: 61790 - protein, 311 aa, unidentified
MSLHLDYIGIDIAKAHLDVFDPKAGHLRLANTAAAIAGWTATLAGRSVFVVLEATGHYDSALRHGLHAADLAHARINPMQARRFAEATGRLAKTDRIDAAMLAELGRCLKPTTRPVRSQARDTLAGLHKRRDQLVQQRAAETVRLGETAGLPEAVRANLIAHLDWLKAAIKALQDEIDALIQNETELAGQARLMTSTPGIGPVTATTLLALMPELGQRSSGTIAALAGLAPFNCDSGLHKGVRRIRGGRPRVRRALYMAALAAARANTRYRAVFNRLVNAGKPKKLALITVARKLLVTLNAMLRDQKPYAP

SEQ ID NO: 61791 - protein, 337 aa, unidentified
MRLHYLGIDLAKNVFQLHGEDAEGNVVYRKRLGRARLLDEVGQLPPCQIGIEACTGAFYWQREFEALGHSVPIIAPQYVKPFARHQKNDQNDAAAICTALRQPNMRFVPPKSLGQQDIQALHRGRQRLVNHRTALVSQMRGLLLDRGLAFGLSITRARCEIPRLLTMERDRLGDLFASLLEQLFEMLCELDRRVAWFDREINRVFRSNEACQRIAKIRGVGPKTATAIVAAIGDGADFKNGRHLAAWLGLVPKQHSSGNRQMLLGISKRGDRHLRTLLVHGARAVLRTAPKHHDVVSQWAIGLQERPGAAKAIVAIANKNARIIFAMPRQNTEFRAA

SEQ ID NO: 61792 - protein, 347 aa, unidentified
MQPMYYIGLDVHKRTISYCLKDVSGTIHAEGTIPATRFHLNQWMKMLPQPWTAAMEATVFTSWIYDHLRPHAAGLKVAHPLMLRAIAAAKKKNDRIDASKICDCLRCDFLPECYMASTAIRERRRTLRYRHLLVRQMVQMKNKIAVLLMEAGVSYNKQRLHKAGYFRELLATNPDIDEGLCSLLRVCRETVVRLQRTESALVRSLERDSLLKDRVERLMPIPAVGPITALTWALEVGDVERFSSIKKVISYCGLCGAEKSSANTVQRSGRLKTIWAEDAIAAGRGRSLCNRPRAGRSAPRSVRSRQATIPIRWKARRSLGPSRCGSTYLRVPVSERRRQQKISSVKQ

SEQ ID NO: 61793 - protein, 355 aa, unidentified
MTVTIVETRAQARAQARAITGGVDTHADVHVAAALDPVGGLLGVQEFPAATAGYAQLLGWLGGFGTVCLVGIEGTGSYGAGLARHLAAAGIRVVEVDRSDRQDRRRAGKSDPLDAVSAARAALSGRAAGAPKGRDGQVEAIRVLMVAKRTARSERIQTINQARSLIMTGPEDLRARFAGHSADDLVAELATLRPRPGSMVRYHTLLSLRELGRRAEFLDGQLQRLDDLIIPLVTARAPSLLALYGVGHDTAAKLLIAAGDHPGRLRSEAAWAHLCATAPIPASSGKVTRHRLNPGGDRQANHALYRIVITRMSSHPPTRAYVDRRSKEGLSKKEIIRCLKRYVAREVYPHLRAPG

SEQ ID NO: 61794 - protein, 379 aa, unidentified
MEISSSTLPAVAAERATMFVALELSKSSWLVALHSPVADKVSMHRFVGGDVAGLLALIARKQTQAEARLGRTIRVLSCYEAGYDGFWLHRLLCARGIDNRILDAASILVDRRSRRAKTDRLDAAGLLRTLMALDRGESRVCRVVRVPSVAQEDARRRSRERTRLVVERGQHSNRIKGILMTLGVRDFEPTRRDWQERLGGLRTADGRELPACLKAEITRECRRLHQVIVMIAEVEAEQAAALDAEESQAARLIRLRGIGLVSATVLADEVFFRDFRNRREVAGYLGLASSPWASGRVQRDQGITKSGNPRARRTAIELAWLWLRHQPGSLLTQWFRQRVGTTRGRMRRIMLVALARKLIVALWRYLSDGLVPDGAELKA

SEQ ID NO: 61795 - protein, 369 aa, unidentified
MAEAREAFIGIDAAKLRNAVAVADAGRDGEVRFLGEVDASPEGMRRLAARLAAKYDRLHFCYEAGPTGYGLHRLLTELGHTCTVVAPSLIPRKPGDRVKTTRRDALTLARLLRAGEPTAVWVPDEGHEAIRDLVRARAAAVEMLRVHKQQVAAFLLKHGRHFPRKTPWGARYMRWLQEQKFAHPAHQIVLQEAVEAVRLARERVLRLEKLIEELLPAWSLAPVVTALQTLRGVNLIVAVTFVAEIGDLRRFESPRHLMAYLGLVPSERSTGDTVRRGGITKAGNGRVRHLLVESAWTYRHPPRVGAKKLAQLERVPPKVREIAWKAQSRLTARYRALAARGKRLTIVCTAIARELAGFMWSVARESQPA

SEQ ID NO: 61796 - protein, 420 aa, unidentified
MNKRLLSRPLGRCIGLDVHLDFIQIAICEEAKVYSAGRVPATPEGLGTLVDSLDRTDRVALEVTGSSREIVRLLEPHVRKIIVVSPGDTGISQARAKTDKLDARTLAKLLWTGELEAVWMPPEWIARMRRRLARREQLVRARSRVKNEIHAVLMRRLKGRAPASDLFGVKGREWLRSLELPEEEDETVKAGLRHIEFLDTEIEQVDRLIAKEALQSPQVKRLMTVPGVNVICAAVFLAAVGDIRRFKDSRKVVAYLGLDPRVYQSGSTPARGGRISKQGSPRARWALVEAARSVAQQPGPMHAFYERLRPRKGHNSAVVAVARKLAVLFYLMLTREEDYAHQQPSLTARKLRMLEVKAGAPTLKGKPTGVFTTREKMRDAERALAEQAEASYKRSVADWQAARPNKQREEAGASVTAGRA

SEQ ID NO: 61797 - protein, 342 aa, unidentified
MKFYCGIDLSARDCHVCVIDQQLKIVVQQKLRNELPKICQLLAPYKAHLKIVVESTFNWYWLIDGLQAEGFEVVLAHTLGLYLITGAKVKTDRRDAYALAKLLLVGAVPAAYIYPVETRPVRDLLRRRLHLVQVRAGEYGSLRRLLLRQGILSSKQQEIKTATEAELEQWFAHPLVRLHASQELQRIELYSQQIAELEKTILGLARTERTYELLLKLPGVGQTIALTILYEVGELTRFANVKVFSSYCRVIPGIAQSGNVTGRGRGSKQGNHYLKAAFSQAAVHAVRCYPKVRRYYERQLKRHQGRGRQMICYNIIAHKLAQAAFHVLKEQTEYREELLFGR

SEQ ID NO: 61798 - protein, 345 aa, unidentified
MNHIGIDLHKTSSQVCILTEDGELVERRIKTDRDSFDSLLGGQAPAKILVEASTESEWVARHLEALGHEVVVADPNFAPMYAARDKRIKADKRDARALCEACRLGAYRPAHRTSDAQRDISAHLAVRETLVRTRAKYISLVGALARQEGCRIGRGTSANFVARVAQAQLPAHVVTQIEPLLDMLGALNEQIQKADERLAEVVRNDETVRRLCSVPGVGPVIATTFAATLDGASRFQGAKHVRSSPGLVPREYSSGEKQHGGRISKAGNRRARALLVEAAWSLLRWKTERTRALHEWWARIAQRRGKAVAAVALARKLAGILYAIWRDGTEFDVRLLRGADAAAAP

SEQ ID NO: 61799 - protein, 348 aa, unidentified
MLHAGLDLSRKRLDYCLLDEDGERVEVGKTPPDGDGLAGFVRRVEERHGRVMVRAAIESMNGARFVHDALERLGWEVEVADAAKVKGLAPLACKTDRIDAWVLAELSRRELVPAVWLPSFEMRQERERARWRLLLVRKRSSLKHRVHAQLLAFGHPCPVTDLFGERGRQLLEQLEFPEPWRSDLLAAVGMIDDLDSEINAIDHDLKALGADHRYIPLLTTAPGIAWVLGYTIAAEIGDITRFASPKKLTSYTGLCPKVYQSGGTDRRGHLTHADPKHLRWALMEAALHACRHPAYHDRYERNKQRLGKQRGAKVAQVDIARQLSETIWHKLTRNQPFAPASARPPLAA

SEQ ID NO: 61800 - protein, 369 aa, unidentified
MTSIIYVGMDVHTTNYTLCCYSIEGNQIFAQVQVDPDYREILRYLNQVQSQRGGNCKFICGYEAGGLGYSLYHELTYHGIECIILAPSTMAVIPGKRIKTDARDAEHISKCLAYHTYSAVHIPSQEDDAVKEYIRMRDDAVTTLKRIKQQTIAFCVRHGKQYDGRSYWTKRHLDWLESLKFDHPILQETFQEYLIQYYQASEKVDIYNIRIEELAQRERYREHVQKLVCFRGIAVHTALSLLVEVGDFHRFKTAQHFASYLGLVPGEHSSGGKQIHTGITKAGNTHLRRLLVESSQVFSRGVIGKKSVKLKAKQEGKPAEIIAYADKANERLRRKYTKIASHSKYNIAKTAVARELACFIWGMMTDNIA

SEQ ID NO: 61801 - protein, 427 aa, unidentified
MNDSRYKPTLCVGADVHLDEIVLRAVDKALGHEVLQQFRVTNNLPGAQLAASTIAQTATDLGYARIEIGWESTGMLWIPFHRYLSTEPLLQPFELDLVCFNPKLVAKFKDGLVLRSPKNDDRDAFDIAARLRFGELPVSYVPSDFWQGLRRLTRYRYRLSKALSQEKNRFQSYAFLKCSDWNRVQAFSDFLGATSVALLTEFTVAEVQDMTHDQLVDLISRRGRGRFDDPTATARAVRQALRTSYPIDPQMDEMVTAALAASWDHIHYLNRSMKRLDHLIARYIDLVPNPLITIKGLGAVITAGILAEIIDVLRFPEEKHLAQFMGLTWQKSSSGGFVSQNTRLTKVGNVYLRYYFIMGANLLRQHNLEYKAYYWRKYQEVSKYQHKRALVLTARKLVRLVHALLTKNEPYVRPRMTDLGQEDVGLQ

SEQ ID NO: 61802 - protein, 400 aa, unidentified
MAVAVGVDVAKEFHWAALVHAETGKVLASRKVDNDPAAIQEFIDQVRTAETGHGPATVAIDVLGGIAALLQAMLLDAGLRLVHVPGLAVNRARRGTRGGEHKSDPRDAKVIADQIRLRGEELREVTPTGEADAELRLLVGRRRELVVDQTRRLGRLRDLLASIHPGLERRIDATNKADLALLARYVTPTQIRRAGRRRISEYLRHVGGLRATSIDTLVEAALTAAHGQHVAVPGETVAADLVRDLADEALTSRTKIAELDKRITQVLDRHPDAALIQTLPGMGATLTAEFLAVAGGITRFATGDQLASAAGLAPVLHQSGKVHYLRRATGGDKILKRIFYQSAFCALQRDTTSRAFYDRKRAEGKRHHQALIALARRRINVLHAILRTRQPYRIDHALAA

SEQ ID NO: 61803 - protein, 328 aa, unidentified
MGVFVSGFRHTTRGCGPFCVCHAVATRCPEVAQFDAQRFDNQAEGHSALIAALKPLEVALVVMEATGGYETELACALQAAGLPVAVVNPRQARDFAKSMGRLAKTDAADARMLAEFAAVLLRRDDLARFLCPLADPQQQWLAALVTRRRQLLAMLLAERQRLQITPKALHPSIEAIIAAIQAQLDDIEGQMVGHVREHFAELDRLLQSASGIGPVASATLIAELPELGRLNRREIAALVGVAPMANDSGASRGRRRIQGGRFDVRRVLYMAALTASRRNPVIKAFYERLIAAGKCPKVALVACMRKLLTVLNAMVRTNKPWDNALHDA

SEQ ID NO: 61804 - protein, 373 aa, unidentified
MHSMTQEREPLVIGGVDAHADTHHFAALDQRGALLATKSFPTTTPGYTQALDWLISFGEIDTVAVESTGSYAAALVRYLREHDVRVVEVNQSHAHTRRRVGKSDPIDAEMAARLLLAGKAKVTPKQTDGIVESIRTLRVARNSAVKARTAATIQIGDLIITAPQSLRDQLAERKTLRGKATVCARFRISTDELSGPTHAAKFALRAIAQRIATLDHEIEGLDLHLEQLVATAAPRTVQLLGISTGHAGQLLVTAGQNIDRLHGDGSFAALCGASPIPASSGKTTRHRLNPGGDRQANRALHLIAVCRLRYCDRTRSYAERRTREGKSQREIMRCLKRYIAREVHSTLRADLAELDLRRPNELPPTSAAVPASA

SEQ ID NO: 61805 - protein, 350 aa, unidentified
MPEIATIGLDIAKNVFQLHGVDRSGKIVLRKALRRSQVSSFFSTLPPCLIGMEACATAHHWARTLMAFGHEVRLIPPAYVKPYLRRQKNDAADAAAICEAVTRPSMRFVPVKSPQQQSTLMLHGARDLLIGQRTALINALRGHFAELGIVVAQGARNTRQLIALLHDDASPDLPATARVALQPLAAMLIGIEVQIAKLDKAILAAHRSNPVSVRLATIPGIGPIVASCLSASIPDAGLFQGSREFAAYLGLVPRQHSTGGKPRLGSISKMGNRHLRKLLVVGAHAALYSMKSGKTRTALADWARSLLAKKPFKVVAVALANKMARIAWAVMARSTAYEPGSQGAAAPAAS

SEQ ID NO: 61806 - protein, 412 aa, unidentified
MRRVIGIDTHRTFGEVVIWEDGRLRHVGRVDMTRTALEGFGRTLLATDEVVIEATGNCMAVSRVLALFVKRVVIANPLQVKAIAHAHVKTDKIDAGTLASLYAAGYLPEIWTPDAATERMRRLVARRYQVVRHRTRIKNEVHSILYAHLIPRCPHADLFGRLGRAWLTRQPVPDDERAAIQRHIRELDRLGDDLRVLDREIAESALDDAAIKWLLTITGVNLAVAAGLVAAVGDIGRFSSPQKLVSYFGLNPRVRQSGLGAAHRGRISKVGRSHARAMLVEAAWAAAKTPGPLHAFFVRIRAGRGHQIAAVAVARKLAVLCWHMLTKQEDYLWARSSLVAHKMRSMELQAGKPQKKGNRRGPTYAYNVKELRNQEMRVAEQAQKGYEHFVEAWRPRPPKEMARGRLSPARLE

SEQ ID NO: 61807 - protein, 342 aa, unidentified
MKFYCGIDLSARDCHVCVIDEQLKIVVQQKLRNELPKICQLLAPYKANLKIVVESTFNWYWLIDGLQAEGFEVMLAHTLGLYLITGAKVKTDRRDAYALAKLLLVGAVPAAYIYPVETRPVRDLLRRRLHLVQVRAGEYGSLRRLLLRQGILSSKQQEIKTATEAELEQWFEHPLVRLHASQELQRIELYSQQIAELEKTILELAKTEQAYELLQKLPGVGQTIALTILYEVGELTRFANAKVFSSYCRVVSGIAQSGNVTGRGRASKQGNHYLKAAFSQAAVHAVRCYPKVRRYYERQLKRHQGRGRQMICYNIIAHKLAQAAFHVLKEQTEYREELLFGR

SEQ ID NO: 61808 - protein, 411 aa, unidentified
MERVLERCCGLDVGQKTVAACVRIPAPDGGREQIIRTFGTMTADLLALRDWLLAHGVTQLAMESTGVYWKPIYYALEDELTVLLVNARHVKHVPGRKTDVSDCAWIAQLLEHGLLRASFVPPAPIRELRDLTRYRKSQIQERAREVNRLHKVLEDAGMKLAAVASDVLGVSGRAMLEALLHGTTDAEILAELSRGRLRKKLPQLRQALNSRFGAHHRFLVGRIIAHLDYLDESIAECSQQVELLLRPFAPVIERLKTIPGVKQRTAEVIIAECGLDMRRFPTPAHLASWAGMCPGNNESAGKRKSGKTRQGSKWLRIALIEAAQAAARTDTALSARHRRIMRHRGYQRAVVAVGHEILVIAYCLIARATTYQELGSTYFDRRYTERTIRRCVRTLEQLGHQVTLQPMAAVA

SEQ ID NO: 61809 - protein, 414 aa, unidentified
MKLFVGIDVSAKELEICFMNLDGNTLDSFKVNNDLNGAAFLRDRIVSVADKLQTSEIQIGLEATSVYSWHPAMYLHEDPLLKERRVKVFTINPKLVRKFKEAYADLQKTDRIDAWLIADRLRFGRLNMTAMMQEQYIALQRLTRMRFHLVHNLTREKQYFLQNLFYKCNAFLTEVESSVFGHAILEMLSEKYSLDEIAAMDVAELADYLQEKGKNRFPNPERVACCIQKAARASYRLAKVVEDSIDLVLGTSIQAIRSVQSQLKELDKAIERILDGIPEATCLRSIPGIGQVYAAGILAEIGDIDRFSDQAALAKYAGLAWRRHQSGSFEAEDTKCIRSGNRFLRYYLIEAANSVRLREPEFGNYYRKKYNEVPKHQHKRALVLTARKLVRLVDALLRNDQLYTPQRKVNRAKA

SEQ ID NO: 61810 - protein, 417 aa, unidentified
MSDLIYTIYVGVDWADTEHRVIVLNAAREPLHDWVVPHTGAGLTAFAARLTELTDGDASHVAVALEVPRGPIVDALLERGCHVFAINPKQSDRFRDRFSAAGAKDDRRDARVLADALVTDRGAFRQLAPEDPLIVHLRELSRVDDELQQEARRLTNRLRAQLHRFYVQPLALCPGADEPWLWALLQLAPTPAAAARVREARLATLLRAHHIRRVTAGALRELLQRPALPVAPGVAEAASSHVALLLPRLQLLQAQRHQCGQQIERLLQQLSEGTDSADPQRQHRDVTILRSLPGVGRTVAATMLAEASQLLAARDYHVLRTQTGVAPITKASGGRRVVRIRSACNRRLRQAVYHWARVSAQVDPLSRAHYTALRHRGHSHPRALRGVTDRLLSILIAMLRTGTLYDATRRRTQHLAA

SEQ ID NO: 61811 - protein, 385 aa, unidentified
MTATTRRFDPIALENMLCLSFELGEGSWTLSFTSGFGAPVHRRRVPARDRDAVLRQIEAMKERLGLAASCRVVSCYEAGRDGFWLHRFLEAHEIENLVVDSSSIEVSRRSRRAKTDRLDGESLLDLLLRHLAGSQKKVFSVVRVPTVEQEDRRHLHRELRSAKQDRTRVTNRMKGLLANQGLPLDLKRDVPTQLASLRQWDGRPLPEGLRARLCREWERVVLYTALIERLEAERREILQRGKDPVLEKVRQLNLLRGIGTNSAWLYGMELFGWREFRNRKQVGAIVGLTPTPHASGMQERERGMSKAGNRHVRAMAIEIAWGWLRFQPRSALSQWYQHRFGRGSKRLRKIGIVALARKLLIELWRYLETGVVPEGAELKTDVRVR

SEQ ID NO: 61812 - protein, 350 aa, unidentified
MMIIGCDYHPGFQQIAFVDTETGECGERRLQHREEAEKFYRDLAAQGMKVRVGMEASGHARWFERLLAELNFELWIGDAAVICTKRVRKQKTDRQDAQLILQLMMEDRFPQLWVANWENRDLRQLLWHRHRMVQARTRIMNQLQAVALNEGLRCKKRLWREAGREQLESFPLAPWASRRRRDLLEVLDRLTPTIAELSQAIEQEAEKCPAAQRLRTHPGVGSLTALAFVLIIGSAERFQCGKQIASYLGLVPSEDSSGDRRRLGHISKQGNALLRFLLVEAAQVTVRSLPEWRNKYFHLAMRRGRKIAKVAMARKLAIQLFWMMRKEWDYEQVRKFGPHAGQPENRRGVQ

SEQ ID NO: 61813 - protein, 422 aa, unidentified
MRIAMTKRLDNTFIQIVHPVCCGLDVHKKKISACLITIDEQGQEHYEIKEFGTFTNDLLTMKKWLTDNGCPIMAMESTGVYWRPVHNILEGYLEIILVNARHIKNVPGRKTDISDSKWLAGLLRHGLLRGSFIPPKEIRHWRELTRLRRTYTESLADYKRRIHKLFETANIKIDSVVSDLFGMTGRNLIFLLCEESELSLANIKENAKRGLKAKSMELHHSIQGFFEDHHRFQLIGMMEVITGLEKQISEITKRMDTLTAGHQDLLNRLDEIPGIDKKSAQSIVSEIGLTLDEFICMGALASWAGLCPGNNESAGKRKTGRTSVRSHPFKTILIEVAWAAVKKKGSYYRAKYFKLKSRRGAKKAIVAIAHRISKAIYNVIKQGDTFMDLGEDYLNAKTKQRVIDNIKKRANQLGYELVPCMN

SEQ ID NO: 61814 - protein, 325 aa, unidentified
MAKRITVCAGIDTGKRKLDVAIDGSCEQLQVENTADGHKMLWEWLQRHNVKRIGIEASGGYEQPVVAALRRKRFVVIVFQPAQVRAYAKFHLQRAKNDRIDAALIAACTAAVKKIHPAPDPRLSPFAEQLTMIDQIGEDIMKLKNRIETCRNERIRAVWKEDIARLAKRERTELKALVAAIRQYPDLAERLDLIHSVGGTGLATAVGILVRMPEIGQITREQAAALAGLAPYDDDSGDQVGARHIDGGRERLRRALYLAALPASFRWNPQLIALYQRLRAAGKEHKRALIACARKLLIFVNTVVARGTPWQGEPPAARTANPSTA

SEQ ID NO: 61815 - protein, 603 aa, unidentified
MLPHGSVPRQSTTTPVDYAPVLIGVGIDTARYGHYAAFLRGDLQPAAAELPFAESGAGYAQLRQHLQQITARHGQVHLLIRLDAAGQYADNLLHFLHSLAEAPGADGIARATFTISCGDPQRNKNYRAAIFGTQKSDPVEARAMARFAVTERPASVKPLPPALRTVRQVAARLQAVVRQRTRLINQLHHLLALAFPELALLVKDIALGWVLELCYRYPTAHRLAAASADDLGQIPYLPHARIDALLAHARSSVASLDDDTVAELIRDQVRQLRDVRARQKRLENLLEHAYGQLPEPNHLHTIPGIGPVTAAILTAFILDIDRFQTANQLVKYFGTLPIEASSGVDRDGKPRGPKRYVMSPRGNDLVRRYLWMAALSAVSCNPAARPLYRRLIAKHPKQRAIAIGHVMRKLLHLVFALWKSGKPFDPAHYCWDTPAHVSAAGAATDAGAVAPDGAEGDQAAGLTLTAEPAQKEVTAARTSSVPETAPVSERSFIDFAHLKRQLPLVRVLDHLGLSSRLRGASAQRRCACPIHRADGRGRTFSVNLDDNVFQCFDANCGKKGDVIDFWAALHQLSVRQAALDLVQTFHLEPAPTAPPRGTEKRQG

SEQ ID NO: 61816 - protein, 359 aa, unidentified
MIPTKVNTVIGMDTGLRQSWCEARSVESGLLLKEQRLFNRAEEFRAFAEGLERPIRLVMEATGNWSYLYECWEGLVEEIQLAHPLKTKAIASARIKTDRIDKRILAQLGLADLVPQAYIPPREVRDLREVLRHRAFLVSLQTKVKNRIHAYLAKLGIEHGLSDLFGGRGQIWLREAPFREPFRELVDQDLEVLHTLQEEIQNATKKIRSLAIDDPRVNLLLPMRGIGEYSALLILAEIGEINRFPGPKQLVSFAGLCPSTHQSGKVSYHGRLTKQGSKWLRWVLVEAAQRYGKAPGRLGNFYRRILRKKGANTAKVALARELLVAIYHCLRKGVCFEEHPSKRVETKEAPTTLRMIPGC

SEQ ID NO: 61817 - protein, 328 aa, unidentified
MKILHIMGADLSKDSIDLGLYPGKSYLRIDNSINGFHLMLNWLKDQGINASTVMIVMEHTGLYSYHMEAFLHKHQIRFTKVPALQIKRSLGMIRGKTDKIDAQRIARYGYEKKDSLVALGKPDQTLKRLQILHSTRRRLVRYRASLKCAVKENRVVLKESDIVIQTDLVLIKNFTKQIKTIESEIQKLVTTSKSIRHNCELLESVIGAGPVVAVTSIVKTGNFTEFANGRKFACYSGIAPFEHSSGTSIRKKTRVSHLADKEMKALLDRAASSAIQYDKELKAYYERRLQMGKSPRSTLNIVRNKIVHRMFAVIKRGTPFVENYLRAV

SEQ ID NO: 61818 - protein, 329 aa, unidentified
MKVPHIIGADLSKKTIDLASHQLKSHLKIDNNSSGFQDLIRWLKRLKINAAEVMIVMEHTGLYSYKLEQFLYHQSICFTKVSALAIKRSMGLVRGKTDKQDAQRIARYGFEKLDQLTQSKPIDKKLQRLQMLHSTRERLVRNRAGFTTAVKEYQQAFELSKTDPIIAPQLKLIKTLDLEITKLDQHIESLVTEHSTLNENYQLLQSIKGVGKVLATAALIKTENFTRFSNARKFACFCGTAPFENTSGTSIRRKTRISHLADKGMKTLLDLSAKSAIQHDKELREYYLRRIQIGKSKRSTINVVRNKIIYRMFAVIKRQTPYQPLQITS

SEQ ID NO: 61819 - protein, 401 aa, unidentified
MNAVGIDVSKGKSMVCVMRPFGEVVLEPFEVLHTAQSLNDLAGKLKALDGETRVVLEATGNYHKPVAFVLHDAGLFVSVVNPVLIHDYDNNSLRRVKTDKKDAVKIANYTLDKWTRLRQYLPEDDTRLALKNCYRQYQQAVAVRTMLKNNLISSLDLTFPDANKLFSSPAKSNGCEKWVDFIGDFWHSECVSSLSSDAFAKKYLKWCQKHGYNFTRSKSDTIYACAVNAASLPKSPTSKLLIQQQVAQLKAVSQSVAAFQQEMLRLSQQLPEFDTVMEMYGVGPSLGPQLMAEIGDIRRFSSKKLLIAFAGIEPQPNDSGKIVGNDSGISKVGSAVLRRTLFLIMTVILKTQPQDEPVFQFMNKKRSEGKPYKVYMMASANKFLRIYYARVKAVMDSKHSK

SEQ ID NO: 61820 - protein, 423 aa, unidentified
MMKLKYSICCGLDVHKNVIVATIVTTNKDGISEYLQKSFSTINSDIQRFHNWLIENNCYHVCMESTGKYWIPIFNYLENDIDVCLTHPKYVKAIKGKKTDKKDSKWIADLYKFDLVRCSFIPPKDFRQLRELSRYRFKLVCMKSSEKNRIQNCMTISNVGIASVLSDPFGKTATEIMSYLLEHTADSMDEKAVRKLIKKGAKAKSDEIIEAIKGYNIETDQAKKLELAQGHLEYLDDMITQTEVELYVRIKPYYEFVEFVSTMPGMTELSSTIVLAETGVDMDIFDDAKHLCSWCGLSPANNESAGKKKSVRIAKAGDYLKPMMVQCALAAIKSKKQPYFAIKYGRIKKRRGHKKAIIAIARMMMVCIYHMVSEKKPFTPTDYEELMNPQNHVERVVLNENNVFAYLESLGYDSSKLVKRNDN

SEQ ID NO: 61821 - protein, 427 aa, unidentified
MTSKMLQNCDKTLIIGIDIAKKIHWAQVTDSIGKVLCKPIKITNDIEGFTNFLDQIHNLSSKFEYEQIYIGFEPSGHYWRAIAWYLNSYENIHVVGVNPYHVKQLKELEDNSQTKNDKKDALVIAHLIRDGRYFDIYLPEDHYADLRILRTYREQISDNRKRIHNHIVVIMDEFFPEYESIGFNMSCLSSKIIFRTTPFPADIKSYSASELRELWKEQSPTGHIRISNAFTERLISTASRSIGVTEGVEAARFKLNALIDQLDLVDSQIEQCDSLMDALMQALDIDKFITSVPGVGSVTAASFIAETGDLSRFDDWKQIRKLAGLNLVEQSSGQHKGKTKVSKRGRPGLRKVIYLIGDKGMLVSPEMMSYYQYLRHRKNNQLKHDQAVLAVGLKLMRIMFHVVKYKELYNPDKALGDVRKKQILELA

SEQ ID NO: 61822 - protein, 355 aa, unidentified
MTSTKYIGMDVHKESISIAVMNASGKIGMECVIETKASMILQFFDGLRGDLQVTFEEGTSAAWLYDLLKPHVTKLLVCDPRKNASMREGNQSDKIDARRLAELLRLNHLHPVYHGEHGLRSLKELVRSYLTITKDLGRVMSRVKAIYRSWAIPCTGKQVYAPRHRAEWLGKIGEPGVRRRAEFYYQQLDALRAVRQQVRRELLAEGKKHSAWKRLCGIPSIGPIRAAVLLGILQTPHRFRTKRQLWSYSGFGIETQSSADHRRVNGQLERAKKQVCIRGLNRNCNHDLKNLFKGAAIVASSKPGPFQEFYTVLLSKGIRPEMARLTLARKIATIVLIVWKRGACFDAQHLKPQTA

SEQ ID NO: 61823 - protein, 388 aa, unidentified
MYYCGIDVAKRKHSALVLNEQSEIVQQNFTFKNDREGFDKLLATLKPFVGQVIVALEATGHYWLALYECLAAADYPVVVLNPLQVHAYQRSGVRKRKNDRIDSFWIADYARISNCQATTSNAPELIQLRDLTRFRYRLSENIGDCKRKLLAVLDRVFPEYENLFSSVFLTTSRQLLKQAVTAQEFADFDLGELSDLLSRASRGRFGQDKANTIVQQARRSVGVSLFADTARIQVHCLLEQLDLLELQCQQIDREIETMMNQIDQHITSIPGVGAVTGAAILAEIGDIARFESPEKLVAYAGIDATVYQSGDFEATQTHISKRGSPFLRIAIWQAACMAALYDPQLKAYYQRKKAEGKHHGTAIGAVARKLLSRIFIILKEGRPYEIRY

SEQ ID NO: 61824 - protein, 343 aa, unidentified
MQSISTIGLDIAKSVFQVHGVDEAGQVVIRRQLKRRHVLAFFQKLPPCLVGIEACASSHHWSRELQALGHAVRLMPPAYVKPYVKRQKNDSTDAEAICEAVTRPNMRFVPTKTVEQQSCLMLHRARHLFIRQQTAVINSIRAYLAEFGIIAPVGRRGVEQLLDVVADRADHRLPEIARACVAALGSQLRALKAQILEFDRRITAWHRSSATSRRLDAIPGVGPALATALVASVADARAFRSGRDFSAWVGLVPKQNSSGGKDRLGSISKQGDRYLRSLFTAGALAVIRYARIHGTGHRPWLTGLLARRPAKVAAIALANKLARMAWAMMARGQRYTEPAALAA

SEQ ID NO: 61825 - protein, 410 aa, unidentified
MEVLYSHCAGLDVHKDSVVACVRHMAGGKVTAPVKTFKTTTAELMLLSDWLSAEGVTHIVMEATGVYWKPVWHILSDGEFELVLANAAHVKNVPGRKTDVNDATWLADLVAHGLIRASFVPDEPTQQMRDLLRTRKQMVRERSSHVQRIQKTLEDANIKLDSVVTDILGLSGRRIIEALIAGQTMPQVLATLAHRRIHASTDELEAALRDRVTKHHRFLLKLHLDQIDAFDAAIAAIDQEVNVNVEPFRAAIERLSTIPGIGNLAATVIVSEIGIDMSRFETAGHLISWAGLCPRNDESAGKRRSTKMKKGAPWLKTTLVQCAWAASRTKGCYLQAQYHRLRSRRGSKKAICAVAASMLTAAYHMLKNGTFYEDLGADHFDRREKGKHILRLVNRLQSLGYAVEITPRAA

SEQ ID NO: 61826 - protein, 411 aa, unidentified
MQVVYMRCAGLDVHKKTVSACVSVCDAGAGKRQQTRTFGTCTGDLLELADWLREQGVTQVAMEATGVYWRPVWAVLEGQFEQMLVNPQHIKAVPGRKTDTKDCEWIADLLQHGLLKGSFVPPTPIQDLRDLTRYRVELRQSQNRVANRIQKLLEQANVKLASVASNALGVSGLRMLEAIIAGEANAAQLAQMARGKLKSKIPQLEQALEGRVRNHHRFLLAEYLDEWKSLGERIRRIEAEIDQRIRPFESAVALWQTIPGVDRVTACNLVAEIGVDMNQFPNAQHLASWAALCPGNHESAGKRMSGHTRDGNKWLRRSLCQAAWAVTRQKNCYLSAQFHRLAARRGVKRAVMAVAHTMLVIGYHMLKTGQTYHELGAAYLEQINKDQLQRYFVKRLQRLGLNVTVTPAIAA

SEQ ID NO: 61827 - protein, 377 aa, unidentified
MAAVMIGVDPHKGSHTAVVIDQAEMALGEVRVRASASQVQQLLEWAAAWAERTWAVEGAGGLGHLLAQQLVAAGERVLDVQPKLAARVRLLAAGDVNKNDPNDARSVAIAALRSAACPPVRADDHAAVLKVRAKRHRDLSRARNQVVCRLHAVLCELVPGGVSKQIHAAAAVRLLDQIQPAGAVQAARRELAGQFLADLRRLDAQRRDTKKKLAAAIRASGTTVTEVFGVGPAVAAAVIGDVRDISRFPGPDCFAACNGTAPVEVSSGGRVIYRLSLRGNRRLNHAIHMAAVTQIRYRHTKGRAYYDKKIAEGKTPKEALRALKRQVSDAIYQHLKADARRAAAAAGPGGHPGERLCRQRGRLTPRTPALRPSHSRT

SEQ ID NO: 61828 - protein, 380 aa, unidentified
MEKDIRYVGLDVDSERVAVAVADSGAAEVRSLGMIPNAEESVRRLVKKLGPVGRLWFCYEAGPHGYALYWQLTQLGAHCDVVAPTLIPVKSGDRVKTNRRDAEKLARLYRSGELTAVWVPDAAHEALRDLVRAREAAKKDQLRAKHRLGKFLLRRGLKAAAGIKSWTLKHLAWIKTLHFEHAAQEATFLDYLHEVEHATERIARLERALDQAIETAPCAMRALIDGLQALRGVSSLSAATIVAEVGPPSRFARPKQLMGYSGMVSSENSTGNSVRRGAITKTGNAHLRRVIGEAAWAYQRRPSMYAALKKRQEGLSEEVKEIAWKAQHRLYSRYRRLVAKGKLHQKAVTAVGRELLGFVWAIGMQVEKEQRARASYGRVA

SEQ ID NO: 61829 - protein, 411 aa, unidentified
MENVFPCCAGLDIHKKSVEACVRRLEPTGQMHHQTRHWGTMTRDLLAMADWMAAQGVTHVAMESTGVYWKPIYNILESRFTVLLVNARHLKQVPGHKSDVRDCQWIAQLLQHGLLKGSFIPPRTQRELRDLTRHRTQLVEEKTRTVNRLHKVLEDGNIKLASVATDILGVSGRAMLEALMEGQEDPVQLADLAQRQMRGKIPELEKALEGHLTEHHRFLLRLLWKELAQQEELIAELDRKIEEHTRPFANEIERLDAVPGVDRRVAEVVLAEVGSDVKPFPTHFHVASWAGMSPGNEESAGKRRRGRITPGNRWLKRTLVQAAWAASHTKNTYLASQYRRLAGRRGKKRALVAVGHSMLVIFYHMLKERTTYKNLGGDFFDRLEPERLTRYYVKRLKDLGHKVTLEPGVAA

SEQ ID NO: 61830 - protein, 340 aa, unidentified
MRKLYAGCDLHGNSNFWGIRDETGEKVFHKKLPNDLALMLAMLEPFREELVGIVVESTYNWYWMADGLMEKGYQVHLANPSAIQQYEGLKHADDKHDAFWLAEMLRLGILPEGYIYPKQERPVRDLLRKRGHLIRLRTSMVISLENIICRNVGRKVSANDVKRLGEDRVTPYLEGQEDLALAGQVSKNTVDFLSEQIQEIEKAVLKRVRLKKSYRLLLTIPGVGKILALVIMLETGPIRRFATVGDYGSYCRKVPSQWTSNEKKKGSGNRKSGNRYLAWAYAEASEFARRYYPEPRVYYQRKVQKTNAAVAHSALAHKLARAAYYIMRDQVPFRMEKLFG

SEQ ID NO: 61831 - protein, 341 aa, unidentified
MSKHTVISLDLAKRVIQVAKISRAGELLFNKTMSPDKLREFLAKQKSSLVVMEGCGSCHYWARFSNTCGHKAKIIAPKAVKPYVSGQKTDANDAIGIAVASQQLGMSFCPIKSVEQQTLLSVDTSRKFLDKSKTALNNHLRGLFYEFGIVVNLGEKGLRESVTYHLDSDSTALPSILKQTIIHLWEHYLTTVAQLKKLSQLLSNLVKQHEPSRRLMALEGVGEISAAGLIASLGDGSAYKNGRNAAVYVGATPKQHSSGGKVKMIGISKNGNYSLRSTLYIGALSVISRLPAEPKTQKQAWLIKLVQRAGVKRACIALVNKTVRTAWAMLKHGSEYQPVML

SEQ ID NO: 61832 - protein, 342 aa, unidentified
MQISTIGLDIAKNVFQVHGIDAAEKVVVRKQLRRSQVLAFFKALPPCLIGMEACATAHYWARELTKLGHTVRLMPAKDVKAYVKRNKNDAADAEAICEAVRRPTMRFVQVKSAEQQGQLMQHRTRDLLIRQRTQSINAFRAHLAELGIVAAQGDAGVTELLAIVADEQDTRLPIDARASVIVLAAQLEAMRTLIGSIEKRIKTQHRSNETSQRVETIPGIGVLGATAIVATAADPKVFRSGRDFAAWIGLVPRQDSTGGKQKLGPISKQGDRYLRRILIVGAIAVLRRAQENPGKYPWLTQLLARRPFKVVAVALANKMARTAWALMVHGGTYRAPELAEAA

SEQ ID NO: 61833 - protein, 420 aa, unidentified
MGRLKIVYPVCCGMDVHRDFLIACIDATNAQGVTEYQSRRFSTYTGSLRELRDWLLANDCKDVCMESTGKYWFPVHNILEESCHVVVSHPKFVKAIKGKKTDKKDAQWIADLFKHDLVRGSFIPPKDIRQLRDLCRYWVKLSSYMTGEKNRAQNCLTVSNFKLDDVFSNVFGKSASAITTQLLEHPGEQFDVAPFVDGRCKTPIAQIQEAVDGIFTYEQAEKLKIIRGHMDSLERHKAELESLILEIAQNYLPQIELLLTVPGIHDAFTAIRILAEIGADMTVFDTSKHLCSWAGLTPQNAESAGKKKTTRIGKSGAYLKPLLIQVALAASRGEKHPEIYGKKQALQKRRGKKKAIVAIARRLLTAIYHILSKNEPYNPAAYIQEDKNPMARQISQEKAFEMLARMGFIVSNPSPLSSSG

SEQ ID NO: 61834 - protein, 313 aa, unidentified
MKEEKTFIGIDVSKEKLDVGVRPQVDFMTFANTEDGISLMTDFVKSKQPELIVLEATGGLEMAALRSLVVARLPAVCVNPRQVRDFAKAMGVLAKTDKIDAHVIARFADSVRPEIRPLKTEETEMLDAFNTRRSQIIIMLTAEKNRLTTASKWTKKDIEKSIKGLEKALAKINREVENLIKKSPHWRHMDKILQSVPSVGPVMSLTILADLPEIGTMNRRQIAALVGVAPLNRDSGKYKGRRAIWGGRARIRSVLYMCVISGICHNPKIKAFYNRLISSGKKHKVAITACMRKLMIILNTMIKNGTCWNESGC

SEQ ID NO: 61835 - protein, 394 aa, unidentified
MKVYIGIDWSENKHDVCFLDETGAVLLVKQIPHTIAGFRQLDQARESLGVGRGEVIIGLETAHNLLVDYLWDQGYEQIHVLPPSAVKSAQKRYRQSGAKDDRWDAHLIANLLRTDQRCYTPWQPDQPLTRQIRAEVRFAQQLGQEVVRDGNRLRSLVLRYYPAALDAFPHLDSLVCLAFLQTYPTLSQAQALSFEQLKVFLREHHHTQIRSWPTIYAGLHADHPVSNPDLDTAYAPLAVAQARILETLLRSRQACLARLDKLFLLHPDREIYDSLPRAGTLLAPALLAKLGDDRARYPTPAILQAVAGTCPLTKRSGKHSYVLFRKACDRDFRHIVQQWARLTLDVSPWAARITTPSVLTARPTMMRFAAWPIAGWKFCGDCGSTGNPMMKLFT

SEQ ID NO: 61836 - protein, 358 aa, unidentified
MEPKYIGFDIDSKNTVACVVQQGRKDVFQCFPTDTRRMQKYLRQLGRDGSPLHLTFEISGEAGYRHDALRPYVESLTVSNPNKMTWIFRTSRKNDRIDARKQAVLLSIDEVPKVHIPVLEVRQWRATIQHRRLLVNRRTAVKNRIRALLKAHGLAQPPHRGSWWKRANQRWMEQLTQDWSEVSGETLWRVQLKNLLEELTLLGGQLKQVTSYLDQYLDRHPGGVLLMSIPGVGPRTAEAVLAYTDDIRRFLRSKQYCAYFGLTPKLDESGLRRRLGHISKEGPSVVRWLLVESAWRVVARVPAFQAFYERVQAGQPNRRKVAVVAVARKLLAIMRAMLQSGELFNESLVAAVPAKSRR

SEQ ID NO: 61837 - protein, 438 aa, unidentified
MWWNSQWLLSIVQKGVLPVKVVYQTCCGVDVHKSFLVATIIKTTSGVQPSYQKKRFSTFNNSILEFKKWLLDNSCRDVCMESTGKYWIPVFNLLEDEINITIANPKWVKAVKGNKDDTKDSKWIGNLFRLGLVPGSYIPCKPIRILREFTRYRYKLTSCRSSEKNRFQNALTVCNVALDSVVSDIFGKSATSVIDYLLKQPDNSINHEEISSRLLRSLKKKSESVIESIEGYQMTDAQKYRMRLVHAHMDYITSMLADIDSMINSLVEPYENAVQLLCTIPGVDRSSAITVISEIGTDMTQFSNSKRLCCWAGLTPGNNESAGKKKSVRITRAGVYLKPALVQAAHAAVKSNKSPYYKAKYEHIMKRRGKKRAIIAVARMILTAIYHMLSTGEAWNPTDLYKIDMPEPLKNKQKEKAVKQALKLLIAEGVIKESQLVS

SEQ ID NO: 61838 - protein, 426 aa, unidentified
MKVLYERVAGIDVHKDMIKVGIRSPGDKPWTRRSEVLQYRTFYGVLQQMAADLRKRGVTQVVMEASGVYTEPVYYALAERDFEQVAVINPAHAKALKGHKTDARDCLRVAELFECGLLRGSYIPVAGLKEVRDLTRYRMKTVQARTSEIQRLGKALESAGIKLGSVASELTGKSATAMIEALIDGERRGRVLADLALGRMRTAGKLADLSQALTGRFTEHHALLCRLHLDRIATFDAAVAGLEDKIALRAARWQREQDLLRTVPGFGDAVAQAWLGEIGPAPHTYFASHEKLASWVTLCPGNHISAGKRKHGRTGDAGTYIKPMLVQAAWAAIRVRGRLQARYSRLVRRFGGEKNPAAKKKAITAIARTLLKIAYQVLRSGKPHEDLGADFYTRRESPGQRQAYLMRQLQKLNPGCTITITPAEAA

SEQ ID NO: 61839 - protein, 324 aa, unidentified
MSKRSIHVQETMYCGIDVSAKSLTVAIQRVHQPVELRVFPNTSVGHRALIVWLRKAKSPVRVSLEATGIYSLDLAFALDAAEGIEVSVLNPKIANRFAQTIRRSKTDAADAEVLAEYARRMPFTAWVAPSPGSLRLRSIIRHVESLSVQSAQNQNRLHAAHGSTSVPRCIVQDLKRSVASLELRIHKLRREAMKLVRQDDLLRKRFELLVSIPGIAQVSAMQLLAELSTLPPDLTVRESVAHSGLDPAHEISGSSVRKASRISRAGNRHLRRALYMPALVASRCDPHAKAFLMASWLETKPAYRRSLLLRESCSMPYTGSFEAA

SEQ ID NO: 61840 - protein, 416 aa, unidentified
MDTMYERCCGLDIHKKTIEACFRSGKKKTHMSFGTTSAELRKLTMWLVENDCQSVAMESTGSYWKPIFNILELSGTDMKIIVVNARHMKNVPGRKTDVNDAEWIAELLQYGLLRPSFIPDREQRELRELSRYRKSLVEERAREINRLQKMLEGGNIKLTSVVSEVTGYSSRRLLDRLLRSDEPMTEDVISGLVHTSLAGKSKELETALDGLLSELQKELLIKVLDHIDDMSRRIADLDDFCRKQMKKYEDALDKLDEIPGIARRTAETILIETGLDMSRFPTAKHFARWAGLAPGNNESAGKRSSGRTTKGNPTLKSTLIQSAKVAARKKDSFFKARYQKIAARRGANRASVAVAHSMLIAIYHILKSGERFKDLGEDYYNQFNKEKKKKYYLKKLTKLGVNLKEATLSISIQTAT

SEQ ID NO: 61841 - protein, 347 aa, unidentified
MRFYTKQHKFYCGIDLHARTMYLCVLNQEGEILLHRNMKAGPEPFLKAIAPYREDLVVCVECIFTWYWLADLCTREGIPFVLGHALYMKAIHGGKAKNDKIDAHKIAVLLRGGMLPQAYVYPAEMRATRDLLRRRMHLTRKRAELLAHIQNTNSQYNLPEIGKKLAYKANRDGVAERFPDPAVQKSIEVDLALIGHYDYLLTDLELDLIQTAKAHDAQTFYRLRSIPGVGKILALVLLYEIHDIHRFPRVQEFVSYSRLVKCAKESAGKRYGTSGTKIGNAYLKWAFSEAAVLFLRNNPAGQKYLARLEKTHGKGKALTILAHKLGRAVYYMLKRDTAFDLDKFLNT

SEQ ID NO: 61842 - protein, 344 aa, unidentified
MDHFAGLDVSVKETSVCIVDDAGKIVREVKVASEPEDLLQILSNPAYHFKRIGLEAGPLSQWLYSALVDAGLPVICVETRHMRAVLKAQINKTDRNDARGMAQMMRAGLYRPVHVKTLRSQKLRMLLTHRKLLQSKAIAIDNDLRGTLRNFGLKVGVVRTVKFEARIRELVENLPDLAELVEPLLVVRRVLREQFVIQHRRLLAIVRDDEVCRRLMTVPGVGPVVSLTYRATVDVPARFRNSKAVGAVFGLTPAQHQSGESKRPGAISKCGDEMMRVMLYEAAQIMLVRSTKWSWLKAWAMQIARRRGMKKAIVALARRLAVIMHRIWVDGTEFRWTWEEVAAA

SEQ ID NO: 61843 - protein, 409 aa, unidentified
MRLFVGLDVSSFDIKACILNGEGKKLDSFSVNNDLPGATALKERVLQCIANQEIETFKIGLESTSVYSFHPSMFLHYDEDLQRFGAKVFLMNPKQIANFKKSYSDMDKTDEIDAFVIADYLRFGRNQMSIVQESQYVALQQLTRSRYQLVRMLTKEKQHFLQHLSYKCNTFSQEVDSSIFGNAMMELFLEKFSLEELADMPLEELAEFVQKKGKNRFGDPKCIASTIQKAVRSSYRLDKVVEDSIDVLLGTSIAVIRTYQQQIKELEKSIKRIMAGLTQTLESIPGIGPVFAAGIIAEIGQIERFDDETKVAKYAGLYWRTHQSGRFTAENTSLSRNGNHYLRYYLVEAANSVRRHVSDYQEYYVKKYNEVPKHQHKRALVLTARKLVRLVDALLRSHQLFTPERCVKV

SEQ ID NO: 61844 - protein, 401 aa, unidentified
MRISVGMDIAKDIHWVAAIDGDGLIHIDRKVENTPRAIADLIEELRALGGTVRIGLDVVAASPGSSRPCWPRPASLWFMCRVWPINRARQGTVGGENKSDPRDARTIADQVRTRTDLRTIEPAAELDLEIRLLVSRRRDLVDAQTQRLARMHDLLTSIFPGLERSLDLTTKGPLQLLTRYVTPAELREAGRKRILRHLKAGGTIPRAEHLADRALEAAAEQTLAVPAERMSARLIRELATEALAAKTRLAEIDRELEALLQGHPDAALIRSLPGMGAVLTAELIAEAGDLSRSADALAAAAGIAPSPASPARCVSSDAPRAATTASNGSSPSPASARSASPTAALSTPVNGARANATIRPSSLWPGAASTSCGPSCKPALPSRPTSKLPLDERIRLPSPRG

SEQ ID NO: 61845 - protein, 416 aa, unidentified
MEILYRCCCGIDVHKKFVVACLLKIDEQGEETRQVQRFETYTQDLLRLSDWLTGFGCTHVAMESTGVYWKPIYNLLEGHLELLVVNAHHIKAVPGRKTDVKDSEWIAELLQHGLLKASFIPPQWQRDWRDLTRYRTSLVQERARIVNRLQKVLEDANLKLAGVATDVMGKSGRVMLEAILAGATNPEQLAELAKGRLRKKIPQLKQALSGRVREHHRFLLVEQLSHIDYLDEAIERLSGEIAERLRPFQAEIERLDTIPGINRLIAEVLLAEIGPDMNRFPDAHHLASWAGLCPGHNESGGKRHSGKTRKGNRWLRQALIEAAHGASHTKDTYLSSQYRRLVGRRGKKRALVAVGHSLLVIAYHVLNRPATYADLGSNYFEQLHRCRLEQNLVQRLQKLGYTVTLQANSALMVSPA

SEQ ID NO: 61846 - protein, 410 aa, unidentified
MGLYCGIDWASDHHDVAVVNDDGQVLARGRVGNDAAGFAQALTLLADAGDTANDPIPVGIETDRGLWIAALRATGRVIYPINPLAASRYRARYAVSGAKSDATDAVLLANIVRTDPDAHRPLPADTELAQAIRVLARAQQDAVWARQQIGNQLRDLLKDFYPAAIIAFAGLPSGGLARPDARTILAAAPTPGQAAKLTPARLRRLLIKAGRRRDLDRDVERLRAVFTDTHLHQPPVLENAMGIQLTALLRQFEAANAAADELAEAAIAHFEQHPDAEIITSFPGLGNLAGARVLAEIGDDRTRFTDARGLKAFAGSAPITRASGKKTIVRHRHIKNRRLATVGSIWALASLRSSPGARRRYDARRAAGDWNRQAQRHLFNKFLGQLHHCLQTGQPYNEHRAFPPPLPLAA

SEQ ID NO: 61847 - protein, 366 aa, unidentified
MAITHVALDDSKRVIVAGILRADATQPELREIPNDPRQVRRLFERLLREAPVRACYEAGVSGYDLYRQLTALGVDCAVIAPALTPRKPGERVKTDRRDAAKLVRLFRAGELTAIHVPTEAEEGVRDLTRCRDDVRADIVRWRHRVLKLLARHGRVYQAAKNWSQAHWTWIRAQRFDDVPLARTLEASLEALEQALRRRADLDRAIDGLASEPRYRDAVGPLRCFRGINTLSAMILVAEIVAFERFRRPRALMAYLGLVPSEYSSGDRHRRGALTKAGNTHARRVLVEAAWHYRHRPALGPRLARHTADQAPAVVAEAWRAQHRLHRRYRHLVGHGKRPTVAVAAVARELAGFIWAAMTQAPRVRAA

SEQ ID NO: 61848 - protein, 369 aa, unidentified
MDDITYVGLDVHKATVCVTVAESGRGGEIRQVGVFENRPEILCKMAARLGKGGRRLSLCYEAGPCGYGLHRLLTGCGHSCIVVAPSLIPIKSGDRVKTDRRDAMMLAKLHRAGELTAIWIPDAAHEAIRDLVRARATAGQVLSKARQHLQGFLLRHDRIYRGVRAWTLAYRRWLTTVRFEHPAQQIVLQDYIHAVEDAEARRDRLTRQIEEMLPSWSMAPVATALQAMRGVALVVAVTVVAEVGDFRRFANARQLMAYLGLVPSEHSSGSTIRRGGITKAGNALARRVLIEGAWTYRMTARVSRKLHDRLEPLSAAIRDIAWKAQVRLCARYRRLAAAGKPKVVVTTAIAREMVGFIWAIARIAQPALA

SEQ ID NO: 61849 - protein, 448 aa, unidentified
MKQQQPEEIADTEHELVIERVCAIDVAKASGKVCVRVGSRAGRRVSKVWDVAATSGAVGELTDYLVDERIEKVTVESTSDYWRIWYYLLEAAGLDVQLVNARDVKNVPGRPKTDKLDAVWLAKLTEKGLLRPSFVPPAPIRELRDYTRLRIDMTRERSRYWQRIEKLLEDALIKVSSVASTLDTLSVRDMLKALIAGERDPRRLAGLARGKMRPKQAALVEALTGRFDDHHAELAQMLLDQIDALDAKIGRLTTRIDQLLAAMEPEPVNGGDATGGANPASRKAGELTTIDRLDEIPGVGPVNAQIILAEIGLDMSRFPTAGHLVSWAKLCPRTIQSGPVQRSGKAGKGNPYLKGALGEAATAAAKTNTFLGERYRRIVKRRGKLKALVAVARSILVIIWNLLHDPTARFHDLGADYHATRINTERRTRNHVAQLAALGYRVTLEPVA

SEQ ID NO: 61850 - protein, 346 aa, unidentified
MSDGTAGGRQVVGIDLHLHRSVIARIDEQGNELGWVRIDNDPKALRAECRKAGRGVPVAIEATYGWYWAVDALRAAGFEVHLAHPLGLKALRKRKRVKTDPRDAYELANLLRLGSLPEAYIAPHDLRELRELVRHRRQLVKLSTAVKAGIRALLAKHNIRLSATQLEGDTATRLLDALELPGSYAQRLASQRRLMLVLTDEIAAVEVELHRRLRNHPGYRNLLTVKGIGPVLAATFVAEIGDVTRFPTAGALCCWAGLTPRHYESDKTVHRGHISKEGDPIVRWAAVEAIQRQCEPAVKAVRDDIVARRGKGARNIAKVAAARRMLEVVYYVLRDGEARCLSSKAA

SEQ ID NO: 61851 - protein, 317 aa, unidentified
MGGVNAAIEVGKHELKVCLGSEGEVFSEPNQPRTINRIIKRLSPAGCARVLIEGGSYQSVLIAALRAAELPVVIVNPRRVREFAKSIGRLAKTDEIDARVLALYGERTEPPLRELADEQTQSLRTLSVRREQLIEMLVMEENRLEHVPAKAKAVRHNLSSHIDYLRKQMKQADDDLDREVRNSPLWDKYEMLSSVPGVGRVLSVALLSDLPELGRLNRGEIAALAGVAPFNCDSGTLRGQRKVADGRTRLRRALSMAALSSVRCNPVLKPFYLRLRGASKPAKVALVAVMSKLLLILNAILKTNTAWRALPCPTANS

SEQ ID NO: 61852 - protein, 428 aa, unidentified
MADPANATPACNLVAIDIGRYGNAVLIEATSGKRHRFKMANTAADFGRLLGFLHGLPGNCRVGLEPTGDYHRPLAHRLLRAGFEVVSINSVALSRYREAIFNSWDKNDPKDAGVILEMLRRGDVQRYVDPIMVGTHDLQELAKTYYQVSRARTKVQHSLINHGLTLYFPEMHRYWCTTRNDWFVRFLLQFPTPAHVRSLSCAEFVDAAWDVVGRKVNKRAKLEEIWEMAGATAALPHAPDSLAVETFRITLRRYQQLNALRAELEVRAEQALASNEDFAQLKTLPGIGSVIAMTVLAEGGDLRRFGHHRQFLKYCGFDLAKNQSGTQRGKEQLSKRGNARLRLAFWLAAVAAVHMKENSFRAKYERYIRAAPEDPDLRRKALTAVAAKMARVAHGMIKKNQPYRQFFEQSLPSGSIPLSAAVGAHATP

SEQ ID NO: 61853 - protein, 367 aa, unidentified
MNNTIIHHEGAASLEVVVSRIKPGGAVIKIGLDVHARIYVAVAQYDHLLPKAARRFAPSEFVPWVEGLLRAGHQVHVVYEACGFGFGLYRQLVAAGARCYVIAPRKLDEQSTGVKTDPRDATTLCQRLSRYCDGNTRELAVIRIPSEDEEQARHVSRQREQLVHHRQKLEAQGRALLINHGLPSPAHWWKNQTWNRLGALLPAWIRVRLDVYRPGLFALQEAITALSGQLEAAAPAAIPVGIGKLTTVVLTREICDWHRFNNRRAISSYTGLCPGERSSGSKRIPGSVTKRGNPRVRAALVECAWRMVRFQPHYPPVQKRLAVLAKGSPALGAVRKKAIVAVARRLAVDLWRLHTGRCSAKQLGLII

SEQ ID NO: 61854 - protein, 372 aa, unidentified
MQEASTFVGLDVHKKDIAVAVLIPGSGVPLEWRVAHEPTAVRRLVQRLLRQAGTQVHCVYEAGPCGYALQRQLVSLGLECDVVAPSLIPIRPGERVKTDRRDARKLAELGRAGLLTVVRPPTEDEEAVRDLCRGRDDARLDLLRARHRLGKFLMRHGRAFGTGKQGAWSQAHRWWLGQQTFERMAERVMFEDYLLAVEQTEARRRSLELHLEEVAREPRYAEAVGWLRCFQGIDTITAITLLAELHDFRRFRSPSQLMAYLGLVPSEYSSGTHQHRGAITRTGNRHVRRLLVEAAWHYRHKPRVGIKLAQRRHGQPVNVIALADRAQLRLCRRYRRMERQGKHPTKIVVAVARELVGYLWAALTPGALATKA

SEQ ID NO: 61855 - protein, 354 aa, unidentified
MRLGINRPFGCAGGIPFDLGAESPWESLATRPLSTSNPNSCQGLVAARARIHKAGSMNTIAEHTHFVGIDVSMDWLDVHVLPGNLRCRVANGSRGIWSLIGKLSDCEEPLVVMEASGGFEARALETISSAGIAVAMINPRQVRSFARALGILAKTDRIDAFAIARYAEAVRPEPRMAAHRDLGEIKALMTRRRQLSDMLTEEKDRRCRVTSALVRRRLLVSMRNLKKEIELIDREIDRLVAADEVMREREALLRSTPGVGKIVARTLIAFVPELGALSRRQIASLVGVAPFNRDSGTMKGRRTIWGGRANARAVLYMGALVAARRNRILSAFYDQLIALGNGRSSRWSPVCESY

SEQ ID NO: 61856 - protein, 353 aa, unidentified
MYHTGIDLHKFTSYLTTVDSSGAIVKQENLKNVAHNFVQYFSSIPGEHKATVESTMTWYWLNDLLTSINIPLVLAHAKYVKAIAYAKVKTDKVDSHTLAQLLRMNFIPVAHKISIENRLLRDALRARLKIVQRHTSVTNSMQLLLAKYNFDSPTELSGIPKFRYEQLTEVEELLSEQMLTLEKSLYPSLIPNEDIQRLLWIPGIGKMNAFTILLEVGDINRFETEKNFFSYCRLVPSARNSAGKTKQRSSKDGNRYLKIVFSDAAVHALQYYPVIKRYHSSKLRKKKKQVAKAIISKEIARFVYHVLKDKSNFNNHFKGKELEHKKSIQWPRIIPPKAGLEWEVMRLPKIYLG

SEQ ID NO: 61857 - protein, 309 aa, unidentified
MEKAFVGIDISKDSLDVAVHASDKQWRFSNDPAGITKLCRMLVKLGPTLVVFEATGGYEMSLYLSLDEANLPATPVNPRQIRDFAKSTGKLAKTDALDARVIAHFGFAIKPTPHPLPDTRGLKMAQARRIQLLEMITAETNRLRGKPKALRKRIEAHITWLQKELADTDRELEEMIGEDPIWRDKDTLLQSTPGVGPVLSATLIAQLPELGTLNRRKIAALVGVAPLNRDSGKMRGRRAVWGGRGHVRSVLYMATLAASRFNPAIRNFYLRLCCAGKTKKVALTACMRKLLTILNSMLKHHIPWSYSPC

SEQ ID NO: 61858 - protein, 351 aa, unidentified
MRHSSQAQAVTLYGIDIGKSLFHVAGLDRIGQGVLRSKFRRNALLQFFSNAPVAIVAMEACPGSQWLARKLTRYGHATRIVPAQFVKPYVKSNKNDTVDAEAIAEAASRPSMRFIAMKRPDQTDLQALHRARDGLVYQRTALVSQMRGFLLEYGIACRKGVGAFKLDLADALGNAENDLTPAFRKLLASLRAYLAELEDHIEQFNQEIEAIADRDDTARRLMTIPGIGPLAATALIAAAGDARQFKRGRDLSAWLGLVPAQYSTGGKPTLLGISKRGNTYIRRLLIHGARSCVVHTDRSRHRWGAWLDALAVRVHVNKLTVALANKIARMAWVVLTRPGATYQRQDPRFAA

SEQ ID NO: 61859 - protein, 425 aa, unidentified
MSERDYNRQVVKRERINRATLVVGVDVGKASNAVGFMDKEGNVLGSCAKLYNSREGFEQFVKMTEGFKERQGMRDVLIGLEPTGHYWRKLAYFAKEQGYEVRFVRTTALKHHRELDESSSAKSDKRDALTIANITREGKYIDTVIEDGVVRQLRTLSKLRERLLRYSVGAKNALHAALDDYFPELHEIFWSMNSRSLWAVLDRCPFPDDVVLMKRSTLRELIACSSRKKAGADQKAKALYQGAKKSIGVKRIGSADRYRVKICLQEVKRTVLMLRDIDRQMKSVLKEISSSEYLLSIPGIGPLSAAIFLGELGNPAYFQNARQIVKYAGYDPQESDSGYRVSRKFISKKGRWLFRKCLFFMSMRVVVLTNYFREYYQRKLQTKNRVGQLPRRKEILCAVAIKLIKVIFALLRDKRRFQDTVNVTA

SEQ ID NO: 61860 - protein, 324 aa, unidentified
MTSEVLTNAEMVEYVGVDVSKKRLDVAVESTGQTWAVDNDAVGIGRLVEQLTGWRLGCIVVEATGGQERLLLAELWAAGLPVALVNPRWVRAFARAMRLLAKTDTLDARILAAFGRATQPLLTQLPSEEEATLEALVTRRRQISDMLTGEKNRLATVPPATRQRLAEHIGWLEREAADLLAEIEALIGRVPALEDKSHLLRSVPGVGPVLTATLLSELPELGRLNRRQIAALVGLAPFNRDSGLRRGQRHIAGGRAEVRSVLYMATISALKCNPVIRAFKQQLCAQGKPTKVAIVACMRKFLTILNAMLRDQRPWSTDLALPRP

SEQ ID NO: 61861 - protein, 357 aa, unidentified
MRFYTKQHQFYCGIDLHARTMYVCILDHHGEILLHRNMPARPETFLKAIAPYRDDIVVAVECIFTWYWLADLCAREGIPFVLGHALYMKAIHGGKAKNDKIDSHKIAVLLRGGMLPQAYVYPAAMRATRDLLRRRMHLRRKRAELLAHIQNTNSQYNLPEIGKKLAYKGNRDGVAERFLDPAVQKSVEVDLALIDHYDRLLREVELTIVQTAKQHNAQALYRLQSVPGIGKILSLVLLYEIHDITRFPRVQDFVSYCRLVKCAKESAGKRYGTSGKKIGNAYLKWAFSEAAVLFLRNNPQGQKWLARLEKKHGQGKALTILAHKLARAVYYMLTRDTVFEMDRFLNGYGSRVGEPAA

SEQ ID NO: 61862 - protein, 345 aa, unidentified
MELHTIGIDLGKTVFHLVGLNLRGEVVVRKKFSRKQLLHFTANLQVGLIGMGACGGAHFLGRALREQGHEVRLMPAQYVKPYVKTNKSDYIDAEAIAEAVGRPKMRFVPIKSDDQLDLQSLHRVRERWVMRRTAVINQIRGLLLERGITLRKGRCHVDEALPGILEDASAKLSGALRVLLAQLKLELDHLQMRIDEADAVIKKTAGENEACRRLVAIPGIGPITATAIIAAIGNGAAFKKGREFSAWLGIVPGEYTTGGKQKLLGISKRGNSYLRRLFVHGARAVLQQSAKQSSGLSSWLAQLTARTHRNVAAVALANKLARMAWAVLAKNEPYRPPMLAEVATA

SEQ ID NO: 61863 - protein, 312 aa, unidentified
MLLEQKLPTTPKAMKEVFGKVPRSRIALETGMHSPWVSRWLSELGQEVIVAHARNVRLIGESRRKDDRFDARTLARLARIDPELLGPVQHRSRKAQADLTVIRARAGLVRARTSLINTARGLTKSYGERLRGCSPRKVNRELAEGLSPELQSALQPLLHEIESLSERIREYNDRVQQIAPESYPEVARLEQVKGVGTLIALTYVLTLEEPRRFHKSRDVGCYVGLQPGRRNSGQSEPQLHISKEGDPYLRTLLVQGAHHILGPFGVDSDLRRWGLRLAERGGKNGKKRAVIAVARKLAVLRNSSQAMLSAAA

SEQ ID NO: 61864 - protein, 459 aa, unidentified
MTTTRIIGIDLAVEAAHKAIVLDQARNAFVSRLLTFQTDPAEIDQVLEVARAQAPDDVRLIAVLEPTDTLWHTVGVYLAHRAVEVYRVSGQQVADQRRAYQRHAKSDQVDVRVLARLPLLYPERLTRLWIPSGAHLALQQTCREVARLTEQIAAIKQRLQAIDRWAWPGLQRVLTAAHPARRWVRECWYDPWAVCAAGEATLRQAWQAASPQQPAETAWIAEFLACAQRVVTLYGHPDVLPHARFQATLQREQARLDALLDQVHTLRLQVVRPLYRQLYPQRYLETLQGVGQDSAAVYTAWVADIQRFPSAQRFRGWSGLTPFSRQTGESQARGLHITQAGPDLLKATAFLNANVARLYDPQIAAVYYTQMMDYGKHHLQAVCACATHLLDRIYVVLSQNRPYQLRDLDGTPLTKQQARRICQERYTVPPEVRRRNNQRVRRARREERLERRAQHNASA

SEQ ID NO: 61865 - protein, 321 aa, unidentified
MQEPTLCIGVDVSKAELVIAMGPERRPCSVANDAVSISNWLRAIPSHALIAMESTGRYHTLLAHLASQAGLKVYVLNARDVYFYARALGTRAKTDGVDAGVIARYLVEHRARLHPWQPGSSLQQRLQDLLARRAQVATHRSALRQVFTGIDTKGIETAKLQAAFDALLQSMDQQVQALIASDAQMAQGCERLRTITGIGPQTSALLATLLSRFDFANADALVAYSGLDPRPNDSGTKRGRRRLSKKGPPLLRRQMYLAGFAASHSKALKPLYQSIRAKGFATTAALMILGRKLLRVAFAIWKGNEVFDPARLIPKNDLQKT

SEQ ID NO: 61866 - protein, 317 aa, unidentified
MRFYPQQHQFYCGIDLHARTMYLCLLNRDGEILVHRNMKTRPDTFLTAIAPYREDLVVCVECIFTWYWLADLCAREGIPFVLGHALYMKAIHGGKAKNDKIDAHKIAVLLRGGMLPQAYVYPAEMRATRDLLRRRMHLMRKRAELLAHVQNTNSQYNLPEIGKKIAYKANRAGIAERFPDPAVQKSIEVDLALIVYYDPLLTDLELPIVKTAKQHDAQTLYRLQSVPGIGKILSLVLLSEIHDIQRFPRVQDFVSYCRLIKCAKESAGKRYGTSGATIGNAYLKWAFSEAAVLFLRNHPAGQQYLARLEKKHGTGKA

SEQ ID NO: 61867 - protein, 445 aa, unidentified
MHTARRLIHIREGVAAVGFTGARVGFAILIESEVNKLNTTTLFVGIDVGKTSNTVRLMDGGGDTLSLFDVPNNADGADKLHGKLRHTLLHTDYSKVTVGMESTSIYADHLAAYLRNDEFLRKWECSVYVINAKNINHFKKSYPELPKTDSIDTWIIADYLRFDRLPKPVCHDEKYLALRNMTRARFQAAQNLSREKTRFLDTLFQKFSTLETAKVFSDTFGATSLAAICDFLSVDEIIYMPINELTDFVNQKGKGKFADPDAVAAALQAAARSSYRVSKTVNDSLNQLLAIRLIGIRAIEDQVKSLDKAIESFMAAFQNVLVSIPGIGPVYSAGLMAEIGDIKRFDGQASLAKYTGLVWKRYQSGNFEAANTKMILSGNKYLKYYMLEAANKVRMHDAEFAEYYRVKFREVPKHQHKRALALTARKLVRLVYSLLSTNRLYTPRW

SEQ ID NO: 61868 - protein, 386 aa, unidentified
MHKPDDLSKSLVAFEQDATLVAVIEMSLSTWLVAGVVPGVDRHPLKKLDPDPEALLRLLHRWRDEAAKAGRAVSRVAVAFEAGRDGFWLARWLRARGLEAHVIHPASVAVSREHRRAKTDRLDTELLKRAFLGWLRGERDHCKMAAVPTVEQEDAKRPSREREALVGERTRIVNRMKATLVRLGVRGFNPTLKKAPKRLETVRTPEGEPIPPNALAELRRDMARLALVREQIEAIERERLERLERAPATGCHAMVRLLAQVVGVGVETADMLVHEVLARDLRDRRAVARYAGLTGSPDESGTKRRDKGLARSGNARVRRGMIQLAWRFLIFQKDSALARWYRQRTENARGARKTMVVALARKLLIALWRFATTGAVPEGVVLRPTV

SEQ ID NO: 61869 - protein, 449 aa, unidentified
MSRPQVIDDEEHERIHDKVAAIDVAKDAGVVCTRTPHPSRPGARRSRIWTVKARMNTIRALGRQLHKDGIEIVTLESTSDYWRIWFFVLEAAGLAVQLDGAAQAKNLPGRPKTDKLDAQWLARLTEMGLLRASFVPPRAIRDLRDYTRARTRLVQERTRCWQRLEKLLEGAQVKLSSVASKLTTVSAQDMIRAMIAGQRDPRVLAALARTGMKAKHDELVQALDGMFDDHHGELAQLLLDQIAGLDGKITQLGTRIEQAVTALPDAWGINADGTTGPQAGTGPDAAVIPAVTRLAEIPGISENLARAVIAETGLDMRRFPTAGHLVSWAGLCPTARQSGPRTRAGKKGQGNTWLRGHLGQAAAGAARTATFLGERYHRIARRRGKAKAQVAVARSILVIIWHLLADPSARYTDLGYGYYQDRTDKDRKLRNHMRQIEALGFTVTLNKTA

SEQ ID NO: 61870 - protein, 402 aa, unidentified
MTYDYVIGMDACKYFHHACVLDIDGTQVLSKRINQNEQSLRALFSAFSAYDHKVLVVVDQPNNIGRLTVAVAQDIGIDVRYLPGLAMRQLSRIHAGNAKTDIRDAYIIAHAAKNLPESLRSVDRVEEAFLQLKVLNGIDEDLARSYTRLINQIRSALVGCYPQFEQALRGQIIHRKWVLHLLARYGGPTKIKRLGKAKAAAFARRYKARNPEPVLDAIFAAISEQTVTIAGAHYAEMGVAMSAKDALLKLEHRQQIEKEVIELINDIPHTQFLLSMSGIGPKTAAQILMTAGDMSDFPSAGHLASYAGLSPRTNQSGTSIMSNSLNRAGNKKLKNALWQSSFASIRFHERSRQFYERKRREGKRHNAAVVALARRRLNVLYAMMRNHEHYHDPAPSQEDLAA

SEQ ID NO: 61871 - protein, 370 aa, unidentified
MTTSNILFIGMDVHKDSIEIAIADGSNHEVRRYGRIGGTHDAMRKTLRKLVSQDKTLHFCYEAGPCGYELYRYLVSEGHDCWVVAPSLIPKRPGDKVKTDKRDAAQLARLLRAGELTPVYVPNREDEAIRDLSRAREDTMLVQKSARQRLKSFLLRHDIRYQGKTSWTEAHLRWLADEVRCPSPAQQIVFQEYVNAVTESQQRLQRLDEQIKHFAQAWRLYPAVEALMSMRGVKMIVAITVVSELGDLSRFENPKQLMSFLGLIPSEYSSGPRQKRGGITKTGNGHVRRILIEAAWCYRYPAKVSREMQLRQEKLPLVIRDIAWRAQLRLTQRYKHMQSKGKPHNVTVVALARELAGFMWAIVNEVKYPR

SEQ ID NO: 61872 - protein, 346 aa, unidentified
MQSSPQLYIGIDVHKKSWSVNLRTDLFDHKTFSMNPSANELIRYVDEHFPGYRVKCCYEACCCGYTAFREFSEVGWEVLVVNSPDVPVINKQQIHKSDTVDCRHLCKQLQAGQLRGIYVPDEKQEQLRSLFRQRNNLTKALRKIKCHIKGELLYYGINAPKCYDNNNWSKAMLSWLQSLPWKYKTGQSSLQSKLRHLHFVYYEWLQVSNELRAYARREYKKDYYLLRSVPGIGPLTAIGILAELGDVRQFKKFDRLCSYVGLVPSVYSSGEKVQTRGLTPRSKQLLRSYLIEASWTAVRRDMALHEYYRSHAGKPANKIIVKVARKLLSRMWHVIKKERPYQCEVN

SEQ ID NO: 61873 - protein, 403 aa, unidentified
MISVGVDVSKGKSTICILKPYGEVIMSPKDYEHTQSDLKKLADQLDDFEEEIHVTMESTGNYHLPIATYLKKKDFDVRIINPLEMKRYRCQGLRNPKTDRIDAVMIAQYGIDFWFRPFRDYVDDNERIELKALGMQYHKTMKTRKDRCLVLESIIDRTLPGIGGILNDYDKHTGKDKKSDFVYDFYHAEKITVHSEKRFCDRYASWSKKKGYRYSEGEARQLYSIAKDSIPTLPPSENTKLIVQDAVRILREVDASLYDILTRMNEIAKSLPEYVTVMEMKGVGISIGPRLIAEIGDPRRFHSAKALIAYAGIDAPPYQSGRFTGTERHMSKRGSRIMRKLGFELMDSINKHQKSYAGDPVCEYFLAKRAEGKMCRVAMFAAYNKFLRIYHSRVSNVLNESVK

SEQ ID NO: 61874 - protein, 322 aa, unidentified
MSVMILGIDIAKQKFDVALLADGKIKNKTCKNSAEGFESLSLWLGKQSSQKVHACLEATGNYGEDLAIYLHEAGHIVSIVNPARIKGFAQSELIRTKTDKVDAGIIARFCLAMKPEPWIPPSPEIRSLRALVRRVNSLIDMRSQEKNRISTAHESVIPLIKEHITYLDQEIEKIRQQIAELIKQNPHLKQKKDLLASIPGIGKATIPAILAELDDLEKFNNVRELVAFIGLAPKETLSGSSIKGKPRLCKIGHARLRKALYMPALVSIQCNPVMIAFYNRLKEKGKNGKVIVCAIMRKLVHIIFGILKSGKKYDPNYKPTFV

SEQ ID NO: 61875 - protein, 429 aa, unidentified
MRTESTPGARGPVFCGVDTHADSHWLCVLDWRGRKVLSRQFPADAAGYEALAGAIAAAGEPACIAMEGTSSYGAGLTRHLASLGMPVREALSPARTQRRRPGQGKCDEADAERAARAAMSGSKLGTPKSQDGWVDGVRCMLAARSGAVKARTSAINTARSLLTTAPEGLRSRFRGMGGPRLMEELPSVRSEGALGAALGALADLWAAARDAALDMERAIEASLEENCPALLAMYGCGPVSAAKLAVAAGDNPGRLRSEASFAAICGACPIPASSGKTVRHRLNRGGDRQANSALHEIARQRVMRDPETAEYAERARGRGKSDREVMRCLKRYVAREAYRALMHPHEVRRPEDASALVAARRAAKVSQVRAASILGTSEKYISMLERGQRELKPIRRAYEAWVEAGLPLDWDRQAFEAERKMDSKKDLAI

SEQ ID NO: 61876 - protein, 409 aa, unidentified
MKTDYNLGLDAAKHKVRVALRRGSAERLLLERDLPVSAAGRRELFALLGRHLPAGAELLVLIEATGVLHLPWTTALAKAGHAVAIINPLMARRLYRVKNSLRENKTDPIDARSLCALAVRDGAELLEKYRFSLAPARCALQRLESVRHSWRSSLTNLKKTYRSLLDLIFPELGQLLEIDGVGIRALLLKAPTPQAIARLRLATLEKDWKLRPKARALKVLAADSIADPELAAASAPALVALLQSMAELETRLLALDRQIERLALQAADPARHQLLQTLPGFGSITAARLIAHLPEELLQAGSNRTAATRLQAFMGNDPRLKESGQWKGQTKMSKRGVEILRTSFFQAAFSASVFDSELKAFYRRKRAQGKPHQVALSHLMRILTRRLVAVLRSGQPYRPKELVPLQNAA

SEQ ID NO: 61877 - protein, 354 aa, unidentified
MLLFLGVDSHKDSLAACLVDQTGAQLAAATFPNTPDGHGDLLAWVGRSGQLTRAGVEGAANLGAGLARLLRDQGLDVREVPCALTVRERRRLRRPGKSDPTDALAIARITAREHDLPPARHAGQAEDLKVLSDYRDELVAQRTAEANRLHADLAIVCPGYARHCRALSSAHALHTAAQLLEQAKTGSMRAQLAQRRIVRLQQLDEQLAACLTQLTKLVTATRTRLVDMVGIGPLLAARILGEVGDVHRFPTRDHFASANGTAPIPVSSGRTDRYRLNRGGNRRLNRALYFAALTQASHDPRARAYLARKQTEGKTRREALRCLKRRLSDVVYKALLAGPKPLPQPDQSPDAATA

SEQ ID NO: 61878 - protein, 391 aa, unidentified
MRSTSDRVVIGMDPHKRSATIEVMAGDETILGAGRFGTDRDGYVAMTNYAKQWPNRVWAIEGCQGIGRHIANRLLADGEQVLDVPPKLSARARIFATGQGRKTDATDAHSVALVGTRMAGLRPVVNDEQLAVLRVLVDRRRSLGEDHTRMISQLHQLLLELIPGGAKKSLSAAQAKALLATVRPRDAVGKTRRRVAAELIGDLERVYQRSKQADKQLTELLAATGTTLMDLHGIGPSGAARLLVEVGEIARFPDRAHFASWNGTAPIDASSGDQVRHRLSRAGNRQINRVLHIMATVQLRNPTEGRAYFDRRKASGKTSMEAMRCLKRRLSDIVYRRMVDDTLATAATGPGGHRGTSTDSSVTSSHPHTGSSDKSLPGPAKTQPRTPHPRT

SEQ ID NO: 61879 - protein, 415 aa, unidentified
MIVLEPLLLRELSAGQLVVAIDPGKVTNRVWLTTGERGLIGKPVSLPVLRDGVDELARLIAASGVRGSPVIGIEATGALHRAWAAEVERRWPGSLRLFAPSETQAARAQLGSRRFKTDDRDCAALVWLLRQGAGRPTPPSAIDALLGAVRHRRQLVDARRVLRQRLHDQLNGLCPGLSAPVGHGRVLELEDPSGRAVLACAVAFAGRAPTVRSLRARSPGRLTETNAGFWVGRWRRLLPPPPDAELRAQRLGRDVERWLGLRDDIATLETQLTELLARTDGQILTSLPGVAVIRAAAFAAHTLPIERWPTAEHLHSATGLAPASYQSASVTRRGRISRQGLAEHRDALMGIAWGLSQHSPAFAQRDREYRARGFRPIQARVALARHACRLCWRLLSSQQPYDERRYDRARHRCGR

SEQ ID NO: 61880 - protein, 346 aa, unidentified
MPELAGRVDYVIGVDTHRDTHTAAAVDRVGGVLEGISVCTSQRGSKELLDFAQATAPGRRCWAIEGTGIYGASLTRFLLARGEWVVEVERPRRPARRRGKSDELDAIAAAREALAGEHLAEPRSPGERAALQMLLTLRRHLVQSKVQAIGLFKTLLVTAPDALRESLAPLSTAEQVGRAARLRERRTVEEDTSVVVLRSLARRILASSAEAEELRARIGSLITALAPQLLARPGVGVLAGAQVFVVWSHPGRLRSEAAFASLAGVAPIPASSGQSRRYRLNRGGDRQLNCALHTIVLTRLRCHPPTMAYAARRLAEGKSPREIRRCLKRYVARELFKLLEGSTQMS

SEQ ID NO: 61881 - protein, 359 aa, unidentified
MSKHSTFFIGLDLGDKYSHLTVLDQDGEVIEETRLPTSPASFRRKFATFAPSRVAIEVGTHSRWSSHLIRELGHEVLVANPRKLRAIYHNPRKGDRVDAETLARLARLDPRLLAPIYHRSAQAQADLAVIHSRDALVRSRTMLINTMRGMVKSSGGRLPSCSAESFTSKAASAIPEPLQPALLPILDTIAALTQEIFARDRHIETLCQESYPETCQLRGISGVGPLTALAYVLTLEDPQRFPKSRQVGPALGLVPRRDQSGDHEPQLHITKTGDTYLRRLLVNCAHYILGPFGPDCDLRRWGLQLAERGGKNAKKRAVVGVARKLAVLLHHLWKTGENYDPFFQSGQPAQETVAASADA

SEQ ID NO: 61882 - protein, 394 aa, unidentified
MRFVGIDIGAERHVVAIVGEDGAVLTAATPFQEDAEGYRQLRAVMGDPTDTVVAMEATGHYWQNLFAYLVAEGFAVALLNPLRTHRFAAEDLARTKTDRIDAVLIARFAAQKRPPATPLTEPVLAELRELVRLRDRLVQEAGDRVRQLHRLVDLGFPEFTRHIPNLNTRLATSVLAPYPNAAAFRQVSRTRLAKLRYDGRHSIGPELAQVLLESARQSVGQYQAPAYHVQVRYACEDLELLRQRIHELERDIECRLRDHEIGTLLTTIDGVGPQTAARLIAELGNPGHFRSAAALAAYVGLVPGLKQSGKHRPVHAALVPIGHARLRAALWMPTLVATRFNPWLRAYYERLRARGKHAKVALIAVMRKLLTAVFSVAKSKRPFVPHTKPLEVPA

SEQ ID NO: 61883 - protein, 350 aa, unidentified
MNKSCKSKADGNVFKDMFVGMDVHKNYLQVAVLDEDGKVLNNSRVDNNLTKVNEFFDSLRPGNNTKVVMESSGMWYNIYECLSKRHLDVRLSNPVKTRAIASAKIKTDKLDAVKLADLLRGGYIAECYIPTRATMELRELVRHRAALVRMRTKLKNKIHSIMVMNGTSISYAGTHTFTKGYIEKLKELNDYRINGNLRIIESLNDEINTISKKILLLAQENEMAKLLMTVPGIGYYSALLIVSEVGDINRFPDSYHLCSYAGLIPSTRSSGGITYHGSITKTGSKYLRWIMLECLHAHIRNDKNSNVTQFYQRISKKKGNSKAAVAAASKLIKIVYWIMKEKRTYNNKSK

SEQ ID NO: 61884 - protein, 366 aa, unidentified
MRAKNLKNNSSPEFNFYIGLDVHKKSWSVTIRTLGLEVAHFTQKPNPSQLLGYLKKNFPEGQYFCAYEAGFSGTSLHFALNNLGIQNIVVNAADIPQTNKQKNSKTDLHDSRSIAKYLEKGLLSGIHVLSIEQQEIRALFRCREATVKDTSRAINRLRSFLYFFGIEVPDVFKDKTYISKKFTTWLSTVKLSTSEGNESLKEYINQLHYHRNQVLLVTKQLRKSILERFDESFTCMLSVPGIGPVTAMGILSETGDLNRFKNPDEYASYLGLIPAEHRSGEFTNMPTLQPRCNMHLRPLLVESAWFAIKQCPTILAYYKKHAGKNSKKAIIKVARKIALIAKSVSINKTPYDSYYGILSNEKLCSN

SEQ ID NO: 61885 - protein, 344 aa, unidentified
MTKKCMAGIDLHSNNLFCAIVDLDGKRVFEKRLPCDLETVVRALKPFKKRLEKIAVESTYNWYWLVDGLQDHGYPVVLANPAAMQQYDGIKHADDKSDGFFLAEMLRLNILPTGNICERKVRPVRDLLRRRMGLVHKRTSLILSLKSLHTRMTGRDLSTGSIKALEPEDAKRLFEHPADQLITRLDLQLMEQLGQSIKAIEAMVLAQVKSLPDYQVLQTMPGVGKILGMTITLETVDPKRFASPGDYASYCRCVDSRRFSNGKKKGENNGKCGNKYLAWAFVEAANLAQRHDLGCRRFYDRKKAQVNGIVATKALACKLAKAAWHMMSGNSAYDTARIFPTDKK

SEQ ID NO: 61886 - protein, 412 aa, unidentified
MEVFCGIDWAEDHHDIALVDRDGKLLARRRIGDDAAGLALLLGLLAEHGDSAEDPVPVAIETPLGLLVACLRATGRTVYPINPMAVARYRDRHSVAGRKSDHGDAVVLANVLRTDLHAHRPLPADTELAQAIAVLARAQQDAVWARTAAHNKLRSHLREYYPGFLAVFADARGGITRPEARVILAAAPDPAAAAKLTAAQLRALLRKAGRSRGVDAEATRLRDAFHVPQMRQLPLVEQAMGRQALALIGQLDAACTAAADLEQAVIESFNQHPDAGIITSFPGLGPLTGARVLAETGDDRSRFADAKGLKAYVGAAPITRASGKTRAVLHRRVKNNRLAAAGYLWAFSAISASPGARQHYDKRKKDGDRHAAAQRNLFGRLLGCLHHCLATGQHYNEDTAFPPPARRHQDAA

SEQ ID NO: 61887 - protein, 397 aa, unidentified
MIAVGIDISKAKSTVAVIDSDGTVLASPFTMAHTQPEMEAFVSYLKGLGEPTTILMEYTGHYHYPVLKKLQDEGFPVCIVNPYQMKKYGDVEIHKAKTDKKDALRIAAYALEKSYKLVPYSSMEQKYEDLKFLSRQYSQRITYVAKLKVQLIALLDQTMPGITRILPLNSRNPEKCALLLFIKRFKSFDEIHRIGKARFLASYDILAKKASERSASSKGLSIYELAVDSITTRGEDPYIWLSQNQCVDLLSTTQNAADEIISQMRNIAETIPEYKVLRAMHGVGDRLGPIILAEIGDIRRFHSGKALNSYAGNDAPPYQSGQFESRNRHISKRGSSALRKACYEVMQALKLTKPQDDPVYLFMLKKEQEGKPFNVAKMAGVNKFLRIYYARAMELYK

SEQ ID NO: 61888 - protein, 373 aa, unidentified
MRRGIGIDVHRPFGEVVFWESGRLRHAGRIDMTRTAMEGFGKTLLASDEVVVEATGNSMAVSRVLAPFVARVIIANPLQVKAIAQAHVKTDNIDAGTLASLQAAGYLPQIWTPDAATERKRRLVARRYQLVRHRTRLKNEVHSILHAHLIPKCPHADLFNARGRAWLAAQQLPDDEYAAIDRHVRELDRLAEDLALLDREIAQVAIDDPAANRLMTITGVNLAVAAGIMAAIGDISRFNSPQKLVSYFELNPRVRQSGLGAAHHGRISKIGRSHARAMLVEAAWAAAKAPGPLCFFRADPRPAWPSGRRGGRGSQAHGALLAFADEGRGLPVGAPGTGRQQDPRDATSSWTSATEGQPARTSLCLQHQGAARP

SEQ ID NO: 61889 - protein, 316 aa, unidentified
MPAPSPIAGVDVGKRFLDLGFQPAAKACRVANDPAGIAALIAALRRRGATRVALEPIGPYAWPVTAALVAEGFEVGLADPRQVRAFRAAEGRIAKTDRLDAGLIARFARAMPQRLRPAPAAQALALKALSTRRRQLVELAAMEKTRLRQAFDEGIAEGHRTLIAALEAACREVEARLEALIAADPALARRREILLSIPGIGPRIAGVVIADMPELGALNRKAAASLAGLAPHPDQSGALPGRNALSGGRPCLTTAFYMAGLVAARSNPRFRAAYRALRDAGKPPKVAIVATGRRLVTVANALIREDITFEKSRFAA

SEQ ID NO: 61890 - protein, 343 aa, unidentified
MSTITIGLDLGDRHSRFCELSPQGTVLGEGRLATTRAGLARQFEGRARCRVVCEVGTHSPWVSRLLAAWGHEILVANARQVRLIYAADRKSDRIDAATLARLGRLDPALLRPIRHRSAEAQAALAQLRARDALVRVRTLLINHVRGAVKATGNRLPATSAVAFARMAGPAIPPELQPAVAPLLLTIATVTDHIRTVAHQVEALARTQYPETLQLRQVGGVGLLIALAFVLTVEDPTRFGKSREIGPYLGLCPRQADSGRYEPQLRISKRGDALLRRLLVRGAQYILGPFGPDCTLRRHGLGLAARGGKNGKKRAVIATARRLAVLLHRLWVSGAVYEPNRQAA

SEQ ID NO: 61891 - protein, 388 aa, unidentified
MLQPLDASKSLTAFEQDSTVIAVIEMSQSKWLVAAVVPGIERQPLKKIEANEETLLKVLHRWRAEAGQAGRVIKRVAIAYEAGRDGFWLARWLRARNIEAYVIHPASIAVSREHRRAKTDRLDTELLMRAFLGWLRGERRHCSIVAIPTVAEEDARRPNRERENLVTERTRIVNRMKATLTRFGIRNFKPTLRKAAEKLDNLRTAEAMPLPENTRAELRRHLARLRVVREQIREIEHERLRMLKAAPVTEKGPHAMVRLLARVLSVGIETADMLVNEVLSRHLRDHRAVARYAGLTGSPDESGRRRREKGLARAGNARVRCGMIQLAWRFLRFQKDSALAKWFDARTADGRAGTRKTMIVALARKLLIALWRLVTTGEVPQGVVLRPA

SEQ ID NO: 61892 - protein, 348 aa, unidentified
MDKITAVGLDLAKQIMQVHGIDAAGRVVLRKAVRRERLLALLAQLPRCVVGMEACSGAHHWARELRQLGHEPRIMAAEFVRPFRKSLAAKNDANDAEAICTAVVQPNMRFVSIKSVEQQALLSLHRVRQGLIEERTASINRLRGVLAEFGLVLPQSVAVLQRALPTLLADEERLPALVQRSLQTLLEHLRDLDSRIAGFDRDIVQHARSSASAQRLGALSGVGPLTASAVVATVGNAQDYRNGRQFAAWLGLVPRQYSSGGKRKLGSVTRRGDAYLRALLIQGARSTLQAALRRAPARHDRLSAWVVQLAQRVGYHKTLVAIANKHARIIWALLARDQALDLVRTTMR

SEQ ID NO: 61893 - protein, 362 aa, unidentified
MRPAPNMRVGGQAMEHYVGIDVSLELSSVCVVDVGGKIVAEAKIESHPDAIVNFLRRLGLSIERIGLEAGPLSQWLHAGLTKGGFETVLLETRHVKAALSAMTVKTDRRDARGIAQLLRMGWFRPVHCKSPGSQEVRALLVERKQLLGKLLDVEFSIRGILRGFGLKMGVVTRTGFEGRVRELCAGQAMLEQIAEAMLAARAALRKEYSKLHKAMLALVRRDAICRRLMSAPGVGPLVSITFKTAIDDPTRIRKSKAVGALLGLTPRKYQSGETDVTGGVSCVGDEMARTALYEAANAILSRVTRFSALKRWGMDVAKRRGTKRAKVALARKLGVVLHRMWMEGTSFRWTKEASKAPQVARA

SEQ ID NO: 61894 - protein, 357 aa, unidentified
MTQSNRISFKGQNIYVGIDVHLKSWSVTILSETSVLKRMSQGADPDALHRFLTSHYPEAEYYSVYEAGFCGFWIHDRLTELGIHNIVVNPADVPTMSSEKLRKTDAVDSKKLAVSLRAKQLKGIYTPDREALEIRSLIRLKISITKDMTRQKNRIKSQLRYLGIAMPTAYLEPYSHWSKRFLNWLREVEMSTPSGRHTMDILIMQLEALREQKAEMTRKLRALSHTERFEETLHLLMTIPGIGQATGLALMAEIVDITRFSNAEQLAAYVGMVPMCHSSGEHEGVGDITLRKHAILRSNIIEAAWVAIRKDEAMQLCYLNNCKRMVPSKAIVKVARKLVNRIYFVLKRHQPYVNAVA

SEQ ID NO: 61895 - protein, 363 aa, unidentified
MTMISAERTDTTVEVILGVDTHLDFHVAVAIDHLGRRLGESRVPTTVKGYEELLCWAQDFGPVRCAGVEGTSSYGAGLARHLKAREIEVLEVERPKRRRPSSRRHLKKSDPSDAERAARAVLVGETSGVPKSADGRVEMIRALRAARRSAMKARTQAANQLQGLRVTAPEQLRHRLRTLSTKELVSVAARFRLGDDLHDVPTATKFALRSVARRYEALSGEIAELDSHLDRLVAQLAPELVSLVGIGADHAATLLIAAGDNPQRLRSEASFASLCGAAPIEASSGKVLRHRLNRGGNREANRALYMICLARMRRDRRTQEYVARRTTEGKSKREIIRCLKRYVAREVYRVLVSRVACSSPIGP

SEQ ID NO: 61896 - protein, 437 aa, unidentified
MIPVTFSELVIRNQQRSIAVSKSKSQKSKSVNNETMIVTLDIGKGSHYGYFRAPDGQDVEPFAFYHSYDSFHSFWKKLCRFKRAHGCKQVLVGFESTGPYAEPITHFLKQRPVTLVQINPMHSKRVRELTGNSPNKTDRKDPRVIADVIMLGHALRVVIPQGSSAHLRRLTQARERAIRDRTAILNQLQHLLFVIFPEFLQVIKNISCKTGLYLLGHYPTRQAIAVLGEEKLSTIIKGVSRGKMGQGHARELFQSAQASVGINEGQESIVEEIGHLVDKIGKENDFIDRLECQMRSHLEQVPYSSCLLSLPGVGLITVAGLIGEVGDFRQYRTTAEITKLAGLDLYEVSSGKHQGRRRISKRGRPLMRKLLYFAAINTVKSTGVMHQPYTRMVERGMPKTKALVAISRKLLKVMYALARDQSMYMENFVSHRYQFAA

SEQ ID NO: 61897 - protein, 379 aa, unidentified
MKSVLSIDVANGKSEVLLITEYGEVLIEPYEVKHCLSEFNLLKEKIDNFNLNDLTIFMESTSTYHLPIQRFFTKNNYNVQVINPILGKNNTRNLRKTKTDIEDCYNLADLFFKNTVKIHTKNMNDIYSSMIELSRQEKHLTESLVRSKNRFKQIIANAFPEYIKCFTANDIFGKTSLNFIKEFPHADIIKEKRIDALANNLYKSSKNGCSYNKCLSKAKKIKELANNSYPGIDVDSYEVNNLINIVDVISYNGSKLNDVKQDIVKLARQTPYFNIINSIYGIGETSTAQIIAELGDINRFENIKQLNAFCGLDPTIIQSGKSINYHGPISKRGNRNARKILFITCCSIIRASVLHNMDNEILLYYRKNKLRINILKNVL

SEQ ID NO: 61898 - protein, 336 aa, unidentified
MTIIRVGLDTSKHVFQMHGVDENEQPVLRRQIRRGAVEKFFAKLPSTRIGIEACGASHHWARLLRGLGHEVLLMPPQYIKAYVKRGKNDKIDAEAICEAMSRPTMRFVPVKTAEQQAALTMLGVRDLLVKQRTMLINAIRGHAAEFGVTTAKGPKQIAELLARLASDEDVPGLAREMIGVLASQLNGLDIKLKALEARLMTWHRQDQTSQCLATIPGIGPIGGVSFALKVPDAKAFRSGRRFAAWVGITPREDSTAGRQKLGRISRAGDEDLRRLLVIGATAVIRAAKPGRTAPWLMGLLARKPKKVAAVALANKMARLVWAMMVSGETYRRPAQA

SEQ ID NO: 61899 - protein, 338 aa, unidentified
MVYGAIDLHMRYSQIRIVDEAGAVLRDQRVSTSRERLVKAFEGFGSMRILVETGTESEWVAQTLEAVGHEVVVADPNYAPMYGDLQRRVKTDRRDVAALAEANRRGWYRAAHRTSAAQRSTRQVLRARRQIVQMRSGAIALIRSLVKQDGYRLRSGGAERVPARLAELCLPASLQAIVAPLVHMITTATAEIATLDQQLATRAAADPLVQRLQTVPGVGLIVALTFRAQIDDVGRFRHAGQVSAAIGLVPREDSSGARRHRGHITKAGPRELRSLLVQAAWACWRSKQSATLRAWVEQLAARRGRRIAVVALARRLSRLLYALWRDGTSFDVKKLAAA

SEQ ID NO: 61900 - protein, 310 aa, unidentified
MDHYIGIDVSKATLDIAALPDGESWTVTNDAAGLADLAPRLVALAPALVVLEATGGFEMLAALTLAKAGLPIAVVNPRQVRDFAKAMGRLAKTDALDAGILAEFAQRVRPEPRPLPDEAALLLESLLTRWRQIVDMLTAEKNRLGFARGPVKRDISQHIRWLEKRLADVEGDLQDAVTASPLYQAKADLLRSVPGVGQVTTLTLLATLPELGHLSRHQIAALVGVAPMNRDSGTRRGKRMVWGGRAPVRAVLYMATLVGLKHNPVLRVFYERLRAAGKPFKVAATACMRKLLTILNAMLRQRRRWDPQHA

SEQ ID NO: 61901 - protein, 340 aa, unidentified
MTKITTIGLDLAKNVMQVHGVDKRGKAVLKKQLKRHQVASFFANLPACQVGMEACGSAHHWARKLEELGHRVKLMAPQFVKPYVKTNKNDAADAEAICEAVSRPNMRFVPAKNGEQQAVLSLHRARQGFVKARTAQANQIRGLLAEYGIIIPQGICHIAKRLPGILEDGENELPGVFRQLLQRLGEHLQALDRQVGELEVQIQSWHRDNEASRRLAQIPGIGPITASALVASIGDAKSFDNARQLAAWLGLVPRQHSSGGKQTLQGISKRGDAYLRTLLIHGARSVIRVAERKADHAGSWLANLMGRRHKNVVAVALANKNARVVWALLAHEREYNADYQ

SEQ ID NO: 61902 - protein, 344 aa, unidentified
MKNSTVIGIDLAKNVIQVCKIDKHGELISNKGISPSKLKELLANSIPSIVAMEGCGACHYWARLAQKYGHDARIISPRKVRAFLLGHKTDANDALAVAIASTQFGMVFSQIKEEEQQSLQTLETSRKFLDKELTALNNHIRAYLYEYGITMNKGQRSMRETIVIVLDALDTRLPSCLKNTLTLLWERYQLTVVQLKETEKYRAMLVKQLEPCKRLMALEGIGEVCASMLYASMGDGREFKNGRQASVYIGLTPKQHSSGGKTYMTGIDKKGGDKALRAALYQGALSVISRLPSEPRTVKEAWLLKLIERVGVKRACIALANKTVRTAWALLATGKSYEPVLLSR

SEQ ID NO: 61903 - protein, 433 aa, unidentified
MHTSQPYDLVVGLDRSDTKADLHLINTRTGQRRSETIDTSPEALWEWLLELRQQHPQVRVGLCLEQPAGHLIPFLETYNWITLYPINPITLQKFREAFVTSRAKDDAKDAFYLAELLLTHIDKLKVWAPDDAPTRALQQLVFHRRSVVDERTGLTNRLQALLKQYFPQALVLCGEDLWRPLATGFLLKWPSLQAVQKAKAGTLTQFYHRNGSRSTKLLEQRLALVEKAVPVTVETGLIESFVMRVQLICRELRLVVQTVKEYDARIAKAFAQHADYPIFSSLPGAGPVLGPRLLASMGSDRERFGAATNLQRYTGIAPVTKQSGGTRHVHRRYLCPKYHRQSFHEFAKESILWCRWAAAFYLAQRSDSKSHQTAVRALAFKWQRVIFRCWQTHQPYNDEVYEAALRKSKSHLVPLFGKVELGKSPFKNPVGKK

SEQ ID NO: 61904 - protein, 364 aa, unidentified
MESVRSVGLDVHADSIAIAVAEPGRGEPGTLGTIPNDTAMLLKRLRKLGRVKCCYEAGPTGFGLHRDRTAVGIDCIVVAPSLVPMKAGDRVKTDRRDAVKLARFLRSGHLTEVHVPDAATEGMRDLERARQAAKRAERTARHHLGKFLLRHGRRYPGKTAWTRAHVAWIRVQRFEQEAQQRVLEDYLKSVEDVGERVVRHTQSIVELVESWSLRPLVKALQALRGANIITAKVLGAELGDLARFETAPQLMGYLGLVPSEHSSGETRQQGRITRAGNGHARRILVEAAWAYRFRASKSAAIRARSRGVSDEVQRIAWRVQERLCARYRKLMARGKNKNRIIVAIARELAGFVWAIGHQPKLLEA

SEQ ID NO: 61905 - protein, 415 aa, unidentified
MALKIVYKICCGIDVHKTFVVACIASTNDKGITSYESHRFSTYTSGLKTLLQWLLDRNCKDVCMESTGKYWIPVYNILESDCSIVLAHPKYVKAIRGKKTDKKDAKWIADLFKHDLVAGSFMPPADIRQLRDLMRYRFKLTCFKSSEKNRLQNCLTVSNIQLGNVVSDTFGKSAQAILDKLLENPADTSFDLEPLVYKSLKKKLPELRDAIDGYITPEQAGKLKVIKAHYENLESRKAELEELILALAAPYQQELAILQTAPGISSDFTAIGIISEIGTNMEAFPSAKHLCSWAGLTPTNNESAGKKKSVRVSKAGCYIKPLLVQCANAVVKSTKHPEMRNRYLRLKKRRGHKKAIIAIARMLLTALYHMLKNGENYNAELYRKSDLPPVNREITVEQALMIARNQGYKIKSATA

SEQ ID NO: 61906 - protein, 431 aa, unidentified
MKYKQSKKQNQRITRISESTLVVGADIAKETHVSRAIDFRGIELGKDCVFSNTRTGLEQLVQWMKGLQREHAKTDVIFGIEPTGHYWFTLAEYLGRQGIPLVIVNPHHVHQSKELEDNSPTKNDYKDAKVIADLVRNGKYSEPKLPTSVYADLRILMNLREKIMVNFGQVQHRVQNWLDRFFPEYTQVFKDWEGKASRITLGEFPTPGEIVEMGTEAIVQRWKKDLKRAVGAKRAQHLMETARSSIGLTEGLPAAKIELKTLLEQYEMFARQLEEILTEVECLLSQIPGTKEMLTVPGVAVVTLAGFLAEVGDLSGYEHGQQIIRLAGLNLKENSSGKKKGKSSITKRGRARLRALLFRAVMPMVAKNAEFKALHQYFTKRSQNPLKKKQSIVALCGKLIRVLHTLGTKQIPYDANDVLGPVRQAQIQMAA

SEQ ID NO: 61907 - protein, 382 aa, unidentified
MLYLGIDQHARQITVSLRDEGGDVLQARQVSTQPDKINAFFQQLTRERLRDGESFVAVLEVCGFNDWLIRMLREYHCHKVILIQPDERKKCKTDRRDAAALSELLWANRERLLQGKPVRGLRQVDIACSTDQENRRLTTLRKEAGQARTRLVNKVRHILRRHNLQWQMPTKRLPTKAAIAWLKQLVLPEIDRLEMNHLLADVEQVQQRVKELERVIAQRCGVSAEAGLIASMPGVSYFTATSLACRVGRVERFPRAQSLANYWGLTPGCRNSGEDTQRLGNITKAGSSMARWLLAQVTHKVLRKDARLREWFKRIRRRRGSTIARVAVMRKLATIIWHMLGKRKTYAECRTLAEAGAKEREKQGSVQGVGGRALGRNAGEAI

SEQ ID NO: 61908 - protein, 323 aa, unidentified
MIDKEGINNEAQCFVGFDISKASVDALSLPDGEYKRFENTDCGLQQCLAWVQGKRHCLCVVEASGGYETALAGVLAAAGVPIAVVNPKHVRDFARGMGILAKSDRIDARVLALFAQKRRPPIRALPGETQRSFIDLVDRRRQLVSMRGQEQTRLTQAKGRPRKSIQAHIKWLNGAIDDVDRNLNDTLRGCELWLVDSQLLDSVPGVGKVTICTLLARLPELGHLDRAAIASLVGVAPFVRESGQWRGRRFIWGGRAEVRSGLYMAVISAIRCNPVIKAFYHKLLSAGKAPKVALTACMRKLLTILNCMMRTRTPWNPPLAQNT

SEQ ID NO: 61909 - protein, 401 aa, unidentified
MKYVLVLDVAKGKSMFMLSSNNGEILLEPTEYSHNKSNFELIDSNINKLNIKDNLTVVMEATSIYHKAPERFFKENNYHVIVFNPLICKEITNTIRKTKTDKQDCFKLTNLFWKGSIPDRNYTEDEIYTKLNELSRQYYHLDEGLTRNKNRYKELLHLCFPEFELCFKDGKIYDLTALNFIKEFPHAYIIKEKRVDALAYNMANTNNRHLNYYKRKANTIKEYALNSYPGVNENSNDVNNLKQLSDIIIDLTKQKDAVKNQMIELSKQTKNFECIVSLFGIGELSTALIIAELKDITRFNNIKQINASCGLDPTIVQSGKSINYHGPISKRGNRYSRKILFNCSRNIVTLSAKCDKENPIYVYYQKKKQEGKHYYACLTACSTKLIRIIYALCMNNSTSQN

SEQ ID NO: 61910 - protein, 354 aa, unidentified
MKYYTTTTQFNCGIDLHARQMYVCVMDRDGKKLVHTNIKNNDFAYFLKLVAPYRHDLTVCAECMFGWYWLADACADAGLHFVLAHALYLKAIHGGKNKNDRIDSEKIAHLLRSNLIPPSYVYPAEKRPLRALLRQRLLYVWNRSELLSRLQSHQLAYNRPTHRQTPYNRESWSAQLLTAEPDPVRQLALQNDLALIDHYDTQLATLEKELLKLTKQTSSRDFTLLQTTPGIGDYLGLTILHEIGDIARFPTVKHFLSYCRLVKGTVASAGKIKGLRGAKLGNPYLRWAFGEAAVVAKRDPLVIGPLAQRLEARLNNKFKANTVLAIKLARAVYFMLKQKTVFDPERLVAALSKN

SEQ ID NO: 61911 - protein, 356 aa, unidentified
MPPIAPADVVVGVDTHKPVHAATALSGLGARLGTITVPASAEGYRDLEAWACSFGAVHAFGIEGTGSYGAGLARALAGRGHAVIEVNRPNRQLRHPQGKSDPLDAESAARAVLGGQATARPKSGTSTVEMIRHLKVARDTAVKSRTRAMITLKTLIVNAPAPLREQLDHLSSRMALIHHLAVLRPGALTSTTASTKVALRALARRWLALDAEIKEHDLALDALTDACAPGLKRAHGIATGTAAEMLILVGDNPERIRSEAAFAKLCGTCPVPASSGKTTRHRLNRGGNRQANAALYRVVITRMRSHPPTLAYVAKRLAKGRTKREIVRCLKRYVAREIFGHLCGPKLRAACRPEGA

SEQ ID NO: 61912 - protein, 388 aa, unidentified
MPQLNDLSRSLTSFVQGTTLVAVIELSLSSWLVAGVVPGVARQPLKKLDPDAAGLLRLLHRWRDEAVANGCVIERIVVAYEAGRDGFWLARWLWAHEIEAHVIHSTSVAVSREHRRAKTDRLDTAMLLRVFMGWLRGEPGHCGMVAVPTAEEEDAKRPHRERENLVGERTRIINRMRAALIRLGIRGFKPELRRAAKKLDGLRTPEGLLIPPNTLDEIRRDLARLAIVREQIDAIEQARLTRIEQAPDTGPNAMVRLLASIIGVGIETADMLVQQVLSRNLRDRRAVARYAGLTGSPDESGAKRREKGLAKAGNARVRRGLIQLAWRFLLFQKDSALAQWYRGRTEGAKGARKTTMIVALARKLLIALWRLTTTGEIPDGVRMRPAAA

SEQ ID NO: 61913 - protein, 357 aa, unidentified
MNSIGIDYHKRYSVLSVLNAEGKEQKLCRVEHSHPEHLIQVIANYAPCQVAFEATMNWGWLYDLLEEIPGVTRIVMANPLHVRLIAAAQIKTDKIDARKLATLLRADLLPASHIPDKATRARKEVLRQRTFLVRERTKVRNRIHRLLGRQHGLAMPQVSDLFGKKGMIALRKLVLGEPDATLLSQHLELLELLGRQIRDLEKQIALDGAKDEATQWLSSMPGIGVVLGNVLAAEIDGVTRFDGSEDLVAYAGLIPTTSSSGDKTHHGRLVPGCNKWLRWAFVEAAWVAVGCSPYFGDLYRHHRQRGKKANTAILIVARRMCQIAFCLLTEHRPYEARPVAVNNLPGRSQQGRTERAA

SEQ ID NO: 61914 - protein, 295 aa, unidentified
MIKYSLGIDFSMKLFHACLSVIDMQQQVKVKAFRKFTNNQRGFIELYEWLQKHYKDQDIPLHIVMEATGVYYEQCAMYLYQKGLTVIVVLPNKSKKYMQSKGLKSKNDKIDSKGLAQMGAEQRMESWQPMSDFYYKLRALTRHYESLQNIKTNFKNQLHADNAGMYANKQVTKQLNKLIETVDKQIAEIEKSIEQHIESDEAVKQKINGIIKMKGIALLTVATLLAETNGFLLFKSASQLISYSGYDVIENQSGNHVGKTRISKKGNRHIRRILHMPAFNVVRYQVSPFRQLIGL

SEQ ID NO: 61915 - protein, 415 aa, unidentified
MSQEEIGAWVGIDWADKEHRIVLEEAATGRRVWMAVGQSAEELHEWLTGLRSRYMGRRVAMALEQSRGALFYALNRYEFIDLYPVNPKTLARYRDALRPSGAKDDPDDAALVLELLLRHRDRLRLWKADDARTRQLRLLVEYRRKLVDDRTALLNQLTQLLKESFPQALRWAGGLDTKQAFDFLLRWPTLAAVRQARTQQLRAFYRTHSHSAEHIEKQIDAIRTAIPLIDDPAIVAACSTMILAIAGQLRVLRESIAQFDRSIDELFAHHQDASIFQSFPNAGAVLAPRLAVAFGTDRDRYSAAVEVAQWSGIAPVTRRSGGSMIVCSRWACPKFLKQTFHEYARVSIAASPWARAFYDQQRLRGATHHAAVRALAYRWIRIMFRCWKDRVPYHELTYQQSLRRRGSPLAGRLAA

SEQ ID NO: 61916 - protein, 359 aa, unidentified
MDATTVAVDLAKSVFELAVADAHWKVTERARLTRRQFERWFVNRSVGRVVMEACGSAHHWARCLQGLGIEVRLLPPKYVRAYVKRNKTDAADAAALLEAARCADIQPVRVKSIEQQALQSLHRIRSLWMATRTSRINALRGFCREFGLSISVGSRLGVEQISRILADPASGIPELLRPTMGLLVDEIRLLEARIAQLEVQLAAAARQSPACETLLSVPGVGLLTATAMVAATGGCVSHFKDARHFASWFGLTPKEHSSGSTRHLGRISKRGDRYLRMLLTHGARSVLRAATVAERAQRPLDPLRRWALAVQCRSNHNKATCALANKLARICYATLRDQEPYERTRLTKKIERTAYALAH

SEQ ID NO: 61917 - protein, 342 aa, unidentified
MTEVAVIGIDIGKTSFHLVALDATGAIQWKQKVSRAQLMRHMDALPRCLVGMEACCGAHHLARELTALDHDVRLMAPQFVKPFLKSNKNDYLDAEAIAEAVQRPTMRFVPAKSVEQLDLQALHRVCERLVSRRTAVINQIRAFLLERGIVFRAGRRHMAREMPALFTDERSTLSSRMRMILQQLWDEWRGLEADIGTVTKEIEAIAAADDGCRRLLAIPGVGPLVATALVAAVADGTGFKRGRDLAAWLGLVPRQHSTGGKSTLLGMSKRGNSHLRRLFIHGARSASMHMKREQGLGPWLDQLEMRTHKNVAVVALANKIVRISWAVLARQEQYRPPVPIAA

SEQ ID NO: 61918 - protein, 389 aa, unidentified
MRASQSHYDSSTAIRTDLGAIFVSLELSRATWLVTSLSPGNGEKMSKHAVQGGDVGELLSRFAHLQEKARGRTGHLFPIVTIQEAGLDGFWIHRVLEEHGVESHIVDAASIAASRRGRRAKTDKIDGETLVRALLAFKRGEPRVCAMVRVPSPQEEDRRRVCRERRVLIAERIEHVNRIKGLLFAQGIGGYQPLRKDRRLRLEDLRTGDGRALPSNLKAQLVRELDRLELLLDHITIVERERDALVSAPEGSASATPAAMLCGIKGVGTEIAAILCTEGLSREFNNRRQVAAYAGLAPTPWQSGTVDREQGVSKAGNPRLRTTMIQLAWLWLRNQPSSALSAWFFQRVNSNGGRHKKSTIVALARKLLVALWKYVRFGIVIDGAVMKAA

SEQ ID NO: 61919 - protein, 415 aa, unidentified
MKVVFPTCCGVDVHKTFLVATIITTPADSLQPNYQKKRFSTFNSDLNRFADWLLEHNCLDVCMESTGKYWVPVFNVLEKRGIRVVIANPKWVKAVKGNKDDTKDSKWIGDLFRIGLVKSSFIPDLNIRILREFTRYRYKLVSMKSSEKNRFQNAFTVCNVALDSVVSDMFGKSATAITDYLTSDESFDPEHCVSLLQRSLKKKAEQVLESIEGFSIASEQKARIKIIREHYDFLEKMIAKVDTCVSEMVEKHEGEINLLCTIPGIDRNSAITIISEIGTDMRQFGSSKRLCCWAGLTPGNNESAGKKKSVRISRAGVYLKPALVQVAHAAVKDKASPYYALKYERIAKRRGKKRAIIAIARMILTAVYSMFCTGEVWNPVDLYKVDMPEHLKEQQLAKAIKQATRFLEKQGLSVA

SEQ ID NO: 61920 - protein, 554 aa, unidentified
MQYALIQVLPDVPPGGVCAGIDWASTDHVACVVDMAGRVVDRFTAAHDRAGIAGMIARLRRAGAGEVAIERCDGPLVAALLAAGLTVVVITSRQVKNLRSRFSAAGGKDDRFDSYVLADTLRTDRARLRPLVPDTPATAALRAAVRARKDLVAHRVAAANQLRAHLAVAFPAAIGLFSELDGPLSLAFLARFGSQDAAAGLDEDAMAGWLSTLPARGNPAPPAVLCARLRSAPPGATGGDGGAQAGVTAALAASVASLATQIKALEIQIAGQLAGHASAHIFTSLPRAGTLRAARLLAEIGDCRSRFPDPWPLAALAGVAPVTRRSGSHTAHTFRWAASHQLRDAVCDLRRGLPARQPLGGQHLPRRPGPRQGPPARRAHPGPRLDLRHLALLARPHRLRPRQAHRPPAPPGPAARRPGRTPRPAGGPVTAAIIAALRAHAAGLHPDEAGTEPLIRHGGIVHRDDFAGFIHTGTSISDGTTLMAWIDWDAALSALHHGQIPLCGGEQRILQLAASIAEGFPVCLRDTLPGLDNRNLKLLTTAIRHAAGHPPGHR

SEQ ID NO: 61921 - protein, 388 aa, unidentified
MNITTDQLEAPTAIRTNLGAIFVSLELSRSRWLITSLSPGGGEKMSKHAVRGGDVSRLLERFLQLREKARARTGKVFPLVVIQEAGLDGFWIDRVLQNEGIESHVVDPASIATSRRRRRAKTDKIDGETLVRSLLAYKRGEPRVCSMVKAPTPEEEDQRRLCRERKVLTAERVLHVNRIKGLLFCQGICGYEPLRRDRRDRLEELQTGDGRPLPTHLKAQVERELDRLELLLKQIKTVEGERDALLAAAKTAMPAPAAMLLDIRGIGPEFAAVLWSEGLFRHFDNRRQVAAYAGLAPTPWQSGAVDREQGVSKAGNPRLRTTLIQLAWLWLRNQPHSALTLWFHERVSRNGGRLRKTTIVALARKLLVALWKYVTAGVVIEGATMKAG

SEQ ID NO: 61922 - protein, 453 aa, unidentified
MAQRNRSLSLKPVKSRAALTITHPNAAGIDIGAASHFVAVPPDRDDEPVREFPSFTVDLNALADWLKACGVDTVAMESTGVYWIPLFELLESRGFTVLLVNARHVKNVSGRKSDVLDCQWLQQLMTYGLLSGAFRPAEQVCVLRSLWRQRGMLLKSQGRHVQHMQKALTQMNIQLTNVISDVVGESGQKILRAIVAGERDAYVLAAMKNVRIRASIDEIAKSLQGNWRGEHLFALKQALESFDFIGTQLVACDREIEVQLQSLQVHDGEPAKGKKRGRARNAPKFDLRTQLFKMCGVDLTRIDGIDVTTALAVVSETGADMSRFASVGHFASWLGLCPGTKITGGKVMSGKTRRVANRAAQALRLAAAALRSSQSALGAYFRRLCSRMDKPKAVTAAAHKLARLIYTMLTKGEEYTDQGQDYYEERYRERVLRHLTQRAEKLGMTLIPRAQPA

SEQ ID NO: 61923 - protein, 377 aa, unidentified
MDKDSGEVLLQPSSFSNTKDGFDSLIQKLSSYSKDSILIGMEDTGHYHFALLKYLLEKNFTVALINPKTTDYTRKIQNGITKNDKLDTLTICDVLDTPVRKKQYRITKVNSFDLYEQKQLTRHHHNLKEELNVYTNRLQKCIDIVFPEFNSLFSSKYGIIYMNVLKTFGSAENIASTDIRTIRKCFEIKGRGNRISLTAQQLKDSAKSSIGISSAAEVIKIKHLISQIELINEQLAETDKKIEEFSIQNNSPILSIPGISHFFGTSILAELGEISNYSKPSKIIKAAGVAPYHYESSQYNAQHTAITKKGSPYLRKTLYQIILPVINNNPVFKQYYDLKISQGKGHRCACGHCVRKLLRIIYHLSSTNQQFDDALLR

SEQ ID NO: 61924 - protein, 369 aa, unidentified
MTPEGEVLIPPFSFANNCSGFSALSDKLACLEERPLIGLESTAHYGENLIFYLCNQKYSVALLNPLQTASLRKSAIRKTKTDKVDALLIAKVLMMGDYTLVQPRDLQLLKLRGLCKTRRNLTLLRTRSKIQMNTFVDQIFPELNGFFRSGLHIKTSYELLKRHASPKEIQALHLTYLSNLLKNSSRGRYTKADAVHLRELAAQSIGVDSPALSLQIGQAIAQIELFTVQRDQVDTQIVALMGEMDSVIMSVPGIGPLNGAMILSCIGNINRFPSSAKLLAYAGLDPAVVQSGNFNARSTRMSKRGNSMLRYALINAAHNVVLNNETFRRYYETKINQSKSHYCSLGHTAHKLIRVLFTMLTKDMAFDLP

SEQ ID NO: 61925 - protein, 433 aa, unidentified
MEEVTDEPLYRDRVCGIDIGKAGLVATIRVPSDRDPARRAQETRSFGTTKREVLALAGWLRSWQVPAVVMEAAGDYWKGPFYRLEAEGFECVLADARQVKNLPGRPKRDPADSRWLAACFERGAVTACFVATPEFRVIRLHTRYRRDLTAERTRDKQRAEKLLESAAIKLSCVVTDLHGVTGRDIMEHLIAGQRDPRALAQLARARARRKIAQLEEALEGAEFFTDDHAALLKTMLARIDRVNEEIGRLTEVIERLLAPYEEQLQQAESMPGWARRAAQDAVAETGVDMSRFRTGGHLVSWGSRAPLDHQSGKRKGQARAKKGNRYLGGLLGETAVAAGRTQTREGARYRRLARKRGKAKACVAVGNTQLKVYHKLLSNPGMRYQDLGPDYYERRRDIRRQIAHHVGKLGDLGFEVTLCRIPGPEPDGTSQAA

SEQ ID NO: 61926 - protein, 419 aa, unidentified
MARIHSIAQDAVLVAIDISKKRNDVLIQMPGSPRRRRLVVLNQRAEHDRFIQRLKAFDRPVVTGFEATGNYHRALAWRLVDAGIKTRLISSMALARQREAIHNGWDKNDPKDAQVILHMLATGLSQVYLDPLVAGLADIQELSKTHEAVSRARTQTIHRILTHYLPLYFPEIEKFLGSSRRDWFFALLETFPPPASITALSPEAFSAAAWDIVGKKVSKARLIVDIYETAKESIGLPVPLDSRAIAMFRMVLAEARSLNRQRNTIEAEAEALLGGTPDFEALKQIPGIGPIIALTILAEAGDLRRFGHHRQFLKFCGLDLSTHQSGTFRGQTKLSKYGNARLRRALWMAGLVAIRQKENNFRDKYTRYIARDPDNPDLRRKALTAIAAKMARTAHAIIKSGKAYRPFYEGAVPGGRISL

SEQ ID NO: 61927 - protein, 348 aa, unidentified
MQVYVGIDVHKAKWVVSIATETFFYKTISVEPKAEALTSYLEHHFKSCTIHCTYEAGFSGFGLQRALPHEGYSCLVVNASDVAMAQKDIVQKSDRSDSRNLCLQLRSGTLKGIYVPSQQQEQLRSLFRQRNTVVKLLREPKVLIRAQLAYYGISLPAHYDNTIWSKQKLVWIKERAWNYQTGKESLDSKLRHYAFAYQELLHLSNTLRAYVRKTYKKDYYLLRSVPGIGPLTAIALLSEVGDLRRFSSANHLCSYVGLVPSIYSSSDTVINRGLTPRSKTLLRSYLVEAAWQAVRTDMELQGYYLLHKGKPANKRIVKVARKLLLRARAVVMREVPYQKDIVQTEAAL

SEQ ID NO: 61928 - protein, 430 aa, unidentified
MKSNTQNAKIEAITEKTLVLGIDVGSEMHYARAFDYRGIEYSKKPFKFSNTEAGFVTFKEWILDLKERHEKDKVIPGMEPTGHYWFNLGKFLQDNEMKPVLVNPHHVKKSKELDDNNPTKNDRKDPKVIAGLVREGRYMIPYLPDGVYADLRTASNIRFQLQAELTRIQNRISRWFNIYFPEYKTVYGKPDAKSGMLILKAAPLPEDILTLGIDGVNQIWRDAKLRAVGKARAKTLIEAAEHSVGSKEGAVSARMEIRMLLEDYESRNTRLQEVMVLIEELVRKIPMAEKLLEIKGVGIRTVSGFLAEVGDISRFNNPKELQKLAGLALVENSSGKHKGETTISRRGRKRLRYLLFEVAMSLVSKNQEFRELHNYYITRRLNPLKKMQSLMAIAAKLIRVFYAMLTKGVDYDPKKMVSDIKRPAVYLQVA

SEQ ID NO: 61929 - protein, 370 aa, unidentified
MLDTTTFVGLDVHARSIKAVSLDVMTGEVRAATFGYDAGAVAEWVRSVDPEARCVYESGVTGFDLQKRLSGLGVDCVVGAVSKMIKPSADRRRKNDRNDAEFLARMLSVGNVVEVWVPDDECEAARDLTRALDDARDDLSRSKQRLSKFLLRHGLVFDERTPTGRRKGNWTRAHWSWIESIRFAEGADNDVLAYYVDAVRRAAEDKARLEGLVEAEARKPRWRRRVDSLRCLKGVDTATAADLVFEAGEFSRFRNARSFAAWVGLTPSEHSSGESDRRGAITKAGNKHLRKTLVEAAWHYLTCSGRPKDLAKGQAPDRGARRHAAKGVRRLVERREALLARGVHGNKANVATARELACWVWAVGLMAEEA

SEQ ID NO: 61930 - protein, 410 aa, unidentified
MSMLEVALDPATVIVAVDPGKVMNRVWVSNGAGLLTKPVSLPVSREGIGRLEQLLAAQAADAPVIAVEATGSLHRSWVTELERRHPGSVRMFAPSETKAARMQLGSGRFKTDDRDCAALTYMARQGHGRLYGEESAVDALRAAVRHRRGLVVDRKVAQQRLHDQLNALCPGLSAPAGHGRSLPVASPTGLAVLACVAAFAGRPPRVRSLITRAPGRMTQATAQYWLRRWQGCLPPPADAEQRARRLARDLHRYKTLQSDIAELDEQITRLLATTDGQVLTSLPGVAIIRAAAFAAHSLPIARFPDAEHLYSATGLAPALYQSATLHRRGRISRQGLAEHRDALMGMAWGLSISSPSFAQRKAELCVRGMAPIQARVALARNVCRLAYRLLQTQQPYDEQRYRRGRLSRGR

SEQ ID NO: 61931 - protein, 353 aa, unidentified
MYSVGIDLHKETAWYCVLDAQGRRVSHGRLTASPGCFKAFFKSVPRPFKVAVEATYNWYYVVDIAEEYAEEVYLADSYQVKAFAKKHKKNDKIDAGLIAWLLQRGDLPTAAIPDKETRKQREVLRYRMKVVSDKTRNIARLKALLDKLGLEGTGNLNTITRREEIEQMEIPVPYAEIVKRYLVRIEQLCDEVRLVDKAIIQLASDDQDAMNIRSVHGFDYFSALLIKTEIFDVSRFRSFPRLCAYSGLAPRVHASGGHCYHGPLNTNRRRYLQWILLENSWHTMRKIPRLQRKYETIKKRKGSNTAKVAVARDVLKIIYHVLKEKRPFYPELTVPNDKAAHSQPAGAPALVGV

SEQ ID NO: 61932 - protein, 387 aa, unidentified
MSQTIAAPIPAAVDYERTLVLAIEVSNKSWVLAAQVPGLPHTKAKRTIDPEAEALLAAITGYRARAAATGRCIERVIAVYEAGWSGFWLARWLMRHGVEVHIVQPSSVPVDRRMRRAKSDGIDAELLLRTLLAWLRGEPRVCSMVPVPDEADEDARRCVRERTELISERIGLTNRIGAVLATLGVSNYNPLLRNRCRRLAELRTGLGEPLPANAHAKIKRLLARLELVLMQIAELERERDAVVETEAPDKASKMIQQLTGLRGIGVQSATVLVREAFVRRFANGKALGSYAGLASSPYSSGGTDREQGIGKAGNRRVRTVMVELAWLWTRYQPDAAQVCWFRERVGSTGPRVRKIMVVALARKLLIALWRFVIDGVVPEGAVLKPAV

SEQ ID NO: 61933 - protein, 355 aa, unidentified
MDELKYIGMDVHSATTSIAVRDGQGRLVMEATVATEAAALSDFLRGLRGRLWLTFEEGNWAAWLTQVLTPQVEKLIVCNPRRNASLKQGNKSDPLDARQLAHLLQANLLRPVYHEAAGPQTLQELARAYTTCVGDTTRVMNRIKARYRARGILCSGSRVYRPRFRQPWFEQLTDPGARQRVELLYLQLDLLQELRKKARRALLTEARRYPACSLLRTVPGVGPVRAALLLALISTPFRFRTKRQLWMYAGLGLITRDSGQYQTVRGQIIRRDRPACVRGLNPEHNRELKEIFKGAALTATRSSSPLHAFYQQRLDQGMRPHLARLTLARKIATLTWILWKKGERFNAHDLTSQAE

SEQ ID NO: 61934 - protein, 368 aa, unidentified
MSETIVAYRSFVGVDLHKDTVTLAAVDPRGESLARLRIHTKSVGKIEAWLRALPRPSALAVEAVGFVEWFIERFRECVDRIDIADATELANRRGKRRKTDPHDAADVARRLARGECPLGYIADDDLMQLRKLGRHWRQLGSILARAKHSMRSILLAANLRGPKLDGAGAQRWLLAHGHRLKPVQRQAFRNFLDVIQLVELQRAPLRHVILKATRHERFAPLVELLQTVPGIGPIWACIIVAEIGPFDRFPNADALEFWAGLTADLKESAGRTQSGPITKAGSRTLRWALCQAAVTLCHCDARQEAIRQRLIRRNGGIKAKANVAMGRRLLGILYAMVRDNKPYEAGPRRNRTSAANKARARKKRKEAA

SEQ ID NO: 61935 - protein, 350 aa, unidentified
MKIVGCDFHPSYQQVAVFDTLTGEVEERKLTHADGQAEQFYRKLEAPALIGMESVGNAQWFVRLVESLGHQLWIGDAAKIRASYVRKQKTDKRDAGHILKLLLENRFPRIWVPNQQQRDLRQLLLHRHKLVGVRTRLKTELQHLALNLGVQKKRQLWSVRGRAELEKLPLEGWTKRRRQDLLALLKVVEPQIEELDKAAAEAAAAHPQARLLMSQPGVGPLTALAFLLTIGEVARFARSKQLASYLGLIPSEHSSGSKRRLGSISKQGNVFLRTLLVEAAQSAVRHDPLFRKEYKHRCHHKPKGVAKVAAARKLAVRLYWMLKTSKPYPEVLHIEGSPRHPVAAKASPSC

SEQ ID NO: 61936 - protein, 271 aa, unidentified
MTRFVGLDVSQKLTAICIVDETGRRLWRGQCATDPGQIERLVRGHTGEDASIGVETGPMTPWLVHELRARELNVICLDARHASAALKMQMNKTDQNDAEGLAQIMRTGWYRPVHVKSLDAHRARALLGARAQLVGMTTRLSNHIRGMLKTFGMLPGAMRGLPFDRRVEELLVDRDDLTPIVGPMLAAWRQLREQIAAFDKAVRALAKADPTCRLLMSVPGIGVLSVLAYVSTIEDPARFARSRSVGAHMGLTPRQYQSGEVDRSGKDIQVR

SEQ ID NO: 61937 - protein, 355 aa, unidentified
MNNCTIIGIDLGDKKHAVVGLDDKANVVLKRWIPNTKADLEALFRRNRRAVFGMETGTHCRWISALCGQCGCEVYVGNAHHLRSIFGNSHKNDMRDAEEIARLLHGDKRHFHPVQLRDAEHQNLVQLVKMREVVVSQRTKSANAIRGMAKANGIRLPDSDADSLHKKLAAVVDTLPESLQTLLGPQVGLLEKLCAAIEEYDRAIRDYRNAHFRKECDLLETIPGVGPVNAAAFVAFTGDVTRFRHARDVGPYYGLTAGRDQSSSKDEPKKITKEGNGFVRHLLVNAANLIMQGRGRNTELRQFGLRVWGNRGKVAKRKAKVALARKLAVTMAAMLRSGAPYNGIMEENENGQSNA

SEQ ID NO: 61938 - protein, 443 aa, unidentified
MKVLHERVAGIDVHKDMVKVAIRSPGDKPWTRKTEVFEFRTFYGVLQEMARFLRERGVTHVAMEASGVYTEPVYHALCEQDFTEVLVVNPQHVKALKGHKTDARDCRRIAELLECGLLRGSYVPSAEQKEMRDLTRYRKKTVQARTSEIQRLQKALESAGIKLDSVASDITGKSATAMIEALINGERRTQVMADLALRSLRQPGKQADLNMALAGRFTEHHAMLCRMHRDQIKLADHAIARLDKQIAAMAARWQRELDLLLTIPGIGLVTAAVWLAEIGPEPHRWFDGHDKLASWVTLCPGNHISARKRKHGKTGDAGTYIKPALIEAAWGAIRVKGRLQARYRRLVRRFGGDKNPGAKKKAITAIAHTLLKIAYQVLKSGQAYQEPGADFYTRRESPAQQQDWLIRRLQNLNPGCTITITPPPGAPPPAPPGAPPPGRAQAA

SEQ ID NO: 61939 - protein, 346 aa, unidentified
MSIVGGFDVHRKQLTFDYLDTDTGEVKCGQIVPADRQHLADWLAARFTGRADVAFAVEACTGWRYVAEELARAQVRAVLAEPAETAAARGPKRRAKTDRADARLLRELLDGERVPACWIPPGQVLEYRALLELYHDLRREHTAWIQRIHAVCFHQGTEHLGTGGVSTAEGRTRLAQIAAGQLSPAGQIQVATSVDMLESLEAQLTALRRRLLGTATHLRGAKALTEGIYGVGPITGLALTSWLGGADRFTSSRQAVRFTGLDVTVYSSAGKRSPGHLSRQGPPVLRWCVYEAGKTHARTSAPDHAYYAKVKDRLDGKRAALSEARKIVRVACHILTDLGDEAFTTV

SEQ ID NO: 61940 - protein, 344 aa, unidentified
MITIGIDPHKSSHTAVALDADGHSLGELRLPATRTTAERLLRWAGRWPDRTWAIEGASGLGHLLAQRLVAAGEIVLDVPATLAARARLLDRGHGRKTDALDATCVARVAMSQAGLRRVCPEDHTAVLRLLSDRRDELTGERRRVVNRLHRLLRDLRPGGAPTELSTAAAARLLGRIRPTTAVDLERKLMARTLVAELRRIDRALAENRTRCASAVAASGTTLTAIFGISDVLAAKILGHVGDVDRFPSDDSFASYSGTAPIEVSSGEVTRHRLSRNGNRALNNALHLAARVQTMHPGLGRDHYERKLAEHKSSREALRSLKRQLAKVVYRRLVADHVHRPALAS

SEQ ID NO: 61941 - protein, 340 aa, unidentified
MNHYAGIDVSLEASSVCVIDGSGKIVREAKVASEPEALIAWFGSLGLRLTRIGLEAGPLSQWLYAALRDAGLAVELLETRHVRNAFKIMPVKTDRKDAHGIAELMRLGWFRPVHCKSMEAQETRAMLTARKLVQKMLHEVEMSLRGVLRGFGLKVGKTTPVRFEARIKELVAGHQNLEVIAHSLLAARATLRREFNGFEKRLRAMARVDPRARLLMSTPAVGTIVALTYASAIDDPSRFKSSKVVGAHFGLTPTRYQSGETDRTGRISKIGDGAVRAALYESAHIILTKPIKGCTGLKSWAMRIAKRAGMNKAKVALARKLAVIMHRMLADGTTFTTQPA

SEQ ID NO: 61942 - protein, 344 aa, unidentified
MDNHTQYSGFAGVDLAKKVMQIHFVTGDGEITDKQVKRAEFLDFFRNRTKCLIGMEACGASQDWARKLEAMGHEVHLMSPKAVKPFVSGQKNDYNDAIGIYKAMFNGVRRVPVKSTEIRDLQTLRRIRSQVTKDRVKEINHVRGLLAEYGIVMGKSITAFNKGISSALESLKERGDVSPLVAEELQTTVESIKTKIERQKRLDREIEQLARGCKNYENFLKTPGVGPFTAAMLCVLLCDPAIFANGRQFAAYIGLAPRSRGSGGKNFIIGIPSKFNCDSESRAVFVECAQALARYKNKSPWVDGILRRKPKKVAVIAIANKLARQVWAMANKGESFKQMTILTA

SEQ ID NO: 61943 - protein, 338 aa, unidentified
MGLYCGIDLHSTNNCLGIYDQEDRAVFYKRLPNELEVVSKSLEPYKAELVGIAVESTYNWYWLVDGLMEQGYRVVLANPAGNEQYNGLKYTDDRDDSRWLARMMRLKILATGYIYPKDERPIRDLLRKRMRLVQHRTAHMVSVVNTITRNTGRTLSWSKLEQMSEEQISELLGDELKGMAPRASLEVINSLDQEIKKIEKTAKQRARLRSDFELIKTVWGVGTILGLTIMYETGEIGRFPQVGDYCSYARCVGSVRLSNGKKKGENNRKNGNRYLSWAYVEAANYAARFYPPAQRFIQRKRAKGNHALAVKALGHKLARASYYVMRDQVEFDPKRLFG

SEQ ID NO: 61944 - protein, 425 aa, unidentified
MEVFKTRVAGVDVHKDILAITVVTGEPDVVPQVFQFSCGTFTEDLLKAGLKLKEMNVVDVAMESTGVYWKPIYNVWAPMGINITLGQAAHMKNAPGRKTDMNDSRWIAELHRFGLIKPSYIPEDVFQRMRLLSRHRTNLVDDLARVKNRVQRILEDGNIKFGSIVSNVFGKSGLQVLDQIADGVTDAGTLASFVTTKIKRKEESRKALTNCLTTEHCFVIKRLMTQFYEIEAHMREVENQLHDKVAPYRHLVDKLKEIPGIDEILAIGVLAEATDKMEKFDDERKFAAWAGVAAGNNESAGKKKRSKRRQGNPHLALILIQIAQNAKLKRGSFYRSKYNKLRYRLGSANKAKVAIANRIARGIYKILAGDKYKEIGYQRGDPHEQKVKQHIAALKALGVNILHHNHQLIVSQTRLTVDETGVIRD

SEQ ID NO: 61945 - protein, 339 aa, unidentified
MQISIIGLDIAKQVFQIHAADAEGRRISQVRLRRAQVLDYFRELPPCLIGMEACATAHHWARELIALGHEVKLMPPAYVKPYVKRNKTDAADAEAIAEAVTRPTMRFVAVKSVEQQSKLMLHRVRELLVRQRTMLATALRAHLAEFGIVAPQGIHRVEKLAAEVRNSAVPPLAQEVLSILVDELASIWRRLDAIDERLVALHRTDQVSRRLALILGVGPITAMAIASTVPDPSVFRSGREFAAWLGLTPKSHSSGGKDRLGRILKRGDRYIRHLLYVGAGNAIRFSKARAATGEAWIRGLQERRPPKVVIIALANKMARIAWALMVRGDSFRSPAVATA

SEQ ID NO: 61946 - protein, 359 aa, unidentified
MTSMNPDRRRGRVVIGVDTHKYIHIAVALDDFGGVLGTEKFTADSAGYQELIDWSAQFGHLLTFAIEGTGSYGAGLTAAVRRRDIGVVEVMRTDRRDRRLRGKSDTLDAENAARAVFAGNANAVPKTADGVVEMIRTIKVAKDVAVKARTSAMISLKTILVNAPAELREQLQPLSKMALIHRCAGLRPGTVTTVEGAAKHTLRSIARRWEQLNDEIIAHQKLLAELTTQLAPQLTAAFGVGADTAAEMLIVAGDNPSRVRSEPAWARLCGVAPIPASSGMTTRHRLNRGGHRQANAALYRTVIVRMQHHEPTKAYLTRRIAEGKTKAEIIRCLKRFLARELWALMRPLREDAPAQKAVA

SEQ ID NO: 61947 - protein, 358 aa, unidentified
MRIIGVDLHTRQQTIAMLDTETGEVTEKTLKHEGDTVRKFYEALPGPVQVGIEATGSMHWFLELMEELGIACRVGHPAEIRKAESRKQKHDRRDAALQLKLQIEDRFPSIWMPSTELRDLRTLLRHRHQWVRMRTRVQNALQALAVSRGLRRGKTLWSQAGQQAIESLPLPPQAAYRRTELQGLYRLLHEKIEELDHRVREQAVQRPGAQRLMTHPGVGPVTALATDVFLGDPARFEDSKTLASYVGMIPGEYSSAGKQRFGKLSKQGNPLLRFLWCEAAIHAVRRDPELQRFYRRKLQQKGLGKARVAVARKLGIRLWIMLRDQIDYQEFCRRGQMRRNSGGARAGMPEVGHSPAAQ

SEQ ID NO: 61948 - protein, 350 aa, unidentified
MIIIGCDYHPAFQQIALVDTETGDCVERRLQHREEAENFYRDLAAQGMKVRVGMEASGHARWFERLVAELQIELWIGDAAEIRTKRVRKQKTDRQDAQLILRLLLEDRFPRIWVPSWENRDLRQLLWHRHRLVQARTRIMNQLQAVALNEGLRCKKRLWREAGREQLEAFRLAPWASRRRRDLLELLDRLSPTIAELTQAIEREVEKCPEAQRLRTHPGVGSLTALAFVLIIGRAERFHCGKQIASYLGLVPLEESSGDRRRLGHITKQGNSLLRFLLVEAAQVTVRSLPEWRSKYFHLAMRRGRKIAKVAMARKLAVQMYWMLRKEWDYEQVKKFGSHAGQPGNRHGVQ

SEQ ID NO: 61949 - protein, 416 aa, unidentified
METYKIVGIDVHKKMLAVVVTDAAAEGECRLERRKFGIEASELRALTEWLTQQGVREVVMESTAQYWKPVWRQLEPQFKLYLAQAQSNRAPRGRKGDFRDAERLVRRHIAGELILSFVPDPEQRMWRTLTRTKYQLTGDRVRLNNQLESLLGDARIKLGTCVSDLLGVSSRRILKALAEGETDATKLAAMKDKALRATPEQLQECLCAAATLSPLHRQILQLFLERLELIEQQIDKLDHSIAEALKDYNAAVVRLAEVPGYGADSAQQVLAEVGPKAATFASAAQLASWVGACPGREESAGVSKTNRSPKGNRQMRRILTQVAQAAVKTKGSIFQILFHRWLPRIGFKRALWAVVHRLCRLTWKILHQGVRYEERGLVRDPKLDKERKKKLIRQLRTLGYDVQLTPLTTAPVPATL

SEQ ID NO: 61950 - protein, 339 aa, unidentified
MKKVFIGIDFSKLKFDVAIYSVETKAIVATEVFENEQSGFEMFLKWIKENIRNKKSQILFCGEHTGYYSGNLSVFLYESGYDMWLISGLEMKLTQGIKRNKTDRVDACKIAEHAYRYQDKVVLFQPVSKELEEIRELLSYRERLVETRKILTTSAKEMKRVKDNASCDYIYQDSIEYIKKLNASVRDCEKRIETLMKQDIVLKTNYELVSSVVGIGLVNAALIMVTTANFTLFDNPRKFGCYCGVVPFEHSSGSSVRGKTRVSKMANRRIKTTLTLAARNSVRFDPELKEYYERKLSEGKNSWLVLNNVKNKLIHRIFAVVRDGQMYEKQYVHPLKQAA

SEQ ID NO: 61951 - protein, 370 aa, unidentified
MSESSTIFVGLDQHKESITVAYVGADRSLEPICLGPIGPRASDVDAMVRKLQSKGKKLVFAYEAGPCGYGLYRHLARKGHTCLVVAPAKIPRKPGDRVKNDKRDATNLCRLLRSNDLKSVYVPQVADEAIRDLCRAREDAVSDLKSAKHRIKSFLLRHDIRFNGKADWKTPHLRWLGEVKCATAAQQVVFQEYVRAMAQGFERVGRLEIELTQHVKSWRLSPVVEALQALRGVRFTVAVTAIAELGDLTRFEKPRQLMAFLGLHPSEHSTGERRRLGGITKTGNTHARRALVEGAWAYRFPARVSKQIQARQENLPEAVRDIAWRAQVRLCKRFQKMIARGKNANIVVTAIARERAAFMWAIAKQVPVAA

SEQ ID NO: 61952 - protein, 349 aa, unidentified
MEEITTIGVDIAKNVFQLHGINAEGQVVLRKALRRGQMQPFFEALSPCLIGMEACATAHHWARTLIASGHDVRLIPPNYIKPYLRRQKNDAADAAAICEAVTRPSMRFVPVKTEDQQATLMLHSARELLISQRTALINALRGHFAELGIVAPQGARNVRQLIAILEDERYSPQAVRTALAPLATVLIEIEGQITKLDKALLAAHRNNDVSIRLATVPGIGPVIATCLSASVSEPKLFEGGREFAAWLGLVPRQHSTGGKPRLGSISKMGNRHLRKLLVVGAYAALYRMKKGTADTPPANWARGLLSKKPFKLVAVALANKIARIAWAIMARNVNFQSEHVSRCSDLIPA

SEQ ID NO: 61953 - protein, 365 aa, unidentified
MANFSNWIGIDDHADKWTIAHYRGTACEPEREWELEPGESGYRKLIGWLKEIKGPEQIVYEAGPCGYELQRRLTKSGFDCRVAAPSLTPRKPGDRVKTNRRDARKLARMLRAGELTLIAIPTERQESVRELVRAREAANKDLLSARHQLSKLLLRHGHRYREGKAWTQRFWAWVGGIELSEEYSREVMRQQVLVIEQREQLVAEYGRIIEKIASESEYTPQVQALSVLRGIDWLTAMTILVELGDLRRFGTAPQLMAAIGLVPSEFSTGDKTRRGSITKTGNAHVRRVVIEAAWHYQRYTRPGPRIRRRRAGQPAEQLDIATRCDQRLHRRFIRLSSRGKRSTVAAVAVARELAGFIWAIGQIAY

SEQ ID NO: 61954 - protein, 479 aa, unidentified
MTPHKDFCLDSAPAVPTPLLPPSPVLSDALQIYHPHAAGIDIGEAEHWVAVPPGCDPQPVRRFGTFTADPDALADWLLDCGVTTVAMESTGVYWIPLFALLEARGLQVLLIDPRQAKRVPGRPKTDRLDCKWLQRLHTYGLLAAAFRPDDQVCVLRSYLRHRQMLLTYGAHHIQHMHKALQQMNLKLSQVVSDITGATGMAILKAIIAGERDPLTLAKLRHPHCHHSEDEIAKALQGTWRAEHLFALQQAVALYQFYHQQLTVCDQRIQTHLGTFADKSEGQPLPPKAHRHKKVNEPRFDARTPLYRLAGVDLTTIEGIEEGTALVILAEIGTDMSRWPSVKHFCSWLGLSPQHTISGGRVLSRRVRPGAHRVAVALRLAARTVQQARTALGAFYRRMRSRLGAPKAITATAHKLARLVYSLLKHGSAYVQQGREAYESQYRERQVKAMARQAKALGYTLVALGTPEVLSLDAVAAPTP

SEQ ID NO: 61955 - protein, 317 aa, unidentified
MYIGIDVSKERLDVAVRGRDITFSVSRDEVGLTELVTRLAAIGEQITLIVLEATGGFERDVATTLLVAKYPVAVVNPKQVRDFARATGKQAKTDAIDAAVLAHFAEAIKPAVQELPDELTLLVEALVTRRSQIVQMIAAEKNRRGAMLVQRSPNKVVSSNIDKHIAWLEKQLSDIDGEIDDTIRESPVWREKEDLLRTIPGVGRVTASTLLAFLPELGTLDRKQIAALVGVAPFNRDSGRSRGRRAIWGGRAAVRSVLYMAAVAAIRCNVLFKAFYARLRAGGKPAKVAITATMRKLLVALNAIARDGVPWKPIANP

SEQ ID NO: 61956 - protein, 314 aa, unidentified
MGQKKYSGIDVSKEWLDVAFYEDNEKIRIKNESKEIQAFVKKLSTMGLKKIVLEATAGLEKEFAKEAIELDLPVCIMNPRQVRDFAKATGKLAKTDCIDAKVLAHFGKAVNPKVTNLKSENQEELSDLLRRREQLIGMRSAEKKRLKNCPSRMQESLKKHIDWLNSEIEDIEHKMNQFVKQKEDLKKIDKQLQSVKGVGPILSRVLIAEVPELGKLNRKQIASLIGLAPFNCDSGRYKGRKRIWGGRANVRAVLYMAIVTAKRFNPIIRTFFERLEKQGKQYKVIATACMRKLLVILNAMVKQGTYWQENIKTV

SEQ ID NO: 61957 - protein, 419 aa, unidentified
MSFKILKFNCCGLDVHKTWIYACIGITDSNNRTEYKQARFSSFTKGLNELCDWLAKYNCKDVCMESTGKYWIPVFNILEQHELWVTLSHPKYTKPMKGNKTDRKDAKWICDLYMCGMVKPSFIPPADIRELRDLVRYRFKLTCMITGEKNRAQNCLTVSNLKLDDVFSDVFGKSSRSITEQILQHPGEKFDVSPFVDGRCKTPIEEIQAAVDGAISKEQAVKLRQCLDHIDELQKHISEVEQETLRLSDKYEAALNLIRTVPGFDKNPMTAIQVLSEIGGDMSVFPTAKHLVSWAGCCPRNDKSDRKIKSTRISCAGSYFKPVLVQVANALIKSKKHPEFTTRYKRIKARRGHKKAIIAICRMILTAIWHILSDLKPYTPDGFLESRPVGKEKILTTSQALNLLKQRGYLIKDDALPAS

SEQ ID NO: 61958 - protein, 401 aa, unidentified
MKVFVGIDMSSESHCIHIMDENENKIKSFEISNDWDGFEELNNNLKQYDVVYIGLEKGHGLIVEYLQGKNYLLYSINPKIIKRFKETRWVSGPKDDSKDSESIASFLRLNYERLRPLYFDSPEVELAIDLCEVYNRLTENKVELINRLRYVLESYFPLYLILFSSLDSLNLWKMIQKYPRWGILKQASQEEIVTLLNQNNYTNRKNIQKLLDKVNNYKHCVQPETERALSIEARLIVEELLILHNSFNEIEKEMAQILDNHKLGKVFLSIPGCGITTATHILALFGNNPGKFKTASEAQSYFGTAPYLFQSGKYSKVMMRRACNKMGRRTFYNLAFSCLRFCNWARAYYDLQRSRGKKHSVALRALSNKWVKIVFAMWKSGKAYDPHEIKFEQELVQTKIA

SEQ ID NO: 61959 - protein, 348 aa, unidentified
MSQSNQYVGLDVSLKETSICVIDDADKIVWRGQVDSTPEAIAAAVKQYAPHAVRIGLESGQLSSWLFHELKEAGLPVICVDARHAKAALSLKVNKTDANDALGLAQIMRVGWYREVTVKGLDCQAVRALLVARAQIVSQITTLKNCVRGILKTFGRVLPKGLRSQFPARVRAAIDGHPILGAIIEPTLLVLEATRAQLLVYDKAVIQRARSDDTARQLMSAPGVGTVVALAYMTGVEDPARFKRSSSVAAYFGMTPRRYQSGEVDHAGRISKCGDGMVRGLLFEAAKVLLSRSARPSALKTWGEALGKRIGAKKATMAVARKLAVILHRMWTTGTTFQWNAEAASPVA

SEQ ID NO: 61960 - protein, 430 aa, unidentified
MEVIYPKACGVDVHKSFIVAVICDSTSVKPQYLRKRFSTFNNSLINFRNWLLANDCHNVCMESTGKYYVPVYNALEGHISNVVVANPKWVACIKGEKDDNKDAKWIADLFKLGIVRSSFIPEKDIRILRELTRYLYKLTNMRTSEKNRFTNALTVGNCKLDMVFSDIFGKTSSAIINTILSQNEYNDKDILKNIDKHCKSSNEDILNSISGISWEDTQKQRMKVIQEHIDYLDKAIKAVREIIDSIIAPYESAITLLCSIPGIDRKSAITIISEIGTDMSQFSSHYRLASWAGLAPGCNESAGKKKSVKISRAGVYLKPALVEIAHCAVKDKNNPYYANKFNVLSKRRGKKRAYIAIARKILVAIYHMLSTGEFFNPSDASKVETSDKDKIKFTKNNFMQSTKQLLSLGLTVDELQTFITSKISDLTPVV

SEQ ID NO: 61961 - protein, 421 aa, unidentified
MPNIEIGVDSMVKENFIYVGIDLHKETHTAVMIDCYNQKLGEITFPNRPAAFPKLVTKVKKCNTDGKEVVYGLENAYGYGRALAVWLIDKGYLVKDVNTAISHRQAKHRGAMYRKSDSDDAKAIALATLNMLDKLPDACPNDAYWSLGQLVHRRDNIMKQRTRLVNQLHEQLCIAYPSYKQFFNDISRPTALYFWEHYPSRKYLKGKSVEDLRAELVPVSHNKCSTKTCEKILDAVASDKVKNNAYQDARDMVTLSIVSDLQHYDSQLTEVDKMLEQMYKMLGCTLTTIPGVNVITAVKILSEIGDIERFANANKLAQFAGIAPLHLSFSGKGKDVATKQGNRRLQATIYFLAIQMVQVSSKGTPRNPVVRAYYEKRKAEGKTSQQALICISRRLISIIYGMLKHGTEYRMPVVESAGENR

SEQ ID NO: 61962 - protein, 416 aa, unidentified
MSGKREIACGVDVHNSFIVATILSSDGMKLQDRFDTNLEDLLKFKNWLKENNCHKVAVESTGNYWIPIYNVLEGSVNFILANAYQIKHIPGRKTDMLDSEWIAEICLKNLISPSRVFFRDHRELRSLTRSRENLVKLRTKLKNWITHELEAACIKLSTVLSDIFGKSGRHIIDGLTNGIDLEKILETIPSKKVRANKEEIRGIIHANLSSSQIFLLRSHLDTVDSISNQIAEIDGKISDLISLRKDDLQIALSMPGMGIVSASTILAEIGDFRDFSSPNKLAAYCGLVPSVYQSASKLINGHITKHGSPHIRGMITEVAHAIVRSKRNSKLKKFFLRIKTRRGTKIAVVALARKVLCILYHLLINQELYQDDLIDKPKRIRPLYVLSTKSLSLDEMIQTVIKAGYEVRRNEYMGSG

SEQ ID NO: 61963 - protein, 373 aa, unidentified
MDAHFPERHLCAKVEMLTNHQREGASEMKITTIGVDLAKNIFQIHGVDTHDKPVVRRALKRGEMLPYFANLEPCLIGMEACGSAHYWARKLTEYGHTVKLMAPQFVKPYVKSNKNDARDAEAICEAVARPNMRFVPIKNGEQQAVASLHRARQGFIKARTAQGNQIRGLLSEYGLIMPQGISHICKRVPDILEDAENGLPGSMRGLIDRLTEHLKELDSQVIALDKEIKQELAGNELGKKLTEIPGIGPLTASALVATIGDAKNFASGRELAAWLGLVPRQCSSGGKSVLLGISKRGDTYLRTLLIHGARSVLQYVEGKQDTTSVWEQRLLARRNKNVAAVALANKNARTVWALLTKQSKFRLDYAAVQTTAA

SEQ ID NO: 61964 - protein, 313 aa, unidentified
MSQNNNHILYVGLDVAKLSLQLHLAGRFHLLANDAKGHAQLLKRLRGQPAAHVVCEATGGYEQAVVRALQSAGVPVSIVEAGRVRYFARAQGQRAKTDPIDAAVLSEYGALFQPVATAPASRQQQQLAELAQRRRQLIHLLVSERNHAEHYADAFRARQSRQLVKTLEKQITQCDEAITTLIAQDTELAHKAERLKAIPGVGPVVAATMLAEMPELGKLTTQTAAALAGVAPYNRDSGNQTGTRSINGGRAAVPCALYMATLSAVRHDRILKEFYLRLRAAGKKPLVAMTACMRKLVILMNRLLKNHDFQLAS

SEQ ID NO: 61965 - protein, 323 aa, unidentified
MSVFVGVDVAKKSFDIATPLPNGKTRTKAKLSNDPGGFKQFCDWLERHAEPGAWILMEATGTYHEALAEHCHNQGYRVCILNPAVIAKFADVELRRVKTDKADAKVIAAYGQQKAASLRQWEPEPPAQRRLRALVRRLDDLKEMRQMEQNRLDVAQDAVQQSIQDVIGHITEELEKTRKAIEQTIDDDPDLRKRRDLITSIDGLGDTTATLLLAELGDPLKYQSPSAIVAFSGLNPVVQQSGEFIGQSTISRTGASRLRAGLWMSGTVSIRYNPVVKALAERLNSRHKAYKQIVCAAMRKLLHLVYGVVKSGIPFDPKIALAG

SEQ ID NO: 61966 - protein, 323 aa, unidentified
MSKIIGIDISKQTFDVSYLEKGKWIHKVFKNQNIGFEQFNKFIGISDWIVMEASGPYYLQLATFLHLSSFNVCVLNPLIIRRYSQTRLYRAKTDKKDAKTIAEYGAQYELKRWCPESKHSIEIRQLYTALELLKKQKHPTKRQLESFEVTGLLSSSLRKELKQVLILLIRRIDKFEEKIEQIGKLAYKDTVERIKTIPGVGLKTAIMMSVITDNFTKFENHKQLTAFVGFSPRLYQSGTSVKGKGHICKMGKPQIRKLLYLCSWSAKRVNKNCIEMHQRLKEKGKPERVIKIAIANKLIKQIFSIATNKQLYNENHQNLYVVK

SEQ ID NO: 61967 - protein, 337 aa, unidentified
MKYSGIDLHSNNSVVTVTDEEDRVVAEKRLPNDLSRIVGFLLPWRDELKAVVVESTYNWYWLVDGLQEAGYVVKLANTGAIKKYDGLKHSGDETDARQLAHLLRLGILPTGTILPPEHRAVRDLARKRMQLVRSRTSHILAIENIVARQRAMKINSNQIKRLTADEIDQMLLPADVGLAIKSNLAVITTLSAQIDLLEKRLQESMSERAEYGLLTSVPGIGRILATIILLETGPIERFAAVGNFASYARCVDSRHMSNNKKKGEGNTRNGNKYLSWAFVEAAYYAQRFCAEAKRFYERKKVKTNTAVATKALAHKLARACYHMLKENKPFDVTRCFA

SEQ ID NO: 61968 - protein, 355 aa, unidentified
MPSKADTAVARTIGIDTGKNTLHMIGLDEKGAIVLREKVSRTRIAARFVNLPPCLVGIEAGMASHHVARELVALGHEVKQVPPAYSKPFRQGHKNDFRDAHAVAEAVERPSTRCVPIKTDGQLDLQALHRVRSRLIGNRTAVINQIRGFLLEHGIPVRQGYRFLRQQLPRILATRTDVLSPRMIRIVGDLMADWKYLDERIEGVTDEIEALAHADEGCQQLITVPGIGPIISSAMVAAIGNGAAFCKGRDFAAWLGLVPKQMSTGDRTILGRITKRGNRYLRMLFIQGARAVLLRPASWAKHSFGSWLTAATRRLHRNVLTVALANKLARIAWTVLAQGRRYEARVEPRVEPAAA

SEQ ID NO: 61969 - protein, 353 aa, unidentified
MAVYIGVDLHVRTQTVCWMNTADGEIHQHTLDHSRDDVRAFYAQFTAPAVVGIESSGYALWFHQLIEQAGHRLLVGDAYAIRQFARRRQKNDRRDAELLLDLLRRDEFPVVHRPAPPSQDTLALLRYRHRLVRMRTMVKNGLQAVALNHQLRLGFRLFTVRGQQRFAALPLSGAYATQRQQSQVLLTTLEAQIAAVNQELATRAAADPRVVRLRTHPGVGLQTALAVVHTLEPVTRFDRARRIAAYCGLDPSEHSSGDTTRYGHISKQGNRLLRFLLVEAAWSAVQHEEDLGRFFRRLRARKKPHAVAVVAVARKLVLRLYRMLREGIDYEEFRRRGRDARRARKWTSPAQRD

SEQ ID NO: 61970 - protein, 322 aa, unidentified
MSASGIFVGIDVSKAHLDVAVRPTEEEWRSENTETGVNEVIDRLKKLGPDLVVLEATGKLENAVASGLGVEGVPVVVVNPRQVRDFAKSTGQLAKTDALDARVIAHFAEAVRPVPRPLPDEQARQLSSLLSRRRQLSEMLTAERNRLGSADRKMRRRLKAHIRWLKKELLEVDDDMDSAIRESPLWRAKDDILRSVPGIGTVVSTTLIAEMPELGDLSGKEIAALAGVAPLNRDSGTLAGRRTVWGGRARVRTALYMAALVASRHNPVIKEFYLRLCGAGKPKKVALTACMRKLLLIVNSMIKNKQMWNPAAAEVQRMPISA

SEQ ID NO: 61971 - protein, 339 aa, unidentified
MRLYAGIDLHSNNNLLAISDENDKHIFKKRLANQGDVILAELEPYRTDLVGVVVESTFNWYWLVDLLMENGYQVHLANPAGIQKDKGLKYSGDTHDAFWLARLLRLGILAEGYIYPKEWRPVRDLLRKRGHLLKLRTSLINSLQGIISRNCGCQLPGKKIKQVKTNHVTPLLEANDDLALSGAVSKECIDYISRKIGEIEVAVEGRVELLAPFRGLQTIPGIGRIISLTIMLETGDISRFSNVGNFSSYCRKVPTGWMSNGKKKGCGNGKNGNKYLAWAFSEAAEFFRRYDPSARAFYNKKTAKKNFMVAHSALAHKLCRAAYFIIRDGVEYDPQKLFA

SEQ ID NO: 61972 - protein, 313 aa, unidentified
MTVPQITLGIDISSTRLDAYAYPAGRAHGVANTAAGIARLVGWARELGAFVVLEATAPFDQGLIRALERAGLAFHRANPKRARDFARSAGFLAKTDAVDARMLALYGTTPALRPTAPVAPERLELQALSTRRDQLVEMRKSERIRLKGVSGPISIQSLQTVIALLDAQIAALDTHIATALARAPDLARDAAILRSGAGVGPVCASVLLAFMPELGTLNRRAVALLAGLAPIARDSGAMRGKRYVGGGRKRVRDALYMASLAAIRIGRWKQAYDHLRALGKAPKQAIIAIARKLLIALNAAIRDQNPLNNAPQA

SEQ ID NO: 61973 - protein, 371 aa, unidentified
MEHTRFVGLDIHKERISIAVAEGGRSGAVEYLGEISNDPVAIGKLCDRLGRSGKSLAFCYEAGPCGYGIHRQLTSIGHRCDVVAPSLIPTKPGDRVKTNRRDATMLARLYRAGELTPVWVPDADHEAMRDLIRLRSVVRQIVTRARQHLQGFLRRHGRKHGRGTAWRMAYRRWLSTLAFEHPAQQIAFQDYVDAVMDAERRLKRVGEQIFSLLPEWNLRPVVDALQTMRGIALINAVVLVAEVGDFIRFSNPRQLMAYFGLVPGERSSGETIRRGGITKTGNAHARRALVEGAWAYRMKARIGRHKVDRIGSMPKIIRDIGWKAQVRLCTRYRRLRARGKTANIVNVAIAREMVGFIWSIACTVQSAPKSA

SEQ ID NO: 61974 - protein, 345 aa, unidentified
MTVYIGVDFHARAQTISYLTTEDGEIRRAQLDHGQPQEVRKFYEQFAGQQVIVGFESSGYAAWFEELLEELGYEIWIGHATAIRLFARRRQKNDRRDADLILDLLWRGDFPRIHRYSPQSRAVLQQLRYRQRLVKMRTMVVNSLVFLASSRGVGLRTQLKSRRGIERLRQIALPQPLIDQRDEMCQLLQELKTKTERVERWLEAKADSDVRVQRLRTHYGIGPLTGLCLVHTLECVERFANARKVTAYVGFDPVEDSSGERRRIGSISKQGSRLLRFYLVEAGQIAMRKDPDLARVYHRVRLRRGHAKAKVAVGRRLLVRAFIMLRDEIDYAEFQRRGVAARSSR

SEQ ID NO: 61975 - protein, 338 aa, unidentified
MCYTGIDLHKFTSFLTTVDSSGKIVKQQNLKNVNHNFVQYFDSIHGEHKTTVESTMTWYWLDDLLTSLKIPLVLAHAKYVKAIAYAKVKTDKVDSHTLAQLLRMDYIPEAYKISKDKRVLRDALRARLKLVQRHTSVTNSMHLLLAKYNFDNPSQLNGISKYQYLQLANLESLLKEQILDLEKQLYPDLIPNEDVQHLLWIPGIGKINAFNIVLEVDDINRFDDVKNFFSYCRLTPSARNSAGKSKQRSSKDGNKYLKVVFSDAAIHAIQYYPVIRKCNNSLMRKKNKQIAKTIIAKEIANIVFHVLKKEEIFNNKFKGKDLEHTKSLQWPRVVNPYA

SEQ ID NO: 61976 - protein, 433 aa, unidentified
MLKINYMSTLFVGIDVSSKSNVVFAMDFDENKYISSSFGNNQPGADKLAGMIAECMQHHKNLDTILIVLEATSVYSVHISNFLATSEILMPYKPYVFCVNPKATANYRKSYIGLEKTDPTDAFLIADFGRVGRTKKLKPWRGGQFIALKRLTRHRMHLSECITREKTYMVSNLYLKFSELQLLEGDDKPFSNIYGSTSSSVLTDFLSPQEIIDMPEEDLLSFLAEKSRNRISDISKTSELLRKAARDSYRLDKCMYEPLNISLANSFNCIHAYQKEIKLIEQAIEKCINGMNPNALTILQSIPGIGPVWASGILSEIGDITAFHSSDALAKYAGLYWSKGDSGDFTSEDNKMSKAGNPYLRYYLGEAANSVRKHSTEYADYYARKYAEANKHQHKRALALTSRKFVRLVFGLLVKNQLDTGEKLDTEYNIESN

SEQ ID NO: 61977 - protein, 356 aa, unidentified
MSRVPRRVARTVLRGDRRSNAAVLPDRHRSVIVRQTVAGEQLSVTRIGNDPIALADEIGKAGECPEVVLEATYGWYWAADVLAEAGARVHLAHPLGIKGFTYRRVKNDVRDAADLADLLRMGRLPEAWIAPPATRELRELVRHRAKLVALRSGVKASVHAVLAKQGLHIPVTDLFGVRGQVLLAKAPLDGAYRARVNSLCRLIDVFDFEIDTFGRLVAGHLARDPGYLAILVIPGVGPTLAAIFVAEIGDVHRFPSARHLCSWAGLTPRHRESDTTVHRGPITKQGSTLVRWAAVEAAQKTPAWAGWLVRSRAGIAERRGRNIATVAVARKLLTLVYYGLRDGHIRALEPGRRQAA

SEQ ID NO: 61978 - protein, 338 aa, unidentified
MKITTIGLDIAKSVFHLFAVNKMGRFVKKKQLKRKQVLATMAKLEPCLIAMEACGGAHYWAREFIALGHQVRLVAPQYVKPYVKGNKNDYNDAEAIAEAAQRPNMRFVPIKSVEQQDVQNFHCQRERIKKERTALVNQVRGLLAEYGVVINKGIAAVRKALPEILEDAENGLSILTRALFAELLEELQALDQRFEQCERRIKSMNRDNAICLRLDEILGIGPIIASATYAAAGDGKNFVNGRHFSAWLGLVPGQHSSGGKTVLLGISKRGNAYLRTLFIHGARAVLRHSANKTDRFSLWAQALLARRGHNKACVAVANKMARMAWVIMAKGETYRPAL

SEQ ID NO: 61979 - protein, 386 aa, unidentified
MQKLNDLSRSLAPLEPDGTLIAVIEMSQSSWLVAGIVPGVERQPLKKLAADEVALLKLLHRWREEAEKAGRRIERTAVAFEAGRDGFWLARWLRTRSIEAHVIHASSVAVSREHRRAKTDRLDTELLKRAFLGWLRGERDHCKMVAIPTSKDEDAKRPNRERESLVGEQTRIVNRMKATLIRLGIRGFNPKLKKAAGRLEDLRTPEDEPIPPNTMAELRRDMDRRRLVSDQIRQIEEARLDRLKQAPDDGPHAMLRLLARVIGVGIETADMLVQEVLARNMRDRRAIARYAGLTGSPDESGTKRREKGLARSGNARVRRGMIQLAWRFLIFQKNSTLAQWFRARTENARGTRKLMIVALARKLLIALWRLVREGVVPDGVVLRPTQ

SEQ ID NO: 61980 - protein, 342 aa, unidentified
MNNVTIIGIDLAKRVFHAHGAYADGSVAFRKRMARSQVLPFLTRQPTCVVAIEASASAHEWGRAIQGLGHEVRLIPPSYVKPYVKRQKNDTADAEAIAEAGPRPTMRFVAVKTEEQQARAMVFRTRDLLVRQRTQLINALRGHLAEHGVIAPQGPAHLKTLAAAIDAAEPSMPKLVRDVGRVYLEQIDRLSCKIAELEKTLRREAQCGEETRRLQTMPGIGPITAMAVEAFTPPMTTFKRGRDFAAWLGLVPVQHSTGGKQRLGRTSKMGQRDIRRLLIIGAMAVIQWAARRGTRPGSWLARMLDRKPLMLVAMALANKMARSIWAMLTKKEDYRDLGSAAA

SEQ ID NO: 61981 - protein, 426 aa, unidentified
MSDSEVLGQELQFSAFVGIDWADQKHAWCLQAADTTRRENGEVEHTPEAIEAWVGQLCRRFDNRPIAVAVEQVKGALVFMLSKYGSLHLFPVPPTMSAKMREALYPSGSKDDPRDADLLLELLLQHRDKLRRLSPDSEATRRVQNLVDERRNLVDEKTAQINRLTHQLKIYFPQMLEWFEQLDTELVCTLLERWPTLEELQKVPPERLRTFFHKQRCRYPELIERRLIGIRQAIPAIQDRAVIEAKSTVVKVSAQVIRSLVRGIADVDRKIEEAAAAHPDFFIFESLPGAGEVLAPRLLAAFGSQRERYASAEEVQTYSGIAPVMKRSGKKKWVHFRWACPKFVRQSFHEWAGHSIAHSQWARSYYQQQRERGKGHHAAVRGLAFKWIRIVFRCWKDRAAYDESRYLMTLAKRNSPLATFPGGAML

SEQ ID NO: 61982 - protein, 348 aa, unidentified
MLIIGCDFHSRFQQIAMVNTETGEVTERRLEHGNGEAKKFYAELQKPVRVGMEATGYAQWFEQMLAKLGYELWVGNAAEIRAAMVRKQKTDSRDALHILDLLMENRFPRIWIPTPAERDLRQLLWHRHKMVCLRTSVRNQLHALAMGQGICRKKKLWAAAGRQELEALTLDAWARRRRQELLEILDRLDPSLAELDRAVAKEAEQRPGARCLMEQPGVGPVTALMFVLTIGPVERFRKSKQIVSYLGLNPRESSSGGRQRLGSISKQGNSMVRFLLVEAAQSASRYDEELRRNYQRLKFRRGSAVAKVALARKLAVRLYWKLRKQPSPVPPARTQGNPENSLVDVSPS

SEQ ID NO: 61983 - protein, 452 aa, unidentified
MEESVIKMEVVNAHAAGIDVGSRSHWVAVGQLMQDIREFGVFNEDLFEMATWLKEKQVKTIAMESTGTYWQNLYAVLIANGFHVILCNGKYTKNIKGKKTDVKDCQWIQRLHSLGLLSSSFLPDGDTEQLRTFCRHRSNLIHEAASTSKKMQKYLRLLNLRLDVVVKDVCGLTGLTIIRAICEGERDPNKLASLRHYNCKRSKEEIAKALQSNGREDYLFALKHELDIYDHLQVKIVECDAMIEKMLNQIIDKDENKKQHYIDSKPYKRINKNTPKDIDLNLKSYQMFEGTDLLAIEGMSYSTVLALMSEIGIDGIRKFPTAKHFASWLRLAPNNKVSGGKILSSKVPKGSNRLKIALRNAANAIGNLKDSTPLRDFFMRINFRKGRVSAISATARKLAMIIWNMVIKNVPYKNPEGYLFLDQKRKLGMAKRIKAQIAKFDLKPDDVGFATI

SEQ ID NO: 61984 - protein, 349 aa, unidentified
MITIGIDPHKDTHTAAAVEDRSGQLLGELTVPGTNEGHERLREWAHGLSEDEELRFALEDCRHVNGRLERFLLANSELVLRVGTRLMANTRKSARTFGKSDSIDALAIARAALREPNLPRATHEPGLRELKLLVDHREDLVSERTAVVSRLRWLLHDLDDDLEPFARTLNREPVRRGLSQRLGRYEQGVQVRICRELLIRVGEITRQEKALRAEIATLVRPLAPGLLALSGVGELIAARLLVESGGGGRFSSDAALARHAGCAPIEVSSGRSRRHRLSRMGNRKLNAALHQVVLTQARVHPPAQAYLAKKRAEGKSNKEAFRCLKRHLVRVVFRAMQPPAEPAVSPSSS

SEQ ID NO: 61985 - protein, 429 aa, unidentified
MNSTRNKKIEQVKETTMIVGIDIGSEKHYFRAFNWRGIELTRKPVAFSNSMEGFNSFYNTIVELIQKSELEEALVGIEPTGHYWFDLGQFMGEKNIKFVMVNPHHVHKSKELDDNSPSKNDRKDPRVIAGLVRDGRYFYSYMPTGVYAELRNASNRRFVLVEEQTRAKNRLQKWIAVYFPEYKGIYTRIDAKGGLLVLKQAPTPEEIVRLGVEGIIKIWKDAKLRGNGHKKAMLILNAAMKSIGLKAGLTEARMEIQDLIEDYELQTKRLERGNDLIKELCQQIRYADKLLEIKGIGITTIAGFIAEVGDITRFDSAKELQKLAGLELVADSSGKHNGKTKISKRGRKRLRYLLFEAAISVVGKNKEFKEIHRYYTTREKNPLKKMQSLIAVACKLIRVFHVILTKGISYDASKMLKDIQHPGEPLKAA

SEQ ID NO: 61986 - protein, 370 aa, unidentified
MAKRSMFVGMDVHQESIDVSLAEEGRDGEVRHYGVIPGDLEAVAKVVRALRAPSRRLRFVYEAGPCGFGIHRYLTAPGEECVVVNPSSMPKRSGDRIKTDRRDGDALARLHRAGELTAIYIPTPDDEALRDLVRAREDAVGLSTQAKHRLKAFLLRQGRRYPGRAGWTRPYRRWLADLSFPLAPQHIALQEYRDTIDETERRVERMTDQLRQLTPAWRWAPVVDALRALRGVSFVTAVGLVTEIGDIRRFTHPRELMAYLGLVPSEYSSGPSVRRGGITKAGNPPARRLLAEAAWAYQSVPRIGRQMLYRQEAVSKTVCDIAWKAQLRLTSRFRKLVARGKAKPKVATAIARELTGFVWAIAREVPPPPA

SEQ ID NO: 61987 - protein, 331 aa, unidentified
MPHPNDLSRSLVALEQDATLIAVIEMGQSSWLIAGIVPGLERQPLKKLAADPDALLHLLLRWRNEAVEAGRNITRIAVAYEAGRDGFWLARWLRARQIEAHVIHPASVPVSREHRRAKTDRLDAELLKRAFLGWLRGEPKHCTMAAIPTLEDEDARRPSRERESLVGECTRIVNRVKAHLARLGIRGFRLTLARASEHLKSLRTPEGAAVPQHTLAELRRDLARLNFVKQQVKEIEAARTERLEATPGGGRNAMVHLLARVVGVGVETADMLVQEVFSRKLRDRKALARYAGLTGAPDESGRRRRERGLAKAGNARVRRGMIQLAWGHLLH

SEQ ID NO: 61988 - protein, 316 aa, unidentified
MIKDTEIIIGIDISKNTLDIQIQEEGQYFTCRNDIIDIGKLVEKLSSIHPALIVLEATGGYEKGIVSALVEAKLPVAMVTPSWVRYFARSSGTLAKTDKIDSRMLVRYGRATHPPVMIVRSELQERLSVLMARRSQLSLALISEKNHLSTTSYPDIKALIEASIDNLEQQILQLEDMIAEIIDQSPELKKNEKIICSVPGAGKITAAIMLADLPELGTLDHKKIAALVGVAPFNRDSGFYRGKRRIKGGRQSIRKVLFMAAMTAMKWNPVIKEFYERLLARGKVKKVAVIACMHKLLTIINAMVRAQTLWNPVVRS

SEQ ID NO: 61989 - protein, 329 aa, unidentified
MHYLYYVGLDVSKVVAFEDANEMAHRKFANSRKGICSCLHWVEKRHGIRLDDVIFCAEDMGSYISEMAVCASDRTLNFNFSLISPLVIKYSMGIARGKTDRVDARRIAEYAITHYRKIALYLPAEKELCQLRTWLILRAHLAKQRVAKLVLLEKLDYKEKFADVSIQRSMLQEEIAYAETHMKTIEREMKELIAADSNICRNYKLLTSIKGVGPITAIVMLCSTLNFTKITDHRKFACYCGLAPFEHSSGTSVRGGCHTSSMANRDIKVQLNRSALIAIRCDPQLKAYYERKVAEGKHKFSVLNAVRAKIAARCFAVVRRGTPYVALQI

SEQ ID NO: 61990 - protein, 444 aa, unidentified
MVCPGMILIREVADAPVIMGISKPAGLKSPCGEVKIVNPLFVGIDVSSRNNVAYLMNPDGSKYSSFSVQNNLGGVKLLSERIVSALNSKQLSDVVIGLEATSIYGDSLVYALREDGSLGRFQRKIHVLNPKQVRKFKEAYPDLPKNDFVDAFVIADHLRFGRIAREVYMDDYRYQALRTLTRARFDVIQNLTREKQRFANYLFLKCSGMAQDKDIQNTSATTIALMERFETVDDLANADLDELTAFIAETGRGRFADPDATARVVQAAAKGSYRLPKTVNDTVNQAMSVSIASMRALKEQVKVLDKAIEQQFEIIPNTLTSIPGIGKVYSAGIIAEIGDIHRFNSQASVAKFAGLVWHKSQSGEFEAEHSQMIKSGNRYLRYYLLEAANSVRRCDSEFRRYYDLKFKEVNKYQHKRALALTARKLVRLVFRLLKDNRLYIPPES

SEQ ID NO: 61991 - protein, 346 aa, unidentified
MKHYVGLDVSLAETAICVVDENGVIIREGFAASEPEAISAWLAKLNLSFERVGLEAGAMASWLYVELRATGLPAICIDPRHLRGLTKTMPVKNDRNDARAIAHCMRVGWFTVVHVKSAVSQELRMLLVNRKTLLTKQIDLENEIRGTLRVFGLKLAGRITQASFQKRVLELLADQPRLAAMVQPMLIARTTLRQQCAVLHRMVLTAVRTDATCRRLMTIPGVGTITAITYLTTIDDPDRFQRSRDVGAHLGLTPKKYASGEVDRNSGISKCGDVLMRTTLYQAALALLTRCQKHSALRNWGLQVAKRRGLRRAVVAVARKLAVVMHRIWADGTEFRWTREEAVTVA

SEQ ID NO: 61992 - protein, 426 aa, unidentified
MNYTQNQKISQVTEATLIVGVDIGSETNFARAFNWRGQELSKKVFRFSNSLEGFQSFLAYLNTYTTIASARHIIVGCEPTGHYWFNLARYLEENNIKLALVNPYHVKLIKELDDNSPKKTDLKDPKTIAKLVVDGRYSYPYLPKGIYADLREAVSSRERIVKELNAITNRIKRWLKIYFPEYLVVYKNFSAESGLTVLESAPLPQDVLRLGPEGVNQLWRDKKLRAVGMKRALTLVEAAHNSIGLPGGSCARMELQLLLEDFRTKQSQLEKITEVLEEETLSVPYADKLLVIKGVGLITVAGFLAEVGDVRRFDSPKQIQKLAGLEVKENSSGKHRGRSSISKRGRKRLRKILFQVMLPMIQNNAEFGEIYQYFTTRQKNPLKGKQAIIAAGCKLIRVFYAILKHGVDYDPGKLRADMIHPELEAA

SEQ ID NO: 61993 - protein, 348 aa, unidentified
MAIVGGFDVHRAQITFDYVETDSGQVTAGQIRPATRSALRNGLQRFDGREDVAFAVEGCTGWRFVVEEFVRAKVEPHLAEPADTANLRGRKKRAKTDRADARLLRELLAQRRLPESWAPPSHVLEVRTLGRLYVTLMDERRAWQQRMHAQLFHQGVPSVRALLTSDGRVALAKAELSPAGVQMLQTALAAVESLTLQILPLRAQLQTIGCNQPAVVALTQQYGLGLLSGTIIWAELGDCRRFSNSDQAVRFAGLDVTVWSSDTKRSAGRLARQGSPELRWALFEAAKCAARQTSPDHDYCEAVRDRLGGKRPALSVARKLVRRCYHALRYLGDQAWQAPITNPRQAAA

SEQ ID NO: 61994 - protein, 399 aa, unidentified
MFVGWDWASTAHDVTVIDSAGERVHRMAIPHTEDGIARAVAKLADYGDPGELPVAIEATRGLVVDRLLGAGHPVIPVHPNAFHAVRPRWGAARAKNDPGDSFKLADYARTDIHRLPVLAPTLPETLELQALTRQRDCQLALRIAAVSQLAALLDQHWPGGKTIFALLHSPIALDFLDRYPKPQAAASLTPARIEAFCRRRGYSGRRSGAELLDRLRSAPIAASRLGEPVVAQMIRGQVAVVRALQAGIDALDIVIAEKATAHPYAGLLADLPRIGTLNLAQIIGEVGPILERATSFDQLAAETGLAPVTRSSGKTHTVAFRYATNRRARQALHTWLDNSRRSSDWAQQRYAAARARGQRHPHALRTIGRAWLRIIWACWRTKTPYDPARDERAKQPTAA

SEQ ID NO: 61995 - protein, 370 aa, unidentified
MKQRLLYVGLDVHKKTTDVAIANGRSNGKVRSYGKIASTLDALNKLIKKLQDGDKELRFVYEAGPCGYQIYRHLDAKGIYCSVVAPSMIPRRSGDRIKTDRRDAINLVRLFRAGELTSIYVPTVEDEAIRDLIRCRDDMKRFERKARQRLLSFLLRHGYQYSGKRNWTKGFYNWLATVRFSHSAQQVTLQEYLDATNECGERIKRITQQIQVHVEEWSRAPFVKAYQAMRGVSLIVSTTVAAEIGDMRRFQNPKQLMAYLGLIPSEHSSGKTVRRGPITKTGNSHVRRVLIEAAWTYKMQARVSSILLKRQKGLPKNICEISWKAQTRLCARYRRLYARGKSRQTVVTAIARELSAFIWAIDKEIQLAIS

SEQ ID NO: 61996 - protein, 336 aa, unidentified
MKNYVLFTGIDVSKDKLDICYVDKNGNVLGSKVIDYKPKNIKSIVKDLERLGYNLTQTLICFENTGVYSIKLGEVLSELNAYYSEVSALEINKSKGITRGKDDKTDAKMIALYALRNIDKIVLSKVTDEAIQELKLLFAEREKIQKSITSLKMTQENEGRVNSKAYESVQKINQQTRVALKNSLKAIENEIERVFKEHPELKKNRDLLKSIKGIGTIISAYLVMITHNFTKFKNSRKFACYSGIAPFEHSSGKSVRGKTQVNHFANKKVKALLSMAVQSAKKYNSQIKAYFEKKKEQGKHILLISNNIKFKLVNIAFAVIKRGTPYVDIYKYATVA

SEQ ID NO: 61997 - protein, 314 aa, unidentified
MIMNDKTTPVYAGLDIAKASLQLHLQSKSYDLPNTADGHAQLSKRLAAIPGVHVVCEATGGYERAVVAALHAARQLVSVINPARVRQFARASGELAKTDPIDAAQLTAFGQAFAPAPTPPRTPTELKLAALVTRRMQLLELRVAEAQRADTCADLALRKLFTPWLAQLEKQIAKVEALIEALLQEQAPLADQVQRLDDIMGVGRLTAVMVLATMPELGTLNRRQAAALAGLCPYNRDSGQWAGKRCISGGRAEVRRALYMAALSASRSNHLLKPFYARLIAAGKPAKVALTAVMRKLIILMNHLLKNPNFSLAH

SEQ ID NO: 61998 - protein, 345 aa, unidentified
MNIIRVGVDIAKSVFHVHGVDRHGQTQWQGKYARNKWLTALSRKVPAGAEIGMEACASSHYWARELQKRGYFVRLIAAQFVKPYVKSNKNDRVDAEAICEAMSRPNMRYVAPKTVAQQDVQAAHRIREELVGQRTAKANQIRGLVGEYGVVAPVGIQQLRHALPEWLEDAENGLSESFRVLLHGLADDLRYLDDRITALDERITESVKQDPVARRLMTLRGVGPLTASALSGALGDGKAFRKGRDFAASLGLTPRQHSTGGRDRLLGISKRGDSYLRKLLVHGARAVLRHIGGKDDGLSHWLQALVSRKHVNVATVALANKTARIAWALVHNEAAYDEGLAAAGV

SEQ ID NO: 61999 - protein, 405 aa, unidentified
MTIAAHRSETPSAVRVDLSAIFISLELSQSKWLITSLSPGAGEKLSMFTLPASDVAGMLTRFGELQRRAKARTGQAFPIVVIQEAGLDGFWVHRVLEAEGIESHVVDPASIAVSRRKRRVKTDRIDGEMLLRALLAYKRGEPRVCAMVRAPTPEEEDRRRVSRERKSLTTERTRHRNRIGGLLYSQGIKGYRPLRQDRRDRLNELTTGDGRPLPVQLKAQISRELDRLELVMQQIEECEETRDAMLAAAHPAATADTNSWASAAEPSSPAPSVPAMLVGLKGIGPEIASVLWLEGLSRQFDNRRQVAAYAGLAPSHWQSGKIDHDQGVSKAGNPRLRTTLIQLAWLWVRHQPDSALTVWFKARVAQNGGRLKKTTIVALARRLLVALWKYVNAGVVIDGAVVQPA

SEQ ID NO: 62000 - protein, 342 aa, unidentified
MNSSKKVDRMGMDLGKNTFHVFGVDESGSVVVKKKLRRKQVLEYFANLPPCLVGMEACGSSHHWARELIKLGHEVKLISPQFVKPYVKGNKNDYNDAEGICEAVGRPTMRFVTIKAIEQQDLQGLHRIRQSVVKQRTALANQIRGLLGEYGIVVAQGIGQVRSRIPAILEDGENGLTDRFRGWLAELLEAFRALDERIQQYDQQIAREHAANAACQRLSAIPGVGPKSATAIVATYGDGKQFSDGRQFSANIGLVPRQHTTGGKPLLLGISKRGDKYIRTLLIHGARSVIHRIEGKTDSLSRWLQALVARRGKNKAAVALANKNARIIWALLSRGECYGAGE

SEQ ID NO: 62001 - protein, 401 aa, unidentified
MAFVGGLDWGGAAHAICVVDAQTGAVSERFEARHDAAGLREIVRRLGLWGPPGDLAVAIERPSGLIVDALVAAGHPVVPIHPNAVKAARPRYRSSGAKDDRGDAYLLADLLRTDGHRFRALALPSDAIRALRALTRGRDDLVATRVGLANQLRSLLEGFWPGAAAIFADVDSPIALAFLDRYPTPQSAARLGEKRLAAFLAQHRYSGRRSPAELLARLRAAPEGLAGAAEAEARGEMVRALVAVLASLVARIAELSARIRHDLAKMEDGRILMSFPRAGQICAAAILAELGEDRARYLTSDQLAADAGLCPVTYQSGKSRGVGFRWACNRRLRAALTCFADNSRHASAWAARIYTQARARGCRHPHAIRILGRAWLRILWRAWQDREPYDPAKHSAAAAMG

SEQ ID NO: 62002 - protein, 412 aa, unidentified
MQVVHPVCCGIDVHAKMLVACLILANGEKKKRTFSTMTAELLQLRDWLVAVQCTHVAIESTGVYWKPVFNILEDALTVILINPEHTHALRGRKTDVKDAEWLVDLLRHGLLQPSFIPPPVIRELRELTRYRESVIREQSSVANRIQKLLESGNLKLGQVASDALGVSGRMILKALAKGESDPRKLAALARGKLKEKSLSLEQALQGRLTVNQRFVLGELLSRWEQLEAADARVTSEIDKYVQANPKLARARELLDSIPGIGPRVAEVIMAEIGIEMASVFADAAHLASWAGMCPGNKATGGKRLSGRTRKGNTYLRSALVQAAWGASLKKHCYLSSQFHRLVKRLGRKKALVAVGHSLLVIIFHVLQNDQTYTELGGDYFDRRHVEQQRDYYVRRLQMLGLKVTLEELPQAA

SEQ ID NO: 62003 - protein, 320 aa, unidentified
MEKEEGIIFEQIIERGCGIDVHKKVITATIRGEGIKEMTQTYSGFTESIELMRDWLKGNKITHIAMESTGIYWKPIYNILEADFEIILVNARHIKNVPGRKTDKKDSKWIAKLLLSGLLNGSFIPPKHIRDLRDLTRYRKKITEQIASEKNRIQKILEDANIKLSSVVSDMSGATATKIINAMISGEEDIQELLKYRHGKMQASKEELASSLKGKLTEHHKFMLRTIKESMQEKATIIEKLDRRIEEQLESHELLLDSELLQTIPGVGEIASASILAEIGNDMSQFPNEQHLASWAGMSPGNNESAGKKKAAKQLMEINI

SEQ ID NO: 62004 - protein, 361 aa, unidentified
MHATTVAVDLAKSVFQIAVADDKWKVVGQERLNRSQFERWFHNREVGLVIMEACGSAHHWGRWFNRLGIPVKLLPAAYIRAYVKRNKTDAADACALLEAARCADIVPVQVKSLEQQALQGLHRIRSRWMATRTSRINTLRGFCREFGLVVPQGARTGVEAMSRALADPNSAIPLLIRESMKLLIEEIRLLELRIAQLERELTVLARQSPACTELLTIPGIGLLTATAMVAATGGSVSHFKDARHFASWFGLTPKEFSSGNSRKLGRISKKGDRYLRMLLTHGARAILRAAELARRSGKALDGLRTWVTEIQARTHHNKAACALANKLARVCYAVLRDHTPYGTPQPRQEKKLTRTAFVIAA

SEQ ID NO: 62005 - protein, 412 aa, unidentified
MKQQVTEDVNIMPQLDKACGLDMHKDKIVGFISWKDGSNQEFREFGTYTCELKQIRDWLQESHIHHCLMESTGIYWMSLYAILTEAGIEVIVANPVHIKQMPKRKTDRKDAKWLCTLLLHGLVRPSFMPDNTQRIIRDYCRNRLFYTWQLNRIRNRLLKILESNNIKLRSVISSIHTLSAMDMIRLLAKGVTDQEQLLSCARGKVVKKKEQLIKALDGTLQNYHHTQLQMLLEDYDHVQKQVDFLDKSITEIISEHYAQAFECLDSISGIGIKSAEIILSEAGKDMSRFPTADHFTAWCGIAPGNNESAGKRKNTAIKKGNSYLRVAIVGAAWAAVRMKDSYWHALFDKLRKRMKAQKAIVAVARRLLKVVYKTLETLTVYQEKGIAHFVDLQAKAALYHAAKPSWPQTDNI

SEQ ID NO: 62006 - protein, 428 aa, unidentified
MSYRIAGIDVHKKMLAVVVSDVEIESEYQFERRMFSSNPEQLRSLAAWLFEQKAEEIVMESTAQYWKPVWETLERYWKPLCEKREGARRRSGTLHLAQALSNRGRRGRKRDFVDAERLVKRLVARELTLSFVPDAEQRLWRTVTRKKYQLRRDVVRLHNQLEALLEEAHIKLSSLVSDLLGVSARRMLKALADGETNPAALAALAHERLRATPEQLCDALGACTELKPVYRRLLKMALAHLQLLEQQIGQLDQELATLLHPHQDAVQRLAEVPGFAVDSAQQIIAEVGPTAATFPSEKCLSSWVGACPGEEESAGVNYSHRSPKGNRHMRRLLNQAANAAIKVKGSIFEIIYRRCVPRLGHNQTIGVIAHRQCRLIWLILHQGTSYEERGPAVTKRSRYQRTWRMIRQLRTLGYRVELPNPEPSPAQA

SEQ ID NO: 62007 - protein, 426 aa, unidentified
MKEHIDYLSTLFVGIDIASRIHVISALDFNQNFYIKMKPFENTKEGAGIVEKMIADVLADNYQFKYVVIGMESTGFYGVHLANYLSTSELLAPFSVSVYCLNPKEVKNYKKSFNDIGKNDGIDSFVIADFARVGRIAIKPWRGSQYLALQRLTRHRMHITECITREKTYMLNNIYLKFSEYALLRNGGHPFSNKYGATAEAILTEFTTNEDIVNSSIEELVEFINSKSKGRIADPEETAKIVQAAARNSYRLDKCLYEPLTISIASSFNCISSFEKELKAIDKAILQTVQGLNPEEYTVLNSIPGIGKVYSAGILAEIGSIKAFQNANQLAKYCGIVWNDNDSGDSESEDSRMSKAGNRYLRYYIIEATGSVINHCSEYKAFYQKKYAETRNHQHKRALALTSRKFIRLLFGLLDKGQLYSPEKGR

SEQ ID NO: 62008 - protein, 346 aa, unidentified
MKKYIGADVHTKNTMYCVKDEEGNIVDMQRLPNDEVMAEEYLKLFGPEMVVGFESVTNWGWMADVVERSGGVARMGHPLHLQKGKPRGKKTDGVDAEWMAELLRLNSWPDAYLASYDCRVAREMYRTHVMLSQNITRLKNRLSAVLHKTNIRKPYKDVFCKSGRKWLSSLKIEPAYREEIASLLRVIECMEQEMKIIEEMEPEGWLDGTAYFYLRSMPGVGDFIARFILAEAGDLRRFHSAGAFSAWCGLAPGVDISDETVRHKKLRKGSKWLRWAYFMAATRAVRQRGRLQRQFLRISIKKGYFPAIMAVAREMSVISYCMITRNQGYYEPICFAGQGRKNARSA

SEQ ID NO: 62009 - protein, 461 aa, unidentified
MPDGGGENSSPRRTKQIEGLPVIRRNVAGIDLGSERHWVCAPVAGSISREVADFGATTPELIRMTKWLQACGVESVAMESTGVYWIAPHEVLEAAGLEVLLVDTRQLARVPGRDKKTDPSDCEWIQRLHSCGLLRGSFRPREEVCMLRTLVRDKANLVAECSDWLRRMQKSLDQMNVRVHRAVSHMDGITGMAILRAIAEGERDARKLAKLRDTRCHKSEEEIAEQLSGHWREDHLFSLRQSLKMYDAIQQRLADYDREILQRLAAMQREEFRQQPPPPVKNPHKAKNMKKRGEEPMREALFRMSGVDLTGIDAIGVETVQVVLSEYGPDLSRFPTEKQFVSHVTLIPHKPMSGGKPVRKKRRSSASTRVAAALRMAALSLRNSATALGAYYRKIARRLNGDVAVFATARKLATLIYRLLRWGQPYVDEGAEAFERRYQETRLKTLKAKAKDLGYQLVASN

SEQ ID NO: 62010 - protein, 386 aa, unidentified
MAGGKISAPVKTFKTTTQELMALSEWLSSQGVTHIVMEATGIYWKPVWHILSDGEFELVLANAAHVKNVPGRKTDVNDATWLADLMAHGLIRASFVPDEPTQQMRDLLRTRKQMMRERSSHIQRIQKTLEDANIKLDSVVTDILGLSGRRILKALIAGQTMPQALATLAHRRIHASADELEAALRGRVTKHHRFLLKLHLDQIDAFDAAIAAIDQEVNVNVEPFRAAIELLSSIPGVGNLAATVIVSEIGIDMSRFPSAGHLISWAGLCPRNDESAGKRRSNRMKKGAPWLKTTLIQCAWAASRKKNSYLQAQYLRLRSRRGAKKAICAVAASMLTAAYHMLKDGAFYKDPGADHFDRREKGKQALRLVNRLQSLGYVVQITPQAA

SEQ ID NO: 62011 - protein, 328 aa, unidentified
MQGKVSSERTAMATVYVGIDVCKEWLDIHLHPLGRSFRVTNDAAGLRRLKRELDALDQMPRSTLHIVMEATGKWHRAVQRSLHADGFYVSVVDPLRARLFAKACGFLAKTDRLDARLLAIMGEALKPAQTPPQDQALEALQELVNARSAANGERTALSNRMKTAVTAFLRKELTRRLAALDTHIARLDAEIERSIGAEPEMRRRLDILISIPGIGAVTAASLIAGLCELGACSGKQAAMLAGLAPLACESGERAGHRAIRGGRPAPRNAIYMAALSASRHNPDLAHFAERLKKAGKPNKVVLVAVMRKLIVLANTLITKNRIWTPNPP

SEQ ID NO: 62012 - protein, 403 aa, unidentified
MYSSFVGIDIGKWNHQAAFLELSGKETARSLAFQNTSEGFQSLLESLATFDKGQTVIGLEATGHYWLALFSFLVDNGWTVKVINPMQSDALRNMNIRKAKTDRKDCVVIADVLRFGRYTETVLPDEDLLQLRELSRCRVAHVELLGDLKRRVLGILDRIFPEFASCFSTVFGAAPTELLQECSDPEELADYDVDKLIKLLEKESRGRHSREKAEELKDKASRSVGTRFGRDALKFELKMLLEQLDFIKGQVKEFDKFLKNLMKNHELIYTIPGISVTLGSAILGEIGDVKRFGTPQQLQAFAGMDPSVTQSGNFQGTQGKMSKRGSPYLRRAVYLAANAARRFDPVFKEFYDRMIARGKHPKQALAAVGTKLLRVIHAVMTSQKPYNPQKLLPPAARISQVTP

SEQ ID NO: 62013 - protein, 373 aa, unidentified
MPKYSTAFGMDVHLRSTTVCALDADTGEAVTRRFPGNPWGEIAGWMDGFPGPSLAAYESGYLGFAPQRELAGLGVECVVAAVSKIPRSAADSASKNDRNDAARMAKAILAHDISPVWIPSPEVEGIRDLAGAYDGATARLATAKQRLLAFLARRGFVYGGTTPAGNPRKYWTYDFLRWLDKVRPEDDGGVRTLAALRNEVEAAAEARADLLSEYRAAVDASPIAAEVAALQSIKGCAFALAAAFSAEVGDFTRFRSGRQVTAYFGLAPSQRSSGDSVRLGGISGAGNALVRKLAVEGSWCYAAARPQPKLMPRDTGVPLEIRVHGRKGSERLLRRREELLARGMPAAKANAATAAELVRWLWALGMMCREGAE

SEQ ID NO: 62014 - protein, 320 aa, unidentified
MQTPALVLNIGVDVAKSEIVVACSEGSFPVRQVANQRPALLAFLKGLPAGSRIGVESTGSYHELFAGLAHQLGFLVFLLNPKDTHHYAKAVGLRGKTDRVDAELIARMIAHEHTKLHVWIPPTPQQRELDRLIKRRATLISLREALEMSLHELDGFGADLKALRTRFNQLIARLDLRVMALVDASPERKQNLTRLCTITGVGPVIGTALVNTLERVPLKSADTFVAFTGLDPRPDDSGQHRGKRRLSKRGPGELRRLLYLAALSGIKTKTWRPLYEHYRAKGLSSTATLVILARRIARTAWSIYTHKTEFDPGRLTKSLT

SEQ ID NO: 62015 - protein, 420 aa, unidentified
MFKIFRFNCCGLDVHKTWIYACIGITDSNGRTEYKEKRFSSFSKGLRELDEWLTLYSCDEVCMESSGKYWIPVFNVLEKNHKVTLAHPKYTKPQKGNKTDRKDAKWICDLFMCDMIKPSFIPPPDIRQLRDLLRYHRKLTNMETGEKNRAQNCLTVSNLKLDDVFSDVFGKSSLSITKYMLDHPGESFDVSPFVDKRCKTPIEEIQAAVDGAISKEQAIKLRQCLEHIDQLEEHKQSIKDEILAITKSYSDTLELLRTIPGFDKNPMTAITVLSEIGSDMTVFPTAKHLCSWGGCCPRNDQSNQKVKCRRISQAGTYLKPLLVQITNALIKSKSHSEFVERYRRLKARRGHKKAIIAICKMLLTAIWNILSKHVPYTTEGYFTSSPNIKKDKVLTTAQALSLLRMRGYTISDDNSQPIAS

SEQ ID NO: 62016 - protein, 340 aa, unidentified
MNVTTIGVDLAKSVFQLHGVAANGEVIFRKKLRRSAVLDFLRDLAPCLIGLEACATAHFWAREIGALGHDVRLIPPAYVKPYVKRQKNDAADAEAICEAVTRPTMRFVPIKSAERQGVLMLHRTRDLLMRQRTMTLNAVRAHLAEFGIITAQGPHKLLDLIREIRAGEVSGLPQIAQAPLESLATQLDTLAGEIRELERRLMVWHRADETSQRLETIPGIGIITATALAASIPDPSVFTSGRQFAAFLGLVPRQNSSGGKGRLGRISKMGDGYLRRLLVVGATSVVRRANTNTSATGAWVRCLLARKPSRVVTVAVANKTARIAWAILARGETYRAPMTA

SEQ ID NO: 62017 - protein, 324 aa, unidentified
MSGQYVGIDLHRRGSVVVHKNEAGEVLSVRRIDNDPVNLAAAVADAGDAPEVILEATYGWYWAADLLGELGCSLHLAAPSSLNWGQRRVKNDERDANDLIDLFRLGRMTEAWIAPPAIRELRELVRYRAKLVQLRSGLKAQLHSVMAKNGVLPSRWDMFGPGGTAQLDALDLPVAYTTRIASLRGLVDVFDQEVSDDPGYRAIQVIEGVGPILAAVFVAEIGDVTRFPSAPALCSWAGLTPKHRESDTKVTRGKITKQGSRIVRWAAIEAISKQRGGAKLRADYHALTARRGKHKARVAVARRLLTLVYYGLRDHEIRCLNIAA

SEQ ID NO: 62018 - protein, 322 aa, unidentified
MARVQGETTTEVAQHFAGIDVSKAYLDIRLTREKRSRRFTNDPAGFAALAAHLGPAPHLIVLEPTGRYHHAIWKALAAAGHGVAPVNPLHVRRFAESDGELSKTDALDAAVLARMAVERRPAAKAPPGEDQLRIKELTTSLADRIDRRAMLKAGRKEVRNPLIAKLDEAEIDLLNAAIGTLKAEIAGLIDADPARARCAEILVSIPGIGVSSAHRIIAEMPEIGTLDKKQAGALLGAAPRASESGKRKNRRRTKGGRRHLLAALHMPAIAAGRANPNLKAFRQRLKARGKPGPVITTAVLRKLIVLANALVQQNRLWAPKMG

SEQ ID NO: 62019 - protein, 334 aa, unidentified
MNTIALIGIDLGKHSFHVHCQEQSGKALLRKKFTRTKLMEFLADCSPATVVMEACAGAHFMARRIADLGHEAKLISPQFVRPFVKSNKNDFIDAEAICEAASRPSMRFVQPRTEAQQAMRALHRVRESLVRDKVKTTNQMQAFLLEFGISMPKGIAVIKRLSAVLAEHELPPYLVQVLLRLQAHYHYLVEQITEIETALSQEVAQDDIGQRLMTIPGIGPITASVLSSQLGDGKQYSRSRDFAASTGLVPRQYSTGGRTTLLGISKRGNKTLRQLLVLCARSFMQQIEHRQGKLADWVKQQLERKHSNIVACALANKLARIAWAITTQHTVFVA

SEQ ID NO: 62020 - protein, 388 aa, unidentified
MQIVTDRSQAPTAIRTDLGAIFVSLELSRSTWLVTSLSPGGGEKMSKHMIRSGDVAGLWSRFSQLKDKALDRTGQGVPIIVIQEAGLDGFWIHRLLQSERIESHVVDPASIATSRRRRRAKTDKIDGEALVRALLAYKRGEPRVCTMVRAPTPQEEDRRRICRERKTLTAERVEHVNRIKGLLFAQGISDYEPLLRKRWERLEELRTGDGRPLPEHLKAQIRRELDRLELTLQQIKAVETERNAMLSPSDDGTPAPGAMLKNLKGIGPEFAGVLWSEGLFRSFSNRRQVAAYAGLAPTPWRSGSVAHEQGVSKAGNPRLRTTMIQLAWLWVRHQPRSILTLWFHQRTQLNGGRVRKVLIVALARKLLIAFWKYVTAGVVLEGAEATSA

SEQ ID NO: 62021 - protein, 430 aa, unidentified
MKSNTQNAKIEAITEKTLVLGIDVGSETHYARAFDYRGVEYSKKPFKFSNTEAGFVTFKAWVLDIKEKHGKDKVIPGMEPTGHYWFNLGKFLQDNEMKPVLVNPHHVKKSKELDDNNPTKNDRKDPKVIAGLVREGRYMIPYLPDGVYADLRTASNIRFQLQAELTRIQNRISRWFNIYFPEYKTVYGKPDAKSGILILKAAPLPEDILTLGIDGVNQIWRDAKLRAVGKARAKILIEAAEHSVGSKEGAVSARMEIRMLLEDYESRNTRLQEVMVLIEELVKGIPMAEKLLEIKGVGIRTVSGFLAEVGDISRFNNPKELQKLAGLALVENSSGKHKGGTTISRRGRKRLRYLLFEVAMSLVAKNPEFRELHNYYTTRRLNPLKKMQSLMAIAAKLLRVFYAILTKGVGYDPKKMVNDIRRPAAYAQAA

SEQ ID NO: 62022 - protein, 410 aa, unidentified
MERVIEHGCGLDVHKKTVVACVRVPGRTSAREQHVRTFGTTTAELLALRDWLAGYGVTHVAMESTGVYWKPIFYLLEDAFTCVLANAAQIAQVPGRKTDVKDCVWIAQLLEHGLVRGSFVPPVPIRELRDLTRYRAALIGEHTRETNRLQKVLEDAGIKLASVASDVLGVSGRAMLDALTQGTRDPDVLADLARGALRRKLPALRQALAGRFRPHHAFLVSQVLAHLDYLDEVIETLSTHLDEVMAPLAEAVSRLDTIPGVNKRTAEVLIAEIGVDMGVFPTARHLASWAGLCPGNNESAGKHRSGRTRKGNRWLRGALIQAALAGGTRATKGAFAARYRRVMRHRGHKKAVVAVAHAMLVAAYHLLERHTTYQEPGADYYDRRHADRVRHRAIQTLERQGYRVTLEPAA

SEQ ID NO: 62023 - protein, 341 aa, unidentified
MQVTTIGIDLAKNVFQVHGVDANERVVFNKPLRRSQVLPFFAKLAPCLIGMEACASAHYWARELKKLGHNVRLMPAKDVMAYVKRGKNDAIDAAAGCEAVRRPTVRTVPVKTPEQQARLMQHRVRDLLIRQRTQAINALRSHLAELGIVAAQGYEGLKVLLAIVADASDTRLPEDARASLSALVAQIASCQAEIGTIDKRLLAQHRKNVDSKRLETIPGIGFLGASAIVATVPDATIFKKGRHFAAWIGIVSREDSTGGKQRLGPISKQGDRYLRRILIVGAFAVLRRARAHPEKYPWVTQLLARKPAKVVAVAIANKTARIAWAVLTKKEIYRVQTNAAA

SEQ ID NO: 62024 - protein, 409 aa, unidentified
MLFVGDDWAEDHHDVAVSDEQGRIVRTARLPEGVDGITRFHELVAAHLTGDADAPEQVMVCIEIDRGPWVRALVAAGYQVYGVNPKQAARHRETMSLSGAKSDKADACMLADMVRTRRHQLRLIAADSDEAEAVKVAARTHQTLIWERTRHMLRLRAALRDYFPAALLAYESLTLTGADTLELLAKAPDPARAAGLTNAQISAALKRARRRDIAVKAAAIRDALRTQHLGQAQTVTNAYAATVRAQVAILQTLNTQIKTLQGQVEAHFGQHPDAEIILSQPGLGAILGARVLGEFGDAPGRFADAKSRKNYAGTAPITRQSGKSKTVHARFVHNDRLVDALQLQAGAALLHDKGARAYYDELRARDMSHNAALRQLGNRLVGILHGCLKTGTLYNQATAWSHRYQHLAA

SEQ ID NO: 62025 - protein, 452 aa, unidentified
MQEGMDKRKGLSLECIELNAAGIDVGATEIFVAVPPDRDVQPVRRFPTFTADLRAMAAWLVRCRITTVAMESTGVYWIPPHEILEEAGIRICLVNSKHVKHVPGRKTDVQDCQWLQYLHSVGLLKASFRPDSQICAIRSLSRHRASLVESAAVHVQHMHKALTQMNLQIHHVLSDITGQSGMAIVEAIVAGQRDPAQLAALCHQQVRSSRETVIKSLAGNYRSEHLFTLRQSLISYKHYQALMADCDREIERLMRSLNGRIDPTRNGPVPPSDPRVQKRRKNQFHFQMSPELTRIFGVDLTAIPGISALTAHTLLAEIGPDLSRFPNVAAFASWLALCPANKKSGGKVLSSRTRKTNSRANCALRIAAQTLARSRSRLGCFYRSMRARLGGPQAITATAHKLARIVYHLLTTGQSYDETVFLEQDRKQAQRYEKRLRNQAKDLGFQLVPIPA

SEQ ID NO: 62026 - protein, 339 aa, unidentified
MNIKTIGLDIAKTIFHLICLDQYGNQLFKKKLRRGQLLRYFANLEPCIIAIEGCASSYYWQRELTKLGHTVKLLPAQHVKAHLRGNKNDYNDALAIAEASRVPTMREVTPKTIQQSMQALHRLRDKAIGERTALSNQLRGLLAEFGIIFPQGLSKIREGLYSVLEDAENDLTHTLRAALALKHSQFTQQDDLVAELSRLIKEAGNEQTQVDLLQSIPGYGEILSTAYYSVIGDGKAFAKGRDASASLGVVPKQHSSADKTKQLGISKRGDKYLRKMLINGARSVVNHAHKKDDALSVWVTRLIERRGRNKATVALANKLARIGWAVTVSGKPYQVNYGD

SEQ ID NO: 62027 - protein, 403 aa, unidentified
MTIFVGLDWGGSNHAVCIVDPAGKILDHFAVAHDRDGLADLVARLRRHALPSETPIAIERPSGLLVDVLVEAGFVVIPVHPNVVKACRPRYRAVAAKSDPGDAYILADILRTDGHRLAPLKPQSDAIKALRALVRGRDDLVASRLVLANQLRALLESFWPGPGGLFADIASPIALAFIQRYPTPESASRLAEKRMAAFLAQNQYCGRRSVADVLGRLRSAPSPIAAEAEADAKGELVRAIAATLESLVAQITKLSSRIEHAVAQLPEGRIVMSFPRAGKICAAQITAELGDVRTRFQSEDHLAAEAGVAPVTYQSGRSRGVGWRWACNKRLRAAVTCFADNSRHASPWAAKVYQDARTRGCKHPHAVRILARAWLRILWRAWQDGMPYDPQKHPAARAMLTQG

SEQ ID NO: 62028 - protein, 404 aa, unidentified
MKFCGIDWANDHHDALSIDENGQQVGSIRVAHSPEGLSQLDTYLERMAGPGGREQIACIVETTHGLLIAHLLEQGWPVYPVNPRTVEKRRAPSGAKTDTIDAYLLAKTGRADFQDLRRLNPDSEQIQELKTLTRDQDALIQMQTRLVNQLTACLKAYYPMALAVFGKVQQPSTLAFLRAYPTLQAARAASAEELTTLLKQARYPGARHKALQIVKHLQQPSLQATEVTTRTKGRLMLALVAQLEALLKQIADYDQEIERLFLSHADSELFCALPGAGQRLAPRLLAESGDDRSRYEDASSWQALAGTSPVLFQSGTYQKAHRRLGCIKPWRNALHQFAWQSTHQEAWARAYYQRKRAEGKSHSVAVRALANVWARILYAVWKTKQLYHTATFEQARQAHARRVG

SEQ ID NO: 62029 - protein, 362 aa, unidentified
MELSRSLWLITSLSPGLGERMSKHSVAAGDTSALLLRFAELRRKAKARCGKTFPIVTIQEAGLDGFWLHRVLESEGIESHVVDPASIATSRRRRRAKTDRLDGETLLRALMAFKRGEPPVCAMVKPPSPEEEDCRRLSRERGVLVAERTEHINRIKGLLFSQGVADYEPIRRDRRQRLEELRTGDGRPLPPRLKTQVARELDRLELLIDQIKAAEAERDALLAEQRAATPGPAGKMLANLKGIGPQFSSLLWLDGLFRHFDNRRQVASYAGLAPTPWQSGSISREQGVSKAGNPRLRKTLVELAWLWLRHQPDTALSRWFRERIQGGRGKKTTIVALARVRRHLGVRNRMQRNQVFRLRHDI

SEQ ID NO: 62030 - protein, 428 aa, unidentified
MGNRENRRLDEITTDTLIVGVDVAKAVQWARFVDDRGREIGKAVRFENNRKGFETIAAEIRQRCNNKLSSKPIMRVIVGMEPTGHYWKTLANYLMRKGLRVVGVNPFHTKKAKELDDNSPTKSDKKDALTIARLVQGGRFFDPYLPQDVYAELRGLSNARASIIKRGNAVKNNITAILDEYFPEIWTVFKKPLKGKASRQILRACPFPAFILALGEIGVLTEVKKAVKRTVGIKKVLQLITVAKQSIGVPYGLESAKLRLGWLLDELEQQLEQVEAAMQQILETTGYAGQMLSIKGIGVVTAASFLGEVGDPLRFQNARQIANYAGYNLVEDSSGKSKSGTCISKRGRSQLRSLLYLMAFTMVGKNPEMKRLYRYLITRKVNPLKKKQALVVVSKKIITVIFTLLKKQQSYRPELVFGAARQEMLLAA

SEQ ID NO: 62031 - protein, 427 aa, unidentified
MQQNSIPVERVVGLDAHPDSFTAALVQGPNPRAAIVEKTFDKVPMDQLIRWAKKHTTPSDLIVLEASGNSFHVARSLQAQGFRAQVLESAHLGKLKEAHANNDKISAVRIAKAFLAGTTKSVWVPDETTQMRRDWYHAHRKAVELVTALNNSLLSYLSDNGVRPDKSNSVLKQTRAKTMKWLRSARPWSVSQWQVIEIRLKDLYHAMESRRLWESLLAQEVAKDPLLLSLVRQTGVRDVVAFALGAVVGDVKRFAKPCKLVSYVGLNPAFDASGNERREGGVGGRGHRGLRNLLIESAHSVLRSREHPLGIRGRKLLARKGELKLVVAAVARWLLVSIWYQMMGLNEPIVEISKSLDQKLGVIISRIGKEGLAKLNLTRKELRQQMHQRLKTGRVYLLKPKGTPPGSTPAQDPTQELQAELDRVVPA

SEQ ID NO: 62032 - protein, 348 aa, unidentified
MAHFVGLDVSVKETSVCVVDDAGKVILEQKVLTEPDAIIALLTSLGVTYGRIGIEAGPLSQWLVNALTAAELPVICVETRHMKALLTAQQINKTDRNDARGIAQMMRVGLFKPVHVKTLVAQEQRMLLTSRKLLQRKLLDVESDLRGTLRNFGLKVGVVSGGRYETRVRELVAGFPRLAAIVEPLLSVRRVMRQQFAVLHKMLLDMVRGDPVCRRLMTAPGVGAVVALTYRATVDQPQRFVHSRAVGAHVGLTPKRYQSGEIDYDGGVSKCGDALLRTMLYEAAHVLLTRGAKWSWLKAWGVRVAQRRGMRRAIVAVARRLAVVLHRMWVDGSEFRWSKDGTAVPAVA

SEQ ID NO: 62033 - protein, 431 aa, unidentified
MSSKKQNTSTVSVVHDICCGLDVHKKTVCACLLWSDASGAEQCEVMEFETFTDDLFRLKEWLMERECPVVAMESTGPYWTPIHNILEGFFQVILVNARHMRNVPGRKTDLSDSRWLAGLLRHGLLKAAFIPPKYQRQWRDLTRMRNKYQQTVGHFKRRVHQLFQQANIKIDSVLSDLFGLTGRNLMKLLTSKKATPSLSEVEQCLRGSLKAKRTEVYRSIQGFFEKHHRDMLALMLETIEKLESQVKELDHRIVQAMRTYQGKMDLLDEIPGISDISGPAVLAEVGPTVEAFPNADALSSWCGLCPGNNQSGGKRFSGKSRVRKNRLKTIMIEIAWPAIKKKGSYYRAKYYALKARLGPKKAIVAVAHRILKAIYHVIKYDTPFKDLGEAYLLEKNKDAKIRYLTRQAALLGFELVPAHQAPAQPQQPIFP

SEQ ID NO: 62034 - protein, 320 aa, unidentified
MSGFIGIDVAQGDFVVAREGIAGSRSYPNTDRGCHDLVKDLSADAADLKLIVVESTGGYERRLVAALGAAGLPVVVVNPRHVRDFARSKGQLAKTDQIDAHVLSDFAASIKPDIRPLPSEEQQDLRELLTRHEQLVQMLVAEKSRLLQAEGQSRHVLRKKIKNHIKFLEREITMNDSDLDDTLKNSEVWREKDDLLQSVPGVGKGTSRTLLGFVPELGTVSAQEIAKLVGVAPFNHDSGKFRGSRHIGGGRGRARTMLYMATLSASRRNPVVRGWYERLLAAGKPKKVALVACMRKLLVVLNQMLKTKTRWQAHLTPTTA

SEQ ID NO: 62035 - protein, 324 aa, unidentified
MADKIRSSVFVGIDVSKLTLDIAVRPSGEYWQVNNTIEGIASLVAKLRSLKPISIVMEATGGYETAVAVSLSVINLPVAVINPRQSREFARTTGHRAKTDKIDASVLAHFADVIRPEPREMPDEQTMLLQAKLARRRQIVNNIAAEKNRLQQAHISIKPEIQDHITWMEAVRDRIDKELYDQLRNSVVWREKEKLLRSVPGVGPVTATTLLAELPELGHLDRKKIATLVGVAPLNCDSGKKHGKRFIWGGRASVRSALYMATFSARRFNKVIKEMYDRLILAGKPTKVATVACMRKLLTILNAMMHSGQSWQPELASSKLPVAS

SEQ ID NO: 62036 - protein, 514 aa, unidentified
MFKKPDSNQGLNVKSNRLSLLAFEFNGDTFIVIPIGIISKLVVTFLGAYFIIFKKQTIMKRKQISLEVVNPNAAGIDIGSRSHWVAVGQNAQDVKEFGVYSQDHQELCEWLKKHKVTTIAMESTGTYWQNLFSSLVVFGFDVILVNGRQTKNIKGQKTDILDCQWIQKLHTLGLLSSSFLPDSTTAVIRTYSRHRQNILKQSASAILKMQKYLRLMNMRLDVVVKDIVGLTGTKIITAFIAGEKSGKVLAQNRHYNCRKSEEEISKALQYNGREDYYFALKQEWETYLHLQKQIDQVDVQIKRHLEKVIDTDDDKKQHIASNKPYKRKNKNTIRNTDMNQLSYQYFEGVDLMAIEGVNDALLMAFIREIGLEGIKKFESSKQFTSWLRLAPNNKISGGRVLSHHLPKGSNRLKVALRQAANTIGNLKDGHLSDFFRRINYKKGRATAISATARKLAVIIWNMLTKGIPYHPPTEYLFLDQKRKLKMLSRIKKNIVKFDIRPEDIGLSKILNIST

SEQ ID NO: 62037 - protein, 347 aa, unidentified
MNYYAGIDVSLECSSVCVVDGTGKIVREAEIASEPEALITWLGSLGFRLERIGLEAGPLSQWLCAALRQAGLEVELLETRHVRDAFKAMSVKTDRNDARNIAQLMRLGWFRPVHCKSTEAQEARAVLGARKLLQSKLLDVQNSLRGILRGFGLKVGKTTERSFAARINELVAGHPRLEAVAQGLLAAHAVLLREFNVLDKLVGKIARAHPQARLLMTTPAVGPNIGLTYASAIDDPKRFKSSKAAGPHFGLTPRKYQSGQTDVSGRITKVGDASVREALYQAAHLILTRPIKNCSALKSWAMRIAKRAGMRKAKVALARKLAVILHRMLADGQPFNPAANTSTRVAT

SEQ ID NO: 62038 - protein, 427 aa, unidentified
MNSTQNDKISQITENTMVVGIDIGCFAHYARAFDWRGREISHLYHFLNCRDQFERFLRWMREVAHENGMKNILVGLEPTGHYWFALGQFLEEHHVTLCMVNPYHVKQTKELDDNNQTKNDQKDPKVIAKLVLAGRYSYPYVPKGVYADLRILSSMHLGLNKSLIQYKNQIARWFTIWFPEYREVFKDIRAKSSLLVLEKACTPDAILALGADGINAIWRGARIRAVGMKRANHLIEAAHRSIGQKEGRETAAFQMKMLLADYRKAKEQEDEVIEKLEQLCKRIPATEQMLSIQGIGIKTVAGFLAEVGDIGRFQTPKQIQKLAGLALKENSSGKHKGATTISRRGRARLRTLLFNAAIALIGKNDAYRKLHQHYTQRSKNPLKKKQSVVAISCKLIRIFYALLSKDIAYDEEKMLKDIVWESENTVA

SEQ ID NO: 62039 - protein, 321 aa, unidentified
MQSNNAVIYAGVDVAKATLQLHLQGQQSEFSNAPKGLDQLVAQLRKVPNVHVVCEATGGYERAMVKVLQQGQIPVSVTNPARVRAAAQAQGQRAKSDPIDAGGLTDYGQRYEPEPTPPTSATQDQLVALTQWLKQLIHGRALAKTQAEHHQDPFVRRQHAKLMTHLESQIEAVEKQIEALLEQDAPLQERVTCLDEIQGVGARTAWMVLAHMPELGRLNRHEVAALAGLAPWTRDSGTMKGRRCIGGGRPEVRLALYMAALSAARCNPVLRTFYKRLRAKGKLPKVALTAVMRRLLIYMNHCIKALLSETATARAGELKNA

SEQ ID NO: 62040 - protein, 347 aa, unidentified
MAVVMIGVDPHKGSHTAVAISPAEEPLGELRVRASAGQAQRLLDWAAAWPQRTWAIEGARGLGHLLAQQLLAAGEQVLDVQPKLGARVRLLATGDTNKNDPGDARSAAIAALRSPARRPVQQDDHAAVLKVWSKRHRDLGRMRTQVVCRLHAVLCDLVPGGVSKAITAGQAARLLGSITPSGAVEAARCELAAAFLDDLRRIDAQLRDTKKKLDVAVRAPGTTLTQVFGVGPVVAATVIGAVAEVFRFPDRHHFAACNGTAPIEVSSGPRKIYRLSRRGNRRLNHVIHMAAVTQIRYRHTDGRAYYDRKLAEGKTPKEALRALKRRVSDAIFAQLQADARRASADPR

SEQ ID NO: 62041 - protein, 342 aa, unidentified
MKHYVGLDVSQKETAVCVVDQDGKVLFEGKVPSDPGALAKVISKRAPGAERIGFETGAMASWLWHELNRVGLPVVCIDARHAHAALSVRMNKSDPNDARGLAELVRVGWYREVRVKSSDSQAIRAVLVARARLVGVRRNLENQVRSLLKESGLLFPRAIGGQFRTRVRQLVDDGHMLRAVIDGLLAVHEEVEAQQAVLDKRVRAAAKADETTRRLMSVPGVGVVTALAFRHTIDDPARFRSAQAVGAYLGLTPRRKQSGEMDFNGRISKWGDRLLRTYLFEAASVLLHRTQRWSALKAWGVRLMKRVGAKKAKVAVARKIAIILHCIWTDGTSFEWGTEQVA

SEQ ID NO: 62042 - protein, 335 aa, unidentified
MAKNVIQVHGVDERGKTVLKRQLKRDQVASFFANMPACLVGMEACGSAHHWARKLQSLGHEVKLMAPQFVKPYVKTNKNDVADAEAICEAVARPNMRFVPIKTAEQQSVLSLHRARQAFVKARTAQGNQIRGLLNEYGIVIPQGIGHVTRRLAEIVEDGENELPGRFRRLLQRLADNLKEMDRQVGELEREIKTWHRESEASRKLEKIPGIGALTASALTASIGDASCFTSGRQMAAWLGLVPRQRSTGGKATLLGISKRGDTYLRMLLIHGARAVIRVCERKPDPDRWLKDLMGRRNKNVAAVALANKNARIAWALLRYDKEYASDYAPAFAAE

SEQ ID NO: 62043 - protein, 323 aa, unidentified
MSTKATKKRRSFIGIDVSKKLLEVGVHQSDYHFRCPNDPKNFPALITELISLRPARILLEATGGLERALLQALHAAGLPVVVVNPRQVRDFAKALGLLAKTDRLDARVLAHFAAATQPAIRPVKAQQETELDALMGRRTQLSDMLVQEKNRRGSAATKDTRDDIEEHIEWLEERIQELDEKLKEQLKCSAVWQQKDKILQSVKGIGFVTSMALLADCPELGQLNRHQIAKLVGVAPLNRDSGQQRGARHIWGGRAQVRGKLYMATMAAIRFNPVLKSFYERLIAKHKPKKVAMVACMRKLLTIINVLIRENKLWNVDAQQLSA

SEQ ID NO: 62044 - protein, 353 aa, unidentified
MDRYIGLDVHSQTCTLAVLGPTGRKLRLQVLETTGPALIQAVRAIPGPKHICLEEGTQSAWIYELLEKEADELVVTMAERRGGSKDDARDALQLAEALRTRAIKRRVYKACGPYSELRAAVRSYGLLRDDLARTKNRLKALFRSRGMLTGDDVFHPEKHLRWEKKLPTPQQQSAALLCAQVESLTKLWAAAEERLLAASKPHSIIKVLSTAPAIGPIRAAQIVAIVVTPHRFRTSRQFWSYCGLAIVMRSSSDWVRGPHGDWLRSNVRQTRGLNRNRQPALKSIFKGAALQLATQMTNHPLHADYQRLLDAGTKPNLARLTIARRTAALVLSMWKHEEVYDPAKHRSHIIAQA

SEQ ID NO: 62045 - protein, 424 aa, unidentified
MKVTYQTCCGVDVHKSFLVATIVKTTGGIEPSYQKKRFSTFNNSILEFKQWLLDNDCHDVCMESTGKYWVPVFNLLEDDINVVIANPKWVKAVKGNKDDTKDSKWIGDLFRLGLVKGSYIPCKKVRILREYTRYRYKLVSCRSSEKNRYQNALTVCNVALDSVVSDIFGKSSTSIIDYLLEQSGSSINHEEIASKLLRSLKSKEDAVIESVEGYQMTDAQKYRMRLVRAHMDYITAEINDVDKMIENMISSNTDFENAVQFLCTIPGVKRDSAITIISEIGTDMSQFSSSKRLCCWAGLTPGSNESAGKKKSVRITRAGVYLKPALVQCAHAAVKSDKSPYYKKKYESLVKRRGKKRAIIAIARMILTAIYQMLSTGEQWNPSNLYKIDMPVALVEKQKAKAIKQARKLLQREGLLPPDEPLAS

SEQ ID NO: 62046 - protein, 369 aa, unidentified
MNNYTTVVGLDVHKESIVAVVLPRGHNEVSEKVSIDNHPKAIAKLVNRITKQGPVEFVYEAGPCGYQVQRQIAGLGQHCAVIAPGLTPVRPGDRVKTDKRDAVNLARFYRSGDLTEIRVPTCEEEAARDLPRAREDALADRLRARHRLSKFLLRQGRTYRETKSWGVAHKAWIKTQKFEFPTLQQTFEADLRALDEAEARLETLNQQTFDLAQRPEYRKAVNCLRALKGIDTLGALILVAEAQDFRRFSKASEFMSFTGLVGSEFSSGEKVRRGSITKAGNAHIRRVLVEAAWSQRYPDVERSGLAERRKGCPREVVQIAKKAQARLHRKFLRMTSRNKLPQVTVVAVARELAGFVWSIGQHIPAAVAV

SEQ ID NO: 62047 - protein, 367 aa, unidentified
MKKVSTVAAQRSTKISRQKLTVGLDLGDRSSWYCVLDETGQTVLEQKLSTTPKAMQEVFGAMPRSRIALETGMHSPWISRLLTELGHEVIVAHARNVRLIGESRKKDDRMDAQTLARLARIDPQLLSPVKHRSAKAQADLTVIRARAGLVRARTALVNTARGLAKSYGERLRGCNVRNMNPEKAEGLSPELQRALEPLLAALESLSERIREYNERIETLAQQSYPQTALLKQIKGVGTLIAVTYMLTLEDPHRFGKSRDVGCYLGLQPGRRNSGQSQPQMHISKEGDPYLRTLLVQGAQHILGPFGVDCDLRRWGLKLAERGGKSGKKRAIIATARKLAVLLHHLWVSGEAYEPLHNNRSRPLAIAA

SEQ ID NO: 62048 - protein, 337 aa, unidentified
MKTWHVTTVTESGYKYSFAQHSDARELFDRLNRKFPDAHFLSAYEAGFCGFSAHYALTELGFENIVVHAADIPTTGKEKAMKTDTVDSEKIGWALKRGELKGIYVKAKKYMDDTNLMRLRQRFVTDLSRQKNRTKHLLYTQGVTYPERFMKNRTHWSRNFMRWFRDEVSLLSEEKRSLVLLCDQVENTRKSILAVTREIRRLSTTDKYKENYDLLASVPGFGLIMSMSMLTELGNNVARFPNERTFVSMLELIPTCHDSGEKKVSGEKTNRGSKHLGPLIIETCWVAIYRDMELGAYYSNCCQSMKPHKAIIKVARKLACRAYAVLKTKAKYKYEQS

SEQ ID NO: 62049 - protein, 375 aa, unidentified
MDKGIKFFVALDVHKDSITMAAADAGSSRAPARQIGRVAHDVNKLLKALAKVGAPGEVHVVYEAGPTGYGLQRALAAKGYACEVIAPSLIPKRPGDRIKTDRRDSLNLAHLSRNGDLRAVWVPDPRDEAIRDVSRAREDAVNERTQARLRLRGFLLRHGVRYPGKTAWTKSFHNWLTTLNFGPDGSHTAFTEYQLAVQWADQRVDRLTRALGESIAGWRFEPAVQALMALRGVDVVTAIGLLAEIGDLSRFDHPRKLMGYLGLVPAEQSSGDTVQRGSITKTGNGHARRLLIEAAWHYRHTARIGQRAHARQQGVAEPLQAHAWKAQLRLNRRFAALQARGVQRNKICVAVARELAGFVWSIGRQAMDATVSKGV

SEQ ID NO: 62050 - protein, 343 aa, unidentified
MEKTTVVGVDLAKTVFEIAVSNTPGQVSEKRRLPRTKFLSFFKELPPATVVMEACGSAHYWGRVFEGFGHTVVLLPPHLVKPYITRNKTDRADAKGILEAYRNDQIHRVPIKTVEQQTLGAVHRLRSRWIKARTAQVNTARGLLREFGINIPVGIEHVVPEVRLLVEDADSKVPDSLRPLLVAVCDQIELSGQQIKLAEQQLEELAEQTALVNRLRTIPGIGLISGTALAAFVGTVDRFPTARHFACYLGLTPSERSSGTKRRLGSISKLGDIYLRTLLIHGARSVITHARQAKSNDHLRAWALRLVSRTRYNKAVTALANKLARITWAVWKSERDYEPQAAA

SEQ ID NO: 62051 - protein, 392 aa, unidentified
MLPSVHHANTEQTASDSPDLTFYASLELSRATWLVTCLLPERDRMSKYSTPGGDGGALLGLLERMRARAQQLTGRPAKVVVIQEAGLDGFWVHRLLEANGIESHVVDPASIAVPRRRRRAKTDAIDGETLLRTLLAWTRGEPRVCAMVVPPTPEEEDRRRVCRERAILLQERIRHTNRIKGLLAGQGITDFNPLHKDRRQLLDAARTGDGRPLPLQLKAEILREIELIELLLRQIADVEAAREVLAGPKAAKAPSPVVLLEQLKGIGPEIASVLYLEGLFRSFGNRRQLAAYAGLAPTPWRSGTVDQEQGISKADNPRLRSTMIELAWLWQRHQPASTLSRWFHTRVGNERGRIRRISIVALARKLLIAVWRYVTQGEVPEGAVLKARIVQA

SEQ ID NO: 62052 - protein, 311 aa, unidentified
MEHSRFVGIAISKDHLDVHVRPTGDSFRVRYDDAGLVTLVAHLRPLAPVVLVLEATGGYEVTVAATLASAALPVAVVNPRQVRDFARATGQLAKTDTLDARVLALFAEAVRPAARPVPDAQAAALGELIARRRQLVDMLGAEHNRRRLLRDRRLQRHLEAHIAWLEEALRRLDHDLTTLIRSTPVWRETDDLLRSVPGIGPVTAGTLIADLPERGRLDRRRIAALAGLAPIARDSGAFRGRRMIMGGRAHIRRVLYMATLTAITHNPVIRAFHQRRVAAGRPGKVALTAAMRKLLTILNAMLRDRRPWHPA

SEQ ID NO: 62053 - protein, 411 aa, unidentified
MEVVVVVGAGLDVHKKKIVACCLDGRSSPPKVVKCTFGTFRDELERLREWLLKRECTHVAMESTGVYWMPVHRVLEGSPLQIILGNARHMANVPGRKTDMSDAEWIAKLLRHGLIRPNFIPPRPIRDLRQITRYRRKLIDMRSSSELRVEKLLQTANIKLSSVASEVFGVSGRLMLRSLAKGMTDPVKLAALAKGTLRNKRAELTRAFRGTFTADDARLLAVELNVIDDLEKRLTNLEQLIEKQVGPFAEEIARLDTIPGVDRALATELIAEIGTDMTAWPSDRHFAAWTGTCPGNRESAGVRRRARTRDGNPYVKVILLRAAVCASRTVTSYLAARYRRLAARRGSRRAIVAVAHEIAIAIYHMLSKQQPYIAPKAADPAVVRKHKSNQLIRELRKLGFEVTCTPTANLI

SEQ ID NO: 62054 - protein, 338 aa, unidentified
MDRQYVGIDLHRRRSVVVRLSATGEKLSCVRVANDPLAVAAAVAEAGPDPEVVIEATYGWYWVVDLLQANGARVHLANPQGLNWGQRRVKNDERDAIDLADMLRLGRLPEAWIAPPATRELRELVRYRAKLVGLRSGLKAQVHAVMAKEGVLPAQGRMFGPAGNAQLDAMTLGDSYTTRVASLRDLIELYDREVGSLEGQIRRQLRSHRGYQAIQAIDGIGPTIAAILVAEIGDVTRFRFAEALCSWAGLTPKHRESDTTVRRGRITKQGSRLVRWAVIEAVSRYHGGPRLAGDFRRIAQRRGTNKARVAVARKMLTLVYYGLRDGEIRCLAQARAAA

SEQ ID NO: 62055 - protein, 345 aa, unidentified
MSHFVGLDVSQKMTAICVVDKDGRRIWRGQCPSVPEQISAALRRYAGDNARIGIETGAMTPWIVHELRNLGFEVVCLDARHARAALKMQINKNDQNDAEGLAQIVRTGWYRSVHVKSFDSHRARAIPGARTQLVGMTTRLSNHIRGVLKTFGLLPGAMRGLPFDRNVEVLLEGRSDVAPIVRPMLVAWRQLRVQIAALDKAIRAMVRMSGASRLLMSVPGVGLLSALAYVSTVEDPSRFARSRSVGAHLGLTPRQYQSGEVDRSGRISRCGDTLTRTLLYEAAGVILTRVKKASGLRDWAAAIAKRSGPGKARVALARKLSVILHSIWRSGEPFRWSEPKHVVVA

SEQ ID NO: 62056 - protein, 350 aa, unidentified
MEYIALDAHKRYSFVSVEGVDGNRRREARIEHAPGAIREFLQRFERGSPVAVETVGNWYWIVNEIEEAGMVPKLVHALHAKMMLASVNKTDRLDARGMNRLQRSGTLPTVWIPPSELRDQRELFRTRMVFTQQRTRLKNRVHATLAKYGLGVDGASDMFGKKGRQQLVGCLDKLPPHTRYAAECVLEQLDGVAVQIAALEARMKQVFAPSPAIKFLMSLPGVGFILAVVILSEVGDVGRFVAASHFASYSGTAPRIRASGGKVHVGKLRSDVNRYLKWAFVEAAEAIAVHRRHWPHRYAVRLYEQVRSRRGHQTAIGAVARHVAECTYWMLKKKEDYREPKKGAISSTRR

SEQ ID NO: 62057 - protein, 360 aa, unidentified
MKYNVMKYYISTTQYNCGIDLHARQMYVCLMDRQGKKLVHTNIRNNDFGYFLKLIAPYRHDLTVCCECMFGWYWLADACHQAGLSFVLAHALYLKAIHGGKNKNDRIDSEKLAHLLRTNLIPPAYVYPASLRPLRALLRQRLSFVWRRHESLARIQSHQLAHNRPLFKQSPSNRDEWEKRLLVQEPEVLGQVALQNEMAMVRAYDEQISQVEGQLKKHTRKVAARDYALVQSAPGIGKQLGLTILYEIGDIERFPTVKDFLSYCRLVKGTVASAGKIKGLRGARLGNPYLRWAFGEAAVIAKRDTDWFGPLAQRLEARMNGNKFKANTVLAIKLARAVYFMLKHKTVFDPQRLVMALQRN

SEQ ID NO: 62058 - protein, 352 aa, unidentified
MAVTIVETRTETRAITGGVDTHADVHVAAALDPIGGLLGVEEFPATPAGYARLLGWLGGFGTVCLVGIEGTGSYGAGLSRHVTAAGIRVVEVDRSDRQDRRRQGKSDPLDAVSAARAAQSGRARGAPKGRDGAVEAIRALMIARRGATRERTRTINQARALILTGPDDLRTRFARHATAALVAGIASLRPRPGDVPGYATRVALRELGRRAEFLDGQLERLDELIAPLVTARAPGLLALYGIGPHTAALLLIAAGDHPGRLRSEAAWAHLCAAAPIPASSGKVTRHRLNPGGDRQANHALWRIVFTRMGSDAATRAYVERRTAEGKSKAEIIRCLKRYVAREVYPHLRAAAG

SEQ ID NO: 62059 - protein, 384 aa, unidentified
MEKSSTLFVGLDVHKDSIDIATADAPRDGDVRHVGSIGGELALLDKSLRRLVSRGHRLHVVYEAGPCGFVIWRHLTAQGMHCEVVAPSSIPRPPGERVKTDRRDAMLLAKLARNNDLKAVRVPDAVDEAVRDLVRAREDAVRECRNARHRLKALLLRNGIGYSGRSAWTAAHLRWLAKVTLAHATQQIAFQEYLHAITQASARIARLEQAMRDVLSDWGLAPVVQALQALRGVQLIAAMTLVAELQDFLRFESPRQLMAYVGLVPSEHSSGPKRRQGAITKAGNSAARRMLVEVAWHYQHNARVSPIIATRHDGLPQAVTDIAWKAQLRLNGKFKRLLARRVMKTKAVVAVARELAGFVWAIGREVQTSGWRGIKAPSAAGAPA

SEQ ID NO: 62060 - protein, 348 aa, unidentified
MNKVVAGMDLHSNNVVIGVMDLAGQRVATGKVPCELPAVEKFLAPFKTRLEQVAVESTYNWYWLVDGLQAHKYPVVLANPAAMDQYSGLKHADDTNDAFFLAELLRLKILPTGHIYDAQLRPVRDLLRRRLMLVHQRTALMLSFKSLYTRTTGGELTLSELKALAVKEAQALYEHPANQLIAGMQIQHMEQLNASIAKLEKAVLGCARELPYYATLATLPGVGRILGMTITMEVGDIHRFAGPGNFASYCRTVAAERISNRKQKGENNAKCGNKYLAWAFVEAANFARRYDEQCRRWYDRKAAKTNQIIATKALACKLAKAAWHVMTAGVDYDAQRVFGPLPATPAKT

SEQ ID NO: 62061 - protein, 315 aa, unidentified
MRSTVAQSVGVDISKDALDVAIHPSGESFRVTNNPEGHRTLIKRLKEFDIARIVFEATGAYHRLLQQALVEAGLPWVKVNPRQARRFAQATGKLAKTDRCDALMLARMGAALELETRAPASKTVEALRELVNARDALIKDRVAALNRQAIAVSPLIKRQLAQRLRQIDGQIEAIDRRLKTLRNADADLCQRFDILTSIPGVGEVTANVLVVETPELGRLEHAQAASLVGLAPVPRDSGQTHGKRSIRGGRSRARQALYMPALNAIRLNPEFKAKYQAMVKAGKPAKVAIVAIMRKLLILANALIRDQRKWTPANP

SEQ ID NO: 62062 - protein, 289 aa, unidentified
MKYTPVGVDIAKHVIQIHFINEHTGEVVDKQLRRQDFLMFFGNREPCLIGMEACGGSQHWARELTKLGHKVRLLQARFVKAFVMGNKNDVMDARAIWMAVQQPGKEIAVKTEEQQSVLVLHRTRMQLVKFRTAQINALHGTLLEFGETIHKGRAAMEREFPEALERMKERLPPYLIMVLENQYNRLNELDSLIEDIEKQLTSVARQNETCKRLLDIPGVGPLIATAAVATMGEASAFKSGREFAAYVGLVPKQTGSGGKVRLLGISKRGDTYLRTLFIHGARAVALVAK

SEQ ID NO: 62063 - protein, 336 aa, unidentified
MDTVTAVGIDIAKNVFQIHGVDKKGRCILKKRLSREKLLDFMRSLSPCIVGIEACGSSHHWARELKKLGHEVKLMSPQYVKPYIKTNKNDCNDAEGICEAVSRPSMHFVSVKSIEQQDIQALHRIRQRLMEGRTALVNQIRGLLAEYGIVMAQGVSVVRRKLPEILSDENNNITSLAKEIFRPLYGELETLDKRIKEADMCVEKISKASEVCQRLVKVEGIGPLTATALVAGVGDVHVFKNGRQMAAWLGLVPRQRSSGNKQLLLGISKRGDSYLRTLLIHGARSVVSRVKEESSWLMGLIRRGGSNKACVALANKNARVLWALMAQGTEYQPRAL

SEQ ID NO: 62064 - protein, 383 aa, unidentified
MNDLIRIGVDTSKSVFQLHGVNAAEQPVLRKKLRRRQVIEFFQKLPATRVGIEACGASHHWGRELSALGHEVVLLPPQRVKPYVERNKNDAADAEAICEAMSRPRMSFVPVKTAEQQAALMLVGVRDQLVGRRTQLSNAIRGYAAEFGLVAAKGTDKIDPLLVRIASDENLPPLAKDLFATLGNEYVRLKPELRKIEAKLMAWHRGNELSRRLAEIPSVGPIGATLSVMKVGNPHAFRSGRDFSAWLGMTPKDHSTAGKVRLGAITKAGDEALRSVLVAGATSVIQQVRKGRGRPSPWLVALVKRKPPKLAAVALANKTARIIWKLMVSGERYNPQRAPQRFVPPTDSLAPGTRRQGQAACGGDLRSALTAPALRAPSAPPSA

SEQ ID NO: 62065 - protein, 414 aa, unidentified
MELLHERCAALDIGKKDLKACVRTPSPKGKRSRRQEIRTFATTTNALLELRDWLVGERVSLVVMEATGDYWRGAFYLLEDDLEVILVNAAHAKGLPGRKTDVCDSSWLCQMGECGLLRASFVPPEPIRQLRDLTRYRTTLATERTREAQRLEKELEDAGIKLSSVATDILGVSGRAMLAALIDGERDAQVLAEMAKARMRPKIPRLVQALTGNFGEHHAFLCRLHLERIDQLTAAIGELSARIEEQMLPFARQLEHLATIPGVGQSVAEVIVAETGADMSRFRTAAHLASWAGVCPGHHESAGKRRSGKTRHGNRWLTGALGTAALAAARTKDTTYLGARYRRLTRRAGKKKALVAVEHSILIAVWHMLTNDVEYTDLGGDYFARLDPERAMRRIVRQAKALGFTVRFDPIQAA

SEQ ID NO: 62066 - protein, 321 aa, unidentified
MATEVFVGIDVASASLEIATRPTDERWHVGNDPAGISALVTRLRSIRPELIVMEATGGLEVAVLGALGSVGLPVVAINPRQVRDFARAIGKLAKTDALDAQVLAHFAAAVRPAVRPLPDAATQELSALVTRRRQLVEMLTAEENRRKTAPSAIRSDIQEHIAWLRKRLHGVDRELGQAIRSSSLWREQEDVLRSVPGIGPVVSATLLAELPELGQLGRKQLAALVGLAPVNRDSGTLRGKRTIWGGRATVRAALYMGALVGSRCNPVLHAMYIRLIAAGKTKKLALTACMHKLLTILNAMLKHRTTWAPTRPPAACATTNS

SEQ ID NO: 62067 - protein, 315 aa, unidentified
MSHPATPSRFIGCDVGKTAIVVFDAASGRTRAVANTPEALSGFAASLEATCFVVCEATGGYERDLLAALIAAGVPACRADARKVKAFIRSFGTLGKSDAIDANALARYGRDRYAELPLWSAREPERERLQALVLARRDLVKDRLAYANRRAAPAAEPVHPYLEALVESFDAQINAIEADIKTLCAACEPIAKAVNVLVAIPGVGQKTAAALIALMPELGSLPRRQAAALAGLAPHPNQSGQTDAYRRTRGGRPEVKRVLFMAAISAAKHNPTLSAFYKRFLSAGKKPLVAITAIMRKLIVIANAKLRTAKPLQVS

SEQ ID NO: 62068 - protein, 342 aa, unidentified
MNEFQAYHYIGLDIHKHSVVFCEKTMAGKIVEQGSLPARRADLLSFAHSRSKPWIGGMEATLFSGWVYDTLVPYAVELHVGHPLRLKALSKNKNDRIDARLLANLLRADLFPSCYMAPREVRALRRVLRYRNFLVFEATRMKNKTSGLLMEVGVQYNKKKLHGKKYFSELLGSLGEVPSSVRELLQMTRTSLELFTRAQHRLLQALKDHPALSGRLELLKSIGGVGDIVALTWALEIDDPNRFTSIKKAQSYCGLCSAQHESAGKQWRAPLSKERNPHLQRVLIEAAKLAPSKRGCLERVYAAALERGYNGNRATLAVARKLVAYLMAVDKSGSFFIEPQLG

SEQ ID NO: 62069 - protein, 421 aa, unidentified
MGKIIERCAGIDIGKRFLLCCVMTGAAHEEPRSETRRFDTTVPGLERLRNWLNDEQVTDVVMESTGSYWIPVFNLLEGHVTIVLANPEEVKNRKGHKTDRKDAEHLADLLRHNHVRSSYIPAEPVRQLRDLTRRRVQLTQDATRERNRVQKLLEQVNVKIGSVLTDVFGVSGLQMLLALLEGRAAPAEIAGLARGSAKRKIPQLIEAIEGNRMCDHVRFLIRGCLRHLACLEEETEELDGEILRRMQLSTFQKAFTLLQTIPGVGELSAATILAETGPDLSSFPTVEQMASWAGVCPGNRESAGIQKGSQTTHGNPYLCTALVQCAWAATRKRDSVFRSRFQRLAARRGEKRAIIAAAHHMLVILYCMLKRGVPFLGAEHAPKQRRRERRAHHHLRCLRRLGFSVDIRLSSESTPPDTISR

SEQ ID NO: 62070 - protein, 348 aa, unidentified
MTITTVGIDLAKNVFAVHCVDQHGKTVLVKPKVSRAALPELIASLPPCVIGMEACSGAHYWARLFRQYGHEPRLMAAKFVSPYRMAGKSGKNDAADAQAICEAVRRPHMRFVPVKDESQQAMQCLHRIRQGFIEEKTATYNRLRGLISEFGVIAPQSTDALRHMVSEQKSSLPLQVQQCVNDLLEHIDRIEDNITEYDRILSRMAKTDHRSQRLMELKGIGPTTACALVASIGNAHDFKNGRQLAAWLGLTPSQYSSGGKSKLGRITKAGDSYLRTLLVQGARSVLIGAEKRTDLFSRWVCSLVDRRGYWRAVVAIAAKNARLCWHHCITVMISGCTQPAKARNKITI

SEQ ID NO: 62071 - protein, 483 aa, unidentified
MAKRKTSTFERLQNGKLGRNERRELQRRLCSADPGLTIIYPDAAGVDIGNESHHVAVPPGRDAVPVREFGAWTAALEEMAQWLKGCGIQTVVMQSTGVYWMAAYDVLTRHGFDVHLVDARGTKNLPGRKSDVQECQWLMKLQTYGLLRRCFLPSEQIRKVRTVWRLRGEYIQDAGRAVQHMQRALIQMNIQLPNAISDLSGVTGQAILRAMLKGERDPEKLAALRHRQVQASREEIVHSLQGDWKEDIVFELRQAVDCYDFYQKQVGECDRQLKEYMAALPNRNLAEAVSEPTAKPEKGKKRGSANRPRKPKGNQPAFDLESELQRVLGVNAKTINGLDVMTIQTVLAEVGPDLSAWKTEQHWSSWLNLAPKRDVSGGKVIRHTREHRTNRVGNAFRLAAQALFRSKTYLGAKYRYLRAKLGAGKAVKAMARTLACLYYRLIAKGQVWVDRGSQEFERKKQQRDLAGLERKASNLGMKLVPVA

SEQ ID NO: 62072 - protein, 465 aa, unidentified
MTHRRRSPGPPAGAEPALLERINPNTAGIDCGAEMHYVAVPPDRAASAVRAFKTFTAELHRLADWLTSCGVHSVAMESTGVYWIPLYEILESRGFDVVLVNARHVKNVPGRKSDVVDCQWLQQLHSVGLRRASFRPAAAMAALRSYLRHRESLVQGAATHVQRMQKALVQMNLRLSVVLSDLTGATGQRIVRDIVAGQTDPWVLAQHRDARCRASEAELIAALTGHYRPEHLFVLQQNLELFDAHQRQIAACDTAIEGHVATLVAQAPPAASPLPAPRTRQKPRANEPRFELRTPLHQLTGVDLTQIDGIGPYGALRLLGEIGTDMTRWPSERHFTSWLTLAPQNKVSGGRRLSSKTPPSANRAAAILRIAAMTLGRTQTALGAFYRRLAYRVGKAKAITATARKLAILVYRTLKEGLVYQDPGATAYDAQHRRSALRRLRLRAAHLGFSLVNRETGEVLDGAVS

SEQ ID NO: 62073 - protein, 379 aa, unidentified
MGKDIRFVGLDVHGETIAGAVSEQDGSELELGVIANRPEAVRRLIKKLGPVEKLRVCYEAGPCGYVLYWQLTGLGVDCQVVAPSLIPQKAGDRVKTDRRDAKKLARMYRAGLLTAVWVPDAEQEALRDLVRAREAAKKDELRARHRLGKFLLRRGCRAPQGVEAWTKRHSEWLRSLRLEHAAQEVVFIDYLHEVDHAQERLVRLERAIDEAVERVPASKRAVIEGLQALRGVSKVTAVTVYSEVGELSRFARPKLMMGYTGMVSSEHSSAGRIRRGGITKTGNAHLRRVLVQAAWAYCRRPNLSPALKKRQAGLSEEIKEISWKAQHRLYGRYRRLVSKGKTPQQAITAVARELVGFIWAIGVDVEGRIRQESQGHAAA

SEQ ID NO: 62074 - protein, 347 aa, unidentified
MVYVGIDLHRNRSQIAVLDQQGTELLSRRIINDPETFLSLLHELGDDAQVALEATYGWEWLADLLEDAGYELHLAHPLRTKAIAAARVKTDAVDARTLAHLLRADLLPEAYIAPRELRDLRDLLRHRVALTRMRSALKQRVGAILAKNGIARPYSNLFGPGGSRFLAELQLREGPRRRLDSLLALIGAFDHEIEQTSREIDARAKEDPYVEVLCQIRGVGRYIAMLVVAEVGDITRFPSARHLCAWAGLTPTVRSSDGKARLGHISGQGSPALRWALVEAAQHAPTGGGPLRQSYERIAKRRGKQVAKVAVARKILTLCYYGLRDGEIRCLAPRAKARTIRSTAVAR

SEQ ID NO: 62075 - protein, 398 aa, unidentified
MTESSDYESVQVFIGVDVGKDTHHAVAINRSGKRLFDKALPNDENKLRSLISDLKQHGQILLVVDQPATIGALPVAVARSEGVLVGYLPGLAMRRIADLHAGEAKTDARDAAIIAEAARTLPHALRTLKLADEQIAELSMLCGFDDDLAAQTTQASNRIRGLLTQIHPALERVLGPRLEHPAVLDLLQRYPSPEKLASLGEKKLAAQLCKLAPRLGKRLAADIAQALAEQTVVVPGTNAAAVVLPRLALQLITLRKQRDEVALEVEQRVLAHPLYPVLTSMPGVGVRTAARLLTEVACRAFASAAHLAAYAGLAPVTRRSGSSIRGEHPSRRGNKALKRALFLSAFAALRDPLSRVYYTRKMSQGKRHNQALIALARRRCDVLFAMMRDGTFYTPQGS

SEQ ID NO: 62076 - protein, 407 aa, unidentified
MNPLFVGIDVGSRNNAVYIMLPDGSKHSSFSVQNNLGGAQTLSKRVVAALTEKNLSAAVIGMEATSVYGNNLLYFLREDGALGRFERKLHVLNPKQVKKFKDAYSDLPKNDLIDAFVIADNLRFGRITAPVYMDDYRYKALQNLTRARFFAVQNLTREKQRFMNYLFMKCSGLTQEKIFSDNFGATALALFEEFETPDDMANMDIDQLASFIAHKGKNRSPRPLEIAKALQAAARGSYRLPKTVTDSVNQVLALSISSMRAMQSQIKALDKEIQRQFDNIPNTLTSVPGIGPVFSAGIIAEIGDINRFNGQAALAKFAGLAWSQHQSGMFEAHNTRLIRSGNRFLKYYLCEAAHSLVRCDTEYKRYYDLKFKEVNKYQHKRALALTARKLVRLVFRLLKDNRLYKPA

SEQ ID NO: 62077 - protein, 343 aa, unidentified
MKLQALGVDLGKTVFHLVGLDSTGRVVIRKRCSRTQLLAFTANLQVQLIGMEACSGAHFLGRALREQGHEVRLMPAQYVKPYVQTNKSDYLDAEAIAEAVQRPRMRFVPIKTEEQLDLQALHRVRERWVMRRTAVVNQIRSLLLERGLTLPKGRSHLDEQLPRILEDAELNLSDSFRVLLAQLKLELEQLAARIEEMDRVIQKTARENEACQRLTEIPGVGPVTATALIAAVGNGSTFKKGRNLSAWMGIVPGEYSTGGKQKLLGISKRGNTYLRRLFVQGARSVLQQRHKQVPGLSSWLAQLLGRTHQNVVVVALANKLVRMAWAVLYKNERYRAPVFAVTT

SEQ ID NO: 62078 - protein, 408 aa, unidentified
MQRRENLLYVGIDLHKETHTAVMVNCWNEKLEVVVIENKPREFKKLEEKVNRKSSILGLEPIYGLENAYGYGRSLAVWLIENGYIVKDINPALAYDQRKSAPMYRKNDEHDAYCVATVLINQLHTLPDAKPKDNEWTLAQLVNRRDLLVKDDIRFKNGLHEQISMAYSSYSKFFSEIDGKCAMYFWKTYPSPVHLQEKTAEDLTIEFKEISRSARRDKAELILDCVYNDGNTIREYQESRDFITTSLVRDLEHHKEALAGLDKEIEKILLSFDYKLTNMPGIGTSIASKLIAEIGDIRRFPSADKLARFAGVAPVKFSFVGKGKEQSSRQGNRQLHGLFYFLAVTMVSKPKNGIPNHPVFYEYYMRKIGEEKTKSQALVCIMRRLVNIVYGMMKNKTEYREPIREEEQ

SEQ ID NO: 62079 - protein, 352 aa, unidentified
MKIIGCDFHPSYQQIAMMDTETGELWEGRLEHEQGEARRFYQALQGQTVRVGMEAVGNSHWFEQLLAELGHELWIGDAAQIRRLVVRQQKTDRRDAKHILDLLLDGRFPRLWVPSPQMRDVRQLLRHRQKLVEIRTQVKNQLQHLALNQGVRRKSRLWSVQGRAVLEQLPLPPWTARRRGDLLAMLDRLQEQVGELDRAVRAEAEQRPEVRLLMTHPGVGPVVGLAYVLTIGPITRFPRGKQVASYLGLIPSEHTSGGHQKFGPISKQGNTMMRTLLVEAAQTAARLDEQLRRQYGRLKARKHSALAKVMVARKLAVRMYWMLRENKPYAQLYAQRPVARMQGSPSHSVVAS

SEQ ID NO: 62080 - protein, 392 aa, unidentified
MLFVGIDVASQKHDVAMTTTHGKTFSAPFTIANNLEGFKKLRDEIVSHTEHLDDVRIGIEETGIYSKNIAEFLALCGFTIHMINPVLTSNSRKSQSIRPTKTDSIDALVICRYLEFNYQRLNSYTSTLYTLSEIKSLSRARINVQKRLVQAKVEWTRLLDISFPEFRLKFDQHSKWVYELFKHYPTPDKIGKMHVNTLVSIVRTMGNRYETANTIKSLAKSTVGSSCVTTRILLKNTLADILHYTSQMDAFAEEIEAMIKTHFPHLLTIPGMGPVTAGLIIGEIGDVNRFHSPSALVAFAGMDPVVHESGLFKAKKVQLSKRGSKYLRSALYTVTKVAIINPKIKNNKFRDKYDKKITEGKHHNSAIFCAAKNMCNTIFAILQSGKAFDYSL

SEQ ID NO: 62081 - protein, 334 aa, unidentified
MEKITTVGIDLAKSVFSLHGVDGAGRVVLRRTVRRDQLLGVVASLSPCLIGMEACSGAHEWGRRFQEHGHTVRLMAPKFVAPYRKSGKNDGNDAEAICEAVTRPNMRFVPVKSIEQQALLALHRVRQGFVVERTATINRLRGLMSEFGVVLPLRSVTVRRQAAAAAEGLPDLARRVIGDLLEQLRVLDERIGGYDREIEAQAKLCEPAQRLMKIRGIGPTTALAIVATVGNAREFKNGRQFAAWIGLVPGQYSTGGKTRLGHISKRGDSYLRNLLVQGARSVLNSAGMHQDRMSRWILELQPRRGYYRTLVAIANKNARIAWALLAKNETLRSV

SEQ ID NO: 62082 - protein, 413 aa, unidentified
MAEETISWFAGVDWGSERHQVCLLDARGTTVGEREFPHSGEGLAELGDWLLSMASAASTVAVAIEVPHGPVVDALIDRGFVVYAINPKQLDRLRDRFSVAGAKDDRRDAYVQADGLRTDRRLFRHLQVADPRLIELRAWSRLTEELQGERVRLSNRVRHQLWRYYPQMQKLTNDLAAPWFLELWTVASTPAKAGRLRKSTVERLLKQYRIRRIDAETVLRILREPAIKVAEGVAEAASIHMRSLVARLRIVDRELREAERKLDEVCTAVSEIEQTSGESLQRRDVAILRSMPGIGRINLATLLSEASGPLSRRDYEGLRTLSGAAPVTKRSGKSLIVVRRYAAHVRLRDTVYHWARVATQRDPKSRARYTALRKRGHSHGRALRSVADRLLALACVLLQRQTLFDPHFGRPTT

SEQ ID NO: 62083 - protein, 408 aa, unidentified
MRIIGLDIHRAFAEAVAWSNGKLSRLGRIIMRREPLEEFARQLSKSDIVIVEATGNAASVAAVIGPHVSRVVIANPKQVRLIAHAKIKTDKIDAGVLAQLYASGFLPEVWIADETTQALRRQVTRRNQIVRQRSRLKNIIQSILHAHLIPSCPHQDLCGPKGRAWLSEQILPGDERLAVERHLREFDRLTDDLKAIERDLAQSALADERVKRLMTIPGIDMVVALALIAAIGNIERFAKPEQLVGYLGLNPSVRQSGPGPAYHGRITKQGRGHARGMLVEAGWAAARSPGPLRSFFLRVQSRRGQHVAAVATARKLAILIWHLLTKNENYLWARPALHARKLRDLELKAGHRPARGQKGTAHAYNLQSQRDQERRWVEQAEVAYARFVAGWNARGPKVRTGAAKEERH

SEQ ID NO: 62084 - protein, 339 aa, unidentified
MKLYGGIDLHSSNNYLAISDEQDKRIYKRRLPNMPDVILAELEPYREDLQGVVVESTFNWYWLVDLLLDNGFTVHLANPAGIQKYKGLKHSTDKHDAFWLAHLLRLGILPEGYIYPRESRPVRDLLRKRGHLVQLRTSLINSLQGILRRNTGQKLNVNKIKQLTTDHVAPLLAGQEDLELSGLISKEVIDHLTAQIKRIESAVKEKAKIRKPFESLQTIPGVGMVLCLTIMLEIGDIRRFPKVGNFTSYCRKVPTEWTSNEKKKGKGNKKNGNKYLAWAFSEAAELARRFDETARSYYNRKAARTKAMVARGALAHKLARAAYFIMRDGVEFDHRKLFG

SEQ ID NO: 62085 - protein, 345 aa, unidentified
MNIIRVGVDIAKSVFHVHGVDRHDKTQWQGKYARHKWLDALSRKVPAGAEIGMEACASSHHWARELQKRGYCVRLIAAQFVKPYVKSNKNDRVDAEAICEAMSRPNMRYVAPKTVAQQDVQAAHRIREELVGQRTAKANQIRGLVGEYGIVAPVGIQQLRRALPRWLEDAENGLSDSFRILLNGLADDLRYLDDRIAALDQRITDTVNQDPVARRLMTLRGVGPLTASALSGALGDGQAFRRGRDFAASLGLTPRQHSTGGRDRLLGISKRGDSYVRKLLVHGARAVLRHVNGKDDGLSHWLKGLVSRKHVNVATVALANKTARIAWALVHNGTAYDDKLAAVGT

SEQ ID NO: 62086 - protein, 362 aa, unidentified
MTKVIIGVDPHKLSATIEVVDRHEKLLGSGRFSTDQAGYSAMRTYAKNWPDRLWAIEGSNGAGRPLAQRLLEAGEHVVDVPAKLAARVRLFDTGHNRKTDARDAHSIAVVAVRTKTLRVLRPDGELEALRMLCDRREELTRLRVQTVNRLQRLLAELIPGQAKKDLTALQAKAILATVRPRDIAGKTRRRIAAEELADLVAVEAKMKKATAELKVLVKARGSRLMDLTGVGPVVAARTLADVGDIARFADRNRFASWTGTAPLDASSGEQNRHRLSRAGNRRMNHMIHIAAISQIRLDTEGRAYYRRKRADGKTKLEALRCLKRRISDAIYRQLLADAGRAQLDNAHQPVGTGRALRGALLH

SEQ ID NO: 62087 - protein, 430 aa, unidentified
MLCTELTSTFTQCQDGRTRLSKVFCGIDWAENHHDIALVDQDGIQLAKLRISDDSAGFHALLELLARHGDSPEAPIPVAIETPRGLLVASLRATGRKIYAINPLAAARYRDRSSVARAKSDAADARVLANILRTDMAAHRPLPADTELAQSVAVLARAHQDAVWDKTQMVNRLRSHLREYYPAALSGFHGSGTLGLDSAHARAVLAAAPTPATAARFTRSQLRALLKRAGRLRRGIEAEAERLREIFRKDHLHQLPQVEQAMGKQTQALIQQLDAACRSVDDLAAATEEAFLAHPDAEIITSFPGLSIMSGARVLAEVGDDRERFADARALKAYAGAAPVTRASGRSHVVVARAVKNQRLAAVGYMWAFAALRTQEPRDHYDRRRAGGERHTAALRNLFNKLLGCLYHCLQNGTLYDAERAFTPPVALAA

SEQ ID NO: 62088 - protein, 414 aa, unidentified
MGTAATAFVGIDVSKDSLDACLLLPGGPERRATFGNDARGHAALLAWADRHAAGVVAEGGLHFCLEATGPYSEAPADALAAAGRLVSVANPARVKAHAAASGQGNKTDPADARAIAQFARDRCPPPWQPPAPEVRELQGLARRADDLVEMAARDKGRLASPALTKAARRSVERTVCLLEKEAQKVRTQADALIAASPALRADRELLETIAGVGRQTATTVLAELPAVERLPSAESAAAACGLAPREFRSGSSVRKRTRLSKAGNARLRKALYLPTLTAIRFNPLLKRFFERLVAAGKPKMQAVGACMRKLVMLCYGVLKNRAAFDPAWASKKRRRQTRLVCEASSRLDFGPRQGGRCDGQDGVPARADELQGPVPAAPELPRLRPAHVAGLHQPPHPRHPGRLHPAEAVGPPLP

SEQ ID NO: 62089 - protein, 463 aa, unidentified
MQTSRGKTSQPGSEREVEGLPVVRPNVAGIDLGSTKHWVCAPKLGGPGREEEEFGATTPELERMAAWLKERNVESVAMESTGVYWIAPHEVLERHGLEVMLVDTRQLARVPGRKKTDRVDCKWIQRLHRCGLLMGSFRPNEQVCMLRTLVRDKGTLVAEAGDWLRRMQKSLDQMNVRVHRAVADIDGMTGMAIVRAIVAGERDARQLAKLRDRRCHKSEEEIAEQLSGHWRADHLFSLKQGLKMYDATQERIAEYEQEIMRKLGEMEREECRGQEPPMNNPQKAKAIRKRGEEPMRQALYRMSGVDLTGIDAIGVETVQLVLSEYGPDLSRFPTEHQFVSHVTLAPHKPTSGGKPVKKPKKRGSASTRVAAGLRMAALSLRHSETALGAYYRHIARRKAGDVAVFATARKLATLIYRLLRWGQPYVDEGAAAYEKRYQQARVKSLTAAAKDLGYQLTPNASQA

SEQ ID NO: 62090 - protein, 401 aa, unidentified
MVSDFRKGRYNLMKIFVGIDIAKLNHFAAAISSDGEILIEPFKFTNDADGFQLLVSKLESFDKNSIIIGLESTAHYGDNLVRYLVAEFYQVCVLNPIKTCQMRKNNVRKTKTDKVDTFVIAKTLMMQDDLRFITFFDLDMMDLKALGRFRQKTIKQRTRLKIQLTTYVDQVFPEIQYFFKSGLHQNAVYALLKEAPSPKEIASMHMTHLANLLKVNSHGHFTKEQAKELRVLAQKSVGANDSAISIQITQTIQQIELLDSQLEKIEAEMTDIMRFNDSVIMTIPGIGYINGGMILGEIGDIHRFSNPNKLLAFAGLDPSVYQSGNFQAKTTRMSKRGSRVLRYALVNAAWNVVRNNATFKAYYDAKRAEGRSHYNALGHCAGKLVRVIWKMLTDEVEFNLE

SEQ ID NO: 62091 - protein, 383 aa, unidentified
MRKEPVVKKDISWVGLDAHKRNIAVAVLWPGRREAEQWEIENTPKSVERLLKKLEKEANGGEVRCCYEAGPCGYALQRQLEKDGRVVCEVIAPSLIPSKPGERIKTDRRDALKLAQLLKAGLLTAVQPPSEEQEAVRDLCRCREDAREDLHRVRHRLLKFLLRRGHIFNETSRPWSEKHRRWLKGLSFENAVDQSVLDEYLLAVAQTEQRLKALDQKLEEAAQLPIYKEPVGWLRCFRGIDTITAMIFAAELHGIERFDNPRKLAAYLGVVPSEYSSSDKTRRGSITKTGNRHIRRALVQACWQYRHRAGVGSKLAERRRGQPPRVIGIADAAQRRLCSRYARLSERGKPKNKVVIAIVRELVGFLWAALHPSQLESRTRRAT

SEQ ID NO: 62092 - protein, 391 aa, unidentified
MIYIGIDVAKDKHDCFITNSDSEVLFKAFTILNNLDGFNDLYQKIESVMDDVTKVKVGLEATGHYSYNLLGYLIDKGLPTYVINPLHTNLYRKSLSLRQTKTDKVDARTIASMLMSDVNLKSYSDTSYHNEELKSLTRYRFDKVKERAKLKTSVSRLVCILFPELEKLVPTLHMASVYALLSEFPSAKHVATAHLTRLTNLLSESSKGRYGKDTAITFRDSARASIGSNMPAKSLELKHTIKLIQELDSEIDEIENEIKIIMDEINSPILSIPGINYRMGAMIIAEIGDFNRFDSPDKILAYAGFSPSTYQSGQLDGAYAHMENRGSRYLRYALYNATKYVCHWDPTFAAYLAKKRAEGKHYNVAISHAVKKLVRVIYHLEKTKQQYIKAA

SEQ ID NO: 62093 - protein, 323 aa, unidentified
MEYGLSTGRRAQHQWRTATTEYIGLDVSMKETAISIRREGKRIWRGKCASDPAVIAELIRKRAPTVKRAVFETGPLSVWFYHALHAERLPAICIDARHAKAALDMAVNKTDANDAHGLAHLAEAGFFREVRVKGFDSMLARTLVAARTRLVRMTTELSNQIRGIMKTSGLVVPAGKGSTFEKNVRSLLINHKDLADIVLPMLDAWLGLRTRAAELGRQLLVDARQSQACRILMSIPGVGAITATSFATAIEDPGNFTKSRAVGAWIGLTTRRYQSGDVDYDGHISRRGDSHLRGLLYEAASVILARSSKESYLRTWGLQLRNG

SEQ ID NO: 62094 - protein, 343 aa, unidentified
MDHFAGLDVSVKDTSVCIVDDAGRIRLEVKVASEPDALLTVLRNPAYRFKRIGLEAGPLSQWLFSALAEADLPVICVETRHMRAVLKAQINKTDRNDARGIAQMMRVGLYRPVHVKTLRSQKLRMLLTHRKLLQAKAIAVENDLRATLRNFGLKVGMVGTIKFEARVKELVENFPDLMALVEPLLVVRRVLREQISILHRRVLAAVRNDEVCHRLMTVPGVGPVVALTYRATVDVPARFRKSKSVGAVLGLTPAKDQSGERDRPGAISRCGDEMMRTTLYEAAQVMLLRSAKWSWLKAWAMKIARHRGMKKAIVALARRLAVIMHRIWTDGTEFRWTREAAAA

SEQ ID NO: 62095 - protein, 381 aa, unidentified
MSKLDICMIDLALTFTLCATGVVCMPTKNSPKKRDLDELACVFPNAAGLDIGSAEIVVAVPPDRDAEPVRVFATFTPDLHALVAWLVKSGIDTVAIESTGVFSLPIYELLEAAGISPDLVNARHVKTVPGRKTDWNDAQWLQKLHALGLLGASFRGDAEIRTLRTLVRYRAELRERRAPDINHMIQALKHMNIQLNLVLTDITGKSGLAILRAIMAGERDAQRLAHFRESSCKHSEAEIAKALTGRWDDAQLFILQQALEIFDYYSTKITECDNKLEQQYQAMESRAEKEAMLPDLPPAKKDSRSKNALTFNARAQIAGVVGVDLVAVMGLSAVSVQTIISEIGTDMELFPTVKHFCSWLGLAPHNDKSGGKVLRSRTNHA

SEQ ID NO: 62096 - protein, 414 aa, unidentified
MLKIVYRVCCGMDVHKSFVVACIASTNEQGVTTYKSKRFSTFTGDLRRCAAWLSENNCKDVCMESTGKYWIPIYNILERTCNIVLAHPKYVKAIRGKKTDKRDAKWIADIFKHDLVAGSFIPPADIRQLRDLFRYRWKLTNFATGEKNRAQNCLTVSNFKLDDVFSDVFGKAASAITARILENPSEKITDVSGFRTKRMKATDEEILAAVDGEMCAEQAEKLRIIRSHMDSLELCKLNLESLILSTAEKYLPQLELVMTAPGIQSFAAIGIISEIGVDMSVFPTSKHLCSWAGLTPQNNESAGKKKTTRISRAGAYIKPLLVQCALCAVRAKQFPEVRNRYLALKKRRGHKKAIIAVARMLLTAIYNMLKKNEPYNSELYRKGDRPPAHREVSVEEAVFILQRQGYLVTAPPTP

SEQ ID NO: 62097 - protein, 397 aa, unidentified
MNYFLVLDVAKGKSMFMLSSDIGEVLLEPTEYIHNKSYFEKIDSYINKLNIKDNLTVVMEATSIYHKSPERFFKENNYHVIVFNPLIGKEITNTIRKTKTDKQDCIKLTNLFWKGSIPDRNYTEDEIYTKLNELSRQYYHLDEGLNRYKELIHLCFPEFELCFKDGKTYDLTALNFIKEFPHAYIIKDKRVDALAYNMANTNNRHLNYYKRKANIIKEYALTSYPGVNKNSKNADNLKQLANIIINLTEQKDEVKNQMIELAKETKNFECINSLFGIGELSASLIIAELKDITRFNNIKQINASCGLDPTIVQSGKSINYHGPISKRGNRYARKILFNCSRNIITLSAKCDKENSIYVYYQKKKQEGKHFYACLTACSTKLIRIIYALCMNNSQQQN

SEQ ID NO: 62098 - protein, 312 aa, unidentified
MDAIYVGIDVSKDRLDVAVRPSGESFFVSRNGAGIDELIERLKTVSPRLAAIEATGGFETVVAAGLAGAGLPVVVVNPAQVRAFAQALGRRAKTDPIDAAVIAHFAEATKPQARQLPDETTQMLADLVSRRRQIVEMIASESQRARRITSARLKKSIARLHKALEKELSDLDGEIGDHVRGTPAWAEKEDLLASVPGIGPTIARSLIAELPELGSLDRRQIAALAGLAPWTRQSGQWRGKSFIGGGRANVRRVLFMGAMVAARFNPELKRFRDRLVAAGKPKLVAIIAVARKLLTILNAILRDKTPWQLKNA

SEQ ID NO: 62099 - protein, 449 aa, unidentified
MMEQDMATSKAKEVARLEVVHPDAAGVDVGSSGHHVAIRGDAPGQTVREFGCCTRDLHEMADWMLSNGVKIVALESTGVYWIPVYEVLERRGLEVLLVHARHVKGVSGRKSDVLDCQWLQRLLSYGLLRGAFRPQDQMCELRELNRLRTRLLRDQGRSVQHMQKALTVMNVQLTNAISDVAGVTGQKIVRAIVDGERDPQELASYRDARIKASEEEIAASLQGNWRTEHLLALKVALATFDFCGQQIGQCDVEIERAMQVLQRFTQEPEKGKKRSKAKNAPKFDVRERLFKMCGVDLTRINGIDVSTAMTIVSEVGTDMSRFPSDKHFASWLGLCPGTNISGGKRLGAASKRSANRATQALKQAAAALRTSQSALGAYFRTLCGRMDKAKAVTAAAHKLARLIYAMLTKGQEYTDMGQLYYAERYRERAVRQLQRRAHKLGMLVVPAGC

SEQ ID NO: 62100 - protein, 318 aa, unidentified
MNTKINQSINVGVDTGKTQLDIHIRPLDLFFSVENNDKGIKKALKTIKSHSPERIVIEATGRLEMPFVLACAEAQLPIVRANPVHIKRFAGAIGRRAKNDRLDAELIAHYGEAIKPVLTVIKPKNIRLMSDLVIRRNQLLSMQTMEKNRIQILPASLHPTIKPVLTTIKNQITKLEEKLVKLIKDSPEYQAKNTILQSVPGIGNIAAASIISNVPELGYITNKQAASLIGVAPITRESGRYKGKRVIQGGRAQVRTVLYMAMMSAMQCNPVFKATYARLLAAGKPKKVAIIACVRKMVVALNSMLRDGAMWDENTAKN

SEQ ID NO: 62101 - protein, 357 aa, unidentified
MTANGPPVVGAILAIDLGKYKSVACEYRGASDGVRFHTVRTRREELCQLIERLRPGVVVIEACAMAGWVHDLCGERGVCCRVANTASEAWKFRHSKRKTDRDDARRLADLTALGQLPTVAIPAKAVRERRALIAVRQTLVGRRTTVRNRIRGILLGQGLPVPVGHRAWTELGRAGLAQLGRPLAACSAEDLWRGLLDLALTELGQVEALVAATEAKLNAQGRDDAATRLLQTVPGVGPRTAEAIVAHLDDPHRFRTGKQVSAYAGLVPRQYQSGESDRRGRITKRGSVVLRSLLVECAWALVRYNAWGRATYRHLTRGGPARRKVAIVALARRLLVRCWAMLRDGTAWRVGPAAAVH

SEQ ID NO: 62102 - protein, 343 aa, unidentified
MKTVTIIGLDIAKSVFQVHGIDADGKVVARQQLKRGRVIAFFKKLPPCLVGIEACTSSHHWARELQALGHEVKLMPPAYVKPYVKRQKNDAADAEAICEAVQRPSMRFVPVKVPDQQAGMVLHRTRHLFVRQMTAVSNAIRAHLAEFGIVAPTGRNGIQQLVAIVNDAKDERIPPLVRTCLFALVIQLDALNKQISILDRRLAGWHRTNETCRRLDAIPGVGPALATALVASVADPKAFRSGRDFSAWIGLVPKQNSSGGREKLGNITKAGDRYLRSLFCAGALSVIRYAQKHGTKHRPWLTKLLERRPTKVAAIALANKLARMAWAMMAKGERYKEPVALAR

SEQ ID NO: 62103 - protein, 346 aa, unidentified
MLHLGLDLSRRRLDFHLLDEQGATVEVGAAPPDVHGLASLARRVGGHDQPVRAAIESMNGARFVHDQLELYGLDVEIADAAKVKGLAPLACKTDKIDARVLAELCRRELVPAIWLPDPSVRGDRERARFRLHLVRQRTRLKSRIHQTLVAFAVPCPVSDLFGKRGRLLLERLALPEPWAGTLTATLRLIDELDREISSCERELRRLGLEHPYIPLLMTVPGIGWVLAYTIAAEIGDIARFPSPRKLAGYTGLCPRVYQSGDSDRRGPLSKQGPKYLRWALLEASTHACKHPLYRERYQRTKRRLGRQRGPRVAQVDLARRLSEAIWHMLTTTTPFAPASASAPLAA

SEQ ID NO: 62104 - protein, 432 aa, unidentified
MSRTAAAIDVGSEKMHVGIDQQQEVRIFECFTDSLHQLRDYLLERQVTTVAMEATGVYWLPVFDILEGAGLEVVVVNGAHVKNVPGRKTDIQDCQWLAQLHGQGLLQAGFVPPARIRKLRSYVRLRQEHVTHGAQHILHMQKALDLMNIKIHDVLSQTIGVSCLRMIRGMVAGQRNPLALLALCDVEVQKRKSKDVLRALQGHWEEEHLFALKQALQGWDFYQSQIASCDKEIERLLGSLAAQKPQPSPTQKPTIKKRRGNTPEIAELEGFLHRLTGADLSALPCITAYSQLLLVAEVGTDMSRWATAKHFTSWLGLAPGSRQSGKRRRVQKRFRGAAGKIFAVVARTIGRSKYLAISGFYRRVKAKRGGQVANIACARKIAVLFYNAMRYGIQYVEQGLKKYEQQYKERTVKGLARAAARFGYTLTNQPVP

SEQ ID NO: 62105 - protein, 308 aa, unidentified
MSVFVGIDVSKSRLAVSVRPHDVNFEVANTAAGHKALKRKLQQWPVSRTLLEATGGYEKAVLATLAGTWPTIRVPPHRARAFATAMGKLAKTDPIDAAMLAHMAEVVEGPIVRPPSPGQDRLQALVHRRAQLVQQRDDERRRQQQTTAPEVLASLKRQLRGMQAEIERLDRLIAAAVQDIDSLQAQRLRAVKGVGPVTVAMLTAFLPELGQLDRRQISALVGVAPYNVDSGDKRGKRRIRGGRADVRRVLYMATWGAIRGQPEFNRRYRDLLARGKCAKVALVACMRTLLGRLNAMVRDQSEWQTQPV

SEQ ID NO: 62106 - protein, 343 aa, unidentified
MSIVILGVDLGKNACSVVGVDAAGAVIVRRSMRRQSLIDYVAKLPACVIAMESCCGAHHLGRLFKAGGHEVRLMSPEYVRPYVKAQKNDDRDAEGIAEAASRPTMRFVELKSQEQLDIQTLHRVRSRLVAERTNLINQLRAILLERGIIFPVGRRKLELGIDDVIADKGEVLSTRLHQLVGELRDEWKRLDEKIETLNGEFVALARNDPATRRLTSIPGVGVLNATALVAAVGDASSFAKARDLAAWLGLVPRQHTTGGKPRLLGISKRGNTYLRTLLIHGARAALPSLSQSDTPLGRWLKAMIERGAHRNVVLVALANKLARIAWATLRKETDFDRGYPVAA

SEQ ID NO: 62107 - protein, 336 aa, unidentified
MLYVGLDVHKRLWVCCVLNGKGEEVGMKWLRPDSNLLVEWLKGFDEPFSVCFEASTGYGYLYERLTVFASEVVVAHPGHLRLVFGSKRKNDRIDARKLARLLLLGVVPKVHVPRPPVRSFRAAVRARQRLVDECTRCKNAIRALLYANGIRAPKSLWSRAGRRWLAAVEFGDRLSAERRDLLVEALEQATARRKRLERILDGLTRHDRAVVLLRTIPGVGIRTAQAMVAYIDEAKRFPRNKFVGSYFGLVPREHTSGGRKRLGHITKNGPAVARRLLNQAAWQAIARSPEVRAFFERVCRDDPKRRKIAIVATMHYLVRVMHAMLRTGEPWRPLAR

SEQ ID NO: 62108 - protein, 315 aa, unidentified
MSAQAVVGVDVAKRTFDACITDASKPTTYANSKRGITSFIKSLQLLVAPFVVMEATGSYQRTLTRMLAAAGVTYSVVNPRTIRHFAKAGNILAKTDRIDARVITLYGERMGPRVTIPPTEAAIRLKALVGRRRTLVDFAAEEKKRAKTIEPFLRDDIQEMIASLQQKIAALDRQIKQLVQGCESWAAQAQLLDTVPGVGKVLISTLLAALPELGLLPHKQIAALVGVAPYNDDSGQHVGDRRCWGGRAHVRAALYMATISAIRCNPVIKAYYHQLKDRGKKSKVAIVACMHKLLRILNAMLRDNEPWQTESTQTA

SEQ ID NO: 62109 - protein, 379 aa, unidentified
MARREIAIREEDNSKVPTIYTALDLGRRRWTVGMLLPGDRDARLFQIAGGDREALSELIRRQRQMVGDPGARVVSCYEAGRDGFWLHRWLADRGVDNRVLDPASLEVPRRRRRVKTDRVDTLGLLRVLLRLERGETEMTRVIWVPAPAIEDARRHTRERERLVSERTAHRNRIQGLLAAQGVTGVKVGTRDWLNQLAVARTGDGRTLGMALLAEIRREAERLALVEHQIKEVETAQRAALKADTELVSRACKLRHLRGIGDVFASGLVHEAFWRDFGNRRQVGGAFGLTPWPWDSGDMHADQPISKVGNRRARTMAVECAWMWTLHQPDSTLTRWWRQRFAGGGKRLRRIGIVALARKLMIALWRYIKQDLVPEGAVLA

SEQ ID NO: 62110 - protein, 412 aa, unidentified
METIFERVSALDVHKAQVTACVRVPDGSGKRAVHLAEFATTVRGLLALADWLKEYGVTHVAMEATGVYWQPVWHVLEEDFELMLVNARDVKNVPGRKTDVSDAQWLCQLMEAGLLRSSFVPPKSQRQLRALTRYRKTQIAERQREANRLHKALEDTGIKLGNVASDIMGKSGRAMLDALVAGTTDPEVLADLAKGRLREKLPALREALEGHFEAHHSLIIGAILAHLDFLNEQIDGLSEAIGELLGPTGLVSVKLASTIPGVAARTAEVMVAEIGTDMSKFPSARHLASWAGRCPGNDQSAGKRRSGRTRKGSKWLGIALEEAALGAIRGRNTYLGAQYRRLKPRLGHGRALGAVKHSIVIAYWHMFTNGEVYRDLGGDYFQRRDPAKATKRLVAKLQALGHTVTLQPQAAT

SEQ ID NO: 62111 - protein, 268 aa, unidentified
MKYVGLDWAYRQAQWCALASAGEVVGEGRITADRDGLARLVLELGDEVQACLEMMSGALWVRDELVACGWQVDVADARKVKTVAPLAAKTDKVDARLLAELCRRELVPALWLPSLDERALRERLRRRMHLVRLRTSAKGRIFGLQTQWGVRISLARLRRADGVSLLERAGVPEVWRRSVSECLALIDFLDARLEPLERELRPFAKADPRAVLLDTIPGVAELLALTIAVEIGDIDRFSRPERLVSYGRLAPRVHQSGESRPRSGPLNW

SEQ ID NO: 62112 - protein, 337 aa, unidentified
MSLYCAIDLHSDNNVVVVIDDNDRILFRKRLANDLDVVLPHLAPFKEDLHAVAVESTFNWYWLVDGLAEAGYRLQLVNPCAVQQYQGLKQTDDESDAFWLAHLMRLNLLPLGYIYPKAERAVRDLLRKRLQLVRCRVTHLLSTQNQLWRSTGHKVDSKRIKQADDTLCELVVDPNIQRAIRANLTVIATLNTQIAKIEASVKSQMVTRPEFRSLLTINGIGDILGLTIALETGDIHRFPTVGRFASYCRCVRSQRLSNGKQKGENNRKNGNAYLAWAFVEAAHSIIRHHQAAHRFYQRKRAQKNGALATKALAHKLARAAYYVMRDRVAFDDQRLFG

SEQ ID NO: 62113 - protein, 349 aa, unidentified
MLADELDYVVGVDTHRDEHVLAVLAAATGAVVARKVLRASASGYREALGFAEQQAPGARAWAIEGAGHYGAGLARFLADRSETVLECSRAPRAERRLAGKDDALDAARTARAALASETLALPRSGQRREALRLLLITRRSAVDVRREALVQLRSVIVTAPDRLREELRGLPVGRLLERCRRLRRSSSASADGLATRLVLRSLARRIEAATLEAADLEQEILAHVRALAPQLLDEPGVGPIIAAQLIVAWSHRGRVRSEAAFARLAGVAPVPASSGQTQRHRLSRGGDRQLNRALHTVVLHRRQHDPATKAYIARRIAEGKSRRDATRLLKRYLARHLYRLLENQEPRMA

SEQ ID NO: 62114 - protein, 315 aa, unidentified
MTTKSETYVGIDVSKDRLDLAVLEEKRIEQYTNTERGIKELVDEMKALKPALIVVEVTGGYERAVVKALFEAGLRVARVSGYRARQYARAKGLLAKTDPLDAMNLADYGKHVQPRVYEAKSEEGQYLAGKLARRRQLGEMVQAEKNRLRLAYGDIGPSIERVIKFLQGELKQLDEEIRAYLDANPVWLEQEQLLRSMKAVGPVTAATLLAELPELGKLDGKQIASLVGLAPINQDSGKRSRYRKTGKGRPSVRNVLYMAALTGLRYNPVIKKQYDGLVLRGKVKKVALTACMRKLLTILNAMVRDQKPFGYAAMS

SEQ ID NO: 62115 - protein, 397 aa, unidentified
MPELWAGIDAGKAHHHCVLIDDEGNRLLSCKVANDEAALIELLADVRTLAAGREILWATDLNRGGAALLIGVLEAQRQTLVYIPGRSVYHAARTYRGDGRSDAKDAAIIADQARMRRDLQPIRSGDQISTDLRLLISRRTDLVCDRTRAINRLCAVLLEYFPALEAAFDYAMVKAAVVLLTKYTTPASIRRSGEARIATWLRTQGCYNAKTIASKAVAAARAQNTTVQAQDIGAELVTAIARTILELHEQVADVDKRIEARFREHQHAQILLSLPGFGTLLASTFLAATGGDITAYDSPARLAGVAGLAPVPRDSGRISGNYHRPKRYDRQLLNAFYLAAQSAARYCPHSRSYYQRKRGEGKNHKQAVLSLARRRLNVLWAMLRDGTPYQQPTVIAA

SEQ ID NO: 62116 - protein, 388 aa, unidentified
MPQSNDLSRSLAAFDQDRTLIAVIEMSQSNWLVAGLVPGLERRPLKKLSPDEDALLKLVQRWRNEAAQAGREIKRIVIAYEAGRDGFWLARWLRRRGIEAYVIHPSSVAVSREHRRAKTDRLDTELLMRAFLGWLRGEKRHCSMAAIPTIEDEDAKRPSREHEKLVGDRTRLVNRMKAMLARFGIRTFKPTLRKAEERLDRLRTAEGTPLPENTRAELRRDMMRLRMVREQIKEIEQERLRKLTAAPAEKGPPTMVRFIARIIGIGIETADMLVSEILSRGLRDSKAVARYAGLTGAPDESGRRRREKGLAKAGNARVRRGMIQLAWRLLIFQKDSALAQWYRARTANARGATRKRMIVALARKLLIALWRMATTGEIPEGISLRAAT

SEQ ID NO: 62117 - protein, 351 aa, unidentified
MWIIGVDYHPSVQQIAFVNTDTGECGERRLSHSDGEAEKFYRELKAAGCKVRVGMEATGHAGWFERLLVELGFELWIGDPAKIKAKRVRKQKTDRLDAALLLQLLLEDRFPRVWVPSAENRDLRQLLWHRHRLVQMRTRITNQLQAVAMNEGVRRKKALWSKSGRAQLESLLLAPWAARRRHDLLELLDRLNPTIEELSAVVEQQVKHRPEVLRLMTHPGVGPITALAFVLIIDSTERFACGKQIASYVGLIPSEDSSSDRRRLGHITKQGNTLLRFLLVEAAQAVVRRDPDWRRRYTHLAMRRDKPIAKVAMARKLAVRLYWMMRKEWNYEQLKKFGSYAGESEHVNGVQ

SEQ ID NO: 62118 - protein, 456 aa, unidentified
MPESERKQRKSTKQLSIVYPLAAGIDVGATAHVVAVPAERDGRPVRTFRTFSADLHRLADWLAEVGITTVAMESTGVYWIPVFEILEAHGFQVLLVNARDVRNVPGRKTDVNDAQWLQQLHQHGLLRGSFRPRDGVVRLRAYLRHRERLVDYAAAHIQHMQKALMQMNVQLQHVVTDITGVTGMRIIRAIVSGTRAPEQLAEYRDVRCAASPQTISAALNGNYRSEHVFALRQALELYDFHQTKIAECDDEIEAVLHRLNHDRDRPEKPLPEARHAKSRNEPRFDVRAGLYTLLGADLTQIHGFGPYTVLRLVAECGDDMRKWPSGKHFTSWLSLAPGNKISGGRLLSSKTKRSSNRAAVLLRIAAVNIGRTQTALGAFYRRLAARTGKAKAVTATARKLAILFYNALRFGMSYKDPGTSYYEQRYRQRVLHNLQRRAQSLGLTLVAKTATPDAVS

SEQ ID NO: 62119 - protein, 320 aa, unidentified
MLSFCGIDVSKDRLDVMVLPDEYSSSVPNDPAGWAILVEQLRGFSITAIGIEASGGYERGAVRSLQAAGMPVRQVNPFKLRQFAKASGVLAKNDPLDARMIASFVGIMPTRPAQPTTPAAEQLVEMLAVRRQLSAEKTAAENASRLLEDLMLQRLSRRRIARLAADIELLDKRLVEIVATDATLAHRYRLLTSMPGVGPVLACTLIALLPELGGMSRKQVAALVGVAPYAFESGTLKGRRCIWGGRANVRQVLYMAAMSASNWNPALKLFHDRLKGAGKLPKVVIVAVMRKMITTLNAMVRDDIAWADRLSGRHSVTTAR

SEQ ID NO: 62120 - protein, 459 aa, unidentified
MKRQQKNKQQKKKNLKPLTEAPTVRMDAAGIDISPESIYVGVDTRVAEPSVRCFGTVTRELQRIADWLQACGVRTVAMESTGVYWIPLYQVLEARGVEVFLVNARHYQNVPGRKSDVSDAAWLQYLHAVGLVRGSFRPAGEICALRTILRHRSGLVQAASRHIQQMHKALDQMNVQIHRVLSDITGVSGLAIVDAILEGERDGHRLAALRQGGVRASEEEIVKALEGDYLPEHLFTLRQSLENYRHFEKQIAICDRQLGEMLVQLEIQTGRQAPAPPPHKNMRTRGDEELRQKYYRILGVDLTAVPSLNVGTVGVVVAEVGPDFSRFRSAAAFAAWLILCPHNTITGGKVKSSHTREGSSRLGEALRMAAESLCRDKSYLGQFYRRMRAKLGEESAITAAAHKLARIIYALVTKGVAYDEGHFAQIEQRDQQRQRQRLLKLAHSMGYQLVPCTTAAVVS

SEQ ID NO: 62121 - protein, 342 aa, unidentified
MQVTTIGLDIAKNVFQVHGIDAVEKVVVRKQLRRSQVLEFFKALPPCLVGMEACATAHYWGRELTKLGHQVRLMPAKDVKAYVKRNKNDAADAEAICEAVRRPTMRFVQVKSAEQQSQLMLHRTRDLLMRQRTQVINALRAHLGELGITAAQGKAGLTELLAIIAGSTDERLPTEAHASLMVLAAELQAMRTLIASIEKRIIAHHRLDEASKRLRSIPGIGLVGATAIVATITDPKAFRSGRDLAAWIGLVPRQDSTGGKQKLGPISKQGDRYLRRILVVGAHAVLKLARQKPAKYPWLTQLLARKPFKVVAVALANKMARIAWALLVKGGPYRARSLVAAA

SEQ ID NO: 62122 - protein, 402 aa, unidentified
MSPKLNNEIAVIGIDLGNSSFCLVGPGSALHRCQRSTLAGTPKTKEHAMSQKLDSEIAVIGIDIGKNSFHLVGQDRRGSIVLRQKWSRGQVEARLANLQPCLIGMEACVGAHHLSRKLQALGHDARLMPAKYVRPYSKGEKNDYRDAEAIAEAVQRPTMKFVATKSADQLDLQALHRVRERLVGQRTSIINQIRAFLLERGIAVRQGLHFLRAELPTILAKRTDVLSPRMLRVIEDLAGDWRRLDERIDALSDEIMTLGRQDKGCERLMTVPGIGPIISSAIVAAIGTGDAFAKGRDFGAWLGLVPKQMSTGDRTILGSISRRGNRYLRKLFVQAAWVVLAKITPEGWERYGLKSWIEAAKQRLHRNVLAIALANKLARIAWAVLHKGRAFQCVKTNAPRVA

SEQ ID NO: 62123 - protein, 371 aa, unidentified
MTEAVKYVGLDVHKETIAVAVADGERGGEVRFVGTVANEDDAIRKLVKRLTGPGVTLNVCYEAGPCGYGLHRLLSKLGQNCIVIAPSMMPRRPGDHVKTDRRDAMTLARLLRAGELTAIWVPDEAHEAVRDLIRARRSAQDDAIGAKQTVRSFLLRHDRRFGGKAAWTKMYWRWLSEQRFEFPHQQLAFEEMQKRVLEAQARVARLEAALAEAVDAWCFAPLVRNLQVLRGIRLVSAATLVAEVGDLTRFDNPKQLMAYVGLVPSEHSSGARTKRGRITRAGNAQARTMLIEAGWSYRLPAREERRYRERVIDLPEDIQAIGWKAQVRLCQRYRRLTATGKPQPKVTTAIARELVGYAWDIARRVSPAIAG

SEQ ID NO: 62124 - protein, 404 aa, unidentified
MQFCGIDWANDHHDALSIDEQGHQLGSIRVAHSPEGLSQLDNYLERIAGPGGKGQLACIVETTHGLLIAHLLEQGWAVYPVNPRTVERRRAPSGAKTDTIDAYLLAKTGRADFQDLRRLNPDSEQIQELKTLTRDQDALVHMQTRLVNQLTACLKAYYPIALDLFGKLQQPSTLSFLRAYPTLQAARSASVEDLTALLKQARYPGARKAAQHMVEQLQQPCLQANAVTTRTKSRLMLALVDQLEPLLKQIADYDKEIERLFLSHADSEFFQALPGAGKRLAPRLLAESGDDRSRYESASSWQALAGTSPVLFQSGTYQKAHRRLGCIKPWRNALQQFAWQSTHQEAWAKEYYQRKRAEGKSHTVAVRALANVWARILYAIWKKKEPYQTTTFEQARQAHAPRVA

SEQ ID NO: 62125 - protein, 485 aa, unidentified
MAKRKMSTFERLQKGEKLRRWERKELERKFQAEEPGWEVVHKDVAGIDVGNESHFVAVDPKCCPQPVREFGSWTAGLQEMAEWLKSCGVKRVVMQTTGVYWIPVENVLQAAGFHVAVVDARGTKNLPGRKSDVQECEWIRKLDTYGLLRKSFQAPESIRGIRTVWRLRDRLVKDAGRAVQQMQKALTTMNVQLANAISDVSGKTGMAIIRQIVAGERDPWQLAKLRDKRIQAREEELAHSLEGNWREDVLFELERVLESYDFLQEQIAKCDRQVEEYMGQQPTREVVKEGAAEATVGVAAGKRRRKKTAVKPPKNHPVFDLGAELTRLLGVDLTLIDGIKLMTAQVIYSELGPDLSAFADEGHFTSWLGLAPRRDISGGKVIKQHSGHVCNRVANALRMSAQALSDSDSYLGARYRYLKARLNCGLKAAKAMARYLACLVYRMLTKGQAYVDRGAAYFEQKRQDRDLKQLQRKAAALGMQLVPTA

SEQ ID NO: 62126 - protein, 327 aa, unidentified
MSSLICGLDVHRDRTYVALIGSEGGVVAGKRLANREVLGFLKGYSVGRVAVESSTSIAPLYRALRGEGYEVVVSHPKKTRLIAESWIKSDRVDARAIAELLRLGALPLSYMPSGDLASLREMVRRRAFLVRERAKLKVKIKDRLVYDGLGKPRSGLFTKEGVEWLKGLHHEAIEMYLRLMEPLNREIHLLSQKLKVRALEDEDAKLLMTTPGIGYYSALLIKAEIGSIDRFPDGEKLCSYAGLVPSVRASGSHIQHGSITKEGSRWLRWVMVECALAHIKHDTYYSRFYHRLAQRRGKQVAIVATARKLLLCCYSILKNRKPYHDQA

SEQ ID NO: 62127 - protein, 344 aa, unidentified
MQIVGCDFHPSFQQIAILDTTTGEIAERRLMHGDGEAERFYRELAAPALIGMESVGNSLWFERLVTGLGHELWIGDAAQIRASYVRKQKTDRRDAGHILRLLVEGRFPRLWVPTEEQRDVRQLLLHRHKLVQLRTRVKTELQHLALNQGMQKKRQLWSVRGRAEFEQLPLEGWTACRRSDLLSLLSMLSRQVSALDVAVDELAGKDAQARLLMTQPGVGPLTALAFVVTIGDVSRFPRGKQVASYLGLIPRERSSGGKRRLGSISKQGNVFLRTLLVEAAQSAVRHDEQFRREYQHRCHQKPKGVAKVAAARKLAVRLYWMLRSQKPYAAATRNEGSPGHFVVG

SEQ ID NO: 62128 - protein, 413 aa, unidentified
MDVVHPRCAGIDCSKRDAKVCIRVQGRGRNQASSTVTTWGATTSQILALREHLLAAKVTCVVIESTSDYWKPFYYLLDDELNMRLVNASRVRNVPGRKSDVSDAAWLAALGAHGLVNASFVPPPPIRALRDLTRTRTHITRERSREIQRLEKLLEDAGIKLSSVATDITGVSGRAMLEALIASQRDPAALAELARGRMRQKIPELTEALTGRFSAHHAFMTRLFLDRIDAHTADIARLDARIEEVIAPFRPIRELLTSIPGFSSKIAEVFIAETGGDMSVFPSAGHLASWAGVSPGSNESAGRVKSTKTRPGNPYLKGALGVSAMSAARSKNTFFSAKYQRIKSRCGPMRALVAVEHALIITAWNMLTDGAFYRELGTDYYTLRKPAKTKARAVRQLEALGYTVTLTPLAAAP

SEQ ID NO: 62129 - protein, 391 aa, unidentified
MIYVGIDVAKDKHDCFITNSDGEVLFKAFTITNNLDGFNDLYQKIETVMKDITKVKVGLEATGHYSYNLLGYLIDKGLPTYVINPLHTNLYRKSLSLRQTKTDKVDARTIASILMSDVNLKSYSDISYHNEELKSLTRYRFDKVKERAKLKSSVSRLICILFPELEKLVPTLHMASVYALFSEFPGAKQVANAHLTRLTNLLSEASKGRYSKDTAITFRDAARTSIGSNMPAKSLELKHTIKLIKELDSEIDEIENEIKIIMDEINSPILSIPGINYRMGAMIIAEIGDFSRFDSPDKILAYAGFSPSTYQSGHLYGAYAHMEKRGSRYLRYALYNAAKYVCHWDPTFTAYLAKKRAEGKHYNVAISHAVKKLIRVIYHLEKTNQQYIKAS

SEQ ID NO: 62130 - protein, 345 aa, unidentified
MEHYAGIDVSLESSSVCVVDASGKIIRESKVASEPAALVGWFASLGITLGRIGLEAGPLSQWLYAAMRQEGLAIELLETRHVRDAFKAMPVKTDRNDARGIAQLMRLGWFRPVHCKSLAAQEVRAVLTARKLVQSKLRDVENSVRGILRGFGLKVGPTTPRHFAERIRDLVVGHENLQIVTGGLLSVHAALLREFQAFEKQVRALVRQDIRTRQLMTTPGVGPIVALTYASAIDDPDRFSSSKQVGAHFGLTPRRYQSGETDYSGRISKIGDAAVRTALFEAAHIMLTKPLKGCTALKSWAMRIARRAGMKKAKVALARKLAVILHRMLANGTVFNSEAKPMTGA

SEQ ID NO: 62131 - protein, 358 aa, unidentified
MKIIGCDLHARQQTIAMLDSDTGELEEKTLEHQGETVRKFYSALSGSILVGIEATGSMQWFLELMEELGIECRVGHPAKIRKAETRKQKHDRRDARLLLTLLAENRFPTIWMPSSEQRDLRTLLRHRHQWVRLRSRVQHTLQSMALNHGLRRGRSLWSQAGQGELRALPLAPHASERRKALMTLYPRLQESIAELDRQVSEQTQQRTDARRLMTHPGVGPVTALATEVFLGDPMRFSDGKALASYIGMIPSEHSSGRRQRLGAMSKQGNALLRYLWCEAAMHAVERDPELKRFYRRKLVQKGLGKARVAAARKLGIRLWIMMRDEIDYQEFCRRGKARQESGSVRAGMPDRNSGPAEQ

SEQ ID NO: 62132 - protein, 419 aa, unidentified
MFSDTTLIVGVDVHGRTNVTLVMDGHGDVLDKHQRFANNRVGTDQLTDYLAQLAQRGGFDSIHLAAEATNNFWQPFFHQIAHAPHLSDSPLTLYPFNPRLIRNFKKALGEEEKTDLRDAGVIAERLRFGKKLPRPFDMDELYLPLRSLTRYRYHLVRDLVRVKSYCLSLVYLKATGYTDKASQPFSNPFGATSQAVLREFATLDEIANMPFDELVEWPDVKGKRRFPNPEENARKLQQVAAEAYQLPAEWADVIHDIISLNLRHVALLENLIQRVETAVAQQMENIPHTLNTIPGIGPVLAAGILAEIGDVSRFDFNEAKVASYAGLRWPRSQSDEFEAEDRRLSRSGNHFLRYYLCEAAQSVRLHAPEYRDYYQRKFKEVRKHQHKRALVLTARKLVRLIVRLLTTHEPYRLRQVSHD

SEQ ID NO: 62133 - protein, 403 aa, unidentified
MRVPAALDEAWAGIDVGKRHHWVCVVDPGGRQLLSVKVADDEAEIAAAIGSVTRLAGKVTWAVDISGAPSALLLALLSQAGQPVRYASGRLVAAMSGAYPGEGKTDPKDAFVIAETARLRRSLPVIDHKTDLVRNLSLLTAHRADLVADRVRMINRLRDVLTSVFPALEREFDFASCKGALVLLTGYACPARLRRTGQARLAGWLRQRRVRGYAGVAARAVAAAQSQRITLPGQDIAASIVCELARNVLVLDQRVAELDKQIAALFAEHPQAEVIQSMPGFGPILGATLLVTAGDLAAFPSAGHLAAAAGLVPVPNDSGRRTGNLHKPRRYSRPLRRVFYLSAQTSMMRDGPSRDYYLKKRQHARAHNQAVIALARRRVDVLWALLRDNRTYAAIPPAPAIAA

SEQ ID NO: 62134 - protein, 436 aa, unidentified
MRGCRCSMIMGFTKPIEHFNLQRKKVITMNTLYVGIDVSSKSNVVYLMLPNGDKHSNFSVANSHEGSTLLVKKIYSALTSHSLDTVLIGLEATSVYGVNLVYFLREDATLAPFNRKIHVLNPKQVKKFHDTYNDLPKNDYVDSFVIADCLRFGRINKEVYMGEYRYKALQNLTRARFFAVQNLVKEKQRFMNVLFKKYSTMTQEKVFSDAFSTTALAVYDEFESAEALANMDLHELTDFIIEKGKNRFPDPDAVAKAIQKAARSSYRLPKTVNDSVNQVLSISITSMKALESQIKEFDKAIKALMELLPNVLISIPGIGPVYSAGIMAEIGDINRFDNQASLAKYAGLAWKQHQSGGFEAEVTRLIPSGNRFLKYYLCEAAFSLVRCDKKYSDFYHLKYKEVNRCQHKRALALTARKFVRLVFRLLKDNRLYCPAK

SEQ ID NO: 62135 - protein, 351 aa, unidentified
MVIIGVDYHPSFQAIAFFMEETGECGEQELNHSDGQAEKFYRDLQQRGICVRVGMEATGYSRWFERLLAELGFQLWIGDPAQIKAKRVKKQKFDREDARLLLRLMREDNFPQIWVPGPENRDLRQLLWHRHRLVQMRTRIMNQLQALAMNEGYRWKKKLFSEQGRAQLEKLLLAPWASRRRQELLELLDRMNPTIEELTAAVEREARKRSDVLRLMTHPGVGPLTALAFVLIIGTWERFPCGKQIGNYVGMIPSEGSSAGKQRLGHISKQGNSLLRFLLVEAAQAAARINPDWRRRYIHLAMRRHKSIAKVAMGRRLAVRLYWMWRNGCEYSPSLEFGSYVGQLGTGHGVK

SEQ ID NO: 62136 - protein, 338 aa, unidentified
MVSVGIDLHRRRSDLVGVDDLGSVVWKRRIPSSPADFLHVFGELEPGSFEVAFEATYGWGWLADLLQDVGIPAHMSHPLATRAIASARVKNDTIDATTLAQLLRTHLLPEAWIAPPEAREARRLVRSRAALVRIRSRLRCQIHAVLADHGITPEMSDLFGVAGRRLLAELELPPLSRHRIDGCLRLIDALTVEVESVDREMRVVFGQHSALPRLMRIPGIGFVGAATVIAEVWDVSRFRRADQLCSWAGLTPTERSSAEHTRRGHISKQGSRWLRWILVEAATNHTGRDPELGQFEARIARRRGLKIARLALARRLLCLCFYALRDPAGCAAYPLDAA

SEQ ID NO: 62137 - protein, 342 aa, unidentified
MDYFAGLDVSVKDTSVCIVDDTGRITREVKVASEPDALLQVLRNPAYRFKRIGLEAGPLSQWLFSALAEADLPVICVETRPMRAVLKAQINKTDRNDARGIAQMMRVGLYRPVHVKTLRSQKLRMLLTHRKLLQSKAIAVENDLRATLRNFGLKVGMVGTAKFEARIKELVENVADLAVLVEPLLVVRRALREQIGVLHRSVLAIVRDDEVCRRLMTVPGVGPVVALTYRATVDVPARFRRSKSVGAVFGLTCSRDQSGERDRPGAISRCGDEMMRAMLYEAAQSMLRSRKWSWLKAWAMQIARRRGIKRAIVALARRLAVIMHRIWVDSTEFRWTREATAA

SEQ ID NO: 62138 - protein, 346 aa, unidentified
MKKTIVGVDLGKRVIQVCVYTNKTVRSNEEMTPCEFTEFLAKSEPMMVVFEACASSNYWKQKALSFGHDANLISAQLVSSVRQNQKTDKNDALAIVQSAMLPEVNFIYGKSVEQQQLQSMMRIRELCSKQKTALSNQLVSLLSEFNISTANRNGGLKSAVESTLEDAENDFSDLFRLALDRAWKLYLETIKSLAIYDDCLEKSINEHSDCKKLLKLEGVGSINAINLYIALGCAELGTFNKGKDASACIGLTPLQHSSGGKTKMGSIGKHVKNSMLRSQLIAGAMSCVIQVVKREARTTKEKWIQGLVDRRGKKCAAVALANKTVRTAFAILTQGTEYKAELISAS

SEQ ID NO: 62139 - protein, 336 aa, unidentified
MEAMREVLGIDVSKSKLDIELLINGKVKTKVLQNTPAGHKSLLEWIDKSKASRSSLHVCMEATGVYHEALALKLYDAGIKVSIVNPACIKGFGHGENIRNKNDEIDAGLIARYCLAMNPELWTPPPLEQRQLRGWTLRVQALKDIRQQEENRLEAHTIGGMDDVAMNVKTHITWLDIEIKKLEKEIDDHIDRHPGLKNDAQLIASIPGLGTTTIARVLGHIGDIRRFKNAKAFAAFLGVTPKQRTSGSSVKGRTVMSKTGSSSLRAALFMPSMVARRHNPILRQFADRLLATGMAKKAVIGAVTHKLAHLIYGVIRTGKPFDANFLSNRLAIQDGI

SEQ ID NO: 62140 - protein, 482 aa, unidentified
MMHGHEKSDLAIVAGKLANKAEQSAAELVERRAGTKGNASQQSTHWTQSQARVSRALDRIRHVFAVTHPRWEKLWGGAAEVVAPSSSIRTDGGCPVPQVNDLSRSLAAFDPISTLVVVVEMSKTSWLVSGVVPGVERQPLKKLEPDATALLRLIERWRIEAVRAGRPIRRIALAYEAGRDGFWLARWLIARGIEAHVIHSASVAVSRERKRAKTDRLDAAMLMRVFLGWLRGERGHCGMVAIPTMEEEDARRPNRERESLVNERSRIVNRMKSALARLGIRGFKPHLRKAPERLAGLRTAEGTGLPANIIEEFRRDMARLALVREQISSIEKTRAERLERAPDTGPHAMVRLLARVIGIGIETADMLVREILSRKLRDRRALARYAGLTGSPDESGLKSREKGLAKAGNARVRRGLIQLAWRFLMFQKDSALARWYRTRTEGPSGARKTTMIVALARKLLIALWRLVTTGEVPDGVELRPAA

SEQ ID NO: 62141 - protein, 433 aa, unidentified
MKGGDFLSKYRNSIVCGLDVASEFSIACILDPEGNVGLRSYKIIHSLQGFNSFLSIVNDIVKSHNQAPIVFALESTGIYHMTLLTFLKNNNFEVLLINPLITNSNKNNSIRKVKNDKKDAFSIANLVKYQDIKVSFLPSLDILRLRAFIREYFYLGDEYAKFKLKLGNVLAYTWPGYSNVFSDIASLASINILSTYPSATSFLNADKADILKLLSPSRKGSKWCETKYSQLLSCANDTSSLSNVDQPFIVQSFVSMISSLDKNIGILFNSLQDFINSKDFDQSVKYNIDLIKSIPGCGFISAVAIIAEIGDFARFSKPKELIAYFGLDPEVNQSGKFTADKVKISKRGPRIARRALFFIALASIRKGKNKQPINSVLKAYYDKKCVSKVKMSALSCVMHKIVKILFSVLREQKTFSLRTPEDHINQFLNNQAA

SEQ ID NO: 62142 - protein, 362 aa, unidentified
MMRHIFVGIDLGDKNSVARIAVDRDKSERFGFVNDVRGRARLFEKVKVKSEEADGAKIIMAYEASSCGFILRDEAEARGNQCCVLAPTKMEKSVEQRKHKNDDRDAVDVLEKIRAHVLAGNRLPTVWVPDPQMRDDRELVRARVELVEKRTRLKSQVQMLVKRQGLEKPSGCGSGWSLQHRRWLEALTKSDALGSGARTALTSLLRQLQFIEEEIERIEKPLLQLASQARHQPIIEELTLEPGVGVMTAMVYRTEIGYAGRFRRSRQVGKFVGLTPTSHESGQQNDRKGHISRQGPARLRKMLCQASWVHVNHDADAKRIYQQLVSRNPKKKKIAIVAVMRRLAVRLWHRMLRVELQMTQAG

SEQ ID NO: 62143 - protein, 383 aa, unidentified
MSSSTSSAVPAVHSIIYLGMDVHKESITIAVLPEGAKSPTRLDRLHNDLPKLKKWLERVARDGEIRACYEASGAGYVLHRAMKEWGYECEVIAPSLVPKRPGVQRKHDKRDAADLARFYRAGELTTVRIPSESDERVRDVVRCRETFQKEILKSRHYILKFLARRGFVFREGTNWCSPHLKWLLHLTTENSPLEQHDRLIFREYHALLLYKLERRDELDRQIEQLALLPNLAPMVSRLQCFRGISLHSAMVLATEIVDWRRFERPSQLACYLGLVSREDSSGDRTRLGSITKAGNSHCRHVLVQAAWSYRHRPQTGVELKRRQQGQPPAVIVHAWKAQQRLHQRFNHLSYRKRPQIAVVAVARELVGFLWAVMQDTPVEHQAA

SEQ ID NO: 62144 - protein, 466 aa, unidentified
MQELTLGIDVACRAAHQASLADQAGRLAWSGRRFRTTTADLDRLWAAIPSPAAVTVVLEPTRNAWVPLAAWFRRHGARVILVPPEQSADLREYYSKHTKSDHLDSRMLARLPLLHPDGLRPAEGLGPADAMRRATRLRASLVKRRNVILARLDSYLELLGPGWHAAFGGDLATNTALRFMSAGYADPHTARRLGRARLTRFIWRYSHGHWGEELAARLLAAAAETLALWDGELDYTELAADIAAEARLALALSAEIRDLEQKIAALLHQADPAAIMTSVPGVGVINAAQILARLGDPARFRSLAGARSFTGLVPSLTSSGVSGHHGPPTKSGDAPLREALFMAADHARRTDPTLAARYHRLMVTCGKHHNSALCHISTALLTRIIACWRAGTPYQIRDTDGTPLTAAQGRAIAATRYRVRDDIRAQRRTSHHSAKAGRRHQESPSAPTPARPRTTLRPPAKALDTA

SEQ ID NO: 62145 - protein, 352 aa, unidentified
MTVTIVETRAPARAITGGVDTHAGAHVAAALDPVGGLLGVQEFPATPAGYAQLLGWLGGFAAVCLVGIEGTGSYGAGLARYITAAGVRVVEVDRADRQDRRRAGKSDPLDAVSAARAAQSGRAAGAPKGRDGAVEAIRALMVAKRTARSERTQTINQARALVVTGPDDLRIRFATHAPADLVAELASLRPRPGAVVGYATRIALRELGRRAQFLDRQLERLDEFIVPLVTARAPGLLALYGVGPDTAALLLITAGDHPGRLRSEAARAHLCATAPIPASSGKVTRHRLNPGGDRQANHALWRIVFTRMGSHPATRAYVARRTKEGLSKKEIIRCLKRYIAREVYPHLRPGPG

SEQ ID NO: 62146 - protein, 469 aa, unidentified
MICSVGIDLHQGSHRARCLDDRAQLCDGFTFQTTPEGLATLEERVFRDSANPIIVLEPAGLPWLMVAVYLRSRHPGCRLVKARMQKVAALRRYLRGPVKSDRLDALTLAKMPFIDPEQLVEIYLPPAEIHALQRLTRQRKRMESDVSGRKIRISAILDGYLPGVRRAFSNAWSSSFRAFLRARINPFSVVRDGEETLHAYLSKTSPRSNVQTRQVFLACQSVAHVCQMSRTAGTLNEEFFTELQDEVARELRLMEASEAESESLACRIAEFYQKLHPSDNLSTIPGVGPHTAPIFLANVGDPARFRNQSAFANWEGVVPGARQSSNVEAKGLRMTKAGPSIMRMALYQAGEIGRRNDPHLAAVYYREMVYHGKNHRQAMGAVMSHLGARVLRVLKENRSYEIRDLDGKSIDKKDAKILILSQYHVSEEVRRERRRRNTKASRRRETATASINEAANAPQAVQVNSVSQK

SEQ ID NO: 62147 - protein, 384 aa, unidentified
MSAKHKVADPLEPERHRCARVEMSSNHSRGRGSTMNITTYGLDLAKQVFQVHCVDPDTGEIRRLALLRSEVSAFFAQRPPGVVAMEACGSAHHWGRVLRGLGHEVRLLAAQFVRPFVKTNKTDAADAEAIWEASQRPGMRQVGLKTEEQQAVLSLHRIRQQSIKVRTMQAHQVRGLLYEFGVVVPKGWRALLAQAVPILADDRRCAVPELLRGQLLTQLQGLRALTTRITELECQIGSWQRRESECRRIAAVPGVGKLTATAVIATVGDARAYRSGREFAAWLGIVPRQSGTGGRVKLLGISKRGDPYLRTLLIHGARTELARQSRANRQLDPWLKGLLSRRPKNVVIVALANKMARTIWALLAYGREFDRCWSRASMPAPALS

SEQ ID NO: 62148 - protein, 413 aa, unidentified
MQVLYSHCAGLDVHKKAVSVCVWITSAEGRGQTHHQQFGTTTPDLLELAQWLQSLGVTHVAMESTGVYWRPIYEVLEGGFTLVVVNARHAHVLPGRKTDTGDAQWLGDLLRHGLLKASYVPPRWQRELRELVRYRRNLSQRRTQVVNELHKTLELANLKLASVVSDVTGASATDMLQHLVAGQGDPQLLSELSRGSLRKKKEALCRALTGRVRDHHRFMISQHLAEISGVEEDIRVISEEIERRTAEQQELIDRLDAIPGINRRVAEVIIAEMGTDPSVFGNNVERAMAWAGVCPGNNETGGKRHQARIRQGNRTLTTAAVEAALAAIRSRKTYFHFLYRRLAGRRGHKRAVVAVAHAILKTVFMMILRGTTYQDLGADYYDRLRPQVVIKKLTRRIRQLGFEVQLNPKPAPA

SEQ ID NO: 62149 - protein, 316 aa, unidentified
MCERAALNNRPSLDLSPFELKGPESLSGSEGQIRCLPQPEQLHGLRARTEQGREWMMAQNEVVVVGIDVAKDKVDACIRSLSQRQTFPSTAEGQRALIRWLRKHKVGKAVMEASGGYEREWAKALRNAKIEVRIVDPKRVRSFAQSAGRLAKNDAIDAEMIAWFAETFDEARGQAYDAAREELVQIVNARQALLEQQTQMQNRCEHTVPIPVRKMHERLLKAIALEVTKLEAVIAALTKASPHFAETAEIIESVPGLGKITSAGLIAAMPELGQVSNEAISALLGVAPYDDDSGKRQGERQIKGGRRKVRNLFYMA

SEQ ID NO: 62150 - protein, 344 aa, unidentified
MNRTTYAIDIAKRVMQLHWVDAPTGEIKRRRLTREKLVPFFAELQPVRIVMEACGGAHHWARCLSSLGHQVELLPPRQIRAFVRSDKDDAADARAIWLASQHSDIRRVPIKSCEQQAVLSLHRTREHWKDVRTATINCLRGLLYEFGVVLPRGRQAALKTLAERRADIDNVLPALMSPMVDAQLAMLDHVDHCMKQLQTQIAATSGKTAQRLRQVNGIGLLGASALAATLGDASGWRSGREFSASLGLVPKHSGTGGKTRIGHLSKRGDSYLRTLFMHGARSAILHMKTKPRWLEQLLLRRPFNVVVAALANKMARIAWALVAHGRSYDPGWSSTAPIPAAAVH

SEQ ID NO: 62151 - protein, 339 aa, unidentified
MQVTTIGLDLAKSVFQVHGIDEHGEVAFNRALRRAQVVAFFEHLEPCLVGIEACGTSHYWARELIKLGHNVKLIPPAYVKPYVKRGKSDAVDAAAICEAVTRPTMRFVEVKTPEQKAILAVHRTRDLIVRQRTQTINMLRAQLAEFGIVLPQGVYHALKFAKNSIEGEPLDLPKDAHEVVFDLSEQLLFLHAKILRHTRHMTQIARREKQVALLRTIPGVGPITASAIVATVGSGKQFNNGREFAAWLGLTPLNRSSGGKERLGHISKMGDQYIRRLLVLGMTSRIRSIRLEPEKFDPWFANILSRKPSRVAAVAMANKTARMIWAALTRNEPYKVRTV

SEQ ID NO: 62152 - protein, 341 aa, unidentified
MHSHFVGLDVHKQVVAFCVKTADGNIVAEGTVKSTRAELDQWVKTVPEPWVGGMESTLFSHWIYYHLKQRGAELQMGHAARMKAICSGKKKSDKIDARTIADLLRCNMFPSCYVISPELGALRRQMRFRRSVVNEQTRFKNSTAGLLMQAGVEYERRRLHGKRYFDELMRANGWVDDAMRPLLQFNREQIETLARMDKALLTMLQKHPELAARVAALTKIEAVGAVTALTWALETGTPKRFPSIKRAQSYAGLTSAFWESAGKEKHGPISKQRNAHLQSVLIEAAKLAPAHSEKLKAVYQKSRAAGADENVATLEVARKMVAYLLAADRAFFAQHEGAAAA

SEQ ID NO: 62153 - protein, 452 aa, unidentified
MTRQRKKSTAQAALPVMRPDAAGIDVGATEVYAAVPVDRDRERPVRCFPTFTENLHALADWLEHCGIKTVAMESTSVYWIPLFQILEARGLEVCLVNARHVKNVPGRKTDVSDCQWLQYLHAVGLLRASFRPEQAVCAVRSLLRHRESLVQMTGTHVHHMQKALDQMNLQLHHVISDITGVTGLAIIEAVLEGERDPKVLAKLRNHRIKASEETIAKSLVGDYRREHLFTLRQSLTAYRSYQKLIGDCDSEIHRSLEEIDSKNDSPPSPPVNGGSEPPETLPFQLSEQLDRILGVDLTKVPSLGTLNVQILVGEIGPDLSKFRSASAFASWLGLCPANDISGGTVLRTGTRKVNSRAAKVLRLAAQTLYRSKTPLGDFYRRMRAKLGGPKAVTATAHKLARIIYHLVTTGQEYDPTTFIKQQLRFQKHQEAKLRGKARELGFQLVPLGVSPA

SEQ ID NO: 62154 - protein, 467 aa, unidentified
MKHHRRRPSGKPRVSPTVLDRINPHVAGIDCGSAEHFVAVPPDRDPHPVQSFTTFTSDLVRLADWLTACRVTSVAMEATGVYWIPIYEILEARGFEVRLVNARHFKNVPGRKSDVSDCEWLRELHIVGLLRGSFRPTEAIVALRGYLRHRQTLVESASTYTQRMEKAFVQMNVQLPLVVSDIAGTTGLRIVRDIVAGQHDPQRLAQHRDPRCRATEAEIAAALTGNYRPEHLFVLQQNLELFDVCQAQLAACDTAVEAHLQTVTARIAAPATALPAPRRRQKKPRDNEPHFELRAPLFHLTGGVDLTQIDGIGGHTALKLLSEIGTDMTRWPTEKHFTSWLTLAPKNNISGGRLLSSRTSPSANRAAAIFRMTAMTLGRTPTALGAFYRRLAARIDKPQANTATARKLAILVYRALKGEIIYRDLGAAGYDSQQHSRVLRNLRKRASAFGFELVNRTTGEVLVAGVS

SEQ ID NO: 62155 - protein, 312 aa, unidentified
MHTTTPDPIEYVAIDVSKATLQVQNENCSLVVGNDPPGHRKLLKHLKCSKNPLVVFEASGGYERGLSAFLAKSSIPMAMVNPARVRDYARSEGVRAKTDPIDGRMILAFAKSKAVKAMTPPSEASVKLSALLDRRGHLVEQLAREKNRLQNSEAFIHGSIRKMIRILEKEILSLEKLIEGFVLADKELQPRSQIIQSVQGVGKVTAWTLLAFLSEMEHLNRNRLVALAGIAPFNRDSGKFSGKRSIIGGRAKVRKCLYMSAHTAASCNPVIAPYVQGLRDRGKPYKCAIVAAMRKLLIHIQSLLKNAHLQSA

SEQ ID NO: 62156 - protein, 315 aa, unidentified
MTSPTPVIGIDVAKDSLSLFCADSGQAIEIGNDTRSIHTWLKQLPTSSAIAIEATGIYHLDVASLAQAQGHQVYIINGYRLSNYRKGIGGRNKDDRSDARLLARYLTHEREQLQPWQPPPEAYRRLQILLHRRAVLVRSGVSLRQSFSQESLLKDVLKPLLEQLSAVEKRLEKLISQVLSESGLAEQSKRCQAVEGIGPLTAAGLNMAFLRGTFRNSDAFIAFLGLDVRMKESGRYCGQRKITKQGDPEIRRLLHNAAMAAARTQRWQEVYQGYLKRGLKRTEALTILARKLARIAFALMQKQVDYNPRQGGSLT

SEQ ID NO: 62157 - protein, 332 aa, unidentified
MKEQQIKHNEVQIKKFIKKLKTEWNEIYCCYEAGVTGYPLYRYLKSLGVNCILVAPGKIPRQNTDKIKTDKRDAIKLARLMRSGELESIHVPSEEDAAVRDYLRSRDSLRLDLGRNRQRLMKFLLRKDIKYSTTKYWTVSHYKWLNNLHFNNEILQETFNDYYSRVRVQEENLKAMDKKIQEIAESEPYREKVGILRCFRGVDYLTAMFLLCEVNDFKRFKTAGSFMSFLGLVPGEYSSGSKRKQTGITKTGSPRLRRILTEAAWQHRFPGTGSKIITARRSGQPALVVALSEKASLRLHKKFRNLQRKNSSSDDNGSFKRVIRISLGGDGG

SEQ ID NO: 62158 - protein, 358 aa, unidentified
MVDKVTEAAVVGGVDTHKDLHVAAVVDQNNKVLGTQYFSTTRQGYRQMLAWMTSFGTLKRIGVECTGTYGSGLLRYFQNAGLEVLEVTAPDRMERRKRGKSDTIDAECAAHAAFSGIRTVTPKTRDGIIESLRVLKTCRKTAISARRVALQIIHSNIISAPDELREQLRNMTRMQLIRTLGSWRPDASEYRNVTNVYRISLKSLARRYLELHDEIADLDVMIAAIVDELAPELIKRNAIGYESASQLLITAGDNPQRLRSESGFAALCGVSPVPVSSGKTNRYRLNRGGDRAANSALHIIAIGRLRTDAKTKEYVARRVAEGHTKMEAIRCLKRYISREVYTLLRNQNRRINSIPITA

SEQ ID NO: 62159 - protein, 418 aa, unidentified
MRKIRNKKRIFNEKTILATVDIGKEYNYGYIRCYDGAEVAPFKFQNTYRGFTIFWHAIESIQRDKHVPDIIIGFESTGCYGMPLIHFLHDKPVTLVYVNPKHTKKVKEISDNSPNKHDKKDPKVIADIIELGNWLRVVVPCGTAADLRELVHARDGELKLLTELYNKLHAHVFRIFPEFQRVFTHLDTKTAHYLLTHYPTPEAIVSLGVEKLADIIHLKSRGRMPRDRAKHLYQYALMSVGIKEGQHCIADRIHRLLHIIEEHEQWVAIYEQRIAHVLSRVPESHLMLSIKGVGPITAAGLIGEIGNFHDFSSYAELEKFIGLNLYEVSSGKRRGQKRIAKRGRPLARKLLFFAAINVVRQGGIYHAHYQRYVARGMKKIKALTAISRKLLRLIYALVHHQCEFDLQYFQKQHASNAA

SEQ ID NO: 62160 - protein, 391 aa, unidentified
MIYVGIDVAKDKHDCFITNSDGEVLFKAFTITNNLDGFNELHQKIASVMDDVTKVKVGLEDTGHYSYNLLGYLIDKGLPTYVINPLHTNLYRKSLSLRQTKTDKVDARTIASMLMSDVNLKSYSDISYHNEELKSLTRYRFDKVKERAKLKTSVSRLVCILFPELEKLVPTLHITSVYALLSEFPGAKHIATAHLTRLTNLLSEASKGRYGKDTAITFRDAARASIGSNMPAKSLELKHTIKLIQELDSEIAEIEDEIKITMDEINSPILSIPGINYRMGAMIIAEIGDFNRFDSPDKILAYAGFSPSTYQSGQLDGAYAHMEKRGSRYLRYALYNATKYVCHWDPTFAAYLAKKRVEGKHYNVAISHAVKKLVRVIYHLEKTKQQYIKAA

SEQ ID NO: 62161 - protein, 338 aa, unidentified
MKTHIGVDLHQRFCYLTAVDASGKTFKQGQVVNEEVALRSWLRQVPGPRQVVVEASGFWPAFARAVSAESERLVMVHPQRVKAIASAKLKNDRVDSETLAHLSRCDLLPEAWMADEATQQLRLLVRLRITMGRQRARAKNQLQAVLHQEGFKKPVTDVFGKRGRTWLAGLELSPAGRLVVDTWLRQVDRLDVELSEQTRQLERLARADARARILQTVPGIGPYAAMVIVAELGDVARFEGKRALASYAGLTPVVRESAGKRKRGGITHQGSNTLRWIMLQAAQVAARCSPGARSYYAGLRARKPAQVAKIALARKLLTVVWALLRHGVCFDEQVFIRS

SEQ ID NO: 62162 - protein, 395 aa, unidentified
MENLYVGIDVSKEKFSAQGIDERGKKRFYLEIPMDSHGFSELLRAIKLETKDLGNVTVAMESTACYHINLFSFLTSKGIKVFVVNPLVISNFVKLSLRKTKTDKKDALAIARFLILHKDSLEQLYVKKDISDLRDLTRQRETLVDQMTAIKMDTKRLLNVTFPELEKVVALFTKSILRLLMKYPSAHAVRKARSAAIGKQIIPGSYGKMTAETVSLIKEAAAGSVGTMSFTKEVVIRQKASMLLQLDEHLQEITSLLTEQCEAMMQQEMEILKSIKGIGNKGATNFLVEMGGEIKNYKSHRKLIAMAGIDPAVYQSGKYDGRGRISKRGNSHLRRVIWLMAEKVVQFNEYFRAYYLKRREDGLPYKKAVMATAHKLIRTIFAMLSNRTFFNAKVT

SEQ ID NO: 62163 - protein, 408 aa, unidentified
MLKIVYPICCGIDIHKTFVVACIASTNDKGVTSYQTKRFSIYSKSLNEFSDWLVTNNCKDVCMESTGKYWHPVWNVLERTCRPVLAHPKYLKAIRGKKTDKKDAKWIADVFKHDLVSGSFIPPEIIRQLRDLMRYRSKLTNYTTGEKNRAQNCLTTSNIQLDHVFADVFGKSATAILNHILENPGKKFDVAPFVDRRCKTPIEEIQLSVDGNISPEQAEKLKIIRSHMDSLELCKLNLESTILTLAEPLLPQINLVSSVPGVKSFSAIGVIAEIGTDMSAFPSAKHLCSWAGLAPQCNESGGKKKSSRVSKAGAYIKPLLIQCSNAVVSSNKHPEIKNRFLAINKRRGHKKAIVAISRMLLTAIFHILSKSELYNPALYRNSDVAPVDLIERAVKMLEKRGFTVSQSV

SEQ ID NO: 62164 - protein, 347 aa, unidentified
MKHFAGLDVSLDETTVCVVDEAGGIVREARVPSEPEALVAFFRGLGLAMERIGLEACSLAAWLHEGLTAAGLPAVCLETRRAKAAMGAMPNKTDRNDARGIAQIVRTGWFRAVHVKSPACRSWRALLAARRLVLNKMRDLENGVRALLREAGLKLGRPARKELAARVRELVGADAVLSASVEPLLAIVATMAHELAQLTRRVLAIVRDEPVCRRLMGVPGVGPLTALAFRATIDRPERFRRSRDVGAHLGLTPKRYQSGETDVQGGISRCGDELARTALYEAAHSLLVRSRRWSSLRAWGMQAARRRGMARARVAVARKLACVLHRMWADDAEFRWGKQETASAVPG

SEQ ID NO: 62165 - protein, 345 aa, unidentified
MPIVGGLDIHRKQITFDYLDTATGQVERGQIAPADREHVRAWLGRFAGRDEAAFAVEGCTGWRYIAEELAAAGLEPHLGEPADTAALRGRKRHAKTDKTDARHLRTLLAEGRLPGCWIPPEHILEYRALLETYHDLRAEHTAWVQRIHAVFFHQGAPRLGEGALRTEPGLAGLRAAAAADLSPAGPLQVATALDMLAAVEARMGPLRRQLLHAARHLVGAKVLAARLYGAGPVTALALTCWLGGAGRFSSSRKAVRFTGLDVTVWSSDRKGPPGRLSRQGPPVLRWAVYEAGKTHGRTPAPDHGYYAAVKDRKNGKQAALSEARKIVRQACHILTELGDDALTIA

SEQ ID NO: 62166 - protein, 351 aa, unidentified
MKTTNTAEPKLFIGIDIHKRSWHVHFNTDLFKGKGMSMPANASSLKAYVERHYPDHEVYTAYEAGCCGYSAHRSFESFGWHSIVFNPADLSRTGNAQHQKTDKIDSALICRELKDRRLRGISVPSIEREQLRCLFRRRLDLVKDYRQIKVRLKGQLLYLGVEIPEEYDNPNWSHGFRDWIRSLKFEHDTMNYTLASEMRQFDFIDASVREVSNTLRKYCRQHYKKEYYLLRSVPGIGGIVACGILSELGDLKRFNNFKQLAAYVGLMPSMYESGGNSKSKGISPRGNRIMRSYFVEAAWQALRFDPVMQAYWRTHGGKDKKAILIKVARKLLSRTMAVIKTEIPYEIGVVK

SEQ ID NO: 62167 - protein, 339 aa, unidentified
MNSMAVGVDIAKHVFQVHYVDQESGEIVNKPIKRAKFLEHFANRAPCLIGMEACGGAHHWARQLTKMGHEVRLMPAEFVKAFNIRNKNDAADARAIWLAVQQPGKPVAVKTEMQQAMLALHRMREQLVKFRTMQVNGLRGLLTEYGEVMSKGRAALDKEIPLALGRLAQRLPAALIDTLREQWNGLTKLDEQIAEIERRMREWKKEDLAVKAISEIPGVGLLTATAAVAMMGDPKAFSSAREFAAWAGLVPKQTGSGGKVNLHGISRRGDTYLRTLLIHGARSVLSHAKAPGPWVEQIKKRRPPNVVIVALANKMARTIWAVLAYDRPYQNGYVSVKPA

SEQ ID NO: 62168 - protein, 322 aa, unidentified
MASFLGIDVSGLSLDALVRPEGIKISVPNDSAGFVALEKSLRGLNIKRILLEATGGYEREVMRFLQDAGYKVLRVNPRRARSFADSMGIKAKTDAIDAEVLAHFAEVIPDKPALQISPDRALLRELLQQRDRLVQQRDDDRRRLKQTQSMVVAHFLKANLQHFRLQIKLVEQAIKQQAAILNDERIAQLIQVKGIGLVTAGKLVALLPELGRVESREIASLVGVAPFNHDSGKSVGKRSISGGRFEVRRALYMACLVAVKHNPALKARYEALRGRGKFAKVAIVACMRIFIVRLNAMLRTGTPWRDLALPVPENTAQLQGTA

SEQ ID NO: 62169 - protein, 356 aa, unidentified
MSHDVKYIGMDVHKEAIVIAVLNGSGKLVMETILETKASSILQFLHGLRGELHVTWEEGTWAAWLYDLLQPQVEEVVVCNPRRNALLKEGSKSDKVDARKLADLLRTGMLRPVYHGENGLRTLRELGRSYQTIGKDLTRVMNRLKAVYRGWGIPCAGTRVYAARSREEWLSKIPQAGVRRRAELLYQQLDGLQILRRNVRPEFLAESRKHKAAKLLRQIPCIGPIRAARLIALMQTPHRFRSKRQLWTYSGLGVETHDSAQFRFVRGQLQRATKPQQIRGLNRNHNHEMKEIFKSAATRASCGRGPFHDFYAGLLAKGMKPEMARLTLARKIAAITLTLWKKEERFDAEQLKTQAA

SEQ ID NO: 62170 - protein, 428 aa, unidentified
MNEKNHNRLQEFRQLKKEIPGSHEHLIVGLDVAKDKHHAFMGTANCKTLLKKLIFENNLEGFSKLFSRVEAIRAQNSLSKVVYAFEPTGNYHKPLQRHLIAKGCNVVIVTGQAVKNNRETLYGRWDKNDIKDAANVAELVSRGKFLYCDNPCEGINDLRDLLSLRRRLKKEEHSLKMRIRNSLLTKYFPELDRFYNACEGESLAIVRWCLNPRKIAQMPFDQFVKLVTTNRRGIAQKLRLQKIHALAAQSIGWPMGLAADFEASLLVDKLRAVRRQIKDLEKPIEDLSMGFVEYKWLLTIPGFGPYISSKALATIGDPWRFDNAKQVLRLAGYDLGAYRSGKGSNQAVPVISKRGNSEFRYALYQAAFIASVHNRHFIAYFTEMLRGREREQGIKTKMRVKLAAKMLIIAWTLMKKQEAFNPQYLIVA

SEQ ID NO: 62171 - protein, 323 aa, unidentified
MNKDIKYFGIDISHLVFDVTDSDGNYYQFKNKVSGFKKFKKLLNSKSHCVMEATGYYHYQLAYYLVEEGFNVSVENPLVVKRFIQMLLSKIKTDKSDSKLICAYAQQVELKLWKGSSKEVQECLQITRALSVYTKQRTMLKNKLHGESVLGEPSKVVLRSLKRSLRQLDKEVKTLEEKLLLLVKETHQDLFTRLETIPGIGRKTAIMLIVLTGGFERFSSASELCSYAGLTPMIRQSGSSVKGRPRISKMGNQKLRNLLFMCSFTACKYNKACRDLYERIVAKGKSKKLALIAVCNKLLKQAFAIAKSGLIFDNEYKSTLAKN

SEQ ID NO: 62172 - protein, 362 aa, unidentified
MFESTTIIAFDQHVSAVVAAVLPPGHRTPATHALSGDLPTIGRFVARLAALGPVQCCYEAGPCGFELQRVLTAGGVACEVIAPALIPRRPGDRVKTDRRDAGQLAVLYRAGALTAIHIPTEDEEAVRDLLRCREQVRTDLLRARHRLSHFLLRHGRRFLLGKRTWTKRHAEWLQAQRWDRPALAQTHRAYVRAVDERVAQLQTIDLELRDFLSLEPFRARVERLRCFRGIDELTALTIAAELGDAHRFPTAPSVMAFVGLIPSEYSSGAKRAHGAITKTGNAHLRRVLVESAWHYRHHPFLGDVLARRQRGAPQVAIDHAWVAQRRLHRRYRRLAARGKSKQLIVTAVARELTGFLWAVLTQ

SEQ ID NO: 62173 - protein, 438 aa, unidentified
MSNKVIFNLDELFISVGIDVGADFSWMSIALPNQQFVGKPYKILHNSIDSLTTAVSKIKEAEELYSLESRIFLESTGIYHYPLFCYLRDKGFNCSVINPIITKNSTNINIRKVHNDRFDSKKAALVGLKPDLKVSLMPSDLALNCRNLCREYYDLIDNRSAYVNKLQGELRMAFPQYLGIFSKVTINTSLTLLETYTSPSAFLKADKQEIIDIIKSTARFGLTYAQNKYNAIIQAATDANQFGYIIDSNIKRIRLYISFIRKYDEEINNILESLHELVDANEDADFVKQIHLIETFKGAGFLSAVSIMGEIGDFTAFSKPKQLFAYFGLDPAVKQSGKFEGTKVQMSKRGSAIARRVIHTLTLQSISISRNREAKNPVLREYYLKKCDSKPKLVAMGAVSHKVCNMIFAILRDNKPFKIIAPQEHIKQYNSAKCDIAA

SEQ ID NO: 62174 - protein, 345 aa, unidentified
MSIVGALDIHRGKLTYDYVVMETGEAQRGRIKPADRDHLRAWLRRLEGREGLEGAEFAIEACTGWRYVAEELERAGCKVHLAEPAEAAARKGPKQRAKTDFADARHLRQLLLDGRVPESWIPPQEVLEARARIRLYKDLMEERTAWAERAQATVFHQGVPEVRSLLDARGKALVGEASLSPAGRQAVEYHLRQIDRLSGELRELRKEIGKRALAQAACRALYEAHYGIGPLLSYAVWAEMGDARRFSSSSDAVRYAGMDITVYASDSKRSRGHFSRQGQPLLRWALYEAAVAATHASSPDHAYYEQVKAHHQGDAQIAVIAVMRKLCRRCYHTLRDMGETWSQAA

SEQ ID NO: 62175 - protein, 369 aa, unidentified
MPHVTSIGLDVHARSVAAAAFNPFTGEVVHRDFGTDAAEIAEWALGFEEPRACYESGPTGFHMARELRALGLDCAVAAVSKMQRPAADARRKNDRRDAEFIARMLATHNIVEVPLPDAAVEAARDLDRALDDATAEYRRARQRLNMFLIRLGHVWDERNADGARKGSWTRAHWRWISGIRLEGPQRDVLEYYVTAARCAESDRRQLEKKVLALARTDRWRPAVEALSCIKGIDTLTAFRLAAEAGSFTRFRTAPAFASWCGLVPSERSSGETERRGGITKTGNRLARTALMESAWHYLTCTPRPKAPAPGADVPAAIRARADDCTARLCRRREALAAAGKSSCKANAAVARELACWVWEIGRRAEGTLG

SEQ ID NO: 62176 - protein, 339 aa, unidentified
MRREEFECIGVDVSKKTLDVALYRGKVDWNDGHIKVDNTVSGYRELKKWLRLKNAVKSRLRICMEATGLYTHDFRSWLEQEGITYYVVDPKRMHHFAPPLSIKGIRQTKTDKADSFRIAIYCSLFHESMEPSRLPSPAYFKLKRLLAERRQYVKQSVLYKQQLSDISIYDTVSSRMRKEKEVGTLKDDIRQTDKEMKSIIDSDPAIKRNYDLLTSIIGVGIVVAVTTIVLTENFTTFTNPRKYASYIAIAPFPHESGTSVRGATRVSKQGFRQAKADLSVSVLNAITHDAELREYWQRKKAEGKHTGVILNAVKFKIVLRMFAVVKRKKPYVNTKGYKG

SEQ ID NO: 62177 - protein, 347 aa, unidentified
MEYFAGLDVSLETVNVCIVNAAGDILLEKKIAAEPAAIVHLLKSFGSPVKRIGLEAGPTSSWLYGELRAAGYGAICLECRHVKAGLSAMRNKTDRNDARGIAQLVRLGWFRQVHVKSEEAQRIRMLLVNRQQLLSKALDIENSVRGSLKVFGLRVGVVARRGFEARVLELVANDPILLAVTEPMLRVRQALFEEFERLDRLCQQLARRDPVCRRLMTVPGVGVVVALTYRTGVDAPERFSRSRDVGAHFGLTPKRYSSGQTDYDGRISRCGDEMVRTALYQAANVLLHHGRWSSLRSWAMRIAKRGSVKGAKVALARRLAVVMHRMWTDGTDFRWSDTSRMTAPTAA

SEQ ID NO: 62178 - protein, 412 aa, unidentified
MDVLYPRCCGIDIHKRSITVCVLIREAGRKEQKHIREFGTTSSEILSCGDWLRDLGVSHGAMESTGVYWRPVWNLLEGQFGLLLANATHVKNVPGRKTDVKDSEWIAQLMQHGLLKPSFVPDTVLRDLRELSRDRTSLVAERSRLKNRIQKILEDANIKLGSLASDILGKSGRAMLTAMVKGKENPEQLADLAQGQLRLKIPQLVEALRGRVRAVHRFRLQQQLERIDFVDAQIAQLEEEIEKQNAPLEEAVSLLAEIPGFDRTTAWSVIAEIGVNMKQFPSADDLASWAGVCPGNNKSAGKRLSGKTRKGSPWLRQKLCQSAWCASRCKKSYFSAFFQRIAAHRGRKRAIVAVSHALLVVCYYLLQRKCHFQDLGVNYFDQLNREKLTHYFVKRLTRLGHKVTIEPCEAAA

SEQ ID NO: 62179 - protein, 400 aa, unidentified
MRAVFGIDVSKTSSEVAILVNGEKVHGYTILNDTIGFNRLLGDLKTVHNPEIIFEATGVYSRRLQAFLEEYSYAYTRLNPLEAKKQLDSLRVRKTDKIDAEKLAKSQLVHNRKPTYVQEEVYQHLRDLSRFYQNLTEDIVRAKNRLHKVLQVTFPELENLLSTPTGEQYWNLVMAFPCKEFVLSLSQSNLCEIIRQSTSKRISEKRIAYLTDKLIKLAKQSFCAVKKTSPMLEEVRYYAQELLRLSERRQVVLNDMVALAQPLPEYDILRSIPGIAEATATSIIGELGDIRRFQSTNQINAFIGIDLRHYESGNFLAKEHITKRGNPYARKILFKCIHNIASASHTNPCHIADFYEKRKRQSTIASTKPHTIASIHRLIRTMYYLITHNKLYDYTSIQNR

SEQ ID NO: 62180 - protein, 436 aa, unidentified
MLDSQSMPVTYEKEAVIMMRIVNRKCAGMDVHKKFIAVCIATTDFKGITTYKKKRFATFNSDLKSCRDWLLANGVTAVCMESTGKYWIPVFNILEPHLKVNVANPKYVRAIKGQKTDDKDAMWIADLFKFDIVPSSYIPDKDIRKLRELFRYRHKLVNARSAEKMRLQNCLTVSNIALASVLTDSFGKSASSIIDYLLNAETFDPEHCKSLLQKSAKLKAEEVVASIIGYEISNDQSLKMKLCREHVDYLSLVVDKIDASIEDLSKPYDELITLASDVPGITAKSARYIIAEIGADMTVFKSAKRLCSWAGLTPQSNESANKKKSCRISRAGAYLKPLLVQCALAAIKDKQNPYFRTKYDRIKKRRGHKRAIIAVARMILTCLYHMFLKKDAFQPSDIYYEEVPEQLLQSRKQQYIEQAIKLLEKEGHTVLPPAVA

SEQ ID NO: 62181 - protein, 420 aa, unidentified
MPNIEIGVDSMVKENFIYVGIDLHKETHTAVMIDCYNQKLGEITFPNRPADFPKLVTKVKKCNTDGKEVVYGLENAYGYGRALAVWLIDKGYLVKDVNTAISHRQAKHRGAMYRKSDSDDAEAIALATLNMLDKLPDACPNDAYWSLGQLVHRRDNIMKQRTRLVNQLHEQLCIAYPSYKQFFNDISRPTALYFWEHYPSRKYLKGKSVEDLRAELVPVSHNKCSTRTCEKILDAIAGDKVKNNAYQDARDMVTLSIVSDLQHYDKQLAEVDKMLEQMYKMLGCTLTTIPGVNVITAVKILAEIGDIKRFSNANKLAQFAGIAPLHLSSSGKGKDVATKQGNRRLQATIYFLAIQMVQVSSKGTPRNSVVRAYYEKRKAEGKTSQQALICISRRLISIIYGMLKHGTEYRMPVVESAGEK

SEQ ID NO: 62182 - protein, 340 aa, unidentified
MNTFYVGLDLGSTFCYQCVMKPDGAIVRSRPVPTSEKQLRSAFADLDGELLVHTEAGELANWVVDIISPLVTRVVISHPRSLAWIAKDSLKNDKLDARKLADLMRSNLVHEVYLPKHNRRTFKQIVRHYDEATRAQAKCKAKLKARLRCQGIIRRDAKVFDNVERKIVLENISDKYLREMFGQFYATLDALIEDRVTAKRLMVETSKQFPEVELLQTAPGVGIIGACRFVAYIQTPARFSNKRKLWRYCRLGITRRSSDGKLLAHPRLDINGCGALKDVSRKAFDAAMRCKEDNSFKRAFEQTLENTGDKVHARLTVQRKIVACLRAMWLNKQPYHEDLP

SEQ ID NO: 62183 - protein, 371 aa, unidentified
MFHVGLDIHTKRISICALDEKGQVVHRSQVRSIQDLLRVLTDLPDRFQVCYEASCGYGHFHELLRPLATRVVVAHPGQLRLIFRSRNKNDRNDAERLAKLLYLGEAPAVHVPSADVRTWRELINCRSQVIAKRTRAKNAARALLRGAGVTPPKHPGLWTKEGLAWLRRLELPTASQQLRRDLLLEEMETLLRQVQRIERQLAQQAQRTPAVVRLRSIPGVGLRTAEAVAAFIDDPHRFPNAKAVGSYFGLVPCQDQSGDRNRLGHITRQGAPVVRQLVAEAAWQARRRSPTVRAYFERAQRDDPQRKKIALVATAHYLVRVMWALLKRGTDWQENPALAKAPASASCGGPAVERGEGEREKERGERMSESA

SEQ ID NO: 62184 - protein, 371 aa, unidentified
MNQNLIYVGVDVDDVRYHGCALDQRTGEALEFQCRSTLKGLMGQLEKVSEYFGGVDLKLCYEASYVGFSLQRDLKDQGYACEVVAPSSIPRRPGKAVKTDRIDAADLAQFYANGLLTVVTAPDAQLEQDRDLLRSRQYVMQQQGMVRKHIQSLLRRNGFHYKAETQHKTHWQKHHYGWLERTVEACSGSLKVNLSLLLRQLRSLDVILADYGQEVEALAVTPRYREPVKALTCYKGIKHLFALTMITEIGDVKRFPHPRQLVSWIGMDIREYASGGKSNRFGITRQGNRHLRTAFVEANQRGYRTASLSKDIKVRRANAKPEYIAIADRCLRRLNKKGNRLLLAGKHPNKVKVACAREMVGFVWESLRAAT

SEQ ID NO: 62185 - protein, 347 aa, unidentified
MRFYSEQHRHTCGVDLHGRNLYLCILDQQGQIRLHKKLRCEPKLFLEAIAPFRDDLVVGAECIFCWYWLADLCADEGIPFVLGHALYMKAIHGGKAKNDKIDSRKIAILLRSGAFPYAYVYPRQMRSTRDLLRRRLHFTRKRAELLTHIQNTFTQYNLPMPSGQLTPAAGREGLPELFDDPAVRATIRADLSLLDHYDTLIPQLEHTVLQLARVHDPDTLRLLMTIHGVGKVLGLTLLYEIGDIARFPSAQDFSSYGRLIKCAKESDGKPLGVSGAKIGNAHIKWAFSEAAVCFLLRNPPGHAYLQRLRKKHAKGKALSVLAAKLGRATYFMLKQQTTFDMNRFLSH

SEQ ID NO: 62186 - protein, 354 aa, unidentified
MMIIGCDYHPAFQQIAFVDTETGELQERRLQHREEAEKFYRDLAAQGIKVRLGMEASGQARWFERLLAELNFELWIGDAAEIRTRRVRKQKTDRQDAQLILKLLLKDDFPQIWVPSWENRDLRQLLWHRHRMVQARTRIMNQLQAVALNEGLRCKKRLWREAGREQLEAFRLAPWASRRRHDLLELLDRLSPTIAELTQTIEQEAEKCPAARRLRTHPGVGSLTALAFVLIIGRAERFQCGKQIASYLGLVPLEDSSGNRRRLGHITKQGNALLRFLLVEAAQVSARSIPEWRHKYFHLAMRRGRKIAKVAMARRLAVQLFWMWRKGWDYEQVRKFGSHAGQPGTGHGVHSNTE

SEQ ID NO: 62187 - protein, 319 aa, unidentified
MAQNDLVVAGIDVAKDKVDVCVRSLSLKRTFVSTAEGRRELTSWLRRRKVGKAVMEASGGYERDWAKALRNAKIEVRIVDPKRVRSFAQSAGRLAKNDTIDAEMIAWFAETFDEARGQAYDATREQLHQMVNARQAMKDMQTKLESQGEHALPATVQRMHARIMKTIAVELVKIEAAISAMVQATPHFTELAEIIESVPGIGRTTSAALIAAMPELGQANNKIVAALLGVAPYDDDSGRRRGERHIKGGRRRTRNVFYMACLGAATQHNPVLKAFYDRLVAKGKQKKVALVACMRKLISILNIMIERRQKWDASRYAVS

SEQ ID NO: 62188 - protein, 447 aa, unidentified
MPMVHPNAAAIDVGATMHMAAVRADRALEPVRSFGTFTADLHRLVNWFTECGVETIVMESTSVYWIPIFELLDSRGFTVCLVNARDAKHVPGRKTDVSDAQWLQRLHSFGLLRASFRPKGQIAELRSYVRQRERLLEYAASHIQHMQKALTEMNLQLHHVVADITGATGLRIIRAILAGERDPEVLACLRHYSCHSSAETIAKALTGSYRAEHLFALEQALALYDAYQEKASACDARIEAVLKELSVHRGRGHGSPPRASRRRNRTDQANALAFDVREALFALLGKDVTSIDGLGPYLSLKLIAECGDDLSSWPSAKHFTSWLGLAPSNKVSGGKILSSRTRRSGGRTAALLRLAAVAVGRTDTALGAFYRRLSSRIGKAKAVTATARKIAVLFYNAVRYGMDYVDPGASSYETRYRARVVNNLHRRAKAFGFVLQPLEPKVGAAVS

SEQ ID NO: 62189 - protein, 370 aa, unidentified
MFESSTIFVGLDQHKESITVAYVGADRSLEPILLGPIGPRTSDVDSMVRKLQSKGKKLVFAYEAGPCGYGLYRHLTRKGHTCLVVAPAKIPRKPGDRVKNDKRDATNLCRLLRSNDLKSVYVPQIADEAIRDLCRAREDAVSDLKAAKHRIKSFLLRRDIRFNGKADWKTPHLRWLGEVKCETSAQQVVFQEYVRAMAQGFERVGRLEIELTGHVKSWRLSPVVEALQALRGVRFTVAVTAIAELGDLTRFEKPRQLMAFLGLHPSEHTTGERRRLGGITKIGNTHARRALVEGAWAYRFPARVSKQIQARQEKLPEAVRDIAWRAQVRLCKRFQKMIARGKNANIVVTAIARELAAFMWAIAKQVPVAA

SEQ ID NO: 62190 - protein, 342 aa, unidentified
MKITTIGIDLAKNVFQVHGVDAHGKTVLKKQLKRDQVASFFIQLKPCLIGMEACASAHHWGRKLQAMGHTVRLMAPQFVKPYVKTNKNDVADAEAICEAVTRPNMRFVAIKTVDQQSVLALHRARQGFVRARTAQANQIRGLLAEFGLVLPQGIHHVAKRVPQLMEEASDELTGAFRLLIERLLDQLKVLDRHVHELEAQITAWHRANPMSRRLERIPGIGPITASALVASMGDARNFHNGRQVAAWLGLVPRQQSSGGKPLLLGISKRGDAYLRSLLIHGARAVVAHAQRTLSGDGWLNTLRQRRHTNVAVVALANKNARVAWALLAHEREFRTDYAPSAA

SEQ ID NO: 62191 - protein, 369 aa, unidentified
MGEYSELFVAFDVAKKKHAVAIAEGGRRVYIQFVANIENSPATIERMIKKLADRYKRLHVCFEAGPTGYELYRQIRALGHDCMVVAPALIPKRAGDRVKTNRRDAITLARLHRAGELTAVWVPDATHEAIRELVRAREAAADDLRGKHQQLLSFLLRCGRIYSGGGHWTLAHRRWLARQAFEHAAQQIVFQEGIDAIEDAAQRLHRLEQQLTLIVPGWSMAPVVAAYQAMRGASFLVAVTFAAEIGDVRRFETPRQLMSFLGLVPAESSTGDTVKRKGLTLAGNRRARRALVEAAWTYRYPARVSETLRARIEGLPKPVRDIAWKAQLRLCTRYRRLSAAGKKLPVVVAAIAREMAAFLWAIGREVAPV

SEQ ID NO: 62192 - protein, 350 aa, unidentified
MIIIGCDFHTRYQQIALVDDSTGELSERRLDHENGEAHTFYRSLPKPVRVGIEATGPMHWFQRLLAEHGHELWIGDSAKIRSSELRKQKTDERDARLILELLLANRFPRIWVPTAAERDLRQLLWHRHKLVRLRTMLGNQLHFLAMSQGLCRKKKLFTHKGRSELVGLPLGPWASRRREALLKLLDQVEPSIAELDRAVLEQANRREDAVRLMTHPGIGPVNALAFVLTIGPVSRFRRSKQVVSYLGLNPSEHSSGGRRRLGAISKQGNTLVRWLLIEAAHHTVRFDPELRQDYQRLRFRRGNAVAKVAIARKLAVRMFWMLRSGADYAQLVRMQGSPGATLMDASSSLG

SEQ ID NO: 62193 - protein, 347 aa, unidentified
MKFYHQQHQYYCGIDLHARKMYVCILDQKGKTMIHENIKTDPDAFLQLIGPYLEDIIVGVECVFCWYWVSDLCARHQIPFVLGHALYMKAIHGGKTKNDKIDSYKIALLLKGGNFPTAYPYPAEWRATRDLLRRRMYLMRRCGELVAHIQNTKTQYNLPGFTKRLARRYNHDGVAEKFENPEVRKSVEVDLAAIASLNQILNKLEWHIEKTAEQHDYHTLYLLRSIPGVGLILALVFLYEIQDIKRFPSVQDFSSYARLIKPVKESDGKWAGKSNGKIGNHHLKWACNEAAILMLRESEKAKQYVAKLERRYNKGKALGIFTHKIGRAVYFILKNKEAFNMDKFFSQ

SEQ ID NO: 62194 - protein, 410 aa, unidentified
MDVFLERCAGLDVHQASVVCCVLIGAPGRKPQKLLRSFGTTTRDLKTLQAWLAEHGVTHVGMESTGVYWKPVYAVLEGHVDLTVGNAHHIKNVPGRKTDVKDAEWIAQLVRHGLVAKSFVPPPAIRDLREMVRHRRTLIETRTAVRNRVLKLLEGANIKLSGVASDVFGVSGMAMLEALAAGTSNATEMAALARGRMRRKHAALEAALDGRMREHQCFLLGMHLRNLKAIDQDLDALDARIEAQLEPYQAQHRLLTQIPGVDWVTAASIIAEIGTDMDVFASARRLAAWAGVAPGNYESAGKPKGAGTRRGNVFLKSALFAAASAAVRTKGSYYRDKYNRLRARRGPVRAIMAIAHKLLIAAFHMLSTGEAFRDLGEGYLDQVARKRSTTKLVQRLSNLGYDVMLVPKAA

SEQ ID NO: 62195 - protein, 450 aa, unidentified
MDKKAKQKQSLQFAVINPCCAAIDVGSMMMMVSYSDAQGNQHLLEVDAFTGSLQELATTLKQAGVTHVAMEATGVYWIVVYEILEQQGFKLTLVNAKHFKNVDAQKTDVKDCQWLHQLHANGLLRASHIAEEVYRELKSYLHERTILQNQKSDTLNRIHKLLTQMNIKVQHLISDIEGVSGMKLLRGIAHGLTAPEELLSLINVSKLKADKEDLIKSLNGVYKKQFITILQHALKAYDFFKQQMSAYELLIEEVLKTMLPKDEEGYRPVLQKKKGLVRKNQYSINIKEYLRHIIGVDVTQIDGIDEISALEIISVTGTDMSKWPTAGHFSSWLNLAARPKKSGGKVIGHERRFTNNKATQAFRMAAQTMWQNKGSLGQLYRRLSAQKGSKKANKAIARKLSVIFYNMVKHKTEFDKKKLEVDTARQTAKKISYLQKEAMKYGLVLQNVAC

SEQ ID NO: 62196 - protein, 374 aa, unidentified
MGCQAGGEAASLTTMITDDKTETNKSYDTIKLGIDAHAKWYYVARQLDGATPQPVQKMDFHGLLRFVVRQKDLAREVHTCYEAGAFGYHLHRKLEALGVSNLVVQPQDWDERGKGVKTDRIDALALCQRLDRYVRGNRKAFSVVRVPSEEEERERAFSRQRQQLVRERQRLQAMGRSLLAMQGIHVRGKWWKGQTWAAICREAPAWVVERLEVFMKLIEPVEVEERKLTEGIQKVGRKSRIPKGVGPLSFEVLRREVGDWSRFNNRREVSSYTGLCPREHSSGGKRRGGSVNKSGNPRVRAMLVEMVWRMMRWQPGYHALRKWMAVLGDASRSAAVRKKAIVAVARQLAVDLWRLFTGQTTAEKLGLIYLPEAS

SEQ ID NO: 62197 - protein, 453 aa, unidentified
MPKSKSTSPQNLARTNPGAAAIDIGSTMHMAAVNPDSDGTPIHAFGTFTHDLHDLADWFKACGVTSVAMESTGVYWIPAFEILEQHGFEVILVNARYAKNVPGRKTDLSDAVWLRQLHSYGLLRGSFRPNAQVAVLRAYLRQSERLVEYAAAHIQHMQKALMEMNLQLHHVVSDITGATGVKIIRAIVSRERDPDILAAMRDVRCHSSTATIRAALIGNDREDHIFALYQSLELYDFYQQKMLECDRRLEAAIAMMAIEQAAPLAPLPKIRTKTKQVNAPSFDVRAALYGLVGIDLTQIHGLGTSLALKLVGECGTDLRAWPTARHFTSRLCLAPGKKISGGKLLSSRTRRSSSRAAALLRLAATTIGRSDTALGAIYRRLAGRIGKQKAVTATARKIAVLFYNALRHGMRYQDPGAASYDEQHCGRVLANLQRRARSLGCYLEPIADGVSVS

SEQ ID NO: 62198 - protein, 293 aa, unidentified
MVLIGSDFHPSWQQISWVDTDTGETGEYKLVHQPGEVEKFYRRFAAPALIGMESTGNCQWFVDAMGALGHEVWIGDAAKIRASDARRQKHDRRDAALLLQLLMDGRFPRIWTPSSEQKDLRQLLIHRHKLVRLRAQAKNGLQHLALNQGLQKKRRLWSKNGQTLLRELPLPPWASRRREDLLKVLAMLDQQVESLDLAVQQAAEKDENARLLMTQPGVGPVTSLAFVLTIGDVSRFKRGKQVASYLGLIPREHSSGGQQRLGSISKQGNRFMRMLLVEAAQIAVRCDPQFRSE

SEQ ID NO: 62199 - protein, 449 aa, unidentified
MKAPQEIEDEEYEQILERVAAVDVARASGMVCTRVPHPARPGKRQTRVRAVEAVTGSVLELADHLVAERIGKVTLESTSDYWRIWFCLLEARGLDVQLASARDVTNVPGRPKSDKLDCVWQAKLTERGMLRPGFVPPAEIRELRDYTRLRTDLTRERTRHWSRLEKLLEDALIKVTAVASKIGTKSVRDMVEALIAGQRDPEVLAGLARGKMRARHDRLVEALNGRFDDHHAELARMLLDQIDALSVRIDKITGRVDELIGAIPRAWGVDADGVTGPGAGLGTGAPVLPAVARLDEVTGIGGPAAQVIIAEAGLNMSIFPTPGHLVSWAKLSPRTIQSGAKNQSGRTGKGNPCLKGVLGEAAAAAGRTDTFLGERYRRIARRRGKLRALVAVARSILEIVWHLLADPAARFCELGAGYYASRIDKDRKTRNHVRQLEALGYTVNLAQAA

SEQ ID NO: 62200 - protein, 343 aa, unidentified
MQAITTIGFDIAKSVFQVHGVDADGQVVLRRQLKRRYVLAFFEKLPACLIGIEACASSHHWSRQLRALGHTVRLMPPAYVKPYVKRQKNDATDAEAICEAVSRANMRFVPTKTPEQQSGLVLHRTRHLFIRQQTSVINAIRAHCAEFGIVAPVGRRGVEELLNVIANTKDEQVPAIARACVAALGAQLHQIKQQILEFDRMITAWCRCCETSRRLNEIPGVGPALATALVASVADPRAFRSGRDFSAWIGLVPKQSSSGGKPKLGSISKQGDRYLRGLFTAGALAVIRYAKLHGTRHRPWLTALLARRPTKVAAIALANKIARMAWAMMARGEHYREPIALAA

SEQ ID NO: 62201 - protein, 367 aa, unidentified
MDEDITAYVGLDVHKESTAVAVAEVGRAAARFVCTVGPQLRELLKALRPVGEPGRVLVAYEAGPCGYGLARQLATNGYRCQVIAVAKIPRKPGDRVKTDRRDALALARYLRAGELTPIVIPDERDEAGRDLSRAREDAVRARLKARQQLKSMLLRHGMRYEGKTSWSAAHERYIAGVAFPHCAQDIAFAEYRIAVREAGDRVERLTAALREQVASWRFAAVVAALTALRGIEFVTAVTLVTELGDLARFAHPKKLMSYLGLVPSEYSTGHSRLQGAITKTGNGHARRVLIESAWNYRFPAKLSKILVARSQGQPKAVRDIAWRAQLRLCSRYRRLHARGMHKNKICVAIARELSAFVWDVARHSATP

SEQ ID NO: 62202 - protein, 375 aa, unidentified
METIYIGVDFHARQQTICYLTTETGEFVTHELKHQDKDEVRTFYAQFVGRVIVGLEASGYSPWFEQLLEELGHEVWLGDATEIRRRARWRQKNDRRDAELILDLLVHDEFPRLHRPSLESREILRMLRYRHKLVKMRTIIKNSLQALALQSGLSRRTKLFTKAGQQELRAAPMSPVMKQQQEQWLELLLVLNQRIVETTLWLKQQSLNDARIRLLRTHPGIGLLTSLGLVHTLDPISRFRNQRKVTAYAGLEPMERSSAERKRFLGISKAGSRLLRFLVIEAAHTAVKKDDDLKRFYRRLQERRGRPKAKVAVARKLLVRSFIMLRDEIDYAEFQRRAVVARLARQSSRPAVPDSLIGQPASSESQERVLSAAKK

SEQ ID NO: 62203 - protein, 343 aa, unidentified
MEKHTVAAVDVAKVVFDVALSDEPGRVRLTRRLPRGGFLLFFGQLPAAIVVMEACGSAHYWARRIQDLGHQVVLLPPHQVRPYVTRNKTDRTDAKGILEAYRNADIRPVPVKSVPQQVLVTLHRFRSGWLGARTAHLNTLRGLLRELGIVIPVGAEKVLPQVRTLIADADSDIPDALRPVLAAACEEIEALTERITIAQRQIEAIAEQTPVVDLLWSIPGIGLLIATALVAFVGDIHRFPSGRHFASYLGLTPREYSSGMKRRLGRISKRGDAYIRMLLIHGARSILCHAKKAKEHDRLRTWALELERRVGHNKAAVALANKLARIAWATWKNGRPFESLKAA

SEQ ID NO: 62204 - protein, 370 aa, unidentified
MRIIGCDLHARQQTVAMLDTTTGEVVKMTLTHAGNNVREFYSKLPPPVLVGIEATGSMQWFLNLMEELGIECRVGHPAQIRAAEPRKQKHDRRDADLILKLLAQNRFPAIWLPSKELLDLRALLLHRHQWVRMRVRMQNALQAIALANGLRRGPALWSYDGQAKIAFLPLLPHAAYRRSALQAMYKNMQSEIENLTQQVAEQAGNRCGARRLMTHPGVGPVTALATEVFLGDPQRFTDSKTLASYVGIIPREYSSGEHQRLGGVTKQGSPLLRFLWGEAGAHAARRDPELKRFYRRKLVQKGLGKARVAVARKLGIRLWIMLRDEIDYQEFCRRGQIQQKTVRPVVGMPETGNGAKSHRPSDEATRLPGS

SEQ ID NO: 62205 - protein, 373 aa, unidentified
MTKNLRYLGLDVHAETIAVALAEPGGEVRSLGIIPNEPSAVAKLVRKLGGREQLRACYEAGPCGYVLYWQLTKLGVACDVVAPTLVPTKPGDRVKTDRRDAEKLARCHRAGDLTAVWVPDAAHEALRDLVRAREAAKADQLRARHRVSKFLLRHGRRAPGDVKPWTQRHRRWLDTVTFAPVAQQTTLADYIHEVDHAGARLERLESALDLAIAAAPPAMQAIMRALQCLRGVRQLTAATIVSEIGPLSRFAHPRQLMGYSGTVPSEYSSGSSVHRGAITKTGNAHLRRVLVEAAWAYRFPPKCGDALRTRQRGQPPGITAIAWKAQQRLHTRYRRLLGRGKPVPHVITAVARELVGFIWAIGIAAEREVAIAA

SEQ ID NO: 62206 - protein, 338 aa, unidentified
MIAVGVDTHKDRHHAVALDQVGRPLGELVPAADAAGYEELRLWAERIGGAGEIVFGIEGAGSYGAGLCRHLQAAEHQVVEVERPRRAERRAGKSDRIDALAAARRVLEGSFSIPRRRGALSAIRALLLARRSAVGERTRVLNQLQALNTTAPIALRERVGRGTGKQIERRILSMRRRPGADLEERVAFAVMRDLAAHSRALGADARRYEHELAELVTGIDPALLRKPGVGPISAAKLLACDPARFRSEAAFARCNGTAPIPASSGKTVRHRLNRGGDRQVNNAIHTIAIVRAKYQPETRVYLDRRIGEGKSKREALRSLKRHISRELYRHLTAVPLTS

SEQ ID NO: 62207 - protein, 337 aa, unidentified
MDYFAGLDISMDETHVCVLDREGAVVRESKAASTAQAVANELAKAPSCRRIVFETGRMAPILFHGLNQLGLPVVCVESRQAYQALKSLATHKTDRNDARGLAHLARTGFFKPVHVKSLRAHALRSLISARKKLVGQRVTLENQIRGLAVVFGIRLPRALTTAFIDQALKASEGVAGLSAAMRGLSAARVAVMTAVAAIDADIRRMTRASAACRRLMTIPGVGQLTALAFVAAIDDPSRIRRSRDIGAYLGLVPRRYQSGEVDYTGGISKCGDGRVRTLLYEAANVMLTRYKGQLKLKDWAFAIAKRSTMRKARVALARRLAIIMHAMLRDGTEFAPA

SEQ ID NO: 62208 - protein, 338 aa, unidentified
MDVYCGIDWAEDHHDIALADRDGKLLARRRIGDDAAGLAQLLELLAGHGDSAGDLIPVAIETPRGLLVACLRATGRKIYPINPMAVARYRDRHSVAGKKSDHGDSVVLANVLRTDIGMHRPLPDDSELAQAIAVLARAQQDAVWDRTTAHNKLRSHLREYFPGFLVAFADARGGITRPEARAVLAAAPTPAAAAALTLTQLRALLKKAGRSRGIDIEATRLRDAFRIPQMRQPRLVEDAMGRQAIALLRQLDAACVAADDLEHAVTESFNLHPDAGIITSFPGLGPLTGARVLAEIGDDRSRFQDARGLKAYAGAAPVTRASGKTKSVTYRGSVKLTV

SEQ ID NO: 62209 - protein, 373 aa, unidentified
MKYTKFVGLDVHKDSIAVAVAKEGREAAESLGTIINSPDAIAKLIRKLGPAESLYFCYEAGPCGYGIYRQLKAAGSTCMVAAPSLIPRKPGERVKTDRRDAKKLAQLLRSGELTPVWVPDEKQEALRDLVRAREDTQEDIIRKRNQIGKMLLRLEKRPEHGVKAWTIKYCQWLNSLAFNQAAQGIVLKEYLHALEEAEARKKRLEEEITELVKYSEQAPVIAAFQALRGVGLITAVTVVSEAGDLSRFDSPKQLMSYVGLVPSESSSGGSRYQGRITKSGNAHIRRVIVESAWHYRRQPAIGTGLKKRQEGQTEEIKAISWQAQHRLNLKFRRLSGRGKPSQTAAVAVARELLGFMWAITQELRQKNKLQKIS

SEQ ID NO: 62210 - protein, 432 aa, unidentified
MKPKPDIEFAAFAGIDWADAKHDICLQTAGNEEREWAVVPHRPAAIDAWASTLRQRFQGRPVAVCLELAKGPLVYALQKHDFLVLFPVHPATLAKYREAFTPSHAKADPTDAELALELLLRYRAKLKPLTPPSGPMRMLLRLVEQRRRLVGDQNRIGSRLADALKQYFPDVLSWFPEKDTLLFCDFLTRWPTLKQLQRARRATLLSFFHEHHVRSQSRIDERLLAIKSAIPLTDDLAVIRPNQLLVLTLVEQLRVTLRAIESFDAEIATVSQTLPDYGLFRALPGAGATLAPRLLVAFGEQRERYQSAAEIQRYAGIAPVTESSGKKCWVHWRLQCPTFLRQTFVEWAGATIPRSFWAAAYYRQQRDKGCSHQAAVRALAFKWIRILYRCWKTRTPYDESTYLNALKRRGSPLLNSIAAAAKILDRQSQGVS

SEQ ID NO: 62211 - protein, 404 aa, unidentified
MIDTGDIDVFLGLDVGKGEHHATAVTPPGKKTFDKRLPNTEPKLRELFAKLQAKHGTVLVVVDQPASIGALPLAVARDMGCPVAYLPGLTMRRIADLYPGEAKTDAKDAFIIADAARAMPHTLRAIDGEDETIAELQMIVGFDDDLAGEATRIANRLHGLLTQIHPSLERALGPRLQHPAVLTLLERFGSPAQIRKAGRRRLVTLLRPKAPRMAERLVDEIFTALDEQTVTVPGTEAAALIVPSLAGSLTAVLDQRKLLAGRIEELLEAHPLFKVLTSMPGIGVRTGARILIEVGDGSTFPTAGHLAAYAGLAPATRSSGSSIRGEQPSRRGNKQLKRAFFLSAFAALGDPASRAYYDKKIAQGKHHTQALLCLARRRADVLFAMLRDGTFYEPQPALALTPQT

SEQ ID NO: 62212 - protein, 309 aa, unidentified
MTLVGCHLHTRKQQVAALHTETGETHERQLVHEGSAVEEFYAALPRPVTVGIESTGYAIWFHALMHRLGHTVLVGDAAKIRAMVVRKTKTDQRDARHLLDLLRHDRFPTVWVPDPATRDLRALLTHRRRLVRIQTMLKNGLHAIALNQRLARGAKLLRHAGLAQLQALPLPPYTAQRRDHSLELLETLHTKIQQLDAAIATAALAHPDAPRLLTHPGVGPLTALATVVVLGPVTRFADTKHVVSYVGLAPSLHASADKYRLGHITKQGSSLLRWVLGQAAPHAARLDADLKRTYSHCATAAGARRPGSQ

SEQ ID NO: 62213 - protein, 383 aa, unidentified
MRIVCGLDVHKDSVFVCILSENGDKFESKYGVLTPELEELHQLLVNHGVKEVTMESTSIYWHPIWRILEDIEELKLVNPYFIKQLPGRKSDVRDAAWIAECTMKDLIRGSFVPAPLVQRMRQYNRRIFDLNKEKVYKLTKLDAVLQRCNIRISNYVSSTDSKSYKEVVRLLSEGVTDAVLLADAIHGRTVNRVGKDVIIASLTGVVSEVDIDLIRQYREEIELDDRHLQECQEKLTAICKKEFPKEFENLQTIPGVKERSATSILSEIGADMKMFITASALVSWCGLKPRNDESAGKIKSRKITHGNKYIRKTMIECAWGASRTQDCFYSQFSYIQTVVRRKNAMKVKVAVARKMLVAVWHVLNEGVPYRDYKMLQAQAGGNS

SEQ ID NO: 62214 - protein, 401 aa, unidentified
MDPMTELRVCMDIGSKQHSVVIGLSTGERLESFEMQHTTQGIEHFFAKVAAYESKYDAPVSIAMEAYNGYARPIDQYILAKGYRLFNVNNHKLAQFKKVFPGPAKTDTIDTQKMFELFHLDNHLSLSKNVLQEVIPVSEVNLKLKRITRRRRSIVEEKKKLVNRMQADIIAVSPGLLDITKSVDNLWFLNFISSRDDMQKLSRIRQTGFKSIPGVGKKYQTKIESWQKESSFSSEVSWVGDMIIRDAKRIIELKQEIKVLEKHVEDLLSESEMASRIKTITGFGSVSAAELAGEIGVLERFKNESGLALYLGMAILDNSSGQYTGTKKFQHVNVNTKRTMMIAVARHIDHCEESKKYYDKKRLQGKKHNQAVRSMGRHLVRVMWSMLRNKRDYEIRKVGNL

SEQ ID NO: 62215 - protein, 345 aa, unidentified
MKVTKVVERLGIDIGKNVFYLFGVDAQGTPVLRKKLRRGALLEFLAQQPSCLIGMEACGGAHYWAREIRELGHEVRLMAGQFVKPYVKGNKNDYNDAEGICEAVGRSTMRFVAIKTVEQQDVQGFHRMRQAAIKARTALVNQMRGLLAEYGIVFATGAAQARRRVPEILEDAENGLTDRFRRWLNGLYEQLREWDRCIDEYDREIDVLFRADERCGRIAEIPGLGPVGATALVGAYGDARQFESARQFSASLGLVPRQHTTGGKPRLLGISKRGDRYIRTLLIHGARSVVCRAMNKTDARSRWIQRLVTERGKNCAAVALANKNARIIWAMLTRGQAYRPAAPAT

SEQ ID NO: 62216 - protein, 415 aa, unidentified
MEVIYVGIDWGSRVHAVCVLGPDRKKLLEQEVRHDGAAIREFVEQILELVDGDASRIVAGMEAPRGTMVEVLLDRGAQVFSISPRKLERFRERYSEAGAKDDALDAYVIADTLLSDRKFYRPIQLPEPEMVRLRQLSRTYDSFTDQARALGNQIVDQLNRYYPQLLRLSDSWHETAWLWALFEAAPTPQHAASLHPSVIKKLLKSHRVRRYTHTEILAELRKEPLHVAPGVVAAAAGHVAMLLPVLRAVHQQRKACSQQMEQLLTQACEPGDDNPERPHRDAALLLSLPGVGIHNGAAMLAEATMALQERDYQSLRKLCGAAPVSKRTGGRSNRPQVSMRRACIPRLREAVYHWARVATQHDPRTKAHYATLRSKGRSHGRALRGVADRLLKLLISMLTSGQPYDPARRLASNSS

SEQ ID NO: 62217 - protein, 371 aa, unidentified
MKTGSKLSEDEIQLYNAFVASKKAQPVAVDLAARVFQVCYIDKDTGRLYNRKLSRADFFKFITEQKDKVIWGFEACGACNFLARKVAEHGHDSKIMPAASIKSFLGIDKSDKIDAMGIFRALITPTIREIKPRSVGNQMLLWLFTAREQLNKQMVQTINVAHAILYEFGTVADKAYTKNVKVLKDGFAEMRDKYRQLPEYLHIELTLNAVEEQLDAISKKLEQIDDRLEAIGKTDSVCRALCSIPGIGPKTAVAFVAYAGDIGRFPSSRHFCSFIGVTPRITGTGGKIITAGLRKSGIKTLKRMLYMCAFSYFGNSVRRGVMSSWLKSRLNRKGYSKRKIICAIMNRLCRIAYSVMKNGKTFEPGRCSMIA

SEQ ID NO: 62218 - protein, 344 aa, unidentified
MEVAIGVDPSKSSLAVAAVDPLGRVVGTAEFSNDPPGHRALLGWVGERGPDRVIGIECSLSYGATLSRVLLRSGEDVREVPTTLTHRQRRRRASQGKSDMVDSVAIARIVASGEVLPSAHRLEVLADLRALVEYRDQLVRARTQVANRTHADLVNVLPGYERQVPNLRAKAHRTTARSLLRGDRSVRGELVRKRLGELSRLEGEIAAMDRRIRATVQKTGTSLTSIPGVGPFIAAKILGEVGDPSRIRSKPAFAVLSGTAPLSASSGQVQRHRLNRGGNRQLNWALHYIALVQCRITPEAQAYMARQREAGKSHKEAMRCLKRQLSNVVYRHLVADARRAELAA

SEQ ID NO: 62219 - protein, 364 aa, unidentified
MSEPITYVGIDAHKAQLQVAVLAPDAAEPTIWTVRNEVRAVNRLRRRLEKDAPGPIACCYEAGPCGYALQRQLERDRVRCDVIAPALVPRKPGDRVKTDRRDARKLAELHRASLLTVVRAPTPAEEAVRDLCRARDDARADRQRCRHRLGKLLLRRGLHYPGRAWTQAHRRWINGLTWSHPADRVVVDDYLLAIDQLEARLLELDAQLAAVAEADPYREPVGWLRCFRGIDTLSAVLLLAELHDVQRFPTARALMAYLGLVPGEHSSGDRHRRGPITKTGNTLARRLVVEAAWHYRHRPGVSRPLAQRRSGQPARVVALADKAQQRLCRRFRRLAEHKPGPVVTVAVARELVGFLWAALHPEAA

SEQ ID NO: 62220 - protein, 308 aa, unidentified
MSFVGIDVSKLQLEVCSLFSEENNWTVPNEPAAIAEFVKQMQQQRPTLIVLEATGGLEALVSSALAVVGLPVVVVNPRQVRDFARASGLLAKTDKLDARVLAQFGRAMNPAPRPLPDECAQQLQALIARRRQIVEMIIAENNRMGVSPRRVKDDIRQHISWLQRRLKQIDKDLDGAVRDSPIWREKDNLLKSVPGVGPVVSMTLLAHLPELGGLNRRQIAALVGVAPFNRDSGTLRGRRTIWGGRSAVRAVLYMATLSAVRFNPVIRQFYERLRNSGKAPKVALTACMRKLLVVLNAIVRNQRPWQPA

SEQ ID NO: 62221 - protein, 457 aa, unidentified
MKKKKKTVSYKRHQERKRWITGKKVIGIDPAKEKHQVTVLDERGIQMGESFSINVTHKGFNEDLWKKLGKILGEFRKEEVVFAIESSCDLWRVFAGYLHRRGYTVLLVSPLITSKTRATINNDFSKTDPKDAFLVAENAQGGKYNEYKRYCPEINKLHSLCIAHDKLTKDRNRIILRLRSLMEEIFPEYLKCMHVEIQTSLYLLGKYFLPEHFLKLDVKEEQMNIRRISNGNHNAGTLMKLKEYAQNSIGADKRGEEDSVRIILDAWISQLRLIHENMKSIGNRMIELAKETEFFEIIVSVPGISDISAARLIGECRDLRLFTHYKQIEKMAGSNIRLCDSGKYAGTRRINGMGNKRLLKLIYIMTTQTARFMPEVRIKFIKRQMRNKSYRKNIFAASSILLRLLMELIKEKRTYEFRDDKVMELARLELKYDPEGMKGKKRKMKRKNKKNAAQEAA

SEQ ID NO: 62222 - protein, 368 aa, unidentified
MKQQTSATTETKIKGRNIIDFSGKTIWVGIDVHEKDLQVAKVLDGICLGNHRMAVDSQALIGHLNSRYPGATFKCAYESCAWGFTLQRELSAAGMECIVVHAADVSSSDKEKKRKTDKVDALKLARNLANGDLTAIYVPDEDLQKERNLIRFRKKLVGDLNRSKNRLKSLLKYQGIKIPERLGKQNNWSYNFMNWVEEEANKDVLLKDTLLLMLEEIKLLRQLLLKTEKALRKLTHDKYDEQSKLLMTAPGVGRTTAMLVLLEIGDIKRFGPFDKLNDFVGFCPDTNSSGDTQRDRGITSRRHKQLRSALIEAAWTAIRIDPALMDAYQKLLKRMKGHHAIVRIARKLLRRMRAMLLTGQSYQKGVIA

SEQ ID NO: 62223 - protein, 362 aa, unidentified
MNRNTGMSAGQIIGTMNGLQVMGLDIAKHVFQLHTVDMGTGEIANVQIKRAKVLEYFVNKPNSLIAMEACGGAHHWARELTALGHSVRLLHAKIVRPFVSGNKTDATDARAIWLAVQQPGVKFVGIKTAAQQATLTLHRQRELLMKMRTMQTNALRGLLYEFGATFAQGRKALFKDIERALEELSTQLPQMVRDSLREQVGRIKEMGDAMLEIEKRLALQLKADPHMQRIAQIPGVGLLTATAAIATMGEASAFKSGREFCAWLGLVPKQTGTGGKVRLGGISKRGDTYVRTLLIHGARSVLSHAKEPSPWLQQIKERRPANVVIVAQAAKMARTIWAVTAKEQSYQRGFQSVRPSAAMHAA

SEQ ID NO: 62224 - protein, 409 aa, unidentified
MHFVGIDWSDQALDYHLRSPEGRVLKEGRVLPTLNGLGNLFAALEAHTAPDQIGIAVETAHGAWVQPLLDRGYSVYPVNPKTAEAFRKALSAAGNKSDRIDAKVLAMFLATAHQELRRLRPDDPEIVALRIACEDRLRLVNERTAKLNELQAVLKVYYPAFLACFSDLDAQIALDLLEKFPTQNALRALTPRRLSAWLKRHGYSHPDRIDEIAAVLEAPVLPVADHLQAAKAPLIRYLVKALSSLKTEIAEREKRITRHFEGMPEADWVKSLPGAGANLAPSVLACIGRDAERFPTTADARAFMGTAPVTRASGRSKAVYFRMGCCKFARRTLQLLALCSLDSCPWARAFYEKQRNTGHKHHAALRALAHKWLKIILAMKRTGAHYNEAIFTHSRTRYLLNAPAQIAVS

SEQ ID NO: 62225 - protein, 412 aa, unidentified
MEVIHRIIVGLDVHLAVVVACLRVQRGKKVTRERRQFGTTTPELQKLLDWLVESSCPLAIIESSGVYWKPVFNVLEGKVEVCLVNAYHAKAVAGYKTDGLDAERLAELGAHGLLRSSFIPPPAIRELRELTRYRKSLVEDRVSEINRAAKVLEAANIKLGTVVSDIMGASGRAMMRALIAGERDPSALAALAKGTLRGKTAELIPALTGRFMAGHGFLLARILDHIEYMDEQIEAISKEVARLCEPFREAIDLLMTIPGVGEETAEAIVAEIGLDMSRFPSAHHLTSWAGVCPGNHETAGKRRSGRTRKGNRWLRGALAQAAWAASRSKGSEYQALFRRLAFARGKGKKKARVAVSHAMLIAVWHILKDMTPYRELTPTQRTGSDPEKVKQTLLKRLEKLGFTVTVEQKRAA

SEQ ID NO: 62226 - protein, 343 aa, unidentified
MKSKKVSTWHEFVDCPAIGVDVCKKHLDLVGLRGSVGFCRRISNTAQAVGELTKALVRQGFTGTVLCEATSHYHLVLAVMCCEAGLDVRVINPLLSSKHAKSAIRKTKTDRVDAQVLATMVLTEPNLPPPLQLTRRHCLVRHTLGLIHSQEQHLQGIKRALASYQERLSQLNLETGEAYKQTLEAFNQLQRSHEQLLSELESYLLETQPDRQEVIERVCEIPGITRRNAALFTFVLDPTVSNAKSWIAYAGLDVAIKESGTWRGHGKITKRGPAWMRKRLFQAAWGAAMTCPQGRLYYDALKAKGRKHKEALVIMAKKLLSIMHTLIVHRKTFDYSKAFQVTA

SEQ ID NO: 62227 - protein, 351 aa, unidentified
MNYIGVDYHKKYSYILVKNEDGRVGGRGTVNNTKEEVQRFLEPYRPGMAVVEATRNWGLIYDWLDEVLDDVTLAHPLKVKAIAEARIKTDKISADILADLLRAGLLPRAYAPSKQTRELKNVLRQRMFFVRVQTMVKNRIYDILDRHPEVLSQGPEASDLFGAAGMQWLGQTVLPGEDNRLLTSELELLKFLKEKISQSNGTVKNLAKGDARARLLKSIPGIGPFFSVLILYEIDDISRFRDEKKLCAYAGLVPSTHASGGKVFHGRITKTGSKWLRWAAIEAAQTAVRSDSEFHAYYQRIRIRKGTNAAKVATARRLLTIVYRLLRQGRFYERRTTNTRKIITPAALVIV

SEQ ID NO: 62228 - protein, 437 aa, unidentified
MGVARRNAKLKELRRLVSRDRAIVAVDLAASRQAAVVLDHDSVVLARRMFTGSAWCISDILAWAEPIAAKAGFGGLVLACEPTRHRWKPLVVTARAGGIAVVCLQPLLVHRGREGEDFTRNRSDLDDAVIIGRLTAELRCYVPYLPEGPWARLRHRGARRAQLLERATAARQCLRDLLECAWPALLGTAAQPLDSATWQAALALSTSPAAIAAMSEQDFLAALSAQVKAVGGHRICRRIARAIHAAAACPGGIAAERDAALERAGFAYQDWMAALAAIAEAEARMVAVLDELHLTHLIATIPGLSAVSAAAILAETGDPARYDSPRTWVKHAGLAPRANESGAFRAQTRTSGRGRPGLRRAAWRAIWGALPHNPVWSARRDALTSRNSNQLHDGQARAAAAAALLRQLFVVITKRVAGDPAIAAGITTPTEVTASAA

SEQ ID NO: 62229 - protein, 349 aa, unidentified
MLADELDYVIGVDTHLDEHVLAVVALPSGAVVAKRLVRASGRGYASALAFALEAGSGARVWAIEGTGSYGAGLARYLVGRGETVLETGRVPQTERRLRGKDDALDAVRTARAALAGDTLALPRVGERREALRLLLVARRSAVDVRREALGQLRAVIVTAPDGLREQLRTLPVGKLLERCSRLRRSSAMSTDEVATRLVLRSLARRIEAATVEAAELERELLGHVHALAPRPLDEPGIGPIVAAQLLVAWSHRGRLRSEACFARLAGVAPVPASSGKTTRHRLSRGRDRQLNRALHTTVLHRRQHDRATRDYIERRIAEGKTRRDATRLLKRHLARHLYRLLQQTEPLMT

SEQ ID NO: 62230 - protein, 361 aa, unidentified
MASMPSQLDPVSRVVVGGVDTHKDLHVAAVVDTDAVVLGTESFSTTRAGYRAMVRWMRTFGDVRKIGVEGTGSYGAGITRHLGEAGIEVLEVDRPDRSDRRRRGKSDTLDAQAAALAALAGRRTSTPKRKDGLVESLRVLRLTRATAIRSRTKALQLLRMHVVSAPEELRDQVRNLTRMQLLRTCAAWRPDTVGFRDPVVATRIALKSLARRILELNDEIADLDELIDPLVQELAPKLLARPCIGVEIAGQILVTLGDNPTRIRTEASFAMLCGAAPLPASSGKTQRHRLNRGGDRQANRALHMAAISRMRTDDRTKAYVARKTAEGHSKLEIIRCIKRYLAREIYYLIREPTTLPRPLDS

SEQ ID NO: 62231 - protein, 318 aa, unidentified
MDKVKHYVGIDISKNTFDVFDLEKGHRKYTNDTQGFKLFQKSLKELSCCVMEATGSYHYRLAVFLFEHQISVAVINPLVIKRFIQMKLRHTKTDKSDAQMICSYAQEQPVSLWEPEPAYISQCNMLQSAVGMYFKQSTALKNKLHSLSSQGTIKGVLVQSLKRLNKEIEILENEIEGLIKEYNQQMYSNIRSIPGVGKKTALLLIASTNGFKSFENHRQVSAFFGLSPTERTSGTSIRGRSRISKAGNPKIRNNLFLCSFTACQCNPQCRALYSRLVAKGKSKKLALIAVANKLLKQTFAIAKSGICYDQNYRSVLMN

SEQ ID NO: 62232 - protein, 326 aa, unidentified
MVDAATGGVLEEITVEATTEGYTELVEFANNHATLRAWAIEGTGGHGAGLSRHLLQGSELVLELDRPKRAARRNGAKSDPLDAIRAAREAMARPRLGTPRTGGERQALSVLLAARRSAVNASTEAQQQVFSLVIAAPEPIRARFRGQKLAAMLNTAANLRVHASWDTETISTVVALRTLARRAHAMLKEARELQKALVAIIRSWRPDLLEQFGVGPIVAATVLCAWSHPGRIHSEAAFAMLAGVAPIPANSGQVTTRYRLNRYGDRQLNNALHTVVQSRIQYQPATRDYAARRTAEGKTSREIKRCLARYVARDLYRLLENGSAAA

SEQ ID NO: 62233 - protein, 404 aa, unidentified
MRRTDHRATHPRSAVHAHDTALFVALELSRSTWLVGSSMPGSDRVSRHQVRAADTTALLALLKRLKARAERSRGATVRVISIHEAGLDGFWVHRFLEANGVESHVVDAASIAVNRRSRRAKTDRIDVEKLLDTLIEWARGGRRACSMVRPPSPAEEDERRLTREREALVIERTRHVNRIKGLLATQGVFGFEPMRKSDRKQLEQLRGWDGQALPPRLRAELTRELNRLELVISQVAAVEDERDRALKTKQHPAPSIRASEATAGPQPAATEHAGRLLLRLRSIGPEFASVLSSEAFYRNFGNRREVAGYAGLVPSPWKSGGIDVEQGISKAGNARLRKTMIQMAWLWLRHQPGSTLSRWFHERVGDRRGKIRRITIVAVARKLLIALWRYVTLGLVPEGAELKA

SEQ ID NO: 62234 - protein, 307 aa, unidentified
MNCTTIGIDVSKQKLDIFFSSSGEWVTLPNTEEGFVEFLKICKKTYPNIQKVIVEHTGSYQNALVSCLHINKIPVCVVHPTRVRNYAKAIGRLAKTDKIDAELLANYGEKMSPELSSEKPFNIQRLRSLVKYRKQLTDNLTLTKQWLEKKPDQEIVKQISQLVDFLNKQLSKIDIDIHQLIQSDKILSDNFITLTSTKGIGKVTAYILLAELPELGTICRNKIVAICGLAPLNRDSGTLRGKACIQGGRKVVRNALYMSVIAALRSNKHIRDFYDNLRKNGKPAKVAITACMRKMITHLNTELQKKE

SEQ ID NO: 62235 - protein, 424 aa, unidentified
MNLTQNDRLNQVTSDTLIVGVDVGSQTHFCRAFDWRGFELSRRVFKFSNTRMGFLTFLRWTEELMKKTEMKKVIVGCEPTGCYWLTFQKFLHEHDILLVTVNPFTVNRSKELDDNSPEKSDLKDPKTIALLVKDGRFSTSYLPSGVYAEIREASVCRDQIMKQHVRLSNQIQGWLQKFFPEYFECYSGWDSTSGLMLLKEAPLPQDILKIGAGGINQIWREAKVRAAGLKRAQTLIEAAQNSVGLEAGEAARLEIWILVNDYLLKEEQLRRLDEYLEEKVKEVPNVEKLLAIKGVGMSTVIGFVAEVGDIGRFTDPKQIQKLAGLEIVKKSSGKKKGQPRISKRGRRKLRRTMYESARALMNWNPAFQDVFLYYRNRQRNPLGGMQAKIAVACKAIRVFYVVLQTGCDFDEEKFRKDIIHPEAA

SEQ ID NO: 62236 - protein, 326 aa, unidentified
MVKVSNAVVIGVDPHKRINAAVVVDAAGEVLDRGTFATSTAGLRQLGTFVRRFTARTWAVEGCNGVGKPLAQRLVAAGERVLDVPTRRTALVRVFAGGNGRKSDDTDALSIALVGLRTPGLVEVVPDERAATLRLFAHRREELVATRTQVVCRLHRELLILLPGGTKRGLTAARTKTLLASVRPRDEVGKARKAIAVDMLGDLVTVDKKIKAIGVQIKDLVAATDTSVTDIYGVGPVTAAMVLGEVLDVARFVDEGHFASYNGTAPIEWGSGGGQGAFILNLGGNRRSTTPCTWSRSPRSEATPPGGGTTGASSPKARRRRKPCAA

SEQ ID NO: 62237 - protein, 338 aa, unidentified
MKTHVGVDLHQRFCYLTAVDASGKTCKQGQVVNEGAALRAWLRQVPGPRQVVVEASGFWPAFARAVAPEQERLVMVHPQRVKAIASAKLKNDRVDSETLAHLSRCDLLPEAWMADEATQQLRLRVRLRITLGRQRARAKNQLQAVLHQEGFKKPVTDVFGKRGRAWLAGLELSAAGRLVVDTWLREVDHLDVELAEQTRELERMAKADARAICLRTMPGIGAYAAMVILAELGDVERFQNKRALASYAGLTPVVRESAGKRKRGGITHQGSNTLRWMMLQVAQVAARYSPGARSYYARLRQRKPAQVAKIALARKLLTVVWALLHHGECFDEELFSRG

SEQ ID NO: 62238 - protein, 315 aa, unidentified
MYIGIDIGKADFHCALLLEEKVATKSFPNNGKGFNQLAAWLRNRRVEHGHACMESTGGWSEELATFLHDRGYVVSIVNPLAAKAFGRSELSRTKTDKADAALLARFCAAHRPKPWIPPSPQERRLRQLVRRRSDLVASRTAESNRLGAPGTDAVRTSIETSVAFLNEQIAAIEEQIKNDIDSDPKLQNNRKLLESIPGIGTTSASSLIAEVQDMQQFDSARKLAAHAGLSPQVRQSGTSIHSSSLTPIGNRALKQIFYMPALSAMRHNPIIIAFAQRLRERGKRPMQIVVAVMHKLLVIAYGVLKSQRPFDPNRA

SEQ ID NO: 62239 - protein, 340 aa, unidentified
MNTFYVGLDLGSTFCYQCVMKPDGAIVRSRPVTTSEKHLRSAFADLDGDLLVHTEAGELANWVVDIISPLVRRVVVSHPRTLAWIAKDSLKNDKLDARKLADLMRSNLVHEVYLPKHNRRTFKQIVRHYDEATRAQAKCKAKLKARLRCQGIIRRDAKVFDNVERKTVLADITDNYLQQMFGQFYATLDALIEDRVTAKRLMVETSKQFPEVELLQTAPGVGIIGACRFVAYIQTPARFSNKRKLWRYCRLGITRRSSDGKLLAHPRLDINGCGALKDVSRKAFDAAMRCKQDNSFKRAFEQTLANTGDKVHARLTVQRKIVACLRAMWLNKQPYHEDLP

SEQ ID NO: 62240 - protein, 410 aa, unidentified
MQVVYERCAGVDVHQRTVVVTVLLTGPEQVEKHTRTFGTMTADLLELSAWLAALGVTHVALESTGVYWWPVYNLLEEGVTLLLVNPRHMKAVPGRKTDVKDSEWLADLLRHGLLRASFVPPQPIRALRELTRYRKRLIQERAQQANRLQKVLEAANIKLATVASDVLGTSAREMVEALIAGETDVAVIAAHARSRMRAKIPQLQRAVTGRLQPHHRFLLRAILTHIDFLHMAVSHVTQEIEQRLLPYEDAVRLLQTIPGIQASAAATIVAEIVVDMARFPSARHLASWAGVCPGNKQSGGKRMAETTTKGSPWLRAMLGEIAWSISHTRDNYLAAQYRRLSKRLGPHKAAVAVAHSVLVMIYYMLRNHTPYTDLGADYFDRVDTARLEQHHVRRLEPLGYTVTLTPSSSS

SEQ ID NO: 62241 - protein, 433 aa, unidentified
MEEVTDEPLYRDRVCGIDLGKAGMFATIRVPSDRDPARRASETRAFGTMKRDVLAMADWLRSWQVEAVAMEATSDYWKPVYYRLEAEGFELVLADPRQVKNLPGRPKRDPSDSRWIAQCLERGSIRGCFVATPEFRVIREHTRYRRDLTGERTREKQRVEKLLEAAGIKLSSVVSDLHGAGPRDIMDHLIAGERDPRVLAQLARRRGRARIPQIEQALDGTEFLTPELAALLGRMLARIDELGTAIGELTAVIETLLEPYEEQLQQAESMPGWGRRSAQDALAETGPDMTRFPTGAHLASWAGRTPLDRQSGSRAGKAKAKKGNRYLGAVTGETAVAAGRTQTREGARYRRIARRRGKLKACVAIGNTQLKVYHKLLSTPGARHEDLGAGYYDTPASTRRQIRALEKRATELGYTLIPDLTSYPEPTPAAPAS

SEQ ID NO: 62242 - protein, 439 aa, unidentified
MIPPTAARRAAGIDVGSEQLFVAVAAGPVRVFSTFTTALIQIKEHLLAQQVTTVAMEATGVYWVPIFEVLEEAGLEVYVVNAAQARNLPARKTDMKDCQWLAELHSKQMLNSGFIPSAAIRELRDYTRLRQDHIQMATPHILHMQKALDQMNLKIHEVLSDLTGASGQRLVQAILGGERQPERLVELCDVLVLKNKRSQMIEALQGRWKESQLFALRQAYENWGHYQKQIAACDQQMGRVLERLAAQQPVKLTPAGTTTRKRLHKNAPAVKNLGALLLTLTGGHDLTQLPCLTNYSILQLLAEVGTDMTRWPDAKRFTAWLGLAPGSRQSGKTKKSQPRFRGKAGKLFCVVAQSLAQSKYLALGGFYRRIRGRHGGQVANIAAARKLAVLFYNTLRHGWNYVEQGLLEYEKKYKEQYLKRLKATAKRFGMQLIPEPAAS

SEQ ID NO: 62243 - protein, 363 aa, unidentified
MIVIGTDTHKKSHTAAAVFAGTGQRAGELTAPARKAGFAELLDWGKGLDAERVWALEDCRHVSGSLERFLVAGGERVIRVPPKLMGESRRGERTRGKSDPIDALSVARAALQEGPETLPGAHLDEAALELKLLLDHREDLIRARSEDQQRLRWHLHDLWPDFELPAACLDRLVWLGRVSRRLARAEQSARVRVSRELVRAIRDRTKRASELEREIGAMVRAQAPQLLELPGCGSLTAAKLIAETAGASRFASDAKLARLAGIAPIPASSGNRTRLRLDRGGNRQLNCAVHRIAVTQGRIYAPARDFLARKRAEGKSTREALRCLKRHLIRRVWHLLNDSEIDRSVKTADTQRGLSVPQLAAAT

SEQ ID NO: 62244 - protein, 349 aa, unidentified
MQSYGIDLAKEKFDVSFFDLTSKKVSNQPSHKVVKNNLKSIGRFLETLPSDAVLVAEHTGVYGDTLLKCCMDCNVKIAFVGGYVIHRYRATPDRAKTDVLDCALLREFGERYPDKLKYKTFPEEALYELRQLARHREMLVEQRKQLITADKSEDCRPIRSLAVKRSMDRIKEMLDTEIAETEKEMLKVINGHDSIHHNYELVKSVDGVGLITAVELLVKTENFTKITTARQYSAYAGTAPYEKSSGKMDKGAHISKIGNRRSKTLLYICAESARLHNKEIKLYYERRTLIDKKPRHYVLNAIANKLLRIIFTLVEKGEYYDANFIRQDPRVVLAIGDLMEILPLWRSAS

SEQ ID NO: 62245 - protein, 386 aa, unidentified
MQKLNDLSRSPNPLDPDGTLIAVMELSLSNWLVAGIVPGVERQPLKKLAVDESALLKLLHRWREEAAKAGHRIKRIAVAFEAGRDGFWLARWLSARDIEAYVIHASSVAVSREHRRAKTDRLDTELLKRSFLGWLRGERDHCKMVAIPTTKDEDAKRPNREHESLVGEQSRIVNRMKATLIRLGIRGFNPKLKKAAERLDGLRTPEGEPIPPNTLAELRRDMVRRRLISDQIRQIEDARLGRLKQAPDDGPHAMVRLLARVIGVGVETADMLVQEVLSRSMRDRRAVARYAGLTGSPDESGRRRREKGLTRSGNARVRRGMIQLAWRFLMFQKDSALAQWFRARTESARGTRKTMIVALARKILIALWRLVREGVVPDGVVLRPAQ

SEQ ID NO: 62246 - protein, 455 aa, unidentified
MAHKGKKTKPTPEDLPLVHPHAAGIDVGAEEHWVCVPADRDVQPIQKFSAFTCDLYRLTDWLTTCRITTVVMESTGVYWIPLFQILEARGFAVALVNARHVKNVPGRPKTDRFDCRWLQKLHSYGLLAPSFRPPEHICQLRSLLRHRDNLLQMMVKHIQHMQKALDQMNLHLHHVISDVTGVTGMRILRAIVAGERDPHTLAQYRDYRIKSSLETIAKALEGDYRSEHLFTLTQSLALYDFTQQQIADCDQEIERVLNTFEALVDPATHPLPPPTTTHRQPQRNEPAFDLRTHLYRITGVDLTQVPGLQAPTIHVILAEVGLNMHKWPTEKHFASWLGLCPDNQISGGKVLATGSRRVQNRASRALRMAAQSLRTSPSYLGAFFRRMRSKLGPAKATTATAHKLAKIIYHMLKEHTPYRERSAKDYLHKDQERKIQQLRKQAKALGFTLVPQTSP

SEQ ID NO: 62247 - protein, 424 aa, unidentified
MKVTYQTCCGVDVHKSFLVATIVKTTGGIEPSYQKKRFSTFNNSILEFKQWLLDNDCHDVCMESTGKYWVPVFNLLEDDINVVIANPKWVKAVKGNKDDTKDSKWIGDLFRLGLVKGSYIPCKKVRILREYTRYRYKLVSCRSSEKNRYQNALTVCNAALDSVVSDIFGKSSTSIIDYLLEQSGSSINHEEIASKLLRSLKSKEYAVIESVEGYQMTDAQKYRMRLVRAHMDYITAEINDVDKMIENMISSNTDFENAVQFLCTIPGVKRDSAITIISEIGTDMSQFSSSKRLCCWAGLTPGSNESAGKKKSVRITRAGVYLKPALVQCAHAAVKSDKSPYYKKKYESLVKRRGKKRAIIAIARMILTAIYQMLSTGEQWNPSNLYKIDMPVALVEKQKAKAIKQARKLLQREGLLPPDEPLAS

SEQ ID NO: 62248 - protein, 358 aa, unidentified
MAEHRAETFVIGGVDTHKDLHVAAVVDHRDRVLGTESFPTTRHGYRLMLAWMRSFGDLQRVGIECSGSYGAGLLRYMQAAGVEVLEVTAPDKLDRRRRGKNDDFDAESAAHAAFARRYTVTPRSRDGMVESLRVLRVCRKTAIQARRIALQMIQATIVCAPDKIRDPLRSMTRMQLIRTLAAWRPDLTAYRQVEEAYRISLKSLARRYLELHDEIADLDDMIEAIVSELAPELLAQTAIGLNSAAQLLLTAGDNSDRLRSEASFAALCGVSPVPASSGKTVRHRLNRGGDRAANSAIHIIAIGRLRLDARTQDYVARRIAAGKSKLEAIRCLKRYIAREVFAIIMRRHKEINQSQIAA

SEQ ID NO: 62249 - protein, 355 aa, unidentified
MERYIGMDVHAASCTLAVVSQTGKRLKDFPVETNGQSLVEAIRMIPGHKHLVFEEGLQSAWLYETLSPHVDELVVAGITESRGPKSDKRDAYGLAEKLRVGDLDKRVFKAPREFTRLRELSRVHMTLVGDAVRVQSRIKGLYRSRGVLVAGVAVYSPRRRAEWQRQLSSSAQPRAARLYAHLDFLLEQKKQAEADLLREAKKHPVVRIVETAPGFGPIRAARLVPIVVTPHRFRTKRQFWSYCGLSIVTRSSSDWVQTADGGWIKARVPQTRGLSRQHNRFLKHIFKGAATTVITQRSKDPIHARYERLLDGGTKPTLAKLSLARMIAATVLRMWKDEEEYDPGRAGLPTQTREG

SEQ ID NO: 62250 - protein, 342 aa, unidentified
MTITTIGIDLGKNKMHMIGLDEGGHVVERRVFASRTALIRYLSRQTPARVAMEACAGAHYVGRKAEALGHDARLLPGQYVRGYVKSQKNDYADAEAIAEAATRPTMRHVPIKEVSQQELQLLHRQRQGWVGQRTETANRIRAVLLEFGITIPKGLHQLRRELPFVLEDHDNGLPDRTRQLLYTLWRDLLELHERVDWITAEFQRTAEQDPRARSLLGIPGIGPVIATALVAAVGDARAFRRGRDLAAWLGIVPRQHSTGGKTRLLGISKQGNSYLRSLLIHGARALVRHAARRTDALGCWIARLQERKPINVVTVALANKLARAACVVLHRQEPFRAEALVN

SEQ ID NO: 62251 - protein, 340 aa, unidentified
MGIVGGIDIHRRQLTFDLVDLATGENLRGRVSPADRVELRRFLAGLDGAGGDVAMEGCTGWRYVTEELERAGFRAHVAEPADTAALRGNKRRAKTDRGDAQHLRKLLMTGELPESWIPPRHVLEARGVVRLYKDLADQRVAWTQRLHATLYHQGIPELGCPVAGEQARTLLRDVELSPAARRAVEVALAQIEVVNEMLAPIKLDLARLSRHQPGCQALTAHYGIGPVTSVAIWCEMGDTRRFSSSSDAVRHAGLDVTVYQSDSNRAKGHLARQGPGVLRWALYEAAMSSTKKASPDHEYFCSLRERLGTQRAALAVARKLARWCHHALRAAGDDAWAEAA

SEQ ID NO: 62252 - protein, 424 aa, unidentified
MKPPPDSEFAAFVGIDWADTKHDICLQVANNEKREFAILPHRPEAIEEWAGALRQRFAGRPVAVSLELAKGPLVYALQKYEFLVLFPINPSMLAKYREAFTPSHAKADPTDAELALELLIRYRAKLKQLKPQSVAMRTLLRLVEQRRRLVGDKNRISNRLTDALKQYFPDVLEWFQDKDTLLFCDLLSRWPTLKQLKRARRATLLAFFHEHHVRSQARIDERLRAIKSATPLTDDVAVILPNQLLVLALVEQLRVTMQAIDRFDAEIATVSQTLPDYSLFRALPAAGPAFAPRLLAAFGEQRERYQSAAAVQQYSGIAPVTESSGKKHWVHWRLQCPSFLRQTFVEWAGATIPRSFWAAAYYRQQRTKGCSHHAAVRALAFKWIRILYRCWQTRTPYDESTYLNALKRRGSPLLTSIAGLAKNT

SEQ ID NO: 62253 - protein, 358 aa, unidentified
MYPFYLGIDLHLKRTYMVLMNQTGEVIDERRISNNEIKEYLIERVPKNTHAVMEATRNWAFMYDHLSQHVERVDLAHPKELKAISSAVVKADHIDAKVLANLARLDFLPTSYAAPKDIRDLRTYIRHRDQLVRMRTQVKNPTHAVLASYNIASPVSDLFGVEGREFLEEVMQTKLRTAAKKVLHDHLYLIDELSKQIEIVEAEIKLSPEQNQMVRLLKTVPGIGQVTATTIMAEIGDIHRFHSAKALCNWAGLTPKIHSSDVIVRHGRISKQGSSLLRGAMTRAATAASRSSKRWYVVHENLLPRCGKVAAKVAVARRLLTVVFYMLKRMEPYQEDYGRNIQGTGEPVALHGSLKPTR

SEQ ID NO: 62254 - protein, 342 aa, unidentified
MDQILRIGMDTSKQVFQLHGVNGAEEPVLRRKLRRSQLIDFFAAQPRTVIGIEAGGAAHHWSRTLSAMGHEVRIMAPQFVRPYVKRGKNDAADAEALCEAMSRPAMRFVPTKSAEQQAALMLVSLRDRLIRGRTQLTNAIRGHAAEFGLIAPRGVDKIEPLLVRLTSEMTLPALARSLFSQLGAEFAETEARLKQVDAALLAWHRQNETSQRLTQIPGVGPIGATMLSLKTPDPNGFRSARHFAAWIGLTPKDHSTGGKIRLGAITRAGDETLRSVLVVGATALIRQARRGRGRRWPWLQRLLERKPPKLVAVALANKIARIAWKLMVSGQRYDTAHIICGA

SEQ ID NO: 62255 - protein, 330 aa, unidentified
MTDTMVSRGSTEAVDFVGVDMAQKDFVWSLHGVRGTHEASNDEAGFSVFCEAIKDKRIGLIVVEATGGQERALACYLLQHGLPVAVVNPRAAREFARGLGHLAKTDAIDAVALAHYAQTLAGKADQAGVQFAPPGEQVQALQALVTRRAQLLAMRTAEKNRLTGAVRVLKDSIRAVIKTLDAQISKLDKDINGHLDTHFKDQTKRFEAVKGVGITTCATLLAFMPELGTISGARAAKLAGLAPLNRDSGKTRGKRHIWGGRSIVRCTLHMAMLSAVRFNPVIKAFYDRLLAAGKPKKVALVACSHKLLRILNAMARSQQPWSSQLHLQVA

SEQ ID NO: 62256 - protein, 419 aa, unidentified
MALKIVYKICCGIDVHKTFVVACIASTNDKGVTSYESHRFSTYTSGLKTLLQWLLDRNCKDVCMESTGKYWIPVFNVLEKNNIFVTLSHPKYTKPQKGNKTDRKDAKWICDLYMCGMVKPSFIPPADIRQLRDLVRYRFKLTCMITGEKNRAHNCLTVSNLKLDDVFSDIFGKSSRSITEQILQHPGEVFDVAPFVDSRCKTPIEEIQAAVDGAISHEQAVKLRQCLKHIDELEMHKAEIEREIFRLSQKYESVLDLIRTIPGFDKNPLTAIQVLSEIGADMSVFPTAKNLVSWAGCCPRNDQSSRKIKSTRISRAGSYFKPVLVQIANALIKSKKHPEFTTRYRRIKARRGHKKAIIAICRMILTAIWHILTDLKPYTPEGFLESRPVNKEKVLTISQALNLIKQRGYIIKDDVGPVT

SEQ ID NO: 62257 - protein, 385 aa, unidentified
MKNTIVHDEGAASVEAAVKKVKLSGSIIKIGLDVHARLYVAVAQYDCLLPKPVRRLGPSEFVPWVKQLLRAGHTVHVVYEACGFGFGLYRELKAAGAHCYVIAPRKLDEQCTRVKTDPRDATTLCQRLSRYLDGNTRELAVIRVPTEGEEQARHVSRQREQLVCLRQKLEAQGRSLLVNHSLPSPAHWWKNQTWSRLLKLLPGWICLRLQVHRPVLLGLEQQIGVLSAQLEATAPADVPAGVGKLTTVIMTREICSWERFTNRRAISSYTGLCSGEHSSGSKRVPGSVTKRGNPRLRAALVECAWRMVRFQPNYPPVKKRLAILAKGAHATGAQRKKAIVAVARHLAVDLWRVHTGRCSAAQLGLKSAETLIVRGEQKAKLNALA

SEQ ID NO: 62258 - protein, 344 aa, unidentified
MDHYAGIDVSLEYSSVCVVDASGKVVREAKVVSEPEALIGWFGSLGLELARIGLEAGPLSQWLYAAMKQAGLAVELLETRHVSDAFKAMPVKSDRNDARKIAQLMRLGWFRPVHCKSTTAQEIRAMLTARKLVQSKLLDLENSLRGILRGFGLKVGKTTRTKFAGRIEELVQGHPNLQTIGQALLRARAVLLAEFNGFEKRVRAMSRLHDKARLLMSTPAVGPIVSLTFACAIDDPSRFTSSKQAGPHFGLTPKKYQSGETDYTGRISKHGDASVREALYEAAHLMLTKPIKGCSELKSWAMRIARRAGTNKAKVALARKLAVIMLRMLKDNVPFNPAAKAATA

SEQ ID NO: 62259 - protein, 344 aa, unidentified
MKITTVGLDLAKNVFQVHGIDEAGEVVVRKTLRRRQMIPFFSKLEPCLIGMEACGTSHHWAREITALGHAVKLMPPAYVKPYVKRGKTDAADAEAICEAVTRPTMRFVAIKSPEQQSILALHRTRDLLIRQRTQLVNMIRAQLAEFGMVVAKGIQHALRLAGQLVEGAAPDIPALAVKVIVALAEQLGELQARIGNLDKELKAWSRDNAVVKRLQTIPGIGIVTASALAATVADPHQFTSGRQFAAWLGLTPRANSSGGKERMGRISKMGDRYLRRLLVSGMTAQGQSVRRNPEAHPWVVGLLRRKPAKLVAVAMANKAARIAWVIMTREETYHAPNPATEGAA

SEQ ID NO: 62260 - protein, 375 aa, unidentified
MREKVRFLGLDVHAETIAVAVAEPNGEVHSLGTIANRVESIRKLVKKLGSVDRLRACYEAGPTGYVLYWQLAELGVACEVIAPTLVPMKAGDRVKTDRRDAERLARSFRSGDLTAVWVPDEGSEALRDLVRAREAAKQDQLRARHRLSKFLLRSGQRPAPGVKAWTLGYMAWVRQLRFKQVAQESTRLDYLHEVEHMAERVKRLEQAITEAVKLASPELREVICGLQALRGVAQISAVTIAAELGNISRFEGARQLMAYSGTIPSEDSSGQRTRRGSITKTGNAHLRRIAVEAAWSYRLRPGVGPALRKRQEGVAEEIKEIAWKAQNRLHKRYMRLTAAGKDQRKIITAVGRELLGFIWAIGIKAEAASKLRMAA

SEQ ID NO: 62261 - protein, 424 aa, unidentified
MKLTYQTCCGVDVHKSFLVATIIKTTGGIEPSYQKKRFSTFNNSILEFKHWLLDNDCRDVCMESTGKYWIPVFNLLEDEINVTIANPKWVKAVKGNKDDTKDSKWIGDLFRLGLVKGSYIPCKPIRILREYTRYRYKLVSCRSSEKNRYQNALTVCNVALDSVVSDIFGKSSTSIIDYLLEQSDNSINHEEIASKLLRRLKSKEDTVIESIEGYQMTDAQKYRMRLVRAHMDYITAEINDVDSMIEKLISSNPDYENAVQLLCTIPGVKHDSAVTIISEIGIDMSQFCCSKRLCCWAGLTPGSNESGGKKKSVRITRAGIYLKPALVQCAHAAVKSNKSPYYKKKYEYLVKRRGKKRAIIAIARMILTAIYQMLSTGEEWNPSDLYKIDMPETLVKKQKDKAIKQAMKLLQKEGLLPLNEPLAS

SEQ ID NO: 62262 - protein, 338 aa, unidentified
MKVHVLGVDLAKNVFQLHGVDRKGRCVLVRRVRRELLMNLIAELDPCLIGIEACTGAFYWQRQFERHGHTVKIIAPQYVRPFVRRQKNDSNDAEAICTAVQQPNMRFVPKKTLEQQDIQALHRARQRLVNHRTALISQMRGLLLDRGIAIGVAATRARSMIPKVLNEPNEDLSSLTREIITSLYDFMLQIDARIRFFDKKIDAIFKANEACQRIAKIRGVGPKTATAMIAAIGDGSDFKNGRHLAAWLGLVPRQHSSGDRRVMLGISKRGSQHLRTLLVHGARAVVRTAVRKTDPRSIWINDLRERRGHNRATVAVANKNARVIWAVLRTGEPYRAAT

SEQ ID NO: 62263 - protein, 347 aa, unidentified
MHQATTVAVVQDDAGRVIARSVLPTEESALVEFVRGMRGAIQVAFEEGTQAQWLHDLLVPVVARVIVCDRRGEPRRGHKGDWHDAAELADSLRAGRLRAVYHGSPHRAALKELARAYRNLVEDSTRVMSRLKALFRARGIATAGRGVYDAARRAEWLGKLGDAGVRLRAATLYAELEVLHALRPTAKAALVAEARRDPGWAVLRTIPFLGPVRVALLLATLQTPWRFRTKRQLWKYAGLAVVTRTTAEYALDARGRPVKRRRPPMTRGLNQNHNHVVKEVFKGAATVAAVRAGEFRDLYRVLVARGMREELARLTLTRKLAALTLRLWKTGERYDAKKLTSYAVPAR

SEQ ID NO: 62264 - protein, 372 aa, unidentified
MVWTAPYGISLCQNEVWLKSQTREPSVNQIIRIGMDTSKHFFQLHGVDSAERPMLRRKLRRNEVLGFFAKLAPTVIGMEACGAGHYWARELRKLGHEVKLMAPQHVKAYVKRNKNDGRDAEGLCEAMSRPTMQFVPVKTEEQQAALMLAGVRQQLIARRTQLSNAIRGYATEFGLITAKGLDKIEPLLGRIAQDERLPELGREMFAMQGRDYARLQIELKAIEARLLAWHRANADSRRLAKIPGVGPIGATALVMKAPDPRLFPSGRHFAAWIGLTPKDHSTAGKTRIGKITRAGDEMLRSVLVAGATAVIQQARNGRGRQSPWLLALLARKSPKLAAVALANKIARIAWKLLTTGESYDGARMPGASALAA

SEQ ID NO: 62265 - protein, 422 aa, unidentified
MERTDDRLDLVERVAALDLAKASLMACVRVPDPDKPSRRMQEIRSYDTVTRSLLDLADWLRCEQVTLVVMEATGDYWKPVFYLLEAEGFTCWLLNPTHVKHLPGRPKTDKLDAVWLAKVAERGMCSPSLVHPAPIRRLRDLTRYRRTLVRDQVREKQRLEKLLEDAQIKLSSVVSDILGVSGRAMLEAMIAGERNPAVLAEMAMTRMRPKIPVLREALTGHFTDHHALLARTMLDRIDAMTADVEKIATAIDTAVASFRDAVERLDEITGVGPVCARELIAEIGVDMTRFPTPGHLVSWAKFSPIVNQSAARSRPGTTGHGNPWIAATLGEVVIGLSRSNTFLGTRYRRLARRIGKKRALVAVGNSVLKIIWHLLSDPDARYTDLGPDFHDSRRSAYRQERDLIRRLEHLTGKKVALQPAAA

SEQ ID NO: 62266 - protein, 429 aa, unidentified
MSGSVGRAIGLDVRRDFCEVAICEAGRVRSAGRIEASPEMLELFGTSLGPDDRVALEVTGGAWEIARILEPHVRRVVVVSPDDRGIRQARAKTDRLDARTLARLLCAGELDAVWMPDERCRVMRRRLARREQLVRSRSRAKNEIHAVLMRRLKGRPPVSDLFGVKGRTWLSELELPVEEAETVASGLRHIKFLDQEIAEVERLIARDALRSADARRLMTVPGVNVICAASFLAAIGDVRRFRTSRQLVAYLGLDPKVRQSGSEPARGGRISKRGSASARWALVEAAWSVVRQPGPLHAFYERIRARRGHGKAVVASARKLAALFWCLLTRGEDYAHQQPSLTAKKLRLLEIRAGAPTQKGKRTGTWATRQAMREAERRLAEQAEASYTRMVRDWQAATPASAKVGASVTPGRASQQPSEGKVARQTTSP

SEQ ID NO: 62267 - protein, 413 aa, unidentified
MDVFCGIDWAEDHHDIALADRDGKLLARRRISDDAAGLALLLGLLTEHGDSADDPVPVAIETPRGLLTACLRATGRKVYPINPMAVARYRDRHSAAGRKSDHGDAIVLANILRTDRHVHRPLPADTELAQAIAVLARAQQDAVWARTGAHNKLRSHLREYYPAFLAAFADARGGITRPQARAILAVAPAPAAGAALTLTQLRALLRKAGRRRSIDAEAARLRETLRAPQMRQLPLVEDAMGRQALALLRQLDAACAAADDLEQAVIESFNQHPDAGIITSFPGLGPLTGARVLAETGDDRSRFADAKGLKAYAGAAPVTRASGKTRAVLHRRVKNQRLAAAGYVWAFSALTASPGARTHYDRRRKDGDRHAAAQRNLFGRLLGCLHYCLATGQHYHENTAFPTPGHAPCDIAA

SEQ ID NO: 62268 - protein, 350 aa, unidentified
MIIIGCDYHPSFEQIAFVDTETGELQERRLQHREEAEKFYRDLAAQGMKVRVGMEASGHARWFERLLSELQCELWIGDAAEISAKRVRKQKTDRQDAQLILRLMRKDDFPQIWVPSWENRDLRQLLWHRHRMVQARTRMMNQLQAVALNEGLRCKKKLWREAGRAQLEAFQLAPWASQRRADLLELLDRLNPTIAKLTQAIDGEVEKCPEARRLQTHPGVGPLTALAFVLIIGRADRFQCGKQIASYLGLVPLEKSSGNQRRLGHITKQGNSLLRFLLVEAAQVTVRSLPEWRSKYCHLTLRRGRKIAQVAMARKLAVRLYWVMREEWDYEQLRKFGSYAGKPGNRDGVK

SEQ ID NO: 62269 - protein, 316 aa, unidentified
MNKTEAQNINAGVDTGKDFLDIHVRPCNEYFKVTNDKKGISAAIKRLKKLALERVVIEATGRYEVAFITACAKAGIPFSVVNPVHVKRFAGAIGRKAKTDRLDAALIAHFSEVIQPPLSALKPENMQKMADVVARRSQLLEMQTREKNRLQIMPTNVHPSIKALLLVLKKQIQKMDDELAQLIESCPEFKAKSDLIQSMPGIGKVSAAALISYLPELGLMNNKEVAALVGVAPMSKESGRYKGKQVIQGGRHQVRTVLFMAMMSAMQCNAKFKSTYERLVAAGKPKKVAIIACVRKMIVILNSMVRDGVMWEEKTV

SEQ ID NO: 62270 - protein, 409 aa, unidentified
MDIVRPRCAGIDIGKRTLTACVIAADPRGASVKKIRTFGTLTSDLLALADWLDAAGVTAVAMEYTGSYWKPIWNLLEDRFELLLANAAHLKAVPGRKTDVRDAEWIADLFRHGLLRASFIPPRPERELRELVRYRTTLVRERASEINRLAKVLEGANIKLGSVSTNIGGVSGRAILAALAEGTTDATVLAELARGRLRRKHDTLVEALAGSVGPHQRFLLATQLHHLADLDALIESLDAEIAERLRGADELIERLVTIPGIGRRTAETVLVEIGTDMTRFGSSRRLASWAGMCPGNYESAGTRHGGRTRRGSPWLRGALVGSARSASRTDTYLGAQYHRLAARRGAMRACVAVGHTILGIIYAVLVTGQPFHDLGPRYFDDRDRERVRRRLTRRLEQLGYAVTLRPDAA

SEQ ID NO: 62271 - protein, 330 aa, unidentified
MKKDRITLGVDVSKKTLDICHWGTHDFIKIENNSSGFKQLAKWMRGKGFVSSQVFFIMEYTGGYEYRFLQYCESKGLSYTRKSGLEIKKSMGMVRGKSDKQDSFRIAQYGEEKAYMLEPSGKLNSAIFDLKQLISFRKRLVRAMAGYKASSSERKAMYGKDAGKVILQVSKTMIDVYKKEIYKVEREILQLIESDESLNRNYQILKSVKGIGPINAWMTIVYTENFKAFTDPRKYAVYAGVIPFEHTSGTSIRGRKRVSHMANKAIKQELNQAAKIAITHDKTLREYAQRKLTTKAYPLVLNNVKFKLILIMFSLIGRQEMYREDYKYAA

SEQ ID NO: 62272 - protein, 428 aa, unidentified
MNIEDTIRRKQFCQIKDEIAGCDDYLVVGIDVAKDKHHAFMGNTTGKTLSRKLVFENSLDGFRKLMEHSKAVKARGALSKVVFGLEPTGNYHKPLAAYLIRCGCHVVLVTGKAVKINREQLDGRWDKNDDKDAANIADLVSRGRCLYYDLPSPDLGQLRQVLSLRKRLKKEEHRLRMNIRNNLLAQYFPELDAYYSACESETLAIVSRCLDPHQIAGKHFDEFFTQVTCKRRGIAQKLRLQKIHRAASQSVGCEMGPAVQVEAQLVVNKLGEVRRQLKEVEQWMEDIACGFAEYPYLLTIPGFGPYVAATVLAAIGNPQRFNSANQVLKLAGYDLSASRSGKNSHRAIAVISKKGNGQLRYALYQAARVASSRSADFINYFTGLLRGRERERGIKTKMRVKLAAKMLRIAWAIMKKKQVFNPDYLFIK

SEQ ID NO: 62273 - protein, 356 aa, unidentified
MSHDVKYIGMDVHKEAIVIAVLNESGKLVMESVIETKASSILQFLHGLRGELHVTWEEGTWAAWLYDLLQPQVQHMVVCNPRRNALLKEGSKSDKVDAGKLADLLRSGMLRPVYHGENGLRTLRELGRSYQTISKDLTRVMNRLKAVYRGWGIPCAGTQVYAVRCREEWLSKIPHAGVRRRAELLYQQLDGLQALRRELRPEFLAESRKHKAAKLLRQIPCIGPIRAARLIGLMQTPHRFRSKRQLWTYSGLGIETHDSAQYRFVRGQVQRSKKPQQVRGLNRNHNHEMKEIFKSAATRASCGTGPFHDFYTGLLAKGMKPEMARLTLARKIAAITLTLWKKEERFDVEQLKTQAA

SEQ ID NO: 62274 - protein, 383 aa, unidentified
MKKTQETPRNKDNTKQAVLHMAFELSDTKWKLAFSDCSKRRLVTINARNLEQLQEEIEKAKLRFKLSDDVRIVSCYEAGRDGFWLHRYLLSCGIENKVVDSSSIEVNRRKRRAKTDRIDAGKLLRMLMRYHAGERKLWSVVRVPSVEAEDGRSLNRELEVLKKERTMHRNRIRGLLIREALEVGNPSGKKFLEELNSLRTWDGKELPSDFKDSIVREYGRLRMVEEQIGILKKERERRVQSADSPSLRKVAQLRTLYGIGPTSSWDFVMELFSWRNFKNRRELGAFLGLTPTPYNSGSSQHDQGISKAGRGRIRALSIQIAWGWLRFQPHSKLTQWYMERFAEGGSRMRRTGIVAVARRLLIDLWRYTEYGVIPEGARLGPMA

SEQ ID NO: 62275 - protein, 384 aa, unidentified
MQKPNDLNQSGIVLKQDSTLIAVIEMSLRSWLVAGIVPGVERQPLKKLAVDESALLKLLNRWREEAERAGRRIERITVAFEAGRDGFWLARWLRARGIEAHVIHASSVAVSREHRRAKTDRLDTELLKRAFLGWLRGERDHCKMVAIPTTKDEDAKRPNRERQSLVGEQTRIVNRMKAALIRLGIRGFNPKLKKAAGRLEDLRTPEGEPIPPNTLAELHRDMERRRLVSDQIRQIEEARLERMEQAPGDGPHAMVRLIARVIGVGIETADMLVHEVLSRKLRDRRAVARYAGLTGAPDESGSKRREKGLAKAGNARVRGGMIQLAWRFLLFQKDSALAQWYRTRTEGGRNRKTIIVALARKLLIALWRLVTTGEVPAGVVLRAA

SEQ ID NO: 62276 - protein, 406 aa, unidentified
MKLFVGLDVSSFDIKVCFLNGDGNQLHSFTVANDLPGATHLRDEILNTAKEQSVDVLRIGLESTSVYSFHPSMFLDNDEYLRALGAKVYVMNPKQIANFKKSYSDMNKTDEIDAFVIADYLRFGRMPMTVVKEEQYVALQQLTRARYQLVRQITQEKQRFLQYLSYKCNTFTEEVDSSVFGKAMMDLFYEQYSLDELAHMSLEDLADYLRSKGKNRFENPEQVAKMIQKAARSSYRLDKIVEDSIDTILATSITVIRTFGKQIKELDKSIKRIMAGMTQTLESVPGIGPVFAAGIIAEIGQIERFEDETKIAKYAGLYWRKHQSGRFTAENTSLTRNGNQYLRYYLVEAANSVRRHIPEYKDYYAKKYQEVPKHQHKRALALTARKFVRLVDALLRNNLIYTPKGA

SEQ ID NO: 62277 - protein, 456 aa, unidentified
MTRDQNVSSDFDAMAQINAHAAGIDVGASEIYVAVPKGAVSETVRTFPTFTADLEDCAAWLKRCRVTSVAMESTGVYWIPLFEILESRGLEVCLVNARHLKNVPGRKTDVLDCQWLQQLHTYGLLQASFRPPEELCALRALVRQRAMLVRYRAAHIQHMQKALQMMNVQLSLVLSDITGVTGMRIIRAILSGERDPHTLASYRNGNCAHSAEDIVKALQGNYRREHLFALRQAVDLYDMYGVHIQQCDSELEAMYRHLDPPERPDAPPVQPTPQGRNKRRKNQAHFDLAGSLYRLTGVDLTSVDGIDALTAQVVLSEIGLDMSKWPSAKHFASWLGLCPHNEITGGEVKRRGTAKTTNYANTALRIAAQTLWRSHTALGAFYRRVRAKSGAPVATTATAHKLARTIYHMLKYRESYVDPGTQPYETKQRERAIRNLRRQAQHFGFALAPVTLTAVS

SEQ ID NO: 62278 - protein, 427 aa, unidentified
MAYRIAGVDVHKKMLAVAVADVDVEGEWRFERRQVGTSPSQLQALAEWFAERDVEEVVMESTAQYWRPVWEALERHWQPMRRARTDAVPTPGALHLAQAQSNHGPRGRKQDFPDAERLVKRLVAHELTLSFVPEMAQRLWRTVTRRKYQSTCNRVQLRNRLECLLEEAHIKVSSLVSDLLGQSARRMLRAVASGEADPATVVALGSPRLQATPDQLRDALGACVELHPVYRRLLAMTLDELDVIDAHIHQIDEELARLLRAHQEAVERLAAVPGLGVDSAQQIIAEVGPTAATFATAKRLASWVGACPGHDESAGINHSRRSPNGNRQMRRLLNQAAHAAVKTKGSIFELVYRRLVVRLGHAQAIGAIGHRLCRLIWKILHDGVTYEERGPAVTKQRALRRAAKMIRELRSLGYRVDRVLSSASTLA

SEQ ID NO: 62279 - protein, 397 aa, unidentified
MIAVGIDVSKSKSTVAILNGDGSIRAKPFDVHHVADELQALVDYIKRTSEPPTILMEPTSHYHYPLLKAFTEAELPVCLINPYQMKKYGDTELRKAKTDKRDSLRIAQYALEKSYSLIPYTPQDQKYEDLRFLSRQYSQRISTLTVAKVQLLSLLDETMPGITTILPLKSRDPDNCVLLRFIKRFKSFDVIRKMGKTRFLDSYQVLVKKAKDRFAGSKGLAIYELVLNSVTTRGENPLSAMTQDQCVDLVSTSQKATDEINLQMRIIAETMPEYKVLRSMAGVGDRLGPIILGEIGDIRRFHSGKALNAYAGNDAPPYQSGQFESRNRHISKRGNPALRKACFEVMQALKLTKPQDDPVYLFLLKKEQEGKPYNVAKMAAVNKFLRIYYAHAMELYK

SEQ ID NO: 62280 - protein, 403 aa, unidentified
MNNVVGIDVSKGKSMVSVLRPFGEVVAKPFSIGHTGSELKELADYLKSLDGETRVVMEHTGRYYEPVARFLHDEGVFVSAVNPKLIKDYGNNTLRKVKTDKADSRKIARYGLDNWAELRQHTPMDTIRMQLKTLNRQQSLYSKTKTMMKNNLIALLDQTYPGVNTLFDSPVREDGSQKWVDFATTFWHVDCVRNMSLTAFAERYRKWCKRHGYNFSQSKAVEVHAGAQDLIAMLPRDALTKTMVRQAIDALNAISASLERLKAEMQALAAQLPEYPVVMAMHGVGDSLGPQLMAELGDVARFTHRNAITAFAGVDPGADQSGTHEAKSTRVSKSGPPELRRALFLVMDCLLKTMPQDDPVYRFMDKKRAEGKPYLVYMTAGANKFLRIYYGRVKEYLASLEGN

SEQ ID NO: 62281 - protein, 350 aa, unidentified
MTKSVFAGIDLHSNNVMIGLVDESGQRLKHQKLQCDLKEVDNFLSPFKAQLKSVAVESTYNWYWLVDGLHQGGYPVVLANPAQIDQYSGLKYANDKSDAFFLAELLRLDILPTGHIYDAQLRPVRDLLRRRLSLVRQRTALLLSFKSLYSRTTGQELSLREVKGLVPEQGRRLYEHPANQLIAGLQLEHIKQFDASIERIEKVVLKASQALPYYSKLTTLPGVGIILGMTITMEVGNIQRFAQPGDFASYCRTVAAERFSNQKKKGENNRKCGNKYLAWAFVEAAQFAKRGDAQCRKWFERKAAKTCTVLATKALACKLAKAAWHVMAQDTNYDPNRMFGNPEPQSKMKT

SEQ ID NO: 62282 - protein, 361 aa, unidentified
MFDIVGELDRAVVCFEPEPSLERSHETSSNSLGRDLTMKLQKSNFDRYIGVDVAKATLEIDDSRQAIAKSIDNDADAIVQLIVGSIESPKSTLVVCEGTGGYERKLAYAMHAAGVPIVIANPRQVRDFASGNGILEKSDPIDASVLRVFGEDARNLTLATPKSDDQEELGAMARRRKQLLDMINQESNRFEQTVDPVILELIKENLQTLKRQLKTVDEHLAKMIERQAKTNPTVRVLQSVPGVGTVTISTLISELPELGKLSRGEIAKLVGVAPLVNQSGRKDGHRSIFGGRGYVRRVLYMATLVATRHNEKIKRFYTRLVAKGKPKMVALVASMRKLLTILNDMVRNGECWRTVNPSESK

SEQ ID NO: 62283 - protein, 408 aa, unidentified
MQVLHPVCCGIDVHSAQLTACLRQVSDDGQITTELVDCGTTYRALIAFRIWLQEQQCPVVAIESTGVYWKPVYHVLSEAIEVCVANSRDVRQRPGKKTDESDATWIAELLAHGLITPSFVPPPEIRALRDLTRTRVSLVQTRTQAKNRVYKILEDTNIKLASVVSDVFGKSARRMLEALVAGERDAAKLSAMALGSLRRKIPQLEVALEGQFTAHHATLIAGALELVDVLGRQIGELDQQLQELLGPMAPQLEQLDSIPGVNEITARDILAEIGLDMTRFGSAERLAAWAGLSPGNNESAGKRRKGRTRRGNRYLRRVLVQCAWTTRKTSTFLGRTFRRLEARVGGKKAAMAVAHKSLVIIYHLLLEGTFYEEERYDRLLPRQEERERQRALKALERLGYAVTLAKGA

SEQ ID NO: 62284 - protein, 324 aa, unidentified
MEKKIVVGIDVAKAKLDVAVGSDGEVWQVGNDEAGHKELARKLAESPIKLVVMEASGGYEAMVAAALWAAGIQVAVVNPGQVRDFIKGMGQRAKTDAIDARMLAKFGETAEFDIRAPLDEEARQLQWLVLRRRQLLEMLTMEKNRRGLLPAGPARKNLDKHIKWLEKAIDLAGKDVDGAVRNSPLWREKEDLLRSFKGIGRVTARTLIAELPELGKINRKKIASLVGVAPFNQDSGIFQGQRRIEGGRAHVRTVLYMAALTAARWNPAIRATYQRLVARGKKKKVALVACIRKVLAILTAMVRDSARCRLPGVPKAPRLAAAGG

SEQ ID NO: 62285 - protein, 366 aa, unidentified
MLHKLNSAATLIQRTTTEAPRDHMYYIGLDVHKRTISYCVKDAAGHVHQEGKIGSTRCELDAWIKTLPQPRMIAMEATIFTGWIYDHLLPHAEKVKVAHPLMLRAIAAAKKKNDKIDAAKIADCLRCDFLPECHMASTAIRDRRRMLRYRNLLVKQMVQMKNRVSGLLLETGVSYNKRRLHKVGYFADLMATNEEVEESIRPLLKISREHIVRAQRLDYALVSSLERDPLLAERLKRLRTVPGVGPITALTWALEIGDFTRFRSVKQAISYCGLCGDERSSADKVMRMPLSKQRNKHIQRVLIEAAKLAPRECHELAMLRERELQKGNPNRATLAVARKMVSYMLAVERRKQDFVPAEEFKCRAAA

SEQ ID NO: 62286 - protein, 355 aa, unidentified
MTSVKYIGMDVHKESISICVRNSVGKVVMESVIETKASTILQFIDGLRGDIRVTFEEGTWAAWLYDLLKPRVSGVEVCNPRKNALLKDGSKSDRIDANKLSEQLYMNNIKSVYHGEHGLRTLKELARSYLTIIKDLTRVMNRLKALYRSWAIPCADKEVYAPRYRAEWLGKISESGVRRRAEFYYQQLDALCLLRQAVRRDLLLEVKKHKAWKLLRQIPGIGPIRAAVLMAVMQTPHRFRTKRQLWNYSGLGLETHDSGEWHAVQGQLERRKKPATIRGLNEDHNHDLKDIFKGAAMRASTAAGPLHDFYENLLAKGRKPTMARLTLARKIAAITLIVWKKEVRFDANYLKPQAA

SEQ ID NO: 62287 - protein, 372 aa, unidentified
MDESSKILYVGLDVHKDSIAVAYAPDDRGTEVVSLGAIGTRQSDIDKLIRKLQSKGAATLVFVYEAGPCGYGLYRYLTGKGVACHVVAPSLIPRKAGDRVKTDRRDAMTLARLMRSGDLSAIYVPGVEDEALRDLSRGRDDAMQDLKRSKRRLKSFLLRQDIRYEGRATWNAAHLRWLAEVVCPTPPQQIVFQEYLRAVNEEQERRERLERELHEAVKSWRLYPMVEAIQALRGVELTGAVILMTELGDLTRFDNPRQLMSYLGLTPSEYSSGERRRQGGITKAGNSHARRALVEGAWAYRYPAKVSRHLQLRLEKLPAEVQAISWKAQVRLCKRYRQLTARGKHVNQVVVAIAREMAAFAWAIARLVPQAS

SEQ ID NO: 62288 - protein, 338 aa, unidentified
MSILYVGIDLAKNVFAVHGVNEAGAPELRHPKVARAKLGALIASLPPCVIGMEACSGAHHWARLFQAHAHTVRLMAPKLVAPYRMSGKQGKNDAADAMAICEAVQRPNMRFVPIKTLEQQSRLLVHRARQGFVEARTATINRIRGLLSEFGIVLPLKAEVVRTEARNHLEDLPGYANTVIGDLLSELAHLDERVKQYDAHIRAMARDCALAQRLMQLTGVGETTSTALVAMIGNASEFSSGRQLAAWLGLVPGQYSSGGKTRLGRITKAGDAYIRSLLVLGARAVLNAAANKTDSLSRWAIQLRERRGYWKAVVAIAAKNARMAWAALTKGEAFKLPA

SEQ ID NO: 62289 - protein, 394 aa, unidentified
MSNVIMIGCDLHDRNMLLRYALGTSEPQQLAYDNDACGRQRMIARLKSLAQKNNAERIVFAYEASGLGHGLSDQLHDEGIECYVLSPTHLPKTPKSARLKTDAKDAQMLLEQLRGFVLAGNQLPVVWTPPQRLRDDRELVRARVDVADELTRVKLKVTTLFKAREIKITSPTKCRWTKAFIAWIRDDVIPSLDLAVGVKLKLLLDRFEMYRKEQAELDRALSKLSKEPRYKVPNAELRKLPGVGQLVAMTFLTEMGDLNRFDNRRQVAAYLGLCPSSNESGQKNDRKGRITRQGPARLRKMLCQAAWVSVIRCEDAAAEYHRIKQNQKSRSKKALVAMMRKLGIKMWHRALACGVSSELEGRDRPGGKNFAPARQRDMSPPSLSPSLQPIGHAG

SEQ ID NO: 62290 - protein, 355 aa, unidentified
MNSVKYVGLDVHQSTISVAVLDAEGKLVMQSVLATHATAILDFVHGLRGSLYVTFEEGTHSAWLYDLLVRRVGKLVVCNPRKNALLKAGNKSDTIDARKLAELLRAGLLSPVYHGENSAQTVKQLVRSYAALTEDTTRIMGRLKALYRSQAIGCAGKQLYGRRHRDQWLEQLREVGLRRRAERLYQQLDAVQELRRAARRDLIVACRQHPEAKLLRRIPLLGPIRVAVLIGRVQTPHRFRSKRQFWAYCGLALETRSSADYQMVNGQLERRQKPVFIRGLNLNHNHDLKNLFKSAATTAAARPGVLREFYENLLRKGMRAEMARLTLARKMAAVTLHVWKKGEAFDAQQLKPQAA

SEQ ID NO: 62291 - protein, 387 aa, unidentified
MPQRNDLSRSAASLDPDSTLIAVIEMSQSSWLVAAIVPGIERHPLKKLEANEEALLQLLRRWQDEAAGAGRTIARVAVAFEAGRDGFWLARWLRAHGIEAHVIHPTSVAVSREHRRAKTDRLDTGLLRRAFLGWLRGEPDHCSMVAIPTLEEEDAKRPNRERESLIGERTRIINRMRGCLARLGIRSFRPTLRKAPGRLDTLHTPEGVTLPPNTLAELRRDMARLNFVSGQITEIEQARLERLRQAPDERPHAMVRLLARVIGVGIETADMLVHEVLSRDLRDRRAVARYAGLTGSPEESGARRREKGLAKAGNARVRRGMIQLAWRFLRFQEASGLAVWYRARTADARGGTRKTMIVALARKLLIALWRLVTTGETPDGVVLRPAA

SEQ ID NO: 62292 - protein, 366 aa, unidentified
MSQHFRFDASRSLTALEQDSTIVAVIEMSQTKWLVAALVPGVERQPLKKFDAQEEMLLKLLHRWHCEAGQAGRNIKRIVVAFEAGRDGFWLARWLRARDVEAYVIHPTSIAVSREHRRAKTDRLDTELLMRVFLGWLRGEKRHCSMVAIPTIEEEDARRPNRERQNLVTEQTRIINQIKAIFARFGLRTLRPTMRKLAEGLEDLRTAEGTPLPQNTLSELRRHLARLRFVRDQIRAVEQERLRKLAVAPAAETKSPDAMVRLIARVFGAGIETADMLVNEIFSRHWRDRKAVARYAGLTGSPDESGSRRRERGLARAGNVRVRCGMIQLAWRCQVPKEQRPGPMVRGANRRRTRQHTQDDDRGAGA

SEQ ID NO: 62293 - protein, 478 aa, unidentified
MSRHDRSRGPATRPKPAPPPRPPRDTAPALTVLRPNAAGIDVHSDMHMVCVPAASVPPATGDGGLPAHVRRFGANSCDLHAIAEWLAACGVTTVAMESTGVYWVPLFELLEARGFEVWLVEPGQLSRCGARPKTDALDAQWIQRLHSYGLLQPSFRPADSVLALRGYHRQRQMLIRYAAGHTLHMQKALEQMNVKLAEVVSDITGLTGQRIIAAILAGERDPRALAALRDPKCKRDAAAIARALEGTWRPEHLFALRQAHELYQFLHRQIAACDAAIQAELAKLPSRAGDKSFSAKPRRSGRKPNDLAFDAAGPLFRALGVDLTEVEGIDVGTALVILAEIGVDVSRFPTEKHFASWLGVCPRQHESNGTRKRRGPRKGKNRVAIALRMAAQAVGRTQSPLGLFYRRIKSRIGGQGAVTATAHKLARLVYRMLRYGAEYVKQSMAEYEAKLRASLERHLRTKAAKLGFELVPRAAAGP

SEQ ID NO: 62294 - protein, 354 aa, unidentified
MCLLRQLFSTYTKEVVMRCYVGIDLHATNSVVVVLDDADRVLYQKRLRNDLALVLTTLEPYRATIHGVVVESTYNWYWLVDGLMEAGYSVHWAHAPALPQYSGLKHADDQHDAQWLAHLLRLGLLPTGYIYPKAERAVRDLLRKRSQLVRHKTMVVLSLQSLLTRLTGTRLSLPRLRALTPDGIQALVSFPEQAQSIRSSLTILQCLEQEIRRMEETVREAGRTQPGYALLQTVPGIGPILAGTILLEVGDIRRFVTVGHFASYCRCVGSEHLSNGKRKGAGNTKNGNKYLSWAFIEAAHFAIRYEAVIRNYYQRKQVRTHPLVALKTVAHKLARACYHMLREQVPFDLHRAFG

SEQ ID NO: 62295 - protein, 315 aa, unidentified
MTSPLYLGIDVSKKKLHLGSSKKFLREFPNTIEGHEKLIKFVTKSKDVHLVMEASGGYESLACDDFQDAGLKVSVVQASCVHHYAKSIKVLAKTDQLDSKMIAKYAESANPSVTPKTPENVRKIRALRDRREQLVADRVREQNRFEKCRDRDILADLEASILELKAKEKQITKRIRQLIKNDQQMHRTYEILTSVLGVGEITAITLLGHFPELGSLSRQQIASLAGMAPHPQDSGDKKGKRRIYGGRAAVRRAMFMAARTAVIRCPVMIEFYTRLRNAGKPYKVAIIAVARKMLIRLNTLLKDENAQKKHLMECS

SEQ ID NO: 62296 - protein, 418 aa, unidentified
MNKHNNSGKKSEPTTKRAKPRDPMRRDTKEVLAELVGKLKEKLDPKKLAATSAGEKHNRGELRPNLDRLTVGVDLGDQWSNYCILDLEGETLAEGQLRTTQEDLAEFFQALNAARVVFEVGTHSPWVQEVIGGCGHEVLVANPRMMDGSKRRKRKNDRIDANKLARLGRVDPQSLHPIQHRSREVRQDLVILRAREALVAARTELINATRGLVKSMGARLPKCSSLSFAEKVEGAIPAELRDALLPLVRMAAALSDCIQEYDEKIEKLGREKYGHTALLRQVKGVGPITALAYVLTLENPDRFVKSRDVGPYLGLVPKQEDSGEIQPQLGISKTGDAMMRRLLVGSAQYILGPFGPDTDLRRYGLRLCERGGKNAKKRAAVAVARKLAVLLHCLWVSGEVYEPLRQGTSATIVPAVAA

SEQ ID NO: 62297 - protein, 400 aa, unidentified
MRAVFGIDVSKASSEVAILVNGEKVHGYTMSNDALGFAQLLGDLRTVHKPEIIFEATGVYSRRLQTFLEDNGYAYTRLNPLEAKKQLDSLRVRKTDQIDAEKLAQSQFVLNRKPTYVQEEVYQNLRTLSRFYQNLTEDIVRAKNRLHKVLQVTFPELETILSTPSGQQYWNLVIDFPCKDFVLDLSKDELLESIRQSTSKRISDKRVAYLAEKLIALANQSYCAVKKTSPMLEEVRYYAKELLRLSEQRQTVLDQMVELAQPLPEYDILLSIPGIAETTATSIIGELGDIRRFQSANQINAFIGIDLRHYESGNFLAKEHITKRGNPYARKILFKCIHNIASASHTNPCHIADFYEKRKRQSQTTSTKPHTIASIHRLIRTMYYLITHNKLYDYTSTQNR

SEQ ID NO: 62298 - protein, 370 aa, unidentified
MTHSNILFVGMDVHKESIEIAIADGANQEVRRYGKIGGTQDALRKTLRKLVSLGKTLHFCYEAGPCGYELYRYLVSQGHDCWVVAPSLIPKRAGDKVKTDKRDAIQLARLFRAGELTPVYVPDREDEAIRDLSRAREDAMLVQKAARQRLKSFLLRHDIRYQGKTAWTEAHLRWLADEVRCPSPAQQIVFQEYVNAVTEAQHRLQRLNEQIEVFVKQWRLYPVVEALMSMRGVKMIVAVTVVSELGDLSRFDNPKQLMCFLGLTPSEYSSGDRQRRGRITKTGNGHVRRILIEAAWCYRYPAKVSPEMQLRQARLPLAIRDIAWRAQLRLTQRYQHMQRKGKPHNVTVVALARELCGFMWAIANEVKCPR

SEQ ID NO: 62299 - protein, 399 aa, unidentified
MLETIPLEVRVSVDIGSYQHRVAIGLSDGTVLEEFDMVHQAEGFDSFFARIATYEQQYACPVAVAMEGFNGYARPLDTMIRARDYRLYNINNLKLARFKEIFPGAAKSDALDARKGLELFQLRDHLPMAKDVLQEVAATPEENDILKRLTRRRRQLVREKGRVLNRLQGDLQAVCPGLSEMTNDAGNLWFLRFLTSRPELTQLARLRRSSLLKIRGVGATYADAIQAWQKHAVFSHEVAWVGEMIQADAARILELLGQIKALEAKIDAVAQESVVASILDSIPGFGRICSAELAGEIGTIARFRSDASLGLYIGMSNLDNSSGKFQGSKAPKHVNTRAKAAMMIAVDRHRKGVPESQRFYEKKRAEGKGHNQAIRALGRHLCRVIYKLLTEERVYEIRD

SEQ ID NO: 62300 - protein, 324 aa, unidentified
MIGEFFGVDFLGIDVGKLELHAALLQGGSLARKSVPNNVKGFEQLTKWLINRKAKDLHVCLEATGSYGVDIAEYLYDAGHQVSVVNPTQIKAFGRSMLVRTKTDSVDSEVIARFCSERKPLPWSPPSKEIRTFRALVRRRETLVNMIAAEKNRLEAAIDEKIVQSITSTIAMLQDQLARLEESINRHIDGSPLLRDMVDRLDEIPGFGTLTAQKVIAETNAFTVCEGRAQIAAYAGINPQHYQSGTIDRRRGISKVGNAALRKALYYAALAAKKHSAYFRPFVDRLKAAGKPPKVIIVALMRKLLVLAQTLVANKTTFDPAFAA

SEQ ID NO: 62301 - protein, 423 aa, unidentified
MIHAVIECCAGIDVGKKWIAVCVLTGPANGDAQAETRKYATTNECLEKLSEWLVECGCTHVVMESTGEYWRPIYNVLEEATDLEIILANSQQVKGLRGHKTDPSDAHWLAHLLRHDMIRPSYIPPLPIRQLRDLTRRRKQLVRGGAQERNRIQKILEGANIKLGNVLSDVFGLSGQLMLDKLLEGNATPEEIADLAQRSARKKIPQIRVSLEGHRMNAMHRRLINLSLDHMAFLEEQIRVLDEEIVQHIKSHGLEEPYQLLQTIPGVKEEAAASLLAEFGPDMEVFGSAKKLSSWAGVAPGNNESAGKKKRAPALRGNPWVRSTLTESAWSASRKKQSEFQIHYQGWKPRLGHKRAIVAVAHSLAETVFEVLSTRQPYTKAGANPMPDTKAASLIRHHTRRIKTLRKRLKPKPEQRQVQLAAN

SEQ ID NO: 62302 - protein, 444 aa, unidentified
MKVEAVSALRSERGLHRVNGAEPQVVGLTPQTTDEWKANTMKTYILRDPQPVELQKSIRPPRPECTVPVTAKGPVLCIGLDVHNDSIAVSLAPADATEVRRYGIIGGEHDDVLKLAKKLAVAHPGTTLKFAYEAGPRGFALCRCLRAHGWDCILVCPSKIPRKPGERVKTDRRDADDLARLYRAGELTGLYVPEPVDEAMRDLIRARFQVGRQQHRARQQLKMYLLRHNLRYGGQTSWTPAHLRYLAKLKLPFPTQQIVFQEMLDVISEATARLARYDQEIERAVPGWRWEPAVRALMSLRGLALLHAATLVAELGDFNRFEHPGQLMGYLGLVPSEHTTGKDRQQGGITKMGNAPARRALVEAAWQYRIPARLSPHLKKRQEGLPKAITDIAWEAQRRLHHRYTHLTRVGKKKSQVAVTAVARELTGFVWAIARQIKPVATKA

SEQ ID NO: 62303 - protein, 353 aa, unidentified
MRYIGLDVHKDNITACVLTRDGKAKFEKDFTKNGNFWELDELLEFGDKDGFCVMMESGTYAYQPYRFFSDRNVETHVVHAHSLKIITQSDKKTDKKDAFAIARMLRLWKKGDIDLKMSFMPSKEQCELKDLCRYREELSKKIGDETRRIKSQMTRNGQPIPGSGNFQVMKVRKELITAYSGDTTLMYRMNDLEELFVERDRVQKEVESRIPGSEDVELLEGIPGIGRQTAVQIMSMVIDINRFDDAEKLCAYFGMVPRVRDSGGKEHHGHMTKNGDGMMRALMERATESHIHHCESDITGYYRRLKPRMGTKKALITASRKMLSVIYAILKSRRPFRPKSSECAGYGAVTIPK

SEQ ID NO: 62304 - protein, 343 aa, unidentified
MQTVTTIGLDIAKSVFQVHGVDAAGQVLIRRQLKRRQVLAFFQRLPTCLVGIEACASSHHWARELQLVGHTVRLMPPAYVKPYVKRHKNDATDAEAICEAVARANMRFVTIKTPEQQGCLILHRTRHLLIRQQTSVINAIRAHLAEFGIVAAVGRNGVEQLLGVVADANDKRLPEVARACLATLGVQLRVLKAQILEFDRMINAWHRSNETSRRLDKAPGIGPVLATALVATVADPKTFRSGRNFSAWIGLVPQQHSSGGKDRLGHISKQGDRYLRNLFVAGALAVIRYAKIHGTQHRPWLAALLARRPTKVAAIALANKIARMAWAMMVKGEHYKEPVALAR

SEQ ID NO: 62305 - protein, 339 aa, unidentified
MPIVGGLDVHRSQITYDYVDLRTGEESRGMIRPATRDEVRAFLATFGRKSAAFALEGTTGWRFIVEELRRAGMEAHLAEPAETRARRGPKRRAKTDRADARLLRDLLLAGNLPESWIPPDHLADLRTTVRLRRALVAEKSGWLRRMHAQLFHHGLALPPNLQTGAGREYLATAVVPSAARQVLDIGCSMLEELDAQVMLVDAKLFPLARQLPGCQVLCRQWGIGPVLAATILAELGDTRRFSSSRQSVRFAGMDVTVSESDGKRTRGHLSRQGSPTLRWALYEAAGGAWRTASPDHAYYLEAKARLGTTRARLSVARRILRRVHHELAEAGDAAFSEAA

SEQ ID NO: 62306 - protein, 332 aa, unidentified
MKKFVCGIDISSKTFDVEFMINGKPTDIKEYTNDNKGIKSFMKKFKQKKITHVCLEATGNYHLDIALIIDKIKEVKLMVINPRISHNYSKVLNHRAKTDPQDAHVMAHFAAHMSYIEWQAPDETIFSIRACGRRLSQITKQVTKLKNQLHAYETTKSTPKFIITDVRLSIKNLECQKDNLIENALKIISKHEQASQMYKLITNINGFAAKTAIKLIGELAVLDPDMKANQLVAHAGLNPTIFKSGKSINKKSRLSKAGNKYIREALYMSAMQMTCRDENIAAYYEHMQNDNGLKKRQAICAIMRKLLMSIHGMIRDNVEFNPNKFYKIPIVK

SEQ ID NO: 62307 - protein, 311 aa, unidentified
MQDTIGIDISKDTLDCFQLSSSKHSQYRNGKLGHKALIKWLKSQGATLVVFEATGAYHRSLEATLARYEYPFVKVNPRQARRFAEATGKLAKTDRVDAAMLAKMGAVLDLPAQEPKSENINILRELLTARRALTKDNAAAKTRSHTTLHAVLKMQIGARQKQITLQLKQIDKIIAKMIDGNQELSRKFEILLSIPGIGQVTAFSMLTEMPELGTMTGKQSASLAGLAPISRQSGKWQGKERIQGGRAFFRRAMYMPALCIIRHNLSSKQKYDQMIKRGKPPKVAITAIMRKLVVLANVLLRDDRKWTEKPT

SEQ ID NO: 62308 - protein, 399 aa, unidentified
MQVLYERCAALDVHKKTVVTTMMITQTDGSVQEQTRTFLTMTADLLTLDDWLSSHGIEVVFNLLEEGRQVILVNAQHMKAVPGRKTDVKDSQWLADLLRHGLLKASFIPPKPVRELRDLMRYRKTIVQERADEVNRLQKVLETANVKLSSVATDVLGKSGRSMLDALLGGQEDPEILAELARGRLRAKLPDLRKALDGRVRPHHQVLLTRILAHIDFLEESLAQLQGEMEQYLDPFEEAMELVQSIVGIKETAAASILAEIGTDMTRFASDKHIASWAGVCPGNKQSGGKRLSGKTTKGNPYLRAILFEVAWAIAHTKDNYLSAFYHRMARRHGKQKAIMALAHKVLVIIYHILRTKKPYADLGADYFDQQDRGRIERHHIHRLEQLGYTVTLAPKEAA

SEQ ID NO: 62309 - protein, 360 aa, unidentified
MAKARTLVGLDVHAMKIVAAVLDGETGQLQSFAMGGESAAAARFCAGLARPVRVVYEAGPTGDGLARELDKRGVECVVAAPSKIPRAPGDRVKTDRRDAELLARLLLAGELHPVRVPGDEEEALRDLVRAREAVRVDLMRARHRLSKLLLRHGVRFDDGAAWTERHQRWLATIVLEWPAAQATLLDCRGAIDALTHRRDQLEREIVALLPTSPWQVQVGRLRCMRGIDTLTAVGLCAEIGDFERFARAEQLMSYVGLVPSESTTGQQRRLGSITKTGSGHARRLLVEAAWHYRARPAIGKALSGRHELQPPEAIAIAWSAQQRLHRTWARLEARTKRRTIIAVAAARELAGFCWAITRIE

SEQ ID NO: 62310 - protein, 461 aa, unidentified
MSANKPTGAKKKSVPKKVDWKALEVVHPEAAGIDVGGSEHWVAVSPDRDPEPVRCFGCFTADLREMARWLVEKGVRSVAMQSTGVYWMPVFEILEQQGLEVYLVNAQHTKNVPGRKSDIQECQWLLKLHAFGLLNNSFQPNDEIRIARTLWRHRGNLVAEASSVVQRMQKVLTERNVQLSNVLSDISGVSGMKIIKAILDRVRDPWELAALVEPGVKATPEDIVKSLEGNWREELLFVLRQHVEFYQIYQKKIRACDLQLRKHLQSLGSKLDLQAQPLGPRPKGKKLSRNAPTFDLRTELYRITGIDWSQINGIDVLTAQTVISEAGADLSAFPSEKQFASWLGLCPTNQQSGKKILNRRTRKVVNRATVAFRNAAMTLVRSQSYLGAQYRRLRTRLGAPKAITAMARKLACLFYRLIKHGQQYVDKGTEYYEARYREQQIRSLAKRAQKLGLQLIIPKTA

SEQ ID NO: 62311 - protein, 356 aa, unidentified
MSYEVKYIGMDVHKEATVIAVLNESGKLVMESVIETKASSILQFIHGLRGELHVTWEEGTWAAWLYDLLQPQVQHIVVCNPRRNALLKEGSKSDKVDARKLADLLRTGMLRAVYHGENGLRTLRELGRSYQTISKDLTRVMNRLKALYRGWGIPCAGTQVYAARAREEWLSKIAQAGVRRRAELLYQQLDGLQALRREVRPEFLAESRKHKAAKLLRQIPCIGPIRAARLIALMQTPHRFRSKRQLWTYSGLGIATHDSAQFRFVSGQLQRSKKPQQIRGLNRNHNHEMKEIFKSAATRASCGMGPFHDFYAGLLTKGMKPEMARLTLARKIAAITLTLWKKEERFDAKQLKTQAA

SEQ ID NO: 62312 - protein, 390 aa, unidentified
MQALYPRPDEHAAVRTDLKAIFVSLELSRSTWVITSLSPGGGEKMSKHAVPSGDIPALLARLSQLQEKARARTGQVFPIIVIQEAGLDGFWIHRVLQQEGIESHVVDPASIATSRRRRRAKTDKIDGEALVRALLAYKRGEPRVCAMVQAPTPHEEDRRRISREREVLTAERVQHVNRIKGLLFAQGIGDYEPLHRNRRERLQELITGDGRPLPECLKAQISRELDRLELLIEQIKAVEAERDAVLAQAQASPGVPAPAAQLLTLRGIGPEAAATLWSEGLFRTFNNRKQVAAYAGLAPTPWQSGSVHRDQGVSKAGNPRLRTIMIQIAWLWLRHQPQSALALWYRARIKRTGGRLGKTMIVALARRLLVALWKYATAGVLIEGAVLKPA

SEQ ID NO: 62313 - protein, 344 aa, unidentified
MKKVLIGIDFSKEKFDVAIIVKPTSTQEHALFDNKVSGYRKMIKWINSVVEDIPCSSWLFCGETTGGYSRMMSDWLYAQGYDVCIENALVIKRTFPLKRLKNDTVDAFMIAEYALCFEDRVQLYEPMSQALTELREIFLYRHHLVRHRCSFEVRRIEKRFTQQKSANKNVISQSARHIITEINKEIAKCDEKIKEYIESDDQLSSIFAIVTSMPGIGTINAVSLMVYTNNFIKFAYNPRKIACYYGIAPFGRDSGTSVHTDPRVGFIANKMLKSLLTQAVLTSVRTCPQIAKYYQRLIERGKKPMVALNNVKNKMIAIITAMVRTGCMYQPDNICLATQSVNVK

SEQ ID NO: 62314 - protein, 431 aa, unidentified
MSNRLQVGIDFSQKGADFCLMFPDGQPLEPHQAFDNSSSGYTAAKQLLLNALDNHQFDGLDISGEATGYYWLPFFLQLAADPDLARHDARLFVLNPRWVSWFKKCFAQDDKCDEKDPYYIAERTRTSRPRVAWSPQMNILALRFYTRCRFHLIQNLAREKCYFSAYLFLKASAYRCVKPFSDIFGHTSRLVLTQEPSLDDLAALPVHDLAQHLHELSGHHLRDCLDNAHKLQRAAEESFTLDPILAVPVQRILDLTLAHIRFLEDQVQQVDAWIAAEVSSQPAILQLTTIPGIGPVFSSGLGAEIGHTQRFLQGTKWDKRRKKHRPRNLRDAEDAVAKLAGLWWPRADSGGFEAEDRRLAKTGNRYLRYYLIQAADKMRQHIPDYADFYAGKYRQASKYKHKRALVLTARKSVGLVVGLLHRNESYRSKEN

SEQ ID NO: 62315 - protein, 337 aa, unidentified
MFQLGIDVSKKTLDLCLLREGVKGRVKTRKLKNDLGATSAVINWLHKQHCEPGDVHIIMEATGVYHESLAYGLHKAGARVSLANPHRSREFARGMGMLTKNDQVDAYMLACYGTLKEPAPWTPPPENLRYLSALLRRRDALVADSTREKNRLEKCRATDCPPIISESIESMLQRLNLELEHLDELIREHLEQYPELKKDFDLLTSIKSVGFQLGLNMLVILRSHRFDTAEQAAAFLGVVPVEKSSGTSVSGKSRLSKIGPPEIRAKLYLASLCGLRFNPSMKAMYERLCRRGKAKMCAIGALMRKLVHWCYGVLHTQLPFDAEYRSSDAYSACKAAC

SEQ ID NO: 62316 - protein, 341 aa, unidentified
MKQFIRIGVDLAKNYFQVHALASEGGPAVTRKLKRAKMLEFFSQIEPCRVGMEACGSAHYWARELKALGHEALLMPPAYTKPYVKRGKNDAADAEAICEAVSRPGMRFVPVKSAEQQATLMLHTTRELLIKQRTMTVNALRSHLSECGIIVAKGVGRVDELLELADKDAMLPNAAKAAVKVLAQTLEGFDKSLDELEDEIASAHARSEMSRLLVEVPGIGKLIATAIVASMPNPSVFKSGRNFAAWLGLTPRQYSSGGKQTLGTITKQGNRYIRKLLVLGATSLLNVVGKRKGALRDWTVALLAKKPARLVTVALANKLARIVWAMMKTGEGFRTEMFSKA

SEQ ID NO: 62317 - protein, 424 aa, unidentified
MKVTYQTCCGVDVHKSFLVATIVKTTGGIEPSYQKKRFSTFNNSILEFKQWLLDNDCHDVCMESTGKYWVPVFNLLEDEINVVIANPKWVKAVKGNKDNTNDSKWIGDLFRLGLVKGSYIPCKIVRILREYTRYRYKLVSCRSSEKNRYQNALTVCNVALDSVVSDIFGKSSTSIIDYLLEQSGTSINHEEIASKLLRSLKSKEDTVIESVEGYQMTDTQKYRMRLVRAHMDYITAEINDVDKMIENMISSNPDFENAVRFLCTIPGVKRDSAITIISEIGTDMSQFSSSKRLCCWAGLTPSSNESAGKKKSVRITRAGVYLKPALVQCAHAAVKSAKSPYYKKKYESLVKRRGKKRAIIAIARMILTAIYQMLSTGEQWNPSDLYKIDMPVALVEKQKAKAIKQAKKLLQREGLLPPDEPLAS

SEQ ID NO: 62318 - protein, 412 aa, unidentified
MRIIHQRCCGLDVHKKVIVACLLIVQGNGELYKEIRKFGTMTKDLLALLDWLQQNECGQVAMESTGVYWKSVYNILEGHLEVVVVNAQHLKGVPGRKTDVLDAEWLAECFQLGLLKASFIPPAPVREVRDLTRYRTTLIRERARTASRLQKVLEDANIKLASVVTDIQGVSAWAILNAIAEGTSNPVALANLAKGLLRKKRPQLLEALAGQIKPHHRFLIAEHLRQIEYLEEAIQRISQEVEERLRPFEDDIKFLDSIPGIGRQIAEVMLAEIGWDMSRFPSDKHLASWAGMCPGNNESAGKRRTGKTRKGSRWLRQALIEAAHGAARTKNKYLKTHYHRVAAHRGKKKALVAVGHSILIISYHLLTRRQSYSDLGANYFDQRDRTAVQKRCVKRLEKLGFKVDLQAVPIAA

SEQ ID NO: 62319 - protein, 414 aa, unidentified
MLKIVYRVCCGMDVHKSFVVACIASTTEYGVTTYKSKRFSTFTGDLRRCAAWLAENSCKDVCMESTGKYWIPIYNILEPTCNIVLAHPKYVKAIRGKKTDKRDAKWIADIFKHDLVAGSFIPPADIRQLRDLVRYRWKLTNFTTGEKNRAQNCLTVSNIKLDDVFSDVFGKTASAITTRILENPAEKITDVSGFRTKGMKATNEQVLAAVDGEMCEEQAEKLRIIRSHMDSLQLCKLDLESLILATAEKYLPQLNLVMTAPGIQSFAAIGIISEIGVDMSVFPTSKHLCSWAGLTPQNNESAGKKKTTRISRAGAYIKPLLVQCALNAVRAKKFPEVRNRYLALKKRRGHKKAIIAIARMLLTAIYNILKKNESYNPELYRQTDRPPAHREVSVAEAIFILQRQGYLVAAPPTP

SEQ ID NO: 62320 - protein, 412 aa, unidentified
MELIVERCAGLDVGKDEVVACVRTPSPSGRGRCSELRTFVTFTSGLEELADWLGASGVTEVVMEATGQYWKPIWYVLEARRFELRLVNARHVKMVPGRKSDLADAAWLAQLLEHGLLAGSFVPPAPIRELRDLTRYRKRLIQNHASEQQRVQKVLEDAGIKLDSVAADVLGMSGRAMLRALIAGQRDPDTLAELAKGRLRKKMPLLREALRGRFNEHHAVMLGVILDHVDYLERAIAALDVEIDRVITPFSQARDRLDTIPGVAKRAAECIIAEIGVDMTRFPTAAHLASWAGVCPGTNITGGRQRSGRTTRGSRWLGEILAECAAAASHCRDTYLAAQYWRLRRRMGHRKAAIAVGHSILVICWHLLNTNCDYHDLGGDWFVRRTDTDKRRDHLIRQLQDLGYGVRLSKVA

SEQ ID NO: 62321 - protein, 464 aa, unidentified
MGHARARKIPAQLVEDEEYQLRHERVAGIDIAKAKADVCTRLPPQRDGGRRASRVEEVPATAKAILALAVRLIADGAELVVMESTSDYWRMWYYLLEGAGLSVQLVNPAHARQLAGRPKTDRLDAQWLARLAEMGLLRPSFVPPPEIRALRDLTRTRLQLVRDRSREWQRLEKLLEGALVKLSSVVHSLAKVQSARAILEAIAAGERDPKALAALAHPNVKGGRAAVEEALGGMALGDHHPMLIRVHLDHITLLDRSVAEVEDEIEAALDAIPAAWGTDPGGETGPDAGRGPDPAVLPAAERLAEIPGVSPALARAIIAETGLDMTRFQTADHLVSWAGLAPVARQSGPRSRKPKKGQGDAYLRGYCTQAANGAARTGTFLGERLRRLSRRLDGNRARCAVARSILVIVWHLLASPDDRFADLGPGWHQRKTDTDRRTRSLMNQLRALHPDADVNITIVPGTAA

SEQ ID NO: 62322 - protein, 398 aa, unidentified
MTESSDYESVQVFIGVDVGKDTHHAVAINRSGKRLFDKALPNDENKLRSLISDLKQHGQILLVVDQPATIGALPVAVARSEGVLVGYLPGLAMRRIADLHAGEAKTDARDAAIIAEAARTLPHALRTLKLADEQIAELSMLCGFDDDLAAQTTQASNRIRGLLTQIHPALERVLGPRLDHPAVLDLLQRYPSPEKLASLGEKKLAAQLCKLAPRLGKRLAADIAQALAEQTVVVPGTNAAAVVLPRLALQLITLRKQRDEVALAVEQRVLAHPLYPVLTSMPGVGVRTAARLLTEVACRAFASVAHLAAYAGLAPVTRRSGSSIRGEHPSRRGNKALKRALFLSAFTALRDPLSRAYYTRKMSQGKRHNQALIALARRRCDVLFAMMRDGTFYTPQAS

SEQ ID NO: 62323 - protein, 340 aa, unidentified
MKYIGMDAHSKNSYFVVLSRNGQVLHREKVETQEDTILGFVRSIKGSKKLSYEEGVMSQWLYLLLKDEVDELIVCQPPKSKGAKNDWLDAAEIADLLRVNRLKSVFHSDDVLMNLRVLISGYDDLLQEIIRTKNRYSALYREAGISTKAKDVYEDQELLLQLNSEHRQLVGNSLYEQIQLLEQHKQKYVKRLDQNVHKYKPVKLLAGIPGIGTIRANHIVAVMVTPYRFSRKGKLVAYSRLTKYGRMSDGKLYGRRRSLGHPILKDAFRGAALSSLNGSNAFQREYDAQRIEGKSAKEARNKIAKMVAATVLGVWKTGKPYDDKHWEVTRKRNQSCCRHM

SEQ ID NO: 62324 - protein, 343 aa, unidentified
MSEVTTIGLDIAKTVFHAHGADERGRGVFSKRLTRTKLLAFFAAQPRCTVALEACGGAHHWARELTALGHEVRLIPPAYVKPFVKRHKNDAVDAEAICEAAQRPTMRFVAVKSEEQQASALVFRTRDLFVRQRTQLINAIRGHLTEYGWVAPKGPAYVSMLSDLLDDDLGASLPSAAVSMFRVMLDLLADLNERIAALDKEIARRSREDEAARRLMTIPGIGPITATALTALAPAAETFAKGRDFAAWVGLTPLQHSTGGKQKLGATSKMGERTLRRLLIIGASTVIIQATRRGTAKGSWLEQMLARKPRMLVTVALANKMARIVWALLAKGGTCRAPTAVAA

SEQ ID NO: 62325 - protein, 418 aa, unidentified
MSRADADQGRRDRGFEVFCGIDVARETHHVVVLDRQGRRLIDRPLPNGEPQLVALFNELESRGRVVVVVDQLASIGALAIAVARSRGIAVGYLPGLAMRRIADLYPGETKTDARDAHVIADAARTLPHALRRVGPDEQTTVELSVLAGYDADLAAESTRLANRLHDALLHIHPALERLLGKHFRRPGVLRLLAAAGTPQAIAELGESGIRELIANGSPRMSKSLPTLIVAALAEQSVTIPATEQYGRVIRGVAQQLLTIMDQREVLGSELEALLTDHPLAEILTSMPGVGPRTAIELLRTVGDGSTFANAAHIASYAGLAPATRQSGRSIKGEHQARRGNRTLKGALYLSAFASLKHPPSRAYYDRKRTEGKSHTAALTCLARRRVDVLHAMIRDRQHYHPTSVTADPVTPSAEPPAA

SEQ ID NO: 62326 - protein, 414 aa, unidentified
MTKFSVYIGIDWANDKHDVCVQVANSSTRKFEVIKHSPKSINEWISSLHKQYKGQIAVAIELSKGPIVYALQKFDFVTIHPVNTSMLAQYRKAFSPSGAKDDPTDAELALDLMLRYPNKIKALKMESESVRKLTYLVEQRRKLVDDKRRFSNRLIITLKEYYPHLLDWFSHRGSGIFCDFITRWPNLQKLKRARLDTLKKFFGSYPGRTAAYSVKRIQSISEAEPLTLDNAVIESHQLLAVALANQLLVAVKVIKVFDREISELFNALPDAELYNSLPGTGPCLAPRLLVAIGENRSRFNSASEIQMYAGIAPVTVRSGQKSWIHWRYQCSKFTRQSFIEWATKSIRQSYWAEIYYQQQREKGNTHQAAVRSLAFKWIRIVFRCWKTKEPYNEAKYLKALSDRNSPLLFKEKAC

SEQ ID NO: 62327 - protein, 347 aa, unidentified
MLIIGCDFHPGFQQVAIFDNLTGEIKEKRLQHRAEAERFYGSLAGQEVRVGMEACGHYPWFERLLAELGFELWMGDAAKVRASVVRKQKTDRRDAEHLLDLLRQDRFPRIWVPSLEERDARQLLVHRHKQVQARTRSKNQLQAMALSHGVQKKYKLWTQAGRAELEQLPLLPYAAERRKKLIEGLGALEAEISELDRRVAEEARQRPEAVMLMTHPGVGPVTALAMVLTLGPAERFKSAKQVGSYFGLIPSEASSGGKQRLGKISKQGSSFLRFLLVEAGQTAARYDPQLKRFYKRLAMRKNRGVAKVAVARKLATRMYLMLREGWTYAQLNQAVMSASPSHSVAGE

SEQ ID NO: 62328 - protein, 415 aa, unidentified
MEVVVDRVAGLDVHKETVMAAVRVPGGRGRSQVVKEFQTFNFDLVRLREWLVEQGVTLVVMEATGVYWRAPWRVLEDHAGWELMLVNARHVKNLPGRKTDVSDAAWLAQLAECGLLRGSFVPPPVIAELRDLTRYRKKLVEDRAKEVQRVQKTLEDAGIKLESVVTDVMGKAARRMIEALIAGERDPEVLADMALTRMRPRIPDLRLALVGRFGPHHGVMCKAHLSHIDYLDAQVAALDDEIERVIAPFADPLRRLMTIPGVGQRTAEVVIAEIGIDMDRFPTAGHLVSWAGLCPGQHESAGKSKSGRARKGNTHLRVALCEAAWAGVGKNDSYLGAQFRRFQRRFGKRAEGKAIFACAHSLLVMIYHVLAEPDAVYEDLGADWFTRRDDSAAHARRLVRQLEKLGHHVTLTPAA

SEQ ID NO: 62329 - protein, 330 aa, unidentified
MKQYDHVFGVDISKKTVDITHVVNQQFTHRQFTNDDSGMEQLMEWFKELSPAFDKTLFCMEATGLYCFTLTHFLASHSIDTWIEHSLQIKRATALARGKNDKVDSQRIALYATKNLDRLRLWKPVNATLEKIRHLASLRERLVDTKKRLATPIKEFEDVGNLAMAKLLTKTIKSSLAAIDKDLKNIETKIIDVINEDDNLKLLYKLITSVVGIGFVTAINLIVHTNGFTMLKDARKLACYCGVAPFEYSSGSSIRGRTKVHYMANKKLKCNLHMASLTAVKLDADLKAYYERKVGEGKSKMCVLNAVKNKLLARVIAVVNKQELYVKKVA

SEQ ID NO: 62330 - protein, 358 aa, unidentified
MNRHRIQDFILEDKEIFVGLEDSKRTWKIAVRSEKMLIHQTSMEAKYPILIKYLRNKFPKCRVHLIYEAGFKGFNLYDQLTEDGIECVVIPPHIVTEPKVSRVKTDKRDARRLAKILENQDYKFGCYVPDKERREDRQISRTLGAVKKDIIRTRNRIRKFLDFHGIILPFKDSQKWGRVEFMGLKNLSLSDPLRKSLDILLEMLGALWAHAKELREYLRELCRKERYHKAYEIAKSMPGIGWYTAIRFVLEFGEDLSRFTSGKQIAGFVGLGCSEYSTGETENRGRITGVGSGYIRATLIENSWVAIRKDPVLLDKFNRVWRNSGSKKKAIVAVARMLIVRFRACVMSGKPYVIGVIQ

SEQ ID NO: 62331 - protein, 361 aa, unidentified
MRDATTSEETKVTVGLDLGDRHIQVCLVDEAGEVIEEARLATRPQALRRRFCGSEPLRIVLEAGTHSPWVSRLLAELGHEVIVANPRKLRLIYANDSKSDRVDAEYLARVGRLDPALLAPLRHRGAETQVDLALLRSRNALVRARTRLISHARGTTKSLGARLPACSSESFAAKAGACLPDELRPALDPVLAVIAGLDAQISALDERIAEMARQRYPETALLTQVPGVGTLTAMVYVLTLEDPQRFPRSRAVGSFLGLRPRQRDSGSAQPQLRITKAGDEHLRWLLVGAAHYILGPFGPDTDLRRWGLRLAAQGGRAGKKRAAVAVARKLSVLLLRLWVTGEVYEPLRNARLRGELLAAPS

SEQ ID NO: 62332 - protein, 388 aa, unidentified
MQVAADRTDASTAIQTDLPAIFASLELSRSTWLITSLSPGAGEKMSKHSIRAGDVAGLLVRLAQLKEKARGRTGRDFPIIAIQEAGLDGFWIHRVLQSEGIESHVVDAASILTSRRRRRAKTDGIDGETLVRTLLAYKRGEPRVCAMVKAPTPEEEDRRRICRERKTLVGERVEHVNRVKGLLFAQGVSDYEPLKRNRRARLEELKTGDGRPLPAHLKAQISRELDRLELVLPQLKAVEAERDALLKPVSEGCPTPAAMLAQLKGMGPEFTAILWSEGLFRSFSNRRQLAAYAGLAPTPWQSGSVAHEQGVSKAGNPRLRTTMIQFAWLWLRHQPTSALSVWFQERVQSNGGKMRKTTIVALARKLLVALWKYSTSGVVIEGAVMKTI

SEQ ID NO: 62333 - protein, 358 aa, unidentified
MKQYRTTTLTAGMDLGDRYSEVCVVDGAGEVIERTRLQTTERGVRHYFEGRVSMRAVIEVGTHSPWVSRLLEELGHEVLVANPRKVRLIYGNERKSDHLDSESLARLGRLDPVLLSPIRHRGSEAQADLALVRTRAVLVEARTKLINHVRGTVKSSGHRLGSCSSASFGRRFEEVPEGLRTGLEPVFRVLAKITETIREYERWIDDRFEQYSEASAMVTAPGVGSLTALAFVTTLESPTRFARSRQVGAYVGLVQRRNQSGASDPQGHITKAGDPYLRKLLVGSAQYILGPFGPDSALKRWGLALAARGGKSAKKRAVVAVARKLAVLLHQLWMTGECYEPFPEPPRRRVGVEAKART

SEQ ID NO: 62334 - protein, 365 aa, unidentified
MIVIGTDTHKQSHLCGAVDANSGAVLGELEAPARKRGFAALLDWGKELGGKRIWAIEDCRHVSGSFERFLVAEGERVVRVPPRLMGASRRSERRRGKSDSIDAFAVARAALREGPETLPAAYLDEAALEIKLLVDHREDLVRARTQDQCRLRWHLHDLWPEFQIPAGGLDRPKWLEQVARKLGRAPQGARVRIARELVREVKARTRLIKALEAEIATLVGEEAPQLLEIPGCGVLTAAKVLAETAGIERFSSDAKLARLAGIAPIPASSGNTTRHRLDRGGNRQLNAAFHRIAVTQGRQHPDAQAYMARKQAEGKSRREALRCLKRLLVRVVWKALRDTRRPETAVSISPNFQKFQILSSAPSLT

SEQ ID NO: 62335 - protein, 410 aa, unidentified
MDLDHNFEFFAGIDWGSERHRVCLMDRNGQTLAERWIEHSGDSLAELAAWLRQQTSDCPSSLAAAIEIPRGAIVETLLEHGFTVFSINPKQLDRFRDRYSPAGAKDDRRDAFVLADSLRTDMHCFRPVRLDDPALIRLRELSRLDEELAQEQNRAVNRLREQFHRFFPQLLQLSECADEPWLWALFELAPSPLGAARLTEAKIARLLQQHRIRRLTAAQVRAVLKTKPLTLAPGAAEAAAEHALWLLPRLRLLHQQRTHLGRRISALLDELAAPVEGQNEHRDAAILLSLPGLGRKIAATMLSEASQAIADRDYHALRCYSGTAPITHQSGKKKVVLMRRGANERLRNALYHWARVSVVFDPPSKKRYAAMRACGHSHGRALRGMADRWLKVLISMLSTGTLYDPQRRAA

SEQ ID NO: 62336 - protein, 350 aa, unidentified
MDTTVAPLASIGIDIGKEVFHLVGFGTDGKIAFRRKIKRLALTETFRKLPPCIVGMEACLSAHFVSRALRQLGHEPRIIPAIYVKPFVKGQKNDYNDAEAIAEAALRPNLRTVREKSQEQLDLQACHRVRSRLVSRRTATINQIRAFLIEQGIAVRAGANALRNSLFDILKNREDEISPRMCDLIVGLYEDWLWLDERVETITKEIEEISQREGNCLRLMSVPGVGPLISTAVVAAIGTGEAFDRGRDFGAWLGLVPRQYSTGGRSILGSISKRGSRYLRTLFIQAAKVLLMRPQNWSKFSFGPWLTNAAPRMHRNKLATALANKLARIAWSVLSTGKAFDTHKLEIEAV

SEQ ID NO: 62337 - protein, 355 aa, unidentified
MNQDKYIGMDVHQATISLAVMDSSGKVIMESILETKAATILEFIAGLRGTLSLTFEEGTSAAWLHDLLKPHVSHLVVCDPRRNALLKDGSKSDRIDARKLAELLHGNKLHAVYHGEHGLRTLKELGRSYLTITKDLTRVMSRIKALYRSWAIPCSGATVYAPRHRAEWLAKILEPGVRLRAERLYKQLDLLQPVRQEARRDLLVESHKHHAVKLLRQIPSIGPIRAALLVALLQTPHRFRTKRQLWAYSGFAVETHDSGEYRFVRGKLVRNRERITVRGLNHNHNHDLKNLFKGAALSASTRPGPLCDFYVALVEKGMRPTMARLTLARKMAAITLTIWKKGVEFDAKPLNRQAA

SEQ ID NO: 62338 - protein, 321 aa, unidentified
MNKDTEIYGVDISKDVFDVYSITFGHKQFKNDERGFTAFLKSLPNPSLVVMEATGYYHYRLAQYLYKQDVLVSVVNPLSVKRFIQMKLAKVKTDKSDAKAICEYGQMNEVPLYTALTDVQSECLQMFRLLDNYLKHRTATKNKLHGEEVLDIPSKFVYRSLKRDLNHLNKEITSIESRLLELVKQDYQEQLTLLKSIPGIGVKTVLFLLVITDGFSKFETASQLCSYAGITPTIRQSGSSVRGRSRISKVGNRKLRNLLFLCAFSACKHNRACREIYERITNKGKSKKLALIAVANKLLKQAFAIAKSGLPYDENFVSKLN

SEQ ID NO: 62339 - protein, 345 aa, unidentified
MTTMNYIGLDVHKKTISYCVKDVSGRIQQEGKIGSTRRELDCWMKTLPQPWTVAMEATIFSGWIYDHLLPHATQIKVAHPLMLRAIAAAKKKNDQIDASKLADCLRCDFLPECHMMPRAIRDRRRTLRYRHLLVRQMVQMKNRVSGLLMETGVEYNKQRLHKVSYFRELLSANEEVPPSLRPLLKLSRETIERCQKTEYALVSSLQRDPVLADRIKRLRTVPGVGPITALTWALEIGDVSRFRSIKQAISYCGLCGDERSSADKAMRMPLSKQRNKHIQRALVEAAKLAPRQNHEMAVIYDQERQKGNSNRATLAVARKMVAYLLAVDRQQRDFVPAEERRTTAA

SEQ ID NO: 62340 - protein, 314 aa, unidentified
MENIIIGIDVSKKTLDVAVLPTIQEMSVTNDEAGCRELIVALKSLRPRLIVLEATGGLENFAVGMLAAEGFPVVVVNPRQVRDFAKATGKLAKTDRIDAKIIARFGEAVKPEIRPFKDEQSQLLTALITRRRQIVDMITAEKNRLGISHNSVHKDIRETISWLEKRLAEIDKDLGKTMRENKAWKEKNDILTSCKGIGKVISATLLCSLPELGTLNRREISALVGVCPFNRDSGKMRGKRTIFGGRAAVRAMLYMAILSAKKFNPAIKSFYDRLIKAGKLPKVAITACMRKLLTILNAMLKNKEKWNLNVMQIA

SEQ ID NO: 62341 - protein, 408 aa, unidentified
MTAAAPTYPDHEAVEEVVGGIDTHADTIHVAVVTVVGRDVADEEFLTTLAGYRAATDFLQAHGVIERVGIEGTSSYGAGIARACAAAGMDVREVLRPDKTVRRKQGKSDPIDAYHAARAVLSGRSTSAPKDEKILGLRALHTARRSAVKARTATIHQIQQLLITAPDGIREKYRDLNNARLVETLARCRPNRDDLVGGAVLRAMKDLAARHAFLDEQASDLEADITAIVRTLNPGLLGAHGVGPDTAAQLLITAGGNPERLSHEASFAALCGTAPVPASSGKTNRYRLSRGGDRAANSALHRIALVRMVSHAQTRGYVQRQRDKGRSSKEILRRLKRAIAREIFKYLTRTITVPAIDDLRPMRQAKNITLTSAAQHFGVWPARISTLERGTRRDDDLANAYRAWLTAA

SEQ ID NO: 62342 - protein, 387 aa, unidentified
MAQVIIGVDPHKRSATIEIINAREKALGQGRFGTDRDGYQAMLAAGRKHKDRLWAVEGCNGIGRHVAQRLVADGETVVDVPAKLSARARVFATGQGRKTDPVDARSVAVVALRTEGLRQVVTDDTTVALRLLVDRRDQLGRARTDVVSRLHHLLLELVPGGAKKDLSAQQARALLGTVRPRDVVGKTRRRLASELIGELVVIDKKIKIAKQELTDLVNSTGSQLMDLTGIGPSGAARLLGDIADIARFTSRAHFASWNGTAPIDASSGDQNRHRLSRAGNRRINRALHIMAIVQLRRDTEGRRYYRRRLAAGKTPMEALRALKRRLSDIVYRQMVADAKLVRTGPGGHAGATLQSSAADLNPEIDTSEKSLPGPATPQPRTTLAAAS

SEQ ID NO: 62343 - protein, 414 aa, unidentified
MEVVHTHCAGLDVHKKTVVASIIVSDPKAGLRKETRTFGTMTSDLLTLSDWLMSNGVTHVAMESTGEYWKPVFNILETNFEVLLVNAQHIKAVPGHKTDVKDSEWLAELLRHGLLKASFVPPLGQRELRELTRYRSTFVRERATLVNRVQKVLESANIKLASVATDVMGVSGRAMLEALIEGQASPAEMAELAQKRMREKRDMLTKALEGRVKPHHRFVLTELLCQIDSLDETIERFNQQVEAYCRPFEEAVVSLDSIPGVGHQVAEIIVSEIGTDMDRFPSADHLASWAGVAPGNNESAGKRRSGKTSKGNKALCSALNQAAHAAAHTKNTYLSAQYRRLAARRGKKKAIVALEHTILVIAYHLIKRHELYCELGGDYFDKRRPEATAKRLVKRLEQLGYSVSLQQPALCSAV

SEQ ID NO: 62344 - protein, 393 aa, unidentified
MSFCVGVDVSKEKFDACCIDEQGEKLFSLTCSMNREGFEKFIGRLPKGKSSFLVGMESTASYHIPLFAYLTAQDYRVVVINPLLINGFSKRSLRKTKTDKKDALTIAQFLMQEKAILSVKAPDDLIAELKDLARRREKLADHMTSLKGDMKRILSVIFPELEYITGVFTKATLRLLTEYPSAHAIRGANSLAIAAVFNKGRGNRPRVTVKALMDAATSSVGVASPAKELTLRHEASLLMHVEEQMKETTKVLMNTLNERMKQDTDILCSMKGIGENTAMNFLIEMGGAVEIYENDKKLIAASGLDPSTYESGKYAGKSRISKRGNRHLRRVIWLMATRVIINNDLFKSYFKKRKQDGLPYKKAVLATAHKLIRTIFVMLSRRTYFVEGGIKYS

SEQ ID NO: 62345 - protein, 423 aa, unidentified
MDILYEQVAGLDVHKDTVVACVRIVAEGKTKRECRTFATTTDQLVDLRAWLEECRCTQVAMEATGVYWMPVFRILGEGEFELIVANAAHIKNVPGRKTDVNDATWIADLLACGLIKASFVPNEEIQELRSLTRTRKQLVREQTRHVQRIEKTLAEANIKLDSVISDIMGASGRRMIEAMIRGVRQPRQLAELAGKGIKATPKELYDALHGRLTDHHRFLLDLHLKQWDGLDETIRKIDREIDQRIGRMHTKGESGEVPFRSLIELLSTVPGISTVSASAIVSEIGCDMSRFPTAGHLVSWAGLCPGKNESAGKRKPSRLRKGAPWLKTMLVQCAWAAKRKKDSYYRAQFFRLQSKRGPQKAICAVAASILTAVYHILKDGTEHRDLGAAYFDRRPTELKASRLVARLKNLGFNVQIQPIAEAA

SEQ ID NO: 62346 - protein, 350 aa, unidentified
MERQQLVIIIGIDPHKSSLTAVAVEPNGQTHPPIRLVVDKNTPAALLTWAAQWPERQWAIEGATGLGRGIAQQLVTVDENVLDVPAKLAARARLLGSSSARKTDVADAISVAAVARHNRRLNRVRLEDHTTIMRLLTERRDDLVAEHTRWINRLHVLLRDLHPGGAEVRLDTTDASSLLAKIRPVTPADQQRKQIARDVVRDLKRHEASIKDLEKQLRAAVIASGTTLTQIQGIGFLTAAKLLALTGDIRRFPNQEHYASYAGTAPIDVSSGEQETHRLSRRGNRQLNAAIHVAAITQARDPGPGRDHYRRKIAEHKTVKEARRSLKRRISNAIYRRILADQQRLELQAA

SEQ ID NO: 62347 - protein, 413 aa, unidentified
MKTNTITAVGIDVSKGKSTVAVRRPGGEIVMTPFTVIHTIEGLDKLIDTLRSVDGEIRVVMEHTGMYWRPIALALKNAGFFVSVVNAMLIHDFSDNSIRKVKTDRADSLKIANYALTFWQELRDYSVEDENRQLLKIQSRLYERTLNSSVALRNGLISLLDQTFPGVNKLFGIETRTASGHIKWVDFVRRFWHKDCVAALSLHSFADTFQKWCKRTGYHFSLSDAERIHEIARNSVATLAKNDSTKLLITQAVDSLNAVYDTLQILRGEMYRLASLLPEFEIVMSMQGAGKITGPQLMAEIGDVRRFTSKGALVAFAGVDAPPYQSGTFDSKSRHVSKRGSPHLRRVLFTICSVILQHADPENPIYQFMDRKRAEGKHFYVYTVAGTAKFLRIYYARVKEYLNAIDVQTDTVA

SEQ ID NO: 62348 - protein, 432 aa, unidentified
MNKYKANKKQNQRIARITENTLVVGADIAKRIHVARAVDFRGIELGKDCVFANDREGLTRLAAWLKLLCKAHAKTDIIFGIEPTGHYWFPLAAFLKEKDIKIVVVNPHHVNRTKDIEDNSQTKSDYKDAKVIADLVRNGKYTEPNLPTKEYAELRILMNLREKVMVNLSQVKIRIVGWLDRYFPEHPQVFRDWEGKASLMAMRRFPTPQEIVAAGARGVLADWKTSIKHGVGIKRAEQLYAAAAVSIGLTEGLAAARIELAILLEQYDLYTKQKETIMAEAIRILENIPGTNEMLSIPGIGVLTIAGFLAEVGDLGQYDHGQQIIRLAGLNLTENSSGKRKGKTGISKRGRSRLRSILFRAMLPLVATNAEFKTLHTYFTTRRENPLKKKQSIIALCGKLVRVLYALGTKQREYNPDDLLGPVRKAQLQRAA

SEQ ID NO: 62349 - protein, 387 aa, unidentified
MPKFDDLSRSLVALDQDSTLIAVIELSRSSWLVGGLVPGLAREPVKKLAADPDALLALLYRWRDQAAASGHAVMRICVAYEAGRDGFWLARWLRARGIDCDVIHPTSVSVSREHRRAKTDRLDLGLLKRSYLGWLRGERRHCSMVAVPTREEEDGKRPLRERDRLVGEATRLVNRIKGLLALHGIARFDVRSKAAPQVLPKLRTAEGEALPPNTLAELLRACERLQQIRAQIATIEAARRQQLQEAAEIGAHPMIRLVARVKGVGTATAELVVREALSRHLRDHRAVARYAGLTGAPDESGSKRREKGLAKAGNARVRRALIQLAWRFLRHQPDSALARWFRQRTQDGRGTTRKTMIVALARKLLIALWRLATAGEVPADVRLHAAI

SEQ ID NO: 62350 - protein, 361 aa, unidentified
MPIEALRAVWRSKIAIGTSSGPEWLNELKVRITREGSTKMAKHTTICAGIDTGKRKLDVAIEGHREQLQVENTPEGHEVLMAWLRQHRVKRVGIEASGGYEQPVVAELRRKRFVVVVFQPAQVRAYAKFHLQRAKNDKIDAALIAACTTAVRKIHAAPDPRLLPFAEQLTMIDQINEDTARLKNRIESCRNARINKLWQEDIARLEQREKAELKTLVASIRKHPDLAKRLELINSVDGIGLPTAVAILVRLPEIGRITREQAVALAGLAPYDDDSGEQVGVRHIEGGRKRLRRALYTASLAASFRWNRQLIQLYQRLTAAGKEHKRALVACARKMLIFANTVVARGTPWCDEPPVGSLSVS

SEQ ID NO: 62351 - protein, 370 aa, unidentified
MEQYTEAFVGIDTAKNKHALAIADPGCDGEIRYLGEIDSAPAAVQRMIRKLAGHYEKLYFCYEAGPTGYGLYRQVRALGHDCIVVAPSLVAKRPGERIKTNRRDAVTLARLLRAGDLTPVWVPDAAHEGVRDLVRAGTAASEDLRRKRQQLLSFLLRHGRIYSGRKHWTKMHLHWLAQQKFDHPAQQIVFQDAVDAIEDAATRLRRLDQQVAEIVPSWSMAPVVEAYQAMRGVSFGVAVTFVAEIGDLRRFDNPRQLMAFLGLVPSERSTGERVWRAGLTLAGNKRARRVLVEGAWSYRYPARVSQTLQARLEGLPKTVRAIDWKAQLRLCARYRRLTAAGKKRPLVIAAIAREMAAYLWAIAQHVAPAA

SEQ ID NO: 62352 - protein, 350 aa, unidentified
MQTIYIGVDFHARQQTLCYLTTDSGEILLHQLKHEDKAAVRTFYAQFSGQVIVGLEASGYSPWFERMLEELGCEVWLGHATEIRRRARGRHKNDRRDAELILDLMLHDEFPRLYLPPLQSREILRMLRYRQKLIKMRTIGKNSLQALALQSGLAKGPHLFTKAGLQELRHVTMSPAMQWQRKQWLQLLEPLNERLLETMLWLKQQSQADERISRLRTHPGVGLLTALCVVHSLEPVSRFANTRKVAAYAGLDPLERSSAERQRFLGISKGGSRVLRFLLVEAAHTAIRKDAELKRFYQRLAERHGRPKAKVAVSRKLLIRTYIMLRDEIDYAEFQRRAVAARSAPPAHGR

SEQ ID NO: 62353 - protein, 343 aa, unidentified
MQVSTIGVDLAKNVFQVHGVDSAGKVVITRQLRRKQVIDFFSKIPACLVGMEACGTAHHWAREVSKLGHIVRLMPPSYVKGYVKRSKNDAADAAAICEAVTRPSMRFVPIKSADQQALLMLHRTRDLLIRQRTQLINALRSHLAEFGLVAATGREGLAQLAAIITDESNREALPSAMKQALQAIVDQLAALELQIGTLDRAIHTHHRANDVSCRLETVPGIGVIGATAIASTVTDPSDFKSGRDFAAWIGLVPRQHSTGGKERLGGISKQGDRYLRRLLVIGATAVVRHARQRPQKHPWIMRLLAKKPAKLVAVAVANKMARIAWAIMAKGGHYRAPELAIAA

SEQ ID NO: 62354 - protein, 397 aa, unidentified
MYIVGIDIAKRKHEAAVIDGEGTVIIKPFSFTNNCSGYNRLLAMLTKAKLPLDEVSFAMEATGHYWLALFTRLQKEGFRVQVINPVQTNSIRSFYIRQAKTDPRDALLIAEVIRFGHFSESTLHPENIYELRELCRGRHAIVSMQADVKRKVVALLDQVFPEYETAFANMFGDTSMAILQTCPTPKELSEMRLEELCHLIEVSSHKRFRMAKARELQELARNSFGFAMAGDVFSTMIRLYAKHLDFLKQQVREMDRKIAEIMDTLDTPITTITGIGPTLGAYILSEIGDISRFSSAAKLAAYAGIDPTMRQSGEYNGVRNRMSKRGSPYLRHAIWLAASSAVLHDPALKLYFQKKRDEGKPYMASVGHACRKMVSIIYAVMRDNKAYTPYIPNEISA

SEQ ID NO: 62355 - protein, 387 aa, unidentified
MYYVGIDIAKLNHFASVVSSDGEVLVKPFKFTNDNDGFCTLLSALASYDRGSLIIGLESTAHYADNLVEFLVSKRYQVCVINPIQTSTMRKNNIRKTKTDKVDTLVIARTLIAQPHRFFSQEDIDLMHLKNLGRFRQKNIKERTRLKIQLTTYVDRVFPELQYFFKSGLHQKTIYTLLKEAPTPELVASMHLTHLAHLLEVSSHGHFNKEQAKELRILAQKSVGSSDRALSLQVTQSVEQIELLDRQINDVESEMTEIMLGLDSVIMTIPGIGYINGGIILGEIGDIHRFSTPCQLLAFAGLDPSVYQSGNFNASHTRMSKRGSRVLRYALINAAHNVVKNNNTFKAYYDAKMAEGRNHYNALGHCAGKLVRILFKMLTDDVAFNLE

SEQ ID NO: 62356 - protein, 517 aa, unidentified
MVHLPVCARSVLYRHENHPLRFRPGSEDRLASGHRDRGFSGRTRLGRPANFYGPRARDCMWPPLRPTRLCREHASVGVVCPPVSSAVKEGGRVRFIGLDVHRDFCEVAICEDGTVRSGPRVPTSPETLARFAENLGPGDEVALECTGNALAIARIIEPHVARVVIAHAKSVRAISWAKVKNDRIDARTLATLLASGFLPGVWTPDERTRLLRRLVGRRAQLLKHRTSAKNAIHATLQRNLVGRAPATDVFGRRGRTWLSSVELPRDEQDTVEACLRQIDFLDAEISHLDQVLAREVVDSRDVRRLMTIPGVNVTTAATFLSAIGDIDRFPTPRHLASYLGLTPRVRQSGIAEPRLGRISKEGSARARHVLVEAAWAVLKTPGPMRAFGERVAARRGRNVAAVAVARKLAVLCWHLLSTDTDYAFARPSLTAEKLRRMELVAGAESRRGWRGPGATFASKDQHARERAIVIQAETAYRRLVADRTGRRRGAGAITGARISSALQGQAARQDQGPGPAL

SEQ ID NO: 62357 - protein, 312 aa, unidentified
MAMLSFCGVDVSKDRLDMVVLPEGWFFSVSNDTAGWAELVARLFPLTVSAIGLEPSGGYERGIIRALLAAGLSVRRINPNKLRQFARARGVLAKNDRLDARLIAEYVAIMPTRVVQRDAAVERLAEIVTMRRQLCDEHVAAENQAAHLEDAMLRRLSKRRQTRLEADIRLLDKRLAEMVAANVALAQRYELLTSMPGVGPVLAFTLIALLPELGKMSRKQIAALVGLAPYDFDSGKLKGHRSIYGGRMPVRNVLYMAALSASRYSPALKTFHKRLAAADKKSKVIIVAVMRKMITTLNAMLRDNAAWQPRSA

SEQ ID NO: 62358 - protein, 419 aa, unidentified
MKIVKSKKVKNINEKTIIAALDIGKGTHYAYFRSPSGKDIKPFPFNNSRKGFDKFWVRHCQFKSEHNLDETIVGFESTGPYAEPLFHYLRKKPVKLVQINPMHSKRLKELTGNSPNKTDKKDPRVIADVISLGHSLTLIVPEGAAAQLRRLTQARERAMKRRTAAKNQLQDLVFIIFPEFLNIMKKISTKTSFYLIKNHPTPESVAVLGLNPLATIIKKISRGRLNRKRAEELYDAARKSVGIKQGRRAILLEIEYLIAQIGADNKFIDSLEKQMEVYLEKISYSQSLLSIKGISIVTVAGLIGEVGDFKRFHTISEIMKLAGLDLYEVSSGKHKGQRRISKRGRSLMRKLLFFAAINAVKSKGIMHEPYQQMLDRGMPKMKALVAISRKLLGLIFALARDNTLYDENYSNIHDYKLAA

SEQ ID NO: 62359 - protein, 344 aa, unidentified
MGNYIGIDFHKQFSQVAVMDDKGKIIDERRLDHDQREEMTAYFSQFGRETNVAIEATRNWYWLVDLLQEHNMDVKLVHAKKVRIIAESTIKTDKVDARTLAHLDRCNFLPQAYIASPETRSERELLRYHISLIKVQSSIKNRVHSILSKHNIQHNFTDLFGRAGREFLKVVELPPIFRLELNGYLEILDKVGTVLNQAKKEIERHCRAWPEADLLTTTPGIGDYGGLLLAAEIADINRFSTVKKFCCYGGTASSTHQSANTQYNGHIIKDSNKYIRFVVLEAVPHAIRKDPKLWRFYSKIEKRKGKKKAKIATARKLLVIIYHMLKNRVPYKIAHNDHIRQANP

SEQ ID NO: 62360 - protein, 401 aa, unidentified
MSTRQARAWVGIDAGKGHHWAVAVDADGETLFSTKVINDEAQILALIETARERAEEVRWAVDISGRASTLLLALLVAHGQHVVYVPGRTVNRMSGAYQGEGKTDAKDARVIADQARMRPKGFAALDTPPELVTTLRVLTNYRADLIADRVRLINRLRDLLVGMCPALERAFDYSAAKGPVVMLTEYQTPAALRRIGVKRLTTWLERRKVRGADTVAAKAVEAAQSQQIALPGEKRAAKLVCDLAHQLLALDERIKDNDREIRETFRTDDRAEIIESMPGMGPILGAEFVAIAGDLGGYKDAGRLASHAGLAPVARDSGRRTGNNHRPKRYNRRLRHIFYMAAQTAMMRPGPSRDYYLRKRSEGLIHTQALLALARRRVDVLWAMLRDKRPFTSAPPVTQAA

SEQ ID NO: 62361 - protein, 444 aa, unidentified
MGKAKIAKAIIDLVRSNAAGIDIASEVHYVSVPDDRDSPSVRKFGSFTEDLHKMAQWLKQCNIDTVAMESTGIYWVQPYLILEEYGFEVYLVNARHIKNVSGRKSDVQDCQWIRQLHSYGLLNRSFQPESLTRELRAYMRHRKHLVESTANQILHMQKAFEQMNIKLHDVISDITGQSGTRMIKAILEGERDANTLAQLADGRIKATQEQIVKSLTGVWREEHLFELKQAFDLYQYLNLKIIECDAQVTNVLTRLIGNNSSNEIKRHKRSHKNSFHFDGTKYLKQILGIDVTRIYGISEITATEIISEVGTDMSKWSTEKHFVSWLNLAPNNRITGGKMLKPKKTNKRNKAGQAFMMAAATLKNSDHWLGAFYRRIRARRGTGIAIKATARKISLIFYKMLKDKIEFDPLSIETYNQYFKERRIKSIEKQAHSLGLKLVPIFVS

SEQ ID NO: 62362 - protein, 405 aa, unidentified
MNAVGIDVSKGKSTVTIRKPGDVVIMPPCDIPHTQSAINTLIKQIKSLEGETKVCMEHTGRYYEPVASWLSDAGIFVSAVNPILIRTFGDDSLRTPKTDKADSKKIARYALDRWAKLKQYGSMDKTRNQLKTMNRQFSFFMAQKTAMKNNLIALLDQSYPGANDLFDSPARSDGSQKWVDFVYTYWHVDCVRGKSLSAFTEHYRKWCKHKGYNFSAEKAEKVYEASCDLIAVFPKDDNTKMLIRQAVAMLNTASETVENLRIKMDETASALPEYPVVMAMNGVGSTLGPQLMAEIGDVTRFTHREALTAFAGVDPGKNDSGKHVQKSVRTSKKGSPHLRRTLFQIMDGLIKRSPIDDPVYVFMDKKRAQGKPYYVYMTAGANKFLRIYYGRVREYFASLPETGEN

SEQ ID NO: 62363 - protein, 403 aa, unidentified
MGTVYAGLDWASRTHAVCVIDERGAVCVQFDVTHDAEGLRELVHRLRGAGVKRIAIERPSGLLVDALVEAGFEVVPIHPNAVKASRPRYRSHGGKSDASDAYLLADLLRTDGHRFKPLAAQSDDIRALRALVRGRDDLVATRVQLANQLRSLLQSYWVGAAEVFADMDSPIALAFIQRYCTPESASRLGPKRMAAFCAQHAYCGRRSAEELLARLRQAPSVVLSELEMDAKGELASSLARTLSTLVEQIRLLTSRIEYHVANSDDGRILMSFPRAGRICAAQILAELGSVRERFDSDEHLAAEAGVAPVTYASGKHKAVTFRWACNHRLRTAVTCLADNSRHASAWAASIYAKARTRGCKHPHAIRILARAWLRVLWRAWMDRKPYEPALHGGLQNLLTTGGG

SEQ ID NO: 62364 - protein, 347 aa, unidentified
MNKHSKTGSIKVVGIDLAKNIFHLHGVDAHGKVVMRKKSSRSKLAAFMANIPPCMVGMEACGGAHDWARKFRVMGHDVRLMSPQFVKPYVKSNKNDTLDAEAICEAVGRPNMRFVPIKGIEQQDIQSLHRAREQAMKNRTAQSNQIRGLLMEYGIVLGKGVANLCKALPGVLEDADNGLTPMFRELLYGLSDELRRLEERIAAYDTQIKHLSAQSEACQRLLTIPGVGPMTATALAAAVGDARAFANGREMSSWLGLVPRQCSTGGKPKLLGISKRGDTYLRKLVIHGARSALQFADRKQDVRSRWAVDVRGRRGKNIAAVALANKMVRSAWVLLSRSEEYKMAAAV

SEQ ID NO: 62365 - protein, 265 aa, unidentified
MEDIIYDHYIAIDWAAKNMAIARMTKKSNKITAIDVPSDIVELQFYLKNLKGTKILAIEETTTSQWLYTELKDYVDKVLICDPYRNSLLQEGPKTDKIDATKLVQLLKADLMKEVFHSTDKFIYLRRIVSGYEDLVKSGVRLKNQRYSMLRVCGKSGYEKKGIKLASRDEQYVLECLDRQTQNYEEEKKGYEKEFARLARKHPEIRHQKSIPGIGLINAVKIVARVVTPYRFSGKGHYLSYSGLIKHEKMSGGRSYGKKIHDTAE

SEQ ID NO: 62366 - protein, 348 aa, unidentified
MKFYTQQRDFYCGIDLHARSMYLCILDREGKIVLHHNMASAPEPFLAAIAPYRGKLVVGVECIFCWYWMADLCAAQKIEFVLGHALYMKAIHGGKAKNDKIDAYKIASLLRGGNFPLAYAYPSQMRATRDLLRRRMRLMRERAQLLAHVQNTTSQYNLPEIGKKIAYKANRAGVAERFVDPAVQKSIAVDLALIDYLDKALNDLELTLTRLAKQHDAQVFHRLRSVPGIGKILALVMLYEIQDITRFPRVQDFVSYARLVKCAKESAGKHYGYSGKKIGNAFLKWAFSEAAVLFLRGNEPAQKYVARLARKHGKAKALTILAHRLGRAVYHMLKRGEAFDTERFLAQT

SEQ ID NO: 62367 - protein, 411 aa, unidentified
MSSMNNDVVAGIDVHKAMLAVVVARPEQTETEYMSRKFGAGRWQLKELVEWLQQLGVRRVAMESTAQYWKPVWYALEAQFQLILAQPRSTAAPRGRKMDFADAKRIVRRLLADDLTISFVPEAEQRRWRLLTRARTTSMQQITRLRNQIEGLLEEGQIKVSGLLSDLLGLSGWRMLQALAEGESNPEVLAKMAHEHVHASQEQLREALDGRMDSAHRLLLRQSLDQIEQLRKHVGELDEEIVHLFEQQQEAIGRLCAVPGISLTAAFQVVAEVGARAQTFASPGKLASWAGLCPGREESAGVSVNNRCARGNRTLKRVLTQCAWAAVRNQKSQFFRLFQRWRAQIGARKAITAVAHRMLLVIWKLLHEGEAYVDSGCQLSPETIRRRMLKCVKKLESLGFRVTIKAADAPA

SEQ ID NO: 62368 - protein, 320 aa, unidentified
MSDSLDIGVDVDSKEFVPAVADRKAGDRIANTRAGIAQWLNTLPQRCRIGMEATGRYYELLARMAGQAGHVVYVINPRLIKHYGRATGSRGKTDAMDAEAIARYVKKENDRLREYVPRTDEQQQMHDLLRKRQTLVKTRARLEQSFGVSKSAPGELSDLFCALAGTLSELESELQRLARDGEHGTLYKRLLTIPGIGPAVAAHLIYYMTRWPLANANAWIACTGLDPRPNESGGRTGRRRLSKQGAPVLRQMLYMAAMGLKRCRRGQPLYDELSKRGHPSTAVFNILARKLARIAWGVFKSGRDFDPAMLKVGQACFQQA

SEQ ID NO: 62369 - protein, 408 aa, unidentified
MNTLYVGIDISSKSNVVYMMLPNGDKHSNFSVASSHEGSIQLVKRIYSALTSHSLDTVLIGLEATSVYGDNLVYFLREDATLAPFNSRIHVINPKQVKRFHDAYNDLPKNDYVDSFVIADCLRFGRINKEVYSGDYRYQALRNLTRARFFTVQNLIKEKQRFMNVLFKKYSTMTQEKVFSNTFSATALAVYEEFDSAEALANMDLHELTDFIIEKGKNRFQNPDAVAKAIQKAARSSYRLPKTVNDSVNQVFSISITSMKALESQIKEFDKAIKVQTELLPNVLISIPGICPVYSAGIMAEIGDINRFDNQAALAKYAGLAWKQYQSGGFEAEVTRLIPSGNRFLKYYLCEAAFSLVRCDKEYSDFYHLKYKEVNRCQHKRALALTARKFVCLVFRLLKDNRLYCPAK

SEQ ID NO: 62370 - protein, 350 aa, unidentified
MSQNLNSAVAVIGIDIGKNSFHVVGLDDRGAIVLRQKWSRGQIEARLANMPPCLIGMEACVGAHHLSRKLKALGHDARLMPAKYVRPYSKGQKNDFRDAEAIAEAVQRPTMKFVATKTADQLDLQALHRVRERLVSQRTGIINQIRAFLLERGIAVRQGQRFLRAELPRILATPPDVLSARMVRLISDLAEDWRRLDQRIDCLSSEIAVLARQDAGCERLMSVPGIGPIISSAMVAAIGTGDAFAKGRDFAAWLGLVPKQISTGDRTILGKISKRGNRYLRVLFVQAAWVVLIKPMSWERHGLKHWIEAARKRLHRNVLAIALANKLARIAWGVLAGSGRTFEASKRQAA

SEQ ID NO: 62371 - protein, 411 aa, unidentified
MENVFPCCAGLDVHKESVEACVRRIEPNGRVHSETHHWGTMTGDLMAMADWMTAQGVTHVAMESTGVFWKPIYNILEGRFTMLLVNARHLKQVPGRKSDVRDCQWIAQLLQYGLLKASFIPPRSQRELRDLTRHRTQLVEEKARAANRIHKVLQDTNIKLSSVATDVLGASGRAMLEALITGEEDPVKLADLAQRKLRGKIPQLEKALEGHLTEHHRFMLKLLWKQLAQQEELIAELDSRIEEQTRPFAAEIDRLDAVPGVDRRVAEVVLAEVGPDMKAFPTHENLASWAGMCPGNEESAGKRVRKRITPGNRWLKRTLAQATWAASHSKNSYLASQYRRLAGRRGKKRALIAVGHSILVIFYHMLKTGTSYTDLGGDFFDRLEPQRLTRYYVKRLESLGHKVTLESRAAA

SEQ ID NO: 62372 - protein, 400 aa, unidentified
MRVVFGIDVSKASSEVAILVNGEKVHGYTISNDAIGFSRLLGDLRTVHKPEIIFEATGVYSRRLQTFLDDNGYAYTRLNPLEAKKQLDSLRVRKTDQIDAEKLAQSQFVLNRKPTYVQEEVYQNLRDLSRFYQNLTEDIVRAKNRLHKVLQVTFPELENILSTPSGEQYWNLVIAFPCKDCVLELSNDELSKSIRLSTSKRISDKRVAYLAEKLIALANQSYCAVKKTSPILEEVRYYTKELLRLSEQRQAVLDEMVELAQPLPEYDILLSIPGIAETTATSIIGELGDIRRFQSANQINAFIGIDLRHYESGNFLAKEHITKRGNPYARKILFKCIHNIASANHTNPCHIADFYKKRKRQSQTTSTKLHTIASIHRLIRTMYYLIMHNKFYDYASTQNR

SEQ ID NO: 62373 - protein, 353 aa, unidentified
MQRPKQGQVVVGVDTHKEIHVAAAVDRRGTPVGEECLPTTRQGYRQLESWARSLGDVLRVGAGCSGSYGSGLTRHLAKNGFAVLEVTFPDKTVRRKRGKDDFIDAEMAAEAAFTGTRTVTPKSRDGMVEALRMLQKTRSTAVAARKVALQTIRADAMSAPEGLRGQLRGMTRMRPIRRLAATRPGSTDFRTPLGAAKIALKRLAKRHVDLDDEVSELDDMIAAILADAAPPLVQLKCVGAQSAARLMVTVGDNPERLGSEASFAMLCGVAPVPVSSGTTYRHRLNRGGDRQANSAIHIIAIGRLRTDERTKEYVAKKMAEGHTKMEAIRCLKRYIAREVYYTIKKQRELVNCS

SEQ ID NO: 62374 - protein, 348 aa, unidentified
MLADQLDYVVGVDPHRDSHALAVVQVVSGVVVFEATVVASSDGYAQALKLADQHAPARRAFAVEGTGSFGAGLTRFLTVRGERVLEVGRLRRERRSGGKTDALDAVRAARNVLTSERPATPRAGGERQALQALVAAREGAVNAKRAGLCQLRDLLITTPEPVRSELRPLTRARLLQRLAATRPDGRRDPELRGSMLALRSIARRVLQLTAEERELAREIETITRRLAPQLLDQPGVGPHAAAQLVLSWSHRGRIGSEAAFARLAGAAPIPASSGQTVRYRLDRSGDRKLNRALHMILVTRKRSHPATITYIERRLQEGKTRREANRCLKRYLARSLYRLLEHGAPLAT

SEQ ID NO: 62375 - protein, 343 aa, unidentified
MKLSRVGIDLAKNVYQLHGVDRFGKTILKRRLKRHQWFKVLLDKTEPDCVIGMEACAGAHHWGRELQALGYTVKLIPPQFVKPYVKSNKSDAKDAEAICEAMSRPNMRFVTVKRVEQQDIQATHRIRAELMTQRTAKANQIRGLVAEYGLVAPKHLSSLRAAIPCWLEDAENGLTGDFRALLQGVWTDLLLLDDRVCEMDQTIKRLADNNEDCVRLQQLRGVGPMISTAMIATVGDARQYHKSRQMAAAIGITPKQHSSGDKHRLLGISKRGDVYLRTLMIHGARAVVARATHKDDRLSRWVTNIANKKHPNVAAVALANKTARMAWAMLRNETDYDPDYAIS

SEQ ID NO: 62376 - protein, 338 aa, unidentified
MKVVKQNVGIDVSKKELAVCLTFVRENLSIIIKGTRKFSNNESGFKAMMEWLERKKDSALPLHFTMEPTGVYHENLAYFLNDMEQLVHIVLGNKAKKYAESLDINSKTDKLDSKALSRMGVERTLEPWSPGSPIYRKLKVLTRERSAVLKLRVMIKNQLEAMLHSAFPNKKSTNRLKRLINEFNSQVEKIEKDIEKLVENDMELKSRILKVTTIPGVGFLTAVIVIAETDGFALIKSIKQIVSYAGLGIKIRESGTWIGKAKISKAGNVHIRKALYWPAYSSIAHTQTYKAFYERLFSRKEISMVASVAVQRKLLGLIYTLWKNGTVYIDNYESQKVA

SEQ ID NO: 62377 - protein, 479 aa, unidentified
MIRSVGIDLSRTGSHQVCCLDEQARPCDSFSFDSTLEGLEKFEKRVFLEGATPTIVFEPTGLAWIPMAAYLRARHPDCQLVKARLQKVAALRRYLHSRAKSDRVDGVTLAKMPFIDAEQLDEAYLPPAEYHALQRLTRQRERLMKSITIHKNRIGAIINGYLPGLRKAFTDEWSDRARLFYRQRLNPFTVVCDGKDAFETLFVSAKAKGAVTESNRVYQICQKLVELYDKSRAAGMINEDFFDDLQDEISCELRLMETEEAEVERVSGRIEELYQHLHPSDHLRTIPGIGVRTAQVFLAVIGDPNRFRNQSAFANWTGVVPGARQSADSEGKGLRMTKAGPAMMKRALYQAGDIARRYDPQLADLYYREMVHHGKTHLQAMGAVMSHLAARILAVLQENRPYELRDNQDRPISKMEATGLIQQFRVPEGTRQARRRRKANKGRPTGRRTREAARAPQSGLLIPPLRTVYCAEEFQSMAD

SEQ ID NO: 62378 - protein, 422 aa, unidentified
MGGLGSSKVFIIEVEEVSGLIFVGNDWAEDHHDIHVMTADGKKLAARRFPEGVAGVSAFHALVAEHAENPEEVSVGIETDHGLWVTSLVAAGYRVYAINPKAVARYRDRHHVGGGKSDAGDAKVLADLVRTDAHNHRVVAGDSDHVQAVKVLARAHQALVWSRTRENNRLRNALREFYPAALVTFQDLHDRDTLAVLTRAPDPVTAARLTLSQVKAALRAGGRSRNLDTTAEKIQALLRTEQLHAPAAVASAYAAVVSAQVRVITALNTQLAALETELESHFEQHPDADIILSLPGLGDILGARVLGEFGDDPERFAHAKSRRNYAGTSPLTIASGKKRAVLARHARNQRLYDAIDQWAFCSLQASPGARAHYDARRALGDTHHQALRTLGNRWVGILHGCLKHHTRYDEHTAWGHRQPAAA

SEQ ID NO: 62379 - protein, 410 aa, unidentified
MAERFVGIDVALRAHRIAVLDRDGEAVGQSFTIAASTDGVATLLRTLAARGATAAQSLIGLEASGHLWENLEAALVGAGYRVIVLNPLQTRRYRDVVRRKAKTDDIDAHVIAGLLRSGAAQASYVPDEPIQSLRELARLRARLMADRQDYQRQLIAQLDVVLPEHHAVLGDLLTARARGILAQFPTAQHLAHATPRAIRRAAEDAGARGFSLTDATVVRDSARRSLYSGKAAAARAHVVRTLVSQLERLTSAIDEVDRAATALLPPSEPGTGPSDAELLQTIPGIGPQTAATLLGELGALTRFTGARALVAYVGFYPVLNESGDRAAPPRLSRVGSRLARRSLYLAAVNAVRRSGEWRTIYLRKKAQGKTAKQALVVVAVKLLHAVYAMLKHRQPYNPSRLLVAPATIRT

SEQ ID NO: 62380 - protein, 348 aa, unidentified
MAIGMIGLDTAKAVFQVHGVDESGRAVLKRKLRRNELVAFFAQQARCTVIIEACGAGHHWARLLTGLGHEVKLIAPEAVRPFVKKGKKNDAADAAALCVAGSRPEVRFVPIKTMEQQAVLALHSTRSLLVKQETMLANALRGLATEFGLTVAKGLHKLEELIALVSADESLPATGRQVMEELYAHCRAVAERLAALEAQIVSHARQDETARCLATIPGIGPITASLIAATVGDNIAAFRSARHFAAWLGLVPRQYSTGGKVRLGRITKAGNTEIRKLLVLGATSMVWRAAQWNGKAGAWVRGVLERRPVRLATVALANKMARIAWALMTRAEVYQAQGRALATAQAAA

SEQ ID NO: 62381 - protein, 364 aa, unidentified
MKKLTIAATNWMEQQGLTMGLDLGDRSSHYCVLDESGRIVVESKTATSPKAMEAVFGGMTGSRIALETGMHSPWVSRLLSQLGHEVIVAHARNVRRIGESRKKDDRLDAQTLARLARIDSELLCPVKHRSAKAQADLSLIRARAGLVRARTALVNTARGLAKSYGQRLRGCNVRNMNPEKAEALSPELQAALQPLLAGIEAVSEQIVEYNERIEKLAQQNYPEVKLLKQVKGVGTLIALTFLLTLEDPHRFGKSRDVGCYLGLQPGRRNSGQSEPQMHISKEGDPYLRTLLVQGAHHILGPFGADSDLRRWGLKLAERGGKNGKKRAVIATARKLAVLLHRLWVSGDVYEPLRNSHQTAMPAAA

SEQ ID NO: 62382 - protein, 360 aa, unidentified
MPIQSNELNFKGQNIYIGIDVHLKSWNVCVYVGRLKIKPFSQTPSAAVLKSHLETNYPGGTYYSAYESGFCGFSVHYELLRHGINNIVFNAADISDTSKERMRKTDSTDSSKIARNLRKGELSAIHVPSEQEISDREVLRTRMTHVKMCVQTKMRIKSLLYIKGIRYPDTFEKPGTHWSRNFVSWIENEASLLPHEGGRSLLIQIENLRFIHNQILKATRELRKIMTQPRYQDSYKLLMSIPGIGFLTAATFLLEAGDISRFASNDHLASFVGFVPDTRSTGEKDIAIGVTSRSNHRLRTMFIESAWSAIRQDPALTLAYTKLVSRMEPNKAIIRIGRKLLNRVAYVLRTRKPYVKAVVQ

SEQ ID NO: 62383 - protein, 443 aa, unidentified
MEVVYRRCCGIDVHKDFITACVLVNEPGKQREVRKKEFRTYWRDLQKLKLWLYASKVEQVAMESTGVYWKPVWNVLEGHFPLLLANPHHMRNIPGQKTDQKDCEWISDLAAHGLLKPSFVPPRPVQELRDLTRYRAKLTGERNRVHSRIEKILEDANVKLGSVASDILGVTGRRVIEAIIAGQEHPDWLADKACGTLRAKRDQLRLALKGRITDHHRYMLGELMADQDRIEAKILRLEIEIADRMKPHAGAIERLMTLPGLKLISAWSIIAEMGTDMSAFPDAAHAASWAGLAPGNNQSGGKRRSGRTNKGNRWLRRALVQSAWAVSHKSNCFLTAQFHRRAARQGEKKAIVATAHQLLVIAFYILRDGTVYREKGGNYFDQLNPERTKRKLMVRLERMGFDVILRNSTSTPVPSPSPPPSARRRGRPCKCVERGIDCKHRQQ

SEQ ID NO: 62384 - protein, 493 aa, unidentified
MTTTAIVSVSDSEQTAITRERVYVGVDVGYRQHVAAASPLSVFTLRNPNGWRRVKTVRFGSDAAGFAQLQRYLDKHSTTATDFLVLLEPTGGYYALALILYLLGKGYRVVQVENRAVKDYREKVFGSETKADETDARLMARMGFLHELVGEEFSIRPVHLTNPDAAALKVMVGDLSTLQKEITRRRNQLQQITAATFPELKTFFRDSTASPTARALLASFPTPQDLAAATTEEIGDVMRVARSYRHAKRAGELRELAKASAGVRMLTQQHWRQSWIIKQIDVLEEARRDLVEQVQRISAEHRYTPIIESLPVKSPIWTATLIAVIGDVGRFRNYAEFRAYIGWSPQVERSGSSLDSSKLARGGVRLSRKVLGQMVMIMLAPVIRTTAFRAYYERLTARGMRPAKAMGHVAGKLSAVLYSMLKTMTPYDEPKHRKELGLAEAFDVVADATVDAPLDFIGSFDDDVEFLEDGAGPTEPQDDAGSPSNVRSLPSLT

SEQ ID NO: 62385 - protein, 369 aa, unidentified
MAKSITYVGLDVHKDTIAVALAAAGLRGEVREHGKIPNAPGALRALAVKLAAAGRELRFCYEAGPCGYGVQRQLTEAGHECAVVAPSLIPRKPGERIKTDRRDAINLAKLHRAGELTPVWVPDQAHEAIRDLVRARQAAVRSLRQARQQLSGFLLRHGRHYHRPAWTQLHRRWLAGLKFDQAVHHIVLEDCIAAVEAAMARRDRLEAHIEAVLPEWSLAPVVDALQALRGVRLVAAATLVAELGDITRFTNPRQLMAYLGLVPSEHSSGRTRRQGGITKAGNGAARRMLIEAAWSYRFPARIAREQLLRQERLAKPIRDIAWKAQERLCRRYRKLARTGKQPTVITAAIARELAGFIWAIAKQVPPMAT

SEQ ID NO: 62386 - protein, 354 aa, unidentified
MSQKLNAEIAVIGIDIGKNSFHIVGHDPRGAIVLRQRWSRGQVETRLANLPPCLVGMEACVGAHHLSRRLRMLGHDARLMPAKYVRPYSKGQKNDFRDAEAIAEAVQRPTMKFVATKTADQLDLQALHRVRDRLVGQRTGVINQIRAFLLERGIAVRQGPHSLRTELPGILATRTDVLLPRMLRIIEDLAGDWRRLDARIEGLSGEIEALARQDQACSRLMTVPGIGPIISSAMVAAIGTGEVFSKGRDFGAWLGLVPKQMSTGDRTILGKISRRGNRYLRALFVQAAWVVLVRVKNWERYGLKSWIEAAKKRLHHNVLAIALANKLARIAWAVLNKGRAFECVKTEEMASRPA

SEQ ID NO: 62387 - protein, 421 aa, unidentified
MKEKVSAMNQHSHKDRPVLPDGRHVVGIDIAQKLHAAAGVTTVGQDFGRMLSFSNNRAGVDRLEQLLLTPLGGAAKILIGMEATGHYWMPLYFELRRRGYEAIVINPIQTRGKLRSCIRKTKTDRLDARSIARLVLSGEAKAARIPDESNFELRLLTRHRARLTSLCGDLQRFAYSLIERIFPEYADVFCKPLLPTGCALINELGLSPSLLASQPDQVSALIRRASRNTVAHTTIRTLLERAAQSIGIRKAEQVIVEQLRSVISLVETIESQVETLDQELARRVAALSSPLLSLGLHAPLVATIHAESDPIADFRRPWQYAAYAGLEPSTCESGNFKGSRAHISKRGSPYLRHALFLAASTLYRRHKELQRLYQRSRKAGHHHTDAIVIVAHKLARIIWRLLTDNRPFRAIAPKPARAKAN

SEQ ID NO: 62388 - protein, 354 aa, unidentified
MSQTPSTAIAVIGIDIGKNSFHVVGHDTRGTIVLRQKWSRGQVEARLANMPPCLIGMEACVGAHHLSRKLASLGHDARLMPAKYVRPYSKGPKNDFNDAEAIAEAVQRPTMKFVATKTAEQLDLQALHRVRERLVSQRTGIINQIRAFMLERGIAVRQGIGFLRTELPTILATRTDALSPRILRVIEELTGDWRQLDQRIDSLSGEIEALARQDQACSRLMTVPGIGPIISSAMVAAIGTGDVFSKGRDFGAWLGLVPKQISTGDRTILGKISRRGNRYLRVLFVQAAWVVLVRIKNWERYGLRSWIEAAKKRLHHNVLAIALANKLARIAWAVLAKGRAFELTRTNDADVRPA

SEQ ID NO: 62389 - protein, 356 aa, unidentified
MKTRTASTTTIVALDLGKYKRVACLYDGDPAAAFVSFPTDRGRLRRLFAEHRPAAVVLEACLLAGWVHDLCHELGLPCHVANTASEAWKFKHAKRTTDRDDARRLAQLFALGPLPTVTVPPPATRQWRAWIASRQALVGRRVAVPNRLRALLVGQGLAAPRGAKAWTELGLEGIGPCAKPLAECGPDALWRGLLDLALTELRQIRPLADQAEARLDQLAKRSAAVRLLETAPGVGPRTAEALVAHLHEPGRFASGTQVSAYVGLVPRQYQSGELDRRGRIPRRGPALLRELLVECAWVRLRYNRWARAVYPRRSRGQARKKQALVALARQLLGRCWALLRDRTPWRDSTPAAAAPA

SEQ ID NO: 62390 - protein, 332 aa, unidentified
MNYNTVYVGMDVHKESFSLCAYTIEAEKASHYQRTEADYKKVLNYLEFLRTIYGDDANFICGYEAGCFGYTLYHQLTANNVKCIILAPTTMLEQRSKKRIKTDRRDAEIIAKCLAQHNYSPVHIPTAKDEETKEFLRMRDDHKLALKKVKQQILAFCLRHNYRYDGKSHWTAAHLKWLKALTPEALYKEILDEYLLTYQTLSDKIERLDKRIEELATQDEYREAVKKLCCFIGVKTHTALSVLVEVGDFKRFASAQHFASYLGLVPGEDSSGDDQNRLGITKAGNRHVRLLLTEASQCYARGQVGFKSKELKSRQSGNTPQSSLMLTKLTSV

SEQ ID NO: 62391 - protein, 355 aa, unidentified
MDSKKYIGMDVHKESISIAVMNGAGKIVMECVIETKASMILQFIDGLRGDLQVTFEEGTSAAWLYDLLKPHVAKLVVCDPRKNASMKEGNKSDKIDARRLAELLRLNHLNPVYHGEHGLRSLKELVRSYLTITKDLGRVMSRVKAIYRSWAIPCTGKQVYAPRHRAEWLGKIGEPGVRRRAEFYYQQLDALRAVRQQVRRELLAEGKKHKAWKQLCQIPSIGPIRAAVLLGILQTPHRFRSKRQLWTYSGFGIETHSSADHRNVDGQLQRAKKHISIRGLNRNCNHDLKNLFKGAAIVASSKPGPFQEFYTALLTKGIRPEMARLTLARKIATIVLMVWKRGACFDAQHLKPQTA

SEQ ID NO: 62392 - protein, 325 aa, unidentified
MSLSVLGIDVSKDKLHLALLKDEAAKPLHKTCPNSDAGYQEMVRWLEARKAGQVQVCLEATGWGEEAACAVLVSAGHRVSLLNPHAVRQFAGVVSPRTKTDKKDAEVLALYGLRNQADLKAWEPPPPEYLVLRELVRRREALVGMRTQELNRLQHPPATQTVQRSLGELVAHLDKQIADLEREIDDHVDKHPGLKHRSELLQSIKCVGPILAANFLAEANTLVDYFDKPRQLLAYCGLTLKRKQSGTSVRGRPKMCKYGNRALRGALGMPAKTAMQWNPVVKALAKRLLDQNKPFKVVWGAAMSKLCTLMFVVVKKDQPFKLQTA

SEQ ID NO: 62393 - protein, 345 aa, unidentified
MQITTIGLDLAKNVFQVHGVDAEGTVVVRRKLRRTQVREFFVGLAPCLIGMEACGTAHFWARELIAMGHRVKIMPPSYVKAYVRRGKNDAADAAAICEAVMRPHMRFVPVKTEEQQAALMLHKTRELLVRQQTMLINAIRGHMAELGMIAPQGAAKVKDLIAVIQESEDQSIPALARAALQPLVRQLHTLDEQVEILDREIKAWHKTNETGRRLATIPGVGILTASAIAATVPDPSFFKSGREFAAWLGLTPRQNSSGGKDRLGRISKKGNTYIRRLLVTGATSMLRYARAKTAAGADWVNGLLQRRPARLVTVAMANKTARIAWAVMVKGENFRVPVRPMTEAA

SEQ ID NO: 62394 - protein, 318 aa, unidentified
MTRIICGVDIASATLTARIGRTGAWREFANSREGISELADFCQSQGVQLVAMEATGGYEKRSYVQLTEHGLGVAIVNPRAVRQFAQSMGALEKTDAIDAGMIAWYAETKQSQPLSLAPKAQLELRARVTRLRQLTEVRTAQKNQRRLVSLPAIEKSFEQMLGFLAQQIAELEQAISELIEADPLWREFDRAFRTIKGVGDRTVANMMAEMPEIGTLSNKTISKLAGLAPLANDSGNHQGKRSVRGGRGVVRDLLFIVGSVVGRHEPDFIAMEKRLRTANKPPKVVRIAVAHKLLVRLNAKAREIRQSHAQKQALVCPC

SEQ ID NO: 62395 - protein, 430 aa, unidentified
MDEGNRNRLEEFRQLRREIRQSEEHLIVGIDIAKDRHHAFFGTATGKTLLRRIVFSNDHEGFRKLLDQTEALRVQHGLKRVVYGMEPTANYHKPLGEYLIKLGRMVVLVSGVTVARNRESLDGRWDKHDGKDSANVADLISQGKCLYYEHPLAELRGLRGLLSLKRRLKKQEHGYRVRIRNHLIAQYYPEMDRDYERLGAEGLSIVRWCLAASEIAQLDVDPFIERVTSRRITMEKRRRLEEIWEKAAGSIGCDGVPGVDHEAKIMVEGLRQIREMIKETEQKIEELCKAFPEYQYLLTIPGFGPDVSAKVLGAIGDPDRFQNGKQVLKMGGLDLSADRSGKDSDRAIPEISKRGKADLRYALYQAALIASFKNRDVMIYYTNKIRGREREKGIHVKMRVKLAAKLLVIAWTLMKKKEPFNPVYLKAELN

SEQ ID NO: 62396 - protein, 479 aa, unidentified
MAERRIVGVDLGIASAHTVVVLTGEGTEVCRRRCIPTAESLGWIEQQALDGAPEGTVLEVVLEPTGPAWLAPTVFFGRRGHAVYRVSSQKASDLRKFLSRHAKSNSIDALTLARLAIVAPQSLRPVELPGAGRATLDRRVRACDRLTKEASQHKIRIKDLVRQLLPMTPLTGELGQADLAVLERWADPNALLRAGRARLTAVIAKASNNHQGAERAEEWLAAARASVELYEGDSAVAFSDLAAEVATEVRILRAIQAELASHAEVREAAYRRVDSEGLARSLPGVAEVGGPVVVSVMGRPGRFARAEQFKSFTGLVPRASETGESDRKGQPMSKAGSSMLRSQLMRSADTARTSDPELARIYYVQMVERGATHTKALCVVAAHLAERAWAVMARGTPYVIRDTDGRPVAKAEAKAIIAEHWTVPEDVRRRRRNKKVRKVPHQVLVGHVSRARGAVPRRPSPLASSALGATASTTQGGGA

SEQ ID NO: 62397 - protein, 321 aa, unidentified
MAKHTTICAGIDTGKRKLDVAIDGSSEQLQVENTAEGHEALLTWLRQHRVKRIGIEASGGYEQPVVAELRRKGFVVVVFQPAQVRAYAKFHLQRAKNDKIDAAIIAACTAAVRKIHAAPDPRLLPFAAQLTMIDQIGEDIARLKNRIESCRNETINKLWQEDIARLEQRERAALKALVAAIRKHPDLAKRLALISSVDGIGLPTAVAILVRLPEIGQITREQAVALAGLAPYDDDSGDRSGVRHIEGGRKRLRRALYTASLAASFRWNPQLIQLYQRLTAAGKEHKPALVACARKMLIFANTVVARGTPWCGEPPGSLPAS

SEQ ID NO: 62398 - protein, 323 aa, unidentified
MQGKVLLEARSALTVYVGLDVCKAYLDVYLHPLAISCQVTNDPDGIRRLKRLLAKHDVKLVVMEATGKYHRLAHRSLSQSGFAVAIVNPLRSRLFAEAIGTLAKTDRVDAKMLAILGEALGPQARPPAPEALEALQELVHAQNAATEERTALANRLAASQLAVLRKELKRRLKSLDGHIERLAAEVAERIAADPALARRYEILVSIPGVGPGVAANLIVDLAELGTLDCRAIACLVGVAPFADDSGDATGQRHIKGGRANPRRALYWAALSAKRYNPDLRRFYQRLLAVGKKRKVALTAVMRKLVILANSLIKEDRLWVNHCA

SEQ ID NO: 62399 - protein, 345 aa, unidentified
MQTITTVGLDIAKSVFQVHGVDAQGKVIVRRQLKRRYVLAFFQKLPPCLIGIEACASSHYWSRELQALGHTVRLMPPAYVKPYLKRQKNDSADAEAICEAVTRTNMRFVPTKTVEQQSCLMLHRTRHLFIRQQTAVINAIRAHFAEFGIVAPVGRTGVEELLKIASDGNDKRLPDVARVCIAALGAQLQMLKARILEFDRLIMAWHRSNQVSKRLDEVPGVGPALATALVGSIADPKAFRSGRDFSAWIGLVPKQHSSGGRERLGGISKQGDRYLRSLFVAGALAVIRYAKKRGSKHRPWLAALLARKPTKVAAIALANKIARMAWAMMAKGERYKQPVALAAAW

SEQ ID NO: 62400 - protein, 348 aa, unidentified
MAHFVGLDVSVKETSVCVVDDTGKVILEQKVPTEPADIITLLSSLGVSYGRIGIEAGPLSQWLVNALTVAELPVICVETRHMKALLAAQQINKTDRNDARGIAQMMRVGLFKPVHVKTLVAQEQRMLLTSRKLLQRKLLDLESDLRGTLRNFGLKVGVVSGGRYEARVRELIAGFPRLAAIAEPLLKVRQVMRQQLAVLHKMLLDTVRDDPVCRRLMTAPGVGAVVALTYRATVDQPQRFVHSRAVGAHVGLTPKRYQSGEIDYDGGVSKCGDALLRTMLYEAAQVLLTHGSKWSWLKAWGVRVVQRRGMRRAIVAVARRLAVVLHRMWVDGSEFRWSKDSAAVPTAA

SEQ ID NO: 62401 - protein, 344 aa, unidentified
MDHFAGLDVSVKETSVCIVDDTGKIVREVKVASEPEALLAVLKNSAYHFKRIGLEAGPLSQWLFSALAEADLPVICVETRHMQAVLKAQINKTDRNDARGIGQMMRVGLYRPVHVKTPRSQKLRMLLTHRGLLQSKAIAIENDLRATLRNFGLKVGMVGKVKFEARIKELVENLPDLAALVEPLLIVRRVLREQIVILHRRLLAIVRDDEVCRRLMTVPGVGPVVSLTYRATVDVPARFHKSKAVGAVFGLTCSKYQSGEIDRSGRISRCGDEMMRVMLYEAAQSMLRSKKWSWLKAWAMQIVRRRGMKKAIVALARRLAVIMHRIWVDGTEFRWTREQATAAA

SEQ ID NO: 62402 - protein, 366 aa, unidentified
MKILALDLGKYKSVACVYETASLTHKFATIVTTPQALHDLLVEEEPERVVIEICPLAGWVSDLVGSFGIELEVASTTHDAWRWKNVKRKNDRQDGLKLAQLSALGQLTLVHMPAPQVRQWRALINYRQRLVSRRTRIRNHIRALLLRQAIAMGRGAAAWTRAGMAQLAALARPLAEVTAEELWRGELEVELANLKALAEPIRQVEQKLDELGAADKRVQLLRTIPGVGPRGGEALVAVIDEAQRFKRGKQVGAYLGLVPKQIQSGESNRLGRITHQGNSMLRSLLIEISWSGLRYNPWMRAVYERVRRGSKARKKIAIVAVARRLLIRCWAMLRDGTRWRPGAQQYVSLNKGRASLSRIIRVAQAN

SEQ ID NO: 62403 - protein, 341 aa, unidentified
MSIVMGLDQHRAQITAEWIETATGEIFRARVRPADRDTVREFVGQFVGQDGLEVALEATTGWRFVAEELQAAGADVHLAEPAEAAALKGKKQRAKTDWADARHLRELLLIGRLPESWIPPAHILDLRARVRTRHLLSHQRTEWQQRMHAVLYHQGVPHHRDLLSVASRQWLAELTLSVAAREQIEVSLHVIDSIEQRLIPFDRGLRQIARKQPGCRRLIDEIYGVGELTAVTIIAELGDVRRFANSRDVVRYGGMDITVHQSDTRRSPGHLSRQGPPALRWALYEAAQRARFPASPDRPYYEQLAARIGGNRACLALARKLLKRSYHLLKDLGDDAIAPVA

SEQ ID NO: 62404 - protein, 310 aa, unidentified
MEGVNAGIEVGKHTLVVALGSAGELWSLANEPRAIRQLCKRLAQANCARVLIEGGSYQNVLVAALRAAQLPVVIINPRRVRDFAKSIGQFAKTDRIDARVLALYGERNQPALRELPDEQTQALRALWVRREQLIEMLGMEENRLEHAPKTLQPGLRRHIDYLRKQIKQADDDLDRTVRDSSLWDKYELLTSVPGVGPVLGAALLSALPELGQLNRAKIAALAGVAPFPDDSGTLHGPRKILGGRWRLRRVLYVATVAAVRCNPVLKPFYQRLRARGKLPKVALVAAMRRLLHILNAMLKSHTTWRPPCPA

SEQ ID NO: 62405 - protein, 342 aa, unidentified
MKDTMIGVDLAKNVFQLHGASMTGEVKFRKKLTRPQFMAFMADHPAAVVVLEACGSASYWARELSKAGHEVKLIAPQYVKPFVKRQKNDAADAEAIVVAAQRPEMRFVPPKTEEQQARAVLFRARERLVHQRTELSNALRAVLYEYGHAVPQGSVHLKRIVKIIEAETCDLPYLAREEARDLLEQIAEKTVRIEAKTRKIAAQAALTSTARRLQTMPGVGPMTSLAVEAFAPAMATFKCGRDFAAWLGLVPRQMSSGGKERLGRISKAGQPDIRRLLIIGAMSRLNWMGARSIREGSWLDRLRARKPKLLVAIALANKMARMIWAMLTKQEDYKDPVPAGAA

SEQ ID NO: 62406 - protein, 342 aa, unidentified
MNTIIRIGMDTAKNVFQLHGVDAAEAVVLRRQLRRREMIRFFEALPPTLVAIEACASSHHWARLLQSFGHEVKQIPPQYVKPYVKRGKNDAADAEALCEAVTRPSMRFVPVKSREQQASCMLMTVRDRLVSVKSQLSNAIRSYAAEFGIVAPAGRQNVAGLIKRILEEGSLPEMARDLFRLQASEYESVVARLAEVDAKLMIWHRADDLSRRIATIPGVGPIGSTMLSMKAPPAETFKSGRQFAAWLGLTPKDHSTGGRVRLGGITKAGDPAIRSVLIVGATALLRHVRKGRTKPSPWLAAMLDRKPPKLVAVALANKFARIAWRLMMSGGVYNRPPALMPV

SEQ ID NO: 62407 - protein, 349 aa, unidentified
MNKGITVGLDLGDRYSHICVLDNQGEILEEGRVRTTEAALRRKFGALEACTVALEVCGHSPWTSRLLEELGHTVVVAQAAKVALIHHNRNKGDRVDAQTLALLAHANPKLLWPIRHRGVHTQEDLQVIRSREALVEARTKLINHIRSTVKVHGERLPSCGSDAFAGKMAAELPEALKPVLSSLLEVIGDLTKRIRAYDRRIEELCGRYEETERLRQVPGVGPVTALTFVLSIEDPHRFAKSRDVGPYLGLTPRRDQSGDVDKQLRITKAGNTYLRKLLVGCAQYILGPFAPDSALRTWGLARAARGGKNAKKRAVVAVARRLAVLLHRLWVNGAVYTPFPQRSMAEEVV

SEQ ID NO: 62408 - protein, 320 aa, unidentified
MRNAVGLDISKLTFDATAIVGNAEYSAKFGNNSKGLNQFSDWLKSLGCEDLHICMEATGNYYEDVADYFAQYYSVYVVNPLKISKYAESRFKRTKTDKQDAKLIAEYCQSAKESELVKRQKPTDEQYRLSRMTAAYTQIKSECAAMKNRHQVAKDEEAAKAYAEIIKAMNEQLEFLKAKIKEQTEKPNCKEGVKRLETIPAIGRMTAAVLFQYLTSSAFETSNKFAAFAGLSPQQKESGTSVRGKGKLTKFGNRKLRAVLFMPAMVAYRMRAFPDFIKRLEAKKKPKKVIIAALMRKLAVIAYHVNKKGEDYDPSRYKSA

SEQ ID NO: 62409 - protein, 372 aa, unidentified
MLKDMSVFVGLDTSKMKISVALAEDGRQGEVRFFGDIDSTPDAVRRFVTKLSSRYSKLLFCYEAGPTGYGLHRQITELGHECTVIAPSLIPKKPGERVKTNRRDALTLARLHRAGELTAIWVPDPDHEAIRDLVRAREAAMEDLREKRQHLQSFLLRHGRIYAGLRSWTRVHARWLSNLTFAHPAQYLVLREYRQAIEDAEARLERLTQQVTDLVSSWSMAPVVDAYQAMRGVAFTTAVTLVAEIGDVRRFETPRQLMAFLGLVPSERSTGDLVRRGSITKAGNPRARRVLIEGAWTYRFPARLSRPLEVRQEGLPKTVRDIAWKAQIRLCARYRRLTAAGKRQTVVTTAIAREMAAFLWAIGREIQPRAAA

SEQ ID NO: 62410 - protein, 342 aa, unidentified
MYYIGLDVHKKTISYCVKDASGQVHQEGKVGATRRELDSWIKTLPQPRTMAMEATIFTGWIYDHLLPHAQQVKVAHPLMLRAIAAAKKKNDRIDAGKIADCLRCDFLPECHMASTQIRDRRRTLRYRHLLVRQMVQMKNRISGLLMETGVSYNKQRLHKVGYFRELLSTNEDVHESIRPLLKLSRDTVVRLQKTEYALVSSLQRDPLLADRVKRLRTVPGVGPITALAWALEIGDVARFRSIRQAISYCGLCGEEKSSADKVMRTPLSKQRNKHIQRVLVEAAKLAPRQDHDLALVYETEKQKGNANRATLAVARKMVAYLLAVDREERDFVPAENYQRAAA

SEQ ID NO: 62411 - protein, 411 aa, unidentified
METTYKIVGIDVHKSMLAVVVTEVATEGDFQFERRKLGTTESELRQLAQWLAEPGVREAVMESTALYWRPVWQQLEGQCDLYLAQAQSNRAPRGRKRDFADAERLLRRHVAGELILSFVPGPEQRMWRTMTRAKHQLTRDRVRIHNQLESLLEDGRIKLSGCVSDLLGLSSRRMLKALAEGEKDATRLASLADPKLRATPEQLQDALYAASTLSALHRQILGLFLTRLELVEHQIEVLDQSVGQALRAHQDAVLRLAEVPGYGVDSAQQVIAEVGPAAATFPSPEQLSSWVGTCPGREESAEVSKNNRSPKGNRMMRRVLNQVAHAAVKTKGSVFQALYRRFVIRLGHNKAIWAIAHRLCRLTWKILHQGVRYMEFGTRSNPKTAKARINKLIPELRSLGYHVQLSQMATP

SEQ ID NO: 62412 - protein, 370 aa, unidentified
MHQSSTLYIGLDVHKESIAVAYVAKADHAEGVSLGNIGTRQCDIDHLIRKMQSKSTHLVFVSEAGPCGDWLYRYLTKKGHICWGVAPSLIPKKPGDRVKTNRRDAIKLARLMRSGDLTPVYVPQVEDEAIRDLCRAREDAIRDLQTAKLRLKAFLLRHDIRYTGQATWSPAHLRWLSDVVCPTPAQQSVFHEYVRAITDHTERLARLEQELTEHGQTWRLAPVVDALQALRGVPCTVAVTTVAELGDLTRFANPRQLLHYLGLTPSEYSTGERRHQGGITKTGNSHARRALVEGAWASRYPAKVSRHLPLRLEKVSKPIQDSSWQAQIRRCKRYRQLSARGKHANQVVVAIARELRACMWAIAQEVTLTP

SEQ ID NO: 62413 - protein, 339 aa, unidentified
MKYTPVGVDIAKHVIQVHFINEHTGEVVDKQVRRQDFLAYFSNREPCLIGMEACGGSQHWARELTKQGHKVRLLQARFVKAFVMGNKNDVMDARAIWMAVQQPGKEIAVKTEEQQSILVLHRSRRQLVKFRTAQINALHGTLLEFGETIHKGRAAMEREFPEALERMKERLPLYLITVLENQYNRLNELDSLIDDIEKQLTSVARQNETCRRLLDIPGVGPLIATAALAIMGKASVFKSGREFAAYVGLVPRQTGSGGKIRLLGISKRGDKYLRTLFIHGARAAALLTKEPGPWITELKKHRPASVAIVAMANKLARTVWAIAAHGRKYDKNHVSIRPY

SEQ ID NO: 62414 - protein, 288 aa, unidentified
MNNSITYVAMDTHKKQHSVALIYPNDENIIQFSVNNTPADIRKMVSKIKRNAPGQVQFCYEAGVCGFTLQRRIVAEGCPCIVIAPSLTPKKPGERKKTDRRDAKKLLRLFRADMLTEVYPPDEKQEASRELTRCREAAQENLKRIRHQLQKMLVRHGYVFNDGQHWTQKHYRWLEAIQFEEPLLQEVFDCYFTEMRHCLQRVKTLDNELEKLAQSEDYKEVVGILCCFYGIKTLTAMSIIAEIFDFGRFASARNFMSYLGLTPSEYSSGEKENKGPIIVEIACTVKCH

SEQ ID NO: 62415 - protein, 360 aa, unidentified
MFTERTSVGLDVHARSVAAAAIDGVTGELFQTKLPPGNDRIVAWVHGLPGPVAVAYEAGPTGFGLHRSLTAAGVRCVVAAPSKLQRPSGDRVKTDAKDAVHLARLLRLDEITAVSVPSADQEAARDLVRAREDCRGDLMRARHRLSKLLLRHGIVHDDGAAWTTKHDRWLTQQHLAGDASRAAFDAEYETVLQIKARRDRLDKAIGDLANDNEFTPIVRRLGCLRGVSTLTGFALAVEIGDWERFTGNSIGSFVGLVPSEFSSGQSRVQGPITKTGNGHARGLLVEAAWHHQPQYRVGAVMRARWELASAVARARGDLGNRRLHDRWVRFGQRRKRHTIANIAVARELAGWCWSLAVMDD

SEQ ID NO: 62416 - protein, 369 aa, unidentified
MNYNTVYVGMDVHKESFSLCAYTIEAEKASHYQRTEADYKKVLNYLEFLRTIYGDDANFICGYEAGCFGYTLYHQLTANNVKCIILAPTTMLEQRSKKRIKTDRRDAEIIAKCLAQHNYSPVHIPTAKDEETKEFLRMRDDHKLKVKQQILAFCLRHNYRYDGKSHWTAAHLKWLKALTPEALYKEILDEYLLTYQTLSDKIERLDKRIEELATQDEYKEAVKKLCCFIGVKTHTALSVLVEVGDFKRFASAQHFASYLGLVPGEDSSGDDQNRLGITKAGNRHVRLLLTEASQCYARGQVGFKSKELKSRQSGNTPAVIAYADKANERLRRRYYKMVLNKYKKHNVAKTAIARELACFMWGMMTDNIA

SEQ ID NO: 62417 - protein, 344 aa, unidentified
MDHFAGLDVSVKETSVCILDDAGKIVKEVKVASEPQALLKVLGNPAYRFKRIGLEAGPLSQWLFSALAEAELPVICVETRHMQAVLKAQINKTDRNDARGIAQMMRVGVYRPVHVKTLRSQKLRMLLTHRKLLQSKAIAIENDLRGTLRNFGLKVGMVGMVGFEARIQALVATIPDLAMLVEPLLVVRRALREQIVILHRRLLAIVRDDEVCRRLMTTPGVGPVVALTYRATVDVPARFRKSKSVGAVFGLTSSRHQSGEIDWSGRISRCGDEMMRVMLYEAAQSMLRSKKWSWLKAWAMQIARRRGMKKAIVALARRLAVIMHRIWVDGTEFRWTREPATAAA

SEQ ID NO: 62418 - protein, 369 aa, unidentified
MSVRTLRTQQPARPAGRSAQRGSKTHMVFVGVDTHQLTHHAAIVDCHHRRLGNREFVATAAGYRQLLAWAASHGVINGVGVESTGSYGAGLTLHLLGAGLEVYEVNRPEKSTRVKQGKSDPIDAYSAAEQVLTGRASGRPKIKTGVVEAIRMIKVPRDVAVKDRTRAYSQLRDLVTTAPAAIHDELIKLSGKKRVAKALLMHPDQGRIHEPVHAARHALRAIARRIRSLDSEIAEADKLLTNLTKKTCPSLLAMHQVGTQTAARMVITAGENIDRMTSEAAFAKLTGVAPLPASSGKTNRHRLNRGGDRQANSALYLIITGRMRNHPETLAYVQRRRAEGRSNPEIIRCLKRHLARSIYRALKTDLMTP

SEQ ID NO: 62419 - protein, 335 aa, unidentified
MRYIELDVHYSTSTYCVLDANGQELQCETVRGHWAKLLERLRTVAGPWTICFEATCGYGYLYRELSRLAQRVVVAHPGHVRLIFRAKRKNDRIDARKLAKLLYLDEVPAAYVPSEEVQSWRELIEHRRHMMDRQTTCKNAIRSLLRGHGKIAPKGLWTKKGLAWLRQEEMPTAAARLKRDLLSDELDEAKRRVRTVTKALNEIGERHPAVLLLRTIPGVGIRTAETMVAYMDKAKRFLRSSQVGAYFGLVPCQDASAGVNRLGHITRQGPATARKYLVEAAWQGVYRSPTIRAYFERVRHGRPERRKIALVATAHYLLRCMHAILVRNQPWHEAA

SEQ ID NO: 62420 - protein, 458 aa, unidentified
MKNFYLGADVSKGYSDFMLLDAKKRRIEEDFQLDDTFDGHQKLYQILAALSVQHPNAQIYAAVESTGGYENNWFDALVKFQSSLPLKTARLNPCGVHNNSKAGLERNITDRISAENVAKYLIEHPENVTYQQQDPLVSLRKQWSFVKMLLKQKTQLLNQLESNLYAANPEVLAYCKHGVPNWVFSLLARFPTATKLAKAKKSSLASIPYVTEQKAKALIHSAKKSVASATDPITAQIIKATVKQIRQLIKTIEAQEKILTETCSIPEVQLLKTFPGISDISAIGLMLEIGAVERFATAKKLASFFGLHPRYKQSGDGSWGFHMSKIGRIVPRQILYMVAMVAIQCNPLITEIYLKHTEKGMKQKAALGLCMHKICRILYGMLKHNMAFDANIDRNNRKKSRESNTTKIRKDKRRRYQSFDAKAPISGRHNKKRKERKQSQSDNIAQNGIIEASVPASV

SEQ ID NO: 62421 - protein, 421 aa, unidentified
MLILYQRCAAIDIGKDVIAVAVRLPGDGAEHRQTIKQTFKTFYGVLKHAARWLTEQQVTHVAMEATGIYSMPVYHALIEHGQFEKVLVCNAGHVRNVPGRKTDLSDAEWLVHLLECGLLRGSFIPPAQIKAARDVIRYRTKLTESRTSELQRLGNVLQDAGIKVDSVASTITTQSVRAMVEALIDGERRPLLLAELAKGKMRAKIPDLQRALEGRFDDHHALMCRLHLDHLDYLDEMIARLDTQIQDMMQPFRSQRDLLTSIPGIGPFAAAAVISEAGADIAETFPSAGHFASWIGVCPGNHESAGKRHSGKPRKGNQHLQHVLVECAWAASRTPGYLQSLYRWHVRKFGGSRNPTAKNKAIVAVAHKLAIIIWHVLATGKPYTDLGADYLDRRVDPAKETRRLIARLQALGHTVTIEPAA

SEQ ID NO: 62422 - protein, 386 aa, unidentified
MARKRTLSTLDTSIAYAVGLDLAKTDVALAAFDSDHKEPYLIDRIPYDKLYELLADMAPTLVAMEPCSGAHQIAEQIQELGHEVMMISGRHVQAWVKDHCNGQKTDLNDAFAILNLAYDRWLTPIRGKTREECRLLALQASYRQLKGQRTKTMVHVKATLHAWGFPIRAGSFNQKALHELIDANREAFGDEVVETLHLMINRVHDLDHDIATVLKLLTEATQRDPRASLLRSIPGFGVLTTSRWCAVVGDIARFDSPKQTMAFIGLVPNNRITGHHTETSSGREARGQGKMSKRGDKMLRSLCILGAGALCLMVRNDRLPDCPFVASIKERLASPRPWFKVLVYVAAKLVRIATALLKYGETFSFEKAGISKAVLKQWELEKAKAA

SEQ ID NO: 62423 - protein, 346 aa, unidentified
MKFYTGQHKFYCGVDLHARTMFLCVLDQRGYPLLEKNIKTDPELFLKTIAPYREDLVVAVECMFTWYWLSDLCSREKIPFILGHALYMKAIHGGKAKNDRIDANKIAVLLRGGMFPVAYVYPPKMRSTRDLLRRRMFLNRKRSALITHIKCTFAQYNLPEPEQNVSRVSQREGVAEQIPDPGASRNVRLDLELLDFYDQTLTKLEQELTVIAKDHDPNAYFRLRTVPGIGKILSLVILYEIHDINRFPSVQDFASYCRLVKPAKESGGKRLGSGGAKIGNVHLKWAFSEAAVLFLRKNESAKLYRARLVKRHGKAKSLTILAHKIARAVFFILKRRTVFEAETFFA

SEQ ID NO: 62424 - protein, 405 aa, unidentified
MTKFSVYIGIDWANDKHDVCVQVANSSTRKFEVIKHSPKSINEWISSLHKQYKGQIAVAIELSKGPIVYALQKFDFVTIHPVNTSMLAQYRKAFSPSGAKDDPTDAELALDLMLRYPNKIKALKMESESVRKLTYLVEKRRKLVDDKRRFSNRLIITLKEYYPHLLDWFSHRGSGIFCDFITRWPNLQKLKRARPDTLKKFFCSYPGRTAAYSVKRIQSISEAEPLTLDNAVIESHQLLVAVKVIKVFDREISELFNALPDAELYNSLPGTGPCLAPRLLVAIGENRSRFNSASEIQMYAGIAPVTVRSGQKSWIHWRYQCSKFTRQSFIEWATKSIRQSYWAEIYYQQQREKGNTHQAAVRSLAFKWIRIVFRCWKTKEPYNEAKYLKALSDRNSPLLFKEKAC

SEQ ID NO: 62425 - protein, 321 aa, unidentified
MTSQPAPIHIGIDVSKARLDIALGEHGPVQRIDNTPLAIRAWLRALPGGPLHIGCEATGTYHLALRDAVIKAGRPLYLIDGYQLSRYRDATRVRAKTDPIDARLIARYIAKEGTHLRPYTPPPEATQRVQQLLRRRATLVRTAVILRQSLSDLPGFKREVRALLAKADRLAALIQAQIVEKLKASDWIDDHRRCQGIEGVGPLTAAALCATFHRGAFSSADAFIAYLGLDVCVRQSGKQNARGTLSKKGDPEVRRLLHNAAMAASRSETWKPTYQAFIARGFSRTQALVALARKIARVAFSLMKTSTQYQPGGLKNTCAQT

SEQ ID NO: 62426 - protein, 341 aa, unidentified
MAEITTIGVDLAKHVFQVHGVDAAERVVVKKRLRRAEMLVFFKQLSPCLVAMEACAGAHHWARQFQSFGHDVRLIPPSRVKPFVGRQKNDAADAAAICEAAQRPSMRFAAVKTEKQQALLLDHRARDLLIRQRTMMVNALRGHLAEFGIIAAQGLGGARALLAQVLAPDGLAGVPAVALPALQTLASGVRGLDHEIKAIEARLQVARGEDERVKRLMTIPGVGIIGATVIAATVPDASLFRSGRDFAAWLGLVPRQHSSGGKARLGRISKMGDRYIRRLLVQGAISAIHWGKRKPGFAESWLGRLLARKPMRLVAVALANKIARIAWALLARGEIYRSAAA

SEQ ID NO: 62427 - protein, 311 aa, unidentified
MEHSLFVGIDVAKDRLDVHLRPTGETFSIGHDAAGLVALTERLVPCAPAIVVLEATGGYEVPVAAALASARLPIAVVNPRQIRDFARATGPLAKTDALDARVIARFAEAVRPVARPLPDAQAQVLGEFVARRRQLVEMLGAETNRRRLVRDPQLQRRIAVHIRWLERALRELETDLHDTIRSSPVWREAEDLLRSVPGIGPVTAFTLIADLPELGRLTRRKIAALVGVAPFNRDSGTLRGRRMVTGGRAPVRRVLYMATITAIRRNPAIAAFYQRLRAAGRPAKVALTAAMRKLLTILNAILRDHRSWQRA

SEQ ID NO: 62428 - protein, 353 aa, unidentified
MSNIKYVGMDVHKSITVIVVLDALGQVESRSQVKTKAENIRDFFRGISGKVEVVFEEGTHSAWLHKLLTPLVESVTVCDPRHNKLIEDGNKSDDEDAVTLAQLLRLGAVKTVYKGDEQQQQLKEICRTYDNLVEDSTRVQNRLKAIYRGRGISCSGHALYRADQRSDWLAKLGEDAARFRAQSLLEQLESLSQLRKQAKQRLLAQARTHADYRILIKLPGFGPVRVAQLIATVGTPHRFRTKRQFWPYCGYAVVTRSSADYQFVEGKIVKQRKKVSTCGLNRNHNPQLKQVFKGAALTALRHEAIKAYYQRLIDHGRRPELARGSIARKLASIALTVWQRREEFDVKKAFAQD

SEQ ID NO: 62429 - protein, 375 aa, unidentified
MNKICYIGLDVHKKNIVMGESIEAGKGNMTGEFLNTDSGVNKLLKKLKQISSEHDVKICYEAGPCGFTLKRILEKYGFTCDVAAPSLIPQKAGDKIKTDKRDAIKLARLYRAGELTFISVPDEEKEAVRDLVRCRDDIMTDLKRAKQRLNHFFLRHGYCYPGSNWTEGHYKWISQIDIKNNILNITLAHYFNEIEFLNMQLKNMDKEIETIASTEPYREKVKALCAFRGIATLTAMIIISEIIDFSRFSNPKELMAYLGIVPSEYSSGGSVKKGSITKCGNKRVRRALVEAAHHYRHKPIITVKMKKDVESTKEELRIAPVKALHRLHKKYYHLIFKGKPTQVAVTAVARELSGFIWYNMVLIEKGGERLSGINI

SEQ ID NO: 62430 - protein, 363 aa, unidentified
MQVRHIFVGIDLGDKNSVARIAVDRDKSERFGFLNTRQGRARLFREAKRRSEQADGATIVMAYEASSCGFVLSDEAEALGIKCRVLAPTKMEKSVEQRQHKNDDRDANDVLEKLRGHVLAGNRLPTVWVPDLETRDDRELIRTRLDLTEKQTQIKAQIRMLIKRHGLEKPSGLGAGWTIGYRRWLQALRESEQLLGWSTRQALDSLLRQLQCLEAEIDRVQKPLEELANEPRHKPIIEELRQEAGVGLLTAMVYRTEIGQAGRFGRGRQVGKFVGLTPTSHESGQQSDRKGHISRQGPPRLHKVLCQASWVHIVHDARAGRIYQRLVSRNPKKKKIALVAVMRRLAVRMWHRMRKIELQQVRA

SEQ ID NO: 62431 - protein, 416 aa, unidentified
MEHPVAFAALVGIDWSDTKHDICLVDTQTGAQELSIIKQTPEALDEWAGTLRSRFSGAPVAVCLEQSRGPLIYALLKYDFLMLYPVNPKMLARFREAFTPSRAKDDPRDAEYLVELLIHHRERLKAWIPDDEQTRTLQLLVEHRRRLVGDQTRISNRLKALLKGYFPQVLAWFPDIRTELVCDFLLRWPELSALKGVRRATLEKFMRAHNSQRQQTLDARLDAITEAAPLVTDAAVINSSVTMVKALASQMKTTLAAVREFDHRIEELCEAHEDFEVFASLPGAGKVYASRLLAAMGSNRERWASADELLRFSGVAPVVERSGKSSWTRWRYFCPKFFRQSFVEYAGESIRHSQWAQAFYLSQKVKGKSHQAAVRALAYKWIRIIWKCWQTRTKYSEARYVECLRKKGSALVPTIA

SEQ ID NO: 62432 - protein, 401 aa, unidentified
MTAVRSRAWIGVDIGKTHHWVCAVDETGKKLLSLKVLNDEAQIIEVITSITDLADGRVWAIDILGTPSALLVALLANAGEQVRYASGRVVAAMSTAYTGEGKTDAKDAYVIAETARIRTDLAVIDADTDLVRALGVLTGHRADLVADRVRMINRLRDLLTSVFPALEREFDFASCKGALVLLSGYATPESIRRMGEARLSRWLRQRRVRGYADVAARAVAAAHTQHTVLAGQDVAASIVAELAGAVLAQHERLKLLDQQIQDVFAQHPRAEVIESIPGFGPVLGASLLVAAGDLAAFPTAGHLAAAAGLVPVPNDSGRRAGNLHKPRRYSRPLRHALYLSAQSSMMRAGPNRDYYLKKRDQGRTHSQAIIALARRRIDVLWALLRDNRTWTAAPPPRAQAA

SEQ ID NO: 62433 - protein, 375 aa, unidentified
MRLSSGTSAWRTNTRRTAGGRADDPLAFWAGGEQGRRRRFTDPDGCRDVWVRSHKEGSIEQNQSNTKIAGIDVGKRFLDVAAHGLEDETQVENGPEGHAALIAWLRARRVGRVGLEATGGYERKVRAALEAAGFEVVVHQPLEVRLFARLKRLRAKNDRIDARLIAQATAQAETVRAAQDPRLAELAERLTAYEQVADQIAGLKTFLEHVTLKDVLRSLKVQLASLERLKARLLAQVLQALKAHEDLAARFRLLLSIPGFGPVVAASLAIRMPELGQMRRGQAAALAGVAPFDRDSGQWKGLRFITGGRARVRRMLYLASLAAKRYDPGFKAFHQALLARGKPIKLAIVAVMRKLIEAANLILHRGQPWVKTQPA

SEQ ID NO: 62434 - protein, 343 aa, unidentified
MQTITTIGLDIAKSVFQVHGVDADGNVVLRRQLKRRYVLAFFQKLPPCLVGIEACASSHHWSRGIQALGHTVRLMPPAYVKPYVKRQKNDTADAEAICEAVTRPNMRFVPTKSPEQQSCLTLHRTRHLFIRQQTAIINSIRAHLAEFGIVAPVGRRGVERLLEIVADPDDNRLPEVARACVAALGSQLLALKAQILAFDRRIMAWHRSNETSRRLDAIPGVGPALATALVASIADPKVFRSGRDFSAWIGLVPKQNSSGGKDRLGSISKQGDRYLRSLFTTGALAVIRYAKLHGTKHRPWLAALLARRPTKVAAVALANKIARMVWAMMTRGERYKEPVALAA

SEQ ID NO: 62435 - protein, 343 aa, unidentified
MEYYAGIDVSLESSSLCVVDATGRIVRESKVASEPEALIAWLQSLGFDLARIGLEAGPLSQWLYAGLKQAGLAAELLETRHVRNAFKIMPVKTDRKDARGIAQLMRMGGFRSVHCKSLPAQETRSLLGARKLLQSKLHDIELSLRGTLRGFGLKVGKTTPKTFEARIRTLVADHPTLTLIAEALLRARAVLLDEFIKLDKKVHALARQDPRARLLTTAPGVGSMVALTYAAAIDDPARFRSSKTVGALFGLTPKKYQSGETDITGRISKTGDAAVRTALYEAANIILERPVKGGWLKAWALGVAKRAGMRKAKVALARKLAVVMHRMLVDGTPFDLNRVTATA

SEQ ID NO: 62436 - protein, 466 aa, unidentified
MTPHKDYCLDPRPPATPTLPQSPVLADALQVCHPHAAGIDIGEAEHWVAVPPGCDPQPVRRFGTFTVDLDALADWLIDCGVTTVAMESTGVYWIPLFELLEARGVQVLLIDPRQAKRAPGRPKTDRLDGQWLQRLHAYGLLAGAFRPEDQVCVLRSYLRHRQMLLTSAAHHIQHMHKALQQMNLKLPQVVSDLTGVTGMAILKAIIAGERDPVTLAKLRNPHCHHDEDDIAKALQGTWRAEHLFALQQAVALYDFSHQQLALCDQQIKSHLATFADKSEGKPLPPKARRHKKTNEPRFDARTPLYRLAGVDLTTIEGIEENTALIILSEIGTDMHRWPSVKHFCSWLGLCPQHQISGGKILSRRVRPGAHRVTVALRLAARSLHHSQSALGAFFRRMKARLGTPKAITATAHKLARLVSSLLQHGSAYVHQGLDAYEAQYRERKVTTMAKQAKALGYTLGPLPAQG

SEQ ID NO: 62437 - protein, 319 aa, unidentified
MSTERFVGIDVSKDTLDVAIRPDGTHMQVPNTDDGFDQLVACLRPRGPVLIVLEATGGYQRRVVAALSLAGLPVVVVNPTRAREFAKALGQRAKTDAVDAAVLAEFAERVRPAVRPLPDAQAQKMQELLARRGQLVGMRTMEKNRLGTAVDRTVRRSLEAHVAWLNEQIDDAEEQLGEAIEQSDVWKAKDQLLQSIDGIGPGVSRVLLFDLPELGTLTREQIAALAGLAPLNRDSGRWSGKRFISGGRVVVRNAVYMASHAARKWNPALKAFADRLEAAGKPPKVVLIAVARKLLVIANAILRDKKPWRDMTTNSVALA

SEQ ID NO: 62438 - protein, 441 aa, unidentified
MSRRPVFSLIRPDCAGIDLGSSAHLVAVPEGRCENEVRTFGCFTSDLVAMGAWFAELGIKDVAMESTGVYWVPVYEALAGMGFRVALVDGRSAKALPGRKTDVQDCQWIRDLYMHGLLQPCVVPEGSVLAIRSYWRQRGRIVEQRSEQIQLMQKALEQMNVQIHKVLTDISGVSGLAIVRAILSGERNPRVLSELLVGQARKKQDLVVKALEGRWADHHLFALEEAVQTYDFLGSRLQECDRRLDKEIAELAGDSSGSGSGRSPIGRRRSSKNEPEGEIHANLTKLLGCDPTQIDGIQVNTVATLVCELGVDLSRFRTEKHLSSYLGLCPENQITGGNIKKSRTKKVTHRAANALRMAAQSLHSSHSALGAYYRRLKARIGPAKAVTATARKIATLYYRLVVNGQLYADPGEEAYNEKFRTKSIQRLKKQATKLGLVVVEG

SEQ ID NO: 62439 - protein, 254 aa, unidentified
MNLFTVVLGVDIAKLKFDVCLIKENGKAKHKVFANTKHGFEQLAAWLSSHGVAGLHVCLEATGSYGEALALYLFDAGLTVSVVNPAQVKAFAASRLTRTKTDKVDAELIARFCLAHQPQAWQPPAPEVRELQALVRRLESLIEMRVSEENRLSSGVSTDSVRRSLEEHIAYLIEEIKQTERLIGGHIDNHPDLKEQSELLDSIPGIARTTAALLLAEITDFTQYKSARQVAAYAGLVPRERRSGSKQVRQSNKV

SEQ ID NO: 62440 - protein, 330 aa, unidentified
MKIMYAVGIDVSKKTFDVSISKGGHLFYLGNYANSKKDIVAFIKDVKGQGLLPKNTLLCMEHTGVYTHLLLEVLYGKKWQIWLEQPINIKKSLGHRRGKNDRIDSLRIAEYAQRFQDKAILWQPPRKQMFKLRQLVSLRARLLKAKQMISVPATELDSILDKDTKTINTKVIQGLVMQIKKVEASIEALIKNDNNLRRLHDIVISVAGVGKVTSWQMLVYTNEFKDFDNAKKFACYCGVVPFEHSSGSSIYTRPRVSNQANKKIKELLHMSALSATQMKGELNDYYLKKIGEGKKKMLVLNNIRNKLIHRIFKCIKENRKYEKNYMPMLV

SEQ ID NO: 62441 - protein, 337 aa, unidentified
MGLYCGIDLHSNNHVLTIIDETDRRVYERRLLNDLAITKAVLEPYRAELVAVAVESTFNWYWLVDGLMEAGYAVRLVNTAAVRQYEGLKHTDDEHDAFWLAHLMRLGILPTGYIYPKSERGLRDLARQRMRVVQHRSSLITSVQNQVWRSLAVRLRSETIKGRGKQPWPEISDPDLALSVKAGRAAIDTLTVQIERLEKLILKRVDRSPQFRMLKTVTGIGPILAMTIALEVGDIGRFAGVGEFASYCRCVDSQRLSNGKKKGEANRKCGNRYLAWAFMEAAHFAIRNLPAAKRFYERKRRQRHALLAVKALAHKLARACFYVLRDQVPFAPERLFV

SEQ ID NO: 62442 - protein, 315 aa, unidentified
MTLAESKEISIGIDVAKASLDVAVHETGEIWSADNNAGGCAALVARLIKLKPTRIVIEATGGYETLIAASLSAAALPVVVVNPRQVRDFAKATGQLAKTDRLDARVLAHFVAAIAPPLRPTKSEEAQHLEALLARRRQLVEMLVAEKNRLAAHRDRAVVKDLKTHIAWLERRLKQSDDELQRVLKASPVWRERDDLLRSAPGVGSVLSLTLLAQLPELGTLNRKQIAKLVGVAPFNWDSGQWRGSRHIWGGRAAVRAPLFMATLSAIRCNPIISSFYRRLIAAHKAPKVAITACMRKLLTILNVMVKTQTSWRTA

SEQ ID NO: 62443 - protein, 370 aa, unidentified
MKKNNTSGRSSKEGRKCWPGSITIGLDLGDKTSRYCVLEGNGEVVQEGGVATTKKGMGQVFGGRKRCRMALEVGTHSPWVSRLLSGLGHEVIVANARQVKLISQSTRKDDKLDAQMLARLARIDPQLLRPIRHRSEQAQLDLTQIRVRAALVEGRTSLVNAARGLAKALGERLEKCDADNLDVERLSGLPAGLQAVLRPLLEEVASLTEKIHACDEGIEQIARTQYPETALLRQVKGVGTLIALTMVLTVEDAGRFAKSRDVGCYVGLRPKRSESGERQPQLGISKEGDVYLRKLLVQGAHYILGQRGPDTDLKRWGLKLAARGGKNAKKRALVAVARKLAILLHRLWVTGEVYEPLRHSQARAAQRKVA

SEQ ID NO: 62444 - protein, 365 aa, unidentified
MWEAPVKRQRMSDGLDVHARSVLGCALDGDTGEVFQRRLCPDHREIVGWLGELPGPVAVSYEAGPTGFGLARALAAAGITCEVAAPSKLIRPAGDRVKTDARDAAHLARVLHLGQVTAVTIPSASQEAARDLVRARDDCRGDLMTARHRVSKLLLRQGIVYSGGRAWTGDHERWLRAQRFDDPALQLSYEAAWDAMLACLDRRRRLDSAITAMAADSEFTPVVHRLGCIRGVATLTAFGLAVEIGDWHRLTGRTIGAYVGLVPSEYSSGDTRAQGGVTKTGNGHVRRLLVEAAWHHRSRYRPGAELRRRWDLASPAARARGQAANRRLHNRWTGFDARQKRPVIAHVAIARELAGWCWSLAVMPD

SEQ ID NO: 62445 - protein, 338 aa, unidentified
MKTYSGIDLHSSNNYVGVIDDKDQRLYRKRLPNRLDTVLSALEPFKDSLEGVVVESTFNWYWLVDGLKEHGYKIHLANPSAIKQYEGLKHTDDKWDSFWLAHMLRLNILPEGYIYPKEERPVRDLLRRRLLFVKHRTAHILSLQSMISRNIGDNMSCYAIKRLDEGAAESLFDSPYLVLAAKSNIAVIHFLKERIKLIEKAVKSRIKLREEFKCLLTIPGIGDILALTIMLEVGDINRFPQVGNYSSYCRCVKAERFSNDKKKDENNRKNGNRYLAWAYVEAANFAIRFSPPAQAFYQRKTAKTKPVVAIKALGNKLARATYYIMRDQVPYDPKKLFS

SEQ ID NO: 62446 - protein, 420 aa, unidentified
MLAESEDEEQIIERVAALDIGKAEVVCCVRIPGPGKKRLQEVSTHSTMTRSLSELANHLVTLGIERVVMEATSDYWKPVFYLLEAHGLQPWLVNARDVKHLPGRPKTDVLDAVWLCKVAERQMLRASFVPPHPIRQLRDLTRYRIDVIAERGAEKNRVEKLLEDACIKLSVVASDIFGVSGRQMMAALIAGERDPKVLAQMARSRMRTKISQLEEAFTGHFDNHHRFLLTRMLARIDAIDADIAAIDAEIEAHLAPFASAAARLDDIPGIGPVAAAIIIAEIGTDMTRFPTAGHLCSWAKFSPGINSSAGKTKGNGSTGHGNRYLARVLGEAAVGAARTDTFLGARYRRIAKRRGKKRAIVAIGRSTLTIIWHLLNDDTATYADLGADHYTRHANPDTKKRNHVRELQALGYKVTLEPAA

SEQ ID NO: 62447 - protein, 314 aa, unidentified
MHYVNNTELSSHEETRSQFNGGTGAIKLGIDVHQDFYVVVEQVGGSNPKPPQRFQKEAFLHWAARLKQKSGVQLHAVYEACGFGFSLQRKLSALSINCYVVCPQKLDEQNRRVKTDGLDANALCLKLDRFVQGNRDALAIVRVPSEEEEQARAIHRQREQLVKTRKQLEAQGRSLMVNHGLEPVQNWWKPRTFTALPAPQWLKDLLANSQPILVALQQKIVALTVQLQSAASPYQPRGLGKMTSVIIDREIGDWNRFNNRRQVASYTGLCPGEYSSGNTRLQSCVTKHGNPRLALRWWSWPGGWSASSPITNRL

SEQ ID NO: 62448 - protein, 411 aa, unidentified
METLIRRCAGLDVHKASVVACVRLIDENGELLSFTQSFGTTTSDLLKLNDWLMSYSVTIVGMESTGVYWKPVYTLLETEFECWLLNAQHLRNVPGRKTDVADAAWIAQLVAHGLVRPSFVPPKEIRELRELTRYRKTVIQERSREAQRLHKSLEGAGIKLSCVASDILGVSGRDMLQGLIAGTHDPDVLAELARGRLRKKLPALRKALTGWFSPTHRIIVGELLAHLEYLDESIGRLSDDITAMIAPFVAEIDLLDTIPGVNRRTAEAVLAEIGPDMSRFPSSGNLASWAGMCPGNNESAGKRFSGKTRKGSKWLRTALVESAEAAARTKGTYLAAQYARIKGRHGHNKAIVAVAHSILVIAYHILQRGQPYNELGGDYFIERQNKDAYQRRLVKQLERMGYEVALTKHAA

SEQ ID NO: 62449 - protein, 445 aa, unidentified
MPFVGLDLHKQVIEAAIVDEAGKFVHKSRFPATREALLAFAKRWLNQETSVAVEATTNTWPVVDVLEPLVREVVVSNPMRTRAIASAKIMTDAISAPTLAHLLRMDYLPRVWQPDEKTRHQRELVTERTTLTTDRTRIKNRIHSVLHQRMIPAPAGDLFNEQNLAWLRALPVCDEGLNENGRRVLDRYLAQLEAIEKEAAELDTLIAKHAYAEPRVRLLMTLPGVDMAVALGLMAALGEPSRFASADKAAAYFGLVPSTKQSGRHCYHGRITKQGNAHARWLLVQAAQHVAEHEGPLGVFFRRLAQRKNRNVAVVAVARKLVTIAWHMLRRNEPYRYAHPATTAIKLAKVRIVATGKRRRGGVPKGTPRPESYGTGKQLRRMPSLDAVYAKEGLPPRQKLGQGEARMIAERGLEEFLGRIAEQQTTPKAPPSGKRRGPYHVRPIG

SEQ ID NO: 62450 - protein, 379 aa, unidentified
MKKYSKFVGLDVHKADIVVGTANADRGEAGYYGTIEHAPHCYLKLAKKLSKSGGEVLFCYEAGPCGYEVYRQLTKAGYDCIVIAPSLIPKKSGDRIKTDRRDAVSLARLLRAGELTPIWVPDKEQEAVRDLTRAREDMKTMERQSRQRLGGFLLRHGKVYPGRSKWTKAYFRWLESLRFETAVQQIVFQEYIDMVKDVQQRVAAMEEEMRRALTGWTLKPVVDGLMALRGVDLIAAMTIIAELGDITRFESPRQLMAHLGLVPSEHSSGERQKRGGITKTGNGHARRILVEASWSYRLPARKTAHLRKKAEKASKAVQEIAWKAQKRLCSRYWHLVHKGKLHVESCTAVARELAGFIWAIACEVMGKGTVRFNELIIRN

SEQ ID NO: 62451 - protein, 346 aa, unidentified
MLYVGLDLSRKRLDFNALLPNGECFQAGAVPADGFGLASLVLRLGDANEPVVAVIESMSGARFVHDQLELAGWDVRIADTVKAKGLAPLACKTDKIDAWVLAELGRLGLVPEIWLPDPAVRAERERARFRLHLVKHRTALKNRVHATLITHGVPNPCSDLFGVGGRRLLERLDLLDPWRSTTQASLALIDLLDAEITGIERELRALGADHRYIPLLVSCPGIAWILAFTIASELGDITRFPTPVKLVGYTGLCPRVDQSGQRDWRGPLRKNGPNYLRWALVEAAHTALRHPCYEPVLARQTSRHGRKRGRKIATIEVARKLAEAIWWMLVRQQPFAPAGAGKKLTA

SEQ ID NO: 62452 - protein, 322 aa, unidentified
MAMLSFGGIDVSKDRLDVMVLPEEQCSSVPNDAAGWAKLVEQLRGFSISAVGIEASGGYERGAVRALLAAGMSVRQVNPFKLRQFARASGVLAKNDPLDARMIASFIAIMPTRPAQPHAPAVERLAEILTVRRQLSDAKVAAENASRLLEDAMLQRLSRRRIARLAADIDLLDGHLVEIVAADAALVHRYRLLTSMPGVGPVLACTLIALLPELGRMNRKQVAALVGLAPYAFDSGKLKGARCIWGGRASIRRVLYMAALIAMRCNPALKAFHNRLAATGKKPKVVIVAVMRKMIITLNAMLRNETPWVDRSGGRHSVLTTR

SEQ ID NO: 62453 - protein, 429 aa, unidentified
MRTESTPGARGPVFCGVDTHADSHWLCVLDWRGRKVLSRQFPADAAGYEALAGAIAAAGEPACVAMEGTSSYGAGLTRHLASLGMPVREALSPARMQRRRPGQGKCDEADAERAARTAMSGSKLGTPKSQDGWVDGVRCMLAARSGAVKARTSAINTARSLLTTAPEGLRSRFRGMGGPRLMEELPSVRAEGALGAALGALADLWEAARDAALDMERAIEASLEENCPALLAMYGCGPVSAAKLAVAAGDNPGRLRSEASFAAICGACPIPASSGKTVRHRLNRGGDRQANSALHEIARQRVMRDPETAEYAERARGRGKSDREVMRCLKRYVAREAYRALMHPHEIRRPGDASELVAARRAAKVSQARAASILGTSEKYISMLERGQRELKPIRRAYEAWVEAGLPLDWDRRAFEAERKMDSKKHLAK

SEQ ID NO: 62454 - protein, 328 aa, unidentified
MSTQVLTHEHNMQQISFVGIDVSKSRLDGYCRPDGAPFAEANDPAGIASIVERLRALAPTLIVLEATGGLETPLAAALAAASLPVAVVNPRQVRDFARAIGRRAKTDRLDAEVLAHFAESIRPAVRPLPDADARRLDALITRRRQLVEMRVAERNRLGTTTDEVVRRDLKAHIDFLDRQIKEGDRELERAIELSPAWKAKEDLLRGVPGIGPIVSRTLLALLPELGALSNKQITALVGLAPVSRDSGTMHGRRCIAGGRAAVRSALYMSALTAKQCNPVLSAFYRRLIAAGKATKVALVAVMRKLLTILNAMVRHNQAWDPSVALGTN

SEQ ID NO: 62455 - protein, 483 aa, unidentified
MKSKPEEQNKRATNHPTQHHWHEMNRKQRREMTRQIQSEDLSLEVIHPDAAGIDIGNESHYAAVPPSRDSQPVREFGCTTAELKAMAVWLQQCRIRTVAMQSTGVYWVAVYDILEQAGLEVYLVNARDTKNLPGRKSDVQESQWLMKLHAYGLLRNSFRPSQEIRVMRTYWRQRNDLVQSAGRHILRIQKALTQMNLQLANVLTDISGATGQAIIKAILAGEHDPHKLAEFRDPRVKASEEQIAQSLEGNWQPDLLFLLKQEQDGYEFCHKQMAECDRQLAQYLQQREDRSHGAPLPEEKRKGRLKKKKGNAPQFGLREGLFRMSGTDLTRIDGIDVMTATTVISEAGYDMSKWQTENHFVSWLRLCPDNRISGNKVIGKGRLPTNNPISIALKMAATTLRESKTYLGAQFRRLRTRLGAPIAIKAMAAKLARLVYRMLRYGMKYVDQGAAFYELRHRESQIKRLKAKAEKLGYRVTPIPAAA

SEQ ID NO: 62456 - protein, 348 aa, unidentified
MNFYTQQHKHYCGIDLHAKARYVCILDQHGTKLVHKNLPTTPEAFLRIIAPYREDMVVGVEGSFTWYWLADLCQKEGIAFVLGHALYMKAIHGGKAKNDKIDAHKIAVLLRGGMFPLAYVYPAEMRATRDLLRRRCHLVRKRAELLAHSHNTNSQDNLPEISQKLAYKANREGVEEHFPDPSVRKTVELDVSLIDHYDKLLGEVELSLTRTAKGHDGPPFPRRQSVPGIGPILALVILYESQDLARFPRVQDFVSYCRLVKCAKASNGKRLGTSGKKIGNVHLRWAFAEAAILFLGQNQLGKAYFTKPEHKHGKAKALTVLAHKLARAVYSMLAREQAFDLQRFVPAS

SEQ ID NO: 62457 - protein, 378 aa, unidentified
MSPSNLLFVGMDVHKDSVMIAVLPEQAKEPTRVERLPNDPRRLRRFFQRLGREGEIRACYEASGAGYLLQRQLKEWGRHGDIAAPSLIPTRPGERRKHDKRDAIELARLYRAGELVLIHVPSEAEERVRDLVRCRETFNRETLKSRHYILKFLRRRGLIYREGSHWTHRHFEWLRRLSSGGALSGEDTVVFDEYLALLEYKLTRREELDRQIEELALRPAYRSAVERLRCFRGLDTHSAMVLVTEIGDFRRFESPRQLMAYVGLVPSEHSSGQRERRGSITKAGNSRCRHVLVQAAWSYQHRPAVGAVLRKRQQGAAAGVIGHTWKAQHRLYKLFHRIARRRPRQVAAVAVARELVGFIWAVTQDPQPKVEAADRAAA

SEQ ID NO: 62458 - protein, 362 aa, unidentified
MRIIGCDLHGRQQTLAMLDTATGEVVNRVLTHEGDSVREFYSALPGPVRVGIEATGSMKWFLHLMEELGIDCQVGHPATIRAAEPRRQKHDQRDAELLLKLLVENRFPSIWQPSKQLLDLRGLLLHRHQWVRLRTRIQNALQAIALANGLRRGSSLWSESGQQAIASLPLATHTAHRRSELQAMYIRFETEIEQLNEQVLEQAGQRPTAELLMTHPGVGPITALATDVFLGDAKRFRDGKALASYIGIIPRENSSGGRQRLGGLSKQGNPLLRFLWCEAAAHAVRRDPELRRFYRRKLVQKGLGKARVAAARKLGIRLWIMLRDQIDYQEFCRRGQMQQKSGDACAGMPEGRYGAKSHRLSD

SEQ ID NO: 62459 - protein, 355 aa, unidentified
MNEAKYIGMDVHQATICAAVRDSSGNLVLEATLETKAETILEFVHGLRGSLRVSFEEGTCAAWLHDLLKPHVTEVLVCDSRKNALLRVGNKNDREDARKLSELLFLNKLHAVYHGETGIRTLKELARSYLTITRDLTRVMNRLKAIYRGWGIACAGQQVYAPRYRAEWLAKITEAGVRRRAQIYYQQFDVLAALRQEARRELLAEARKHPAQRLLRQIPAIGPIRAALLIALMQTPHRFRTKRQLWAYCGLALRTYDSGEYRFVGGQLKRSKKAVTIRGLNKNHNHDLKNIFKGAATRAAATVGPFQKFYEARLASGMKPPMARLTLARKIAAITLLVWKKGVRFDAKQLKQQAA

SEQ ID NO: 62460 - protein, 416 aa, unidentified
MSGKREIACGVDVHNKFIMATILSSDGLKLQDRFETSLEDLLKFKSWLKENGCHKVALESTGNYWLPIYHILEGSVNFILANAYQIKHIPGRKTDSLDSEWIAELCLKNLITPSRIFAKDHRELRSLTRARESLIKVRTKIKNRVTHELEAACIKLSSVIADVFGKSGRHIVDGLLNGIDLEKILESIPSGRVRKNKEEIRGIIQANLSPSQIFLLRSHLNTIDAVTKQITEIDAKISDQISMRNEDMKIALSMPGMGFISASTILAEIGDFRDFSSANKLAAYCGLVPSVYQSAGKLINGHITKHGSPHVRRIIIEVAHAIILTKKLSKLKKFFLRVKARRGAKIGIVALARKVLCILYHLLVSRELYQDDLLNKPRCIKKPRMHPIAAMELDEMIRTIIRAGYEVRKNECIGGG

SEQ ID NO: 62461 - protein, 364 aa, unidentified
MVVVGTDAHKYSHTFVATDEVGRQLGEKTVKATTAGHATAIMWAREQFGLELIWGIEDCRNMSARLERDLLAAGQQVVRVPTKLMAQTRKSARSRGKSDPIDALAVARAVMRETDLPLATHDETSRELKLLTDRRDVLVAQRTSAINRLRWLVHELDPERAPAARSLDAAKHQQALRTWLDTQPGLVAELARAELTDIIRLTGEINTLAQRISARVHQVAPALLEIPGCAELTAAKIVGEAAGVTRFKSEAAFACHAAVAPIPVWSGNTAGQMRLSRSGNRQLNAALHRIALTQIRMTDSRGQAYYQRLQDAGKTKRAALRCLKRRLARTVFQALRTVHQPSSERTQPAAACHRSYCSRSCLSG

SEQ ID NO: 62462 - protein, 339 aa, unidentified
MPLYSGIDLHSNNLMAAIMDEAGKRILKKRLINDPEIILATLEPYRPELVGIVVESTYNWYWLVDALMDHGYQVHLANPSAIQQYSGLKYLDDNHDAFWLADLLRLGTLKEGYIYPKQDRSLRDLLRKRWHLVKLRTSLIISLKNILSRNFGLQMRSSRIKDESLDTFVSGLPGEDNITLVVRTSKASIDFLTVQIDEVESTIVKQAKNKPFYVKLLDLPGVGKILALTIQLETGPVDRFAKVGNYASYCRKVQSRWLSNEKVKGKGNAKNGNKYLAWAFSEAAAHARCFHPASRKFYNRKLNQGNAAMAHNALAHKLARAAYYIMRDNVPFEEAKMFV

SEQ ID NO: 62463 - protein, 337 aa, unidentified
MKFSGIDLHSNNCFVVIIDEADRIMYGRRLPNKLSGILAALAPYRDELDGVVVESTYNWYWLVDGLMAAGYPVHLANTAAIKKYDGLKHSGDEADAVHLAHLLRLGILPTGHIWPPQERMVRDLSRKRMQLTRCRTQQILSIENLLARQTGATMTSNQIKQLKEDGVDLLGLPEDVAFALKANLAVTKTLSLQIDKLEKRLREKVHLRTEYRILNTAPGIGDILATTIMLETGTVDRFAAVGNFSSYCRCVDSVHTSNNKKKGEGNRKNGNKYLAWAFIEAANFALRFCPEAKRFYERKKAKTNSIVAIKALAHKLARACYHMLREHKPFDAKRCFA

SEQ ID NO: 62464 - protein, 463 aa, unidentified
MSKKGPNHKSGKPDKPKVDWKALDLVHPDAAGIDIGGSEHWVAISPDRDEQPVRCFDCFTADLQRMADWLIERGVRSVAMQSTGVYWIPVFEILQQRGLEVFLVNARHTKNLPGRKSDIAECQWLLKLHTFGLLNNSFQPSDEIRTARTLWRHRGGLVVQASSAIQRMQKALIEMNIQLSNVLSDLSGVSGMAIVQAILEGQRDPRALAALADPQVKASKEVIAKSLEGNWRPELVFVLGQEVEMYRICHDKIAACDRQLQKHLRRMAPKVDLEAAPLGPRPKGKRARGNAPKFDLRTELYRITGVDWTQVDGIVVQVAQSVIAEVGADLAAFPSEKHFTNWLGLCPTNETSGGKVLKRRTPKVVNRAKVAFRQAASTLIRSQSYLGAQYRRLRTRLGAPKAITAMARKLACLFYRLLKQGQQYVDKGTEYYEARYHEQQVRFLIKRAGKLGLKVVQPPAQTA

SEQ ID NO: 62465 - protein, 364 aa, unidentified
MDVHKESFSLCALHGTTGEIVREARCASNVSLVKKFVEKLKTQYGEDIKIKAGYEAGCLGYSLHNLLEQHGIDCDILAPTTMYSSSKNKMVKNDRFDAKMIALNLANGTYKEVYVPEEEDVAVKEYIRMLGDFKTSLKKMKQQIKAFLLRHGYVYEGKSSWTIAYMKWLKNLDLQGLFKETLDEYLLQYDVLVDKIERFSLRLEELSHSERYEGPVAKLRCLKGIDTTSAMTVHVEISDFNRFPTAKAFMAYLGLTPSERSSGEKISRSSITKQGNSTVRSTLVECANSLVKGTIGLKSKRVKARQKGQRSEVIAYADQAVERLQRKYHRMMYQGKPRNVAITAIARELGCFIWGLETGKIHRK

SEQ ID NO: 62466 - protein, 342 aa, unidentified
MDRLSPVTRICKVGFTMENELHFIGIDVAKAKLDVDILRPDGRHRCKKFDNTLSGHEALVRWLRGHDVNRAHVCMESTSTYMEDAAAHLSDAGYTVSIINPALSKAFAQSEGLRSKTDKVDARMLAHFCREKRPSAWEAPHPTERALKALVLRHQALTEMQTQEKNRRETAPEVQLASIDILLGCLSAELTRIEKQIKDLTDNDPDMKRRRKLLNSIPGIGEKTAAVLLAYTGLKLKFGTARQFAAYAGLTPVQHESGSSVMRASRMSKAGPVQLRKALYMPALSALYHTAWGKAFRKRLEESGKRAKVIIGAMMRKLAQVAYGVLKSGKAFDASQHGLLIA

SEQ ID NO: 62467 - protein, 417 aa, unidentified
MNAELSQFTAVIGIDWADAKHDICVQSSDSDARELSRISHNVEKIDKWAQSMYERHGGQMAVALELSKGPIVSALQKYDFFVIYPINPATLAKYRQAFNPSGAKDDPTDAELALDILLKHCNHFQPLNPQSVEMRTLMTLVEHRRQLVNDKIRTTNRLRNALKQYYPQVLDWFDRIDTPLFCAFIKRWPTLAQAKGARHNTLEKFFQQHNMYRKQLLERRAKSIKSAQPLTRDEAVIRPYRLQVLTLVDQLEVALNSLRTYDDEIATLAPQHPDYELFSVLPGAGASYAPRLLVAFGEQRERFANAAEVQKCSGIAPVIERSGQKTWIHWRWQCSTFLRQTFVEWAAQTINKSYWAGLYYYQQRAKGCSHQAAVRALAFKWIRILYRCWVMRTPYDESTYLKALKDRGSPLLEGKTT

SEQ ID NO: 62468 - protein, 351 aa, unidentified
MKYYTSTTEFNCGIDLHARQMYACVMDSKGKKLVHTNIQGNDFNYFLKRIEPYRHDLTVVSECTFNWYWLADACFDAEIEFVLAHALYLKHIHGGKNKNDRIDSEKLAHLLRANLIPPSYVYPSGRRPVRALLRQRMSYVWERATLKTHLSMNQTAEGLVPARKGGHDRDIWEDRILEQYTNPLHKFAASCDMNMIRAYDVQIQQLEDEITRQAKKDLGRNYNLLLTVPGIGRVLAMSILFETDAIDRFPSVKDYVSYCRLVKGSVASAGKVKGLTGGKMGNAYLRWAYGQAALIAKRNHPLLTPYAEKLVAKRGKFKGNAILSNKIARAVYHMLQNGTAFDAERVIATSI

SEQ ID NO: 62469 - protein, 401 aa, unidentified
MKRACGLDVHKDTIFCATYNGAIHGPVKEYSTLTSSIRSMGEALQCEEVDAIAMESTGMYWVPIWNILEEMGFQMILVNPYLIKQMPGRKSDVKDAQWIATLLHKGLLRSSLVPCKEIRELRTYSRRYVKLQQRQTSVLQDMERTLEMCSIRITSFVSNISGKSVLKVIEHIVRGETSPEVLAGLIHNRIVNKHTKQNIMASLTGFITNHHKFILELALQEYELLTSQIDKCILKMEELCNEDYKDEMKLLLTIPGISNLSAMIVIAETGADMKAFENSGKFSGWTGLRPRNDESAGKYKSTATTKGNRFLRAVLVQIAWAASRTKGTYFKEKFNRLAMRKSRKKALIAIARKVGVLIWSVLFYKQEFNAQRLIVYDPGKLQAKMSYHQKEWDRLQNLLQK

SEQ ID NO: 62470 - protein, 436 aa, unidentified
MRGCRCSMIMGFTKPIEHSNLTTKEGDFMNPLYVGIDVSSKSNVVYLMLPNGDKHSNFSVANSHDGSTQLVKRICSALISESLETVSIGLEATSVYGDNLVYFLREDASLASFSRKIHVLNPKQVNKFKESYNDLPKNDWVDSFVIADCLRFGRINKEVYIGDYHYKALQNLTRARYFAVTNLSKEKQRFMNVLFKKYSTMTQEKVFSDTFSTTALAVYDEFESAEALAYMDLQELTAFIIEKGKNRFPDPDAVAKAIQKAARSSYRLPKTVNDSVNQVLSISITSMKALESQIKEFDKAIAAQMELLPNVLISIPGIGPVYSAGIMAEIGDINRFNNQAALAKYAGLAWTQHQSGDFEAQNTRLIRSGNRFLKYYLYEAAFSLVRCDKEYNAFYYLKYKEVNRYQHKRALALTARKFVRLVFTLLKDNRLFRPAE

SEQ ID NO: 62471 - protein, 429 aa, unidentified
MNYNTQNAKIASITEKTLIVGIDVGSETHYARAFNWRNYEYSKKPFAFSNDEAGFASFKAWMNDMAEKHGMETIIPGMEPTGHYWLNLGAYLQEQGMKPVHVNPHHVKKSKELDDNNPSKNDRKDPKTIAGLVNEGRFSYPYIPTGIYAEIRNLSNLRIQTQEEITRIKNRIARWFSIYFPEIKDVYRNPDAVSGLMVIKQAPLPCDIKELGVNGVNKIWRDARLKGAGIKRATTLVTAAEHSIGNTEAPRSARKEIRNLLNDYEIYKNRMDELMQEIKETLSEIPYIDKLMEINGIGIKTVSCFIAEVGDIGRFDNPKQVQKLAGYAIVADSSGKHNGESRISHRGRKRLRYALYEAAISVIGKNKEFKEIHSYYRTREKNPLKKMQSVIAVACKLIRIFYTILTKGVDYDSQKMLNDIVRPEIQLAA

SEQ ID NO: 62472 - protein, 411 aa, unidentified
MERIVERPGALDVHKASVTACVRVWHERQLTEHVAEFQTTVQGLLALRDWLESLAVKQVAMEATGVYWKPVWAVLEDRFALMLVNARHVKQVPGRKTDVKDAQWLCQLLEAGLLRASFVPPKPIRTLRNLTRYRKTQINDRQREAARLHKIVEDSGIKLGCVASDIMGKSGRAMLDALVAGTTDPVVLAELARGQLRKKIPALRDALAGRFDSEHALIVGQILAHMDFLDEAIERLSDAIEEQIAPFALQRDLLMTIPGVKQRTAEVLIAEIGVDMSAFPTAKHLASWAGVCPGNDESAGKRRSGRTRKGSKWLRATLTESALAATRTKHSYLAAQYQRLRGRRGHSKAVTAVAHSILTAAWHMLHTGELYRDPGADYYTRQNPDRTTKRLIRQLEALGHHVTLEPQDVAA

SEQ ID NO: 62473 - protein, 346 aa, unidentified
MERLDHTQGGRTMNYIGLDIHKKNTQACMKNEDGKVMLAGRFPSRAKDLNAFIDKVEEAGGPASFVIESTGFCIPIYDIIASRGHEIKVAHPLKVKALTSGRAKTDKNDAEMLAELLRLKAIPASYIPPAELRQLRELTRFRQILVRNTTSIKNEIHAFLAYRGVETPTEYRSPFTVKHQEWLRSLHLGQVDDLLDIFVTLRTKIEKVEGDIERASQKKDEVALLKTIPGVGDVIANELMAEICDITRFSSAENLYSYAGMVSSVHQSGEKGWTGPITKQGNASIRHIMVEAAFSHIRCCRDSKLTLFYERKKEQKGTKKAIVAMARKMLGVVYRMLKEKEEFHAH

SEQ ID NO: 62474 - protein, 350 aa, unidentified
MSIIGCDLHSRYQVVAGVNTEDGEVVTRRLEHENGEAKAFYAGLAKPSLIGIEATGYTQWFERMLAGMGHELWMGDPAEIWARSVRRQVTDTRAAEHLLDLLLTKRFPRVWVPRPAERDLRQLLKHRDKLVRMRTSVKNQLHFLAMSQGICRQRKLWSTRGRAELEGLSLGPWASQRRKELLELLDSLGPRIEQLDQAVKTEAEQRREAVRLMEQKGVGPVTALAFVLTIGAVERFPNSRKLVSYLGLNPSEHSSGGHQRLGHISKQGNEMLRWLLVEAGQSAAQFDAQLRRKYQRLKFRRGGKVAKVALARHLAVRLYWALRQASSATPPVRTPGSPARTLVEATPSIL

SEQ ID NO: 62475 - protein, 342 aa, unidentified
MNKVYVGLDLGSSSFQQAAINQDGVTIMNRSYPTSEANLRIAFTGLRGEIHVHLEAGELAPWAAAVIAPLVKRVVCSHPRDNAWIAKDNDKCDRVDAYKLADLLRLNRFKQVHYAPDQPRRNFKQLVQHYDELTAHQARWKTKLKARLRMQGVIVTGQRLFSGGGRTAVLGRVESRDVRTAIKQLYEVLDQSVAAQEQARLLMLRAAQAFPEIKLLRTVPGVGPIGACRFSAYIHTPQRFSSKRKLWKYCRLSVSHRSSNGKPLRRPKLDYSGCGRLKDVSRKAFEVALRSRTDNGFKRTYQRALETTHDKTHARLTVQRKILSTLRAIWLTRTPYREELSR

SEQ ID NO: 62476 - protein, 358 aa, unidentified
MDHMGIDVHKRDSQIYILAEGGEVVEQRIRTEGERVAAVLGGRPRARMLIEASTDSEWVARCLEALGHEGIVADPNVAPMYATRSRKVKTDRRDARALAEACLLGAYRPAHRLSDPQRHVRGRLGVRDALVQTRTRDISLIRALLRQPGSRVPSGSAEGVIQRVRALSLPGRLRSVPNIGPVTAAAFLATVDDAQRFRHAHQLEAYLGLVPREYSSGETQRRSPITKAGHSQTRWLLMHAALSMLRCRPPAAEALWTWALRIAARRGTHVAIVALARRLAGILYALLRDGTVYAPRRPAALPDSGSAHRPVRHGRHAQSASQRPRLVSSPRPSPDRRGSSTSTPSGTARPPRGPGPVT

SEQ ID NO: 62477 - protein, 426 aa, unidentified
MNYTQNSKIAQVTEKTLVVGVDIGSETNFARAFNWRGQELSKKVFRFSNSLEGFQSFLAYLEHCKSNASAEQIIVGCEPPGHYWFNLARYLKTQHISLALVNPYHVKQIKELDDNSPKKTDLKDPKTIAKLVVDGRYSYPYLPEGIYADLREAVSSRDRIVKELNAATNRIKRWLKIYFPEYLTVYKIFSAESGLTVLEVAPLPKEVVKLGAEGVNRLWRDKKLRAVGMKRAQTLVEAAQNSIGLDGGECARMEMHLLLEDYRTKEAQLEKVTAVLEAETLKVPHAEKLLSIKGVGLITVAGFLSEVGDIRRFDSPKQIQKLAGLELKENSSGKHHGRSSISKRGRKRLRKILFQVMLPMIRNNAEFREVYEYFTTRQKNPLKGKQAIIAAGCKLIRVFYAILKRGVDYDPQKLRMDIIRPELEAA

SEQ ID NO: 62478 - protein, 342 aa, unidentified
MFFLGVDVSKKTLSVVLTDHKDKTLWSNKSIPNDEVGFKKLVETVIKNTSKKAGKEEYSIAAGMESTGVYGERLAYYLNGNSHNGRIVTYVLNPAAVRAFGTSVMAPNKNDSADAQLIASYLSMAVTKEQISPWKAPSPEGRALRELSRRREELTELHASECNRLEKLECMQEPPEAIVRNVRELISYLEDSIHNLEKEIEEHIDDDPGMREDIELLRSIPGIGDVTSVTLQGESDGLINFASVKGLVSFVGIAPREHSSGTSVFKKSKISRRGNSRIRHHLYMATLVAARVNPVIKEYYERLLNRGKGKKLALVACMRKMLHIIWGVMKNRKRFDPCYSLK

SEQ ID NO: 62479 - protein, 343 aa, unidentified
MTYFAGLDLSLEETSVCVLDGNGAVVREAKVSTDPDAIASWLHESGYSASKLGFEAGALSTWLFHELTTRGWDVVCLETRQVHQVLKAHRDKTDRGDAVGIAQLLRSGWYQSVHIKSYEAHASRALLKARVELVRVRQDLENTIRGLLKPFGIRLPRGDRRTLAVRVRTSCAARPALAAATEALLQAREPVMAEIDKLETLLISIARRDETCRRLMTVPGVGPIVALAFLSSVDDGRRFPKAREVGAYFGLTPRRHQSGEIDYQGRISKRGDRMVRTLLYEAATVLLTIVKRFSSLKSWGLRLAKRIGFKRACIALARKLAVVLTCIIKDGTEFWWSDRGATA

SEQ ID NO: 62480 - protein, 426 aa, unidentified
MAVAQGDRIGGKAMEVLYDRVAGLDVGKETLTACVRTPSPGGRGGSRRGETRTFKTTTGSLKVMRDWFLEQGVAIAAMESTSTYWKPPFYCLEEVMTVWLLNAAHMKAVPGRKSDVRDAEWIAQLLEHGLLAPSFVPPPEIRRLRLLTRYRSQLMADRTREITRLELMLEDASIKLSSVASSLSTVSARAILRAMIDGETDAVKLAGLSRGRMRSKIPDLAQALEGHFDVHHAQMARSLLGRLDLVEHALHEADDTIADACRPWQHQLDLLQTIPGVGVKVAQVFLAETGGDMTRFPTAAHLAAWAGLAPAMHASAGKQSPAGKRHGNPFLTAMLVEAAGSVGRMRHPNYLSAQHARLTKRRGMKRAQVAVAHSILVAAFHMLQRDQPYHDLGADWHVRRNAEAHQRRLVHQLEQLGHHVTLTPAA

SEQ ID NO: 62481 - protein, 410 aa, unidentified
MEGTIFIGIDVSQQTNTVHVMDGTGNRLWQRTFDNTLTGSQEIVRQVLETRHKHPAGFLSFGLEATGCYGDLIAMYLRETDLIPRFEKAVRLLNPKQVSQFKKSYAELPKTDGIDSFVIADSLRLGRIGLKGTVVEDKYLSLQKLTRSRFQVAKDLSREKNRYLQTLFLKFSTLAQDPPLSNLFGATALDLVNDFESVDEIAYTPLEELAEFLNQHGKGHFVDPEALAKEIQKAARSSYRLPKAIQNSVNQVLAMQAQTIRFYAQQLKDYDKLIEAQMTGIPNTLTSIKGIGPVYAAGILAEIGDVNRFKDQAALASFAGLSWSRHQSGKFEAEHTHLVHSGNRYLRYYLIEATNKVRKHDPELKQFYDRKYNETPKSKSKRALVLTARKFVRVVYALLRDNRIYIPRAD

SEQ ID NO: 62482 - protein, 424 aa, unidentified
MSAPESIPSYDLLVSLDRSDRTAALALLDLPTGVLLTEATLDLAPEALDAWWRSLRAAHPKARIAVAFEQPAPNLLAFFAPRRPAAIYALNPSATWAYRQSLTVSRARNDQSDARDQALFVKNHLAELKPWIAPDAAVVQLERLTLSRRKQVDARTALTNQLQAALKRYFPQALELLHEDIWRPMNLEFLRKWPSAQKIQTVPLARLRAFYHKHGSRSEARWTQRSGLISRLVPLAEAGPADELEVGALIDQIEVLTASIARHDHVTAELFAAQGVAAERAAALPGAGPILAPRIYVALARHAPNCENAESLAAAVGVAPVTDQSGKMRKVYRRLRCDNHTRQTFVEWAKESWKHSVWAEAFVRQRQAKGQAFYAIIRALAYKWIRILWKCWQDGVAYHEDTYLIRLRQKGSSLAPQLPSPKAA

SEQ ID NO: 62483 - protein, 366 aa, unidentified
MFKVGEKSESVSADRDGSRDHIVKRRGSMSQLSKSAAGVIFCGIDVSAATLAVAVEQQDQPVAEREFPNNGSGHKALIAWLSQRGHARVSLEATGVYSLDLALALDAAEGVEVQVLNPKVAHRFGQTLSRSKTDPVDARTLAAYSRRMEFTGWRAPSRSQLQLRSLTRHIDNLTAELTRGKNRLHAAKVSDMTPACIVEDLHNALESLECRIHVLRREALALVRADAVLKENFELLISIPGIARVSALQILGELVVLSPELSVRQWVAHSGLDPAHHISGSSIHRPSRISRAGNRALRRVLYMPALVAIQHDPHIKAFYRALVHRHKAKMQALIAVARKLLHAIYGVLKSATPYDGQKLFPQIQAI

SEQ ID NO: 62484 - protein, 346 aa, unidentified
MAYYVGLDVSVKETSICILDDKGVVAAHTDVSTDPDLITRFISGHAPNVERVVHESGILAIWLTRELAKRGVPIICIDARLAHKALSGRINKSDQGDAEGLAQLARTGWFTQVHIRSEASERVRVLIGARERLIRMRKDLEGHVRGVLKVFGICMSSIGTGKLRRDFRDQLAAAADADPAIELMAEMFIPLHKTLCIARDALDEEVRIMARESDLARRLMTVPGVGPIVALAYIATLDDEKRFRKSIDVGAFLGLTPKRHQSGEVDWSGKISKCGDCDMRRLLYSAASTLISCTRKPSRLKEWAIKLAERKGHKKAAVAASRKIAVIMHSVWRHGTVFEPGMEGAG

SEQ ID NO: 62485 - protein, 411 aa, unidentified
MKLFVGLDVSSFDIKVCFLNGEGEQLASFTVSNDLPGATQLRNKILKTAKDQDVTILRIGLESTSVYSFHPSMFLHNDESIQALGGQVLVMNPKQIANFKKSYSDMDKTDEIDAFVIADYLRFGRLPMSVVKEEQYVALQQLTRARYQIVRQITQEKQRFLQYLSYKCNTFTEEVESSVFGKAMMDLFLENYSLDELSNMSLEDLADYLQKQGKNRFPDPDCVAKSIQKAVRSSYRLDKVVEDSIDTILGTSITLIRTFEKQIKELDKSIERIMKGLPQTLQSIPGIGPVLAAGIQAEIGQIERFADETKIAKYAGLYWRKHQSGRFTADDTSLSRNGNQYLRYYLVEAANSVRRHVPEYKEYYAKKYDEVPKHQHKRALVLTARKLVRLVDALLRKNQIYTPKGAYIHEA

SEQ ID NO: 62486 - protein, 427 aa, unidentified
MKNSTARKLGQIPADYLIVGIDAHKKKHAAVIKTPDAFTRAKFKVENSRSGFEELLERVQSQLTNTGCKGAIFAIEAGSRYWRTVAYFLEERELPFRLISPFTLKRRREGEDIDRRKNDYRDADMAAELLRTGKFTETRLPQGNYADLRAAYHTYYSLGRERSRATNLLSALLDGLFPEFHTVFKDVSTKTALSIMATYPCPHTITRMTMEKFMDTMLAKYKGQHILRKKLSQVYQAAQHSVGIQAGAGVLSFEISLLVERIRLLTEHRRKVEDLIVALVEWIPESKYLLSVPGLGHLTVAGILGELGPLTHYRNAKQLIKMAGINPTQSDSADKKASRTPMSKKGRPLLRYCLWEASLNILNHNEEFKAWAKQLQQRPLHQNPLKKREARGAVCRRLLWLVFALFNKRSFYQKNYKTETEVELVTA

SEQ ID NO: 62487 - protein, 344 aa, unidentified
MKDVRILGVDLGKNSCSIVGLDGAGRVLLRRRTRREGVIALAAKLPGCVVAMEACCGAHHLGRLLVEQGHEVRLMSPEYVRPYVKAQKNDDRDAEAIAEAATRPTMRFVALKSEAQLDVQVLHRVRDRLVGQRTSLTNQIRSILLERGIVVPQGRRSLLEALVVLSSEPDGRRVGTRVQRLLDDMLDQWRALDARIKALDDEFAEMARNDPAARRLATIPGIGVLNATALVAAIGDGRTFSRGRDLSAWLGLVPHQATTGGRPKLLGITKRGSRYLRKLVIQGARAALPSLARTATPLGGWLRGLLARAHGNTVVVALASKLIRIAWALLRNETRFVAGGAAVA

SEQ ID NO: 62488 - protein, 413 aa, unidentified
MLFVGIDWAEDHHDVVVMAEDGRVLAGARIGDDLAGVGRLHSLIADHQTDSDEAVGVGIETDRGLLVTSLVAAGYEVFAVNPMVASRYRDRHSIAGAKSDAGDARMLADLVRTDRHLFRPIAGDSDEVEAIKVIARAHKRMIQDRQSQVNRLRSSLREYYPGAIACFGNDLADRDALAVLAAAPTPGLGRALSQAKAVAALRRGGRKRNLERRATEIRAALQTAQLDAPGPISAASGTATGALVAVIGVFNAQVAALEAELVDHFEEHPGAEIYRSLPGLGDVLGARVLAEFGDDPNRYQDAKSRKNYASTSPVTRASGKSTIVHARYARNSRLADACRQWAFCSLTNSPGARTYYDALRSRGKNHEQALRQLGNRWVGILHGCVDHASVYDEATAWSHWLNPSVDEGIRVAS

SEQ ID NO: 62489 - protein, 352 aa, unidentified
MSNVTLLAVDLAKNVFQLYGSDAYGNTVFNKSIKRDKLSQFVANLAPCNIYTEGCGSANYWGREFQKHGHQVKTLNPKYVKPYVKRNKNDINDAAGIAAAARDPDMRFCNVKTESQQDIQSVHRIRSMLIQQRTALVNQTRGLLSEYGIITAKGITSIRKALPNVLGSNPNNMSALILTCIAELKTNLESFDKKIIACDEKIEALFKSNDACKRIEKIPGIGILGATILASVLGNGSSFKNGRHFAAFLGLVPKQHSSGGKEMLLGISKGGDTYIRTLLIHGARSVLQWLDKKADIKNDKLRIWLNNLRSRTSVKNKIAVALANKIARIAWAVVHENEEYNANYRVVKNAKA

SEQ ID NO: 62490 - protein, 388 aa, unidentified
MSFTIDPGVRTETTIRPDHATVFVSLELSRSKWLITALLPCSDKMSKYCVDSGDGTALLDRLAQLRARAEPRIGTAVHMVVIQEAGLDGFWIHRLLESNGMESHVVEPASIAVPRRHRRAKTDVIDGEMLVRTLMAFKRGERRVCSMVVAPSPVEEDRRRVSRERRTLIRERIEHANRIKGLLATQGIVGLEPMRKDFRDRVEGLQTGEGQPLRPHLKAEIIRELDRIDLVVRQVGVVEAERDALVKSDNIDTTAPAALLMKLRGIGPEFAAVLWLEGLFRNFANRRQLAAYAGLAPSPWKSGSIDREQGISKSGNPRLRTTMVELAWLWLRYQPGSALSAWFRERAGSERGRSRRIMIVALARKLLVALWRYTTLGELPKGAALKIA

SEQ ID NO: 62491 - protein, 379 aa, unidentified
MMTSPATSTGEQVLYCTLELSKNSWLLAIQFPGRDNPSLHPIMGGDADRLMAKLDAARERLGKFSGRVPKVILCYEAGYDGFWLARFLEQRGIECLIMEPASLQVNRKARRVKTDRIDVEKLLHALIAWCRGERHVCSMVGIPSVEEEDLRRSHRERDRLVRERTAHINRIKGLLFGQGIRGINVKRHYKTLVPADLVTRDGRPLPERLAREIAREIERLALLQVQLREIERERDLAPTPCLATERKRHQLLRLNGIGVVSASVLAREVYYRQFANRRQVASYFGMTPSAYDSGESRRSQGISKAGNKLARTVMVQTAWLWLRHQPESELSKWFHRRTEGQSKRIRCVMIVALARKLAIALWRYLETGLVPQGAVLAAE

SEQ ID NO: 62492 - protein, 340 aa, unidentified
MNTTQVAVDLAKSVFQVAVSSTPGRVDEQHRLSRARFHRFFAERRPVEVLMEACGSAHHWGRELEALGHTVSLLPPSDVRRYRDGDKTDRADTKAILEAARNEAIDSVPVKTIDQQAITALHRLRSGYLATRTARINCVRGLLREFGVTIPVGARHLAPRARAAIDDGSVPAYLEPVLLDAITEVEELRRKAKDIEAQLKRLVRHMPDVTLLMSVPGIGVLTATALVAYVGDVGRFPSGRHFAAYLGLTPREHSSGLSRRLGRISKRGNTYLRMLLIHGARSVLRAAKLTEQPDALRAWALSVEGRSGHNVAAVALANKLARITWRVWRDHRSFESRLAA

SEQ ID NO: 62493 - protein, 363 aa, unidentified
MTDGICFVGLDVHARKTAAAAVQLGSGEVFKAQLSGAPADALQWFATLPGPVRAVYEAGPTGFGLARAARAAGVEVMVCAPGAIPRQPGDQIKTDTRDALKLARLLAAGQLRPVVVPAPELEALRDLVRAREDLRGDLMGARHRVGKLLLRRGLVWDGPGAAWSPRHLRWLGTIRFDDELVEVVFGEYLAHHEVLLARRDRLDKLLLEQSTQGSWAPTVARLRCLRGVDTLTAVGLVAEIGDITAFRHPKQLASYLGLVPSERSSGTKRRQGAITKAGSGHARRLLVEAAWHYRRPPRVSEPLKRRQDGQPPAAVDAAWRAQIRLHRRWAHLDAARAKKRTTVAVAVARELACFVWEIARQPD

SEQ ID NO: 62494 - protein, 313 aa, unidentified
MGDFMSVAGVDVHKDSISITMLFQEGGKWKQEYFESQTFSQDLIIAGKKIKSKKITEVAMESTGIYWKPIFHIWNEMGIKITLVNAHHLKRVPGRKTDASDSAWIAELHQKGLLKSSYIPDETFQELRALTRHRTTLVNANSPIKNRVQKILEDGNVKLSSVLSDVFGVAGTEVIKGIISGEDDPDKLVELIKTNVKETKETIRKSLVHTLKPYHRLLIKQLYQDYLFRSQLIFEIEYEIDEKMKPFETQIKLLDTIPGVDKVTAQIIIAEATTETKNFENERIFASWAGVVPGNNESGGKKKDQNVDMEIPL

SEQ ID NO: 62495 - protein, 341 aa, unidentified
MKPELSVVGIDLAKSVFHLVGMDERGKIILRKRLARGEVMPFMAKLPRVLVGMEACGGAHYWARQLREQGHEVKLMAPQYVKPYVKTNKNDLRDAEAIAEAVTRPSMRFVPIKNVAQQDLQALHRVRERLMGARTALVNEMRGLLAEYGIVLPAGINAFRNALAAKLEAEHAKLTPLSQELFGKLCAEFKKVEAEVAYDDEKLQALATTHPESQRLLTIPGIGPITATALIAAVGDMGGFTNGRQFAAWLGLVPKQHSTGGQPRLLGISKRGDSYLRKLLIHGARATLRWARTKTDSRSQWIRGLLARRGWNRTAVAVANKNARIVWALLSRGGVYRESTN

SEQ ID NO: 62496 - protein, 344 aa, unidentified
MDLGKKESQIAIVTEAGELIDKRLRTERQRLTQYFKERPLAKILIEASTISEWVARLLEGLGHEVMVADPNYAPMYAQRSRRVKTDRRDALALAEACKLGAYRPAHRTSDEQRHVRAVLTARDSLVRSRAGLVTLAQAILSREGLRVPSGSSGCFGERIERLGLPQPLAAEIAPLLAMLMPLNEQIGLLDEKLSELGRKDERVKRLMTMPEIGPVTAVAYVATLDEAERFRGAHQVEAYLGLVPREWSSSEVQRRGHITKAGNSRMRWLLVEAAWRVATHKKRPETQALREWAERIARRRGQRVAVVALARKLSGILYAMWRDGSAYDPGKLKGMRRSKVEQVA

SEQ ID NO: 62497 - protein, 347 aa, unidentified
MDHIGIDVHKRESQICILAEGGELIERRIRTEPERFAAVLGGRPQARIVIEASTDSEWVARCLEALGHEVIVADPNFAPMYATRTRKVKTDRRDARALADACVLGAYRRAHRLSDVQRHVRGRLLVRDALVRTRTRYISAIRALLRQQGYRVSSGSAEAFPARVRALALPGPLLSLIAPLLAVMRHLNRQLAYSDETIERVAAYDERVPRLRSVPSVGPVTAAAFVATIDDVQRFQHAHHLEAYLGLGPRECSSGDTQRRGPITKAGSGRARWLLIQAAVSILRRRPPEAEALRTWALRIAARRGKHVAVVALARRLAGILYALLRDGTVFTPRQISPPLASAARAV

SEQ ID NO: 62498 - protein, 345 aa, unidentified
MKVTTAGIDLAKNVFQVHGVDEHGKTVLKKQVKREQMAPFFANLPTCLIGMEACGSAHHWARKLQALGHTVRLIAPQFVKPYVKTNKNDAADAEAICEAVGRPNMRFVPVKNIEQQAVLALHRVRQGFIKARTAQVNQIRGLLAEFGLIVPQGISHIASRVPELIEDASNELPGSFRTLINQLVDHVKVLHTQVLDMEAKIKAWHRESEMSRKLEQIPGIGPVTASALVATIGDAKAFENARQLAAWMGLVPRQHSTGGKAKLMGISKRGDTYLRTLLIHGARSAIVAFQRKAMKEDSWLGKLLLRRNPNVSAVALANKNARIVWALLAKDRTYRNELTPMVAGV

SEQ ID NO: 62499 - protein, 331 aa, unidentified
MAIDLAKGSFQVCGVKADGAVVFNKSMSRPRLYQLLADHAHCAVAMEACATSHHWGRVAQSYGHEVRLIPAAYVKPFVKRQKNDRADAEAIAEAASRPSMRFVAVKSAEKQGRAVAFRTHQCFVRQRTQLINALRGHLAEFGLVAPKGPASLKLLERALAQPDVDLPSPVREMAALYLDQICRLTELIEQMADELDRASKTDEELRRLCTVPGIGPVTAGAIAAFAPDLSTFDSGRNFAAWLGLVPRQRSTEGKARLGAVSKMGQCDIRRLLIVGAMSVIRWVVRKGGSANRWLAELVLRKPRMVAAVALANKMARMIWAMTTKQENYRMA

SEQ ID NO: 62500 - protein, 367 aa, unidentified
MIYVGIDVAKDKHDCFITNSDGEVLFQVFTIQNNREGFDALFSRIQSVSPDMSNIKVGLEATGHYSYNLLGYLIDKGLPTFVINPLHTNLYRKSLSLRKTKTDKVDARTIAMMLMSDVNLKSYSDTSYHNEELKSLTRYRFDKVQERAQLKQSVSRLVTILFPELEKLVPTLHIASVYALLSELPSAGKIASCHLTHLTKLLGNASRGRYSREKAVQIREAARVSIGSNMPAKSLELRHTIKLIGELNSEISEIESEIKRIMDQIDSPILTIPGIGYRMGAMILAEIGDFSRFDSPDKILAYAGASPSTYQSGQLESSYSHMEKRGSRYLRFALINAAKYVCHWDETFGAYLQKKISEPTRASQAPP

SEQ ID NO: 62501 - protein, 319 aa, unidentified
MNTIGLDISQKTIDATLHKTDGSTYHTKVGNNREGFKSLKDWIKANKVRKCVIGMEATGIYYEDAAENLSEIHTVYVINPLKIKDYGKSQFNRTKTDKADSNLIAEYTKRHADKIIPYSKPKNRYLQKLINLKQQLKDHQKQIKNRLHSSDDEMIQAIHQDLIQTYQEKIDQTQTAIDAQIEQAENDGHYRNLQTIAGIGKDTAAILYAQLTDKTFQTANQFISYAGLSPQTEQSGTSVHKKGRLSRYGHRRVKRSLYMPALVAYRTGAFPQFVRNLTNAGKPKMVIIVAIMRKLAKLAYYIVKTGKPYDSTRHKAAQA

SEQ ID NO: 62502 - protein, 379 aa, unidentified
MPEVSSNAPAKPTTYVALDVHKLSIVAGVLPASGGEVELLEAENTERSIRRLIKHLGGPEGLTVCYEAGPCGYEPLRLLSEMGVACDVIAPSLIPTRAGDRVKPDRRDARKLVRLYRAGELSFVAPPTPAQEGLRDLVRCLDDLVCARRAARHRISKALLRHGHIWRDGKKSWTKAHRAWVDAQRLEDQLAEEALSQMRAHLQSLDAQIAAIEHRLEEVARTEPWCDPVRWLCSFRGIATRTALGLLAEIGDFRRFSAPRELMSFLGLTPSEYSSGEQRHRGHITKTGNRHARRLLVEAAWHYRRRPALSKRQEELSPLLPAEVPARAWQAQVRLHHRRRALERGGKRSTVANVAVARELCGFIWAAMTHQPLREEAPA

SEQ ID NO: 62503 - protein, 375 aa, unidentified
MKEKLRFLGLDVHAETIAVAIAEPDGEVRSLGTIPNRLESIRKLIKKLGPTEKLRACYEAGPTGYVVYWQLAELGVKCDVVAPTLVPVKAGDRVKTDRRDAEKLARSHRSGDLTAVWVPDEGSEALRDLVRTREAAKQDQLRARHRLSKFLLRSGQRPPTGIRPWTRPYLIWVAQLRFTQMAQEATRLDYLHEVEHMRERVERLERAITEAVKLASPALQQVINDLQALRGIADISAVTIAAELGQVSRFDGARQLMGYCGAVPSEDSSGKRTRRGSITKTGNAHLRRIVVEAAWSYHRPPCIWYGLRKRQESISEEVKEIAWKAQHRLHKRYMRLAAAGKDKRKITTAVARELLGFIWAIGTRAETTVRQQIAA

SEQ ID NO: 62504 - protein, 360 aa, unidentified
MSESYAGRQYVGIDLHRRRTVVVRMSAEGQRLGSMERIPSTPEALRSVMEAAGPAPMVVLEATYGWYWAVETLQGLGAEVHLAHPLGVKGFSYRRVKNDERDAADLADLLRMGRLPEANIAAEPVRALRELVRYRAKLSRWRTSAKSSIHAVLAKRGVVVPMSDLFGAAGNELLDGLVLEPAYAARVSSLRDLLRMLETEITGFDYVIAELLAGHRGYRTIMGISGVGPVFAAVFVAEIGEVGRFAGPEKLASWAGLTPRHRESDTKVHRGRITKQGSTLLRWAAVEAVQRSSEPRITQVRTRISDRRGRPGQPGSGRNIAKVAAARTLLSLVYYGLRDGHIRALDNPPVLDSATALQPA

SEQ ID NO: 62505 - protein, 413 aa, unidentified
MRVHHPRCAGIDVHKRKVTVCVRLGEGGKVRNEIREFGTTTKEILDICDWLKEFEIRSVAMESTGAYWKPLYNLMEDEFEILLANAHHMKTVPGRKTDTKDAEWIAELHAHGLLKASFVPDQEQRGLRELTRTRATLVGERARLANRIQKLLEDANVKLASVAANVLGVSGRLMLRAIADGEDDPKVVSDLARGLLRKKIPALEQAIEGRIRPYHRIVLRELLKQVESLDESIASLERAIEATMEGSERPFETGAQLLVTIPGVANVGARSLLAEIGTNMDQFPSDRHISSWAGISPGNNESGGKRLSGRTTSGNVWVKRCLVQMAHAAVRAKNSYFQAMYARLFRRIGKKRAIIAVAHALLVAMYHMLKNGVPYEDLGADYFDKVNSERTVKHLVQRLERLGVQVPLPEAAM

SEQ ID NO: 62506 - protein, 337 aa, unidentified
MDYYAGLDVSMNETHICVVERDGAVVLEAKASSTPEAIAAVLETAPACAKIVLETGRMAPMLFHGLAALGLPVICIESRQAYQALKSLATHKTDRNDARGLAHLARTGFYKPVHVKSLPAHAVRALIIARKKLVGQRVTLENQIRGLAVVFGVRLPRGLSPRFTEQVIQASQGIAGLSGAMQGLLAARKAVLDAVVAIDRDMRLLARSSQACQRLMTIPGVGQLTALAFVATIDAPERFRRSRDVGAYLGLVPRRFQSGEIDYVGSISKCGDRRVRTLLYEAANVMLTRYRGALALKEWALGIARRSTMRKARVALARRLAIIMHAMLRHGSTFQTV

SEQ ID NO: 62507 - protein, 317 aa, unidentified
MSYNIAAIDIHKKVLIVVVAAVAEEVADATGAAVELEGRKFGSGARERNHLVSWLQQRRVHEVVLESTAPYWKPVWLDLEPHLEKLHWAQAQSNRAPQGRKNDFRDAQRWGRRWLAGERMLSFVPEPEQRTWRWMTRGRLPLVRERVRLPNQVEALLEEARIKLSSVISDLLGVSGRRILEALSQGETDAVKLAELGDDRLRCTQEQLADALRGSPEPSHRALLKLHLERLKLLDQQIDQLSQRSATALKQHQDAVVRLAEVPGFGIESAQQRIAEVGVDAEAFPSAGELASWCGACPGSAVSAEENYSSRCPKGNR

SEQ ID NO: 62508 - protein, 343 aa, unidentified
MEKIITVGLDLAKSIFQVHGIAENGEVLVRRTLRRSQVLPFFRGLPACLVGMEACASAHHWAREIAALGHSVCMMPPAYVKPYVKRNKTDMADAEAICEAVTRPTMRFVPVKTVEQQAAGMILRTREMLMKQRSQTANALRAHMAELGIIAGTGMASIAKLLVLLRDERDNRIPGAARFALIQFAEQIELLTTRIEKLDREIMVVVRKDPDARRLMSIPGVGPLIAATVRTSVLDPRGFATARDFAAWTGLTPRARSSGGKERLVAISKRGNRQLRTLLIVGATSIIKLAKRGLKVPLWVRTMLQRRPVKVVSVALANKIARTIWALLVRGGIYQPPAAMLKS

SEQ ID NO: 62509 - protein, 394 aa, unidentified
MAFKIFRKNCCGLDVHKTWIYACMGITDTNGRTEYKQARFSSFTKGLQELADWLAKYDSNDVCMESTGKFWIPVFNILEKTCWVTLAYPKYTKPQKGNKTDHKDAKWICDLYMCDMVNPSFIPPPDIRQLRDLMRYRSKLTNIMTSEKNRALNCLTVSNLKLDDVFSDVFGKSSRSVIRYILEHPGETFQVAPFIDRRCKHPVEEIQAVIDGTISHQQAVKLRECLQHLDELEVHKTNVEKEILCLVQQYPYQLELLQTVLGFSRNIMTAIALISEIGADMSVFPSAKHLVSWAGCCPRNDQSSKKVKSTRISRAGVYLKPLLVQVAIQPFTANADKLSAAGALEIRCQICDGRFLSMWAALFIFLGCPLPPCPKNLHVHNGRIVILVSVAWIF

SEQ ID NO: 62510 - protein, 375 aa, unidentified
MSASHRGCDGVDASPTALGVPEWWVLVTTEQEASVSEVSTIGLDLAKRVFQAHGADASGKVVFRKRLRREQVLAFFAGRPACVVAMEACSSAHYWAREIGELGHTVRLIPPAYVKPFVKRQKNDTTDAEAICEAAQRPTMRFVSVKSEAAQANAVVFRVRDLLVRQRTQAINALRGHLGEYGVVVAKGPSHVAKLIAHVEDPAADLPEAARTVLRALTASLQFLSERIDLLDREVARRAREDKEVRRLTTIPGVGPVIATALAALAPPADAFRRGRDFAAWVGLTPSQHSSGGKQKLGATSKMGERTLRRLLIIGASSVVQKAIKHGTRSGSWLGRMLARKPRMLVIVALANKMARTVWALQATGEIYRAPVVAA

SEQ ID NO: 62511 - protein, 353 aa, unidentified
MMVLGADTHKRSHTIAAVAAGTGEVAGEKTVAVGARGFGALLIWARELGPQRVWALEDCRHVAGSLERFLIARGERVLRVPTKLMADSRRAARTRGKSDSIDAVAVARAALREGLDELPAAHLDGPELDLRLLVDHRERLVAQRVALNNTLQWHLHDLWPELALPGGALFSTKWSTRLGRKLARAEQTMRVRIARDELRRLRELTHAIKALESEVAQLVAQVAPQLLSEPGFGPLTAAKLVGEIAGAHRFATDAKLARAAGLAPIPISSGKTNRHRLDRGGNRQINAAIHRIAVTRARCHPETRDYIARKRSEGKTHRDAIRCLKRHLARRIWHLLQPPAPLPNQTITPTSLT

SEQ ID NO: 62512 - protein, 409 aa, unidentified
MDVIVEGACGLDVHQKTVVACIRVTASGRKPVKEIKTFGTTLSDLEELRGWLHARGVTQVGMESTGVYWKPVYAVLEGSFELIVGNAHHIKNVPGRKTDVKDAEWICELVRHGLVAKSFVPPKPIRELRDLMRYHRKLVEERTGERNRLLKVLETANIKLSSVATDVFGKSGMAMLDAIARGETSGDALAGLAQGLLKKKTAALKKALTGRIDEHHRFLLGVQLGRLRTAEADLAKVEAYVDAKMEPYRTQQHALEAIPGIGPHTARTIIAEIGVDMRAFKNEHHLAAWAGLCPGNYESAGKRLGGRTRKGNRHLRSALVEASRSAIRKKGSYFRDRYYRLKARAGGNRAAVATAHKILIAAYRILADGTAYQDLGAQHLDNLHKTRTTRQLVKRLQALGFHVDLQPAA

SEQ ID NO: 62513 - protein, 343 aa, unidentified
MAVMIGVDPHKATHTAVAIDRTESELAQIRVRATRKQVSQLLAWAEPLGARTWAVESATGLGYLLSQQLVAAGETVLDVPPTLASRVRVLSTGRSDKNDPNDALSVAVAALRTPELHQVAVADHVEVLRLLAKRNIEIGNRRIQSVCRLHAALAELSPGGIAKELYASDAMAFLQRIEPATPVEAARHARATELLADVQRLDEQLKASHKRIATAIKASNTTLTEIFGIGPVIACYLIGFTGDIDRFASRDGYAAYNGTAPVERSSGGRKVHRVSQRGNRRLNHALHLAAICQIRQPHSEGRAYFERKVAEGKTKKDAIRSLKRQISNTVYRHLVDDRQRRMM

SEQ ID NO: 62514 - protein, 341 aa, unidentified
MVKTPAITGGVDTHADVHVAAALDGIGGLLGVSEFPATPSGYAQLLGWLNSFGTVCLVGIEGTGSYGAGLARHITAAGIRVVEVDRSDRQDRRRKGKSDPLDAVSAARAAQSGRASGAPRGRDGAVEAIRALMVAKRTARAQRTQTINQARALILTGPDGIRARFTRHGPAELVAGLAALRPHPGSMVRYHTLLSLRELGRRAQFLDGQLERLDVLIIPLVTARAPGLLKLYGVGPDTAAMLLIAAGDHPGRLRSEAAWAHLCATAPIPASSGKVARHRLNRGGDRQANHALWRIVITRMSSHPATRAYVQRRTAEGLSKKEIIRCLKRYAAREIYPHLRG

SEQ ID NO: 62515 - protein, 376 aa, unidentified
MRTIGAERPNTKGAVILGVDTHLEFHAAVAVDHLGRRLGEASVPTTAKGYEMLLSWAEAFGPVRCAGVEGTSSYGAGIARHLRTHGIEVLEVERPKHLRRSSRRNRHKSDPSDAEAAARAVLAGEASGVPKSADGRVEMIRVLRAARRSAVKARTQAANLLQGLRVTAPEHLLKRLRGLSTKELVSVAARFRPGNAPEDVEAATRFALRSVARRYQVLSEEIAELDAHLDRLVAQAAPELVSLPGIGTDSAATLLIVAGDNPQRLRSEASFASLCGVSPIKASSGKVVRHRLNRGGNREANRALYMVCLARMRRDHRTKEYVARRTQEGKSKREIIRCLKRYIAREAYRVLVSCGACSSPIGPKDESHIAAGSDAA

SEQ ID NO: 62516 - protein, 309 aa, unidentified
MYVGIDVCKARLDVYLHPCGERFAVANDAGGRRRLRRRLDKLAVALVVIEATSKYHRAVHRHLDAAAIRVAVVNPLRARLFAEASGIFAKTDAIDARTLALMGARLDPARTPPVSRIVEALDELVRARSAAIDERVALANRRDNTATPFLRIELARRIRALDTHVRRIEARISHLVAQDPHMAARHAILRSIPGIGPVNAATLCAGLNELGRVDAKQVAALAGLAPFATDSGPKNGQRHIRGGRPHIRKALYMAALSACRFNPDLKRFHASLIANGKPPKVAITAVMRKLLVLANSLVAQNRPWIPRPA

SEQ ID NO: 62517 - protein, 342 aa, unidentified
MKDSIYDHYIAIDWSIKNMAIARMTKKSNKITVIDVASDIEDLQAYLKNLRGTKILTIEETTTSQWLYTELREYVDRIIICDPSRNKLLNEGAKTDKIDASKLVQLLKAGLIKEVYHSTEKFLYLRRIVSGYEDLIRAGVRLKNQRYALLRICGKSGNEKIGSRLACQGEQFVLESLDRQIEAYEQDKQGYEMQFAKLARSNPAIKHQKSLPGIGVINAVKIVARVVTPYRFPDKGHYLSYTGLIKLAKISGGKSYGKKNPRYSRQLKSVYKSGVLAAIGGNNPINDYYNSLIQDGYAQHNARQKACRRLAILSLGVFKSGKRYQPYRSNHVKGGKEGTSSL

SEQ ID NO: 62518 - protein, 382 aa, unidentified
MPDVISSAPAAVRMRAALDVHKRTIVCAAQPDDPRAELRLEEIPNTERAVRGLVRRLGGPEGLVVCYEAGPCGYDLFRLLSAMGVACDIVAPALTPVAPGARVKTDRRDAKRLLVLHRAGALKFVAVPTPAQEGLRDLVRCRDDLVCARRAARHRVAKQLLRHGHVFREGKKSWTKTHQAWVRRQRLGDPLAQSALEHMLAHLDSLDAQIAALDHQLDEIAAREPWSDPVRWLCCFRGVTTITALGLLAELGDLRRFATARELMSFLGLTPSEYSSGEQRHRGHITKAGPRHARRLLIEAAWHCQHPPRVSQRIAAVHPHVPPDVAARAFSAQVRLHHRHRHLTSHGKRSTVANVAVARELAGFIWAAMTRQPLPAQEVTAA

SEQ ID NO: 62519 - protein, 426 aa, unidentified
MNTTTKFAATIGLDWADQKHDLWICPADGSKAKHVRLEQTPEALHAWVAKMRERFGNRPIALAVETSRGPVISALVAYDFIVLFPVNPKALKDYRSAFAVSGAKDDRTDAQLLEELVRLHPDKLRALEPDTELTRRLAGLVENRRRLVDQRTRLVNQTHALLKTYYPLAQTLLADQMNSAMAAAFLLRWPELEALQKASPEVLRAFFYKHHSRSAKKTEQRLQAIQQAKALTTDPALIQPARDLVLAFAGMLRPLHQAIARFDKQIEQAMDQHPDAPIFRSFPGAGPALAPRLLVAFGTNRDRFDQAADVAQFYGIAPVVVQSGNSKQVHFRHRCPKFGRQTFHENAGCALKKEPWAKCYYNQHKQRNKGKHHQACRALAYKLIRIYFACWKQRQTYDPHRYLKALETHASPLHPKLQNLTASPCE

SEQ ID NO: 62520 - protein, 346 aa, unidentified
MLHAGLDLSRRRLDFHLLDEGGGTVELGAAPPDADGLERLAARLGRHGQPIAAAIESMTGARFVHDQLELRGWEVEIADARKVKGLAPLACKTDRIDAWVLAELSRRELVPAIWLPDPSVRAERERARFRLSLVRKRSSLKARIHQTLVSFGHPCPVSDLFGPSGRALLARLQLPEPWRGTLAASLRLIDDCGREIDACERELRRLGADHPSVPLLMTCPGIAWVLAYTIAAEIGDIARFASPAKLAGYTGLCPRVYQSGDSDRRGPLSKQGPRYLRWALVEAALHASRHPAYRERYQRTRARLGKQRGPRVAQVDVARRLAEAIWHMLTRNQPFAPAGASSVLTA

SEQ ID NO: 62521 - protein, 480 aa, unidentified
MAKRATQRADLKAVPLLLHESLYVGIDIGKGRHLAGFLSKTLLERHERFEACPALVFENAREGFRLLIERIRGLAPLEHVFVLMERTGHYHRTLEHYLQELDIPVSMMHVQSRPGGMLKTDKRDALTLANQLYSQLELGVQVANKLQLVRRVVPPTEAAAQLKGLIRHRYELIRESTQRKNKLTAICDEVFAELTRVVKDPNSLFALTLRERFPTPQALAPVSFTILQEIRGGARSLSDARLLELQGLAAQSLGIKDVARLRGLVLEQGQLIKELRLLREHVEHLDSEIGNIVAHAREGQILLSFPGFGAITAATIIAAIGSIHNFPSASALKSYFGWAPVVVQSGSTLDHSRLTRGGTRTMKQILFLAVFQAIRLQDNEWAKLYERLVKTRCPYDEKTQSRVGKKRVIGRVAGQMTEAIYALLKRDAELLAKMLPGQDPPPPLLYDPEVHQRHRQGQYRPLKSTPLPNTITVLHPLSSE

SEQ ID NO: 62522 - protein, 324 aa, unidentified
MASIEAVEGVVTIGVDPHPGSHTAAALDGVGGFLGTERVGNGEDAGQELLQWGWRFPRRRWAIEGAGNRFVRSVVVELLASGEEVYSIPPAMTSAYRSRRGRKKDDVIDAMNAARALQANPELPRYLPVEHEAHLKAVSRAYHRVSTELKRLRMMKSSATDQVVVTALEVGIAGLAQSLQGLRRELEAVTEALAPKLLERQGIGPVVAGTILAEVGEIRRFAGRDHLAAYGGAAPIRWESGAHSVERVNPGGNRRLNWAVHMIVRTRLRLDERTQAFRKRKLAEGKTQREIVRALKTYVLREIYTVMRNAAERAKPPVEVALAA

SEQ ID NO: 62523 - protein, 382 aa, unidentified
MARTREGARRVTRSGARGAEDVADDVVLGVDIHLDFHVAVALDRLGRRLGEIKVPTTAEGYERVLRWAEGFGPVRCAGIEGTGSYGAGLARHLKAAGIAVVEVERPKRRHLRRRGKSDPIDAEAAARTVLAGQAAGEPKNGDGRAEMIRTLRSARQSAVKARSQAANQLQSFMVTAPEELRHRLRGLSTKELLAAAARFRPGNEPEDVKAATRFAMRSVARRYHSLSEEIAELDAHLHRLVAEAAPGLTSLPAIGTHHAATLLVLAGDNPERLNSEASFASLCGVSPVEASSGKVVRHRLNRGGNRDANRALHMICVVRMGSDERTRRYVARRSAEGKSKWEIMRCLKRYIAREVYRVLLSSAAAEPPPSGITKPVLGADIA

SEQ ID NO: 62524 - protein, 386 aa, unidentified
MQKLNDLSRSLAPLKPDGTLIAVIEMSQSSWLVAGIVPGVERQPLKKLAADEIALLKLLHRWREEAEKAGRKIERIAVAFEAGRDGFWLARWLRTRGIEAHVIHASSVAVSREHRRAKTDRLDTELLKRAFLGWLRGERDHCKMVAIPTSKDEDAKRPSRERESLVEEQTRIVNRMKATLIRLGIRGFNPKLKKAAGRLEDLSTPEDEPIPPNTMAELRRDMDRRRLISDQIRQIEEARLDRLKQMPGDGPHAMLRLLARVVGVGIETADMLVQEVLARNMRDRRAIARYAGLTGSPDESGTKRREKGLARSGNARVRRGMIQLAWRFLLFQKNSALAQWFRTRTENARGTRKLMIVALARKLLIALWRLVREGVVPDGVVLRPAQ

SEQ ID NO: 62525 - protein, 344 aa, unidentified
MRIVGVTGGVDTHADVHVAAAVDHNGGLLGIESFDADQAGFEELLGWLVGFGPVEQVGVEGTGSWGVGLSRFLADHDVTVVEVDRPNRQKRRKEGKSDPTDAVAAARAAISGEASVTPKSRNGPVEQIRVLMVARRSAREQRIQTLNQLRHLVFTAPEEIRVRYKDRPKTGLVKEAANMRPNQGSDPVIYTTNLMIRNLARRIQVFNAEMREIDGMLTALVQQTAPSLLALYGAGTDTAASLLVAAGDNPDRIRSEGSWAHLCGTTPLPANSGKVTTRYRLNRGGDRQANAALYRIVLTRMSSDPETRRYVTRRRDEGLNTAEIMRCLKRYVSRQTYKHLPHMI

SEQ ID NO: 62526 - protein, 319 aa, unidentified
MQRYIGIDVHSKSSTIYVMSAAGKKVRQDVVETNGQALIGYLAQIPGQLHVCLEEGEWSAWLHEILEPRVAELVVEQPQSKTGSKSDAIDARDLAEHLRTGQIKTEVYKAPRRFTELRELARTYDMLTDDAVRAKNRLRSAYRRRAVGYPGHGLAAQSEALPELPAWMRQSVEALGIELASIEELRGGIEKAMIAESRRHPISRILQTAPGLGPIRVAQLIPIVITPHRFRTKRQFWSYCGFGIVTRSSADWAKVAGRWVRVPVQQTRGLNRDCNHTLKRIFKGAAMTVIRFKKEPLSSDYVRLTENGTRPNLARLVRL

SEQ ID NO: 62527 - protein, 407 aa, unidentified
MRYYIGVDWADEEDAVWVVNDAGDKMLSRRFAHTVAARSEWARWLRERQAEGIELWAAIERPHGRIVDFLLDHGVVVYPINPKSLDRARDRFRVGGSKSDPFDAKVLALFLRSDHLRLRPLRPNSEAAQELQGLTRDYRRQVHLQTRLLNQLTATLKEYYPRALELGEDLTAGWAQAFLARYPTPAAAAALTEPDWRAFAHAHRLSPTRTAALWQTLQQPQLPLPAHVVRLKARLLQALLRELAPTLATIAEYRQAIDDFFATMPTAEIARSLPVGKSGTTVPTVWAELGDHADRWASFRHLQAYAGSVPETDCSGKHHVVKFRFACNTTLRDAMHQLAFLSLPHSLWARAYYDRYRERGHTHHQALRALGAKWLKIIFVLWKRQVPYSETHHLATMARQHLHQTAA

SEQ ID NO: 62528 - protein, 313 aa, unidentified
MATSSYVGIDVSKDRLDVAVLGEERVWQVDNTQEGIVSLVEEMQEVCPELIVVEATGGYQRAVVEALFQVGLAVAVVNPARVRQFARACGLLAKTDKLDAQVLAVFGQKVQPRRYEVKSEAGKQLSALLVRRRQLEEMLKAEQNRLRTISQSLRGSVERIIACLKEEKQVLDAQIRQYMQEQTTWQEQTEILGSAPGVGMVTTATLLAELPELGKMDRKKIAALVGVAPMNFDSGKKRGYRKTKGGRTDVRSVLYMSTLVATRYNPMIRAQYQQLLKRGKEKKVALTACMRKFLTILNAMLRDRQPFRCTSIA

SEQ ID NO: 62529 - protein, 340 aa, unidentified
MQAITIGLDIAKNVFQVHGEDASAGVVLSKRLGRASLERFFAQLPPAVVGMEACGSSHHWGRVLGSLGHEVRLMPAAYVKPYVKRNKTDARDAAAICEAVQRPTMRFVAVKSVEQQCERALHRTRDLLVRQRTQLMNAIRAMLAEMGIVAAQGLKGFAILRAMIEGGDAAIPALLLPGLAAMTRQWHALDAEAAKLEHRIVERARADDASRRLMTIPGVGPLTAHAIVAAIGDGRQFASARDFAAWVGLTPKQSSSGEKHRSVGISRAGDNGLRRLLTLGAASRLRQVHGKPDKAGPWITGILARRPMRVAVVAQAAKTARVAWAVLTSGEEYRARSVAA

SEQ ID NO: 62530 - protein, 388 aa, unidentified
MIQVDDLSRSLIAFEQISTLVIVVELSQSSWLAAGVVPGIERRSLKKLDPDPTALLHLVEGWRDRATKAGRAITRTVLAFESGRDGFWLARWLRVRGVETFVMHSTSVAVSREPRRAKTDRLDTEMLIRVFLGWLRGEPRHCKMVAIPTLEEEDARRPSREREILVGERTRIINRMKAALVRLGIRGFKPGLLTAPQKLDALRTPEETPIPPNMLDEMRRDMARLAWVREQINAIEQARLERLERAPATGRHAMVRMLARVIGVGVETADMLVQEVLSRNLRDRRAVARYAGLTGSPDESGSKRREQGLSKAGNARVRRGLIQLAWRFLRFQKDSALAQWYRGRTEDAAGKRKRTMIVALARKLLVALWRLVTIGEIPVGVALRTAVA

SEQ ID NO: 62531 - protein, 393 aa, unidentified
MICVGIDVAKDKHDCVILNSEGKILAGVFTIPNNADGFDTLLQKIRSCTSSDDKIKVGLEATGHYSYNILGFLINQGLPTYVINPLHTNLYRKSMSLRKTKTDRVDAKTIATMLMSNVDLKSYTDTAYHNEELKSLTRYRFDKVRERAQLKQSVSRLVTILFPELEKLVPTLHMSSIYALLIEFPGAKQITEAHLTHLKSLLKDASKGRYGRDMATEIRDAAKRSIGSVMPAKSLELRHTIRLIRELDSEIKDIEAAIEAIMEELQSPITTIPGMGFRMGAMILAEIGDFARFDSPDKILAYAGMSPSTYQSGQLSLAGTYSHMEKRGSRYLRYALYNATKYVCHWDPGFAAYLAKKRAEGKHYNVALSHAAKKLVRLIYAMEKSRQPYKRAA

SEQ ID NO: 62532 - protein, 344 aa, unidentified
MSKQVVRGGDVAGLLERFARLREKARARTGKVFPFVVIQEAGLDGFWIDRALQNEGIESHVVDPASIATSRRRRRAKTDRIDGEVLVRALLAYKRGEPRVCAMIKAPTPEEEDRRRLCRERKVLIVERVRHVNRVKGLLFSQGISGYEPLRRDRRRRLDTLQTGDGRLLPVHLKAQVCRELDRLELLLEQIKAVEAERDVLLAAQQVAAPAPAAMLLDIKGIGPEFAAILWSEGLFRHFDNRRQVASYAGLAPTPWQSGSVDREQGVSKAGNPRLRTTLIQLAWLWLRHQPHSALALWFEERVRRNGGRLKKTTIVALARKLLVALWKYATAGVVIEGAVMKRT

SEQ ID NO: 62533 - protein, 382 aa, unidentified
MKETITGMRRFVALDVHADTIAAAIAEKDQAARDLGVIPNREESVRRLVKKLNEGGAWTACYEAGPTGYTLYWQLTGLGIPCMVIAPTLVPIKAGDRVKTDRRDARRLACSFRAGELTAVWVPDAPHEGLRDLVRAREAAKQDQLRARHRLGKYLLRHGKRAPQEMRAWTESYLQWIKTKVCFDQRCQQVSLEDYLNEVDHAGARIARLEKAIDEAVEQAPETMRELIRALQALRGVAKVGAVTVVAEVGTFSRFEHPRQLMGYSGVVSREHSSGGTIRRGGITKTGNAHLRRIIVEAAWSQRYKPVLSPAMRKRQESVSVEVQELASKARHRLHQRYMHLLGRGKNKQEVVTAVAREMLGFIWAIGVSVERAQMLKAKGAA

SEQ ID NO: 62534 - protein, 342 aa, unidentified
MLIIGCDYHPSIQQIAWVDTETGECGERRLTHSGGEAEQFYRELKKKGISVRVGMEATGHSRWFERLLAELNYELWMGDPAQIRAKRVRKQKNDRRDAEHLFKLMLENNFPRIWVPTPENRDVRQLVLHRHRLVGMRTRVMNQLQAIAMNEGVRRKRGLWTGKGRAQLEALRLPPWTTRRRQELLELLDRFDPSIDQLSQAIEEEAARVPEVQRLQTHPGVGPITALAFVLVLGTPARFGCGKQVASYLGLIPCEDSSADSWRLGHISKQGNALLRFLLGQAAQSVARSEEQWRHQYAHLALRRNHAIAKVAMARKLAVRLFWMWRQGWDYQQLKKFGSHAG

SEQ ID NO: 62535 - protein, 382 aa, unidentified
MRESIKTPSVAPVTIPALTVGLDVADKYTIICGIDAQGEIVERSRIRTTPAGVEGRFRGVERCRVVLEVGAHSPWLSRLLKDCGHEVIVAHTRKVRAISDNPSKSDDVDAEMLARLGRVDPKLLSPIQHRGPEAQAHLAVLRARDTLVRSRTLLVNHVRGVIKSSGSRIKKCSTESFARQADDDVPESLREALAPMLKLIESLTEEIRRYDRRVEQIANKSYPETELLRNVRGVGALTALAYVLVIEDPKRFKKSRMVGAFLGLRPRRAQSGDKDPQRRITKMGDRMLRRLLVGSAHYILGPFGEDCDMRRWGLKLCERGGKNAKKRAIVAVARKLAVLLHHMWTTGIVYEPLHKASREEPATSVKKHETVKPGRKRALARA

SEQ ID NO: 62536 - protein, 302 aa, unidentified
MDVSKAKLDVSITNTPTIFQFSNSEKGLKELAKVLPKKKQTLIILEATGGYEKLAANYLRKKGFAVSVVNAKRVRDFAKASGKWAKTDRIDAETIMQFGKAFNPTPQPLGSLDEEKRLQAINRRDQLVKMIILEKQHLEHSCAEMKTSINKHILYMKKELASVERALEELFSLDKELRDKRDRLDEIKGVGKVTAMNVLIHMPELGKLSSREASALAGVAPFNKDSGQSKGKRETGGGRASVRTALYMAVLSARKFNPVIKKFYDRLIKKGKLKKVAIVACIRKLIIIMNAMIRDNSSWKPI

SEQ ID NO: 62537 - protein, 411 aa, unidentified
MRRVIGMDIHRTFAEVVFWEDGRLRWHGRVDMTRAGLEGFGRSLMKDDEVVLEATGNAMAVVRVLSPYVARVIMANPLQVKAIAHAHVKTDKIDAGVLASLHAAGFLPEVWLPDAETERRRRLVARRNQVVRHRTRVKNETHGILAAHLVPPCPHAELFNGPGRAWLGRQVIPDDEGAAIERHLRELDRLGEDLAVLDHEIAEATVDDPAVRRLLTIAGINVTVAAGLVAAIGDIRRFSSPQKLVSYFGLNPRVRQSGLGFAQHGRISKIGRSHARAMLVEAAWAAAKAPGPLHAFFVRIRSRRGHQIAAVATARKMAVLVWHLLAKDADYLWARPALVAHKLRALELQAGRPMKKGNRRGPAYAYNVKTLRNQEMAIAEQAEHAYEHFVAQWRPKPTKRPAAAPPVTGSS

SEQ ID NO: 62538 - protein, 412 aa, unidentified
MTAIHQFAAHVGLDWADKKHDVCVQFKNGERTFHVINHTPEALDTWLNELHQKVKGRIAIALELKKGPVVYALQKYPFITVFPVHALSLARYRQTFWPSGAKDDPQDAELALDLMLRYPQKIKAIEPDNADIRLLLQLVEQRRLLVEDKRRFVNRLINTLKQYYPQPLEWFSHRDSSLFCELIIRWPSLQQLKRARSDTVRHFMNARGGPAVAYTEQRVTSIANAIPLTTDKSVIEANALMAIALASQIKLVGELIRTYDERIESLFDTLPDAELFKSLPGMGPCMGPRMLAALGDNRDRFNSAEEIQNYAGIAPVTERSGQKSWVHWRWQCAKFVRQTFVEWAAKTVNSSYWAKLYYQGMREKGKSHQSAIRALAFKWIRIIYRCWKTRTRYDEAKYLLALEARKSPLLMP

SEQ ID NO: 62539 - protein, 333 aa, unidentified
MERQYIGVDLHKQFFQACAMSDAGVRLWEMRFPRTEGGFLLFRARCTPATAIAVEACGPTWAFVDAVEPTVGTVCAVDPRKPQLKAGFAAKTDRLDARRLADALRRDSVVSIYVPPAAIRELREVCRGRHQVIRLRTRLAQMIRALLLRTGVADVPVRRVYSASGLDWLETVALPPDAAANVARYRRLLMAIQTEALEAEATVAARAAADPIARALDALVGVGPVLALTLRAEIGDITRFRRGAELASYAGLVPRVDASAGRYWSGRITRQGSPWLRWALVEAAMHAIRRPDAIGRWARQLAVRKGAFKARVALARRLCDDVVSVWPRVTVVR

SEQ ID NO: 62540 - protein, 477 aa, unidentified
MSEILDKLCVENGAEVRPLYDYGVGIDTHLDFIQVCVLVRAGSTIRMHETECRTTWKGLVDAGEWIVETIRGKSIPTIEPEPLRYTIESTSTYHLPVIKAIKGKPCVVNPVLAGSTKKKTDVLDARLLSYQCMTGLWPESFVVPPEIEEFRLLMKQRQYHSRECTAITNRINNYILRFGHTLGSYKSIRSIENRAVIEDMCSEEYVYKDNYPEVEAVRFTCPDGLPYEVRNIVKDMFSEYDAHTEKAKHYQKLAKESAKKINWETDSGYVKGEKLIKNLLTVPGVGDLTALIWLCEIMTPLRFETASHLAAYCGCDPSLKVSAGKVTSQTKRKGNVDLHYQLSEIAGSCINRHSEPFGQWGYAISKKHAKGGYKKASGAVARRIAVSLYYVHKQNAPFSYDKYNFYKIDVPHVELSDMKFSKRLENILASNNLVDSNTIAESYIVGKIHEIKGLGKKSVNEINTWIQSNKNYKSKEM

SEQ ID NO: 62541 - protein, 343 aa, unidentified
MEKRYIGIDLHRNQFTCCLRLENGREYLSQWRLEDLPRFVKRLRPGDELALEITGNTRLFYDAVAPQVARVIAVDTNQFRVISRSMKKTDSNDARLLALYLSKGLLPEVRMKDKEHGQLASLTQTRDTLVKLRTALKNKVNNILSARGVNLPKEALSSEKKLNEVLLLPFDLIVQLELRVIVEQIRSLNKSIGELEKIIDEEASKLEGHKSLISIKGIGKITSAILLSVIGDVSDFPDESRLASYFGIVPRVANSNETERCGHIHKRGSKIGRTALIQSALIAANYSPYLKSFYQRVKARRGAGKAIIALARKFLGIIYRTLKNQWVFEDFPNFALAEPVETA

SEQ ID NO: 62542 - protein, 369 aa, unidentified
MNRLFVGMDVHKEKIVLIGFPKDGHMPVVRETFPGEATRVVKRLVKLSREWKIEACYEAGPSGYGLARDLVKAGLDCRLVAPSLIPRRPGNRVKTDSRDALELALALRARTLAFVRIPSREEEEVRGLVRCREDIARQARVLKMTISHWVFTRGHRLPTGLKRWTPRHWSWLRSLPLSALERETLDHYLDMLFLQEERRKQIEARICELGDLPEYRERVKRLMALKGFSCLAAMRVIAEVMEFRRFKNASSFMKFTGLVPSEYSSGERIRRGKITKAGNSHLRHVLVEAVQRAHSSVRPGRGLLKRLQGVSGPLRQIALRCLARLHHKFWALTRRGVTAGRVRVAMVRELAGFVWALMVFPAGETNTAG

SEQ ID NO: 62543 - protein, 315 aa, unidentified
MVDRLGAHLATIEVSADAAGYAQLTGWASKHAPGPRTAWAVEGCGSHGAGLARALAAAGHLVIEADRPKKARRRGGKSDQLDAIRAARQALAIPDPAQPRTGDTREALRILLATREHATKTRTATVNTLKALILTAPEDLRAQLRGRRTAAQVRAALALRPRPGQPVSEQHLRQALRELARQITGLDAALKTSLKNLRSLVRAWMPALLAEPGIGPISAAQLLVTWSHPGRFRTEAAFAALTATAPIPASSGRTDRHRINPYGDRNANRALHTIAISRLRYHQPTITYAARRTCGARLFDLAWPWAVLRAGIIAE

SEQ ID NO: 62544 - protein, 342 aa, unidentified
MNATTYALDIAKSVFQLHWVQPDTGEIHRKKLQRAKLMDFFARLQPSRIVMEACGGAHHWGRELSKLGHQVELLPAHKVKESASGNKDDARDARAIWITATQKDVRRVPVKSVEQQAELFTHRVRSHWVSLRTATVNQLRSMLYEFGLVAPRGRKIVVRWVAEHRALVEQQVPPMAVQLMDQQLQALRELDERIAANERTLQQAQRADDTVRELLKVPGIGPLGASALKAELGDASAYRNSREFACCRGLVPRHTGTGGKVRMAGISKRGDPYLRTLLIHGARNLVRAPEPAQWIAQMLVRRPFNVVAVAVAHKLARIAWSIVARGEKFDPVRAFGPRHAPA

SEQ ID NO: 62545 - protein, 334 aa, unidentified
MALELLAIDLGKRSFHLYGIDTDGMILSRKVSRAKLAEVVNNLAPIAIAMEACASAHYWARCWLAVGCEVRLINPRFVKPFVKGSKNDAVDAEAIFEAATRPTMRFVPVKSTDQQDMQSLHRARDRLICQRTALINHTRGLLAEYGIVLPQGPSHFTARAPAAIAGADLSDLARTIFGQLLDQLDDLDRRVKKLDATIAGLCRTNETCRRLTKLPGVGPVVATAIVAAVNDGRQFRSGREMAAWIGLVPRQYTTGGKPRLGGIGRRANHYLRRQLIHGARAIVSRSAKHDDRQSTWLKALAARRGFNRTIVALANKTARIAWTLLSRKEEYVAP

SEQ ID NO: 62546 - protein, 423 aa, unidentified
MKKHIYRAVDVKALNLDELREVVKNQKIVLGVDVAKEDFVAALMNEKREVLSTIKWKHPMETEILLDVVLHKLLWSSLDVAMEPSGTYGDALRALFLGNGIKVYRVSPKRCHDAAEVYDGVPSLHDSKAAAIIGRLHLDGASVEWSLPEKAQRELRAAIKTMEIYDDAYYRNINRLESLLVRHWPEVTQHLKLTSATLLELLITFGGPDRVAAEPEKAVELMRRVGRSNLLVEKIDKVVESAQQSMGVPCIEEERRHLMELCREARRLQQKARTAQDRVERLTQDTESVNAMVDVIGKKTAAVLHSELGDVSRYDNAGSYVKSMGLNLKEHSSGKHKGKLKITKRGSGTVRMYLFMAVLRLIQNNFIVQAWYQCKIERDGGTKMKAVVAVMRKLARALWHVGQGKRFDAAKLFDVSRLNLAPV

SEQ ID NO: 62547 - protein, 373 aa, unidentified
MTKRIEGTMRMIVIGADTHKDTHTAVAVADGTGQLVDELTAPARKAGYAQHLDWARGLGPERVWAVEDCRHVSGGLERFLVASGERVIRVPPKLMGKSRKGSRERGKSDPIDAANVARAALQEGIETLPAAYLDEEAMEIKLLLDHRENLVRSRTDDQRRLRWHLHQLFPELEIPAGALDRMVWLEKVAGKLSRASQGARVRVARELLRSIRSQVRRAAGLEREIATLVKAKAPELLALPGCGSLSAAKILAETAGAERFASDAKLARLAGIAPIPASSGRRDRHRLDRGGNRQLNCALHRIAVTQGRVHPPARAYLARKQAEGKSRMEALRCLKRHLARRVWQLLPQSEIDRSMPTVDSQRDVLSPQIAVAA

SEQ ID NO: 62548 - protein, 424 aa, unidentified
MKNSAARKLRQVPEGYLIIGIDPHKKRNAAVAITQDYSLQAKFKFDNTREGFETMLRRARTEMVESGCRGVMFAIETGGHYWRNVAYFLDEQGIPFRFINQFTLKRRREGKDLNRRKNDYRDSEVAAQLLCTGEFTESKLPQGVYAELRSAHNAYRRLVVERTRITNLMKGLLDSLFPEFTLVFKDPCGLTALSVLSTCAVPRVIAGMAEDEFVAKIEERHQGHRLMRMKLRKLHYLARTSIGIDAGAPSVSTEISFLVEKLELICRQTRIMERTLAKLVDETEEGKYLLSIRGLSYIAVAGLLAELGCFKAYRSAKQMIKMAGSNPTESESAGKRSTRTPMSKRGRPVLRYCAWTSVIPMLRLNDEFRAWAKQMRERPVHANPLNGREIVGAALNKLLRLAFALVKNQTYYQAPKGESIPVAV

SEQ ID NO: 62549 - protein, 459 aa, unidentified
MNFIGVDLHKKSITVCVMDEKRKVLARKTFACTQTDEIVEFCRQFRPFKVVVEATASYVWFVELVEPLAEKVVLANPKKLRVIAESTKKTDRLDAQVLTEFLVLDMIPESYQPTPRQRQHRALVRHRQYLQGRITSVRSKIRHILSNYNADRKDLFSANCGPAYLKEVRLSDVDRFVIKQLWAEWQDHLAQRLAVSKKLKAFVAKAPQREAEAREILKTAPQVGSVTAEVILSELGDISRFRNAKTVCAYAGLVPVVRQSGERKSKDMKITKEGSGLLRWALVEAAWRLVGKSPKWAALFSRLRHRSGKKRAIVAVARKLLCVLYAMLRTSTPYKIVTTQTTAARTTGKESVRTSTPDQTTPTETTAPRTTGKKLVRTSTPEQTTPTETTAPRTTGKKLVRTSTPEQTTPTETTAPRTTGKKLVRTSTPEQTTPTETTAPRTTGKKLVRTSTPDQTITT

SEQ ID NO: 62550 - protein, 404 aa, unidentified
MSERVCGVDVHRDSLVATIMGDHLKEAGRFINDADGINGVKEWLKQHECNRVVMESSGIYWVPLYLALEDAGFDVLLANAWRVKGIPGRKTDQSDSEWLAHLLGSGLVKPSYVPEKRVRELRELTRHRVKLVGTRTAFKNRCHKVLNRVNIRLGSKLSDVFGKAGKEILESLMDGKTIDDILQHTMNEWLKKRGDEIRTVVKGVLSQSDIFVLKQCVDMVNEVGEKILKVDAQIETLVNERDVDIVASVPGVGRKSAAAITAEIGDARRFENGKRIASAAGLAPSVYQSAGKCLTGGITKQGSKWLRRSMVEVAHAAVKKRDSKLREFYLRVKARKGEKTAVVAVARKMLTIIHHLLVNGERYVEEGFEKRLRGRKAVYAGHVPLEDMVAVLRGAGYVVRGPFG

SEQ ID NO: 62551 - protein, 408 aa, unidentified
MLSLRYSLALFYSFEFEQNVRNTTCLVYPVYPIRRQDEGEFFHFLFKSNIEMNSKTIVRQVAGIDVAQNELVVSLGRRYDDFNLDLYANKVFANNEKGFEAFISWVRKLTQQTTDVIFVMEATGVYHEKFAYFLHGKGFKVSIVLPNKISNYQRTLEVKTITDKTSAAAIARFGLERNLDGWNPPKKIYRRMRQLTREREQIVEERTMVKNQLHAEESEAFPNKATVKRLKEKIKLLDKHEKQVKKELAELIKQDQSVKENIELICSIPGIGMTTAATVLAETNGFELIRNRKQLTSYAGMDVKEKESGTSVRGKAKISKRGNKYLRKALHMPTFCVIKNNERFKAIYQRLVSKHGIKMKAAVAVQRKVLELIYTLYKTGNKYDPEYFKSDQAVKTDQMDTLKKSERS

SEQ ID NO: 62552 - protein, 417 aa, unidentified
MQSARNTLPEEPPGDVTCGIDWARDDHAVSVVNARGREIHRCSAEHSAAGLRELIAVLTRNGAREAAIERPDGPVAGALLGAGITVVVISPNQIKNLRGRYGSAGNKDDRSGAYVLADTLRTDRARLAPLTPDSPATVTLRRACRARKDLVTHRVALANQLRAHLRNAFPGAVGLFAEIDSPVSLRFLARFATQDRADWLSPRRLAAWLASAGYCGRTAPAVLHTRLAAAPRGATGDDGTAQAHVTAALHAVLTTLVDQIKALSEQITEQLTLHADAHTFTSLPRSGTVRAARLLAEIGDCRARFPTPEALACLAGVAPSTRQSGKIRTVSFRWACDKQLRDAVTDFAGDSRRASPWATDLYNRARARGHDHPHAVRILARAWLFVIWHCWQHHTAYDPARHRALQTLLSQDQQAAA

SEQ ID NO: 62553 - protein, 369 aa, unidentified
MEEIPFVINHVLTIKKTAMEKPIKQCVGIDVSKDELVVSYGVMDGNFDIRILSNASFPNKQSGFTRLLKWSETLNASQGDIVYLLESTGVYHQQFALYLHDNGCKVVVVLPNKAKAFMKTLPVKTVNDKVSAQMLAQLGLEKKLDQWQPPAPVYRELNQLTRERDQLMDEQTQIKNQLHAEQSGAWPNKQSIKRMKSRLGLLAKQIDQIENEIAELVKKDPWLQQKIDTVCTIPGVGLITAVTVIAETNGFNLIRNKKQLVSYAGLDIITKDSGTSVRSKPRISHRGNKYLRKCLHFPALTAIRHTHSMKTLFTRLVDKHGIKMKGAVAVQRKLLILIYVLWKKNEPFDNNYHLKIKEPRVIGALHELA

SEQ ID NO: 62554 - protein, 386 aa, unidentified
MQKLNDLSRSLAPLEQDGTLIAVVEMSQSSWLVAGIVPGVERQPLKKLAVDESALLKLLHRWRQEAEKAGRRIERIAVAFEAGRDGFWLARWLRTRSIEAHVIHASSVAVSREHRRAKTDRLDTELLKRAFLGWLRGERDHCKMVAIPTTKDEDAKRPNRERESLVGEQTRIVNRMKATLTRLGIRAFNPKLKKAAGRLENLRTPEDEPIPPNTMAELRRDMERRRLVSDQIRQIEEARLDRLKQAPGDGPHAMVRLLARVIGVGIETADMLVQEVLARNMRDRRAIARYAGLTGSPDESGTKRREKGLARSGNARVRRGMIQLAWRFLLFQKNSALAQWFRARTENARGTRKLMIVALARKLLIALWRLVREGVVPDGVVLRPTQ

SEQ ID NO: 62555 - protein, 371 aa, unidentified
MRNTMISYKISNAIVVPINLQKGESALVFKSRTVFIGIDVHRKSYSISCICEGVVVKRLRMTAEPEVLIQLIKDSFPEANIKSAYESGFSGFALHRKLFASGINNIVIHAASLAMRVSDRVKTDAKDSKKLAEQLAAGMLRGIRIPSEEQEFSRLYTRTRSQLIKMRSRTMLQIRMRLLQFGLMPIAYDRPLNRAFVRKILPTLPLKLKISIEIHLANWEHIQLQILKVEKLIKEQNKDNPIVSFYRKVSGLGSVTAGSLVAELGDLLQFKNERALFSFIGLTPREYSSGDRKRLGSISKKGNPAVRHMLIQLAWRAIKKDPKLNEKFTALAGRIGKRKAIVAIARKLIGIIRATIRNNTEYQVNYRATGK

SEQ ID NO: 62556 - protein, 339 aa, unidentified
MSKQPSFAQGLVFCGIDVSAKTLAVSVLQQDQPLRQRELANTAGGHKALIAWLRKAKATVRVSLEATGVYSLDLALALDAAEGIELSVLNPRRVHQFAQTLRRSKTDAADALVLAEYSKRMPFVAWRRPSQRALELRAVSRHLATLTEERARLHNRLHAAESSLATPRCVREDLKRSLAGIDKRILRLRKAAVALIERDGEMQRKFRHLTGITGIAETSAVHLLGELATLAPEMTARQWVAHSGLDPAHRHSGTSVNLPSRMSRHGNSQLRRALFMPALAGARFDPHMRAFYTLLQQRRKSKMQALMAVARKLLHAIYGIFKTNTPYEGSKLFPQLKVA

SEQ ID NO: 62557 - protein, 408 aa, unidentified
MEILYPHCAGLDVHKDIVMACARSVVGASARHDTAEFATTTPGLLVLADWLKEHRCTHVAMEATGVYWKPVWHVLEGGFELLLVNPAHARSVPGRKSDVNDARWLADLLAHGLVRASFVPPAPIQALRDLTRTRKQLVRQVGRHTLRIQKTLEDANLKLTGVISDLLGTSGRAILKALIAGETDPERLLAHTTGQLKAPRERLLDGLRGVVTDHHRFMLRLHLRQIESLESGVVQLERQIEKLLRPFRDRVERLTTIPGVSHTVAHVLVAEIGLDMARFPTAGHLVSWAGLCPRMDESAGKRRSTRVRHGAPWLKTTLVTAGWAAAGARDTYLRAQFVRLKTRRGPKKAVVAVAASILTAAYHILRDGVAYRDLGADYFDRRDRSGVVRRLSRRIEALGYHVEVHRVA

SEQ ID NO: 62558 - protein, 345 aa, unidentified
MEPMYYIGLDVHKRKISYCVKDSGGKVYSEGSLSATRLDLDVWMKTLPQPWSAAMEATMFTGWIYDHLKPHAAALKVAHPLMLRAIAAAKKKNDRIDANKICDCLRCDFLPECYMAPTAIRERRRTLRYRNLLVRQMVQMKIKISSLLMEAGVSYNKQRLHKAGYFRELLATNPDIDEGLRSLLRLCRETVVRLQKTESALVRSLESDSLLMDRVERLMTIPAVGPITALTWALEVGDVQRFSSIKKAISYCGLCGAEKSSGSTVQRTPLSKQRNKHLQTTLIEAAKMAPRNSPELAMLYDKEKQKGNANRATLAVARKLVAYLVAVDRRQKEFLTVERENRTAA

SEQ ID NO: 62559 - protein, 310 aa, unidentified
METKVFVGVDVCKDNLDVAIGAGKDIVTFTNDQKGVDSLVKKLSRINAALTVFESTGGYELLATSCLAEAGLPVVIVNPRQVRDFAKSAGILAKTDAIDARVIARFAQAVKPDVRQLKDRATSELAALVTRRRQIIEMIVAENNRLRLANKRSKKDIKDHIRWLRKRLDKIETDIGKMIQNSPIWRCKDDILQSVPGIGPVTSASLICDLPELGVLSPKKIAMLAGLAPLNCDSGKFKGRRRIWGGRAAVRSGLYMATLAAIRCNPAIKGFYQRLIAAGKCHKVAATACMRKLLIIANAMLRDQTLWQQN

SEQ ID NO: 62560 - protein, 339 aa, unidentified
MKYIPVGVDIAKHLMQVHFVDEHTGEIIDKQVKREKFLEYFSNREPCLIGMEACGGSHHWARELQKLGHKVRLLKDRFVKAFVMGNKNDVMDARAIWLAVQQPVQSVAVKSEEQQATLGLHRMRQQLVKFRTAQINALHSLLLEFGETTHKGRAALAKEVPEALERLKERLPLYLINMLDEQYQRITELDEHLDHIEKQLQAIARQNETCQRLLNIPGVGPLIATAAVATMGDASAFKSGREFAAFIGLVPRQTGSGGKIRLLGISKRGDKYLRTLFIHGARAAALLTKEPGPWITELKKRRPASVAIVAMANKLARTMWAIAAHGRKYDKNHVSIRPD

SEQ ID NO: 62561 - protein, 483 aa, unidentified
MKPKPQEKNKRATNHPTQHHWHEMNRKQRRETMRKIQSEDLNLEVIHPDAAGIDIGNEFHYAAVPPSRDNQPVRRFGCTTAELKAMATWLQQCGIGTVAMQSTGVYWVAVYDILEQAGLEVYLVNARDTKNLPGRKSDVQESQWLMKLHTYGLLRNSFRPSQEIRVMRTYWRQRNDLVQSAGRHILRRQKALTQMNIQLANVLSDVSGATGQAIIKAILAGEHDPYKLAAFRDPRVQASEEQIAQSLEGNWQPDLLFLLKQEQDGYQFCQKQMAECDRQLAQYLQQREDRSQGAPLPEEKRKGRLKKKRANKPRFDLREGLFRMTGTDLTRIDGIDVMTATTVISEAGYDMSKWKTENHFVSWLRLCPDNRISGNKVIGKGRLPTNNPVSIALKMAASTLRLSKTYLGAQFRRFRTRLGAPIAIKAMAAKLARLVYRMLRYGMKYVDQGAAFYELKHRQLQVQQLKWKAAKLGYKVTPIPAAA

SEQ ID NO: 62562 - protein, 411 aa, unidentified
MHNRQNYLYVGVDLHKEHHTAVIINCWQEKLGEIQFENKPSAFSKFLLEVETYVSDGLSVVFGLEDVGGYGRALVKYLVDHEQVVKEVNPALSFLERKSQVMIQKNDSWDAECIARILINKLNQLPDAKPNDLFWSIQQLVSRRNALVKAQSALKNQLHIQLNHHYPSYKKFFSELDGKTALAFWQQYPSPSCLEGANIKQLTAFLLDVSNNTCSVKKASDILKLVKEDGHTMKEYQETRDFLVRSIVRDIEFKKTEMKYIERELKQLVNLLDYQLETMPGIELVTASALIAEIGDVRRFSKANKLARFAGIAPVYFGSGGKGKTHKSKQGNRALHALFYNLAVQQVQVAKGSKMPRNPVFHAYYQKKLKEGKTKGQALVCIMRRLVNIVYGMMKYKTAYELPVVEEKEVV

SEQ ID NO: 62563 - protein, 370 aa, unidentified
MGESRLVATKMEINNNTVKEADTREFKYNEEGLKELIKFLEGYEEGIMEATGVYFYHVYNVLRDKGLKVNVINPVQTVEVLGKKTDKNDSIRLAIAYAAGTVKGSYIPTGEMQELREMTRHREGLVERKTQVKNEIRKVLETAGYKLPPFEKKTKEIVRKLATDEKLTDEEIKEYSKLLGRKLTRIEAFILKQLLDLLNIIEEQIKEVENEIMKFLPEEAVELTKIPGIGPISAATIYAELGDVSRFESSKQAASYAGVSPRTKQSGKTEFHNGLIKGNKHLSRVLFLVARSAKNTVQFNGFYQALLKRTGNSKKATLALANKICRIVYHVLKDGEYKGETKKTRYRGGGGEGPQVDPNQVVPSALQAIA

SEQ ID NO: 62564 - protein, 355 aa, unidentified
MKQVKTLSFASQDIYCGIDVHKKDWSVCIRDDERELGSFTQPPRPDKLIDFLQRNYPHANFHAVYESGFCGYWIQQALSSQGIDCMITHAADVPTSDKDRRQKTDAVDCRKLARELSDGSLKGIHIPCHQIIADRSLVRGREQLVQDQTRYKNRILSWLHFFGITIPAGYKKSTHFSKRFINWLEQLDINESSKLALQVKLGGLQCIRQQLLIANRNLRKLAISDRYRKQVELLRSIPGIGITNAMIFLTELDNITRFKTFDHLCSYAGLKPDIYSSSDTIIVKGITHRCNSLVRDALVESAWKALADPALLMAYKEYKKRMNYNKAIIRVTKKLLSRIRYILLHQTPYVTAVVG

SEQ ID NO: 62565 - protein, 366 aa, unidentified
MDQDSEVFVGLDAAKVRHAVAVADEGRQGEVRYLGEIDADPTSVRRMVVRLEKRHGRLHFGYEAGPTGYGLYRQLVAMGHHCTVVAPSLIPRKPGDRVKTNRRDAVQLARMLRAGELTAVWVPDEAHEAIRELIRSRGAAVGDLRRKRQAISSMMLRYGRTYPGKKTWGARHRQWLQIQQFEHPAQQLVLQDMILAAQHAQERLNRIEAAILEFLPGWSLAPVVDALQALRGVQLVTAAIIMAEIGDLRRFDNPRQFMGYLGLVPGERSTGNSVRRLGITKAGNGRVRRALVESAWTYRHMPRTGKLKHYVHERVPPAVRDIALKAQSRLCARYRALAGRGKKLTVAVTAIARELAGFVWAIGRMV

SEQ ID NO: 62566 - protein, 361 aa, unidentified
MHTTTVAVDLAKSVFQLAVADATWRVTDKHRLTRSQFERWFVNRDVSLVILEACGSAHHWARWLTSLGIEVRLLPAAYIRAYVKRNKTDAADACALLEAARCADIAPVKVKSIEQQALQGLHRTRSLWMGTRTSRINALRGFCREFGIAVAAGSRNGIEQISRVLADPHSAVPTLIRGTMTLLIEEIRLLEARIAQLERELTELAKHSPACTTLLSIPGIGLLTATAMVAATSGNVQHFKDARHFASWFGLTPKEYSSGSTRTLGRISKRGDRYLRMLLTHGARSILRAASVALSAGRQLDGLRRWALAVQARSNHNKAACALANKLARICYATLRDAQSYDGMVTRLNRKLESTAFAMPA

SEQ ID NO: 62567 - protein, 351 aa, unidentified
MMIIGVDYHPSDQYIAFAEAETGECGERRLNHSDGEAEKFYRELAARGVSVRVGMEATGYSRWFERLLTELGIEVWIGDAAEIKTKRVRKQKTDRNDAQLLLKLLLENNFPRIWVPSPENRDLRQLLWHRHRLVQMRTRIMNQLQALAMNEGNRRKKKLWSEQGRAQLEKLPLATWASRRRQDLLDLLDRMSPTIEALTAAVEQEAKKWPEALRLMTHPGVGPLTALAFVLIIGTPERFKCGKQIGSYVGLIPSEGSSAGHQRLGHITKQGSSLLRFLLGEAAQVAARCDSDWRRRYVHLAMRRQRNIAKVAMARRLAVRLYWMWRSGWDYAQWVKFGSNAGQLATGHGVN

SEQ ID NO: 62568 - protein, 443 aa, unidentified
MSKNDSAHLRGERGQAFANLVRGIPPEQILCVSLDISKYFHVVMIHNGLGEIVIPTFEIDIFQSGFDQLCQMIDAAQEHTKARLVLVGMEPTSHYFENLARHLLARSQPVKLINSFSVKQNREQQLMRREKTDQIDVAAIGDLLRRGEGTPYKPPTSIYLQLQQIDRVRLGKLKIANMLKNQILGHLDRIFPGLVLVSQTAQERYTPLFNVDFWQCQTLQALIRIFPNPYQLVAMSPDQLIQAFHAQKHRMGPAMAAKIIAEAHKTLLPDLELAAIRCELLQHDLALLEAVQAHITSLEQRLTNLVAQTPYQVWTKLKGISAVQTASLAAAIGDPANYTEAAQVFRRSGLVSGRNDSGNHQRKGRGNPILKTGDVYLRRSLMNAVATLILHQPVLYRYYKQLSFTKPSGVARVATARKTIGILWAAQRDQSSKTLINCKGAAM

SEQ ID NO: 62569 - protein, 417 aa, unidentified
MRVVGLDIHRSFAEAAMIDEGRVHQLGRIDLVRERVIAFAKGLGKTTDVVVEATGNTMAVVKLMAPHVRRMVIANPLQVRAIAHAKVKTDKIDAVILAKLHSAGFLPEVWQPDEGTERLRRQVARRATIVQSRTRVKNRVQSVLHSNLILPYRGDLFSGKGRTWLAAQPLEDDERATINGWLAELDRLAVDLRQVDASLASVGLGDDRVRRLMTITGINVTVAVGLVAAIGDVTRFTSSEKLVSYFGLNPRVRQSGNGRAHYGRITKHGRSVARGFLVEAAWAAAATPGPLHAFFIRIKARRGQQVAVVATARKIAVLVWHLLTKGEDYAFGRPALHQAKLRQMEIKAGMLSKRGGNAPGRARDYNIKSLRDVERAFVAQAEGAYVRFVAAWNERPRAKQSVPKRPGCADAANEERQ

SEQ ID NO: 62570 - protein, 343 aa, unidentified
MQAITAVGLDIAKSVFQVHGVGARGCAVVRRQLKRRYVLAFFKKLPPCLVGIEACATSHHWSRELKALGHTVRLIPPAYVKPYVKRQKNDAADAEAICEAVQRPSMRFVPTKTPEQQSCLVLHRTRHLFVRQQTAVINTIRAHLAEFGIVAPVGRNGVEELLYAVADHKDERIPEVARACLQALGTLLGQLKAQILEFDRQINTWHRSNETSRRLDELPGVGPALATALVASVADPNAFRSGRDFSAWVGLVPKQNSSGGKEKLGNITKQGDRYLRSLFCAGALAVIRYAKIHGSTHRPWLTKLLERRPTKVAAIALANKIARMAWAMMAKGECYREPIALAR

SEQ ID NO: 62571 - protein, 401 aa, unidentified
MQQDQQHDSVDVFVGVDVGKGQHHAVALDRNGKRLYNKAMPNDEAKLRALISELRAHGRLLFVVDQPATIGALPVAIARDEGVMVAYLPGLAMRRIADLHAGEAKTDARDAAIIAETARSMPHTLRSLRLADEPLAELTMLCGFDDDLAAQITQTSNRIRGLLTQIHPALERVLGPRLDHPAVLDLLERYPSPATLAAAGEKTLANRLTKLAPRMGKNLAAEIVQALNEQAVIVPGTQAATIVMPRLAQQLAALRKQRDEVASEVERLVLAHPLWPVLTSMPGVGVRTAARLLTEVAHKAFASAAHLAAYAGLAPVTRRSGSSIRGEHPSRRGNKVLKRALFLSAFAALRDPISRAYYTRKVEQGKRHNQALIALARRRCDVLFAMLRNGTIYQPKAADNA

SEQ ID NO: 62572 - protein, 368 aa, unidentified
MKKRSTMRGPSSQVRKRRHSASTVGLDLGDRSSRYCVLNEHGDVVMERSLATTTKGLDQAFGSVARCRIALEVGTHSPWVGRHLAKLGHEVIVANARRVRLISESTRKDDKLDAKTLARLARIDPQLLSPIRHRSEQAQADLIMIRARAALVEARTALINSVRGLTKSYGERLPNCASYQVCEELAGSLSDPLQAALAPLLTEVESLTERIREYEQKLEELARQRYPEVGLLKQVQGVGTLIALTFVLTVEDPHRFRSSREAGCYAGLRPKRRESGQSRPQLGISKEGDPYLRKLLVQGAHCILGRFGQDSDLRRWGLKLAARGGKNAKKRALVAVARKLAVLLHKLWVSGERYEPLRATNKPQTAAA

SEQ ID NO: 62573 - protein, 361 aa, unidentified
MTGTMTWVGLDVHARSTHCAAIDSLTGELSRARFGVGVEPVVQWLGELQGPIRAVYEAGPTGFGLARAAQRAGIDVMIAAPSKTPRARGDRVKSDRKDAELLARLLLAGQLKPVTVPPDWLESVRHLARVREAVRRDLGRGRQRVSKLLLVEGRVYPGATTWNREHRRWIASQQFQHAPTELALIDLLAAVDGLTARREALDERLSRLAQDARLWPTVARLRAFRGIDTLTALAVHLELGGNWQRFRSPAKLASWLGLTPSLEQSGESKTQGQITKTGSAIARRLLVEAAWHYLRQPRIGVTLRNRQVDQSDHILQIAWRAQCRLHRTHQRLREREKPGNVATVAVARELAGFLWAAATAP

SEQ ID NO: 62574 - protein, 329 aa, unidentified
MCVLCNRKEPMSQVVIGVDIAKQKFDAARLCENKYRHKKFDNNAQGFAAFLAWMRSFGDSPPWICMEATGAYSIPLAEFLVEQGYGVSVVNPAKIHAFAKSELSRAKTDHADAKLIARYGLSMTPEPWTPPPRAIRELQALLRRVEHLLEMQQMERNRLATADLAIVDSLNIVLDTLQKELDATRQRIKHLIDHDPELKQRRDLLESIPGIGPAASAYLLTALSPHYGFANAKQAVAYAGLAPRIQQSGAWVGKTHLSKTGDPALRKALYLPALVAWRHNPVIRTFCQRLKANGKNGNAIACAAMRKLIHIAFAILQSGHPFDLKLTLA

SEQ ID NO: 62575 - protein, 428 aa, unidentified
MSNQEIVRHEQYRQIVSEITGSDQYMVVGMDVGKDKHHAFVGTARGICLFKKLVFENNLEGFGRLLTTVDQLKTQNCLEPLVYGLEPTGNYHKPLARHLVGCGCNVVLVTGQAVKNNRQLLDGRWDKNDTKDAANVADLVSRGKCLYYDCPSPQIDELRGLLSLRRRLKKEEHSLRMRIRNNLLAQYFPEMDEFYSACESESLAIVRWCLDPDKISAMEFSEFFNMVTGKRRGIAQTLRLRKIHGLAMESVGCPMGPAAEYEADLLVEKRQQAAKHAQRTDGLIKGVCLEFPEYSCLLTIPGFGPYISAKVLAAIGNPFRFDNRKQVIKMAGYDLSAERTGKTAEKAVPVISKKGNGELRYALYQAAHIATGRTDLFRAYFTKTLRGRERERGIKTKMRVKLAAKMLVIAWTLMKTKQPFDPGYLNTD

SEQ ID NO: 62576 - protein, 357 aa, unidentified
MVESKTEAKSSEVGVTNPYRRTEHCGKIHAYRCDKRLGVIGIDVSKDHLITSRGRVRKYKNNKRGYEEILKMKPCAIVLEPTGVYAIRPCQYFKEKGIKVLQVSPNVLSREKEFRGKKTDFYDAEKLENMVNKAKEYEYNPLRELVTLYLFLKDIEVKYKNRLKRALFLVSDNDKISKERLEKLAKGDFTQEELYNLEYTPIVLEEIRVLAKTLLETQEKLEEVRRMIEEQVPQDHVLLTIQGVGKLAAGVIIGIVGDIKRFPKPESFVAYCGLDPVVERSGKVVVSKGISKRGNKYLRSLFYFLAEMNYSKNPTLLKFYEAHKDRLQGKKLFTALARKLARIVWSVWYNNKPYEPK

SEQ ID NO: 62577 - protein, 371 aa, unidentified
MKEAITSYVGLDIHKDSVAIAIAQAGPATPRFLGTIKPVPSELCKALRRQRCSPENTVLVYEAGPCGYGWVRYLRKQHWSCEVIAPSRITRSPSEQRVKTDRRDALMLARQLRAGDLTHIVVPDERDEAIRDLSRAREDAVAARLRVGQQMKAMLLRHGRDYLRRNCWSQAHQRHLSTIRFEHPAQEIAFNEYRQASQEACARVERITQALREQCEHWRMKPLVQGLMCLKGFDFVTAVTLIAEMGDLTRFAHPRALMSYLGLVPSEFSSGNTRRQGAITRCGNSHARRVLVEAAWNNRFKAQVTRVLQVRQEGQPKIIRDISWKAQLRLSKRWRSLSMGRKLNQNKICVAIARELAGFVWDVGRHVKIRA

SEQ ID NO: 62578 - protein, 402 aa, unidentified
MTYDYVIGMDACKYFHHACVLDIDGTQVLSKRINQNEQSLRALFSAFSAYDHKVLVVVDQPNNIGRLTVAVAQDIGIDVRYLPGLAMRQLSRIHAGNAKTDIRDAYIIAHAAKNLPESLRSVDRVEEAFLQLKVLNGIDEDLARSYTRLINQIRSALVGCYPQFEQALRGQIIHRKWVLHLLARYGGPTKIKRLGKAKAAAFARRYKARNPEPVLDAIFAAISEQTVTIAGAHYAEMGVAMSAKDALLKLEHRQQIEKEVIELINDIPHTQFLLSMPGIGPKTAAQILMTAGDMSDFPSAGHLASYAGLSPRTNQSGTSIMSNSLNRAGNKKLKNALWQSSFASIRFHERSRQFYERKRREGKRHNAAVVALARRRLNVLYVMMRNHEHYHDPAPSQEDLAA

SEQ ID NO: 62579 - protein, 357 aa, unidentified
MKTALVMRRGSVVGKDIYVGIDVHKESWQITVRTEGEEIFNGRIPGQYQSLKKFFERYQGCRMKVAYEAGPFGFWLSDKLTMDGIETLVVPPSLIPTESGNRVKTDRRDSKKLAKLLESNMLKRVYVLTPEEREHRDLLRTRRQIVDHRNDVARQIKSKLLFYGITPPLTTSERWSLTYIKWLRTLQFDTTYLRECLDLLIDLYEYLTRQIVRINKKVALLCRDKKYRDRIRLLCTAPGIGRLTAIEILVELQDMSRFESADELASFIGLTPSEYSTGERTRQGRITRCGNKRVRTYLVESTWILIAKDPAMRLKYLKLKNLRGGKRATIAIARKLLLVIRRMLLDNVPYRMTAMAA

SEQ ID NO: 62580 - protein, 334 aa, unidentified
MLYAGIDIHKAVFQAVVLDPDWGELSESRFEPSRERLNDWAIGWQGELAAVAIEATTGWRWVARELQAHGFEVHLVDPGRASALRGRRRQPKTDRLDARWLALLLARELLPECEAWLPPVEIQRLRDQTRLRKALAGERTGWAQRLHALLAHEGWPCSRGRLLTRQGRRWVDALELDVHVRAQVDVIFAVIAALEEQLELVESELRRFARGDRRCQALETIFGVGPILACHLLAEIGDVRRFQRPRQLVRASGLDPSVIESAESKRRGRLAKQGSRHLRWALVEAANHSHRHTSPDHELYASTVRRCGRGRARLTVARKIARRSYHVLLAAEPA

SEQ ID NO: 62581 - protein, 326 aa, unidentified
MQGKVSSERTAMATVYVGIDVCKEWLDIHLHPLGRSFRVTNDTAGLRRLKRELDALDQMPRSALHIVMEATGKWHRAVQRSLHADGFYVSVVDPAQVRAYAHAIGRRAKTDPIDAAVIAAFVLATKPEIRPLRDAETQALSELVARRRQIVQMVVAEENRLRMALAKQAQKSIKRLLKALRRELESLDADLDSHIRKSPVWRGREALLTSVPGVGATTARTLLAELPELGSLDRRQIASLAGLAPWTRQSGKWKGKSFIGGGRGKVRAVLFMAALVASRYNPDLKAFRDRLVAAGKPKIVATVATMRKLLTILNAIIRDGRPWQNA

SEQ ID NO: 62582 - protein, 436 aa, unidentified
MGAESHWVAVPGDRAAQPVQCFGAFTTDLYALAEWLRQCQIDTVVMESTGVSWIALCEVLEERGFDVKLVDPHSVRQVPGRKTDVQDCQWLQELHTYGLRRGAFRPEDEVCVLRSYLRQRRMLVAMASRSVQHMQKALEQMNLKLTEVVSDSTGKTGMTIIRAILAGERDSQVLATHRDKRCKHDQATLAKALEGHWRAEHRLALQQAIEQYECMQQQLRACDQQIEVCLQAFVTPAEMESPRPAPARKRRARPRHTPDFEVHAYLESMAGVDLTQMDGIDSLSALKIISEIGLDMTRWPTGKHFASWLGLCPGNKQSGGKRSRVRSKPTANRAATALRVAAQGLAHSHSALGAYYRRMRARLGAPKAITATAHKLARLVYSMLRYGADYVDAGQQAYEKQSRDRVLTNLQRQARAFGYQLVQAESIESGAATATS

SEQ ID NO: 62583 - protein, 360 aa, unidentified
MEQHVGLDVSLDATSVCIVDEKGKKLLEISVVSDPESICIALRPHVGEIARIGIEASAMGMWLARELKAEGLPVIVVETRHMRSSLSAMRNKTDRNDAHGIAQMMRMGWFRAVHIKTEETQRLKTFLANRRLLKRKLIDLQNHIRGALRTYGLKVGTVGAGQFDTRVRELITDSDYMLHTMIESMLEVRTVLFESFQKLHRILLLIVRNDPVCVRFMTVPGVGPVTALSFKVTIDDPYRFTRSRTVGAHLGLTPRRYQSGTSVDWGGRISRMGDVDMRGALCEAAACLILRVKRYSTLKAWAMRIVKRSSKMCAIVALARKLAVILHRLWIDGTEYDWNKGAKITEKRKCDPETGLILNY

SEQ ID NO: 62584 - protein, 377 aa, unidentified
MKRIKFVGLDVHAERIAVAVAEQEGEIRSLGMIPNREEAVRKLVKKLGPVEQLRFCYEAGPTGYVLYWELTKLGAACAVVAPTLEPWKTGDRVKTDRRDALKLARNYRAGELTAVWVPDAEHEALRDLVRAREAAKKDQLRARHRLSKFLLRHGRRPPVGVQPWRVQYLEWVKRDVHFAVKAQEATLLDYLHEVEHMAARIVRLDDAIEEAVKVAPAKMRAVIEGLQALRGIAQISAVTIVAELGEVTRFSQARELMGYGGIVASENSSGERQRRGGITKTGNAHLRRVVIEAAWAYRHRPAIGLTLRKRQENLSEEVKEMAWKAQHRLHARYGKLMAKGKNKGVVVTAIGRELLGFIWAIGVQVEAEQKESLRQAA

SEQ ID NO: 62585 - protein, 408 aa, unidentified
MKPQLLHLPVRAGGRAVVGIDIGKQHHAAVAITSCGEKIASIASFQNTRMGVDLLQTRILEPAGTPPQVLFAMEATGHYWMPLYHELVRRGYKGAVLNPIQTNGEARTRIRKTKTDKRDAEGIARFILTGKAKAARIPDETTLELRILTRRLLQLLQMKGDAERAAQSLSHRIFPEYADCMSKPFLHSGRTLIKEIGLIPASIAEQPDAVRDTLRRASRGRLSAATIDGLLKKAAESIGIGYAETVINEELHSSMELIENIEEQICSLDTLIADIMENRGSPLPSLGIGTSLAAAIHAESDPASDFPSARQYAAYAGLEPTTFQSGQMEGTRAHISKRGSPHLRRALYLAAFGCYRRHEYFARIYNRFRKKGHTHNSALVIVARHLALVIWRLLVENRPFTKRPPKKK

SEQ ID NO: 62586 - protein, 382 aa, unidentified
MTGTEPHAWGTGLMDDIIFVGLDVHKATVCIAVAEGGRGGNVRQLGVFENRPEILNKVVSRLSKGGRRLSFCYEAGPCGYGLHRLLTGYGHECVVIAPSLIPMKAGDRVKTDRRDALMLAKLHRAGELTAIWIPDAAHEAMRDLVRARATAVRVLVKARQHLQGFLLRHERICRGARAWTLAYRRWLSTVRFEHPAQQIVLQDYIHAVQEAETRRDRLTQQIEELLPNWSMAPVVAALQSMRGVALVVAVTVVAEVGDFRRFANPRQLMAYLGLVPSEHSSGSSVRRGGITKAGNALARRVLIEGAWTDRMSARVSRKLHDRLEGLPAAVRDIAWKAQLRLCARYRRLAAMGKSKVVVTTAIAREMVGFIWAIARLAQPALV

SEQ ID NO: 62587 - protein, 375 aa, unidentified
MNYNTVYVGMDVHKKSFSLCCYTNEKEQAEYPQKTAPHYSKVLNYLEAMRFHYGDDVLFICGYEAGCLGYTLYHELMDHNVKCILLAPTTIPQPTSRKKVKTDKRDAALIARCLAHHDYSPVHIPSEKDEQVKEYIRMRNDHKIALKKVKQQISAFCLRHGYRYDATVNQWTQAHLKWLRALKPEGLYLDILMEYLSTYDQLTDKIERMDRRIEELAGEPQYREGVKKLSCFLGIKTQTALSTMVEVGDFKRFSSAQRFAAYLGLVPGERSSSESQNRLGITKAGNSHIRTLLVEAAQSYTRGRVGFKSKALKERQYGNPADVIAYADKANERFRRKYYTMVLTKGKKVNVVKTAIARELACFIWGMMVGNLTER

SEQ ID NO: 62588 - protein, 337 aa, unidentified
MIVIGVDVHKHSLTAVAVDELGRAVGERSGPVGADVVAWAQTLEAERLWAVEDCRHVTRGLERTLLEAGERLVRVPPRLTAPQRRRGRTRGKSDSIDALAVARAALQEPSLDGPRAGEETLRELKLLVDHRDDLVAERRRCQQRLRWHLHELDPTLAVPLGALDRTIWIERLSRQLARRKQTTQARLARELVGRCRTLTRSIGELDRELHTRTATLAPRLLQLPGCGPLSAAKLLCEIGPIDRFPSDAQLARHAGVAPLDASSGKHQRHRLDRGGNRQLNCALHRIAITQGRIHPPAQAYLERKQNEGKTRREAIRCLKRQLARTVYTTLKNEPLLT

SEQ ID NO: 62589 - protein, 413 aa, unidentified
MEVWLGGISCLISEGGARMYSLLVGIDVSKAFFATAGIDSEGKESFSRSYSMDFSGFDDFLKTITSACEDLSKVIVAMESTGCYHINLFSFLASQGIRTIVVNPLLIANFAKLSLRKTKTDKKDAMTIARFLMDHHEEISHLSLSQDHQDLRDLSRERESLCHLIAATKVEIKRVLRTTFPELESIGNLYTGAMLRFLQQFPSARLVRAAKPKAITKALKQPYVGNKLTYSAKDILRAANTSIGTVSPAKEIILQGKIATLLHLQERLDKMTKLLTDLCKATRIDDLKILKSIKGVGLKTAAPFLAEMGEVQNYASHKKLIAFTGIDPSLHESGNYIGMSKLSKRGNRHLRRAVYLMAAAVASKNPFFKAYFLRRKREGLPPQKALFATAHKLLRVIFAMLTQRTYFNPKEVI

SEQ ID NO: 62590 - protein, 392 aa, unidentified
MYIVGIDIGKNHHEASIVSPEGKQIGPSLRFATTHKGADSLMSFIFKNIGNSPCVFGMEATGHYWYPIYSFLKAKGYTIYVINPIQSDSLRKMYIRQTKNDSIDSFLIAEVIRFGQFGTTSMADENILAMRQLCRYRDSVISSRTEIKLRIGTIMEQIFPEYEKQFSSLWVSTSMGILEKYLTPENIENAPIDELFEIIKDKSHNRLTKAKAISIKEAAADTFGIKIAQDAFSFQLKQLIDRMNFLDKQIEALDIEIMKYYEQFDCYLHTIPGIGIIGAATILAEIGDISRFKNSSALVAFAGIDPTVRQSGEFNSTHNHMSKRGSPYLRHAIFLAATTCSFHNSPLNAYYKKKRDQGKHHLTATGAVARKLTTVIYAVLRDSKPYEPNKFC

SEQ ID NO: 62591 - protein, 412 aa, unidentified
MDVVYPRCCGLDLHKRTVVACLLTPGPRAKPIKEVRTFGTMTDDLLALSDWLTAAGCTQVAMESTGVLWKPIFNLLEGSFALLLVNAHHVKTVPGRKTDVKDSEWLADLLRHGLLRASFVPDRPQRELRELTRYRTTLVRERSAEVNRLQKTLEGANIKLGAVASSLVGRSAREMIEGLLAETPDPARLAELARGRLREKLPELERALTGWVGPHQRFLLAQQLAHIDYLDTAVERVSAEIAERLRPFDETLTRLETIPGVGRRVAEIIAAELGLDVSRFPSAAHLAAWAGLAPGNHESAGKRLSGTTRKGSPWLRTTLVEAAQAATRTKGTYLAAQYRRLAPRRGQKRAVVAVAHTILVIIYHLLHEQTTYRELGASYFDQRERQDVERRLVRRLEALGNTVSLSPKDPAA

SEQ ID NO: 62592 - protein, 306 aa, unidentified
MEAAVWVGIDVSKARLDVALGAEGELFEVANDQRGIAALLARLSQPALARVVVEATGGLETALVAELGAAGLPVVVVNPRQVRDFARATGQLAKTDALDARLLARFAERVQPPLRALPTPAERELKAVVARRRDLVEMLTAERNRLGSAPKVLHKELTAHIRWLVGRLKERDRELDRKLRGSPLWQEQEDLLRGVPGVGPVLCATLLAELPELGKLDRREVAKLAGVAPLNHDSGRLRGQRTVWGGRAPVRTALYMATLSAVRFNPTLKAFYRRLRGAGKPPKLALTAAMRKLLVILNAILKHRTP

SEQ ID NO: 62593 - protein, 322 aa, unidentified
MESVGFIGLDVHAETIAVAVAEPGGEVRSLGTIPNRPEPVARLIRKLGKPEQLRVCYEAGPTGYVLYWQLSELGVKCEVIAPTLVPVKAGDRVKTDRRDAEKLARCYRAGDLTPVWVPDAAHEALRDLVRARLAAKRDQLRARNRLSKFLLRHGRRAPEGTTAWSTKHLAWVKRQGFEQAAQQATLVDYLHEVEHAADRIVRLERSIDTAIETLPQKLHAVIDALQSLRGIAKISAVSIMAEVGELSRFESARQLMGYSGAVSREHSNGEPAHAQAGGLRLTANIRELLGRGTKSQRLGWHTAKENPRALLCDRPSWPDPRL

SEQ ID NO: 62594 - protein, 412 aa, unidentified
MPTEAIPKRFIGLDIHRKYFVAAGVDSKLHPVLGPQEAPMRHLERWAKKNLTAQDAVVVEMTTNTYTVYDALKPLVHSVTVVHPPHVALIVRAQVKTDKKAAFTLAQLHAAGLLPAVWIPPLEVRELRALVAHRRKMVKLSSIAKCRLHALLHRHDLEAPAGFELFTEDMRAWWKSMKVSPLEKQCMLSDLATLEFAQGQVKQIEAALNIEIAKDARAPLLVQITGIGLLTAVTILAAIGDIRRFPTAKQLVGYTGLGARVHASGETFTTGRITKAGRKELRWAMVQAARQAVAHHPHFKAEYERLSTRIGTKKAIVAVARKLLVVVWHVLTRGTADKFANPIQVACGLFAFAHRARAKNLPNGQPALEFVREQMDRIGIGADVAVIPWGTKSFKLPPSKLKSERRPKHRIV

SEQ ID NO: 62595 - protein, 403 aa, unidentified
MPLFVGIDWASAEHAVCVVDSVGKVQARFNVTHTAAGMDALHRQLVQFGPELTVAIERPSGLLIDTLVEAGFAVVPIHPNALKASRPRYSAAQGKSDPGDAFILADLLRTDGHRFRPLRPLSDETRALRALVRTRDDLVHQRVALANQLRALLESFWPGAAAIFAEVDSPIALAFLDRYPTPQSAERLGDKRLAHFLAQHGYCGRRSPALLLERLRSAPTGLCGEAEAEAKGELVRALVRVLDPLLAQLVKLSSAVEHAVAAHPDGPVVTSLPRAGRINAAQILAELGDDRLRFSSDDQLAAEAGVAPVTHASGKHRSVSFRFACNKRLRQALTCFADNSRHASPWAADVYRRARARGCDHPHAVRILARAWLRVLWRCWQERQPYSLAAHRGAQRLDTEVAA

SEQ ID NO: 62596 - protein, 350 aa, unidentified
MDSITTIGLDIAKNVFQLHGVDESGVVILRRSLRRGQMLAFFGNLPPCLIGMEACATAHHWARALMALGHEVRQIPPAYVKPYLRRQKNDAADAAAICEAVTRPSMRFVPVKSEEQQAKLMLHSARELLVSQRTALINALRGHFAEFGIVVAQGARNARLLVAVIHDESNPDLSCSARVALLPLASALIDIEAQIASLSKAILVAHRSNDVSVRPATIPGIGPIVASSLAASIADPGVFKSGREFAAYLGLVPRQHSTGGKPRLGRITKMGNRRLRKLLVVGAHAALYSIKSGKTNTPLADWARTLLAKKPFKLVAVALANKMARIAWVVMTRNTIYQPMFRGTASQGAS

SEQ ID NO: 62597 - protein, 358 aa, unidentified
MPDSQTGRRITVGVDTHADVHVAVALDQLGARLGQLEIRTTRTGYDQLERWATGFGPVAAFGVEGTASYGADLTRHLRRGGHEVVEVNRPDRSTRRRRGKSDPIDAEAAARAVLSGQATTVPKTGDGPAEMVRMLKLARDSAVKARTQTINQIRAVLVTAPTALREDLAGLSTAKLLQRCLTFPADMPTTPTPTTVAQYTLHTLARRYRELDQDARELKAHLTQVTTAAAPALTILLGVGPDTAAAILTAAGDNPDRLHSEAAFAALCGASPVPASSGKTIRHRLNRGGNRQANAALHRIAVVRLRWDPTTQHYMARRRAEGKTAKEVLRCLKRSIAREIYRTLCPPANNQPNTTGHQ

SEQ ID NO: 62598 - protein, 337 aa, unidentified
MIVIGVDVHKQSLTAVAVDEAGRALAESTASAACHLLSWASSLPGERSWAVEDCRQLTRALERALLAADESLVRVPPKLMAPQRRAGRARGKSDPIDALAVARAALREPRLDHPRPGEQRLRELKLLVDHRDDLIDERRRAQQRLRWHLHDLELELAVPLGALDRGVWLDRLGRRLAGLEQTAQVRIARELVGRCRSLTRTILALDRELQAAAAQTAPALLALPGCGAVSAAKLLGEIGPIERFETDAQLARHAGVAPLEASSGKHRRHRLDRGGNRQLNCALHRIAITQARVHPPARAYLERKQSEGKSRREALRCLKRQLARTVFTTLKNEPLLT

SEQ ID NO: 62599 - protein, 366 aa, unidentified
MTKDMLYVGLDTDKKHIDVAVAEPLPGGEVRYWGKIANAPAPLDRALRRLQKDGRRLMVCYEAGPCGYGVYRHLNGKPGVTCQVVAPSMTPRRPGVRVKTNRRDSLTLAKLLRAEELTAVWVPDAAHEAMRDLVRARAAAVADLGRCRQRVGGFLLRQGIGYDAKPWTKKHRAWLGRLEFAAPAHRALMAEWLDALDQAEARRDRLTEHIADLVPHWSLAWLVDALQALRGFRLVAAATVVAELGDPRRFDNPRQLMAFLGMVPSERSTGESVRRGGITKTGNGRARKALVEAAWTLTRPAKAATATHHGAAVRAIADKARHRLARRYRALTARGKPRTVAVTAIARESLGFIWAIAHAAAPDARR

SEQ ID NO: 62600 - protein, 405 aa, unidentified
MTTEFFVGLDWAVHTHAVCVIDAAGAVRDRFEIAHDREGLAELMRRLARFGASVRIAIERPSGLIVDALVEAGHQVFPIHPNAVKASRARYRSHGGKCDASDAYLLADLLRTDGHRWTALSPQSDSIRALRALVRSRDDLVATRVALGNQLHSTLQAFWPGAACIFADITSPIGLAFLKRYPSPASAARLSQARLLRFCHAQHYSGRRSPAELLARLHAAAQGLVAPLTAESMAQVVRSLVAVLNPLVTQISALTRRIERFVASLPDGQIIMSFPRAGRVCAAQILAELGDVRERFPTLDRLVAEAGAAPVTYQSGKTRSVSFRWACNHRLRQAITCLADNSRHANAWARSIYAAARARGCDHPHATRILARAWLGVIWRAWSDRKPYDPKLHNAALKLASGGGG

SEQ ID NO: 62601 - protein, 385 aa, unidentified
MNQISCSATSSHTLHCALELSKKSWLLAIQFPDREQPSVYSIKGGDTEKLMAKLTAARDCWAKVSGSLPVITLCYEVGYDAFWLARFLKARGIECLVIDPGSLQVNRRGRRVKTDRVDVKMLLRTLIAWCRGERHVWSLVRIPSVDEEDLRRSHRERSRLVRERTAHINRIKGLLFAQGIRDVKVKSQYKTLAVDKLLTADGHRLPPRLASEIARELQRLAMVQEQIAEIERERDTAPTPCEATERKRQLLLQLKSIGPAISALLSREVYYRQFANRRQVGSFLGLTPSPYSSGEEERCQGISRAGSGQVRAIMIETAWLWIRHQPKSALTRWFVERTAGQSTRMRKIMIVAVARKLAIALWRYVEQGLVPQGAILNPPTTGKAR

SEQ ID NO: 62602 - protein, 346 aa, unidentified
MREIIRIGMDTSKHIFVLHGVDAAERAVLRKRLSRKQVLEFFAKLPSTVIGIEACGAAHYWARELGKLGHEVKLMAPQLVKPYVTRNKNDGRDADGLCEAMSRPRMRFVPVKSAEQQAALMLAGVRDGLIARRTQLSNAIRGYAAEFGLIAPKGLDKIEPLLARIAQDESLPAIARELFAMQGRDYAQLQGELKAIEARLLAWHRANATSRRLAQIPSVGPIIATSLVMKTPDPHAFRSGRWFAAWLGLTPKDHSTAGKTRLGKITRAGDETLRRLLVAGATAVIRQARLGRGQPSRWLVALLRRKPPKLAAVALANKVARIAWKLMVTGESYDAARINAAPASVT

SEQ ID NO: 62603 - protein, 362 aa, unidentified
MKKSSKATQNHQPTSKREKPAFTVGIDLGDRFSRYCRLNQDSEVTEEGRIATTKAALERHFAGEDRLRIALECGTHSPWVSRLLESMGHEVVVANTRKIRAITASDAKNDRNDAERLARFAAYDVGLLSPIRHRSPQRQYDLSLLEARDALVRARTMLVNATRGLVKSSGGRLPKCSTESFATKAAAAVPAAMEASLTPLLQQVGTLTQQIRTMDRQIAALEKRYPEVTRLRTVPGVGPVIAAAYVLTLDSPTVAPASRCAGAFLGLRPRQSQSGDSDPQHRISKTGNGYLRRLLVQAAQYVLGPFGPDSQLRRWGLRLAASGGARGKKRAVVAVARKLAVLLHHLWRTGQSYRPFPETMSA

SEQ ID NO: 62604 - protein, 342 aa, unidentified
MERTTVAVDLAKTVFEVAVANERGQVTERRRLTRSQFTRLLRMQPPSRVVMEACGMAHHWGRFAQEHGHEAMLLPPVYVRPFVRRNKTDRADAEALVDAARSGRIPAVPVKRIEQQAVVGLHRVREQWVTTRTARINALRGLLREQGLTVPVGARLAVERVPALLDEATSVPVTLRHVLLSMHDEIRTLETRVEMVDRQLRDLADADPVTAKLQTVPGIGPLAATALTGTVGHIHSFGRGRQFASWLGLTPREYSSGGRRRLGRISKRGDRYLRCLLTNGGRAVLVAAIRRRRSGRPLTRLHQWALDVRDRSGYNKATVAVANKLARIVWAVWTRDVPFAAA

SEQ ID NO: 62605 - protein, 344 aa, unidentified
MDHFAGLDVSVKETSVCIVDDTGKIVREVKVASEPEALLAVLKNPAYHFKRIGLEAGPLSQWLFSALAEAGFPVICVETRHMRAVLKAQINKTDRNDARGMAQMMRVGLYRPVHVKTLRSQKLRMLLTHRKLLQSKAIAIDNDLRGTLRNFGLKVGMVGTVRFEARIRELVENLPDLAALVEPLLVVRRTLREQFCILHRRLLAIVRDDEVCRRLMTTPGVGPVVSLTYRATVDVPARFRKSKSVGAVFGLTCAKYQSGEVDWSGRISRCGDEMMRVMLYEAAQSMMRSKKWSWLKAWAMQIARRCGMKKAIVALARRLAVIMHRMWVDGTEFRWSREQAAAAA

SEQ ID NO: 62606 - protein, 485 aa, unidentified
MTKRRMSTFERLESGRLNRKQRRELGRQVAVADPGLTIVHANAGGIDVGNESHYVAVPPDRDPNPVREFGCWTAALNQIAEWLQSCRIDTVAMQATGVYWIALYDVLEQHGIRVVLANAQHTKNVPGRKTDVQECQWLMKLHTYGLLRDSFRLAQEMESVRTIWRLRDRHVKEAGRAVQHMQKALTKMNIQLANVISDINGLSGQQIIAAILQGERDPWKLADLKHYRVRASREEVARSLEGNWREDVLFELQQAVDSYHFAHRQMQECDRKLEGYLASLPARMLDIPVQPESTQAATPKKKTKKAKRPRGNQPQLDLKTELKRICGVDLTSIDGIDVMTALTIVSEIGTDVSRFQDETHFASWLGLTPAKDITGGKTIGRGKRKVKNRVAVALRTAATTLLKSDSYLGARYRSLRRKLPSFASAVKAMGRYLAVLIHRLLTKGEAWVDRGATQFERRHTEQELASLSFKARAKGFKLIPITEAS

SEQ ID NO: 62607 - protein, 358 aa, unidentified
MVFGIYGPSNGGMTMIYIGMDVHKKTTTFCALDSEGEILRRGIVNSKESGWLEIVNYWFSDEISIALETGSMTWWVVDVLRDAGVEPIVVDARQFKMIADSKKKSDRHDARALADGLRGGLAERIAVNVPRQKARRARSLMQTRQQILKQRNMTVNAVKAMLRSVGVEMKMGQWPKESHWEEVLSNPAVPVWMKPFLITHRSIWDYLEQQRHDLDALVNQELAHWPEAELLMEIPGFGPIVTMGILSGIDEIKRFKRSNQLASYAGLIPSSRDSGSVLRRGGITHQGRNLMRHFALQAAWAAMRSKKLTPSLQKWSRRLIVKKGRQVAAVALARRLMVLAHKFLSTGEVYSPVYPTVT

SEQ ID NO: 62608 - protein, 472 aa, unidentified
MARAPRRQGGGQPRQRRSSRGRPAQLEQLNLNAAGIDVGATEHWVAVPADRDAQPVQRFGAFTADLYALAEWLRQCQIDTVVMESTGVYWIALFAVLEERGFDVKLVDAHYARQVPGRKTDVKDCQWLQELHTYGLLRGAFRPEDEVCVLRRYLRQRSMLVAMASRTVQHMQKALEQMNLKLTEVVSDITGKTGMTIIRAMLAGERAPQLLATYRDKRCKHDQATIAKALTGHWRAEHLFALQQAVEQYDFIAQQLRACDGHIEGCLQAFVPDVEIDAPQAPSARPWRSSRSNPLSFEVQAYLEAMTGVDLTQIDGIESLTALKVLSEIGRDMTRWPTSKHFAAWLGLCPGNKLSGGKRYRMRSKPSANRAATALRLAAQGVANSHSALGAYYRRRRARLGAPKAITATAHKLARLVYSMLRYGTAYVDAGQQAYEQKYRDRVLTNLQRKAKAFGYKLVHVEDIAGGVASTL

SEQ ID NO: 62609 - protein, 343 aa, unidentified
MKYIGIDYHKQYFIATVVDEKGSVISKVRVSTDRSSIQHYFSKVGSVEETKAVMEACYGWEYFYEEVKGFVGDFLLAHPLKTRLIAETKIKTDSIDSEVLAQLLRGDLIFRAYAPSFETRDKKNLLRYRMFLTGTKVRIKNIIHSVLARNHIEDKLFMGLSDKFGKRGKSYLRSVILRGNDTEILSHYLDLLEATEEKIRLAENRIRKECREDEICVLLDSVPGIGNILAMTIRYEIDDIKRFLSAGRLCSYAGLVPSTYSSGGKTFQGKITKQGNKWLRWAMVEAAQRATLNDPYLRNFYNRVAKKGHNIAKVAVARKLLEIIYRIWIEKRPYSMKPVTVAL

SEQ ID NO: 62610 - protein, 467 aa, unidentified
MLSDAMQTLAGRDADMTAEATGATSQRRVASCPVRERPRISWMRGDAPPRISFGRLRSRALGQAPPHRRREQGMIYAGVDIAKTDHVIGAVDERGAEMCPPMPFKNTEAGLERAVAWLEGLAGSPSDVVVGMEATGHYWMACYSFLVARGYSVAVINPMQVKAVRKLKGLDKVKNDRVDAGLIAEALRIGQYDETRLATDEMASLRSLSRYLQSLRGMVAELKTQCICLMDAHFPEYAGIFSDMFGAGSRAVLSKSPLPFELARRRADSLARDIAEASRRGGKSSGYAAKIKAAAKSSIGVRLGQEAASFQVKSLIRQIEFADSECAGVEARLRSLLDEVEPLVLTIPGVSYVTGAQIVSEIGDVSRFRNAPALVSYAGLNSSVSQSGQFDSGGGPITKHGSPYLRRALWLAANRARQYDPGLRAFYDRKRAEGKPHRVAVTAVARKLCHIVFAVMRDQVPYDPGRE

SEQ ID NO: 62611 - protein, 320 aa, unidentified
MSKKKSKAFIGIDVSKKLLEVAAHESDYQFRCANKAKAFGELIVELLALRPALIVLEATGGLEIPVVAALHAAGLPVVVVNPRQVRDFAKALCQLAKTDRLDARVLAHFAAAIKPPLRPIKSADELELDALVGRRSQLVEMLTAEKNRRGSAATDTVREEIKEHIDWLEERIAELDQQLKGQLKNSTVWQGKDDILQSVPGIGPVVSFSLIADLPELGRLNRQQISKLVGVAPLNNDSGQQRGTRHIYGGRTRVRSMLYMAALTATRFNPVIKEFYQRLLANKKLFKVAITACMRKLISIINVMVRDSTLWKTKLDPVSA

SEQ ID NO: 62612 - protein, 324 aa, unidentified
MNNCPKLGLDIAKKTFQAVLLRQGKQRHKKFDNTPAGFADLSAWLAQQGVEQVHVCLEATGIYSDAVARFLHQAGHVVSLVNPARIKAFAQSRLVRTKNDKADAGLIARYCDEASPDAWTPPPVEITELQALMRHLDSLDETRGQLCNRLTDGPQIELVLASLRKLIAEIAAESERVWQQVRDHINGHPELKAQAALIDSIPGIGELTAAKLLGEITQLRVYSSASQVVAYAGLNPQERQSGTSIKGQSRISKTGNARIRKALYMPAIVALKHNPLIRALGERLEERGLAPLAIVTAAMRKLLHLVFGVVKSGKEFDPNHALAS

SEQ ID NO: 62613 - protein, 422 aa, unidentified
MGKRKYRSTAFDKVDWLELKAKTDGQEVVFAVDVAKEDFVAAVMKGDREVLATVKWQHPQQSRALVETVYSHFAGTGLKVAMEPTGTYGDAVQGLFREAGVDVYRVIPKRVHDAAEIFDGVPSLHDAKAAYLIGRLHLDGVSERWQGLSPERREMKALQGLMTHYKRQLQQSRGRLEALLARHWPELPQLVALDSATLLHLVGQYGSPAQVCAHRAEARELIRRVGGNGLKAAKCEQILDSAASTVGLACVEAERELLQTLAQEMDRTRRQLRELERRLEAKVERDPVLGYMATALGHITSVVLMSLLGSPLDYGDSASYQKAMGLNLKERSSGKYKGKLKFTKRGPSLARFYLYFAVLRLIKRDPNVQRWYQSKVKRDGGLKGKAIGAVMRKLAKALWHVARGERFDSSKLFNVDGLAVAA

SEQ ID NO: 62614 - protein, 425 aa, unidentified
MSKPNVEIAAFVGLDWADQKHVVTLQEADTNQRQRFTLDQTPEALQSWIELLRNRFAGRPVAIAVEQKRGALIYALMHVDFLHLYPVNPQTLSQFRKAFYPSGAKDDPVDADLLLEILLTHRQHLRVWIPDDVLTRSIQLLTEDRRHLVDERTALTNQLTAALKMYFPQALAWFGDLHTARACAFLHRWPSLQDLKRATPSSIRKFYKAQGYRGDDKLKQLIANIQQAQPLTPDGAVLLAGSMKVQALATQIPLLTESIELYDQKIAALFDQHDDSTLFGSFPGAGASLAPRLLAAFGSDRGRFEFAAEMQQLSGIAPVTEKSGTGIWIHWRLACSKFLRQTFQEFAGCSILQSDWARAYYDQQRKRGKSHHAALRALAFKWIRIIFRCWKTRTPYDEALYCKSLQFRRSPLAAELPASEKLALT

SEQ ID NO: 62615 - protein, 336 aa, unidentified
MSHYCGIDLHSNNHVVVVIDEEDKRVLEKRLNNDLSLTLRALSPYRDTLQGVAVESTFNWYWLVDGLQEQGYDLRLVNTLAVKQYDGLKYSDDRHDAFHLAHLMRLGILPTGYIYPKAQRAIRDLLRRRLFLVRTASAQLISVQSQIWRSTGLRIKSGDLRKADFVAPEVEGYTLQAVNAGLSVYQAVQREIDLLEQSAHQAVKLTDAFQILQTVTGIGKILGLTIMLETGTIERFAGPGNFASYCRCVDSKRTSNGKKKGEGNAKAGNKYLSWAFSEAAHFAVRFEPLAQRFYERKKARTNGIIAIRAVARKLARATWMMLKHQAPYDARRMFPG

SEQ ID NO: 62616 - protein, 432 aa, unidentified
MEKMHFHAAGIDIGARKVFVGLEGQPVRSFETFTSDLVSLKNYLLEHKVSTVAMEATGVYWYVLYDILLDGGLDVWLVDGRQTRQLPGRKTDVKDCQWIQQLHSYGLLNRCYVSEGHIKELRSYQRLREDHLRSAAMHVQHMQKALIEMNIRLPEVLSQVHGVSGMALIDAILQGERDPDKLFSLCHKKIRENKGEELLKALQGHYTAQGLFALGQAYKAYGFYQGQIMECDSQIDSVLQRINRDKNLPPGISEGKRKAIRHNKPHINNLGDHLLKIFDGKDATKLPGITDYNWLQLYTEVGSDLSRWPSEKHFTSWLGLSPGQDRSGKKNKSKSKGKPAVGQIFKQMAHGLLNSKYIGWGSFARRLRGRKGPAIAIKATARKLAAQYWRLIVKGADFVEKGLQAYENIIKEQKQRRLEKLAFELNRELVPA

SEQ ID NO: 62617 - protein, 346 aa, unidentified
MIPVASEVHKGRCWMAMIPPGEDVKMLEPIECTREAWRQRWAELPPDAEIALEVSTSGYFVMSVLEEAGWRERAHWVHTAGIDSLRKQKSDRLDTRRLVKKLAVHDVDPLPEAWFPPPAIRALRLLARQRCGIARLRAQTKNRVQSLLEMHGLRPQRCVFTAKGRAWIQQQALPAAAQLCFDRFFRLYDFLSAERETREAELLAAAAAFPQVALLQTIPGLGHMLAAVVWSEIGDLDRFDSADAVLNHTGLVPSSYASGEVSMQGPITRQGPVWLRWALITAANALTRSKSPLGKRYWHLRRCHKHPNVAKAAVAGSVARCVYGVLKHGAPFQAERWGRRAGKLGQ

SEQ ID NO: 62618 - protein, 313 aa, unidentified
MNQKTTTTNHLVAIDIAKDSLQVQSLQESFRFNYDEAGLRSLLKLLGRLQDPFVVCEATGGYERPLLAALYKARIAVRLVNPARLRAFALSEGIKAKTDPIDARMILRFAQEKHLQPTPPPEPARQELAALLDRRSHLSEHLAREKNRLQKSQKSILAFIRRSIKFLEKEIVALDAKIRKLIGEDECLAAQAQRLQSVKGVGQITAWTLLAYLSEMPHLGRNQIVALAGVAPFNRDSGKTSAKRSIHAGRAKVRKCLYMAAQTAAQHNTVIKPYVAGLIARGKPYKCAIVAAMRKLLIHLQSLLKTQQKTFAL

SEQ ID NO: 62619 - protein, 401 aa, unidentified
MRFYTKQHRYYCGIDLHARRMYICILDADGQIRVHRNGPATPEHLLATIAPYREDLAVAVECIFTWYWVADLCAREGLAFVLGHALYMKAIHGGKAKNDKIDAHKIAVLLRGGMLPVAYVYPRAMRATRDLLRRRCHFMRKRAELLTHIQNTATQYLLPPFGKKIAHKSNRTDVAEQFTAPEVRKSIETNVALLDHYDRLLTDLELYLARTAKVHDVHTFARLRSVPGIGQILALVLLYEIHDIRRFPSVQDFVSYCRLVKCGKESDGKHYGYSGAKIGNAHLKWAFSEAAVLCLRQNPPAQRFVAHLTQQHGKAKALTIFAHKLARAVYYMRRREQVFDATRFFAGTAATPDPPGRATLTPGAPRGQATTTTGAPRGSRIPRSTRRRHCPGVVPMTTTAE

SEQ ID NO: 62620 - protein, 371 aa, unidentified
MKQQTKSSNITVGLDLGDRRHRFCALDERGEVVEQDSICNDRVSLRKLAGRYHGALGVMEAGAHSPWISRFLEALGWRVVVSNPRKVRAIYQHERKSDQRDALMLARIGRMDLALLYPVRHGTAEAQQDLLRIKLRDSLVRARVAVINSVRFTLKSLGYTVRTPSSERFHKVVMEEVPESVREMITPSVQALAELTARIKMLELEINTLAQMKYPQSAQLQQIPGVGPITALYFVLKIEDPNRFAHVRDVGAYAGLCPRRDQSGESDPQLRISKRGDAYLRRLLVSAAHYILGPFGPQSALRAYGLMLAADGTARAKKRATVAVARKLAVLLLSLWKSQQPYQPFPGACLNGEQEDRRSGTIALHRMEATD

SEQ ID NO: 62621 - protein, 402 aa, unidentified
MNSVGIDISKGRSTIAVMRPFGEVVISPFEVRHTDSELSELARRLKSLNGETRVVMEATGNYHAPVAKLLHDAGLYVSVVNAKLVHGYGNNDLRRVKTDRKDAVKLANYGLDRWLTLPRYIPEENTRLLLKNCYRQYRQYSKVQTVLKNNLISLLDMTFPNANRLFVSPARADGSEKWVDFVAEFWHCECVSERPLKSFVNKYWRWCRKHGYNFSEEKAHAIYDEASGHIGVMPKSETTKLLVEQAVSQLSATSAALAALKQEMQSLSSQLPEYPVVMDMFGVGPTLGPQLIAEIGDVRRFYSKKALVAYAGIDAPPNDSGDVIGRHKSMSKVGASSLRRTLFLVMSVYLQNSPLHEPIYQFMDRKRAEGKPYRVYMMASANKFLRIYYATVKAYLETLEQT

SEQ ID NO: 62622 - protein, 454 aa, unidentified
MTSKQSKPDYSDFDALQQINLSAAGVDIGADEIYVAVPVGRDDDSVRAFGTYTVDLHEIAHWLKSCGIETVAMEATGVYWIPLYEILEGYGFDVSLINARHIKNVSGRKTDVIDCQWIQQLHTYGLLQASFRPPEHICGMRSLVRHRDMLLRYRAAHIQHIQKALELMNLKLTNVLSDITGVTGMKIIRAVLAGEHSPKVLAQYRDRRCTKSEADIAKSLEGNYKDEHLFALQQAVELFDFYSQQIRACDAQLESMYARFDLRDQPGTLPPAKKRTRSKNHPDFDLAQSLYRMTGVDLTQIDGLEALSIQTILTEIGTDMSKWPTVKHFTSWLGLCPNNRVTGGQVKQRSRQKTKNRANLAFRRAAQSLARNDSALGAFYRRIRAKHGGPKAVIATAHKLARIVYFMLKRREPYQDPGADCYDQQYQARVIRHLTHRVAKLGFRLEPLGPDQVS

SEQ ID NO: 62623 - protein, 448 aa, unidentified
MSERTIAHEAPCIRMTIDGAAVRATKGKSMKPWTEITHYAGFDWARDHHDVVIVDRQGQIVAEMRLQHSLEGWQQFRDQMNNYPALAVAIETSQGAAIDQLLQLDCAIYPVNPLSAKSYRERKAPSGNKTDHLDAWSLAEALRVDGQHWKALQPLDPLTQQLQLLCRDEIGLIEQRTALVNQLQQALWEYYPAALQAFEDWTQPFCWDFILQFPTPEQLTVAGRRRWEKFLHTQKLWRPETASKRMEIFQNARQFCGSAAVTSAKSLLAVSLAKLLNALQRQLDQYRQQIEALFKQHPDHDLFGSLPGAAQTLAPRLLGEIGGNPNRFEDTENLQCVAGTAPVSFQSGQIHRVRVRYQCNKVLRHTVHLWAQCCVRVCPWAEVYYKQKRAEGKSHACALRCLGQRLLKILWKMVQTRKTYDADLHARHQKLHGSWVLALMQPDAKTSQ

SEQ ID NO: 62624 - protein, 342 aa, unidentified
MAIAVVGLDLAKHVFQVHAVDETGRAVLRRQLRRAGVEAFFKILPPCIVGIEACASAHYWARRITALGHEVRLIAPAKVKPYVQRGKKNDANDAAAIVEAVMRPHMVFVPIKNEEQQAVLMLHRTRDLLVRQRTMLVNAIRAHLAEFGIVAAQGRRKVKELIAGLDNTEMPELARIALWQIADQIDECDKRIDALERRILAWHKSDESSCNLATIPGIGPITASAMAATVPSPSAFRNGRQLAAWLGLVPRQNSSGGKDRLSGIMKTGNTYIRRLLVIGATSVIRFARSKAPGTAEWLKKLLERKSARLASVALANKMARIAWSVLTRGEVYRDIHPVPKPT

SEQ ID NO: 62625 - protein, 372 aa, unidentified
MKNTTRWVGLDVHAETIAVAVANEDGTVGSVGTIPNRPEAVRRAMKKLENGSKLRVCYEAGPCGYGLYWQLAEMGIECEVVAPTLIPVKTGDRVKTDRRDAEKLARLHRSGDLTAVWVPDAEQQALRDLVRARHAAKRDQLRHRNRLGKFLLQLDVRRPEKILAWGTKHMAWLEVQKLAHSSHQEVLVDYLSEVKRARERIERLEKAIDAGIARAPKHLQELIAAMQTLRGVAKIGAATLVTEVGRFSRFESATQLMAYVGVVPSEHSSGGSTQRGSISKTGNARMRHVVGEAAWSYRHRPSNGPALKKRQEGQSEDVKAIAWKAQHRLHQRFQKLSAKGKHHGCVVTAIGRELLGFVWAIGNKIEKQLDAA

SEQ ID NO: 62626 - protein, 335 aa, unidentified
MLSSIIFADLRRLCTLLFSTERNAHGHSRPDPHPGSHTVVALDVNGSVLTSLTVLNTSAGLSELQLFAAQFELRRWAIEGAGNHFIADFVKELLARGEAVYPICPNLTSQYRSRRGRKKNDVVDASNVARALLANPQLPVLQSADSQRELQELSRAQRRLSEQLKSNRGALKELTEDSPVRDILKQVITTLIVQLKELQRQLRCAVSRIMPRLLDLPGVGAIMAGTLLAEVGDPQRFPSADHFASYCGAAPVERGSGQNSRMQINPGGNRRLNWALHVIAIVRLRVDGGRSKQFLERLTSKGKTQRAALRLLKTYIAREMFRIMRQSDASSRCES

SEQ ID NO: 62627 - protein, 371 aa, unidentified
MKSILSVGMDVHKNSFSLCAYDGYTGEIVSESTFASDVKLVIKFIETLKSRYENDVEIKCGYEAGCLGYSLYKSLTSRGVDCVILAPTTMQVSAKNKMVKNDRMDALNIAKNLASGSYKAVYVPDEEDVEIKEYIRMIHDFKKELKRVKQEIYAFVLRHGYQYDGKSKWTIRYMNWIRELEMSEIQRETLDEYLAEMDNLNDKIERFMNRIDEMYQSDRYNEKVSELRCFKGIDTFAAMTIQVETADFERFPNAKAYASYTGLTTGEHSSGDKNNRIGITKQGNTVIRKTLVECAQSLVKGNVYTPKSKRPKSRQKGMDVNIIAYADKATERLKKKYQKLIERNVPRNKAIVAVARELACFIWGMETGNIH

SEQ ID NO: 62628 - protein, 366 aa, unidentified
MLAKVGTFFKNVKLTSDDEVFVGVDVHKKSYHVALFLNDMPAIDFQMAAEPKQLNKKLEPMACAIKDIVYETGPTGYGLARNLIKNNLPASVVATSRIPRPAGGGDKTDRLDSRKLAEYSAKGLLCPIRIPTPKQEADRQLYRMRHRQALQFAKVKVQIKSFLLMHGIKEPAGLGNWTIAGVCQLRDMCLIDTLRLSLDELLSDYDYFNNRIKVLNKILADNLNKGALGQRMDLLKTHPGVGPVVACQFTTELYHYRDFSSTRQLYKYLGLSPRISQSGEKSSTGSINKAANGRLRNNLIQAAWSWVLTDIEAKKCFYRICANCGGIRQKAIVAMARKLSGHLWAMLMNDQPYDKNKAKCRYNNER

SEQ ID NO: 62629 - protein, 315 aa, unidentified
MSRMVVIAGIDVSKDKLDIHVLPSNQTFVVGRDPRGLASLARRLRKAGVEQVALEASGDYERIVIEALEADGFVVQLLNPARVRAFAEAIGMLAKTDPIDARLIALYCQHFPDTGLTRRPEQARKLGEFLNMRAMLLKLAGEIRNSLEHVREPGLKALADTLSADIAAKLKDVDDRIAKVIAGDDATMRKARIIRSFTGAGPVLTSGLLARVPELGGVTRHAAARLCRAAPTDRQSGRTRHRSSIEGGRDQVRPVLHMAALAAIRSNPIIKAFAHRLSAAGKPKPLVIAACARKMVVILNAMLRDNTEWKYAKAA

SEQ ID NO: 62630 - protein, 331 aa, unidentified
MDHCAIDIGGRKSQMCIRDSSGTIQFEGALETAGLGDHLRQLPHCRVILETAAESFRIADQARSAGHEVRVVPATLVRTLGVGARSTKTDKRDARALSEVSTRVDLPSVHIPSARSREWKTMAGAHDALVSCRTKLINNVRGWLRGQARKLRGGEAATFTERVRNLGELPVYIASELTVIDALTSEISASEKRFAALTRADPVCKRLMTVPGVGPSTALRFVAALDVVARFASAHKVEAYLGLSPGEKSSSERQLRLGITKAGSSSVRWVLIQAAWIVRTCCRAPAARKLQLWATEVEKRRGKGVAIVALARKLAGILFALWRDGTEFKSC

SEQ ID NO: 62631 - protein, 403 aa, unidentified
MSVFVGLDWGGASHAVCVLDSSGKILERFLASHDCDGLADLVARLRRWGQPAETPVAIERPSGLIVDCLVDGGFIVTPIHPNVVKACRPRYRAAAAKSDPGDAYILADILRTDGHRLTPLSPQSDVTKALRALVRGRDDLVATKVVLANQLRALLESFWPGAIACFADIASPIALAFLDRYPTPGSAVRLGEKRMAAFLAQNQYCGRRPAADVLARLRAAACGVAAEAEAEAKGEIVKALARSLETIVAQIAKLTSRIEHAVAELPEGRIVMSFPRAGKICAAQITAELGDVRARFESEDHLAAEAGVAPVTYQSGKSRGVGWRWACNKRLRAAITCFADNSRHASPWAALVYRKARERGCNHALAVRILARAWLRVLWRAWQDGSAYDPAKHSAAKELIARG

SEQ ID NO: 62632 - protein, 338 aa, unidentified
MGTISTIGLDLAKNVFQVHGIDSLGNVLVRRRLRRSEVIRFFETLSPCLVGIEACGTSHYWARTIAAFGHTVKMMPAIYVKPYVKRGKTDAADAEAICEAVTRPTMRFVPVKSPDQQAALLQHKTRDLLVRQRTMQINALRGHLAEFGIISAAGVAGLNQMIALLHAEQEALPEPAQKLFQDIIAHLRALEQRIDDIEKQIVAAHKANSISRRLAGIPGIGPITASAIVAAVPDVSTFRSGRQFAAWLGLTPKNHSSGGKERQVGISKQGDSYLRRLLVLGATAVIRLARKESASRQWAAKLLEKKAARVVSVALANKTARIVWAVLTTGNEYSARSA

SEQ ID NO: 62633 - protein, 408 aa, unidentified
MQAVHERCAGLDIHKKTVVACVLTGSGKQIRTYGTMTRQLEALADWLAAEQVSHVAMESTGVYWKPVYNLLENRGLELLVVNARHIKNVPGRKTDVKDAEWIADLLRHGLLRASFIPGRDERELRELVRYRRTVIEQRAHDVQRIQKGLEGANIKLSDVASDIMGASGRAMLERLIEGEDDPVALSQLAQKGLRKKQDQLQQALAGSIGAHQRAMLRHLLDHVKFLERQIEELDGQIQERTRPFEQVIDHLDAIWGLGRRSVEEILAEIGVDMSRWPTHRHIASWAKISPGNHESAGKRYSGRTGMGNRWLRAILVEAARNVSRNPHSYYAALYHRLSQRRGKKRAMVAVAHSLLVAIYHMIKDGTLHHDLGSDHFERLDREQIARRAVRRLERLGYQVTIQEAAPAA

SEQ ID NO: 62634 - protein, 397 aa, unidentified
MTKVWAGVDAGKSAHHCVVISEDGDRLLSRRVVNNEPELLQLIADVCALATDVQWAIDLNCGGAGLVLAALAANGQRVVYIPGRVVYHAAAGYRGEGKTDAKDAAIIADQARIRRDLRAFAPADDVTAALRMLTSHRYDRMRARTGNINRLRALLGECFPALERELNLANSKAALILLTGYQSPAAIRRMGQSRLEAWLKKRKVRGSATLADKVIRAAHSQSVTVPGEAVAGRLVASLARCILDIEGELADLDRQITEVFREHRYAEVIESMPGFGPLLGAELLAATGGGIGVFENANRLAAMSGLAPVPKDSGRVSGNLHRPRRYDRRLMRVFYISAQLSARYDPNSEAYYRRKRAEGKRHTQAVITLARRRVNVLWAMLRDEREYAITSRKPLAA

SEQ ID NO: 62635 - protein, 421 aa, unidentified
MKVTYQTCCGVDVHKTFLVATIIKTTSGVEPSYEKKRFSTFNSDIRHFKQWLLDNNCLDVCMESTGKYWIPVFNLLEDRINVTIANPKWVKAVKGNKDDVKDSKWIGDLFRLGLVCGSFIPCKEIRILREYTRYRFKLVSCKTSEKNRFQNAFTVCNVALDSVVSDMFGVSASAITDYLITTNEFDEEICKSFLKGTLKAKADTVVESIEGCQMTQDQKERMLLIRSHLEFVQMELDAIDAKLDDLVAPYEEAIALLCTIPGIDRASAIIIISEIGTDMSQFDSSKRLCSWAGFTPGSNESAGKKKSVRITRAGVYLKPALVQCAHAAVKSIDSPYYKSKYERLLKRRGKKRSIIAIARMILTAVYHMLSTGETWNPCDLFKIDMPQEMQDKQKAKAIKQALKFLILEGVISQSDTLISSG

SEQ ID NO: 62636 - protein, 394 aa, unidentified
MIYVGIDVASRKHDIVITNNQGVVFKKPFKVLNNLGGYKKILSEICLAKEFFNKKLSRIGLESTGPYSKNILHYLILAGCEVMFINPLLTNMDRKASSVRKTKTDSIDAKAICMFLIRNQNDFKPYTLSSYHIDELKTLVRLRKSLKKQINKAMNQLHAYLIQAMPEYYNIFRKIDSKTSLEVLVRYASLSELKKVRLNTLSELIRKTSRGHHGLLQAEALKSLPLTSIGIDSQALSFAIKQTLERINMLNSQISSIEKEVKFNVDQADTTLLSIPGISYTTGGIILAEIGDIYRFKSADALLAFAGLDPSVYQSGNYEGNFKISKRGSSILRWAIYQSAQAIVKFDPVFREYYLKKKAQGKKHRNVLGHVTKKLTRVIYSILKNKSVYIIQAH

SEQ ID NO: 62637 - protein, 365 aa, unidentified
MKKTTTTATASEKNFGGKLTIGLDLGDRSSWYCVLDKGGEVMAEQKLSTTPKAMKEVFAAMPRSRVALETGMHSPWVSRLLADLGHEVIVAHARNVRLIGESRRKDDRLDARTLARLARIDPQLLAPVKHRSRQAQAHLTVIRARATLVRARTALVKAARGLTKSYGERLRGCNPRNLDLEKAQALSPELQTALAPLLQASEALSEQIAAYNRQIVEIAKQSYPQTALLKQVKGVGTLIALTYMLTLEDPHRFRQSRDAGCYAGLQPGRRNSGQSAPQMHISKEGDPYLRTLLVQGAHHILGPFGADSDLRRWGLKLAERGGKNGKKRAIVATARKLAVLLHRLWVSGEVYEPFHNSHSTMLATA

SEQ ID NO: 62638 - protein, 388 aa, unidentified
MRYTSFSSTPTTPRERLLFIGMDVHKDTHAAVGATAYGEKLFEISIGNNRTDFNELIERSRSVAAKRGLNLVFGLEDSTAYGLRLAKHLFANNLLVKTVPPIYVDRERKYETHPEKNDLLDAYAAAKVLIQRIDTLPTYRVTEQNELAKELKDLTLDREFLVKEQSRIKSHLHRLLHRAYNSGYRQKFKDPFAVKGLKYWLAHPLPTGVAKDDILGTPSILKNQIIRKVKRLMDIREELKEIGIELQTLIDQTGQKITTLNGCGVALGSKVLAEIKDISKFSSPSALTKYAGLCPREKSSGKTFRHIKSKSGNRQLNTAIHRIALSQISRSGNKHAKDYFQRKISEGKTKAQALCCLKRRLVDIIWHCRQIPPLIPLKTNQIRATIKV

SEQ ID NO: 62639 - protein, 387 aa, unidentified
MSRLDDLSRCLVPFRQDNTVVVVIELSQESWLVAGTVPGVERQPLKKMEPNETALLRLLHRWRDEATRAGRTIERIVVAYESGRDGFWLARWLAKQGIEVHVIHSSSVAVSREHKRAKTDRLDTAMLSRVFLGWLRGERGHCKMVVVPTLAEEDAKRPNRQLENLTGECTRIVNRLKAALARLGIRGFNPKLRKAAARLEALRTPEGEPIPQNLFEEMQRDLAHLAFLREQKREIEQLRLERLQQAPETGTNVMVLMLASVVGIGITTADLLVQELLSRNLRDRRAVGRSAGLTGSPDESGSKRREKGLSKCGNARVRRTMIQLAWRWQQFQPDSALAKWYKIRIEGAKRVVKLKLIVGLARKLLIALWRMVNTGEIPEGVVLRQPA

SEQ ID NO: 62640 - protein, 343 aa, unidentified
MKLSRVGVDLAKNVYQLHGVDRHGKTVWKRRLRRGQWLRVLTDSVEPGCEIGMEACTGAHHWARELQSRGYTVRLIAPQFVKPFVKSNKNDANDAEAICEAMSRPHMRFVSVKTVEQQDIQATHRVREELKAHRNAKANQIRGLVAEYGLVAPKTLLALRRAIPEWLEDAENGLTGHFRSLLHGLWNDLLTLEDRLKELDKEIEKLARSNEVTRRLQQLRGVGPLVATALVATVGDGRQYRKGRQMASALGLTPRQNSSGDKYRLFGISKRGDVYLRTQMIHGARAVVSQARHRDDPLSRWVTAIAKRRHPNVAAVALANKTARMAWAMLQNDTNYDPSLAVG

SEQ ID NO: 62641 - protein, 411 aa, unidentified
MDTPYCVGIDVALHDHRVAILGPDGEARGNSFSILASQEGFADLVRTLHAREAAPGHTLVGLEATGHFWENLEAFLSRAGYRVVVLNPLQPRRYRDVLRRKAKTDDIDAYVIAGLLRSEAAAACYVPDEQIQSLRELVRLRARLMRERQDYLRQLVAQLDVVFPEHRTGLGEATTARARGLLTAFPTARHLAHATPATLRRTAAAAGARGFSLQDATALRDGARQSTYSGKAAAARGHVVRTLIAQFERLTASIDDLDQTLQALLPPADPEGGPSDATLLQTLPGVGPHTAGTLLGELGSLTRFTDARALVAYVGFFPVIKESGEHAATPFLSPTGSRIARHTLYLAAVNAVRRSTEWRRLYQHKLAHGKKPKQALIAIAVKWLHTAYAMLKHRAPYDPSRLVATPATMSP

SEQ ID NO: 62642 - protein, 463 aa, unidentified
MLLRARVTGSRSCRGPRGRRARIRYWEKKEGAVDIVHPRVAGIDVHKKVAWVAVRLPGEAPGERKVITKRFKTFWRPLQKMAAWLAELGVTDAAMESTGVYWWPVCHALAGAGIEVCVCNAAHMRNVPGRKRDIADCQWIAELHEHGLLRPSFIPAAEVAALRQRTRYRRRLIEQRTSEGQRLSKVLEDAGIKIDSVASRLLGVSGREMIEALIAGERNPGRLADLARGVLRRKTEDLQMACDGRFTAAHAQMCRLHLDAHDHLTAAIAELDALIAEAAAPFAAVIARLMTIPGIGQRTAEVIVAETGGDMTRFAASARLAAWAGLAPGDNESAGKRKHAAARKGNQHLRAAMTEAAWATARTRTRPGARFRRLARRFGKGHEKKAAVAVAHTLICIAWAVLSRGEDYAEAGEDYYEQRDRRNREHLIRHHQQALARLGCQVTLTPPGDGPPPADGPGQQPAA

SEQ ID NO: 62643 - protein, 320 aa, unidentified
MTKKKGRSFIGIDVSKQLLEVAVHESSYHFSCANTVAAFANLIAELVHLQPKLIVLEATGGLETAVVNALRGVGLPVVIINPRQVRDFAKALGQFAKTDRLDARVLAHFAAAVQPPLRPHKSQDEQELDALRKRREQLVDMLADEKNRRASAPSAKWRDQIEKHIEWLEQDLAELDAQLKALLKASNQWQVKDQILQSTPGIGAVVSSALIADLPELGTLSRQAISKLVGVAPLNNDSGPKRGTRHIYGGRAPVRRLLYMAAFNAIRCNPVIKEFFARLTARHKPYKVALTACMRKLLAILNFMVRTNTQWTYKAAPISA

SEQ ID NO: 62644 - protein, 347 aa, unidentified
MDRYIGLDVHQTSCTLAIVGPSGRRLGSQVVETNGQALVEAIRAIPKPRHAVMEEGTQSAWLYEVLSPHVDELVVAGISQSRGPKSDARDAFGLADALRLGAIATPVFKAPSRFAMLRELGRVYSMISRDVVRTQNRIKAQYRSRGVQTSSSVYSQSGRQDGLSKLPVPSRAAAALLYGELDALRALKKQAHCELVSESRHHPIAQVLRTCPGLGDIRVAQLIPVVVTPERFRTARQFWSYCGLGIVMRSSSDWVRQDDRWIRSQTAKTRGLNPCHNSTLKVVFKGAATTVITKLEHEPLRKDYERLLAQGTKPNLAKLTLARKIAATALSMWKHQEVYDPARHRKQ

SEQ ID NO: 62645 - protein, 311 aa, unidentified
MSEQITVGIDVSKDRLDVHVRPTSEVFAVSRDGRGLGTLCDRLKARAPTLVALEATGGYETVVAAALAGAGLPVVVVNPAQVRSFARALGKRAKTDPIDAAVIAHFAEATAPEVRPLADEATQMLADLVVRRRQIVEMIGSEGQRLRRMTLPRVCRSIERLIRALEKELADLDHDIDDAVRGSPAWREAEDLLSSVPGVGPIVSRSLLAELPELGTLDRKKIAALAGLAPFTRQSGTWKGRSFIGGGRTAVRTVLFMAALVAARHNPILKAFYQRLIQAGKPKMLALVAVARRLLVILNAIMRDRRPWQNA

SEQ ID NO: 62646 - protein, 355 aa, unidentified
MTSTKYIGLDVHKESISIAVMNSVGKVVMECVIETKASTILQFIDGLRGDVRVTFEEGTWAAWLYDLLKPRVTEVVVCNPRKAALLKDGSKGDRIDAHKLAELLYMNKIKSVYHGEHGLRTMKELARSYLTISADLTRVMNRLKSLYRSWGILCTGKEVYAPRYRAEWLGKIREAGVRRRAELYYQQLDVLRLLRQQVRQDLLVEAKKHKAWKLLRQIPGIGPIRAAVLIAVMQTPHRFRTKRQLWTYSGLALETHDSAQYHAVKGELQRSKRPATVRGLNKDHNHDLKDIFKGAAMRASTTAGPLHDFYENLLAKGRKPTMARLTLARKIAAITLIVWKKEVRFDANHLKQQAA

SEQ ID NO: 62647 - protein, 369 aa, unidentified
MQEHTNVATLVELRKREPVGRMTIGIDLGDRKSHFCVLNDQAQVIARGFLPTTITAFRREFEGLPASLVAIEAGAHSLWANQVLKVCGHEVLVGNPRKIRLITESDRKSDRVDAESLARLARADRLLLAPIQHRTQEKQVQLSVIRARHVLVRSRTALINCARGLVKPMGLRLPACSAEAFAKRAVTTSLPEILHDALAPLLKQVEAVNQAIRDYDRQIEQIAATQYPETCLLKQIKGVGTLISLTYVLTLEDPHRFAKSRDVGAFLGFLPREKQSGERAPRLGISRAGNEYLRTLLVQGAHYILGPLGPDTDLRRWGLQLAARGGGGAKKRAVTAVARKLSVLLHHFWKTGEVYEPLRKTQIAESTAA

SEQ ID NO: 62648 - protein, 335 aa, unidentified
MKAITIGIDLAKTVFHVHGTASDGTVAFSRPLRRAQMIGFFERQEPCLIGMEACGASHFWAREIARCGHEVRLMPPAYVKPYIKRGKSDALDAAGICEAVTRPTMRFVPVKAPEQQAVLALHRVRDLAVRQRTQTINMLRGVLAEFGIVLGRGPGHAVAFARTPAETDLPEAARIVIADLRETLIAQHDRVERHDRELARISADDPAVALLRTIPGIGPITASALAATIGDASRFATGRDLAAWIGLTPLNRSTGGQQRLGRISRMGDRNLRRLLVIGMTSRFRQIKSHPKTEDPWAVELVRRKPARLATVAMANKTARIVWAVLTRGEPYRAAA

SEQ ID NO: 62649 - protein, 387 aa, unidentified
MLLDHPTDGPAAIRTQFGAIFVSMELSRSTWLVTSLSPGKGEKMSKRSLEAGDVAELLKLFAELKRKAQARMGESYPIISIQEAGLDGFWLHRALRQEGIESHVVDPASIATPRRRRRAKTDRLDGETLLRALLAYKRGEPRVCAMVVAPSPEEEDRRRLCRERRTLIAERIEHVNRIKGLLFAQGIFDYVPLRRDRRKRLEALQTGDGRALLPHLKRQIGRELDRLELLLDQIAAGEREQDALLAASKPTGETAASDPVTMLLALKSMGPNFAAVLWSEAFWRQFANRRQVASYAGLAATPWRSGGIAREQGVSKAGNPRLRTTMIQLAWLWVRHQPQSALTQWFKTNSPRGRKRTIVALARKLLVALWKYVTSGVVIEGAVMKTA

SEQ ID NO: 62650 - protein, 338 aa, unidentified
MNSNVVGLDLAESIFHLYSLSAEGKAVKKKLKRHELLAYIAQMPVSLIGMEACGGAHHWAREFMKLGHEVVLLNARFVKAFAIGNKNDFNDAEAIFTAVSRPNKRTVVVKNLEQQEMQMLHRLRQDLIYQRTALTNRIRGFLSELGLVIPQGVNQVRKQLPLILENAENGLPSLSRELFAELYAGLSKLDDDIKAQDRRINRLCEQNALSRRFLDVPGIGPITATIMACDIGDGKGYAKSRDYAASLGVVPRQHSSGDKQVLLGISKRGNRYLRTLLIHGARSVIRCCTGKTDPLSRWLQNLVDRRGFNKAAVALANKNARVLWAMAKRNSAYEAVAA

SEQ ID NO: 62651 - protein, 348 aa, unidentified
MSDNKVVVTYGIDLAKSVFHICGLDQHGKIVVSRKLRRNQAIIYFSKQSACKVAMEACAGAHWIARKLAALDYDVRILPAQYVKPFAQQQKNDANDALAIAEACQRPSVKPVPIKTLEQQHLQAMHRVRDRLVNQRTRLVNQMRGFLLEYGITIRGGIGNFRAQLPDILATDNEDLTPGMLGLLESLLSEFLDLDEKAKNITRQIEAWAARDETARRLQTIPGIGPLSATAIIAAVGNANQFRRARDLSAWLGLVPKQHSTGGKTTLGGISKRGNGYIRRLLIHGARSCTLHLNREKDKLGQWMDELSQRKPFNKVVVALANKLARIAWVILVKPGATYKRVDPILVS

SEQ ID NO: 62652 - protein, 389 aa, unidentified
MKIFVGIDIAKLNHFAAAISSDGEILIEPFKFTNDADGFQLLVSKLESFDKNSIIIGLESTAHYGDNLVRYLVAEFYQVCVLNPIKTCQMRKNNVRKTKTDKVDTFVIAKTLMMQDDLRFITFFDLDMMDLKALGRFRQKTIKQRTRLKIQLTTYVDQVFPEIQYFFKSGLHQNAVYALLKEAPSPKEIASMHMTHLANLLKVNSHGHFTKEQTKELRVLAQKSVGANDSAISIQITQTIQQIELLDSQLEKIEAEMTDIMKFNDSVIMTIPGIGYINGGMILGEIGDIHRFSNPNKLLAFAGLDPSVYQSGNFQAKTTRMSKRGSRVLRYALVNAAWNVVRNNATFKAYYDAKRAEGRSHYNALGHCAGKLVRVIWKMLTDEVEFNLE

SEQ ID NO: 62653 - protein, 344 aa, unidentified
MTKIITVIGLDLAKSVFQVHGIDAEGAVVVRRKLSRSRVLAYFSKLEPCLVGMEACATAHHWGREIRARGHEVKLMPPQFVKPYLKSQKNDMRDAEAICEAVTRPTMRFVPIKTPDQQALLALHGVRDHWVRLSTRLINTLRGYLAEFGIVASKGRMGVEAILDTLADDQDDRIPDLARECLRPLASELRHVKRQILETDRKIMKAHKANAICQRLETIPGIGPIIATRVVAEVSDPAMFKSGRAFSAWVGLVPRQHSSGGRERLGSITKKGNSELRRLLVAGAMSMIIRAKQLGFTRHPWLSRLLERKPMMVVAIAMANKMGRMIWALMVKGEKFNPAKLMPA

SEQ ID NO: 62654 - protein, 393 aa, unidentified
MACVRMPGEEGARAEEVKEFGTTTNELLALRDWLTANGVTLAGMESTGVYWKPVYYVLEEAMECWLLNARHLRNVPGRKTDLKDAQWIAQLVEHGLVRPSFVPPKPIRELRNLTRYRKAQIEERGREAQRLDKVLQDAGVKLSSVATDILGKSGRDMLNALVRGTRDPEVLAELARGKLRAKIPALREALLGRFSNHHALLVSSILAKLDFLEEIIGSLSEEIDRVIAPFGHHVERIVTIPGVDKRVAEALIAEVGVDMAVFGTPDRLASWAGMCPGNHESAGKQRSGRSRKGPKWLQACLTEAAKAAGRTKNTYSGSQYQRLRGRRGPAKATKAVGHSILVAYFYIIQNEVPYRELGPDWFARRRPEAQARKLIRQLNVLGYAVSLTPIQAA

SEQ ID NO: 62655 - protein, 367 aa, unidentified
MKKVYIGIDAHKATNTTALAFFGQEEPQIHGKCSADLDRFLTVIRKLQKKHGWTKEEMALCYEAGPTGFVLARRLIQLGYDCQVVAPSLIPSQSGNRVKTDRRDARKLAGLFRAGELTAVHIPEVEDEVIRDVCRGRTDAVSERTRSRMQLGSFLLRNGYHYTGESRWGAGHMRYLRELVLPHPVQKLVLEEYLQRIDLAVLQVDRIDEQMGRLLATWSRRPLVEAVMGLRGFQQTAAMVVISEVGDFTRFAHPKQLMAYLGLVPTEDSSGSHRRQGAITKCGNSHARWMLVESAGSYRLPPKISKELSKRQEGLSREVRALSWHVQNRLSRRWYRLTMRGVHFNKIRAAVARELSSYLWDMAHLMS

SEQ ID NO: 62656 - protein, 391 aa, unidentified
MSMYFVGIDISKYKHDCCIISAADQQIVSKFTVKNDKDGFEHLLTTLNSLSNPEDIKIGFESTAHYALNLELFLENAHHSFMEVNPVLIKEYKKSTTLRRTKTDSVDCESIARWLMTVEYKPHSKGFYHSYSLKSLTRLRDRLIRQRSFYLVKITNVLDHTFPEFKPFFNERLSKTAIYLLENYGSAEKMAHMNSASYDKLRCASRGKFSIQQFLRLKELAANTVGVNNSIFDIELNSLLTLYNSLCKEIKILEAEITKLIEEVHPHYMSIPGIGPISAAVIYAEYGDISNFSNPGQMLAFAGIEPGINDSGTESHGGRMVKHGSSQLRYVLLNACLPLIRFDITFATYYAKKRAEGKKHRVAITHVAKKLIRVIYALERQDVDFNVQKLR

SEQ ID NO: 62657 - protein, 348 aa, unidentified
MKLKRIGLDTSKAVFTLHGVDHDEKAVLRRNMRRAEMEAFFAKLPPTLVALEACGGSHHWGRRLADMGHTVQLIPPQYVKPFVRRGKNDRNDAEAISEAAARPDMPSVPVKLAEQQAQAIVLSARELLVRQRTQLVNAVRGHAAEFGVIAARNISQLPALLEAVAAEEAVPEAAKQMLAFLGAQVVQLEGQIAELERRIKQQHKVNPVSQMLTEIPGIGPISALSLALTIDPGQFQSGRHFAAWLGLVPKEHSTGGRQRLGGISRAGNERLRQLLVLGATTVIRFAKPGSKSASAWLLALLERKPRKLAAVALANKMARIVWAMMATGEAYRGSKKVAMLAAEAAAAA

SEQ ID NO: 62658 - protein, 362 aa, unidentified
MRIIGCDLHARQQTLAMLDTTTGEVREVTLQHEGDNVREFYSSLPSPVRVGIEATGSMQWFLNLMEELGIECRVGHPAQIRAAAPRKQKNDRRDADLILKLLAENRFPAIWLPSKELQDLRSLLRHRHQWVRMRTRIQNALQSIALANGLRRGTALWSHDGQSRIASLSLAPHTAYRRSELQAMYEKFEAEIAKLNQRVEEQACKRPGARLLMSHPGVGPITALATEVFLGDPARFADSKALASYVGMIPREYSSGGRQRLGGLSKQGNPLLRFLWGAAGAHAARKDPELQRFYRRKLVQKGLGKASVAVARKLGIRLWIMLRDHIEYHEFCRRGQKQQKSSDAGAGMPETRHGAKSHRPVD

SEQ ID NO: 62659 - protein, 311 aa, unidentified
MDAIYVGIDVSKDSLDVHVRPAMTLFNVPRTDKGIAALIARLLELQPKLVALEATGGFERVVTAGLAGVGLPVVVVNPAQVRAFANALGKRAKTDPIDAAVIAHFVEATKPQIRTLPSKDTLKFANLITRRRQIVDMITDDSQRAHRADEDGKASIARTIAWLQLELARIDSDIDDHVKGSEIWLADEELLVSVPGVGKTTARTLLSHLPELGKIDGRKLAALVGIAPFTQQSGAWRGKSAIGGGRTVVRSALFVVAMTAARFNPVFKEAYKALLARGKPKKVALIAIARRLLVTLNAIMRDRKPWQLKEA

SEQ ID NO: 62660 - protein, 414 aa, unidentified
MSTQVFCGIDWAEDHHDVALVDRDGQLLARRRISDDAAGLAALLDLLAEHGDSAEQPVPVAIETPRGLLVACLRATGRKVYPINPMAVARYRDRHSVSGGKSDHGDSVVLANVLRTDLTFHRPLPADTELAQAIAVLARAQQDAVWDRITAHNRLRSCLREYYPGFLAAFEAARGGIMRPEARVILAAAPTPADAARLTLAQLRGLLKKAGRRRGIDAEAARLREAFRAVQMRQLPLVEQAMGRQTLALLRQLDAACASAEDLEQAAIESFNQHPDAGIITSFPGLGPLTGARVLAEIGDDRSRFCDAKGLKAYAGAAPITRASGKTKSVTHRRIKNNRLNATGYTWAFSALTASPGARAHYDRRRETGDRHAAAQRNLFGRLLGCLHRCLATGQHYDETIAFPDTTQKLPTAA

SEQ ID NO: 62661 - protein, 330 aa, unidentified
MTTNPPQIVFNHILAFEVSKEQLLVHTLPADEQCAIDNKPQTVRRLIKAEIKRNRNKQLGQMLVVCEATGGYERHVLDAAVEMGLSVHRAHGTRVRHFGGYCGLLAKTDPIDARLLAQYGLKTENIRLYSPPPPETAALRALHARRTEIQRMLIAETGRLDHAQHKSVLRSLKDHIASLKAALAAIEADIAQLVEECEVLRKKIALMRTVIGIGPISAMVVLAYLPDIGRLTRGQAARLAGLAPINNDSGKKRGARHVEAGRTAIRRALYMAAGVAMRTNPIVKAFADRLRGKGYPFKYVVTAVMRKLVVILNAVLRDGQSWRGAQVVSV

SEQ ID NO: 62662 - protein, 314 aa, unidentified
MQTVTTIGLDIAKSVFQVHGIDAAGQVVIRRQLKRRYVLAFFERLPPCLVGIEACASSHHWSRELQSLGHTVRLMPPAYVKPYVKRQKNDTTDAEAICEAVTRPNMRFVPTKTVEQQSCLMLHRARHLFIRQQTAVINSIRAYLAEFGIVAPVGRRGVEQLLEVVADPADCRLPEVARTCLAALGSQLRALKAQILEFDRRIMAWHRSNATSKRLDAIPGVGPALATALVASIADPKAFRSGRDFSAWVGLVPKQNSSGGKDKLGSISKQGDRYLRSLFTAGALAVIRYAKIHGTGHRPWLTALLARRPTKLGP

SEQ ID NO: 62663 - protein, 408 aa, unidentified
MKENTTNGPAALVAIDWSDQKHDIALLPAETERVEYLHVAHRPQDLTDWICALRQRFGGKEVAVAIEQKRGALIHALMGYEFLQLYLVNPATLASLRKAFKQSGAKSDLLDRDLLLELLQKHRDRLTQWEPDDVQTRHLALLVQDRREAVNECTRLGEQLLDTLKNYFPAMIDLAGPDLTTQLACKLILRWPDLAALQRAKVQTLRRFFYAHNFRRPKSLDKRLEALQAALPLCQDVAIIGAGRLKAIRLARAILALLPAIKKYDQQIAELFKVHDDAAIFASLPGAGPALAPRLLVAFGSRRDRWRHSLDVATYSGIAPVIEQSGKRSIVHWRWACPKFVRQSLHEFARSSLRFCPWANRFYQTQRARGKNHHGAIRALAFKWIRILFRCWQNRCPYDPTKYAPANL

SEQ ID NO: 62664 - protein, 316 aa, unidentified
MSISETFIGIDVSKEQLDCASRPNGTTSSFKNSVTGIDALIKQLQEQRPRLVVLEATGGLERALVAALVVAQMPVVIVNPRQVRDFARAVGQLAKTDRIDAAVIAHFAEAVKPEVRTLPDQLTQEMDALMKRRGQLVSMLGVERNHLVSATSPVSNHVKEHISHLEELIKRLDQEIDQMIGKSPIWKAKDELFQSVKGVGPVLSRTLLAELPEIGQLSRQKLSKLVGVAPLNNDSGKRKGKRSCWGGRSGVRAILYMSALSATRFNPVIKEFYQRLLAKGKIKKVALVACMRKLLTILNSMVKNNTPWDPSFAQRG

SEQ ID NO: 62665 - protein, 377 aa, unidentified
MMRFYDGQHGFYAGIDLHARKLHLCILDSTGKIVKDVSIAAAPETFLTAIAPYRHDLVVGCECMFAWYWLADLCSAEKVPLVVGHAYYMRLIHGAKAKNDKIDANKIARLLRGGNFPLSYVYPKGMRETRDLLRRRTWLVRHRSGLLTHLQVLNAQYNLPPFPKKLANAGNRLEMDVPARFTDPSVQKSATCDLAVDDGLDEQIAALELYLTRTAKVDDVQTDHRLRTIPGVGPVLALILLYEVHDIKRFANEGQFLSYARLVRCTHESDGKVVGCGGRKIGNAHLRWAFGEAACLFLRGSERAKKWKQKQEKKRGEGKALGILAARLARAVYHLWRKAEAFDEERFWGERHAASTGKGKTGSSSLLGAQEASHAAR

SEQ ID NO: 62666 - protein, 386 aa, unidentified
MTKKITNPEILAIRAAAEVDPACGRVWVGLDVGLKSTSVCVLDQDGKVVHHCSMKTDPTEIGRYLAKNFASNVAVVGMETGAMSAHLAGSLRRQGYQVAVMDALQVHRVLSLKRNKTDTNDARGIAEITRSGRDYLTEVYVKSAACFEVRAQLIMRHRLVQQRLANENMIRGLLRVYGGRVEPGAKSSATYRDRVVEQLLVIQDREGINLRPRIFPILDLCERLQADAVRIETELEALAAANPVCRRFMAVPGVGAITALSFFTAIEEPSRFRRADDVAAYLGLTPRVYQSGDSLTHGKISKMGNRLTRTHMVNAATVLLSATKSFSSLKDWGVRLAKKVGFNKAKVAVARKLAVILFGMWRDGTHFQFKAETVEPHRQMMQAAHA

SEQ ID NO: 62667 - protein, 482 aa, unidentified
MKRKNIYQNQSQELLHLFEAAGSSKKVMCVAMDYAKNDHLVMFLNGHGDILRKPFSVKNTPAGIAYIDDQVTRFCRQQAIQKKHVFFGGEDANSFAKNFVSTLRCKGFVVANVNAHDAKKQRGNVQASTDRIDLMGIASLLLNCRANCCPVQSGIYGNLRTLVRHRRRLVQMLTEVKNRVHGIVDELFPGFLNEKNSGIIPFTQSSLYLMQDRFSAKQIRRRKRQKLIEILKRLGTSKAEQTAAKLQQYAAKTLHAPIEYVDTLQLSLAQHVKHIRCLKQSVAQMEKEIALNLAQTQGAFLTSVRGIGMVLAAGVTAEIGDPNEQKPLNNLASYAGIIPRVKQTGGLDGKSYTGPVGKRCNRILKDYVVKSAYHIGLHGPPDLMADYKRRDASGQHADFGIGRRYLRMAKSLMRTSQVYLPPNLRKADSTRQQRASYYLMSWPYLKEKWKKVGALEAAFANNRPLGLWRQIAQQLYDIKLKL

SEQ ID NO: 62668 - protein, 449 aa, unidentified
MREPQEIADEEHEQVLERVAAIDVGKAAGMVCTRVPHESRPGRRLTRVWDVDATTGAIIELGDHLAGLGIEKVTVESASDYWRPFYYLLEAAGLSVQLVNAREARNLPGRPKSDKLDAVWLAKLTERGMLRPSFVPPAEIRQLRDYTRLRLDLTRDRSRHAQRIEKLLEDALIKLSTVATDIMGVSGRAMIGALIAGERDPQVLAGLARGRMRVKHAALVQALTGRFDEHHAELARILLGQYDALTTEIGVLTTRIEALIAAIPAARGVDADGSTGLGAGTGPDAAVVPALERLDEIPGIARHAAQVILAEIGLNMTQFPTAGHLVSWAKLSPRTIQSGARRRSGKTGKGNPYLKGVLGEAAAAAAKTDTFLGERYRRLVRRCGKLKALVAIARSILVIVWHLLADPAARYHDLGSGYHASRTDKDKQARNHIRQLEALGFTVTLAQAA

SEQ ID NO: 62669 - protein, 343 aa, unidentified
MSNDTRIAVDVAKAVFEIAISDRPGHVTRRERQQRAQFLPFMAQQPPATVVMEACGSAHHWGRKLQELGHRVVLLPPHHVRPYIRRNKTDRTDAKGILEASRNDDIRPVPVKTVAQHVVTSLHRLRSGWMTERTARLNALRGLLRELGIFIPMGSREVVPMVWSFIEDADSDLPEALRPIFAEACREIRDIEARIKQVDRQLEATAEQLPAVGFLMSIPGVGPLTATALVGFIGDIRRFPTGRHFASYLGLTPREYSSGLKRNLGRISKRGDGYLRTLLIHGARSVLVHARKKQADRLREWANQISKTHVHNKASVAVANKLARIVWAVWKHETSFAPMAKVA

SEQ ID NO: 62670 - protein, 411 aa, unidentified
MSYKIAGIDVHKKVLMVVVIDATTPEEKPERRRFATMPSDLQRFLIWLRAQGVEEAVMESTAQYWRSVWLELEPHMRLHLAQAFSNRAPRGRKYDFKDAERLVRRLIADELILSFVPGGEQRSWRSMTRMKLQLTRDRVRLQNQIECLLEEMRIKLSMVVSDLLGASGLRMLRALAAGETDPRQLAQLGDKRLQCTEAQLVDALTGRPQPMHREMLALQLERLQLIDMQITKLNGLIAQAMKPHQEAVMRLAEVPGLGVDSAQQIIAEVGEQASTFPSAAELTSWVGTCPGKDESAEQNHSSRSAKGNKYLRRVLNQAAHAAVKRKGSYFQLVFRRLLPRLGYQSAIWAVAHRLCRVVWKILHEGVRFIEHGIEPDSKAKLRHARRLAQALRKLGYQVTITPTNLASEMQM

SEQ ID NO: 62671 - protein, 342 aa, unidentified
MEHTTIAVDLAKSVFEVAISDRPGHVSESHRLTRARFAVFFATRKPATVVMEACGSAHHWGRHLEGQGHHVILLPPHAVRPYVPRNKTDRADAKGILEASRNEAIRPVPVKSVTQQALAALHRLRSRWLATRTARINTVRGILREFGIVIPLGSTRVVPALGAALEDADSGLPDAVRPTLHEARTEILELEKRMRSVEAQLEALAREIPVVAQLRSIPGVGLFSATALVSVVGDIQRFPSGRHFASYLGLTPRESSSGLTRRLGAISKRGDTYLRMLLIHGARTVLWHAKKSPTHDRLRLWALDREKGRGHNKAAVALANKLARIAWAVWQRGAVYQEAVSA

SEQ ID NO: 62672 - protein, 390 aa, unidentified
MIYAGIDVAKDKHDCLIVDADGIEFFPTFIIPNNRTGFECLFERLTLCSEDLAQIKVGLEATGHYSDNLLEFLITNGLSTTVINPLHSNLYGKSLSFRKTRTDKVAAHSIATMLRTECLKPYSHSSYQIRELKSLTRYRHSLVQDCGRLKSSYSRLCTIVFPELEKKVPSLHIASVYALLSEFPSAKDVAGCHLTRLANLLSTASKGRYGKDKAVEIRETARASIGTHSDVKALELKQTIQLIELMEGQIMQIEAKINPIVDSFNSPLMSVPGISYRMAAIIIAETDNFMHFNSAEKVLAFAGLEPSVYQSGQLTSTHAKMVKRGSKYLRYALFNAAKYVCHWDTTFNAYLAKKRKEGKAYNVAVSHAAKKLTRVIFHLVKTNQAFVKKA

SEQ ID NO: 62673 - protein, 332 aa, unidentified
MYLGIDVHKRYAQVAVMNDAGEIVEEVRVENANLDDLAQRYAGAQAALEATSNYYHIHDTLSEHLDVTVAHPQKLKQIANSDKKTDRVDAKELARMVRLNSVPESYVPTDEIREARALVRGRQTLIENRTKYANKIHGLLSDHGITKDVKPLNVEGREFLRELSLPAPWDTLLESYLEIIETLSEEIRELDAEIEEYAGSLKETQLLMTIPGVSYYTALTIYAELGEIDRFDGDKEVVSYVGLNPVIRESDDSRIEGSISKRGSSRVRWLLVQAAHTAVHASNDEYLTRFYERLASRKNSQKAIVATARKMLVSIYHMLDRGEVYDPPGVSA

SEQ ID NO: 62674 - protein, 408 aa, unidentified
MKTLHRRCAGLDVHKKEVVACLRLVVRGKANYEVRRFATTTRGLLELADWLEQAGCTHVAMEATGVYWKPVWHMLEGRFQQILANAAHIKGVPGRKSDMNDATWIADLLAHGLIRASFVPPQPIQDLRDLTRTRKQLTREIVQHTQRIQAVLEEANVKLSSVITDILGAGGRRILKAIVAGETDPTKLAELGGPRLAAPRAELAEALLGRLRSHHRFLIGQHLKTIEQLEETIAAFDARIEAALEPFRDAVERLKEVPGLSETSAQVLIAEIGTDMSQFPTAGHLLSWAGLIPRLDESAGKRRSTRVRKGAPWLKPVLVQCAWAASRKKNSYFQAQFLRLKARRGPKKAVVAVAASILTTAYHMLADGTCYQDLGTDHFARRNPARTVAKLASRIRNLGFHVEIRPAA

SEQ ID NO: 62675 - protein, 357 aa, unidentified
MTIVAHSHPYVIGVDTHARNHVLAVLAAPTGELLDTAEFPTSKSGMTRAVAWAARRTGGDLAALWVMECIATFGAQFARTVAEAGYQVIEAPRTGVHRGKGKSDPIDARRMAEAALPLEEHELRHPRADEGERAALRVLVTARDQMTDERTANVNALNALVRVVDLGIDGRRALTGRQILEVSRWRTREEPVAIMTARGEAVRLAKRIVALDEELSANAKSMTALVRATPAAGLLDKPGIGPVTAAVVMTAWSHRGRVRSEAAFACLAGVNPIPASSGNTVRHRLNRGGDRRLNRALHMATVSRMIHDPDTRAYVERRRAEGRTNKEIRRSLKRYLARQIYRHLNNADSPHVSTCAS

SEQ ID NO: 62676 - protein, 348 aa, unidentified
MKIVGCDLHARQQSIAMLDRETGELTEKVIRHEGNAVREFYASLGKPVVVGIEATGAMQWFLELLEELGIESRVGDPAKIRAAETRKQKHDRRDALLILDLLERDRFPAIWMPTSEQRDLRSLLRDRHQWVKMRARLQHTLQAIALNHALRKGSSLWSGTGQEALAKLPLPAYTCQRRNELMSLYAQLQRRIQQLDKQVEEQAQHRPQASRLMTHPGVGPVTALATDVFLGDPSRFTTANEVASYIGMIPSEHTSGKRQRLGKMSKQGNSLLRYLWTEAGMHASGKDPELKRFYRRKLIQKGMGKSRIAAARKLGIRLWIMMRDEIDYEEFCRRGKLRQIGESPCRSA

SEQ ID NO: 62677 - protein, 335 aa, unidentified
MEFTYFIGTDVSKNELDFAVMRGKTLLFHQEIANTEQAITVFIKELNKLPAFDLCNAVFCMEHTGIYNNHLLVYLHKKKANIWLESAIQIKRSSGNIRGKNDKVDAIRIADYAYVQRDKVRLWTPKREVIQQLANLAGVRTRLIEAKKMLKTPLQEQDSFNTKRIIKQGAAVCSHTLKAIDADLEKAEKAIDQLIAKDPELKHLFSLICSVTGIGRVTATQILITTNEFKDINNPKQYACYAGVAPFIKESGIFKGKGRVSHMANKKVKTLLHMAAIVAIQYNQDLKFYFDRKVNEQKKNKMSVINAVRNKLILRIFACVNHNSPYQNNYQKLLA

SEQ ID NO: 62678 - protein, 533 aa, unidentified
MATKRKYRKSRRTGPAVLGKPNGVIQQRVQRVGPERFGVVAVDCAKARSKWMFCDFYGKVLVPPTPVEHTRSDFQLATVRLRQACEQHGIRDRIVAVEMTGVYHRPVQRAFRKAGYETRLVHPFASRHYRQPSHADEKTDDRDLEGIFRAAVNGFGLLEPTCPEIYCLLQLLARHRRDLVEKRAKLQCQIRHYLDRCLPGYAALFPNDKLWKRPLPMYVARRAQTAHAIREAGIPGVTRWVSEEKLRFQSRTIARLVTWAGNAADPDPLAPAISRVWQNLHEDWQAKSRQITQLEQESAQILVKTPYILLLSHPGINVVSAAELAGEMGPIEHYAHARAITGRAGLFPSRYQSDQVDRADGPLAHHRNARLRAAWMRVADNLIKCNAHFHGKFAFWKQRGVDARDIRCRVANRAVRTIFQMVSGRRLYHHPSRLDRQYVLDKLLDFHQQHHTPPDRILRDLRQAAEQIPKHEQAAEAAPLLKKYRRTRRSRQPGPKAIGEILLAVLARWGIAELESEVEAHGPDANLSDTSTR

SEQ ID NO: 62679 - protein, 411 aa, unidentified
MVERQQHNRSAAEIDCRRQPEGRLKGVNHTMSKNLLYLGLDVHAQTVAIAIAEANGEVRNYGSVSNDLGVLEKTMRRIKNAHPGCELRVCYEAGPTGFVIARRCAQLGIDCAVVAPSLIPSRAGDRVKTDRRDAVKLARLHRAGELTAVNVPNACDEAMRDLCRARTDAVQDLRRSRAQLKAFLLRNGYRYSGKSSWTEAHRRYLRELVLPHGAQRVVLEDSLRAITTAEERIERLEDQMEALLESWEMKPVVEALMGLRGFQIVGAMVLVSELGGAWRFDHPRQLMKYLGLVPTEDSSGPRRRQGGITKAGNSHARWLLIEAAQHYRLPPKISKELSKRQEHLSKEIKACSWKAQTRLHSRMMRLSARGKLKNKVTVAVARELAGFVWAIFRLMEPQMKSAAKTEAAVVP

SEQ ID NO: 62680 - protein, 417 aa, unidentified
MEAIYDCVCGLDVHKASVQACVRRLTKGRLIEQEVRSFGTMTRDLLELGDWLGVQGVSHVAMESTGVYWKPIYNLLEGRFEVLLVNAQHVKHVPGRKTDVKDCQWLAQLLQCGLLRASFVPDRPQREFRDLTRHRSQLVAQRVAVANRIQKVLEDANIKLAVVASDILGVSGRAMLKALARGGQSSEQMAQLAVRRMRVKIPELREALKGRLTEHHRFMVQELLDQVEDLEKRIERFSQRIEVASGPFTGAIEAVATLPGFDLRSAQNVVAEIGADMGRFPTEAHLASWAGMCPGSHESAGKRKSGKTTKGSRWLRAALVQSAWGASHTKSSYFQSQYRRLAGRRGKKRALIAVAHSLLGVIYHMISKGCAYQDLGKDYFDKLDSKRLVKHHTRRLESLGYKVILAAQEDKSEDQAA

SEQ ID NO: 62681 - protein, 373 aa, unidentified
MEHTITIVGLDVHKNSIEIVTAETAGKQEVRHYGTIGGDMTSLDKAIRKLRSVRSNGAELHFVYEAGPCGYEIYRHLTKQKFQCVVVAPSMIPKKSGNRIKNDRRDAENLVRLERAGELTKIYVPGEEDEAMRDLTRAREDAVKAQRAARQLLGAFLLRHGHRYPGKQSWTPAHMRWLSDITMPHPAQQVTLQEYIHAITEGTGRVTRLTDQIQKLLPEWHMAPVVKALQALRGVAPIVATTSVAEIGDMNRFERPKQLMTYLGLIPSEHSSGESIKRGGITKTGNGHVRRAIIEAAQAYSFPARVSRHILKRQEGLPQSVREIAWKAQVRLCGRFRRLMARGKQRNKVVTAIARELAGFMWAIAKEVQVPSV

SEQ ID NO: 62682 - protein, 344 aa, unidentified
MIIIGCDFHPSWQQIAWVDTETGETGEQKLVHADGEAERYYRQLSGPVRIGLESTGNCHWFVDMLTELGHEVWIGDAAKIRARQVRKQKTDRRDAAHILDLLMKNDFPRIWTPSREERDQRQLLIHRYKMVTLRVRVKNELQHLALNQGMQKGRSLWSKDGQKLLRELPLQHWAGERRANLLELLKTMDQKMVGLDLAVKKAAEENERARLLMTQPGVGPITSLAFVLTIGDATRFQRGKQIASYLGLIPREYSSAGKQRLGSITKQGNRFLRMLLVEAAQVAVRYDPKFRSEYLHRCHQKPKAMAKVAVARKLAIRLFWMLRTNKTYPEIVRIESSSRVPLGG

SEQ ID NO: 62683 - protein, 390 aa, unidentified
MSQHSHFDASRSLTALEQDNTIIAVIEMSQSKWLVAALVPGVERQPLKKLDAQEEALLKLLHRWRNEAGQVGREIKRIVVAYEAGRDGFWLARWLRARDVEAYVIHPTSIAVSREHRRAKTDRLDTELLMRAVLGWLRGEMRHCSMVAIPTIEEEDARRPNRERQNLVTEQTRIVNQMKAIFARFGIRSFRPTLRKAEEKLKGLRTAEGTPLPESTHAELRRHLARLCVVREQIRAVEQERLRKLAAAPVAQNGSHAMVRLIARVIGVGIETADMLVNEVLSRHWRDRKAVARYAGLTGSPDESGRRRRERGLARAGNARVRCGMIQFAWRFLRFQKDSALAQWFAARTADRRASTRKTMIVALARKLLIALWRLVTTGQVSDGMVLRAA

SEQ ID NO: 62684 - protein, 312 aa, unidentified
METKFVGIDVSKLTLDFDCLPVSAAQQFANDSVGIAALVALLQDSGVERIVIEATGGYETATASALAVAKLPVVVVNPKQVRDFAKAMGHFAKTDKLDAKVLALFGERMKPALRALPDEAQRALADVLNRRLQLVTMRAQEKARLAMVTVVARKDVEQHIAWLDKRIAKLETDLADRLKKSPVWCHKAALLESTPGVGEVTTFSLLADLPELGTLNRQKISALVGVAPFPDDSGKRQGKRYIRGGRAEVRCVLYMATLSAITHNPPIKAMYERLTKAGKPFKLAMTACMRKLLTILNAILKNNQPWKIQPTS

SEQ ID NO: 62685 - protein, 455 aa, unidentified
MYIIMDDEVIKMEVVNPQAAGIDVGSRSHWVAVGQREEDVREYGVFNDDLFSLCDWLKECKVRTIAMESTGTYWQNLYAVLISRGFHVILCNGKFTKNIKGKKTDIKDCQWIQRLHSLGLLSSSFLPDGKTEELRTYCRHRQNLLHESASTSKKMQKYLRLLNLRLDVVVKDTCGLTGLRIIRAICNGEKNPEKLADLRHHNCHTSKADIARALQSNGREDYLFALQQELDMYEYLHKKIEECDLKIEEKLNSIINDDENKKQHHIEPKPHKKVNKNTPKNIDLNLKSYQMFEGTDLLAIEGMSYSTVLALMSEIGVEGIRKFPTAKHFASWLRLAPNNKVSGGKVLSSKVPKGSNNLKISLRNAANAIGNLKDSTPLRDFFMRISFRKGRVSAISATARKLAVIIWNMVVKGVPYHNPEEYLFRDQKKKLGLLKRIQKQITKFELESTDFQFSN

SEQ ID NO: 62686 - protein, 386 aa, unidentified
MQKSSTHKKNENIDLFVGLDVHKETIDIAVAADGRTAEVRHYGKIGGDLAALDKVLRKLQADGRTLHVVYEAGPCGYAIYRHLTARQIACAVIAPSLTPKKSGDRVKTDRRDALSLARLHRAGELTTVYVPREDDEAMRDLSRAREDAKRAETRARQQLQALLLRHDLRYTGRTPWSAPHLRWLAQLKLPHPAQQITFQEYVTAIDEAAQRVARLTTQIEELLPSWRMAPIVEALQAMRGVALITAVCMVAEVGDLTRFDNPRQLMAYLGLVPSEHSSGGRRHLGAITKAGNSHVQRMLIESAWAYRLPARVTPIIQKRQEKLSKPVREIAWKAQLRLCARYRRLSGKGKTKQLIVTAIARELAAFMWAIAGEVTPAAGGAVASQQ

SEQ ID NO: 62687 - protein, 423 aa, unidentified
MGRSIGLDVHRDFCQVAIADGGRARSAGRIATTPEQLELFAQSLAPTDRVVMEATGNALAIARILQPHVAEVVLAHAKQVRAISHARVKTDKIDAKVLADLLAADLIPKVWIGDDRNRMLRRLVSRRRGLVKRRTQVKNEISAVMHRNLKGRNPASDPFGKKGRGWIATQQLPLDERLTVDAGLRQLDFLGDELAQIDAIIAKQVLGDEDVRRLMTIPGIDVVTATTLTAVIGDVRRFPTSRHLVGYLGLHPTIRQSGSGPARHRRVSKEGSAAARHVLVEAAWSAAKSPGPLRAFAQRTAARRGRHVATVAVARKLAVLAWQLLTRGEDYAFARPSLVRRKLRALELAAGAPRAKPGPKADPVWNTTNEAAERRVAEQAELAYRRFVADWQTSAAKAGASATPEHASSRPSKGKAAWQANSS

SEQ ID NO: 62688 - protein, 386 aa, unidentified
MRANDMSRAVVPFEQSTTLVLVVEMGAESWLAAGNVPGVERQPMKKLEPDAATALGLIERWRAEAIKAGQTISRVVLAYEAGRDGFWLARWLIARGIEVHVIHSASVAVSRERKRAKTDRLDAAMLMRVLLGWLRGERGHCGMVAVPTLEEEDARRPSRERESLVNEKSRITNRMKSALARLGIRGFKAHLRKAAQRLEGLRTPEGTGLPANIAEEFRRDMARLALVREQIAAIEKARIERLQRAPNTGPNLMVRLLARVVGIAIETADMLVREILSRNWRDRRAVARYAGLTGSPDESGTKRREKGLSKAGNARVRRGLIQLAWRFLQFQKESALTKWFWSRTAGPSGVRKTTMIVALARKLLIALWRLVTTGEVPEGVVLRPAV

SEQ ID NO: 62689 - protein, 314 aa, unidentified
MKMAMLSFCGIDVSKDRLDVVVLPEGWFFSVSNDTAGWAELVVRLRPLTVSAIGLEPSGGYERGIIRALLAAGLSVRRINPNKLRQFARARGVLAKNDRLDARLIAEYVAIMPTRVVQRDAAVERLAEIVTMRRQLCDEHVAAENQAAHLEDAMLRRLSKRRQMRLEADIRLLDKRLAEMVAANVALAQRYELLTSMPGVGPVLAFTLIALLPELGKMTRKQIAALVGLAPYDFDSGKLKGHRSIYGGRMPVRNVLYMAALSASRYSPALKAFHNRLADADKKSKVIIVAVMRKMITTLNAMLRDNAAWQPQSA

SEQ ID NO: 62690 - protein, 465 aa, unidentified
MQMTLGIDVACRAAHQASLADETGRFVWSGRRFQTTAADLNQLWEQIPQPVTLSVVMEPTRNAWVPLAAWFRRRGAIVILVPPEQSADLRDYYSKHTKSDRLDSRILARLPLLHPEGLRPAEGLGPADALRRASRLRSSLVKRRNVIIARLDSYLELLGPGWYAAFGGNLALYTPLRLLAAGYADPHAVRRLGLARLTRNVWRYSHGAFGERYAAGILAAAAETLQLWDGELSYPDLAEDIAAEARLALTLTTQIRDLDTKLASLLHQADPSGILTSVPGVGIIHGAQILARLGDPARFRSLAGARSFTGLVPSLTASGLNGRHGPPTKSGDAPLREALFLAADAARRADPTLAARYYRLMVHEGKHHTSAVCSISPILLTRLIACWRAGVPYQIRDTDGTPLTTAQGRAIIAQRYRVSDELRARRRTSHTKTGTSRRHQESPGAPTPARPRTTLRPPASPLDTA

SEQ ID NO: 62691 - protein, 429 aa, unidentified
MKKRMYRSISVKSVVVEQLVEAAGGALVLGCDAAKEVWLGAFMNRDREVVSTVRWPSVSGAVDVVRLLLKLREAGVKVEVAIEATGTYADAFCELMARNSVEVYAIRPKDTHDYQEIYDGVPSGHDAKSAAIVAKLHWDKPLHQRRRWQRPDGERREVRAMTDRLDWLRQEENRWLSRLESRLARHWPEVWELMDMTGATPIALLAEYGGPAEVVKAGQSAAEKMSTRSRGLLSKEKIAAVVESARQTLGVAMTRAELEQVRWLAQQITRTREEATAIERQLKRRIKQAPSINAVGEVVGLMTAAVLSATLGDFSKYESVRALQRAAGINLKERSSGKYKGQLKITKRGSSTARRWLFLATLRWIKDDALARAWFQRKVERNGGVKLKAVVALMRKLLAGLYHTAHGATFDSSRLFDVRRLKRGHLKVA

SEQ ID NO: 62692 - protein, 360 aa, unidentified
MKKRIYRRMPVNQFQPSSISLDEVGARLVFAVDVAKVDMVAAIAGDDGRVLNTIAWKAPSENAAVLGILQAFRAAGFLVEVAMEPSGTYGDVLQYHLEKDGFPIFMVSGKRTYDARELYDGVPSLHDAKSAAIIARLHLEGLSKPACAPCPERRQLHAAITIMELHQRRYLQLVGNLESWLARHWPELPALVDLTAASLMALLARIGGPADVAAQRSEAEKLLHGISRGLMDKEKITAILDSAGPSVGVPLMGMERNALMEIAAEAHRALRAFKGAKTELEKLAAPTPAAAMAPVIGRTTAAIVYTDVGDANLYSSAGSFVKAMGMNLKEKSSGTIKGQIKITKRGSSRVRHYLWLAVFR

SEQ ID NO: 62693 - protein, 316 aa, unidentified
MTNYIGIDISKRDFHVCFSEDGEVLKFNNDRKGIREFIRNLKQGKMKPGETVIGMESTGHYHFLPALMCTKAGYTVKVINPLITKRQNQTDLREVKTDPIDAGLIRYCTVNGKGHIFKETGETLKLKTLVRQRNYLSGLRAVMKLRQQNIDHREDCIKTAITSVNRKLHNILTAEIGKLDKELSQHNKELQKLLRSIPGVGPQTAVSFLSEVGDIFRFPDSKKLTAFIGIEPRVQQSGTSINKKGHITKRGNDILRTRLYNASSVAVLHPNIFQDFFQKKRSEGKPYRVALVATMHKMVHVIYAVWSRGTPFVKER

SEQ ID NO: 62694 - protein, 367 aa, unidentified
MFTERTSVGLDVHARSVAAAAIDGVTGELFQAKLTPSHEHIRSWVAGLPGPVAVAYEAGPTGFGLYRVLSAAGVRCEVVAPSKLQRPAGDRVKTDARDAVHLARLLRLDEVTAVAIPTIEQEAARDLVRAREDCRSDLMRARHRLSKLLLRHGIVYDGGAAWTGKHDAWLRNDALPRLTSTATRLTFDAGYETVLATKARRDRLDVAIEQLAADSEFTPLVRRLGCLRGIGTLTGFALAVEIGDWRRFTGNSIGSFVGLIPAEYSSGGSRALGPITKTGNGHARRLLVEAAVPSQHHRPRYRIGKTLRDRWDLAPATARIRGDEGNRRLHQRWVRFIDRRKRSTVANIGIARELAGWCWSLAVLEDT

SEQ ID NO: 62695 - protein, 450 aa, unidentified
MMREVQEIEDEEHEQILERVCAIDVAKASGKVCTRVPHPSRPGARRTRVWDVDATTNAILELGEHLAGEGIEKVTLESTSDYWRIWFYLLEAAGLDVQLVNARDIKNAPGRPKTDKLDSVWQAKLTERGMLRPSFVPPAEIRRLRDYTRLRTDLTRERTRYWQRLEKLLEDSLIKVSTVASSLDTLSVRDMLEALIAGERDPKVLAGLARGRMKAKHAALIEALTGRFDDHHAELARMLLDQVDALNAQIGKLTTRIGELIAAIPSAQGVDADGTTGPAAGTSPGAPVLPAVARLDEVTGIGPDGAQAIIAEISLDMSRFPTAGHLVSWAKLSPRTIQSGTSSRSGRTGKGNPYLKGILGEAAAAAARTDTFLGERYRRIVKRRGKLKALVAVARSILVIIWNLLANPAARYHDLGSGYHASRTDTGKKVRNHIRQLEALGYTVALTQAA

SEQ ID NO: 62696 - protein, 337 aa, unidentified
MPTLTVGLDIAKNVFQVHGVDRHGKTVIQRKLRRPDVLKFFAKLESSLIGIEACHGSHYWARELTLLGHTVRLLPTQYVKPFLVGGKNDANDAAAICAAVTRPGIHFVAIKSAQQQSLQSVHRMRERLIQERTAKSNQIRSMFAEEGVVFPVGISQLRNGVVALVNDPDARITSVLRRLGSMYLEQLEALQQWLDKLAAELAEVFKRNEACQRLATVPGIGPVIATAIVSSVGDPAQFKNGRQFAAWLGLTPMQRSSGGKTKLGGITKRGDTYLRTLFVQGARAVMHFVKRHDDRHSRWIKAVMQRRHVSVAAIALANKTARIAWAILTSNDSFRVA

SEQ ID NO: 62697 - protein, 273 aa, unidentified
MKFYCGIDLSARDCQVCVIDEQLKVLVQQKLGNELPKICRLLEPYKANLKIVVESTFNWYWLIDGLQAEGFEVVLAHTLGLYLITGAKVKTDRRDAYSLAKLLLVGAVPTAYIYPVETRPVRDLLRRRMHLVQVRAGEYGSLRRLLLRQGILSSKQQEIKTATEAELEQWFEHPLVRLHASQELRRIELYSQQIAELEKTILALAQTAPSYDRLLKLPGVGQTIALTILYEVGELTRFANPKVFSSYCRVVPALPSRAVSQGADEPASRGIII

SEQ ID NO: 62698 - protein, 432 aa, unidentified
MQLWCGIDWAKNHHDVSIVEEGGTQRVRLRIDDTVAGFTQLMTMLAEQQSLCSEPITAAIETSKGLLPVALRAAGVPVVAINPLAVSRYRDRHSPSRSKSDAGDAYVLANILRTDPHSHRSLPVDSELAQSIHVLARAHQDAVWDRMQIANKLRSVLREYYPTFLAAFDDLASREARATLRLAPSPMHGQQLRKSSLTAALRRTGRTRGIPATVNTIHAALHVEQLRQPTLVESAMAEHATALLHALDTAVANVARLEQTLTLAFDQHPDAQIITSFPGLSTVLGARILAEIGDDRSRFATARGLKAFAGTAPVTRASGMKTVVTRRVVRNKRLGQAAYLWALPMLAHSPGAHAHFTTRRERGDSYSAAARNLTNRGMGMLHHCLQTRQHYDESRAFPNRPPHPVTSSKPSAHDAHQETEAQPESIAASSGQ

SEQ ID NO: 62699 - protein, 347 aa, unidentified
MRFYTQQHQCYCGVDLHARSLYVCILDQAGDVQVHQNLSATPEAFLQVIAPSRQDLVVAAECMFAWYWLADLCAREGMPFVLGHALYMKAIHGGKAKHDRIDAHKIAALLRGGLIPMAYVYPARMRATRDLLRRRMHLMRKRAELLTHIQNTTSQYNLPALEKNLAYHANRAAVPEHFAHPVVRKSIEVDLALIDHYDRLLKALELYLLRTARQHDPNTLYRLRTVPGIGKILSLVILYEIHDIHRFPTVQDFASYARLVTCAHLSAGKRTGTSGKKIGNAHLKWAFSEAAVLFLRQNPPAQAWLKQAASKHGKPKALSILAHKLGRAAYYILLRNEAFDMDRFLAA

SEQ ID NO: 62700 - protein, 354 aa, unidentified
MFLGIDLSKLNFDAVLLDTSAGSVTQGKAPHRDSSRHKAFPNTPAGFGRLQEWLGDQQVHSCLESTGTYGDALARFLHSKGHTVSIVNPAQIKAFGQTGLSRTKTDKADALLIARFCRMHQPPAWAPPPPEADALQALARRLEALQQRRQMEQNSLDTAPAPVRASIEAVLQVLDEQIAQTQAAIQDHIDNTPTLKGQRDLLTSIPGIADATAAVLLSELRDVTQFSGARQVAAFAGLAPRVRQSGTSVRGRSCLSKTGSARLRHALYFPAISALRFNPLIRRMGERLTAAGKCKMVIIGAAMRKLLQIAFGVLKSGKPFNLHHVPDFQPTLRPDLCQQSNFQPNFCQKVAVGA

SEQ ID NO: 62701 - protein, 350 aa, unidentified
MRFYTGQHRYYCGIDLHAHTMAVCVLDATGEIVLERNLPATPEAFLETIGPYREGLVVACECLFTWYWLADLCAKEQIAFVLGHALYMKAIHGGKAKNDRIDAHKIAVLLRGGMLPQAYVYPPGMRETRDLLRRRLHLVRKRGQLLAHLQNLRHAYNRGAFEKRIAYPSNRVGVVAHFAGEPMVQANAALDLSLLDHYDKLLVELERRLVRQAKKEAQNGFHLLLSIPGIGRVLAMTIVYELHDVKRFERVQQFASYARLVKCAKESAGKRKGTSGAKMGNVHLKWAFSEAAVLFVRHSAEAKLLLARLTKRHGKGKALSILAHKIGRAAYYVLAREKPFDAAKFFAHTS

SEQ ID NO: 62702 - protein, 334 aa, unidentified
MNIVSTVGIDLAKNVFSVHGVDAGGVVMIRRTVSRLKLAQLIAQLPPCLVGMEACSGAHEWARRFAVFGHSVKLMAPKFVAPYRKGGKNDGNDAEAICEAVARPNMRFVPIKSIEQQADLTLHRVRQGFVEERTAMLNRIRGLLAEFGHVLPLRATEVRRRVPELLETLPTRVAGCVRDLLEHAMRLEAKALEYEREIRAHVRTNALAQRAQTRLGIGPITASALVATVGNAHDFKNGRQFAAWLGLVPRQYSTGGKTRLGHITKRGDPYLRTLLVMGARAVLHGALRLNDPLSRWALALQQRRGYHRACIAIAAKNARIAWALLAKDTVIVAA

SEQ ID NO: 62703 - protein, 340 aa, unidentified
MKLTAVGVDVAKRVFQLHWVEPETGEIISKQIKRAGFLEHFANRAPCLIGMEACGGAQHWARRLIEMGHQVRLMPGKAVKAFVSGNKNDVADARAIWTAVQQSGVKSVAVKSEAQQAILALHRMRQQLIKFRTMQSNGLRGLLTEYGEVMAVGRAALNKAMVDVLARLNERLPGMLVNTLREQWSRLGELDGQIAEIERRLSEWMKEDQSCKKIAEIPGVGLLTATAAVATMGDAKAFRSGREFAAWLGLVPGQVGTGGKVRLLGISKRGDTYLRTLLIHGARAVLAHAKEPGPWVEQISKRRPQNVVTVALANKMARTIWALLAHDRKYERSYVSARPV

SEQ ID NO: 62704 - protein, 402 aa, unidentified
MTVAPPAASPVFGGADTHADTIHVAAIDGFGRELGDREFPTTPAGYSDSLAFLGSFGSVEILGIEGTSSYGAGLTVAARTAAIEVREVIRPEATVRRMQGKSDPIDAYQAARAALTGRAKTAPKDDDIEGLRALLNAHRSAGKARTAAMNQIHAQMITAPAEVREKYRQLSDKRLVDALATCRPRARSGVAANVLLALKMLAQRHRFLTQQAQLLKDQLRDLVAAVNLNLLSARGIGPVTAAQLLVTAGGNPQRLTSQASFAALCGTAPVPASSGKTTRYRLSRGGDRHANAALHTIATVRMSCDPRTRQFVAAQRAKQRSNPELLRILKRAIAREVFKLLQEPNALAGIDDLRRLRREKNLPLRKAVEALGTCQIHISRIERGITHDREFTERYRNWLKAA

SEQ ID NO: 62705 - protein, 337 aa, unidentified
MEPEYVGIDLHRRRSVIVRMSPDGERLSTEKIDNDPRALAAAIAPAGPNPKVVVEATYGWYWAADVLEECGAELHLAHPLGMKGITSHRRVKNDVKDAVLLADLLRLGSLPEAYIAPRGLRELRELVRYRAKLVNLRSGLKSQVHAVMAKEGVLPTRSDMFGLGGQAQLDEMQLGDCYRIRIDSLRDLIDSFTDEVEALEDLIHDVLKDHAGYRAVQAIDGVGRTFAAIFVAEIGDVTRFPGPAQLCSWAGLTPRHYESDTTVHRGSVTKQGSPLLRWAAIEATAKGRGGPKLRADFHRIAQRRGVAKAHVAIARKLLTLVYYGLRDGEIRCLAETG

SEQ ID NO: 62706 - protein, 343 aa, unidentified
MVHYVGLDVSLKQTSICVVNQLGSIVREGVVDSDPEAIAAFVRLNAPGAVRIGLETGPTATWLWTELKKLGLPVICIDARHAKAVLKMQINKSDRNDAAGIARIMQTGWFKEVRVKDLDSHSVRALLASRALLVKIKRDLENQIRGLLKNVGLVIGRAKFNVFAVRAEELIEDRPELIAVVGPLLKARKAIEQQTDDLDHQVLKLARYDAQVRRFMTVPGVGPITALCFKATIDDPTRFKRSRTVGAYVGLTTRRHASGEIEWTGRISKCGDAMLRSYLFEAAGVLLTRVPKWSALKAWGMRLAKRNGLRKAKVAVARKLAVILHRMWIDGTEFNWSKKEVAA

SEQ ID NO: 62707 - protein, 351 aa, unidentified
MQYIAFDSHKHYTLASVEAVTGPGVIQERRITHERGAIRQFLSQWDASSPVAVETIGNWYWIVEEIEQAGMRPRLRHARKAKLMLGSINKTDTLDVRGLNRLQRNGTLPTVWIPPAALRDERELPRTRMVLVRQKTQLKNRLHATLAKYALTVTGVSDVFGKRSLELLRRHVQQLPEQTRFATEQVLEQLAFLNQKIAAFEARIHQVVAETPTSLRLRSLPGVGPILATVIALEVGDVARFPEAPRLASYAGCTPRVSASGGKVRYGSLRPDVNRYLKWAFIEAANICCLLHRRYPERHVSRLYARLARRKGHQKAIGAVARHLAEATYWVLTKRTVYHEPHEQAVLSTKA

SEQ ID NO: 62708 - protein, 430 aa, unidentified
MKNSAANKLKQVPVGYLVIGIDPHKKKHAAVIMTQDFNTHSKFKFNNSKEGFEMALERIRMEMVRTGSRGAIFAIETGGHYWRNLAYFLDEIGIPFHFINQFTLKRRREGKDLNRRKNDYRDSEVAAQLLCTGEFTEARLRHGVYAELHAAHNAYRRLVKERTRITNLVKGLLDGLFPEFTQVFRDPCGMTALSVLSICPVPNVIAGMTEDEFVNTIRTGHRGLLMRKKLRALHYAAQTSIGVKADAQSVSYELLFLVEKLSLIKWHIRSIDETLVRLVNETEEGKYLLSIIGLNYISVAGILAELGSFRSYKSAKQLIKMAGSNPIESESAGKRSGHTPMSKKGRPVLRYCAWTAVIPMLRFNPDFRAWAKKLRERPVHANPLSGREIVGAALNRLLRLAFVLVKNQTFYQVPEIESIPELKLLPVARR

SEQ ID NO: 62709 - protein, 392 aa, unidentified
MVISVGIDVSKDKHDCFIVSSEGEVLADVFTIPNNMDGFHRLLQRIQDCTNSQDKIKVGLEATGHYSYNLLGFLFDNGLTTYVLNPLRTNLYRKSLSLRKTKTDRVDARTIASMLLSDAGLKPYTSTAYHNEELKSLTRYRFDKVKERAKLKSSISRLVCILFPELEKLVPTLHMTSVYSLLEEFPGAKQVAAAHLTRLKTLLETASKGHYKRDMALEIRDAARNSIGSRMPAKSLELQHTIRLTRELDREIDEIEEQIQSIMGELHSPITTIPGLGFRMAAMILAEVGDFTRFDSPDKLLAYAGMSPSTYQSGQLKNRYPHMEKRGSRYLRYALYNATKYVCYWDPAFADYLAKKRAEGKHYNIAISHAAKKLVRLIFAMEKSMQPYCSAS

SEQ ID NO: 62710 - protein, 407 aa, unidentified
MAMRKREEVFPNAAAVDVGASSHWAAVPPGRTDQPVREYGVMTGNLHALADWFIECGVDTVALESTGVYWIPLYEVLEQRGLKVWLVDARQMKYVPGRKSDVQDCQWLQKLMSLGLLRGAFRPAGEVCVVRAVARQQKVLITEQGQWVQRMQKALVEMNIQLTEVLTDVMGVTGQAIIRAIVAGERDPKCLARYRDGRVKASAAEIAEALRGNWREEHLFVLSQALAMYDDIGRRLLECDAKLQQLLAERAEHAVDLGKAPRQGSKQRIGFDARQAMANWAGVDLTRIPGLGVTVVMTLLTEIGPDLSRFESVKHFCSWLGLCPGTKISGGKVLYSATKRSANRARQALKMAAQALSHSDSALGAFYRRLCTRMDKLRANTAAAHKLARMVYFMLTRGEAFVEQGQQ

SEQ ID NO: 62711 - protein, 355 aa, unidentified
MKYYTSTTEFNCGIDLHAHQMYVCLMDRQGNKLVHTNIRNNDFAFFLKLIEPYKHDLTVCSECMFGWYWLADACQAAGLTFVLAHALYLKAIHGGKNKNDRIDSEKIAHLLRTNLIPQSYVYPADKRPLRALLRQRLFFVWQRSDLLARIQSVQLAHNRTPFKQSRSNRDPWEARLLAHEPNPLRQLAIQNEVAMIRHYDVQIIAIEEQLHRLTKQSAPRDYALLQSVPGIGEHLGMTILYEIGDITRFPTVKDFLSYCRLVKGTVASAGKIKGLRGAKLGNPYLRWAFGECAVIAKRDHHVIRPLSQKLEAEMRGNKFKANTVLAIKLARAVYFMLKNKTVFDPERLVAVVMKK

SEQ ID NO: 62712 - protein, 394 aa, unidentified
MFNGLKIPIKCMPMKTVCGLDVHKDSVFLCILHENGEKIQHKFGILTDELECMRDLMLSEGVEECAMESTSIYWIPIWRVLEDHCKLYLANPYFIKQLPGKKSDVKDAEWIATCLSNNLIAGSYVPEERIQRLRQYDRRIFDLTASISRNLVKLDACVQRCNIRLSNYVSTVDSKSYREVVKKISEGQTDPQKLMEAVHGRIVSKHGEETILRSLTGVINETDIDIISQLVEEIELQQRQRDAAQQKMTTLTKEWFPEQFENLQTIPGVKERSATSIIAEVGTDMSNFQSPKKLVAWVGLRPRNEESAGKIKSRRIVHGNKFLRKTMVECSWSAAKTRDSFYNAFYHHQTVVRRKNKMKIQVAVARKLLTVVWYVLSTNSQYKPYDHTAAGEES

SEQ ID NO: 62713 - protein, 322 aa, unidentified
MTYAGIDVHSKKCTATLKHGSGSIIQQSTFDNTPTGINSLITTLNAIGESKAVVESTGNYWIRIHDMLEDNGIDTILANPVKTKIIAKAKLKNDKADSNILCDLLRADLVYESYVPDREHRMLRQLVRGRLELVQTRTTLKNRIHSILAKYNHTPPCQKLFSNQGLEWLKTIELTPVDRLLLDANLQTLATLNNQIEQVTKHIAKHSIEDPRVTLLMTIPGINYYTTLTIVSEIVDINRFATKWKLVAYAGLCPIQRDSGSKHWRRGITREGSRWLRNALVEAANTARLHDQRLGAYYDRIAKRRGPQKAQVATAKEMLCII

SEQ ID NO: 62714 - protein, 352 aa, unidentified
MERYIGLDAHSQSCTFAVMGPSGRRLQERVLETHGTVLVDFVRSIPGDRYLCFEEGALSEWLYELLEPYTKETLVTQPRRRPGSKTDSQDAWELAEAYRLGGLKRVVFKAPDKFTAMRQAMRAYHTATRDMVRAKLRLKAVFQSRGLTPQGDIYESAARATWLKRLPAAHRTLAQLLSQRLEAAVEAQQEAEAWLLEESQKVDTVRLLSSVPGIGPIRAAQIVAIVVTPTRFRTKRQFWAYCGFAVVMHTTANYRRGADGGLERKAVTGTRGLNRNRNPVLKAAFTGAAMTVIQTMPTHPLHQDYQRLLQAKIDPAMARLTLARRIAAATWAIWKHKEQYDPARHQAPKSAV

SEQ ID NO: 62715 - protein, 445 aa, unidentified
MSDASTAAPLEPEWAAFAAIDWADQKNFWRLLPAGSGRSEAGELENTPEAVEAWAAGLQQRFGGRPIAVILEQSRGALVYMLTKYPHLVLFPVHPTTAARYRETFAPSGAKSDPGDTDSLLDLLLRHRERLRPLQPDTVETRLLHFLVEERRQTVDDKTRQGHRLTDCLKLYFPQILRWFDDVTSPVVGALLERWPNLEGLQRAHPGTLRKFFQQHNCRSAEKTEERIAAIYQATPATQDPAVLEACALIASGLVAELATLRTSVAAFDKRIAELVAAHPDTAIFGSLPGAGAVLVPRLIVAFGTCRDRYQDAHEMQCYSGIAPVTQASGDSEWVHFRFACPKFLRQTFHEFAGCSIAQSEWAKAYYDHQRNDQNKEHHAAIRSLAFKWIRIIFRCWKDGKPYDEEIYMQSLRRRGSLLVDALGPATGAGWKSVAGFQKLSANKT

SEQ ID NO: 62716 - protein, 346 aa, unidentified
MRQIVRIGLDIAKRWFQVRGVDEAEREVFNRKLPRDKVLGFLGSLPPCEVALEACSSSHYWGREIERLGHRVRLISPNYVKPFVKRGKSDVHDARAICEAASRPDMRFVPVKTEQQQAALMQHTSRQLLIDQRTAAANSLRSQFAEFGVIEKRGVENLADLVRRLDENDPDIADFPQSALAIMRVLADHLRALEAHLTLIDEQIEAEQRSSASAQALETIPGIGALISAALVAHAPDPSAFRSGRDFAAWLGLVPRQNSSGGKDRLGRITKQGNPYLRRLLVLGATASLRWLHKRTDPLAVWTRQLLHRRPARLVTVALANKLARIAWAIMTTGELYRREAPPVVG

SEQ ID NO: 62717 - protein, 335 aa, unidentified
MYYVGLDAHKNQFVMCVLDEGGKVVCRKTIRGGIRALLRALRALRRRIVVVFEASQGAGFLRDELRRVAKRVVVANPSRTALIFKSKRKNDRTDAQSLAKLLILDMVPEAYIPEEATRLWRETIEQRRRLLKRRTATKNAIRAFLRARGFSGGRGLWSRAGLAWFEDLPFENPLATARRDVLLKRLRDAETDLRAMTKALDAYAKGHAGMSLLMTIPGVGPRTAEAVMAYIDDPTRFRRSCQIGTYFGLVPQQDQSASVNRLGHITRQGPSAVRWLLTEAVWQGIRRSPRLLARYERHLRGDPQRRKIAAVATAHHLARVMLTMLKTGEVWSEAA

SEQ ID NO: 62718 - protein, 399 aa, unidentified
MLAVGIDISKSKSVAAILNQDGSMHTSPFEFHHTQPELDAFIKYILNSNQSATILMENTGHYHYPVLKAFQEAGLPVCMVNAYQIKKFGDMDLRKAKTDKKDAVRIARYALEKSYSLVPYTSMEQKYEDLRFLARQYNQRMLTLKTNKVFLLNLLDETMPGITNILPLTTRTPETSLSVLFINRFKSYDRIKKMGKSRFLDAFEKITRKSRNRQTKTYGLAIYEAALRNITTRGENEYTLVAQDQCLELVCESQKAADSIILKMQTLAETLPEYAVLRSMAGVGDRLGPLILAEIGDIRRFHSGKALNAYAGNDAPPYQSGTFESHNRHISKRGNAALRKYCFEVMQALKLTQPQDDPVYLFLLKKEQEGKPYNVAKMAGVNKFLRIYYARAMETLKQQ

SEQ ID NO: 62719 - protein, 317 aa, unidentified
MDVASKSLEARIGQQGAAGSFANDAQGIAALGDFCRAHQADLVAMEATGGYEQQAFAQLSEQGVAVAILNPRAVRQFAQSMGWLEKTDRIDAGMIAWYAEVKGAQPVCLGPENQQHLRALVTRLRQLTDVRSAQFNQQRLVTDRKVQASFKKLLALLSRQIGELEQSIAALLARDPLWRQFDQAFRSIKGVADRTVARLMAEMPEIGRLSNKTISKLAGVAPLANDSGKRQGKRAVRGGRAAVREILFMVASVVGRHEPDFIAFRLRLRAAGKPPKVVRIALAHKLLVRLNAKAREVRQAMASLACDPAAVVQIESA

SEQ ID NO: 62720 - protein, 321 aa, unidentified
MENVTKTYVGVDVSKKQLDIYIHPIEKSIYFTNSKNGIDKLVTLLSTYKVEQIVCESTGGYENLMIDMLREVGFKVWQVEPNRIKSFIRSKGKKAKTDKIDAKMIALFAVQEAPEYEQVNLCQNHKLLQSLTKRKRDLIAMITSEKLRLKNPNLAICANEITVHINFMTKQVKKLERKIQKLIDDDDDLSKKAEIIESVPGVGKTTAATIIAEMPELGKIENKKAAALVGVVPYTRQSGQYKGKAFISGGRGVIRSAIYMAALVASRYNPAMKEFYNRLCKTNKKPPKVALVAIMRKLIVILNVMIKKQAKWCYIGQKSGA

SEQ ID NO: 62721 - protein, 430 aa, unidentified
MKNASRSNRKLEAITYKTIVVGIDIAKSRQWARFVDYRGMEIGKAVSFNNDREGFEYIVSEIRAKIKMFDAEKVIVGMEPTGHYWKPLANYLMKQNITVVLVNPYHTKKAKELDDNSQTKSDKKDALTIAKLVKDGRYYDTYMPHDKYADLRVLTTARISLNDKKSAIENKITAVLDEYFPEFTTVFKHPYKGKAAVQILKSCPLPKDIKAMGIDGVLTEIRKAVKRTVGRKTAGKLVNAASISIGVDYGEAEATFKIQKLVEELELVNKQLEEIKERMGNILDDLDIGKYLLSVNGLGVVTVAMLLGEIGDPLRFDDAKQISRLAGYNLIEDSSGKNKSGTAISKRGRKNLRRVLYQISLTMVATNSEMKQLYHYLKTRKENPLKKMQALVVIGKKVLSLIYALAKKKEYYHGDRVLGAVRQSQLLLAA

SEQ ID NO: 62722 - protein, 341 aa, unidentified
MSELALVGIDLGKHTFHLHGQDVSGREMFRKKLSRVQMMRFFGNCPTCTVVMEACAGSHFVARELATMGHVTKLISPQFVRPFVKSNKNDFVDAEAICEAASRPSMRFVSPKTEAQQTLSVLHRMRESLVRDRTKTINQLHGFLLEFGISLPLGRTVIKRLPRVLAEHELPIRLSTLLQQLHAHFGYLDEQITQLDKEMAGQLADDDLGSRLLSMPGVGPITASLLAVEMGDGKQFGCSRDFAASIGLVPRQYSTGGRSNLKGISKRGDKSLRCLLVQCARVYMQRLDSQKGALADWVRSLLQRRHSNVVACALANKLARIAWAISAHHTVFEAGPDAMAA

SEQ ID NO: 62723 - protein, 345 aa, unidentified
MHIASIGIDLGKTTFHLVALGERNKILLRKKFSRTQLLAYTANLPASLIGLEACAGSHFVGAALREQGHQVRLIPAQFVKPYRKSNKNDFIDAEAIAEAVSKQNMRFALLKTQEQLDWQAMHRVRDRLVHRRTALINEIRGFLLERGITFAAQPIHLRKNLPAVIEDAEQNLSPRLRWLLDRMWQEWKQLETDVETITDEIERISHEDARCRQLRQIPGIGPLVSTAIVAAIGNGAAFRRGRDFAAWVGVVPRQYSTGGKQKLYGISKRGNVYLRRMLIHGARAVLFRVKFDTGGFGQWMRRLAQRAPSNKVVVAIANKLARIAWAVLSSGQDYRHQPLEQRAAA

SEQ ID NO: 62724 - protein, 360 aa, unidentified
MKIMTVGIDLAKNVFQVHGVNEHGKTVLRKQLKRDQVATFFAIMPQRLIGMEACGSAHHWARKLRSLGHDVRLMAPQFVKPYVKTNKNDVADAEAICEAVGRPNMRFVPIKDIEQQAVLSLHRVRQGFVKARTAQANQIRGLLAEFGLIIPQGIAHIAKRVPEFIEDERNELPSSFRLLVQRLLEQLKGFDHQVHEIENQIVAWHRANENSRKLAKMPGIGPITASAMVASLCDAKSFKNGRQVRAWLGLGLGLGLVPKQNSTGGKTVLLGMSKRGDSYLRTLLIQGARSMIFAAQRKEISGSWLGRRLKRHNANVAAVTLANKNARIIWALLAGDREFRSDYTTVVAESKRLEDVNVTL

SEQ ID NO: 62725 - protein, 428 aa, unidentified
MDEVNRNRLEEFRQLRKEVRHSEEYLIVGIDIAKDRHYAFFGTAMGKTLLRRLVFSNDHEGFRKLLDHAEALRVRHGLKKVVYGMEPTANYHKPLGEYLIILGRTVVLVSGVTVKRNRESLDGRWDKHDAKDSANVADLISQGKCLYYEHPSAELRGLRGLLSLKKRLKKQEHGYRVRIRNHLIAQYFPEMDGDYERLGAEGISIVRWCLPASEIAQLDVDPFIERVTSRRIRMEKRRRLEAVWEKAAESIGCEGVPGVEHEAKVMVEGLRQIREMIKETEQKIEELCKQFPEYQYLLTIPGFGPDVSAKVLGAIGDPDRFENGKQVLKLAGLDLSADRSGKNSDKAIPEISKRGKADLRYALYQAALVASTRTQDFMLYYARKLEGRQKEKGIQTKMWVKLSAKMLLIAWTLMKRKESFDPAYLKAE

SEQ ID NO: 62726 - protein, 408 aa, unidentified
MRIIGLDIHRVFAEAVALEDGVYGRLGRIGMTRDHLRAFAATLHPTDHVIVEATGNATAVLEILAPKVERVAVANPFQVHLIARAKTKTDKIDARVLARLYAAGFLPEVWIPDEATLARRRQVTRRNQLVKSRVRLKLIVQSILHAHLAPRCPHADLFGGKGRTWLRAQDLPDDERAAVERHIEEYDRQTEAQRCVEREIAAVALDDVDVKRIMTIPGIDMVVAVGVMAAIGRIGRFASPDRLVAYLGLNPSVRQSGDGPAHHGRISKRGRSHARHLLVEAAWQTVRNPGPMRAFYERVRGRRGAHVAAVAVARKLAVLIWHMLTKAEDYAWGRPALMARKLRALELSAGHAARHGQRGSAYDYNLPERRRADRERAEQAEKAYRHLTQYWRRQSQCKGAGAASEERH

SEQ ID NO: 62727 - protein, 334 aa, unidentified
MWHVGIDLHRTTVVLAAVNDVGEAMNPISIPCSDTAAILDVVKTLGAFRAVIEATETYRWLYDLLRPHGTVLLAHPLRLRAMIQRRSKTDKLDAQLLANLLRINQIPLAYIPPEPYQQLRDLTRGRARLGRHLAEVKIQLRALLARQNRESPYRTPFGPRGLHWFRGQDFGPIENMVRDELLERFRHYAKQMTLFDQRLEEIRQAFPQIDALTDIHGIGLYSALLIVAEIGEAERFRTAKQVGAYTGLTSRIHQSGGHCYQGSITRQGSPWLRWVLVQAAMKAVHKDVALKNFYGRIRKRSGAKIARVAAARKLAEICWKRLRHWHRTHAGQAA

SEQ ID NO: 62728 - protein, 381 aa, unidentified
MTEMIVGVDPHKTSNTIAVLARDETLQLRCRFDNTAEGMVAMLDAVAEFPDRVWAVEGANGIGRSVAQRLVAAGEKVIDVPAKLATRVRVYSTGHGTKTDQADAVAIAKAAVHSKHLRTVHPDDENVALKLLSDRRHQLIASRTQSVCRLHRLIRELVPGGTPRALTAERAETLINSLDLSDIAGLMRIDLALDHIDDIKRFDRRIDQVTLKIHAAVKDSDTTLTRIYGVGIINAGLILGEAGDVSRFPTRNHFASYSGTAPIAVSSGDINRHRLSRSGNRQLNHAIHIAAIAQIRYDTPGRAYYRRKLGEGKSRREALRCLKRRISDAIYRQLQLDRQLNQQQDQAWPRWPSSRGDYPSYRSPDTLRRNGRPMEPRPAAV

SEQ ID NO: 62729 - protein, 383 aa, unidentified
MGARRRGPGPSHVLITPDHAGNVVGVDPHKHTLTATVIDPRGGILACEHFRVSGDGHRALEAWALQFGQVARWGVEGASSWGRHTAMFLCGRGYDVRDVCANRTPRNDRARQRGKSDTLDSERIAREVLAHPLLPKAFKRAGADSGPDEQHQLLALWHNRRRSILTSRQHVVNEAEHLLCELPLERRDQLPSTKAVRPRLAALERRNRRRRYDAPTTLRLQMLDSYRAQITVLDREEKHVVAELNELVRRSGSTLGELCGLDTRSVAELLVETGDVRRFTEGGFARFNASAPLAASTAEGPGEPVRHRYNPGGNRRINAILHRMAVTQLRCEPRAQRIYAGARANHHTKKEARRVLKRHLSDVIYRHMVRDLASHSAQPLLAA

SEQ ID NO: 62730 - protein, 390 aa, unidentified
MQVIDDRPEAASAIHTNFGAIFVSLELSQSTWLITSLSPGSGEKMSKHVVHGGDIAGLLERFARLQEKARARTGRTFPIIVIHEAGLDGFWIDRVLKNEGIESHVVDPASVATSRRRRRAKTDKIDGEALVRTLLAYKRGEPRVCAMVKAPTPEQEDRRRLCRERKVLITERVKHVNRLKGLLFSQGVCGYEPLRRNRRRRLDELRTGDGRPLPKHLKAQISRELDRLELLLEQIKVVETERDALLAAQQIAAPTSAAMLLAIKGIGPDFAAILWSEGLFRHFDNRRQIASYAGLAPTPWKSGSIDREQGVSKAGNPRLRTTLIQLAWLWLRHQPQSALALWFEERVVRNGGRLKKVTIVALARKLLVALWKYVTAGVVIEGAVMKGASR

SEQ ID NO: 62731 - protein, 353 aa, unidentified
MAKSATGITGPTYAGLDVSLKETAVCIVDDAGNIVFERMVPTDPGLLASCLAKHAPGLERFGIESGATSAWLWREFRALGLPVVCLDSRHAHRVLSMKRNKNDRNDARGLADLVRMGWYREARVRSLDAQYIRSMLLSRQQLLQSRRAVENQMRGALKTLGVMTGPTKGRGFMPRVVALRADNDWLGPVLDPLIAARAAIAKQLRMVSESVLVAAREDADVRRMMTVPGIGPLTALAFKAAIDDPKRFTSSTKVGPYLGLTSRQYQSGESEWIGGIGKTNDPLLRAYLYEAAGVLMTRVRRDCPLKEWAKRLAKRVGWKRASIAVARKLAVILHAIWRDGTEFSWEAGEPTPA

SEQ ID NO: 62732 - protein, 311 aa, unidentified
MTPSSSPRFFIGCDVGKAHVVVFDSRTRQTSILDNSPAALAAFAATLCDDCLVVCEATGRYEAALLDALAQAGRSAHRADARKVKAFIRSYGTLGKTDAIDAEALARYGQERHPLLRLWQPETAARQQLHALIATRHSLVADRTAWSNRAKAPVTAAIDSFIQPVLACFETQIAAIDAAIAALIAGDAALHRCVTALRTIAGIGAHTAAALAALMPELGQLDRRQAAALAGLAPHPNQSGASNRYRRTRGGRPEVKRLMFMAAMAAVRHDPGLRQFHHRLIAAGKKPIVALVAVMRKMIVICNARLRPAPA

SEQ ID NO: 62733 - protein, 417 aa, unidentified
MESPYNLVAGLDIHKKTVVVVVLQNAQPEQDYASSTFGTTQFGLKELAAFLRQHGVTHVAMESTAQYWRPVWMTLEEEFTLTLAQARSTRARRGRKWDKADARRIAKRLLSGDLTVSYVPPPEQRNWRLLSRTQVAMRESLVRLRNQVEVLLEQAQIKLSSVVSDLFGKSGRRMLEALLQGMENPAELASLGDRRLHASKEQLADALTGQLTEAHRIVLRLLLQQIDQIEQHVIDLDRALAQALAAHQEAVERLCEIPGISVRTAQYLIAETGPGAEPFESPGKLASWVAICPGQQESAGVTVSNRSAKGNWMMRRTLSQTAWAAVASKGSEARRRFLAWRPRLGTQKAIWAVAHYQLRVIWKVLHDRVRYRSPDTEALSHRALMARATRVFNQLRNLGYDVSITPPSKPVCINSKG

SEQ ID NO: 62734 - protein, 364 aa, unidentified
MKNSKKQGCVTAAQSQPSPVVGLDLGDRYSHYCMLSNRGEWMEEGRIGSTVAALEKHFGGEPRMRIALETGTHSPWVSRLLKSYGHEVIVANPRKIPTLTRSESKNDRNDAEQLARMAAFDPKLLHPIEHRSLERQQDLNLIHTRSVLVRARTMLVNSARGLVKSAGGRLPSCSSEAFPEKVLAAVPGELKAACEPLLKQIAQMNRTLAAMDKQIGGLGKKYPEIAVLRTAPGVGPVVAACYVLTLGHPETMETNRQAGAYLGLRPGQQQSGGSDPQCRITKTGNSYLRSLLVQSAQYILGRFGPDSELRCWGLKLAACGGKRGKRRAIVAVARKLAVLLLSMWRNGKKFEPFPQSATQLAKAV

SEQ ID NO: 62735 - protein, 368 aa, unidentified
MQGVCAFVGLDVHKETITVAVADAGRAAEVRHVGTIKNDPTAIGKLARSLARRHGVVEFVYEAGSCGYNVHRQLSAMGMICRVCAPSLTPRKPGERIKNDRRDAIVLARLLRAGELTYVWVPDALHEALRDLVRARHAAGQDVRRDRIRIQAFMLRCDFRFEGKAWSRRHRMWLCNRTFAHPAQQIAFQTYLNALEHNEARKAGIEQQIREAITGSPWAKQMQALQALKGVGPIVAATVLAEVGDFSRFAHPRQLVAYFGLAPGEHSSGGTVRPRGITKAGSSIARAVLCEAAWSYRTTPKVGQWMKERCPPVPQDIIALAWKAQLRLHKTHRKLTARGKRSVVATAAVARELLGFIWSIGQRVPLGV

SEQ ID NO: 62736 - protein, 364 aa, unidentified
MNKKRKRMTTAQDPKPFAPDQVDPCGTEVSAEELIVALCRKGVQQPLKSFPNTPEGHREIGHYLARSGRLVRVCMESTGVYGLDLALALAAQAGIQVRVANPRAVRNFAKALMERNKNDRVDAGVLQEFAARMPFEPWQPPARPALHLCALARRLEAITDLCAAEENRLHASQATEALPAIIRQDLERSIRFHQRAAQRLTREALKIISEDSNLQQRYTLLVTVPGIAQTSALRILAELVMISAHLDARQWVAYAGLDPREYSSGTSVHKKVRISKAGNRHLRRGLYMPALVAVRHDPHLRGFYQHLLANGKLKMQALVAVERKLLHAIYGMFKHQQAYDGTKVYRLPDGLTPASSAPVRTEAA

SEQ ID NO: 62737 - protein, 404 aa, unidentified
MRCITMFYCGIDIAKYKHEASVIDMSGKALSNSITFANDRQGCEKVLAIFEKSEITPDNVVIGMEATGHYWLSVYTFFLELGYTVKVINPIQSEAFRKMYIRQTKNDSKDSYIIAQIMCFGEYSATTLSEDNIIALRQLSRYRLALVDACGDCKRRVIALLDQVFPEYDKLFSDTFGKTSSELLLNCPTPEDMLAVSTRKLTNILNKASRGRFGKEKAEELKDAAKNTFGIAFAKDAFSFQIKQLMQQIIFTEKQLSELEEQIANLLHETNQYITTITGIGDVLGAIIVSEIGDINRFERPNQLVAFAGLDVTVKQSGEFSGTKNRSSKRGSPYLRRAIWLAAQRAAFCDPILSEYYQSLKARGKHHLTAVGAVARKLCNIIFVILKENRPYLPIPPKKSQNLS

SEQ ID NO: 62738 - protein, 428 aa, unidentified
MNYNTQNAKIASITEETLIVGIDVGSEMHYARAFDWRNYEYSKKPLEFSNTEAGFLTLKAWMEDIAERHGKTAVIPGMEPTGHYWFALGKFLQDSGMKPVHVNPHHVKKSKELDDNNPNKNDRKDPKTIAALVNEGRFSYPYIPTGIYAEIRSLSNLRFQTQEELTRIKNRIARWFSIYFPEYKDVYRDLKAVSGRMVLKVAPLPEDIIKLGAEGVNQIWRDAKLRGAGMKRARTLVSAAEYSIGSKEAPEAARMELKNLLSDMDVYASRLEELLQSIEEKLKEIPYIDKLMAIKGVGLVTVSGFIAEVGDIGRFDNPKQLQKLAGYAIVANDSGKHIGESRISYRGRKRLRYVLYEAAISLIGKNAEFREIHEYYRSRKENPLKKMQSVVAVACKVIRVFYAILTKGVDYDAEKLMGDIRRPQMQAA

SEQ ID NO: 62739 - protein, 339 aa, unidentified
MDHVAIDLGAKKSQICVRGADGRILEEKRWPTGDLESFLASRPTSRVIVETCAEAFCVADAARKLGHETRVVPATLVKTLGVGARRLKTDQRDARALSEVSCRIDLPSVHIPKTESRDRKTMCGMREALVGARTKIINNVRGWLRSRGRRIERGGRASFKQRVEAAWQGPLPSYVERQLLVLEVLTTQISEANAELESWAEADETCARMMTVPGVGPLTALRFVAAIDDVTRFESAHQVESYLGLVPGESSSSERQQRLSITKAGPRALRWVLVQAAWALRTRSRKPEAIPLQLWALRIEQRRGKRTAIVALARKLAGILFAIWRNGSVYDGSRGAKMI

SEQ ID NO: 62740 - protein, 343 aa, unidentified
MRLTDRDSLAKERVKMQAGEGIIGIDISKDSFDVVLRSTRGEQHRVFSNDQKGYTSLVGWAEKQPERVVHICMEATGSYWEGLAEALYQGGYRVSVVNPYQIKRYGDHLLNRNKTDKADASLIAEFCEKDRERLRAWKPFSPEIKALRSMGRRLDELQGMKQQEQNRLKSGVTDLVVIESLQENLKQLDAQIKALWKKIKEHVNQHPDLREKQRLLTSIPGIGKLTAIKLIAEIGEIKDFTSASQLAAYAGLAPKQFQSGSSVHKQTRISKQGRTELRRCLYMPAVVASEHNPIVMDLKRRMLASGHVMMEVIVAAMKKLLHLVYGVLKSGKPFDPDYGNLFC

SEQ ID NO: 62741 - protein, 375 aa, unidentified
MRETLRFLGLDVHAETIAVAIAEPDGEVRSLGTIPNRTESIRKLIKKLGPAEKLRACYEAGPTGYVVYWQLAELGVQCEVVAPTLVPVKAGDRVKTDRRDAEKLARCYRSGDLTAVWVPDEGSEALRDLVRTREAAKQDQMRARHRLSKFLLRSGQRPPSGVRPWTRPYLIWVAQLRFAQMAQEATRLDYLHEVEHMRERVARLEQAITEAVKRASPALQQVINDLQALRGIADISAVTIAAELGQVSRFDSARQLMGYCGAVPSEDSSGKRMRRGSITKTGNAHLRRIVVEAAWSYRRPPCIWYGLRRRQESISQEAKEIAWKAQHRLHKRYMRLGAAGKDRRKITTAVARELLGFIWAIGTRAETIACQQVAA

SEQ ID NO: 62742 - protein, 404 aa, unidentified
MAPVQDVITEAPILHVAFELSSVSWILASGVRSGRSVRRKSVKAGDLKGVLTEIEEAKRRFGLPKDARVVSCYEAGRDGFWLHRWLLDRGIENLVVDPASIDVNRRARRAKTDRLDADKLLERLRRYTRGEEEVWSVVRVPELEVEDLRRLQREVDRLKLERTQHSVRIRSILATHGLGHLCAAEGVHSLKGLHPPAGYDLGKYTLLEIQMISDRMDLAAKQLKEVEKIRRELERGPADLKSVRSVLLLLAVRGIGEEGAWAIGTELFGWRKFHNRREVGAIVGLVGAPYDTGKKDHEQGITKAGRSSLRRLLVELAWLWVRLQPKSALSQWFERRFGEGSKRCRRVGIVAVARKLVVALWRWVEFGELPEGAELSRSMAPEVLKAVGKGWEVPKGRDVVAATG

SEQ ID NO: 62743 - protein, 412 aa, unidentified
MNRKARRCCGIDVHQASLSACIRLHGKGRKVSEEIRTFGTTGDELLALHDWLKEHQVTEVAMEATGVYWKPVYYVLEDGFRVILVNPAEIKRMPGRKTDVSDCAWLAQLLDHGMLRPSFIPPREIRELRDLVRYRVSLKHDHTRSANRLHKVLQDADLKLSSVMSDLLGVSGRQILSQLAKGNCDPVALADLARANLRGKLPQLRQALSGRFNAHHAFLLSRLLADLDNTEEAMAQVAQRIEAQLVPFAAELERLCTIPGVKQVAAAAILAEIGAEMSWFPSTADLDSWAGMAPGNNQSGGKRRRAKARKGNRWLRTMLVESGNAAGRTRNTALSALYRRMIVRGGRKHAAFVVGRHILNIAYHLLRERTTYRELGPTYFEQRRVEQLKRRCLDQLRNLGFDANLVPLPKAA

SEQ ID NO: 62744 - protein, 346 aa, unidentified
MEYFIGIDVSLEASAVCVMDQGGAVVKEAKILSEPDALITFVRGLGHEVSCIGMEAGPLSQWLYKHLIAADLATVLMETRQVKGALKAMPIKTDRRDALGIAQLLRMGWFRPVHCKSVSSQEIRALLAARKTLQGGAIAIELSMRGLLRGFGLKIGLVSKRLLDARARELAEGNSTLMALVTSMLRSRAALRAELLRIDKRLRDIARTDGVCRLMMSVPGVGPLVALTVKAGIDDPGRFRSSKMVGPHFGLTPRRDQSGERDVVGGISRAGDAGVRTALYQAATSMLYRSAKNSWLRAWGMRVAQRRGMKRAVVAVARRLGVVLHRMWTDETQFRFSQADAPVKGA

SEQ ID NO: 62745 - protein, 356 aa, unidentified
MSQQCNCAIAVIGIDIGKNSFHVVGHDLRGAIVLRQKWSRGQVEARLANQPSCLIGMEACVGAHHLSRKLQLLGHDARLMPAKYVRPYSKGQKNDFRDAEAIAEAVQRPTMKFVATKTVDQLDLQALHRVRERLVSQRTSIINQIRAFLLERGVAVRQGPRFLRAELPGILATRTDVLSPGMLRVIEALAGDWRHLDARIEGLSGEIETLAHQDQHCERLMTVPGIGPIISSAMVAAIGTGEVFSKGRDFGAWLGLVPKQISTGDRTILGSISKHGNRYLRALFVQAAWVVLVKLGPKQWERYGLKSWIEAAKKRLHYNVLVIALANKLARVAWAVLNKGRALTCVKTDAMASRPA

SEQ ID NO: 62746 - protein, 412 aa, unidentified
MEVVHERAAGMDISKTDAKVCVRVPSTRKGVFTKSVTTYGATTNEVLRLRGDLENAGVSVVVMEATGDYWKPFFFVLAETLNVELVNATQARNIPGRKTDVSDATWLAELAAHGLLRASFVPPEPVRELRDLTRTRTALSQERTREYSRMEKELEAAGIKLSSVASTLTTLSSRRILDALVAGERDPHVLAGLAHTSMIKKSAQLVEALTGRFTAHHAFMTKLHLDRIDQIDRSVAAIDARIEDTIAPFQLARELIAEIPGISARTAMTILAEIGTDMSVFPTAGHLASWAGVCPGQNESAGRVKSSTTRQGNRHLKGALGIAALSISRSNTTYLAVKYRRLRSHTGPLKAIVALEHTLLVIIWNMLNNGVAYEELGPDYYAKKNPDRARADALRKLNTLGFDVQLTPRAAA

SEQ ID NO: 62747 - protein, 341 aa, unidentified
MYYIGLDVHKKTISYCVKDASGQVHREGTIGATRNELDCWVRTLPQPRIMAMEATIFTGWIYDHLLPHAEQVKVAHPLMLRAIAAAKKKNDRIDAGKIADCLRCDFLPECHMASTEIRDRRRTLRYRHLLVRQMVQMKNRISGLLMETGVSHNKQRLHKVGYFGELLSHHQEVQENIRPLLRLSRETIVRCQRTEYALVSSLQRDPLLAERLKRLRTVPGVGPITALTWALEVGDVSRFRSVKQAISYCGLCGEEKSSADKVLRTPLSKQRNKYIQRVLVEAAKLAPRQNHELALIHEREKQKGNRNRATLAVARKMVAYLLAVDRREREFVPAEGRGTAA

SEQ ID NO: 62748 - protein, 439 aa, unidentified
MQPLPVLDPKAAGIDVGSEQLHVSIAGDLPKIFGTTTGQLHALRDWLKENGVRSVAMEATGVYWLCAYEVLEVAGLDVLVVNGKHVKNLPGRKTDLKDCQWIATLHAHGLLRSGFVPPEHIRRLQDYLRLRGDHLTLAAGHVQKMQQALERLNVKFHDVISDLTGMSGLKVIRAILAGERDPQRLLALCDAQIQKKKAAAVIESLRGTWKAEHLFALRQAVAGWEFYQQRIVECDEQIGRELRVLAGPEDPQAPAPKATKPGGGNAPQIEGLHGLLWRLCGGKDPTVLPGVADYTLLQLVGEVGTDLSAWKSEKHFTAWLGLAPGSKQSGKRKGNQKRSRNRAGRLFCVIARSVGRSVDKALGGFYRRLKARRGGLVANLALARKLAALFWRLMVHGMRYVEEGLKKYETRVAHTEQWLLQKLARKHGLVLMPKATGQP

SEQ ID NO: 62749 - protein, 362 aa, unidentified
MVYIGVDLHRKVSHVVALDEAGATILSRRFDHSRDAFRRVFGELEPEPISVAFEATYGWGWFADLLADAGIEAHMAHPLATKAIGAGRVKNDAIDAATLAQLLRTNLLPEAWIAPPEVRELRRLVRMRASLVRIRSRLKCQVHAICADAGIPVAASDLFGRKGRAGLEALVLPPITASRLAAHLRLIDDVGREIIAADREIVAAFRGDDRVRRLLPIPGIGILNAATIVAEIGDVTRFPSAAHLASWAGLTPTERSSADHVRRGHISKQGSRWLRWTMVEAAARIGTSRAAKLHRIADPIADRRGTKIARVALARRILTLVFYALRDERGCRDYPALPRPSRRPVTARSRSVMASPDGRSLD

SEQ ID NO: 62750 - protein, 294 aa, unidentified
MANSVTLFVGMDVHKESISVAYCREHESEPPHFVGKIGTRKADIEKMVRRLQSKASYLVFAYEAGPCGYVLYRHLTSKGLECRVIAPSLIPKRPGDKVKTDRRDSVEIARLLRSGDLTPVYVPLVEDEAIRDLCRARDAARMVLKSAKLRLKSFLLRLGLNYTGRANWTNAHRRYLSTVACPTPAQQIVFQESIRAVNEQVDRLQRLEQELIELGSQWRLAPVVQAVQALRGVQWVVALTVVAELGDITRFATPRQLAAFVGLIPSENSSGGKRRQGPITKTGNTCPSAPVWLA

SEQ ID NO: 62751 - protein, 344 aa, unidentified
MTQYKRIAVDTSKSVFTIHCIDAQDQAVVRTNLRRGQMSSFFKKLPPTEIALEACGGSHHWARELNALGHQARLIPPHYVKPYVKRGKNDRNDAEAICEAAGRPGMHFVPVKTLAQQAQGMVLKVRETLVDQRTRLANTFRGHATEFGMIAAKGMSNIGALQIAIEQEAAIPPEAKEMFVLLNQELSELDEKIEQVDKKLTAAHKANPVSKLLATAPGIGPVTALTLAIEIDPGVFQSGRHLAAWAGLTPKEHSTGGKQRMGGISRAGNKRLRVLLVSGATAVIQAAMKPGSKQMTGWLRALLLRKPRKVAALALANKMARVAWAMMTTGEAYRRPAAAPAVPA

SEQ ID NO: 62752 - protein, 347 aa, unidentified
MRFYTQQHQHYCGIDLHARSMYVCILNQAGETLVHRKLPCDAGELLKIIKPYRKDLIIAVECLFCWYWIADFCAEQDIPFVLGHALYMKAIHGGKTKNDRIDSYKIAALLRGGTFPQAYVYPRKMRATRDLLRRRLFFARKRGELFAHIQNTNTQYNLPVLEERARKTKDRGAIIEHFEDPVVQMSIASDVELLKAYDEVIRDMELYLIHEVRKDHNANFFLLRSIPGIGEILALTLLYEIHVIDRFPRVQEFLSYCRLVKGTHESAGKIKKSTGGKMGNVHLKWAFSEAAALFLRGNAAGQKYFARLEKKHGKGKALSVLAAKLGRAVYYMLLRSKPFDPKRFATV

SEQ ID NO: 62753 - protein, 356 aa, unidentified
METAYDGRQVVGMDLHRRRSVLVRMTEDGRRLGTAKITNSPAELRAQIARAGKAPRVVLEATYGWYWAADTLAAAGAEVHLAHPLGVKAFTYRRVKNDERDAADLADLLRMGRLPEAWIAPAEVRELRELTRYRQKLVHLRTSCKDQVHGVLAKLGIPVTCTDIFGIAGSAWLDALGLPQPYAGKVTSLRHLTGELTTEISMLGDVIADLLAADRGCQVIQQLPGIGPVLAAVITAEIGDVTRFRTAAQLCSWAGLTPRHRESDTKVARGHVTKQGSRLLRWALIEAIQRIPRDCVIGSARDAIIARRGKEARNIAKVAAARRLLTLVCYGLRDGQIRCLSRPPADPPVTQTARAA

SEQ ID NO: 62754 - protein, 407 aa, unidentified
MVVAEVEVEEEYQFERRWYGSNREQLQRLSEWLIEQQVEEVVMESTAQYWQAVWGALERYWRPICQKREGAGAMSGKLHLAQALSNRGRRGRKRDFPDAERLVKRLVAQELVLSFVPDPEQRLWRTITRRKLQMTRLHVRMQNQLESLLEEAHIKLSGFVTDLLGVSARRMLQTLADGETDPAALAALADKRLRATPAQLCDALGACTELNPVYRRLIKMALEELQFLEQQMGQLDQEIANLLRPHEDAVKRLAEVPGLGVDSAQQIIAEVGPTVASFSSDKQLCSWVAVCPGDNETGGVNYSHRSPKGNRQMRRILNQAANAAARTKGSIFEIVYRRQVMRMGHNQAIGVIAHRLCRLIWILLHRKVRYEERGPAVTERSKRVRTLRMIRTLRSLGYRVEPLGNPA

SEQ ID NO: 62755 - protein, 398 aa, unidentified
MLEQAWAGVDVGKEHHHCVVIDAEGRRLLSRRVANDEAVLLALISDVTGLAGQVRWAVDISTGEAALLLALLAAHDQQVCYLSGHQVNRAAGGYRGSGKTDAKDAAIIADQARMRRDLAPIRVPDEVIVELRMLVARRRDLQSDRVRAVNRLHETLLTISPALEKALDLTTQGPLILLTGYQTPAAIGQLGVTELTEWLRARKVRSAAELATRAVAAANAQRIALPGEALAAHLAAQLAEGVISLDEQIKHIDKLIEGRFHRHHAAPVILSMPGIGTLLGAEFLAATGGDTAAFATPDRLAGYAGLAPAPRDSGRISGNLYRPKRYNRQLQRVFYTSALISIRCCPESRTFYDRKRAEGKRHNQAVLALARRVNVLWALLRDHRPYQAGPPVTTAAAA

SEQ ID NO: 62756 - protein, 376 aa, unidentified
MEKDIRHVGLDVDSEKLVVGVAEPSGEVRSLGSIPYTSEGVGRLVKKLGPASRLRICYEAGPHGYGLYWELTALGVHCDVVAPTLVPVKSGDRVKTNRRDAEKLARCYRSGDLTPVWVPDAEHEALRDLVRAREAAKKDQLRARHRLGKFLLRHGLRAAAGVKNWTLKHLLWVRTLHFEHPAQEATFLDYLHEVEHAAERVARLEKAIDQAVEGLPQEMKAMVAGLQALRGIKQVSAVTIVAEVGPLSRFERPKQLMGYSGMVSSEDSTGNRVRRFGITKTGNAHLRRVAGEAAWAYQYRPAMSAALKKRQEGLSEEVKEIAWKAQHRLCTRYRRLLARGKIKQQVTTAVGRELLGFIWAIGLQVEKEQQRRSRAA

SEQ ID NO: 62757 - protein, 342 aa, unidentified
MSEDYDGRQYVGMDLHRRRSVLVRMTEAGERLETVRIVNDREQLAAVMARAGEDPEVVLEATYGWYWAVDALAELGGCVHLAHPLGVKGFSYRRVKNDERDAADLADLLRMKRLPEAWIAPPATRELRELVRHRAKLVHLRTSLRCQVHAVLANHGVCVPVSDLFGVQGSMLLERAALSAAGRARVDSLLRLIDSFDTEIDQVAKTTARQLANHSGYTAVQTLPGVGPILAAVFVTEIGDITRFPAPAKLASWAGLTPRHYESDTTVHRGRISKQGSRLVRWAAVEAVQRVGKHTYIGGYRDRITARRGRNIGNVAAARELIECVYYALRDGTCRRALTTTA

SEQ ID NO: 62758 - protein, 421 aa, unidentified
MSNSTLSKKLASVKPGTLFVGVDLALDRNIAVVLTERAERLARFGFPNERDGYDYFYRRLEAAQESRQAPAVLVGMEPTNYFWKLLAADMEQHRPDYGYRLVNPYTVKKNREGDQLDRSKDDNRDAFTIGDLLRTGKYTETQLLHGAYAELRQYVTLYTRLQRDNRRQKTLIHNVAGQLFPEMTHVFKDLTGVTVLAMLRNHASAAVVWKMSQEAFIASVRADFRGQRLQVAKLRRAHVQATRSVGLRDGVEALQLALRLHIEALEALQPQLKEVCTALVDTFLALPEAKYLLSVHGLGIITAATILSEIGDPGNYTNGRQLIKLAGTQPVLNTSGRKTRSRTPMSHKGRPRLRTALFFAVMRLVQRDKTFAREYQRLQTREKNPLTKMQALGVLMNKLLRILWALMRSRTFYNPDFQRAA

SEQ ID NO: 62759 - protein, 383 aa, unidentified
MPRSDPLRAGAGRQRPSHRPSQGKDRTAVSTIVAHTHPFVIGVDTHARTHTYAVLTAAGEHLGTETFPNTAAGRSRAIAWSGRRASGVADALWVIEGANSYGAQLARNVTGTGYRVVEAARMTGGRRGIGKSDPIDAQRIAAAVLALPTDQLRNPRQDKGVRAATQILLTVRDELAGERTRAVNALTALLRITDLGLDVRRPLGARRIAEIARWRTRDEHLAAATARTEAIRLGKRILGLDAELDQNMARISELVQASPAAELLHKTGIGPVTAARTLVAWSHPGRVANEAAFAAIAGVNPIPASSGNTTRHRLNRGGDRQLNRALNVIAMVRMVHDPGTRAYVDRRRAEGKTDREIRRILKRYLARSIYRHLNAASTAQTGG

SEQ ID NO: 62760 - protein, 342 aa, unidentified
MRLFIGLDVSLDKTAICVISEHGEIIREAEAASEPEVLSRWLYELDGRVAVVGLEAGPLSQWLHRGLIEAGLDAVLMETRQVKGALKAMPIKTDRRDAEGIARLLHLGWFRPVHCKSVSAQETRAVLGARKAIQQNMIALEMSLRGLLRNFGLKVGAISRGRFEARIRELADGNPMLETATAPMLRARETLRQELATLEKHVRQFAQDDPVCRRLMTMPGVGAVVALTFRAAVDDPTRFRTSKRIGPWVGLTPSRNQSGERDVSGGITKAGDVNLRRALCQAATVMMNRGRSTWLRTWGAQLAQRRGRKIAMVALARRIAVILHRIWIDGSVFQPDAAPKMI

SEQ ID NO: 62761 - protein, 338 aa, unidentified
MGQYVGIDLHRRSTTIHRMTEDGETLGVEKILSQPFELAQAISAAGPEPEVVLESTYGWYWAADVLKECGAHVHLAHALGNNWGNRRVKNDKRDAADLALMLRIGRLSEGWIAPPEIRELRELVRYRHSLGRHRTSAKAQIHGVMAKNGILPVVGELWGPIGQAQLDSLELTEAYALRMRSLRELLAHVEREITKVDAQLHHRLKSDAGYRALVRLPGVGKVLGAVFVAEIGDISRFDSAKKLSSWAGLTPKHKESDEVVRRGAITKQGSRLVRWAAIEAVGNYRAKGNEKLRADYRRIAERRGKYKARVAVARKLVTLVFYALRDGEVRCLDTQSAA

SEQ ID NO: 62762 - protein, 364 aa, unidentified
MKNVITYVGIDAHKKDLFIAMLIGTQETSVTWTVPNETQAVRRLVRKLERAAPGPVKCYYEAGPCGYTLQREMTTERVSCHVVAPALIPRKPGERVKTNRRDARKLGELARAGLLTEVRPPTPEEEAVRDLCRARDDAREDLQRCRHRLGKLLLRRGLHFPGRNWTRAHRQWIERIEWGHAPTGVVANDYLLAIDQLEARLTELDAALTAIAETAPYAEPVGWLRCFRGIDTLTAILLLAELHDFRRFHDPRALMAYVGLVPGEHSSGEKHRRGRITRTGNALVRRLLVETAWHYQHRAGIGPALTRRRKGQPSRVIAIADRAQQRLCRRFRRLMEQHKPAPKTAVAVARELAGFLWAALQPAQ

SEQ ID NO: 62763 - protein, 325 aa, unidentified
MTVLGIDIAKLTFDATLCFNTTRSHQSFPNTPAGFAALDDWLSQHGVTQVHACMEATNVYWEALAIWLHARDHIVSVVNPARIKGFAQASMQRNKTDKLDSAMIAAFCATHHPSAWEPLTEAQQHLRALVRHRDDLLQTRLQLHNRLRDTTNTFVRASLQALLDTLKAQMKEVEHQIAEHQAAHATLQAQVTLLSSVIGIGVLTATKVLAECGDLRSYASAKAVVANVGVNASHYESGTSVRRKPRMSKIGNARVRAALYLPALTAMRCCAACKSFVERLRKRGKPIKVIIGAVMRKLLHAMYGVLKHQTPYDPAKAFGAVSPTT

SEQ ID NO: 62764 - protein, 345 aa, unidentified
MEQISRIGMDTSKHFFQLHGVNAAEKVVLRKKLRRKEMVVFFEALAPTVIGIEACGASHHWARILRSFGHEVKLIAPQLVKPYVKRGKNDTADAEALCEAMSRPTMRFVPVKTADQQAALMMVGLRDRLIRNRTQLSNAVRGYAAEFGFTAARGMAHIDPLLDRIQADESVPVLARELFAAQAEEYAQLQAQIAEVDAKLMAWHKADECSRRLANIPGIGPIGATLLLMKTPAPEMFRSGRQFAAWIGLTPKDHSTAGKVRLGVITRAGDEALRSVLVVGATAVIQHVRRGGRGSPWIVDLLKRKPPKLAAVALANKMARIAWKLMVTGNSYAAKSAPAALMGAA

SEQ ID NO: 62765 - protein, 354 aa, unidentified
MQYIAFDSHKRYTYAVVEEKERGRVMEKRIEHRRGEIGAFLSQCEVGSPVALETIGSWYWIVDEIEAAGMLPRLVNARKAKMMIASSKKTDRLDAKGLNTLQRTGTLPTVWIPSSELRDIRELYRTRMVLTQMVIRLKNRILSCFSKYGISFDETSDAFNIKGRASLEAALEILPTQTCFALKELLRQLDLLQEAVKEFEARMLQVQSNDPEIKLLQTIPGVGPILSYVIAYETGDIHRFPSASCFASYAGTTPSVHASGGKVRYGHTPSSVNHYLHWAFIEAANVISMRHEVLRFRHTARLYERLRQAKGHDIAVGAVARHLAEATYWILTTKTAYREPNQNKQVVVVSSKEG

SEQ ID NO: 62766 - protein, 339 aa, unidentified
MPECRFLAVDLAKNVFQLHGAASDGALVFKRRLMRDQLSVFVANLAPCQIAMEACASAHHWARVFRRFGHEVKLISPQFVRPFVKGSKNDGNDAEAICDAMQRPNMRFVPIKTVEQQDIQSLHRVRSRLVNERTGLVCQIRGILAERGIVFAKAVSRVRKEVPVIAQDLDNALTPILRTMLTELMDELRDLDERIKVFDRHIDAIFQSSEACQRIARIEGVGPKTATAFVAAVGDPLEFKNGRHFAAWLGLVPRQHSSGDRQQLLGITKRGDKYLRTLLVHGARAVLRTAPKKSDAKHAWALEVAGRRGASKAIVAIANKMARVIWVLLAKKEDYRLAV

SEQ ID NO: 62767 - protein, 413 aa, unidentified
MEVVYHKCSGIDVHAKFLVACLLQDGKKHIRRFSTMTDDLINLRGWLISEGCEIVAIESTGVYWKPVFNILESALPVMLVNPEHVKALRGRKTDVKDSGRLAEFLSVGLLEPSFIPPPHIRRLRELTRYRESLVRTRAAVANRIQKVIESGNIKLGQVASDVLGASGKKMLQKLAAGETDPVVISELAQGNLRKKLGELKLALRGELNEAQRFVLGELLQRLKELETADYNVSRQIHQAICDPEHPELFHAWELLQTIPGIGEQVAEVVIAEIGANLREVFPTAGHLASWGGMCPGNKATGGKRISGKMRKGNHFFGCAMVQAAWAATHTKKTFLSAKYHRLVRRLGKKKSLIAVAHALTVIIYNVLVRNEPYNELGVDYFDRNHSDKQRKYLVKRLQALGYTVTLEQNVHAA

SEQ ID NO: 62768 - protein, 411 aa, unidentified
MSLPESSFYVGVDWAAETHAVCVLDAAGKIKAQLTIAHTADGFADLLRRLGKLSTDPMDVPVAIERPDGRLVDALLEAGYPVVPVSPNAIKTWRDGEVLSGAKSDAGDAAVIAEYLRLRAHRLRPATPFTVETKALRTVVRTRDDIVEMRVAATNQLAALLDAHWPGARAIFADIESPMALEFLTRYPTAAHAQRLGEKRLTAFCVKHGYSGRRPAAELLHRLRQAPAGTTDDTLVEAVRDAVLALVTVLKALGAARKDLDRSVAAHLGEHPDGPIFTSLPRSGQVNAAQMLAEWGDSRVAYDGPDAVAALAGLTPVTNQSGKHKAVHFRWACNKRFRKAMTTFADNSRHASPWADQVYRQAIARGHDHPHAIRVLARAWTRVIYRCWLDGTPYNPVKHGNANEINQPTAA

SEQ ID NO: 62769 - protein, 427 aa, unidentified
MNYTQNRKIMQVTETTLGVGVDIGSQWHYARAFDWREIELTRKVFRFSNDLDGYIAFEEWVQSVSEKSAKMDILIGCEPTGHYWFTFAKYVKEHGMKLAFVNPYHVKQSKEMDDNSPRKTDQKDPKTIAKLVTEGRYSFPYIPEGVYAELREAMSVRDQIVKTLNATSNRIQRWLKIYFPEYLEVYKVFDSVSGLAVLKKAPLPKDVVEFGADEIVKLWRENKLRGVGKKRALTLVAAAKRSIGLAGGNCARLDLQLLLEDYSKKKEQLDRITAALQEETLKVPNVEKLIAVKGVGIITVAGFLAEVGDISRFTSPKQIQNLAGLEPKENSSGKHKGRSSISKRGRRKLRRLLFQVVLPLIRSNEDFREVYTYYTTRKENPLKGMQAMIAVSCKVIRIFYALLTHGIDYSSARFRADIIRPEPAKAA

SEQ ID NO: 62770 - protein, 351 aa, unidentified
MSRQSTPSPIATIGIDIGKNTFHLVGLDRPGAIVLQLKTSREQLERRLANLPRCLIGMEACSGAHHIGRQLAALGHDVKLVPAQYVKPFLKGHKNDYRDAEAIAEAVQRPTMSFVTIKTPAQMDLLALHRVRSRLVSLRTGVINQIRGFLIERGIAVRQRPAPLRKALYDLLSSNPPSLSPRMVRLIADLFEDWRRLDDRIATVSAEVEALVEEDEPCQRLMTVPGIGPIISSAVVAAIGDGAGFKQGRDFGAWLGLVPRQESTGDRTILGKISKRGNKYLRTLFVQAAHVILARRPSAAMRGLWPWIAQTSKRLHRNMLAIALANKLARIAWAVLARGREYQPSITPHAA

SEQ ID NO: 62771 - protein, 305 aa, unidentified
MISWVGIDISKSNLVVWVQPQKDGFEVPNTVEGFDVLVARLAQYTVGRVLLEATGGYERRVMAALQQASFSVLRINPRRARAFAVAMGKNAKTDPIDAAVLADFAEALHASREKPISPEREALRELIQLREHFVQQRDDNKRRLQQAQLPAIVEAIKDHIRYLQTQIKQFTKAIDQNMRKLDAEKADRLISVKGIGTVATASLLVYLPELGELDRREIAALAGIAPYNDDSGNHSGKRQIFGGRARVRRALYMSCWVVIRHQADFKARYKSLRERGKSAKVALIACMRILLIRLNAMLRDGTEWR

SEQ ID NO: 62772 - protein, 481 aa, unidentified
MVVSTPGNKLIRVFRFEPPIVSCMYSCIERTVKRPAKSFCSGWEQGGIEIPIRPLSDLSNFKRMKGGMELISAIAKCVAGLDIHKAIIVCTLLREDSEGCPVKQTREYKTFRYDIHDLAKWLEASDVELVVMESTGIYWKQTYEILEETGLKVCVVNARHVKNVPGRKTDVMDSEWLAELARCGLVRPSFIPPRDFRELRLLVRYRRKLKAASSAEKNRLHKHLEVSGIKLSCVVSSIDGVSATRMIEAVLEGREPNEIVELAAGRLKKKKKDLLKALADYRLSDRVQSVMERILGHIKWLDGHIEEIDAQVVAAMEPYREEWQLLQTLPGINQISAAMLLTEIGVDMSQFRNGAHLSSWAGMCPGNNESAGKRKSGRSRKASVHVRTLLCEIANAAIKTDSQFKGYYRSLVIRRGHKRSIVAVGHKILKIAYIMLRDKTPYKDPETDYEAVLTRKNAPRWIAALKKYGYISEEMDERASA

SEQ ID NO: 62773 - protein, 338 aa, unidentified
MTYYAGIDVSLESANVCVVDAAGKTIREGKVASEPAALADWLKGVGPGLERVGLEAGPLSQWLHTGLRQAGIASELLETRHVRRAFEIMPVKTDRKDAHGIAELMRMGWFRPVHCKSIDAQETRAMLTARKLVQKQVFEVESSLRGILRGFGLKVGKTTPVKFEGRVKELVAGNPSLERIADSLLATRAVLRREFNGFERQLRGMARNDTRTRLLMSTPGVGTIVALTYAAAIDDPARFTSSKTVGAHFGLTPKRYQSGETDYTGRISKLGDTSVRTALYEAAHVILTKPLKGCTALKSWAMRIARRAGMSKAKVALARKLAVIMHRMLANGTTFQSA

SEQ ID NO: 62774 - protein, 436 aa, unidentified
MGLPRWVGRAVGLDVHRDFCEVAVCEDGEVRSAGRVPATPGGVASLARSLLASDRVALEVTGGCWEVARILEPHVNRVVVVSPDDTGITSARAKTDKLDARALASLLWKGELEAVWMPDERCRILRRRLARREQLVRARTRSKNEIHACLQRRLQPKPPCSDLFGVKGRQWLAKLELPTEERESVNAAMRHVEFLDAEIAQVERLIAKQALSWPEIRRLMTVPGVNLICAASFIAAIGDPHRFMTSRKLVAYLGLDPRVKQSGEGPARSGRISKRGSPSARWALVEAAWTAVLQPGPLHAFYERTKNRRGHGKAIVATARKLTVLFWCMLTRSEDYAHQQPSLTRKKLRRLEITAGALKYTRRAAGVWSTNDLMRQAELELAHQAETSYKRMVQDQQAGAPAKKAKAGASVTPERALPSHSTEDSHAAGPAPTPAL

SEQ ID NO: 62775 - protein, 400 aa, unidentified
MMTPDDIDVWVGLDVGKSAHHAHALDHDGNTLYDKPLKQDEKAIRTMLGKLSKHGRVLLVVDQPNTIGSLPLTVARNMGIAVAYLPGTAMRRTAQLLPGDAKTDRRDAHVIAWAALKLPETLRDAGPDDETLAALKLLAGHDEDLAHESTRHVNRLRSLLLQTHPAFERALKGERITRDATLALLERYGGPMGVKRAGIEDVKDWAKSNGLRAGRIIDDMFKAIGEQTVTVPGTLMAETIIPSIAHDIKTIRDRRREVDRQVEKLLEDHPLLTALTSMPGIGVRTASNILLGIGGDIANFKSSAHLAAYAGISPVTGQSGTSIKGERPSRRGNKHLKNALWQTAFVASTKHPPSVAYYKRKREQGKHHNAAIICLARRRCDVIYSMLKNGTLYQEPALVA

SEQ ID NO: 62776 - protein, 316 aa, unidentified
MKSSQSFVGIDVSATRLDVAVLPAGTHFTVPYTDDGIAALVHTLRDLAPQTVVLEATGGYEIPVVYAMSGASLPVVIMNPKTLRHFAKSTGKLAKTDKLDARVLAHYAQSIQPPVRPLKDPEQLELGTLMSRRRQLRDMIVMEGNRRRTSTPKIRHNIDQHLTYLRQLLKDLDREIHDFIRCTPLWHEKSAILQSVVGIGPKVSASLIADLPELGTVPRPQISALAGLAPMNRDSGKWRGKRTIQGGRPTVRQALYMAALVASRHNPVIRVFYQRLLAAGKPKKLALTACMRKLLVILNAMLKNRLHWNQQLPLAA

SEQ ID NO: 62777 - protein, 326 aa, unidentified
MESVVGIDVSKDSLDVVFVNDGRHLHKIFSNHATGHNHLHNWLVAQRSGTVRVCLEATGQYGEGVTEYLYQRGYPVSVVNPARIKHYGESKLHRNKTDKADAALIAEFCQKENPALWTPLPAEVKHLRALVRRLYDLQNAYQQERNRTLAGEQNAWVLEDLKAHLSYLQDRIRTARQAIQQHIDQTPSLKSQQELLVSIPGVGQLTAARLLAEIGDISAFEDAPQLAAYAGLNPKGFRSGSSVHKKTRISKEGRAFLRQILYMPAIVARQHNPIIKEFCKRLADRRLANMAIVVAAMRKLIHIVFGVLKNQRPFDPDYGNQFAFTS

SEQ ID NO: 62778 - protein, 383 aa, unidentified
MHHPLSGVQKEAKPQTVAKEANMSMIPKQSGKRKQAQVDFTGKTCWVGVDVHKSSYAVAILDEDGQRQEFSTLADSQRLLVQLLKMGMHIQTLVYESGPCGYGLAWACQEGGVPVVVAAPSRIPRPVSKSGKTDRLDSMNLVGLLARGMLKSIAIPSREEFAVREMERARQSLVRARRRVRQEIRSFLLRNALTEPPNLSRWSQIAVRALHDMPLPEYLQNSLAVYLGEHASILASLSRISAQLAEATVAQGHGERIKNLQTIPGVGPTIAHTFTCEIFRPERFKRAEDICAYVGLAPMTNHSGAGKERAWTRPVGQGYLRSILVESAWRLVAVEDCYRDFYNRIRSRTGLAQKAITAVARKLLVLIWRVAIEGRTYRPAMTN

SEQ ID NO: 62779 - protein, 342 aa, unidentified
MDISTMGMDLSKTTFHLIGLSPRGEIVLRKKLSRKQLLTYTATRQPMLVGMEACAGAHFLARALRDQGHDARLMPAQYVKPYVKTNKNDYLDAEAIAEAVQRPTMRFVPIKNDEQLDLQALHRVRDRWVARRTAVMNQIRGFLLERGIAIRKGPSYLMTQLKIIFSDGNPSFSERLLHLIHELKHEWDELERKIEEADTELARIAKEDDGCHRLMEVPGFGPIVSTALVAAIGNGVNFRKGRDLAAWLGLVPRQHSTGGKTRLLGISKVGNEYLRRMMLHGARSVVMQMERKPSALGEWLTSLSARRHRNVTVVALANKMARIAWAILSKGTHYCAPAFVAA

SEQ ID NO: 62780 - protein, 420 aa, unidentified
MKSFVPVAGVDVSKRFSDLCVLSPDNNVLLRQKIYHDMVNMKLAEKKLHEIELECGARPVVVMESTSHYHLILFQFFTDAGFEVVVVNPIQSGALKNINVRKVKNDRVDAYRIAMLYRLKVLRPSQIPTSSLRGLRLLTRQRSELKSDVARFKNRMTAYLDQIFPGYGEVFSDVGGSASRAVLHMCPTPEELLNADGSLLAKAICEAGNKGHKFGAEKAAKLREAAGSAQVIGVRSASNASLIKNVLDIIEGLLAAIQRIEGEIKELVTQDTRLDEDVKLLCSIPGIGFSSAVVIVAEMGDISLFRKPKQLAAYFGLDPGERQSGTFKGRKNKLSKRGSPQVRAALHMAAVSSVSRNRDGTYRNPVLAEYYERKCAEKPCKVARVAVMRKLSNIIYAVLRDRRPFELRTPQEHMALLAAA

SEQ ID NO: 62781 - protein, 331 aa, unidentified
MPSIWRKRVFQIHYVEPETGAIHSKVLKRAQLAPFFANRPASRVVMEACGSAHHWARVLARLGHDVRLIAAQFVRPFVKSNKNDAADAAAIWEAAQRPGMRFVAVKTEDQQAMLAMHRIRQQLVRIRVMQVNQLRGLLYEFGVVLPQGRRASIEAAKAALASLADELPAMLLDSLQDQLSRLRALDEQIARIEQRILSWRRNDDACLRISEIPGVGVLTATAAVSVIGQARTFRSGREFAAYLGLVPRQNGSGGKIKLGGISKRGDVYLRTLLIHGARSVISSSKHLPERLRQMLSRRPTNVVAVALANKMARTIWALLAHGRTYEAAPSQ

SEQ ID NO: 62782 - protein, 406 aa, unidentified
METIVERPAALDVHKAQVTACVRVPAADGKGREQYVAEFATTVRGLLALRDWLAAHRVQQVTMEATGVYWKPVWAIIEDEFPLLLVNARHVKQVPGRKTDVSDAAWLCQLAEAGLLRASFVPPKPIRALRNLTRYRKTQIQERAREANRLHKALEDTGIKLDCVATDILGASGRAMLAALIEGTTDPQLLAELAKGRLRAKLPALREALEGRFDGLHAVWIGAILAHVDFLDEQIDRLSDAIEEQLAPFAAAVELLCSIPGVQRRSAEVIIAEIGVEMSVFPSPKHLASWAGQCPGNDQSAGRRRSGKSRHGSKWLDWALEEAALAAHVYLAAQYARLRPRRGHKKALGAVKHSIICACWHMLTTGELYHDLGGDYYQRRDPERTTRRLVGQLEALGHTVILQEAA

SEQ ID NO: 62783 - protein, 414 aa, unidentified
MEGEINKSCGLDIHKHFLIATILSRSGEKQQQRFSRDDDGILNLKNWVTFEKCDVVACESTSDFWVPIYEALIDHLPVIVGNARDMKAFTHKKTDKIDSEVIAQLALNKMVQPSRVFPKKHREFRSYVRLRLTLVRKRTDIKNEAHAVLSSEMLHLGDVLTDIFGKNGRAILSGISSGKNVDQIIESLSPNVRKKAVQIREILDREISQSAAIRLQICLKLIKHLDEEIEILEREIFNYAYRNHKHEMEILLSVPGIGELSAAILIAEIGNFNDFSSGDKLASWIGIVPNVYQSADKYHNGRITKRGSKVARWILTQIAQAAARKKNSKLKEFFNRKKKSIGHAKSIIALARKIATIIWHLITKDEMYEDETGYEKGEVQKRKIVETEIFSVDERITIISGIFAIMGKEDREST

SEQ ID NO: 62784 - protein, 355 aa, unidentified
MTRYFGCDAHKRYSIFTFVDDTGTPGPYVRVENERSLFRGYLKMIPPRSQIAVETVGNWYWMVDEMEKAGHIPLLTNAGKAKAMMGQINKTDKLDAKGLALLLRNGTLPSIWIPPGELRDQRELPRMRMTLVRMRTMIKNRIHATLSKYAIEIDEVSNVFGVAGRKLLEERIRELPPQTHHSVEKQLELLDDVEDQIKESERQIKAVVQETPAMQLLMTLPGVGMILAVVIAMEVGDVNRFSGPDRLASYAGTVPRVKSSGDKIFLGRVRPDVNRYLKWAFIEAANTIVLFHKRWTGRHVVDLYVRLREKRGHAKAVVAVARHLAEATYWVLKKGESYRERNLKRPVSSTREQAR

SEQ ID NO: 62785 - protein, 318 aa, unidentified
MASIGDVASGTVTIGVDPHPGSHTAAALAADRGVVGYLTVVNDLEGLRRLREWASQFPDRRWAIEGAGNHFVAPLVVELLADGEKAYSIPPAMTAQYRRCRSRSKDDQIDAENAAKALLANPDLPPHDPTNYERRLKELTRSYARISSQLKASRMALKDTKIPEVRHVLNSVITALDQAIDTLKRTMKETVQAIAPQLLATVGVGPVVASVVLAEAGRVARFKDRDRFVAYGGCAPIRWESGAHQSVRVNAGGNRRLNWAAHIIVTSRLRIDPRTQDYRDKKLAEGKTQREVMRLLKTYVCRELFKTLRATHIGPLDA

SEQ ID NO: 62786 - protein, 346 aa, unidentified
MMIIGCDYHPSWQQICWFETATGETGELKLEHASGEAEKFYRGLSGHALIGMESTGNCQWFVEMAATAGHDVWIGDAAQIRASDVRQQKHDRRDAALILKLLMEGRFPRIWIPSGQEKDLRQLLIHRYKLVRIRAQVKTELQHLAMNQGVTKKRKLWSKAGERVLRELPLKPWASRRREDLFKVREMLNGQIALLDQAVVEAAEKNEKAKLLMTQPGIGPITSLAFVLTMGDVNRFQRGKQVASYLGLIPREYSSGGHQRLGSISKQGNRFLRMLLVEAAQGAVRCDPGFRSEYLHRCHKKAKGVAKVAAARKLAVRLYWMLRTNTGYPEVVRVESSSRVPLVSAS

SEQ ID NO: 62787 - protein, 432 aa, unidentified
MICAAVERCAGIDVGKRFLKVCLMVGPLTGEARVERRTYLTTVAELEKLRDWLVAEGVTHVVMESTGSYWKPVFNILEDAVKVYLANPKEVKNRKGHKTDDKDGWWLAHLLRHAMIHPSFIPPRPIREMRDLTRRRRKLIGNATAERNRVQKVLEDANVKLGDVLGDVFGVSGQLMLESLLQGKAQAEEIAQFAQRRAKKKIPQIIAALEGHRMSDHHRKMIRYSLAHMQFLEDQLEELDRDILEKIREAGCQPQWELLQSLPGVKETSAASIIAETGADMSQFPSRQQISSWAGVCPGNNRSAGKNKSSRTTGGNPWLRGALTECAWAAARKKHCFLKDRFWRITSKHAGQKGPALVAVAHNLLHLIYEVLRSGQPYQPREAPLLNEVHRERLIRHHVRRLGKLGLRVRYIPPASQHSRKERGTEPTKERS

SEQ ID NO: 62788 - protein, 482 aa, unidentified
MAKRKMSTFERLQHGKMNRKQRRELDRQLNSEDPSLAVVHPNAAGIDIGNESHFVSIPPDRDAVTIREFGSWTADLHEMANWLKEHGIETVAMQSTGVYWIAVQEVLEQAGLEVYLVNARGTKNLPGRKSDVQECAWLRKLHAYGLLRNSFRPPEEIRAVRTIWRQRDRWVKECGRAVQQMQKALTTMNVQLANTISDISGVTGQAILRAIVVGKRDPWELAKLRDRRIAASEQEIAHSLQGNWREDVLFELRQVLEAYDFYQKQMAACDQELTKYMAAVASREITEKSDLPKDASVLPLSKTARRPQHRRKNQPSFDLATELQRTMGVDLTRIDGIDVMTAQVIFAEIGPDFSAFPDENHFASWLTLAPKHDISGGKVLRRIPAAGRNRVANALRMAAESLCRSNSYLGARYRRLRIRLDGPLAVKAMARYLACLVYRMVTKGQAYVDRGAHYYESKRQEKERLALQRTAATLGLKLVPAT

SEQ ID NO: 62789 - protein, 413 aa, unidentified
MEAILEICCGLDVHRDNIVACITKGALNCKPTSEIRKFSALQHGLKSLKEWLEKEDCHHVAMESTGVYWKPVYVALEDAFEGDIEILLVNAQKIKNVPGRKTDVKDSEWIASLLRSGLLSGSFIPEKEVRKLRDLTRYRKSIVHEVSNQKNRIEKFLQSCGFKLSTFMSDVFGASGRLIINHLIDHGNVNVEELDSLIKGVLRKKQSDIALAINGSLNEHERSFLSMQMRHLLQMEENIEELDNSIDKYLEKFKEAEETLDGIPGISKVAAAAIIAEIGIDMSKFPDPEHICSWAGLSPGCNESAGKTKSTKTRHGNPYIKSILCEVAWTVTRRKGTYLSNWYWKVKQRRGTKKAIIGLARKILVIIYTLLKENLSYDEDKFTEIQVNHEKQREKKLIRELKKRGYMVEPLIA

SEQ ID NO: 62790 - protein, 340 aa, unidentified
MEELYVGLDLHSRNTYTGIMTKDFKRVFGKRLTNDLPVIVGALEPFRNDIQGIAVESTYNWYWLVDGLMDAGYDCLHLANPSAIKQYEGLKHVDDKSDSFWLAHLLSLGILPEGYIYPKEERPVRDLLRKRSFLVKQRTSHIHSLKSMIERNTGERISTRKLTGPDRIDLEQLLKEEYLFLSANASRSNIKFLSHHIKIIEKAVRKKIEIKKGFEFLKTVPGIGDILALTIMLEVGDINRFPKVGDFSSYCRCVSSKWTSNGKSKGKGNTKNGNKYLAWAFVEAAHFAQRFSPTIKRYYQRKSAKRNEIVGRKAIANKLARACYYIMRDKVPFKEDASFC

SEQ ID NO: 62791 - protein, 345 aa, unidentified
MKIVGCDLHTRYQQVAMLDQETGELVERRLEHESGEARAFYAALCAPVRVGIEATGHTRWFERMLAELGHELWIGDAAQIRASMVRKQKTDARDAAHVLDLLLSERFPRIWRPTLAERDLRQLVWHRQKLVWMRNAVGNQLHALAMGEGVCRKKKMFTKKGRAELESLALGPWASHRRHELLEMLDQLDESLHELDQAVEQQAEQNADAVRLMTHPGVGPVTSLAFVLTIGPVGRFERSKQVVSYLGLNPREHSSGGRQRLGAISKQGNPMMRSLLVEAGHTAARLDPELRQDYQRLKLRRGSGVAKVAMARKLAVRMYWMLRSQAGYAQLVRMQGSPWATLVKE

SEQ ID NO: 62792 - protein, 430 aa, unidentified
MKSNTQNAKIEAITEKTLVLGIDVGSEMHYARAFDYRGIEYSKKPFKFSNTEAGFVTFKEWILDLKERHEKDKVIPGMEPIGHYWFNLGKFLQDNEMKPVLVNPHHVKKSKELDDNNPTKNDRKDPKVIAGLVREGRYMIPYLPDGVYADLRTASNIRFQLQAELTRIQNRISRWFNIYFPEYKTVYGKPDAKSGMLILKAAPLPEDILTLGIDGVNQIWRDAKLRAVGKARAKTLIEAAEHSVGSKEGAVSARMEIRMLLEDYESRNTRLQEVMVLIEELVRKIPMAEKLLEIKGVGIRTVSGFLAEVGDISRFNNPKELQKLAGLALVENSLGKHKGETTISRRGRKRLIYLLFEVAMSLVSKNQEFRELHNYYTTRRLNPLKKMQSLMAIAAKLIRVFYAMLTKGVDYDPKKMVSDIKKPAVYLQAA

SEQ ID NO: 62793 - protein, 453 aa, unidentified
MRGETMVWRSIGIDLGIKTTHEVVALDLGEQEPQARFRCGHGYEDLEDMLQRVQVGLMPGGKLRFIMEPTDTAWVPVASFLQAKGHDVYLVKSEMVKDQRRVLKKHAKTDQIDALTLAKLPLVLPEALHRLLLADSRLEALRRRVKQAYKLTQSITCRQRRIRATVRLALPVGSDEIDLFSAVGQTLSTGCLDPYGVVQIGLWPLERALQHQAGTQAGTEAAHQWFLACQETLKLYGQSGPVDYDELQDECEMEFELLHLEQQHLKRVQERIHSLYLELHPSRNLETLRGVGPYVAAVAVAAIGNPKRFSSVRKFRAYTGMIPKVSASGQSESKRTSLSKAGPNWLKRALFLAADVARQWDPQLAKIYYDQVERYGHHHFHAVCAVASHLADRIFVVCRDDKPYELRDPEGKPITPADAKAYINAHLRVSAETRKRLRKQNKGKHRPRKLGAS

SEQ ID NO: 62794 - protein, 396 aa, unidentified
MNKIVHYIGLDVHKETIAVAIAPQNSTEVRRYGIIGGTLEAIDKLRKKLAQEGVELRFVYEAGPCGFVICRHLRAKGIACDVVAPSLIPKKASDRVKTDRRDADQLARLFRAGELTAIHVPDQEDEAIRDLVRARTAAVVDQRRARNRLKGFLLRQGFRYTGKSSWNDAHKRYLSSLIMPQPAQQIVFQECIHAIDDAAERVQRLTQAVEDALPGWKWEPVVKALLCLRGVQLLTAMTLVSEVGDFSRFEDPRSLMHFFGLTPSEHSSGDKRVQGGITRCGNTHCRRVLTEAAWQYRLKPQVGAAMQKRQEDQCKDARQIAWKAQQRLHKRFLRLSARKKSVVAATAVSRELVGFVWAIATQVKPARQTAAPQIARTCRSKVYRLDPDKAYVNKTK

SEQ ID NO: 62795 - protein, 416 aa, unidentified
MKQTQNTRGYERYFAIDTHREYHLVGGQNEDQKWVVSPRRVSIEKFAEWAQQNFRAGDIVVLETTTNVWDTYDIVAPLASRVLVANAAAVGEIAGARVKTDKEDIKRLLKLLVGGIVPEVWVPPAHVRELRAFISYRNRLVKMATMIRNRLNSLLHKHSLMLPEEGILNQAWWDAQVSISTLEKMQIRQELGLLDEIKKRQAAVNEELEKQSTGELWGKQALQLMQLPGVGVIVAMTVLSAIGDITRFEDAKHLVGYAGIGAGVHDSGKTHKEKHITKKGRKELRWIMVEAAWRAVRMSPYWKDQYEKHLRRMRKPTQAIVAIARKLLVAIWHVLTKEETDIHASEDDLAYKMLLLSWSLKDNVRMGLTYKQFAKYALMKLGVENDITRFVRREVPRRLAPREEVLMRMTELGIAQ

SEQ ID NO: 62796 - protein, 411 aa, unidentified
MQDKFQWYVGIDWATEKYDVCVLDASGREIAKRVIEHSGSGIAELLDWLTELAGRKPEAVAIAIETPRGAMVEGLVERNFAVFAINPKQLDRFRDRYTVAGAKDDSLDAFVLGDSLRTDQPCFHRVQLDDAQRIRLRELSRIEDDFQSQSNRLSNQLWEQLHRYYPQMLSLSSAANEAWMWDLLELAPQPSEVGSLKLAVVKRLLRSYRIRRLSAEQVLSILQRPALRLAPGAAEAAGEHALLLLPLLRSVHEQQQQVSRRIRRLLEQLSRPATEHSDAAILLSLPGVGQSVGATMLAEASQPLAERDYHALRCYAGIAPVTRKSGKRKVVLMRYGCNQRLRNALYYWSLASIQNDPWARAYYAELRARGHSHGTALRMLGDRWLAVLVAMLKTRTLYDPGRRLQPQAQAS

SEQ ID NO: 62797 - protein, 329 aa, unidentified
MNSTTIGLDIAKYLFQVHGVDGKGKVVLRKSLRRAQVLAFFANLDACLIGLEACAGAHYWARELGKLGHEVRLMSPQFVKPYVKGNKNDANDAEAICEAVGRPNMRFVPVKSVESQDILALHRVRSGLVKARTAEVNRLRGLLGEYGIVIGQGLILEDGENGLSFLVRELFADRYRQILELDRQVAAYGAKLQGLYQASAVCRKLGQVPGVGPITATAMAASLGDGKTFESGRQVSAWLGLVPKQDSSGGKPKLLGISKRGDTYLRTLLIHGARAVVKTAAKKTDAQSRWINELVKRRNANIAAVAVANKNARLIWALLRRDEGYRVRA

SEQ ID NO: 62798 - protein, 347 aa, unidentified
MNYIGCDCHISTLDCAVVNERGQETKKQKMNTGVKGLMEFVKSIPKPRKIIIEEGTLASWLLEVCTAYGEDLIITDPKTNRWIGRAGQKNDTIDASKLAQLARGGYIKEIHHPIGHRRRFRELVMSYHDTVKSQTRIKNKLKAKFRQNGIKCSGETVYSAKYREEWKKRLPNEKVVEVMVTGLWQQLDQVHEVQEELLTHIRKQGRQYAEIKRLKHIPGVGTVHAATISAIVETPHRFANKKKLWMYAGLGLAEKGSGEKVYSRNLTRSYNRLLKSALKQAAKAAIIARDNQFRRQYLRLTLEQGIPSHRAKLTVARSMLATIYGIWKSGEDYDPTIDKKRTESDNT

SEQ ID NO: 62799 - protein, 341 aa, unidentified
MTASSPSLFVGIDIAAKTLAAAWLRPGEAVSRPITLAQSPPGFATLHERLGQTGCVPAAIHVVMEATGSYWIALATTLAHTGYRVSVINPAQAHHFAKALLKRAKTDAIDAQTLAHLAALLQPALWTPPPAVYYEVQQRLAQRDALLDVQRQLMNQLHALLFAPLVVASVKARMEELIETLGQQIRALDAEVREALAADAAWAASAARLQSIKGVGLITAAWLLVTTLNFTICSTPEAAVAYAGLAPNPYESGTSVRGRPRIGHTGNGRLRTALYLATLSAAQHNPVIKAFYERMRAAGKPAKVARCAAARKLLHIAWAVVCREQDFDPEYAQRQIQPVAA

SEQ ID NO: 62800 - protein, 353 aa, unidentified
MTSALLDLQEALVCGVDAHKSTHHAVVLNRLGVRLGDREFGTTAFAHQQMLEWMTEFGSISRVGVESTGTYAAGLTRHLRAEGVSVVEINTPHAHTRAHKGKDDAIDAEAAARKVLAGEAMSEPKDTTGAIESIRVLRVARDSAVKSRTVALTQLGDLLVTAPTALRESINAATNRGKASQCAKLRPDSARVGEPLHAAKFALRALARRIASFDAEITELDRHLERLVARAAPTLISKVGIGIGNAAQLLITAGQNIDRLTSEAAFARLCGVAPIPVSSGRTKRMRLHRGGDRQANRALYMIAICRLKYDPKTITYVERRLSEGLSKKDAIRCVKRFIAREVYNDLKHDLNTT

SEQ ID NO: 62801 - protein, 363 aa, unidentified
MFTERTSVGLDVHARSVAAAAIDSVTGEVQQTRLTPSYEHIRSWLSQLPGPVAVAYEAGPTGFGLQRALTEAGIRCEVVAPSKLQKPSGDRVKTDARDALHLSRLLRLDEITSVSIPTVSQEAARDLVRAREDCRGDLMRARHRLSKLLLRHGIVYYGGAAWTGAHDRWLRTVAASQLAAPATRMAFDADYDHVLTMQARRGRLDSAIEEMAADGEFAPIVRRVSCLRGVNTLTGFALAVEIGDWNRFTGNTIGSFVGLVPAEYSSGSSRAQGPITKTGNAHVRRLLVEAAWHHRARYHVGAVMRSRWDRASAAARARGDEGNRRLHGRWVGFLERRKRPVVANVAIARELAGWCWSLAVMDD

SEQ ID NO: 62802 - protein, 356 aa, unidentified
MRSESKYIGLDVHKETISIAVLDGGGKLVMESIIETEAATILQFIQGLRGQLHVTFEEGTWAAWLYDLLKPHVPRLVVCNPRRNALLKEGSKSDKIDARKLAELLRGELLRPVYHGENGLRMLRELARCYWTLSKDMTRVMNRTKALYRSWAIPCGGVGVYDPRYREQWLEKISEAGVRRRAEIFYEQLDGLRPLRQKARCELLRESRKHKASKLLLQIPSIGPLRAALLVALVQTPHRFRSKRQLWAYSGLAVKTHDSAQYRYIDGQLQRSKKPQQLRGLNKNHNHQMKEIFKSAATHAARCAGPLQDFYAGLLDKGMEPEMARLTLARKIAAIALTIWKKGDSFDANQLKAQAA

SEQ ID NO: 62803 - protein, 321 aa, unidentified
MTYVGIDVSKATFIVAYSSAKSSKTKTFKNTTKGVHEFIQTLSANEHHCVLEATGNYSSLLVYLLSQANITVSLENPLKIKNFARVMLSVTKTDETDARLIALYGQRMQPSPYKLRSDAILTLKQKRTVIRQLKKQLIATRNLKGSMEALPFFDPKCKKAIEKTIVFLEKQTKGLEEELAALAQSEYKKQIDLLTSIKGIGVTLAAALIMATGGFTYFDNAKQLTRYLGLSPTYQQSGTSVNVKGHINRNGDSSLRGQLYIAAMASLRCNAECKACFDRLRSNGKPGKVAVVAVANKLVRQAFAVVTQEKPYVDGFKSKKP

SEQ ID NO: 62804 - protein, 354 aa, unidentified
MSQNPNAGIAIVGIDIGKNSFHIVGLDQRGAIVLRQKWSCGQVEARFANMPPCLVGMEACVGAHHLSRKLKEFGHDARLMPAKYVRPYSKGQKNDFRDAEAIAEAVQRPTMKFVATKTADQLDLQALHRVRERLVSQRTGIINQIRAFLLERGVAVRQGQRFLRAELPRILATPPNVLSPRMVRIIENLAGDWRRLDERVQNLSDEIEAVARQDAGCERLMSVPGIGPIISSAMVAAIGTGGGFSKGRDFAAWLGLVPRQMSTGDRTILGKISKRGNRYLRVLFVQAAWVVLIKPKSWERHGLKSWIEAAKKRLHPNVLAIALANKLARIAWGVLARGRNFEARTNTNATVQAA

SEQ ID NO: 62805 - protein, 421 aa, unidentified
MLILYQRCAAIDIGKDVIAVAVRLPGDGAEHRQTIKQTFKTFYGVLKHAARWLTEQQVTHVAMEATGIYSMPVYHALIEHGQFEKVLVCNAGHVRNVPGRKTDLSDAEWLVHLLECGLLRGSFIPPAQIKAARDVIRYRTKLTESRTSELQRLGNVLQDAGIKVDSVASTITTQSVRAMVEALIDGERRPLLLAELAKGRMRAKIPDLQRALEGRFDDHHALMCRLHLDHLDYLDEMIARLDTQIQDMMQPFRAQRDLLTSIPGIGPFAAAAVISEAGADIAETFPSAGQFASWIGVCPGNHESAGKRHSGKPRKGNQHLQHVLVECAWAASRTPGYLQSLYRWHVRKFGGSRNPTAKNKAIVAVAHKLAIIIWHVLATGKPYTDLGADYLDRRVDPAKETRRLIARLQALGHTVTIEPAA

SEQ ID NO: 62806 - protein, 345 aa, unidentified
MEIRTIGIDLGKTVFHFVGVNARGEVVVRKKGSRTQLLRFTSNLRVCLIGMEACGGSHFLGRALGEQGHDVRLMPAQYVKPYVKTNKNDYIDAEACAEAVTRPTMRFVPIKTDDQLDLQSLHRVRERWVVRRTAVINQIRGMLLERGITIRKGRHHIEESLPGILEDPDNKLSGALRVLLTQLRSEMQYLHGQIEETDKLIARICGELEQCRRLVAIPGIGPITATATVAAIGNGAAFKKGRGFSAWLGVVPGEHSTGGKQKLTGTSRRGNKYLRKLFVQGAHSVMLQSTKQSVGLSMWLSHLTARKRKQVATVALANKMARMAWAVLFKGEDYRPPTVSQVIAA

SEQ ID NO: 62807 - protein, 420 aa, unidentified
MSLPVGDAVCYVGIDWAAASHSVCVLDPDGERRAEFTVEHSAAGFAELARRLGRFGEAGDVPAAIERPDGRLVDALLQAGHPVVPVSPNAIKTWRESEVASGAKSDAGDAYVIADYLRCRARRLTPAVPYSVETKALRTVVRTRDDLVDMRVAATNQLSALLDTHWPGAKAIFADVESPIALAFLTRYPTAAHAERLGEKRLAAFCAKHGYSGRRTASQLLTRLRAAPAGTTDATVCEALRDAVLALVRVLTALGGALKDLARSVAATLGEHPDSEIFTSLPRSGQINAAQMLAEWGDARQAYDGPDSVAALAGATPVTKASGKHRAVHFRWACNKRFRLAVTTFADNSRHASPWAAKVYAEARARGHDHPHAIRVLARAWTRVIWRCWVDGVPYEPDRHAAARRLTQQDPPEREDQHAA

SEQ ID NO: 62808 - protein, 475 aa, unidentified
MNIKGTKKKNQVVTANIFEQQELLKKAEVVKENLTASTWRELETNGKFDKNKKLSFISDDMLILGCDVGSETHYMRAIDTRGRELSKSAYSFNKNQEGFQSAKEWAVRIAAEHDKSQIVLGLEPTGHYWFCLATWMIANGISVVQVNPYAVKQTKEVEDNSQLKDDRKDPKLIANLVKDGNFGMPYLPEKIYAELRRLSMFRDQLNEDRIRTINRMHREMKIYFPEYKEALGKVDGAFSLELLKEAPFPDELTALGEEGIRQIWHAAKLRGRGYSRAREILQYAKASVGIKDGSIASKAAVKWFVQKIMELDVELAVIENQINQKCQEIPHTGNVLEISGIGENTLSGILAEMGDISRFDDVKEIQKLSGLGLVACSSGKHKGETKISHRGRKRLRYWLFQAAKSAVAHAEEFKELHMYYTTRADNPLKKMQSLIVIACKLLRIIYTILNTGTKYAPKKMLMDIRRPENKEAIVA

SEQ ID NO: 62809 - protein, 420 aa, unidentified
MDEITEEPAALVERIAALDIGKAALTACVRVPHEDKPGARRQQVRTYAALTPALLELRDWLTCQGVTRVVMEATSAYWKPPFYLLEDGIECWVVNARDVKNVPGRPKTDRLDAVWLAKLAERGMLRPSFIPSRPQRQLRDLTRYRRTLTQERTREKQRAEKLLEDAQVKLSSVISDIFGASGRAMLAALISGQRNPHELACLARGSVRAKTSVLQEALTGHFTDHHAFMLTMMLARVDALTAQIDTLTTRIEEAIAPYAAQVAQLDDIPGIGVIAAQDLIAEIGTDMSRFPTPGHLVSWAKFAPRARQSSGRSKAASTGKGNPWLGGTLGEAAISAARTRTFLASRYKRIVRRRGKKRALVAVGNSILTIIWHLLSDPAARFTDLGPDWHDRLAPLRRKRQLIAELERISGKKVTLHDAA

SEQ ID NO: 62810 - protein, 342 aa, unidentified
MLGSDSHKRSHTVVATDLNGRQLGQVTVRATPAGHLELVRWAQQWSERSWALEDCRTLSRRLEADLVRAGERVVRVSPKLMAGARRGGRQPGKSDPIDALAVARAALREPDLPVARLDGPERELRLLVDHREHLVTERTRAQNRLLWHLHDLDPDLALPAGALSKLRTCEQVRELLAGHRGVVAEIAIELVEVIVGLTVRINTLERRIATVVTPLAPGLLALAGCGALSAAKILGETAGIDRFRSRAAFARHNGTAPIPVWSGNATRHRLNRGGNRQINAALHRIAITQARIHPPARDYLTKRLAAGDTKTEALRALRRRISDEVYRRLHHDNTATSLTPAA

SEQ ID NO: 62811 - protein, 418 aa, unidentified
MDTIVECCAGIDVGKGEVVACVRGPGPGGERVKQTRSFSSFTGDLEAMAAWFAAEGVSEVAMEATGSYWKPVWAVLEDRFDVKLVNVRHLKILPGRKSDVLDAEWIAQLLEHGLLRGSFVPPRVIRELRDLTRYRKRLVQTHTSECQRIQKTLEDAGIKLDSVASDVLGVSGRAMLRALVNGERDPVVLAELSHGVLRKKIPELRRALKGRFTAHHGLLIGMSLDHITHLEATMARLDSEIDQVFQANTSEAGLPFVRARDRLDTIPGVASRAAEGILAEIGVDMSRFPTAGHLASWAGVAPGNNITGGKRRSGATNNGDVWLRDLLVQCAWSAARTRDTYLSAMYWRLAKRIGKKKAAMAVAHAILVICWHLLTNDVDYHDLGADYFTRRTSPDNHRDRLVRQLHGLGYQVTLEHVA

SEQ ID NO: 62812 - protein, 339 aa, unidentified
MKVINQNVGIDISKETLAVCIVIMYEDFSVKVKGSKAFMNSKIGFKQMLTWVLSKRIPEIRLSFTMEPTGVYYENLAYFLYAKKEIIHVVLPIRAKRYAESLPGNSKTDKLDAKSLGRMGVERKLGVWQIDTPIYRNIKQLTRERDALIKERTNVKNRLHALDHSVSPYKKSLTRLKSLIKYLDKQIKVIEKDIYTLVTSDEWLRKKVEYIISIPGVGFLTAIIVIAETNGFALIKNIKQLVSYAGLDVKIRESGAWKGKSKISKKGNVHIRKALYFPAYTNMKHSNNYMGLYSRIFAKKQKSLIAATATQKKLLGLIYTLWKNETVYVENYQQQKKVA

SEQ ID NO: 62813 - protein, 337 aa, unidentified
MKNASSEKVFKACLGIGIDVSKAELAAVGITPNEAYLKCVSNDMEAIKVFIKGLHQSGYRGKVVCESTGHYHLKLALVCHEIGIELIVLNPLQSSKHSKANIRKTKTDPQDALMLATMCITEPNLPQPAQLTVPKVLIRLKMGQLASIEKHLQQWQQSLAQYEETYAGLSLALSDHQQALRAHGSSLKRVRKQLEKELELLLSQALADDESLADLRDIPGFSNVVAGLVGILDRQVKGADSWAAYVGFDVSVRQSGTWKGRGRLTKRGNAYMRKRLFQAAWGACLNYDYVRAYYDQLKAQGRKHAEAVCIIARKLLRIAYCVVVKKVQFDPKIAFSN

SEQ ID NO: 62814 - protein, 340 aa, unidentified
MKKILFIGIDFSKSKFDASLLKSMSDEEVVSGSFENNRGGYVLFLKWVSDHTRIKKEDWLFCGEHTGLYSRDLAEFLSKKNLTVWLENPYQIKCSCGIKRAKTDKIDALEIARYAYRFQDKCTPYQPVDKAIESLSLLLSYRGRLIKEKVLLEVSAKETRRVISRDTTSRFVFENSMRNIERIKKEIKAVEEKMHQILMDSPLKENYLLTVSVKGIGLVTAVALIVHTNNFSTFNTARQLACYCGVVPFEKSSGTSLNRGKHISHLANRELKTLLTLCARCAIEHDKELNVYYHKKLSEGKEYKVIINNVRNKLIHRIYAVVTHKMPYMENYLNPFRKCA

SEQ ID NO: 62815 - protein, 342 aa, unidentified
MREASMSEISILAIDLAKGSFQVCGVKADGAVVFNKSMSRPRLYQLLADHAHCAVAMEACATSHHWGRVAQSYGHEVRLIPAAYVKPFVKRQKNDRADAEAIAEAASRPSMRFVAVKSAEKQGRAVAFRTHQCFVRQRTQLINALRGHLAEFGLVAPKGPASLKLLERALAQPDVDLPSPVREMAALYLDQICRLTELIEQMADELDRASKTDEELRRLCTVPGIGPVTAGAIAAFAPDLSTFDSGRNFAAWLGLVPRQRSTGGKARLGAVSKMGQCDIRRLLIVGAMSVIRWVVRKGGSANRWLAELVLRKPRMVAAVALANKMARMIWAMTTKQENYRMA

SEQ ID NO: 62816 - protein, 383 aa, unidentified
MKAVCGLDVHKDSIFLCILHSDGELFEQVFGVLTFQLEEMRKLLQKHHVSEVCMESTSIYWIPIWRVLSPHFTLRLVNPYFIKQLPGHKSDVKDAQWIAECTMKELVRGSFVPPEIIQQLRQYDRRIFDLNAEIVRKVSKVDGVLQRCNIRLSNYVSNIECKSYRDVVRRLSEGVTDPNELVKLVHGRIVNRHGADTILASLTGVVSQAEIDVLRQLHEEIDIAESHRDECQQRMLEICEKHFPEELERLQKIPGIKERAATSLIAEIGTDMSKFETANHLASWSGLRPRNDESNKKIKSRKITHGNVYLRNTIIQCAWAASRQKDCFFCRFSYHQTIVRRKNKMKVIVAVARKLLVAVWHVLHDKTDYVDFKPNREESANIG

SEQ ID NO: 62817 - protein, 394 aa, unidentified
MRYAGIDIGSERHVAAIVDERGETLVAPTSFGEDADGYARLLVQLGDPAGVLAAMEATGHYWQNLFAVLSSKGYTVALLNPLSTRRFAQAALVRAKTDAIDALWIAKLAAVKRPAPSRVPDELTRELREHVRLRDRLQQDLGDRVRELHRVVDLAFPELTRHLKDLGSLTAIAVLSAFPTAKSLAITSVRSVAQIVYDGRHKIGDELARTLITAAKSSIGQHQGPVYAREVKYFCEDIKVLRERLKEIDDDLRRAVDGHELATLLTTIEGIGPNTAARLVAELGDPAEWKSAGALAAHVGVVPQLRHSGKHAPLRAGIGSLGDRRLRHALWMPVLGAVRRNPWLRHHYRRLRANGKLAKVALIACMRKLLAAIYSVAKHRRAFEPRVPIASSPA

SEQ ID NO: 62818 - protein, 387 aa, unidentified
MYFVGIDISKFKHDCAIIDELGDTVTPSRSFPNDREGFSHFKALLDSLEGEKKIGLESTGHYGQNLKQFLESNGFTFMEFNPLLVSRFVRSKSLRNTKTDSIDALSIAHYVMTVEYKPYPSSFYHLDKLKSLTRFRNSLVRQRSKQLVELTNVLDKLFPEFKPFFKDKFSVTALYILAHYQTPERIANMNARSYEALRKLSRGRFTLSNFIQLKALAKNTVGTQSDYLLDQMNILLELYSQLDSKVDELEAQIKECVRGIDPPCLSIPGVGELSAAMILSEFGDFSKFQNPSKMLAFAGLEPGYFQSGQSEYTGHMVKHGSSRLRYALMNCCLPLISNEPVFAAYYAKKRSEGKPHRVALTHVAKKLLRVIYTLQTKNIRYDPTMIH

SEQ ID NO: 62819 - protein, 360 aa, unidentified
MEMIGLDLHKRESQLAMKAEDGTITDRRIATSRARFTAVLGDRPPARILLEASTESEWVARHLESLGHDVIVADPNYAPMYANRSRRTKTDKRDARTLLDACATAAYRPAHRLSEPRRHVRAELAVRDALVRTRTRYIALAKALVRRDGLRVPTSASAWVPARIAELDLSPALTAELAPLFAVYASLNEQIAAADRRIAIGVASDPIVARLATAPGVGPVTASAFVATIDDITRFRSAHELEAYLGVVPSERSSGEKRQLGRITKAGNGRLRWLLVEAGWQILRSKSPETAALRAWTRTIAQRRGKRIAVVALARRLAGILYAMWRDGVPYDAQRIRPLARAVPRAADQRAGDHPGERAG

SEQ ID NO: 62820 - protein, 388 aa, unidentified
MSATDHLIVGQAAIRMNLGAIFISMELSRTNWLLTSLSPGGGERLSKHVLRSGDVAGLRSRFSQLRDKVRARIGRTVPIIVIQEAGLDGFWIHRLLQGDGIESYVVDPASIATSRRRRRAKTDKIDGEALVRALLAYKRGEPRVCAMVRAPTPQEEDRRRICRERKTLTAERVEHVNRIKGLLFAQGISHYEPLLRWRRERLEELRTGDGRPLPEHLKAQIERELDRLELVLQQIKRVEAERDALPSVSDEGRPAPAVMLKQFKGIGPEFAGVLSSEALFRNFANRRQVAAYAGLAPTPWQSGSVALEQGVSKAGNPRLRTTMIQLAWLWLRHQPHSRLTQWFHQRVQLNGGRVRKVLIVALARKLLIAFWRYVTAGVVLEGAEITAV

SEQ ID NO: 62821 - protein, 473 aa, unidentified
MVVFDQPRLRAFSYNTGSEQSHFHFITLKLQIMRPKKAFTILQPNAAGIDISSKEHFVAVNPDYADPPIRSFGAYTEDLHNIAKWLRECHVNTVAMEATGIYWVNLFLVLEDAGLEVILVNARHVKNIHGKKTDMKDAEWIRQLHSCGLLTGSFQPDTFTRKLRTYMRHRKNLIDMSATHIRMMHKALEQMNIKLQHVITDITGRSGQDIIKAIITGERDPEVLASLCDGKIRKSKKPEIIKSLFCIWKEEHIFELKQSFELYHYYRRMIAECDEEIKKHLYLKSGSEVITPEKITAKSNKNNFSFDGRDVLNKILGIDITACYGLTETNTIEILSEIGFNLNKWPTVKNFTSWLNLAPNNKITGGKVIKTRIPKKKNQAGQIFKMAAYSIQRSNHWLAHFYHKIKSRSGPGKAVVATARKLAVIFYHMVKEQKEFNPTTNEQYLKRQKEYQVKRLNKQALRLGMEVIPIQVT

SEQ ID NO: 62822 - protein, 371 aa, unidentified
MKNNSIFIGMDVHKNSIDIALAHKGRNGQVLHYGKIDGSLAALDKFVRKLISKGHDPHFVYEAGPCGYQIYHHLAGQGFACDVVAPSRVPKKSGDRIKNDRRDALALARLHRAGELTAVYVPVPEDEAIRDLVRAREDAKADEKKSKQRVLAFLLRSGKRYTGRSLWSKAHINWLSDVKMPHRSQQIVLQEYIDTVNQCQARVQRLTDQIRQLVQQWRMFPVVKALQSLRGVSLIVASTTVAELGDMKRFQNPSELMCHLGLVPSEHSSGQKTRRGSITKAGNTHVRRVLVEAAWAYRLRARVSRALLKRQEDLPQHIRDIAWKAQLRLCSRYRHLWAKGKAKQLIVTAIARELCGFMWAIANETQLPDAI

SEQ ID NO: 62823 - protein, 329 aa, unidentified
MKETTTVGIDVSKDSFDAHIDSTSQFLHLENTPAGIQFLLEALKELSVSLVVMEATSKYHYLLASMLTEAGLAVAVVNPRQVKNFARALGKIAKSDPIDAKTICEFGKRMQPAARPLKANELQELSLILARRRQLVQTRTMEATRCQEKPSPFIEQGIAKHIAWLNVEINALDHEIKLRLKESEELTIRRKLLDSVKSIGPVTQAVLLTQLPELGKLNRRQISALVGVCPYDRDSGSLRGKRAIWGGRSGVRAMLYMAMLSAVRYNPQIKLFYTNLVSRGKPKKVALTACIRKFITILNAMVRDSKEWSAEQQTLGGGKQVSAYGSLGS

SEQ ID NO: 62824 - protein, 341 aa, unidentified
MDYYAGIDVSLEYSSVCVVDASGKIVREDKVASEPEVLAAWIRSLGLNLVRIGLEAGPLSQWLYAGLREAGLAVELLETRHVHNAFKTMPVKTDRKDARGIAQLMRLGWFRPVHCKSMGAQETRAVLTARKLLQKKLGDVEASLRGTLRGFGLKVGKTTPKRFAERVKELVVGHASLEAIAEALLAVHAVLLREFNGFERRVRTMARHDAKAQLLMSTPGVGAIVGLTYASAIDDPARFKSSKRVGAHFGMTPKKYQSGETDYTGRISKNGDKGVRTALFEAAHVILTRPVKGSALKSWAMRLAKRAGMKKAKVALARKLAVIMHRMLVDGTTFDFAAAAA

SEQ ID NO: 62825 - protein, 355 aa, unidentified
MKYYTSTTEFNCGIDLHAHQMYVCLMDRQGNKLLHTNIRNNDFAYFLQRVEPYRHDLTVCCECMFGWYWLSDACQAAGLKFVLAHALYLKAIHGGKNKNDRIDSEKLAHLLRTNLIPPAYVYPASLRPLRALLRQRAYYVWSRADLLARIQSHQLAHNRPALRQTRPNRQPWETQLLAAEPDPLRQWALQNDLAMIRHYDVQITALEEQLHRLTQQAAPRDYALLQTVPGIGEHLGLTLLYEIGDIERFPTVKDFLSYCRLVKGTVASAGKIKGLRGAKLGNPYLRWAFGEAAIIAKRDHAVLGPLAQRLEARLGGNKFKANTVLAIKLARSVYFMLRQHTVFDPDRLVAALARN

SEQ ID NO: 62826 - protein, 377 aa, unidentified
MVPLQSCPIARPPGPHPPAERAAVQQPERAAEVIIGVDTHKDTHTAVALNALGARIGAITIPVNQDGYRQIEAWACAFGSVRAFGIECTGSYGAGLSRALQASGHRVLDVNRADRSARRRHGKDDPLDAEAAARAVLSGQATALAKSGISSVEMIHHLKLARDSAVKARAQAMQMLKALIVSAPAELREQLEGIRGKVRFVRHLAALRPGPMTSTTASAKVGLRALARRWLSLSEEIEAHDRDLGGLTAAHTPELITAPGIATGTAAEMLILVGDNPERIRSEAAFAKMCGTCPLPASSGKTSRHRLNRGGNRQANAALHRVIVTRMRCHQPTIDYVRRRTAEGKTKAEIMRCLKRYVAREVFTHLCKPRQSTSETP

SEQ ID NO: 62827 - protein, 465 aa, unidentified
MTKRGQRQASAQRSSKVSRNLTMLNPNAAGIDVGASEHYVAVPAERDEQPVRCFGAFTEDLHRLAQWLRQCGVRTVAMESTGVYWIPLYQILEDYGFVVKLVNARHVKHVPGRKSDVQDCQWLQQLESFGLLSGSFRPEAKICILRSYMRQRQMLISNASRHIQQMQKALTQMNLKLHQVISDLSGQTGMRIVRAILQGERDRLKLAALKDPHIKSSLSTIAKSLEGDYRAEHLFALRQAVELYDYHQQKIAECDQEILKEMQSLESRAAPGSVPPPPLKRKGRSRHNLIPYDGRAELYRIMGVDLTRIDGLNEGTVQLILSELGLDVCKKWPTEGQFSSWLGLCPNNEISGGKVLRRGTRKVVNRVANALRMCAESLLNSKSALGAYARRMRAKRGSQIAIGATANKLARLIYRTLTYGQEYTDIGQEKYETKYRENVIKSLQKRARHLGFQLVDLHPVSVRVP

SEQ ID NO: 62828 - protein, 369 aa, unidentified
MNATTAPAKDATVVGVDLAKSVFQLAVANGSWKVVASHRLTRTQFERWFGNRRVDLVVMEACGSAHHWARWLNALGVPVKLLPAAYIRAYVKRNKTDAADACALLEAARCADITPVRIKSIEQQALQGLHRTRSLWQSTRTSRINALRGFCREFGMVIAQGSRLGVEQISRALADPHSAVPALIRRTMQLVVEEIRLLETRISQLERELTLLARQSAACTTLLSIPGVGLLTATAMVAATSGNVQHFRDARHFASWFGLTPKEYASGNSRHLGRISKRGDRYLRMLLTHGARSVLRAASVAAKTGRTLDGLRRWALAVQGRSNHNKATCALANKLARICYATLRDAQPYGQPAPRLNKKIGRTAFALAT

SEQ ID NO: 62829 - protein, 308 aa, unidentified
MTTIYTGLDIAKLNLQLHFAGRIHDLPNTAAGHRRLLKLLAAQPGVQVVCEATGGYERDVVAALHEGSVPVSVLNPARVRHFARATGQRAKTDHIDAAVLSAYGQALQPKPTAPRTEQEQQLAELVRRRVQVVEILVAQRQQAERLTVPALRRQAQSLVRRLERDVAQIEEQLKALRTQAATLDARVQKLEAITGVGTITALGVLAELPELGTLNRRQAAALAGLAPHPRESGQWHGRRSIGGGRAPVRRALYMAALVAAHSNRQLKEFYQRLRAAGKPAKVALTAVMRKLIVLMNHILKNPNFALQN

SEQ ID NO: 62830 - protein, 373 aa, unidentified
MPKYSTAFGMDVHLRSTTVCALDADTGEAVTRRFPGNPWGEIAGWMDGFPGPSLAAYESGYLGFAPQRELAGLGVECVVAAVSKIPRSAADSASKNDRNDAARMAKAILAHDISPVWIPSPEVEGIRDLAGAYDGATARLATARQRLLAFLAKRGFVYGGTTPAGNPRKYWTYDFLRWLDKVRPEDDGGVRALAALRNEVEAAAEARADLLSEYRAAVDASPIAAEVAALQSIKGCAFALAAAFSAEVGDFTRFRSGRQVTAYFGLAPSQRSSGDSVRLGGISGAGNALVRKLAVEGSWCYAAARHQPKLMPRDTGVPLEIRMHGRKGSERLLRRREEMLARGVPAAKANAATAAELVRWLWALGMMCREGAE

SEQ ID NO: 62831 - protein, 350 aa, unidentified
MLHAGLDLSRKRLDVCLLCEHGELVEEFSAPPDADGLRGLVRHVGRHGMPVRAVIESMTGARFVHDTLEQLGWEVLIADAQKVKGLAPLACKTDKIDARVLAVLSERDLVPSIWLPDPHIRSEREQARFRLHLVKHKSMLKHRIHSTMLSFGHPCPVSDLFGVQGRELLEGSEIPDPWRQSVDASLELIDYLERQIAEINRDLKASGAEHPYVPLLLTVPGIGWVLAFTIASEIGEITRFPSAKKLCGYTGLCPRVHQSGESDRRGPLTKQGPKYLRWAMLETTMHALRHPAYSERYQRNKKRLGRQRGAKVAQIDIARKLTEAIWHMLTNNQPFAPTPASGGATSRLAA

SEQ ID NO: 62832 - protein, 431 aa, unidentified
MKGGDFMKNNFLSTLFVGIDVSSKTNVLCALDFQGDKLLNLKALNNQPGAESILHSILGCLNSNSLKYVVIALESTSFYSTHIANFLSSNEELLAYTPMVYCLNPKTIANYRKSFVDMDKTDPLDAFIIADFARCGRITSQPWRGAQFLALQRLTRHRLHLIESISREKAYMVSNIYLKFSQLAVVDKEDKPFSDTYGATSEAVLTEFLSLDDIAYSSLEDLVDFIRIKGKNRFSNPVGTAKLLQKAARDSYRLDKVLYEPLNISIASSFNVINALETEIKTIDKAIEKAIKGINTTEYQSLISIPGIGPVFASGILAEIGSITSFNSNDALAKYAGLTWRTNQSGNYTSDETNMTKTGNKYLRYYLIEAANSVRNKVPVFNEFYHKKYDEVTTHQHKRALALTSRKLVRLIFGLLTKNQIYSSNKAGEIQ

SEQ ID NO: 62833 - protein, 354 aa, unidentified
MTSTKYIGMDVHKESISIAVRNDAGKVVMESVIETKASTILQFIDGLRGNVHATFEEGTWAAWLHDLLKPHVAKLVVCDPRRNALLQEGNQNDRVDARKLAELLHNNQLRSVYHGDHGLRTLKELVRSYLTITQDLTRVMSRVKAIYRSWAIPCTGKQVYARRHRAEWLAKINEPGVHRRAEFYYQQLDALRCLRQEVRQNLLAESKKHPAWKRLCGIPSIGPIRAAVLLGILQTPHRFRTKRQLWTYSGVGIETSSSADHHVVKGQLERKKKAEVRGLNRNHNHDLKNLFKGAAIVAATKPGPFAEFYAELVAKGMRPEMARLTLARKIATIVLIVWKRGVCFDAQHLKPQTA

SEQ ID NO: 62834 - protein, 407 aa, unidentified
MDVLYPCCAGLDVHARQVTACVRQVADGVVTRQHQVFAATTDGLTRLATWLRDQGCTHVAMEATGVYWKPVWQQLDGTFALILANALHIKAVPGRKSDLNDAAWIADLLAHGLIRGSFVPPAAVQEGRDLTRTRKQLIREISRHTLRIQKTLEAAQVKLTHVLTDILGTSGRAILHALVAGETDPARLAALPRGRVKASPAEFVDALHGHVTAHHRFVLQTHLVQIESLERAVAALDARLAEQPAPFQAAVALLTTMPGLGDTAARAVVAEIGTDMTRFPTAGHLVSWAGLCPRLHESAGKRRSTRLRHGAPWLKTTLIQAAWAASRTKNTYLRSQFQRLKARRGPKKAMVAVAASMLTAVFYMLRNGVVYTDLGPRYLDEHDKTRLTTRLVRRLEALGNIVEIKAA

SEQ ID NO: 62835 - protein, 310 aa, unidentified
MTLTYRTIGIDISKASLDIFDKASGRANRISNSVSDIKAYCDTLPVDGVRVVFEATGSYDSCLRQALGDAGIVFLRVNPQQARDFARACGKRAKTDRIDARMLAEMGEAIELPQRPQPSPEHIQLAELQQRRDQLVADRADEKKRRQTASSSAVTANIGEHIAFLDRQIVAIERQIDTLIKATPRLADLFRRLIEVPGIGATTAVVLMAQMPELGSLSSKAVAALAGLAPFNDDSGRHRGHRRISGGRSRVRRALYMAALSAKSRVARFAAHYQRVVERSALKKVALIAVARKLLVAINAMLKSGEPFRA

SEQ ID NO: 62836 - protein, 428 aa, unidentified
MIKINPLSTLYVGIDVSSKSNYVCALDFYKNKYINSSFANNQPGAEELAQKILECLKEHPDLNTVVAALESTSVYSIHIANYLSSCEELMPFKPFIFVLNPKCTANYKKSYIGLGKSDPIDAFVIADYARAGNIETEPWRGSQFLALKRLTRHRLHLVECITREKAYLVSNLYLKFSELQMLEKDNQPFCDIYGATSSSVLTEYLSPEEIIESSEEELVSFLADKSRNRIKDISKTADLLKKAARDSYRLDKALYEPLNVSIASSFNCIETFKKEIKAIDIAIEREIKGLNPNAFIILQSIDGIGPVFAGGIVAEIGDISAFTSSDALAKYAGLCWRSNQSGDFDGEDTPMTKAGNRYLRYYLGEAANSMRKHNVEYGAYYRKKYNEVPKHQHKRALALTSRKFVRLVYGLLARNQLYSGVSLDTSNE

SEQ ID NO: 62837 - protein, 366 aa, unidentified
MKKIRLAEIPEQGGAPSPGRPVPGTAVSMAVDVSRSKLVYCLRWNGAEQRRLSTPAALKHLQAVVAQYRHCQLHVAYEACGFGYEPAWWLQEQQVAVTVIAPSRVERAPGLAVKTDRMDAGTLARKLEAGALKSIYIPPRTVHEQRQLGRTYAQCVRERQRAQIRIRSLLQEQGRIGPEPSAGWSAYQRWLAAQELAAPVRACVHAHEQLRALADHQASDLRHALAQVARSAAYRPLVHALCAQAGVGSLSAIRLVLELATIERFASGAALAHYLGLTPSQYSSGELDHRGHIVKSGPGALRALLLQCAWAAVRPGRDAALRAVFEGVALRRGRQRAIVAVARRLAVKLHHRWRAVAHPPDAAPAP

SEQ ID NO: 62838 - protein, 449 aa, unidentified
MDSYAGVDWAADKHDVRVCDEAGEGLLAATFAHDEKGLRALCRTLVRLKVQLVAIERSDGLLVERLLDAGLRVLPMHPKQVAAARARFRAAGGKSDRFDAFVLCELARTDSHRFRVLEPDSDATKALRALTRTREDLVHARVALTGQLRAELERFWPGPIGLFTKLDSPISLAFLERYPSPAEVRGLGERRLQAFLARQRYSGGQKPAELLAKLRRAPEGRVGEAELAARRALVLALVAAIRPLVEQIKELTEQIATALREHPDGEIFLSLFRDPRSVVTAAELLAEIGDCRARYPTRDTLAADAGQAAVAIESGKRKTAAFRWGCNKRLRGAFCTLADTTRHWHPWAQDLYASACGRGHDHPRAIRTLGRAWCRVVWRCWQDRTPYDPAKHRALQQHCTVTIPTSSGALPDLAATQRMLGAAVTGTAARRAEREALDGKPTPAIPLGS

SEQ ID NO: 62839 - protein, 411 aa, unidentified
MIKENYIYVGIDLHKETHTAVIIDCYNQKLGEITFPNRPADFPKLVTKVKKCNTDGKEVVYGLENAYGYGRALAVWLIDKGYFVKDVNTAISHRQAKHRGAMYRKSDSDDAKAIALATLNMLDKLPDACPNDAYWSLGQLVHRRDNIMKQRTRLVNQLHEQLCIVYPSYKQFFNDISRPTALYFWEHYPSRKYLKGKSVEDLRAELVPVSHNKCSTKTCEKILDAVASDKVKNNNFQDARDMVTLSIVSDIQHYDKQLVEVDKMLEQMYKMLGCTLTTIPGVNVITAVKILAEIGDIKRFGNANKLAQFAGIAPLHLSSSGKGKDVATKQGNRRLQATIYFLAIQMVQVSSKGIPRNPVVRAYYEKRKAEGKTSQQALICISRRLISIIYGMLKNGTEYRMPVVENAGENR

SEQ ID NO: 62840 - protein, 350 aa, unidentified
MPRYSTAFGMDVHLRSTTVCALDAETGEAVTRRFRGNPWGEVAEWMSGFPGPSLAAYESGYLGFAPQRELSGLGVDCVVAAVSKVPRSAADLSSKNDRNDAARMAKAILSHDISPVWVPSPEIEGLRDLAAAHDAATARLAAAKQRLLAFLARRGYAYGGTTPAGSPRKYWTYGFLRWLDGIHPADDGGIRALAALRNEVEAADETREALLAEYRAAVAAGPLSAEVEALQSIKGCGFALAAAFASEVGDFSRFRSGRQVTAYFGLAPKQRSSADSVRLGGISGAGNALVRRLAVEGSWRYAQAGHQPKLMPKGSGVPLEIRMHGRKGSERLLRRREEMLERGMPQAKAC

SEQ ID NO: 62841 - protein, 462 aa, unidentified
MPGREDSETGESSRRQLQGLPVIRRNVAGIDLGSERHWVCAPTRDGSGREIASFGATTAELLRLAGWLKARQVESVAMESTGVYWIAPHEVLEAQALQVLLVDTRQLARVPGRDKKTDPSDCEWIQRLHSCGLLRGSFRPEEAVCMLRTLVRDKANLVAESGDWLRRMQKSLDQMNVRVHRAVSDIDGVTGMAMLRAIAAGERDAQKLAQLRDRRCSKTQQEIAEQLTGHWREDHLFSLQQALKMYDAVQQRIAAYEQEILRQLGEMEEPGQQGQAAPPLHNANKTKAIKKRGQESKRQALYRMSGVDITQIDALGVETVEVVLSEYGPDLSRFPTEKEFVAHVTLAPRVPSSGGKPLKKKKRNSASTRVAAALRMAALSLRHSQTALGAYYRKLAQRLGGDVAVFATARKLATLIYRLLRWGQPYVDEGAAAYENRYLQQRIKSLTAKAKQLGYELTAVNA

SEQ ID NO: 62842 - protein, 351 aa, unidentified
MLIIGCDFHTRFQQIAMVDTTTGELVKRRLEHSTGEAERFYAALPSPARVGIEATIATQWFEKMLTRYGHELWFGDAAEIRAAMVRKQKTDDRDALHILDLLMQNRFPRIWVPSAAERDVRQLVRHRHKLVRMRTSVMNQLHALAMGQGLCLRKKLWTTVGRQKFESLTLDPWASFRRRELLQLLDQLDPSIEELNRAVISEAESRPTAVCLMQQAGVGPVTALAFVLTVGPVSRFANSKKLVSYLGLNPSEESSAGRQRLGAISKQGNSMMRSLLVEAAQTASIYDPELRRDYQRLKFRRGHSGVAKVAIARKLAVRLYWKLREAARPVPLAPMQGSPAVAVVGENLSCF

SEQ ID NO: 62843 - protein, 351 aa, unidentified
MNKEIISYRGKKVYVGIDVHKKTYSVTLICGTDVVARDTMQASPDGLGRYLKKRFLGAQIFSVYEAGFSGFGLHRKLVELGIRTIVINAASLQTAANDKVKTDKRDSKKLAEQLKDGRLKGIYIPSTTEELKRVLTRTREQIVRHRAKVATQIKSKLHYFGLIECDDDNKPMSAAYLKRIEEQKLPAELVYCLRLLGEQWKFLTMKLKEIADKITEQAKGDEELEKVYQSVPGVGNISARVLSNELGNLAERFHNERSVFSFTGLTPGEHSSGENVYKGNISRQGSSRIRKYLTEIAWRAIGKDDALEEVFNRIAKTRGKKRAIVAIARKIIGRIRACFRLGCLYQVGVYA

SEQ ID NO: 62844 - protein, 348 aa, unidentified
MLHAGLDLSRTRLDYCLLDERGDRVDVGAVPPDGDGLRGFARRVDLRHGPVPVRAAIESMNGARFVHDTLEREGWEVEVADAQKVKGLAPLACKTDRIDAWVLAELARRDLVPAIWLPSFELRAERERARFRLFLVHKRSSLKHRVHAQLLAFGHRCPVSDLFGRQGRELLARLEFPEPWRGGVLAAVAMIDDLDRQIAGIDTGLRALGADHAYVPLLMSAPGIAWVLGYTIASEIGDIHRFSSPTKLCGDTGLCPRVYQSGRTDRRGALTHAGPRYLRWALMEAATHACRHPVYRERYQRNKARLGKQRGAKVAQVDIARRLAEAIWHMLTTNTPFAPAGATVALAA

SEQ ID NO: 62845 - protein, 377 aa, unidentified
MKNVRFVGLDVHAETIAVAVAEKTGEVRSLGVIPNRAESVSRLIRKLGKPEQLRVCYEAGPTGYPLYWQLTQLGVKCEVVAPTLVPVKAGDRVKTDRRDAERLARCYRAGDLTAVWVPDAAHEALRDLVRAREAAKTDQLRARHRLSKFLLRHGRRAAEGVQAWTGKYWDWVKSRVHFEQPAQTATFIDYVHEVEHAAARIQRLEQAIDVAVETVPPKMRAVIEALQALRGVAQVSAVTIVAELGQISRFARARQLMGYSGAVSREHSSGARIRRGAISKAGNSHLRRIVIEAAWSYRHRPGIGKALAARQRGQSEAVKEIAWKAQHRLFHRYCKLMAVGKSKQQVVTAIGRELLGFIWAIGVQAEQAPQPRLAAAA

SEQ ID NO: 62846 - protein, 349 aa, unidentified
MLTREARRPVMEAYVGKQFVGIDLHRRRSVIVRTTAAGEVLESVRIVNDVERLASVMARAGEGPEVVLEATYGWYWAVDALQAGGASVHLAHPLGVKAFEYRRVKNDVRDATDLADLLRMGRLPEAWIAPPATRELRELVRHRAKLVGLRSHCKAEVHAVLAKCGVQVLMSDLFGLAGTELLDRLNLPAPYAARIDSLRRLMDDLDFEIDLFAGMVRGRMAREPGYTAVQVIPGIGPTLAAVFVAEIGDITRFTSAPKLTCWAGLTPKHHESDTHVHRGRITKQGSRLVRWAAIESVKTITAVTPAGALRERVADHRGRNIGSVAAAHPGLPPAGTPALTSAPPTPFSQ

SEQ ID NO: 62847 - protein, 350 aa, unidentified
MIIIGVDFHPEYQEIASVNTETGEYQEKRLAHPKEAEEFYRSLSCVGQVVRVGMEASGHGRWFERLLEGLGVELWRGDAEVIRAKRGRKQKTDREDARHILKLLLKDDFPRIWVPSWENRDLRQLLWHRHRMVQARTRVMNQLQAVALNEGLRCKKRLFRADGRQQLESFQLAPWASRRRRELLELLDRLNPTIAELSQAVEREAEKCPEAQRLMTHPGVGALTALAFVLIIGETERFQCGKQIAAYLGLVPLEKSSGNRRRLGHITKQGSSIVRFLLVEAAQVTVRSLPGWRSKYVHLMMRRGRKIAKVAMARKLAVRLYWMWRKGWDYEQWKKFGSYVGKPGHRYGVQ

SEQ ID NO: 62848 - protein, 336 aa, unidentified
MTVLATVGIDLAKSVFQIHGIDENGKILVRRQLRRSQLLAFFEKLPRCLIGMEACAGAHDWGRRLQDMGHDVRLMPPSYVKPYVKRGKTDAADAAAICEAVTRPSMRFVAVKTEACSSALVLHRTRDFLVRQRTQIGNAIRAHMAEFGIITAKGAHNVDRLKEQLDRLPEATRTPIGLLFDQLVETNSRIELLSGEIEVTHEQNETSRRLATIPGVGILSATAIAATTPDVSNFDSARDYAAWLGLTPKPHSTGGKQKVGRISKMGNRYIRRLLYLGAMAQIMVRRRRGLGADWLSGMLTRKKTKVAAIALAHRMARTIFAVLRDGTRYEPRAVTA

SEQ ID NO: 62849 - protein, 348 aa, unidentified
MRFYNETHPYYCGIDLHARTLYICILNSNGIVVLHKEIKPSTEKLLEILAPYMGEIIVGVECMECWYWVSDYCQNNNIKFILGHALYMKAIHGGKAKNDRIDSYKIAVLMRSGTFPLAYVYPEEMRATRDLLRRRTKMVSYRSQLKAHVKNTTSQYNIHAPSANLRHPKSRDSMRNIFKQACKPVQCSINLDLDIVGHINKELSKVERFIEKKAKQHSPQDYSLLRSIPGVGQILALTIIYEVGNIDRFESVQKFASYSCLIKCKAESAGKGYGTRGNKIGNGHLKWAFSEIAILYLRDNPKAKQYLKKLQKRMSKAKALSVLSHKLGRCIYYMLKNKSLFDEKRLLN

SEQ ID NO: 62850 - protein, 325 aa, unidentified
MDIIGIDISKAKFDIALLTGERTRHAVFSNTEAGFSQLLAWMVKHRSDPDVPLHACMEATGNWGLDLADFLHGQGVRVSIVNPARIRAFGQSELARNKTDKLDAAVIARFCRANVPPAWTPPAGHLREMRELVRRCDALKVARVQELNRQQAGFVSDAVAASITAYLEWLDKQIGAVTMKICELVAADPVLARNLALLRSITGFGEVSATILLAELPNIADFTPKALAAFTGLSPQEHSSGSAVRRPGKVSRIGNERLRSMLYMCALSAKRHNKALADFVQRMTNAGKAPKVILVAVARKILVHAHAVIRTQKPFQPFPEAPSSI

SEQ ID NO: 62851 - protein, 373 aa, unidentified
MPKYSTAFGMDVHLRSTTVCALDADTGEAVTRRFPGNPWGEIAGWMDGFPGPSLAAYESGYLGFAPQRELAGLGVECAVAAVSKIPRSAADSASKNDRNDAARMAKAILAHDISPVWIPSPEVEGIRDLAGAYGGATARLATAKQRLLAFLAKRGFVYGGTTPAGNPRKYWTYDFLRWLDKVRPEDDGGVRTLAALRNEVEAAAEARADLLSEYRAAVDASPIAAEVAALQSIKGCAFALAAAFSAEVGDFTRFRSGRQVTAYFGLAPSQRSSGDSVRLGGISGAGNALVRKLAVEGSWCYAAARHQPKLMPRDTGVPLEIRVHGRKGSERLLRRREEMLARGMPAAKANAATAAELVRWLWALGMMCREGAE

SEQ ID NO: 62852 - protein, 366 aa, unidentified
MSTTLPAPKPRRRRPAGEVVLGVDTHRDAHVASVLSLTGAVLATDEFPATTAGYRALLKWARRSGAVRRAGVEGTGSYGASLTRYLLAQGVDVFDVNWMDRADRRRRGKSDPLDAQNAARAVLSGRVCARAKSGDGPVQIARMYKLTKASAVKARTQTINQLKAVIVTADPALREELAGLGNAELFRTCARFTDASSHEGAGEESVLQATRITLGLLASRIGQLSEEIREVDARLARLVECHAPQQLDVVGVGPDTAVALLITVGDNPERLDSEASFAALCGVSPVERSSGRRQVRRLNRGGDRQANAALHRIVFTRLRVDPRTQDYYERRIKEGKTRREIVRCLKRYAAREVFHLIKQLLPGPRS

SEQ ID NO: 62853 - protein, 346 aa, unidentified
MMIIGCDFHPSWQQVSWLDTETGETGERKLVQASGDAERFYRQVAAPALIGMEATGNCHWLVDLLSELGHELWVGDAAQIRASYVRQQKTDQRDAAHLLKLLVEGRFPRIWMPSSEVRDLRQLLLHRYKLVIMRARVKNELQHLCLNKGVQRKRKLWSAAGQQILRELPLKPWAARRRDDLLKLMAMLDQQIEPLDQAVQEEAQRDKMALLLQTQPGVGPITALAYVLTMGDVSRFPRGKQVASYLGLIPREHSSGGRQKLGAITKQGNRMLRMLLVEAAQIAVRFDPEFRKQYLHRCHSKPKAVAKVAAARKLAVRLYWMLRTQTKYPAVVRIESSPRVPLVGAS

SEQ ID NO: 62854 - protein, 385 aa, unidentified
MPQNDLSRSYIPFKQDGTLVTVLEMSSKSWLLAGVVPGVKRQPRKGLPIDPERLLAQLHRWRDEAVRAGHTIERMVVAFEAGRDGFWLARWLQARGIEAYVVHASSIPVPREHRRAKTDRLDTEMLLRALLGWLRGEPRHCHMVAIPTLAEEDAKRASRERESLVDEKTRLTNRLTSILVALGLPKIKIQLRKTAKQLDALRTPEGEPIPPHTLAELRRGLERLAVIKAQIHAIEKARLEQLKAAPTQGTHPMMLMLAKVLGVGIETADRLVHEVLSRNLRDHRAVARYAGLTGSPDESGTKRREQGLAKAGNARVRRAMLQLAWRWLIHQKDSDLAKWYRARTADGRKDTRKIMIVALARKLLIALWRYVNTGVVPGGVVLKQA

SEQ ID NO: 62855 - protein, 359 aa, unidentified
MAILYGAIDLHGDNGYCAILDQDQRRVFGKRLHNDIEEVAASLGPYRDELVGIAVESTYNWYWLVDGLQARGYRVHLVNTAGVQQYEGLKYSDDRRDALFLANLLRLQILPEGYIYPKEERGVRDLLRKRMLLVRQRTTHILSLENLIARNTGTQISARVATRMNEEDVAGMIADPHVRMSAQMNIEAIRFFSERIRVVEKAVLAEQQLEDDHQHLLTVPGIGPIMAMTIALETGDIGRFPGAGNYGSYSRCVKSERKSNEKPKGKGNEKCGNRYLGWAYVEVAHFMLRSYPPAKSFYQRKANKRNTTVATKALANKIARACYYIMRDHTSFDGVRMFGPAAGCGGEPVEGLAKADRQV

SEQ ID NO: 62856 - protein, 464 aa, unidentified
MARKSKNVNGKDKRYPRSLKTIREHAAGIDLGSREHWVCAPPQEDGTPNVERFGTTTPELYKLADWLKEQGVDSVAMESTGVYWIPLYEILDSRGFEVLLVNARHISNVPGRKTDMLDCQWIQLLHSCGLLRGSFRPSDDICRLRALIRQRNTMVDQRSDWVRRMQKSLDQMNVCVHHAVSDITGATGMAIIRTIVDGERDPHALARLRDPRCRKSESQIAEELTGTWRPEHLFNLRQAMHMYDQANAVIGEYDSEILTYISTLQPENTAEAPVPPHRSKPKAKHFAQRGQEPLRQALYRFSGFDLTSIDGVGVDTASVILSELGVDFSGFPNEGHFVSYLRLAPNLSISAGKRVPNKSKTTTCTRVSSALRMAATALRNSKTALGGFYRRMSRRKGASVAVFATARKLAQIIYRLIRYGQAYVDTGEEAYNARFNERRLSFFTKALRTMGYTVEPITESVLAK

SEQ ID NO: 62857 - protein, 366 aa, unidentified
MKKISTVAKNGNEIFKEHKLTIGLDLGDRSTHYCILDEAGEVILEHNLPTTQKGIHQVFDGIPRSRIALETGCHSPWVSRQLTQLGHEVIVAHARNVRLIGESSRKDDQLDARTLARLARIDPSLLGPVKHRSAKAQIHLTVVRARAGLVSARTALVNAARGLTKSYGERLRKCGTRQVSRDLVAGLSAELRDALEPLLAEVEALNERIAEYDRRIEQIAKEVYPEVALLKQVKGVGTLIALTFMLTVEDPHRFRRSRDVGCFLGLRPGRRNSGMSEPQLHISKEGDRYLRTMLVQGAHYILGPFGQDSDLRRWGLRLAERGGKNAKRRAVVAVARKLAVLLHKLWVSGEVYEPLRNNHKVESAVA

SEQ ID NO: 62858 - protein, 338 aa, unidentified
MNYAGIDHHRQYSHITWLNEQGEVVKSGRVANLRRELEAFFQGAEDVKAVIEAGRSSYTMVDVLDDLGIETTVAHPKEVRAIARAKIKTDERDSWKLAHLLRTGYIPEVHKRSRENRSSQRVLRQRAFYVGKQTAVKNRLRTLLAQQGEEIRQEVERVEDIFTEKGLKVVKGLALPEREAKLVGALLRTYHHLEERIDETNALVKQLYEAMPSARLIQTVPGFRIFLAVLVAVEIEDIGRFEDVSKFHAYAGVIPSTHSSGERSWHGKIIKEGNRWLRWAAVEAVWPALRADFDIRCFYDRLNKRKGANAAKVATARRLLTIIYRILKENRPYIRYKR

SEQ ID NO: 62859 - protein, 387 aa, unidentified
MCRPAGPLRARPGRTYNGEDQRPWWCSAWTRTSGPTHTTVATDELGRQQDQRTLPATDTGHQRLLAWARENYPGPAEQRLWAIEDCRHVSGRLERALLAAGERVVRVPSHLTAQARRDARTRGKSDSIDALAVARAALREPDLPVARHDQASRELKLLVDHRDQLVTRRTEIINRLRWRLHELDPELVVPDRTLHRTGTQKRLIAALGTAQHVNAAAAAGLELQRQLALDELDEVVQLTHRADELEKQISARSRDQAAELLAIPGCGALTAAKLIAETADVRRFRSEDGFAAHAGTAPIPVSSGNRQRLRLCRGGNRQLNLALHRIALTQIRLSGRGRDYYQRKQAEGHTKKEALRALKRKIARAVYTALRLDAARRSTPSSPAVLT

SEQ ID NO: 62860 - protein, 324 aa, unidentified
MSSHEIVGIDVAARKLVVIGERLTLAEYENTAAGRSKLVNALSRSPQPVRVVLEATGIYFLDLACELAAAGIAVMVANPKATHHFAEAILQRRKNDPVDAAMLREYGRRMDFVSWQPPRHELFGFRALTREVQALSKTVAAARNRLHAITTTQLAPTAVIGALERQIAHNQTLIDELVAAAVAQTESDPELARLLARTDSVPGFAAKAAVLVIGELAVLPPMTARQWVAQAGLDVREECSGTSLARRPRLSKRGNKRLRVALFYPALTAARCCPAAQAFVERLVTHGKTRLQAIVALMRKLLHGLHAMWRNDEDFDAEKLFAPA

SEQ ID NO: 62861 - protein, 339 aa, unidentified
MIHYAGLDVSLEHTAVCVVDEIGKVRLEKVVSSDPEAIARCLENFPGIARLGLEAGPLAPWLYDGLARKGLPAFCIEVRQMKAFAKASPVKTDKRDARLIAQAMRTGLFKATHVKTKYSQRLRLLLRHRQAMVRRNKELTNTVRGTLKAFGVRVPKGKSALFARRVREILEEDILLDMTEPLLKAFEDGLEALAALDKMVLEAARNDRICRLLMTVPGVGAVTALAFRTGVDIPQRFESSRMVGAIFGLTPRVHASGEVEQVGRITKCGDAMVRWLLYEAANVMLTRCKTDNWLKSWALSIARRRGMRKAKVALARKLAVIMHRMWITDTPFMVERPAV

SEQ ID NO: 62862 - protein, 480 aa, unidentified
MQERIDRKDERLALGNIPHKGETPMSQTYFLGVDPGKKNLTCCLLRDRQGAMVLKPTDFPTTRQGFESLLAELQKHLKAGDRLLAGVEASASLDDNIMAFFTSLKAQDWALKLMRVDAAQVARFSGARPIRGQTDKTDSKRVARFVASYADELHSFEHDPQAQAMLRLVNDRAHLVQDRVVWCNRLQDRLVLSFPEFTSVLPDPAGALGLAALKTVATAREAAGKQARTLARIKPPTARSQALGSERAEALVKAAKSSVASANEPSDAQTIRFHAGQLETLDARIAEIEKQLKEYATRDLRETPEETPSAQEGPENNETHPDRAIPISRQIRLADSLPGFAAVGASVVVLRVRGITRYDCSEALAAQLGVCPDRVETGTSLKTSHLTCRGDRLTRSTLYLLTLAATRSDLAMTFHKWRHIRAGMTPKQAVCACMNRMVGWLYAVVMSQQPYDKNRSAENARKQHPRLWEEFRKSREEQAA

SEQ ID NO: 62863 - protein, 346 aa, unidentified
MTHSTTVGVDLAKNVIQVSVVSALGKELLNRSFTRHKFAVFLGKQKPALVAFEACATSHYWARAAQRHGHEARIIPAKFVAPFRQGHKTDSNDALAVAEAARRPNIKEAPLKTVEQQGLQAIHRSRQLLVQESTALSNHLRGLLMEFGVVIPQGFASLLKAVPEILEDGENELPDLYRPTLHRMYSRLLELREDIQVMTKEVDRLAKNHPVCKKLMALEGVGPIGALLLYATMGSGAAFSGSREFAAYLGLAPRQYSSGGKTNIVGLSKKIGNSRLRSVLILGARSYVYKLKEPKSSKDKWLKANIERNGESRAAVALANKNVRTAWAMVTQGTEYQRREQLEMAA

SEQ ID NO: 62864 - protein, 489 aa, unidentified
MSTARKQQGKKKDPMLNARAPQRKVRGSHCQQGKGNQRGSELTITNPDAAGIDVGSQVHYVAVPEGRAQESVRSFGAYTAQLDELVQWLKDCRIKTVAMESTGVYWIPLYQKLEEAGFEVLLVDARQAKHVPGRKSDVQDCQWLEQLHRYGLLRAAFRPEDSVCRLRTLQRHRKDLVESAAMWIQHMQKALNEMNLHLHHVLSDISGLSGLAILDAILAGQRDPRKLASLAHYRVRKSQAQIAAALTGDYRPELLFVLRQSLQNYRQIQQQITQCDLSIEKQLAKMTDRQNPNQASEPTPPSPDLGGGKPRKRKSPVILEISLAGHLKRILGVDLTTIPGLDVLAILTLVSEIGTNMTKWRNEKAFVSWLGLSPNNKISGQRVLSSRTRKVVNRAATILRLAAMIVGKTNTPLGSFYRRKRAQLGGPKAVTATARKLGCLIYRLVKNGQGYHEPDLHTYELKYKDQILNSLPKRANTFGFDLVELPKAA

SEQ ID NO: 62865 - protein, 306 aa, unidentified
METFAGIDVAKDTLEVSVRPDNLRKTFLNDEEGRAGLARLLGMMKPALLVMEASGGYETPVVDALRGLNVVVVNPRQIRDFAKATGRLAKTDAIDADIIARFGEVIRPEIRPLKDVDTQRLHALIARRRQLVQMLTEEKNHLAIAPSWTKADIEAHISWLTECLAKVGKEMSELIKKNPLWKEKEKLLRTFKGIGPVTAGTLLARLPELGQLDRKKIAALAGLAPFNRDSGKYRGRRTIFGGRGDVRAALYMAALTAVRHNSVIKAFYERLTHAGKLPKVALTACMHKILIILNAMVRTNTSWCAR

SEQ ID NO: 62866 - protein, 345 aa, unidentified
MDNHTQYSGFAGVDLAKKVMQIHFVTGDGEITDKQVKRAEFLDFFRNRGKCLIGMEACGSSQDWARKLEAMGHEVHLMSPKAVKPFVSGQKNDYNDAIGIYKAMFNGVRRVPVKSTEIRDLQTLRRIRSQVTKDKVKEINHVRGLLAEYGIVMGKSITAFNKGISSALESLKERGDVSPLVAEELQTTVESIKTKIERQKRLDREIEQLLARGCKNYENFLKTPGVGLFTAAMLCVLLCDPAIFANGRQFAAYIGLAPRSRGSGGKNFIIGIPSKFNCDSESRAVFVECAQALARYKNKSPWVDGILRRKPKKVAVIAIANKLARQVWAMANKGESFKQMTILTA

SEQ ID NO: 62867 - protein, 315 aa, unidentified
MDAIRERCAGLDVHQETVVACVLSGPLEKKPISEVETFGTTTKELLRLQDWLVSRECIEVAMESTGIYWKPVWNILESTCDLTLANPERIKNVPGKKTDINDAVWIAKLHRCGLIEKSFVPTVEIRDLRDLTRYRRKLIQNVTQEKNRIHKILQDANLKLTTYISDIFGVSGRALLDSIVNGEVLDEQEVRSMVKTKLKKKVPELIEALNGRLRKHHRSMINRHLKHMKYLEEEVLDLESNIAQLLQPYQAEIELLDTIPGISQDAAASILAEIGADMTHFPSEAHLASWAGLSPANHESAGKKNEGRINEEIKV

SEQ ID NO: 62868 - protein, 381 aa, unidentified
MLDQTAHNPVPTVYAAIELSKKSWVVAIVQPAKGQPSIYRIKGGAFSDLVMRLRTATPGGERLLVCYEAGYDGFWLARSLQTEKIDCRVLDPASLQVNRRARRVKTDRIDVLMLVRALIAVERGDRHVCSIVRVPTVEEEDARRSHRERQRLIRERTAHINRIKGLLFGQGIRGVEPRLRRSRIDFSDLRTGEGLPLPARLRAELEREYARLDLVETQLRVTEAERDTADAQDPSIEYKRNMLIQLRGVGPASAAILTREIFGRRFANRRQLGSYLGLTPSAYDSGSTTRCQGISKAGNSFARRVMIEVAWLWRKYQPNSALAKWYEERAAGQSPRIRRIMLVALARKLIVALWRYVEIGLVPAGAVSCANIGAALDAAAA

SEQ ID NO: 62869 - protein, 380 aa, unidentified
MQPAQHANANATLTLSIELAGNSWKLAATDGLQPNPAVLATDVEDRWSRLQDVFGHIDALRKKWRLPAHARVAVIYEAGQDGFWIARALQARGVQVFVVDAASIPVPRHLRRRKTDRLDAIKLLEVLRAWLRGERSEVHMVRIPSEEAEAQRLLSRQRGLLQKEVLQHRDRMRKLLLLQGCAETVDRGFAERLMAGQVRRGDGRPLPQQLWDWLLLECERLELVQRQLASLEKTLLHQLPQSVQQTITVLARLRGVGWVGATRLVLELFWRDFANRRQVGACVGLVPQPYDSGQSHSDQGISKQGNARLRALLIEMAWKWLQHQPDSALAKWFARRTAGEHKRGRRVAIVAVARRLAIDLWRYLKNGVIPAGAQLKPAGC

SEQ ID NO: 62870 - protein, 349 aa, unidentified
MPKTALTDITVIGIDIGKNSFHIIGLDGHGAIVLRQKWSRGQVEARFANMTPCLIGMEACVGAHHLSRKLKALGHDARLMPAKYVRPYSKGQKNDFRDAEAIAEAVQRPTMKFVATKTADQLDLQALHRVRERLVSQRTGIINQIRAFLLERGVAVRQGLRFLRAELPRILAAPPEVLSPRMVRVIEGLSEDWRRLDERIDCLSGEITALAHKDTGCQRLVSVPGIGPIISSAMVAAIGTGDAFSKGRDFAAWLGLVPKQISTGDRTILGKISKRGNRYLRVLFVQAAWVVLIKPQSWERHGLKRWIEAARKRLHHNVLAIALANKLARIAWSVLAHGCGFEASKLQTA

SEQ ID NO: 62871 - protein, 343 aa, unidentified
MLKPLKQSVGIDVAKSELVVSLGRMNQDTSIELIACKTFVNNKTGFEKLVHWTKKILSDEATILYVMEATGIYHESLAYYLSDQGHQVSIVLPNKICNYARTLDIKTVTDKSASQAIARFGLERRLEVWQRPQKVFRELKQLTRERDQLIAERTMLKNQLHAEQSEAFPNERSIDRLIERITLLNRQEKDIRKELVVVIRNNVKLADQIKAITSIPGIGPLTAVIVLAETNGFELIRSKKQLVSYAGLDVREKLSGTSVKGKPRISKKGNRHLRKALHLPSLAAIRSNDRFKAIFARLIARHGIKMKATVAIQRKLLELTYIIWKTNKLYDSTYFQNETQTAL

SEQ ID NO: 62872 - protein, 325 aa, unidentified
MANESLKSVYVGIDVSKASLDVALSDKAPSVRFGNDEQGIAAVLAQLQGHEVTVVLLEATGGLEKRCAHALYLAGLTVVVANPRQAHDFAKSMGYLAKTDAIDARVLSHFARTLHGSERFEQSLFKMASPQERQLQALVTRRAQLVHMRVGETNRLGQAHELAAKSIQAVIKTLDKQIKALDADIGNRLKQHFAHKLKLLEGFKGIGENTKAVLMAALPELGQLNRRSIGKLVGVAPLNNDSGNKRGKRSVWGGRADVRSALYMATLSAVRFDAVIRAFYQRLRAAGKPAKVALVACMRKMLSILNAVIKFNTPWEQRYSQASAA

SEQ ID NO: 62873 - protein, 335 aa, unidentified
MQVYGIDLSKEKFDVNFIDAKGKEKNRVVKNAVVSISRFLSSVSEDSILCAEHTGVYGDILVYLCNQMNISIALVPGYTIKHSLGLLKGKSDPLDSKRIREYGERFSDKLEYAEYAEENIAEIKQLYTLRNQLVKQRRALRTIDTGRGHLPMQSISVHNHIHAVFSSLDNEITSIEDEIEALIKANQDLNENYELAKSVFGIGPVIATDLLIKTGNFKTIDTHRKAASYAGVCPFPNRSGKMVGKSKTSPHADKKLKSLLYMGAKAVVKNNKEFRLYYQKKQLEGKPHYVIMNNVSNKLLRIVFSVVRNKTPYTSDHVCLDPREKNNNSSTKKVA

SEQ ID NO: 62874 - protein, 384 aa, unidentified
MRFYTTQHPFYCGIDLHARTMYLCILRQDGEGMLHRNMPAAPEPFLKAVAPYRDGLVVAVECIFTWYWLADLCAREGIPFVLGHALYMKAIHGGKAKNEKIDSQNIAVLLRGGRLPQAYVYPAERRATRDLLRRRVPLTRKRAELLGHSQNTNSQYNLPESGQKIAYKANRDGVAERFPDPAAQKSSEVALALIGYDDQLLRDVEWTIVQTAKQHDAQTVYRLQSVPGIGKILSLVLLYEIHDMRRFPRVQDFVSYCRLVQCAQESAGKRYGTSGAKIGNAYRKWAFSEAAVLFLRNNPVGQKYLTRLEKKHGKGKALTVLAHTLARAVYYILKRDTVFDMDTFLHGSGRGAGEPAASLGHEGASLMTVLDHDAALRLRTPLSP

SEQ ID NO: 62875 - protein, 402 aa, unidentified
MNCVGIDVSKGKSMIAVMRPFGEVVISPFEVQHTASELSELAKLLKSLDGETRVVMESTGNYHTPVAWLLHDAGLYVSVVNAMLVHDYGNNSLRRAKTDKKDAVKLANYGLDHWLTLPRYVPEEDTRLLLKNCYRQYQQYSKVQTMLKNNLISLLDVVFPEVNRLFNSSPRADGSEKWVDFVSTFWHCQCVSTLPLKSFSARYLKWCRKHGYYFSQEKAFEIHSKAQSCIGVMPRNETTKLLVQQAIAQLKATSAALAALKQEMQSLAASLPEYPVVMEMFGVGSTLGPQLMAEIGDVRRFHSKKALVAFAGIDAPPCQSGQMDIHSRSISKRGSAALRRTLFLVMGIYLQSAPLDEPVYQFMDKKRSEGKPYKVYMMASANKFLRIYYASVTAYLNTLARI

SEQ ID NO: 62876 - protein, 353 aa, unidentified
MDHVGIDVHKVASQICMIAEGGELIERRVRTEPARLGEVLGDRVRARILLEASTESEWVARCLEGLGHEVIVADPNFAPMYATRQRKAKTDRRDARALAEACVVGAYRRAHRLSDAQRHVRGRLGVRDALVRTRTRYIALIRSRLRQEGWRVPTGTAERFPHRVLALPLPGRLRSEVAPVLAVMRHVTRQVEYSDERIEALTATDERVRRLRSVPTIGPVTAAAFVAALDDAHRFGRAHEVEAYVGLVPREWSSGETQRRGRITKAGSGRVRWLLIQAAVSMLRLRDPRTAGLREWAERIATRRGKKIAVVALARRLAGILFALLRDGTVYAPRAGQPTSGARRRAEAACANS

SEQ ID NO: 62877 - protein, 341 aa, unidentified
MEKVSIIGLDLAKNVFQVHGARADGSVDFRKKLSRRKMLMFFAAQPGCVVAMEACASAHYWAREIGNLGHVVKLIPPVYVKPFVKRQKNDAADAEAIAEAASRPTMRFVAVKCADQQALGMAFRTRDLFVRQRTQTINALRGHLAEYGVIAPKGIAHVDRLKRVVEGPDSGLPAPVVALSSMLLDQIAALQEKIGVLEAEIRSGVRRDDVASRLMTIPGIGPICAAAMKAFAPPPETFTKGRDFAAWLGLTPRQHSSGGKERLGKMSKMGQRDLRRLLITGAMAVIRWAVRKGAPEGSWLGRMLQRKPRMLVAVALANKMARIAWALMAKGGTYSNPVAVA

SEQ ID NO: 62878 - protein, 370 aa, unidentified
MESMTQVDGPIHLGLDVAKNAIVVGLLMPGREGVDVDRIAHDEASVRRLVGRFDDCRSALRVCYEAGPTGFGLYRLLRSMGVCCDVVAPSLIPRAPGDRVKTDKRDARRLARLHRSGELVAIAVPTPEQEAVRDLCRARSALVRDRRRARQRLDKFLLRHDQVYRAGRAWTARYELWLAGLRFDVSALRSTFAHYRGVVSARDAELAAIEAALTPWTERGPFAAATRRLACYRGVAYLGGLTLASEVFDWRRFGSAGQFMGFTGLVPSEYSSGESVRRGHITKAGNGYVRTQLIESAWAYRNRAMIGVDLKRRQQHADPATLARSWTAQQRLCGRFRRLAHRKTDKKIVVTAVARELAGFLWAEMVAAQG

SEQ ID NO: 62879 - protein, 359 aa, unidentified
MEYGAIDLHKKESQVRIVTDGGEVVDRRIVTTRDRFTAVFEGRRPMRILLEASTESEWVAQHLETLGHEVIVADPTFAPMYSERSRRVKTDRRDVAALADACHRGCYRAAHRRSASQRTVQAQLNVRRALTDSRTRAIALTRAITRGAGLRIRSGSTASFLVRVAALDLPSSIAETLAPLQRVIGVLNEELVAADDRVATIAVQNPVVARLTTVPGIGPVTATAYVAALDDAARFGRAAQVASYLGLVPREYSSGEQQRRGRMLRSAHPYVQSLLVQAAWSVWRSQDPRTAGLRRWAQGIAHRRGRSIAVVALARRLARILFAMWRDGVPYDAVRTEPTRAHGGAATTKTAAAPSPGPS

SEQ ID NO: 62880 - protein, 412 aa, unidentified
MTTTNQFAAHVGLDWADKKHDVCVQFKNGERVFHVIEHTAEALDVWLTELHQKVEGRIAIAVELKKDPMVYALQKYPFITIFPVHALSLARYRQAFSPSGAKDDQQDAELALELMLRYPQKIKAIEPDNADIRLLQQLVEQRRQLVEDKRRFVNRIINTLKQYYPQPLEWFSHRGSLLLCELIIRWPSLQQLKRARRDTIRNFLNAKGGRAMALTEQRVASIDNAIPLTTDPSVIEANALMATALATQIKVVSEIIKTYDERIETLFDTLPDAGLFKSLPGMGPCMGPRMLAALGDNRDRFSSAEEIQNYAGIAPVTERSGQKSWVHWRWQCAKLVRQTFVEWAAKTINSSYWARLYYQGQREKGKSHQSAIRALAFKWIRIIYRCWKTRTCYDEAKYLLALEARHSPLLRP

SEQ ID NO: 62881 - protein, 424 aa, unidentified
MKVTYQTCCGVDVHKSFLVATIVKTTGGIEPSYQKKRFSTFYNSILEFKQWLLDNDCHDVCMESTGKYWVPVFNLLEDEINVVIANPKWVKAVKGNKDDTKDSKWIGDLFRLGLVKGSYIPCKIVRILREYTRYRYKLVSCRSSEKNRYQNALTVCNVALDSVVSDIFGKSSTSIIDYLLEQSGTSINHEEIASKLLRSLKSKEDAVIESVEGYQMTDAQKYRMRLVRAHMDYITAEINDVDKMIENMISSNPDFENAVQFLCTIPGVKRDSAITIISEIGTDMSQFSSSKRLCCWAGLTPGSNESAGKKKSVRITRAGVYLKPALVQCAHAAVKSDKSPYYKKKYESLVKRRGKKRAIIAIARMILTAIYQMLSTGEQWNPSDLYKIDMPEALVEKQKAKAIKQAKKLLQREGLLPPDEPLAS

SEQ ID NO: 62882 - protein, 426 aa, unidentified
MEDEYRIYVGIDWATEAHQACVLDSAGGLLAERAFAHTGEAVAAFAQWLHELAGGEPAQVAIAIEVPRGAVVETLIEHGFHLYAINPKQLDRFRDRHSAAGAKDDRRDAFVLGDSLRTDRARFRRIRLDDPLVIQLRELSRVDEDLGREAVRLTNHLREQLHRFYVQALKLCPSADEPWLWALLELAPSPVRGCRLQRKTIERLLRQHRIRRLNAQAVLAALRAPALHVAPGVVEAATEHIALLLPRLRLVHTQRQRCGVRLDALLDKLAVVEGNDDSQQREHRDVEILRSLPGVGRVVAATVLAEASGPLAERDYQALRAHAGIAPVTKQSGKRRTVVMRYACNGRMRNALYHWARVAATCDPASKTYYAALRQRGHSYARALRSVADRLLRILIAMLKSDSLFDSTRLRHSVDAAINEEVPCAS

SEQ ID NO: 62883 - protein, 376 aa, unidentified
MKKDSTEKLAQATAAKSSPRSTKRLQGRLTIGLDLGDRSSRYCMLNEAGETVSEGTVATTRKGLDQLFGRMPRSRVALEVGGHSPWVSRHLGRLGHEVIVANPRKVRLITQSSRKSDRLDAQALARLARVDPELLSPVRHRGEAAQMDLMRIRARAVLVEARTMLINSARGLAKSCGERLPGGDAKYVNESLIEPLSEPLRQALGPLLAQVRSLTEQIEACDQQIRQLAHERYPETGRLMQIRGVGPLIALTYVLTVDDPTRFRRSRDAGCYAGLRPRRRQSGGRDPEMHISKEGDPYLRNLLVQGAHYILGPFGPDTNLRRWGLRLAARGNKNAKKRARVAVARKLAVLLHHLWVSGEGYEPLRVSQPPVAAAAA

SEQ ID NO: 62884 - protein, 422 aa, unidentified
MLEETQETEEIIQRVAALDVGKAELTCCVRVPGQGSSGRRAQEVRTYKTMTRSLLVMVDRLAELGVTRVVMEATSDYWRGAFYLLEAHGFETWLVNARDVKHLPGRPKTDTLDAVWLCKLAERQMLRPSFVPPRPTRQLRQVTRYRADLVAARTAEKQRVEKLLEDAQIKLSVVASDIFGVSGRAMLTALIAGERDPKRLAQLARARLRAKLSLLEEAFSGFFTDQHAFLLAKMLARVDQLDADLAELDAKLQELIAPFVAAVERLDEIPGVGQLAAHLLIAELGTDMTRFPTAGHLVSWAKFAPGVKESAGKPKGSGSTGHGNPYLARVLGEAAVAASKTDTFLGERYRRIARRRGAKKAIVAVGRSILVIAWHLLSDPEAHFHDLGAGFYDTRIGPERAKRNHIRQLEALGYKVTLQPAA

SEQ ID NO: 62885 - protein, 338 aa, unidentified
MPLYGGIDLHANNSVVVLLNEQDQVIYQRRLANHLPTILEPLAPHQADIMGVVVESTYNWYWLVDGLMEAGYRVHLANPAAMQQYNGLKYTNDHSDARWLAHLLRLGVLPEGYIYPKAERAVRDLWRKRAHLVRQHTAQVLSVQNLMARNTGSRFSAKRLVDLTPADLQGMLPEAAHVLAVTSSLAVVHCLGQQIKTLEKTVNTCLKPTPAYAQLQTVDGIGTTLAQTIVLETGEIGRFPTVGHYASYCRCVGSTKISNGKRKGQGNIKNGHPYLEWAYMEAAQFAIRFSPTVQRFYQRKPAKSHLMIARKAVAHKLARACYDILRDLVPFDVHKAFG

SEQ ID NO: 62886 - protein, 413 aa, unidentified
MGAGVVIGMDPHKRSATIEVMDGDERILGGGRYATDVAGYQAMLKYGRQFEQRTWAIEGCNGIGKHIADRLLADGELVVDVPPKLSARVRVFATGQGRKTDATDAHSVALVGTRISGLRPVVNNEQLAVLRLLIDRRNSLGNDHTRMISQLHRLLLELIPGGAKKHLSAAQAKVLLGKVRPRDTAGKTRRRVAAELVADLERIYERTKAADKELKELLAQTGTTLTQLHGIGPSGAARLLVEVGDITRFPSRAHFASWTGTAPIDVSSGDHVRHRLSRGGNRQINRVLHIMAVVQLRSPTEGRAYYDRKKAAGKAPMEAMRCLKRRLSDVVYRQFLADAIRSTKAGPGGHSGATTSSSAVDSNPDIDASEKSLPGPASTHVTRAKSPRPDRSSARSRRPATAPARSRRQAQSA

SEQ ID NO: 62887 - protein, 351 aa, unidentified
MMLIGVDYHPGFQTIAFFVQETGECGEQELNHSDGQAEKFYRDLKQRGICVRIGMEATGYSRWFERLLAELGFELWIGDPAEIKAKRVRKPKTDKEDARLLLKLMLEDRFPKIWVPSPENRDLRQLLWHRHRLVQMRTRIMNQLQALAMNEGRRWKKKLWSEQGRAELAKLGLAPWASRRRKELLELLDRLNPSIEELTAAAEREARKRPDVLRLMTHPGVGALTALAYVLMLGTPERFHRGKQIGTYVGMVPSEDSSARKQRLGHITKEGNCLLRFLLVEAAQAAVRTNLHWRRRYIHLAMRRHKSIAKVAMGRRMATRLYWMWRNRCDYSPSFEFGSYAGKPETSHGVK

SEQ ID NO: 62888 - protein, 348 aa, unidentified
MSTMTETARCVTAGVDTHRDVHVVAVLDERGAQLGCEPFAADPAGYRKALTWVRSFGPVERVGVEGTGSYGAGLTRYLHNQRVKVVEVSCPDRQRRRSHGKSDPVDAVAAARAAQSGEASAQPKSRTGNVEALRALRVVRRSAAHSRIDSVNQMRALLVTGPEKRRESFRDTTVWRMVTAAVRLRPGDPTTPAGAVKFALRELARRVQALEDELDRLDAIIGPLVKATAPTLVARHGLGPDTAGALLVSAGDNPERLHKESAFAHMCGSAPIDASSGVVVHKRLNRGGDRLANEALWRIVMVRMVSDPRTRHYVERRTKEGKSKREIIRCLRRYVARELYPYLVEERS

SEQ ID NO: 62889 - protein, 402 aa, unidentified
MSNYFAGLDWASKTHALCVIDERGGVVERFDIDHDAGGLTELRRRLRRFGSPPVAIERPSGLLVDTLVDADFTVVPIHPNAVKASRPRYRSHGGKSDASDAYVLADLLRTDGHRFKALTPQSDEIRALRALVRGRDDLVATRVHLANQLRTLLESFWPGAAAVFADIDSPIALAFIERYPTPESASRLGPKRMAAFCAHHAYCGRRSPDDLLARLQEAPSAVSAETEMEAKGELARCVARTLTRLVEQLRLLSSRIEHLVASLDDGRILMSFPRAGRICAAQILAELGSVRERFATDAQLAAEAGVAPVTYESGKSKAVTFRWACNHRLRAAITCLADNSRHVNAWAAHVYANARARGCDHPHAIRILARAWLRVIWRAWFDRKLYNPELHLGALKLDHQAG

SEQ ID NO: 62890 - protein, 417 aa, unidentified
MKSASSSLPDQPVNGVTAGLDWACEDHAVAVVDDRGQEIARRTVAHSAAGLRDLAGLLDLYRVEEVAIERPDGPVVEALLEAEITVVVISPNQVKNLRGRYGSAGHKDDRFDAFVLADTLRTDRARLVPLVRDSEATIALRQMCRARKDLVGHRVAATNQLRAHLHNVLPGAVGLFADLDSAISLAFLARFDCQDRVDWLSAKRLAAWLASVGYSGRVDPAELYARLVAAPRGATGQYGAAQTHITKALLAVLTTLSEQIKALTVQISRQLALHADQQIFTSLPRSGRVRAARLLAEIGDCRGRFPSPDSLACLAGVAPSTRQSGKSRAVNFRWACDKNLRDAVCDFAGDSRHTNPWAADLYQRARDRGHDHPHAVRILARAWLYVIWHCWQNSSAYDPNQHRALQRFLNQDHRAAA

SEQ ID NO: 62891 - protein, 305 aa, unidentified
MFNRFIGVDVAKAKVDVFLSETGELMQIKNDEKSLHKFVQFLERTEETLVIIDLTGGYETQCVKAFYQAGFTIHRAEGRKVKAFMRACGQLAKTDSIDARALADYGKRLQDKLTLFQPVDNEIKPYVMRLNELKQLLQMEKNRLQSPQTDNKIYEQISRHIAFLKTEINFLAKELQQIIEKMPQLHQKQKVLTSQTGIGETTANLLLALLPELGYLPRRKIAALAGLAPYAKDSGTLNAARHVYGGRKEVKRALFICALTAIKRDKEMKCFYEKLIKNGKKKMVALVAVMRKLIIILNAKCKKLN

SEQ ID NO: 62892 - protein, 351 aa, unidentified
MPRTSSLHAVTTIGMDMGKNTLHMIGLDSRGAIVLREKVSRGRIASRLANVPSCLIGIEAGLATHYVARELAALGHDVKQVPPAYAKPFRQGHKNDFRDAHSVAEAVQRPTTRFVPAKTDEQLDLQALHRVRSRLVSERTAVINQIRGFLLERGIIIRQGLPFLRQALPDILAKRTDVLSPRMVRIVADLASDWRKLDERIEPVTDEIETLAKSDDGCRRVMTVPGIGPIISSAMVAAIGNGAAFARGRDFSAWIGLVPKQMSTGDRTILGCITKRGNGYLRTLFVQAARVILLRPTSWPKHSFGVWLARAAQRLHRNVLAAALANKLARIAWTVLAQQRNYQARVTKAAA

SEQ ID NO: 62893 - protein, 397 aa, unidentified
MYIVGIDIAKRKHEAAVIDGEGTIIIKPFSFTNNCSGYNRLLAMLAKAKLPLDEVSFAMEATGHYWLALFTRLQKEGFRVQVINPVQTNSIRSFYIRQAKTDPRDALLIAEVIRFGHFSESTLHPENIYELRELCRGRHAIVSMQADVKRKVVALLDQVFPEYETAFTNMFSDTSMAILQTCPTPKELSEMPLEELCHLIEVSSHKRFRMAKAQELQALARNSFGFAMAGDVFSTMIRLYAKHLDFLKQQVREMDRKIAEIMDTLDTPITTITGIGPTLGAYILSEIGDINRFSSSAKLAAYAGIDPTMRQSGEYNGVRNRMSKRGSPYLRHAIWLAASSAVLHDPALKLYFQKKRDEGKPYMASVGHACRKMVSIIYAVMRDNKAYTPYIPNEISA

SEQ ID NO: 62894 - protein, 419 aa, unidentified
MPFKIFRKNCCGLDVHKTWIYACIGITDTNGRTEYKQARFSSFTKGLQELADWLAKYSCTEVCMESSGKYWIPVFNVLEESCYVVLAHPKYTKPQKGNKTDRKDAKWICDLFMCDMIKPSFIPPPDIRHLRDLLRFRTKMTNQITGMKNRALNCLTVSNLKLDDVFTDVFGKSSRSIIQQILDHPGETFDVTPFVDRRCKHPIEEIQAAVDGAISHEQATKLKICLAFIDEQQKRISELDTEIFRLAEPHTTVLDFIRTVPGFSKEPLTAIRLLSEIGPDMSVFTTSKHLVSWAGCCPRNDQSAQKVKSTRISRAGSYLKPLLVQIANALLKSKKHPEFKERYRRIKARRGHKKAIIAVCRMLLTAIWNVLSKLEPYSAKGYLADKLTEHSVVITKSEGLALLRKRGYIFRDEIADTGS

SEQ ID NO: 62895 - protein, 356 aa, unidentified
MNHVSKLDFTGQQVYVGMDVHKKSWSISILTDQFEHKTFSQPPEVGALVNYLKRTFPGAAYKSVYEAGYSGFWIHDQLQEQGIRCLVVNPADVPTKDKERAGKTDRVDCRKLARSLRNGEIEGIYVPTRPKAEDRSLLRTRHSMVRKQTRCKNQIKSILCFYGIHIPDEVANSKWSKRFIAWIETVRMERASGDMALKVHLSELSHIRQTIAELNRAIRALSITDGYRNNVRVLKTVPGISILTAMTLLTELHDIGRFKTLDKLCSYVGLIPNTNSSGETDRKTCMTGRRNVQLRVVLIESAWTAVRKDPALMMSFNESSKHMTKTKAIIRIARKLLNRIRYVLKHQQEYVPAVIQ

SEQ ID NO: 62896 - protein, 326 aa, unidentified
MKSIGIDVSKEKLDVALYDGECRWHEIYENNSIGIKKLNKRLKGEGERVTMEATGTYYIRTAEMLKDGGYDVRVENPLSIKRYAEMKIRRNKTDKVDAFLIAQYGYYEEGREFRKEDVKRRIIRLKLRAVDQLHSDVNKNISRMEALNQYPEGAEEIKAVFIKMNHILEKQIEKLVKEISEIINADIAYKELSGRLQEIPGIGPRISSMLIAFFGTFEEFETAKQVSSFIGIAPTVRESGISVRGNGRISKMGNGYIRKMLTMGAKTAVKCNKSCKELDERLVAKNKPYRLRLVAGGHKLLRQAFAVAKYGVKYNPDYYNTIMQTS

SEQ ID NO: 62897 - protein, 430 aa, unidentified
MNKPNYISVGIDVGSAFSFMSIVDHHENVILKPFKIIHNNPDSLARAVLEIKKAEESNSMKSRTFLESTGIYHFPLFCHLKESGFEVLVINPLITHSIKNMGIRKVKNDRLDSIGIAKLGLKPDLKTSLMPTELVLELRSLTRNYYNLTDERASHVTAIKTDLHTVFPQYLDIFSDILGTTSKMILRQYPTPDKILRGHKKTMIEKISTASRKGLTKATEHYEKLIYAATCAKSFGCKVDSIYFNIQLKLDLIDCLNLNISKTMERIVSLLDEYENHTFVNQIRLLDTIPGVGLLTAVSIMCELGDFSAFQSPKQLFAYFGMDPNVNESGKFKGTEVHMSKRGSRIARRAIFAIALASIRTKRNGEALNPYLYQYYNKKKESKPKMVAIGAIMHKVSNIIFAVLRNNSAFELRSPEEHRNSYQQPTLMVA

SEQ ID NO: 62898 - protein, 352 aa, unidentified
MKTETTALVPKLYIGIDVHKKSWTFHYQTDLFDGKTITQPANPNTLVDWVQKHYPLHEVTCAYEAGFSGYSAARLFQKQNWNVLVLNAADIPKPQKQSIVKTDKIDCRNICKQLKNEALKSITIPEEQRESFRSLFRERNNFVEGLRHVKLQIKSNLMYNGIVIPEEFDNPNWSKNFIEWIQSQQMPFETGTEKINFLLKRFNFMHYELLTISNQLRAYARKHYKKDYDLLRSVPGIGGIVAVSILAELGDLRKYNRFDDLASSVGFVPGMYSSGDTTIVSGITPRAKSLLRSYIIEASWQAVRFDPVLQEYYRSHYGKQPNKIIVKVARKLLSRIHAVIKTETPYQIGVIK

SEQ ID NO: 62899 - protein, 354 aa, unidentified
MSQTLNTAIAVIGIDIGKNSFHVVGHDARGAIVLRQKWSRGQVEARLANMPPCLIGMEACVGAHHLSRKLASLGHDARLMPAKYVRPYSKGPKNDFNDAEAIAEAVQRPTMKFVATKTAEQLDLQALHRVRERLVSQRTGIINQIRAFMLERGIAVRQGIGFLRTELPTILATRTDALSPRMLRVIEELTGDWRQLDQRIDSLSGEIEALARQDQACSRLMTVPGIGPIISSAMVAAIGTGDVFSKGRDFGAWLGLVPKQISTGDRTILGKISRRGNRYLRVLFVQAAWVVLVRIKNWERYGLRSWIEAAKKRLHHNVLAIALANKLARIAWAVLAKGRAFELTRTNDAGVRPA

SEQ ID NO: 62900 - protein, 395 aa, unidentified
MFIVGIDIAKRSHEAIIIAEDGQVVRKAFSFRNNCTGYNLLLEQVRRLTLVKSQIVFAMESTAHYWLALYARLLKDGYAVMVLNPIQSHSLRELYIRKAKTDARDSLIIADLVRFGRCKASNVPQDKILALRELCRSRAYLVDMAADLKRKLIALLDRIFPEYESLFESVFSKASIAVLSKYSTPQKVKNANLRKLTDLLMESSNGHFGEWKAHQLKEAACSSFGIDDSGGVYSTLLGMFLEQILSLTAQADSLEKQISVFFQEFNNPLTSIPGVGTVLAATILSEIGDITRFSSADKLLAYAGLDPSVKQSGEFKSNQNRMSKRGSPYLRRAIWLASTVAVHRDPMFQTYYEKKISEGLHYMNVIGHVSRKMTAVIFAVLRDGQPYQPILQSAG

SEQ ID NO: 62901 - protein, 413 aa, unidentified
MTVFCGIDWAERHHDVALVDEAGTLLAKARITDDVAGYHKLLALLAEHGDSPDDPIPVAIETSHGLLVASLRTGSRQVFAINPLAAARYRDRHGVSRKKSDPGDALVLANVLRTDMHAHRPLPADSELAQAITVLARAQQDAVWARQQVANQVRSLLREYYPAALLASQSKQGGLTRADARVILTLAPTPAKAAKLTLAQLRAALKRSGRLRGCDAEAERLRDVFRAEYAHQLPGVEDAFGHQLLALLKQLDATCQAADDLAEAATAAFHQHADSEILLSFPGLGPMLGTRVLAELGDDRARFADARALKSYAGSAPITRASGKKRFVGRRFVKNNRLINAGFLWAFAALTASPGANSHYRRRREHGDWHAAAQRHLLNRFLGQLHHCLKTRQHLDEQHAFAPLLSLPTEQAA

SEQ ID NO: 62902 - protein, 321 aa, unidentified
MKKEIFVGIDVSKERLDIGIYPGDETRTFDNNEQGIAKLLVLMSSVSPTLIVLESTGGLETLAVSSLCEKNLPVVVINPRQVRDFAKATGTLAKTDAIDAKIIARFAHSIRPEIRPLKDKNVQRLSALNARRRQIMTMLVAEKNRLKRAPKPNKKNIKEHIDWLEKTLANIDDDIQKTIKKSPVWKANSDILQSFKGVGPVLSASLLGDLPELGCLNRKKIAALVGIAPLNCDSGKYRGKRRVWGGRSNVRRLLYMATLSAMRSNPVIKSFYSRLIEAGKPHKVAMTACMRKIITILNAMLKNRTFWESPANYSLDIKHSC

SEQ ID NO: 62903 - protein, 345 aa, unidentified
MEPMYYIGLDVHKRKISYCVKDGAGKVYSEGSLAATRLDLDVWMKTLPQPWSAAMEATMFTGWIYDHLKPHAAALKVAHPLMLRAIAAAKKKNDRIDAGKICDCLRCDFLPECYMAPTAIRERRRTLRYRNLLVRQMVQMKIKISSLLMEAGVSYNKQRLHKAGYFRELLATNPDINEGLKPLLQLCRETVVRLQKTESAMVRSLERDSLLMDRVERLMTIPAVGPITALTWTLEVGDVQRFSSIKKAISYCGLCGAEKSSGSMMQRTPLSKQRNKHLQTTLIEAAKMAPRNSPELAMLYDKEKQKGNANGATLAVARKLVAYLVAVDRRQKEFLTVQRENRTAA

SEQ ID NO: 62904 - protein, 411 aa, unidentified
MKLFCGIDWAETHHDIAIVDGGGNLVAKKRITDDADGFAQLVELLAEAGDSAEHRIPVAIETPRGLLVASLRATGRSVYAINPLAVARYRERHSVARSKSDHADAMTLANILRVDAHVHRKMPADTELCQAIAVLARGQQDAIWRRTKASNELRSLLREFYPSFLAAFKGRFQIGIASLEARAVLAIALTPAVANKLSASRIAAALRRAGRTRNIDQVAAEIKTALRAPQLRQLPLVESAMGRQTLALLAALDAACVSVDELGQAAAELFHTHPDYAVITSFPGLADSTGARVLAEIGDDRTRFADAKALKAYAGTAPITRASGRSISITRRRIKNDRLAAAGWVWGFAAMANHPAAQDHYRRRRDQGDHHAAAIRHLVNKFLGQLHYCLQNQQMFDTVKAFPPPNEGLAA

SEQ ID NO: 62905 - protein, 455 aa, unidentified
MAKQKRQMKMKVQVNALEQINPHAAGIDIGAEEIYVAVPPDQDTQSVRAFPTFTADLRRLAEWLKACQIETVAMEATGVYWIPLYELLEEEGFEVCLVNARHLKNVSGRKTDVLDCQWIQQLHTYGLLNPSFRPPEQIVAIRSLVRHREMLVQYRSAHIQHMQKALTLMNVRLTNVLSDITGVTGLKIIRAILAGERNPHKLAQLRDERCKKSEAEITKSLEGHYKREHLFALKQALELYDFYDHQLQACDAELEAMYQEVDPPEDPGTPPPAPRTQKRRKNQAHFDLSPALYRLTGVDLTQIDGVDELTVQKVLSEIGTDMSKWPTVKHFTSWLRLCPNNKITGGKVIQTGVQPTKNRASTALRVAAASLKTSDSALGAYYRRMRARLGTPEAITATAHKLARIIYIMLKERKPYHDFGSNYYEQQYRARVLRTLNRRATMLGFRLEPIAPLVS

SEQ ID NO: 62906 - protein, 387 aa, unidentified
MRRVIGLDIHRTFAEVVIWEDGQLRPHGRGDRTRSGLEGFGRSLRRSDESCRRSYGQRHGGGAGSVVGRVIVANPMQVKAIAHARIKTDKIDAGFLAQLHASGFLPEVWVPDGRTERLRRLVARRNQVVRHRTRVKNEVHGILQAHLVPKCPLADLFNPRGRAWLERHVLPDDERAAIARHIREIDRLAEDLADLDQEIAREAVDDVQVRRLQTITGVNAIVASGIIAAVGDIRRFREPQKLVSYFGLNPRVRQSGLGLAQYGRISKHRRSHARAMLVEAACATAKAPGPLRAFFLRIRNKRGHQVAAVAVARKLAVLIWHLLTKEQDYFWARPALVAAKQRQLALKAGAPGERGVGRRGSAYAYNVKELRNSEKAAAENAPNVPTS

SEQ ID NO: 62907 - protein, 398 aa, unidentified
MQPTRINHSIPAEDVLAVALELSNNTWKIALHDGKREKPAIQTVAAKVPACRLDEAMQAIEKIKTKWGIGPGVRTVVLYEAGQDGFWIERALSKLGYEVVICDPASIPVERHARRAKTDRLDAIKLVLCLRAWLRGEHDRMHVIRVPAVETEAQRHLVRDRGELQKETLQHRDRIRKLLRTVGCWQDVEGDIAKRLAKGEISCYDGAAIPAQLHARLTRECQRLALAQQQLAALEKDLVRQLPEPAQKRIADLQRLKAVGPVGATRLVLELFWRSFDNRRQVGACVGLAPQPYDSGQSRVDQGISKQGNRRVRSLLIEMAWLWLRYQPGSAMAQWYVQRTQGNSQNKRGKRIAIVAVARRLVIALWRYLTHGILPEGALLKNSKTTGLKRSAGEVAAV

SEQ ID NO: 62908 - protein, 356 aa, unidentified
MSIVAHTRPFVIGVDAHARTHALAVLACPTGEVLDEAQFPATTAGLARAVAWVARRTGADLDALWVIEGVGTYGARLARAAADAGYAVAEAPRMNARANRGVGKSDPLDARRIAQAALPLDHTQLRLPRTDEGARAALRILVASRDHITNERTAAINALIALLRVVDLGIDARGTLNTGRISEIAAWRARAEELSIGVARAEAVRLAKRVRTADRELGDLTRQMTALLNESPAAGLLDQPGIGPVTAAIAYAAWSHPGRIRSEAAFASLAGVNPIPASSGNTVRHRINRGGDRRLNRALHMAVVTRMRMDPETRAYVDKRTAQGRTPREIRRSLKRYLARQIYRQLNATITPSAAA

SEQ ID NO: 62909 - protein, 451 aa, unidentified
MSRKPVLLYHKLWLVYLEESESVGSCHSVYSWIGFVSSCHASLHDLISTVENRVFYERRSFLMTLYVGIDIAKYVHVASIYDPSTGELILDSLHFDNNLKGFKLLLSKLKSLHDSDVVIAFESTAHYHQNLFNFLTDQNYKCFLINPYLTSRFRSVSLRNAKNDNIDSRAIAYFISLKHKDLLEEEFQMNELKELCIHRDDLMKQSSALKTRLLTYLDRVFPELESIVDKHGIHSKAVRAILKDYPTAKAISSVRVDHLIKLASDASKNRFPSDKVRKIKEAARSSVGFDSLALALKIRQTIQSLESLEKQIDEVELSISSLPSVMDSPLHKLKGINSIEIAYILSAIISITRFSSEKKLVAYAGLDPVIRQSGTWQAAHTRMSKRGNKLLRYALIWTANNMRKHDSALKDYYEKKREEGKSHYNALGHCAAKLCRYIFFILNHPDLDFVM

SEQ ID NO: 62910 - protein, 416 aa, unidentified
MLLIGDDWAEDHHDVEIEDEGGRRLARARLPEGLEGITRLHALVAAHAPAGWSELSPEQAAGQVIVGIETDRGPWVTALRAAGYQVFAINPLSAARYRERHSASGAKSDAGDAHVLAEIVRLDRDHHRPVAGDSELADAVKLLARAHQTAVWERTRHVLRLRSVLLEFFPAAVKAFDDLAAGDALSLLGRAPDPARAAKLTRAQVTAAVRGARRHHADARADALLAILRAPGLRQPVVTEGAYAAVVAGQVRIITALNEQIAGLQEVMAEHFGRHPAADIYLSQPGFGVVLAARVLGEFGDDPQRFADARGRKNYSGQSPVTRASGKKTVVLARWATNRRLGAALHLQAFAALGASPGARAYYDALRSRNIGHHAALRQLANRLVGILHGCLKTGTLYDENTAWQNQQTAVQTAAA

SEQ ID NO: 62911 - protein, 420 aa, unidentified
MSFKIFRFNCCGLDVHKTWIYACIGITDSNGRTDYKQARFSSFSKGLKELCDWLAKYNCSEVCMESTGKYWIPVFNVLEKANNSVILAHPKYTKPQKGNKTDRKDAKWICDLFMCEMIKPSFIPPADIRHLRDLVRYRFKLTCMITGEKNRAQNCLTVSNLKLDDVFSDVFGKSSRSITEYMLAHPGEIFDVAPFVDSRCKTPMEEIQAAVDGAISPEQAIKLRQCLNHIDELEKHLEEIEREILRLSDKYQAALDLIRTVPGFDKNPMTAIQILSEIGGDMSVFPSAKHLVSWAGCCPRNDQSNKRIKSTRISRAGNYIKPILVQVANGLLRSKKHPEITGRYKRIKSHRSHKKAIIAICRMLLTAIWHILSDLKPYTAEGFLESRPANKAKVLTTSQALNLLKQRGYTIKDDIVPAMN

SEQ ID NO: 62912 - protein, 346 aa, unidentified
MLHVGLDLSRRRLDFHLLDEQGETVEVGAAPPDADGLLGLAARVGRLRQPVRAAIESMNGARFVHDQLEQAGWEVEIADALKVKGLAPLACKTDRIDAWVLAELSRRDLVPAIWLPDPEVRAERERARFRLHLVRHRSSLKQRVHAVLLAHGKPCPVSDLFGVSGRALLERLALPEPWAATVEASLRLIDELEREIAACERELRRLGADHRYVPLLLTIPGIGWVLAYTIAAEIGDIGRFPSPVKLSGYTGLCPRLYQPGESDRRGPLAKQGPKYLRWALVEAAVHASTHPVYRERYQRTKTRLGKQRGARVAQVDLARRLAEAIWHMLTRNQPFAPAGATNPLAA

SEQ ID NO: 62913 - protein, 347 aa, unidentified
MNFYTHQHKHYCGIDLHARAMYVCILDQHGTKLVHKNLPTTPEAFLRLIAPYREDLVVGVECMFTWYWLADLCHQEGIAFVLGHALYMKAIHGGKAKNDKIDAQKIAVLLRGGMFPQAYVYPAEMRATRDLLRRRCHLARKRAELLAHIHNTNSQYNLPEIGKRLANKANREDVAAHFPDLSVRKAIELDVSLIDRYDQLLGEVELYLTRSAKAHDVQTFARLQSVPGVGQILALVILYEIQDIARFPRVQDFVSYCRLVKCAKESNGKRFGTSGKKIGNVHLRWAFAEAAVLFIRQSQPGKAYFAKLEHKHGKAKALTVLAHKLGRAVYYMLTREQAFDLQRFVTA

SEQ ID NO: 62914 - protein, 418 aa, unidentified
MQTALSQYTAIIGIDWADKKHDVCVQSAASGRRQIYQVPHKAEKLDEWARSLYRQHGGPIAVALELSKGPIVSALQKYDFFVIFPIDPTTLANYRRTFTPSGAKDDPTDAEYALNLLLTHTEHFTALRPQSVEMRTLMTLVEQRRRLMNDRVRITNRLRNALKQYYPQALEWFDRIDTQLFCDFIKRWPSLAQARRARKATLEKFFREHNMNRKALLERRMTAIKSAVPLTTDEAIIMPYRLQALTLVAQLEVALASVRRYDDEIAALAPQHPDYGLFNGLPGAAATLAPRLLVAFGEQRERYSKAAELQKYAGIAPVTQRSGQSTWIHWRWQCPTFLRQTFVEWAAQTVNKSYWAGLYYYQQRAKGCSHQAAVRALAFKWIRILYRCWFTRTPYDEAKYLKALQERGSSLLKMAEAA

SEQ ID NO: 62915 - protein, 337 aa, unidentified
MSIIRIGLDTAKHVFQLHGVDEQEQAVLRRRLGRREVERFFAKLAPTRIGLEACGAAHHWARVLRRLGHEVVLLPPQYVKPYLKRGKNDALDAEAICEAMSRPSMRFVPVKSAERQAALMLLKTRDLLVKQRTMLINAMRGHAAEFGVVAAKGPVRVAELLQAAHAEAAGVPALALEMLRLLAGQLDALAAELKMIEAKLMAWHTQDPVSQCLATQPGIGPIGAVSFALKVTDAKGFRSGRHFAAWLGLTPKQNATGGRARPGAISRQGDETLRRLLVLGATTVIRFAKAGRVSPWLWQLLARRPRKLAAVALANKMARILWAMMVSGEVYRRPQPV

SEQ ID NO: 62916 - protein, 335 aa, unidentified
MNAIAIIGIDLGKNTFHIHCQDKSGNVLLRKKFTRNKLLEYLSLCKSTTVVMEACAGAHFMARRITDLGHETKLISPQFVRPFVKSNKNDFVDAEAICEAASRPSMRFVQPRTESQQAMRALHRVRESLIRDKVKTTNQMHAFLLEFGISMPKGIAIIRRLSAVLAENKLPAYLTQLLKRLHAHYLYLVEQITEIERELSFELSNDDVGQRLMTIPGIGPITASVLSSQLGDAKQYAKSRDFAASTGLVPRQYSTGGKNTLLGISKRGDKNLRRLLVQCARVYIQRVEYQTGRLAHWVKDQLSKKHSCIVACALANKLARIAWALTVQKTVFENE

SEQ ID NO: 62917 - protein, 430 aa, unidentified
MKSNTQNAKIEAITEKTLVLGIDVGSEMHYARAFDYRGIEYSKKPFKFSNTEAGFATFKEWILDLKERHEKDKVVPGMEPTGHYWFNLGKFLQDNEMKPVLVNPHHVKKTKELDDNNPTKNDRKDPKVIAGLVREGRYMIPYLPDGVYADLRTASNIRFQLQAELTRIQNRISRWFNIYFPEYKTVYGKPDAKSGMLILKAAPLPEDILTLGIDGVNQIWRDAKLRAVGKARAKTLIEAAEHSVGSKEGAMSARMEIRMLLEDYESRNTRLQEVMVLIEELVRKIPMAEKLLEIKGVGIRTVSGFLAEVGDISRFNNPKELQKLAGLALVENSSGKHKGETTISRRGRKRLRYLLFEVAMSLVAKNPEFRELHNYYTTRRLNPLKKMQSLMAIAAKLIRVFYAMLTKGVDYDPKKMVSDIKRPAVYIQAA

SEQ ID NO: 62918 - protein, 353 aa, unidentified
MRTYYVGMDVHRATIAIVVLNGAGKVVEQLVVETSATRVRRYLKQLQGRVYVTFEEGTQAQWLYDIVQPLVTEVIVCDPRHNKLLKAGNKSDRIDAQKLAELLRNGSLKAVDHRDHGVRALKELVRNYDCLVSDTTRVMNRLKAMFRRQAIACGGHEVYRQDRREVWLGKLTERGAKERASSLYRQLAALKALRHEAKLAMVREARRGAAYVWLMSVPRLGAVSVAQVLAVVGTPHRFRTKRQFWTYVGLAVVTSSTADMEVVAGVLRRRRRPVATRGLNRNHNHLLKRVFKNAATSACQSEPFKQHYELRLQQGMDPALARLTVARQLSAITLSLWKRGEKFQAERMKRQAA

SEQ ID NO: 62919 - protein, 356 aa, unidentified
MTRQRKELNFEGQNIYIGLDVHKKSWSVTILSDVLVLKKYSQDPSPDVLYAHLVRNYPGATYYSVYEAGFCGFWIHYRLTELGIHNIVVNPADVPTTAGEKIRKTDAIDSNKLARSLRSGDLKAIYVPDNVSLEIRSLIRLKDSMTKDQIRQKNRIRSFLFLHGIEEPTFSTSHWSSRFITWLKEVSMKTTCGREALDIMINQLETLRKQRLELLARLRTLYKSDRFAEPLRLIMSVPGIGQLTGMALIAEIDDIKRFKSADNLASYIGMIPMCHASGDHEGIGDITIRKHSKLRPLLIEAAWTAARQDPAMQFAYAAYCKRMKPQMAIVKVARKLVNRIYYVMKHEQEYVNSIVA

SEQ ID NO: 62920 - protein, 447 aa, unidentified
MALDVVNPQAAGIDVGSRSHYVAIGQTDEDVKEFGVYNEDLIALAQWLLDNEVKTVAMESTGTYWQSLFTTLQSVGIEVILCNGKFTKNIKGKKTDVKDCQWIQKLHTLGLLSGSFLPDEATEQLRTYCRHRANLLEQAADTSRKMQKYLRLLNLRLDVVVKDVTGLTGLTIIDAVCKGEINPEKLASFRHGNCKKSEQEIAKALQSNGRKDFLFSLTHEYQLYQIFQKKITECDKQIQKLLNEQINNDENKKQHHIDGKVHKRINKNNPDININLLSYQYFEGVDLLAIEGVSHSTVLTLMSEVGHGINKFESAKQFASWLRLAPNNKISGGKILSNRIPKGSNRLKIALRNAANAVGNLKDTALSNFFKRIAFRKGRTSAISATARKLAVIIWNMLVKKVPYKPATDYEFLDQKRKRKVMEMKKLIHKFDITPDDLGLQLNVNNL

SEQ ID NO: 62921 - protein, 385 aa, unidentified
MTIMIDTTAQIDRLYVALDLSKGSWVVVLTSLGEEKLRTHRIDARTDRALGELLALIERHRAALAKRLGRPVSVMSCYEAGPDGFWLHHALSAQHIDNLVLDPASLRVDRRVRRAKTDRIDAEMLVRALMARARGDLQACRPVRAPTPEQEDARRPGRERERLLAEKTAHTNRIESLLVTLGVRGFAPLRANWSQRLAALRDWAGQALPAHLTAEITREVERLHIVVAQLVTVTRAIESRVRAEAKVEAPSRSAPGQITRLVSIGPIGADTLGHEVLWRDFTNRRQIANYVGITGTPDDSGETSREQGISKAGNRRARTILVELAWLWLKHQPDSALTKWFYNRTAGQHRRMRRIMIVALARKLLIALWRFLTTGLVPLGARLKA

SEQ ID NO: 62922 - protein, 355 aa, unidentified
MTSTKYIGMDVHKESISIAVRNSAGKVVMECVIETKASMILQFFDGLRGDLHVTFEEGTWAAWLYDLLKPHVTKLVVCDPRKNKSMREGNQSDKIDARRLAELLRLDHLTPVYHGEHGLRTLKELVRSYLTITKDLARVMSRVKAIYRSWAIPCTGKQVYAPRHRVEWLAKISEPGVCRRAEFYYWQLDALSSLRREVRRDLLAESKKHKVWKRLCQIPSIGPIRAAVLLGILQTPHRFRTKRQLWGYGGLAIETHSSADHRSIDGQLQRSKKQVLVRGLNRNCNHDLKNLFKGAAIVASSKPGPFQEFYTALLTKGLRPEMARLTLARKIATIVLIVWKRGACFDAQHLKPQTA

SEQ ID NO: 62923 - protein, 357 aa, unidentified
MTSMTSTAVFVTGGVDTHGQTHHAAVIDQVGRQLGDREFPTTPAGYRALLSWLQEHGPLERVGMEGTGAYGAGLARHLHDEQVDVVEVDRPDRKARRAHGKSDPLDAYAAARAALSGTATGTPKTRNGAVESIRALRVARSSAVKARTQATNQLKALLLSGPAELREQLRQLSTTTLIATCARLCPTSELTDPEQATKTALRRLARRHQQLSEEIAEADGELRALVAQAAPRLLALPGVGVEVAGQLLTSAGDNPDRLRSESAFAQLCGVAPVPASSGKVRRHRLNRGGDREANKALYIVVLGRLRTCQRTRTYVERRTKEGLSKPEIIRCLKRYVAREIYLALRPLQARKDLASAA

SEQ ID NO: 62924 - protein, 439 aa, unidentified
MTDKNETIEFAAYIGIDWADQKHAWALQSSSESGMEQGDLLHKPEAVEAWAAELARRFGGRPIAVALEQSRGSLLFMLLKYEHFVLFPVHPSTLVNYRKGFRPSGAKSDPSDAILLLDLLVRHREKLRRLHPDSEQTRTLQFLVEGRRKFVHEKVRYCNRMTAYLKMYFPQILDWFSAVGSPIVGDFLLRWPTLEKLQKARPATLREFFRQHNSYKSDSIERRIQEIRNAVPATHDEAVIRSCSRAVLGLVRILREVRAALRAYDEELETLTRQHPDFALIDSFPGVGPVLAPRLIAALGTQRDRYQNASELQRYSGIAPVLASSGNQSWVHWRWACPKFLRQTFQEWAVHSLASSAWAKAYYQQQRAKGKAGNTVVRALAFKWIRILFRCWKDRTPYSESAYQQVLEHRQQLAHKRSAVKVQWKTSAGFSKIAAATVD

SEQ ID NO: 62925 - protein, 322 aa, unidentified
MNTVAMPLGIDVSKAKLDCALWLGSKYRSKAFANTPEGFARLSEWLHQHGADQVHACMEATGVYWEAAALYLADAGQRVSVINPALAKAHGQSLGLRSKTDAVDAKLLADFCREKQPPTWTPPSEAERRLRALVLRHQSLVEMQIQEKNRCESLREEVRASVETHLVWLASELERIEQAIAKLLDDDDHLRGQRELLASIPGLGERTIAVLLAYGVSGERFQSARQFVAFAGLSPRLHESGSSVRGRPRLSKIGHAFLRRALYMPAMVTLYKTAWGKRFQHRLAAHGKPPKLIIGAMMRKLAQVAFGVIKSGKPFNPALHGA

SEQ ID NO: 62926 - protein, 338 aa, unidentified
MTYYCGLDVSLQETFVTIINQNGTKYKEKTLPSDPNLIAQYLNKLNINLKLVALESGQLSINMCHVLKQHHINVICVDARHMATLLKAQNINKNDKNDSLGIATMIKAGLYKEVAIKSHKSCQIQVLLRSRRQLVETKLKLQSTIRGLLKIYGIKLPLRSDFDKSQVLGLLDSSAEDSILSISSLLDSVRFLRKKLCILDERICDISRQDEDCILLETIPGVGPITALTYKSSLDNYDRFSRSCSVGAYMGLTPRQYSSGEIDRKGSISKRGPSECRTMLYEASQTLIMRSKKNFKLRFFGLRLMKKKGSKKAIVAVARRLSVIMHRMLIDRTEFIYS

SEQ ID NO: 62927 - protein, 412 aa, unidentified
MKDLLEISCVLDIHKEKIVACILTGPLGKPTHSEIREFTTLIPDMLALRDWIISENCHHIAMESTGIYWIPIYEILEDAFSGDITLLVVNARHMKNVPGKKTDIRDSEWISTLLRAGLLNASFIPEKRIREFRDLNRYRKSIIRDITSQKNRVEKFLQSSGFRLSSFISDIFGASGRNIILHLMEHGQIDKMSLDSYLKTKTRKRIDEILMSVNGTLSEHQKSFLKILMCHYDSMKEHLIEIETHLQEDMLPFALQIEQLNTIYGISTTASCAIIAEIGTDMKPFKTAEHICSWAGLCPGNNESAGKRKSTSITKGNPYIKSMLCEIAWVIAGKRNTYLSAWYWRIKQKKGARKAIVALARKLLVIIYTMLKQGTNFDENCFEVRRKNCEQKQLSRYIRELEKHGYTVEAQV

SEQ ID NO: 62928 - protein, 408 aa, unidentified
MQVYIGIDWSENKHDVVFMNEAGADLACLVIAHTPEGFAQLDARRRKLGLAVEDCQIGMETAHSILIDYLWSQDYTQLYVLPPNQVKSNQGRFRQSGAKDDSADARLIADILRTDRRHSQPWKPDTLLTRQIRSQVSLIIHLNRHILRLSNRLRAILLRYYPAALHIFSAGLRTQILPEFICAYPTPQAAQRLTFAEFEAFARHHHYPALGRLPACFANLQADYPAASPEVVLTYQSEAMMLAEMLLLATRDKTLCLRQLLQLFSQHPRHATFASLPGAGDFIGPALLAKFGDDPLRLPSAASSQSLAGTAPVTRRSGKRKTVSYRWACDKEWRFIAQEWAIALVHQSHSPIAAAYFQTIRPHCHSDAHAYRCVANRWMAVAWKLWQTGQTYDEAYHFQQRTLRSKPR

SEQ ID NO: 62929 - protein, 412 aa, unidentified
MHYYVGIDIAKSFHVACVVNQDDKVIKKSLKFNNDESGFDELLLLLNSIDEVSTFTIGMEATGIFFENLYLYLSEKGFNVILLNPYQTNRFREMDSMKKVKNDNIDALMIAALIKSGRYSKAYVSEDMYQSIKSLYRHKNNLLEEMKKHKRQINTILAVVFPEMEQVIKDPFNVTGLALLEKYPTAKHYHHASADRILKTFRGIKGNNFTEEKASKLLELAKHSIYQGNGVDERAYVIKSHIRVIKLLQEELKELEDEMLKLFKQQISLDKNDEQEVMDIIDNLRTIPGVSDKTIFALISECGDLSRFKNNSHFIGYLGLYPTLEQSGNKLVFGPIAKRGAKLAKKALYQAAIAAVRHNEQLNKLFRDKVSQGRAKKEAIVIVARKLAHIILAIYKNNVAYDPQRVFQASVS

SEQ ID NO: 62930 - protein, 389 aa, unidentified
MKIYVGIDIAKLNHFAAAISSDGEIILEPFKFTNDADGFQLLVSKLESFDKNSIIIGLESTAHYGDNLVRYLVAEFYQVCVLNPIKTCQMRKNNVRKTKTDKVDTFVIAKTLMMQDDLRFITFFDLDMMDLKALGRFRQKTIKQRTRLKIQLTTYVDQVFPEIQYFFKSGLHQNAVYALLKEAPSPKEIASMHMTHLANLLKVNSHGHFTKEQAKELRILAQKSVGANDSAISIQITQTIQQIELLDSQLEKIEAEMTDIMKFNDSVIMTIPGIGYINGGMILGEIGDIHRFSNPNKLLAFAGLDPSVYQSGNFQAKTTRMSKRGSRILRYALVNAAWNVVRNNATFKAYYDAKRAEGRSHYNALGHCAGKLVRVIWKMLTDEVEFNLE

SEQ ID NO: 62931 - protein, 430 aa, unidentified
MRVVGLDIHRSFAEAAMIDAGRVQQLGRIDLVRERVIAFAKRLGKNTEVVVEATGNTMAVVKLMAPHVKRMVIANPLQVRAIAHAKVKTDKIDAVVLAKLHVAGFLPEVWQPDESTEQLRRQVARRATIVQSRTRVKNRIQSVLHANLILPYKGDLFSGKGRMWLAAQPLHDDERTTINGWLAELDRLAVDLGQVDAALARVGLGDDRVRRLMTITGINVTVAVGLVSAIGDITRFASSEKLVSYFGLNPRVRQSGDGRAHYGRITKTGRSVVRGLLVEAAWSAAATPGPLHAFFLRLKARRGQQVAVVATARKIAVLVWQLLTKSEDYAFGRPALHQAKLRKMEIKAGLRSKRGGNTPGRARDYNIKTLRDAERAFVAQAEGAYVRFVAAWSERPKKTDRLRSDRGARTPQSRNDSKAARRGSHPLPRS

SEQ ID NO: 62932 - protein, 370 aa, unidentified
MAQSSTLYVGMDVHKESIAVAYVAQEFGAAVVSLGTVGTRQCAIDKLIRQLQSKSKQLVFVYEAGPCGYWLYRSLTTKGHGCWVVAPSLLPKKTGDRVKTDRRDAIQLARLMRSGDLTPVYVPAVQDEAIRDLSRAREDTLHDLKTAKFRLKAFLLRHDIRYTGRATWGPAHLRWLSEVVCPTPAQQIVFQEYVRAVTEQTDRLQRLEQELHEQVTAWRLCPVVDALQALRGVQFTVAVTTVAELGDLTRFDNPRQLMNYLGLTPSEYSSGERRRQGGITKTGNSHARRALVEGAWAYRYPAKVSRHLQLRLEKLPKPIQDVSGKAQVRLCKRYRQLSTRGKNPNQVVVAIARELSAFMWAIAQQVPVTA

SEQ ID NO: 62933 - protein, 351 aa, unidentified
MVILGIDAHKRTHTVVAIDEAGRQLGAKTTLATTTEVHLELVRWSDRFGSERRWAVEDCRHLSRRLEADLLAAGEQIVRVPPKLMAHARDSARTYGKSDPIDALAVARAALREPGLPIAQLDGHSRELRLLVDHREDLVRDRTGHINRLRWHLHELDPSWDPTPRSLVRYKSLDALTARLEGLEGTLPRIARDLVARIRELTIQANALEVEIVQRVSALAPSLLELSGVGGLSAAKIVAETAGVRRFKSKDAFARHDGTAPLPVWSGNRARHRLSRTGNRQLNAAIHRIAVTQIRCHDGAKAYPGAPHGERQHEDGGAPSPQTEAVRRRLQGPNRRRRTHRGSLLRRGSLT

SEQ ID NO: 62934 - protein, 351 aa, unidentified
MARSKRTIIGGVDTHTATHHAAVIDRNGRLIADAEFPATPAGYTAMLTWMGNQGKLSRVGVEGTGAYGAGLAGHLHQQGVEVLEVPRPDRRLRRQRGKSDPIDAEAAARTVLAGNASSAPKLADGPIEAIRMLRVARNGAVKARTAALNTLRSMVITAPEPLRTQLRSLSSPQLVAACARLRPDLANLAEPAQAAKLALRSIALRVQHFDIETRSLRKQLDQLTQAAAPVTSALFGLGPDTVSALLITIGDNPDRLRSEAAFAHLCGVAPIPASSGKTNRHRLHRGGDRAGNSALHIAAVVRLRYDPRSRAYADRRTSEGLSMPEIIRCQKRYLAREVFQALRADYTKLST

SEQ ID NO: 62935 - protein, 415 aa, unidentified
MERVLERCCALDVHKRQVTACVRVPDREGRRSELRAEFRTVTSELLALRDWLKGLGVTHVAMEATGVYWKPVYYLLEDDFELWLVNAQHVKNVPGRKTDVQDAQWLCQLLEHGLVRASFVPPKPIRELRDLTRYRKSLVWERAREANRLQKLLEDANIKLGDVASDVLGASGKAMLSALCEGDTDPEALAELAKGKLRAKLPALRLALEGRFSAHHALLVSHLLSHVEYLDETIAALSAEIEERVRPFERQRELLCTIPGVAERTAEVILAEFGPDMERFPSHRHAASWAAICPGHDESAGKRRSGKTRKGDRWLRTALIEAAQSAAGRTKDTYLHSQYLRIKRRRGHSKAIVAVAHSILVAAYYILSEDKPYEELGGDYFIRREDQERLTRRLVRQLERLGQRVTLEPATVEAR

SEQ ID NO: 62936 - protein, 343 aa, unidentified
MYYIGLDVHKKTISYCVKDAAGHVHLEGKIGATRRELDAWVKALPQPRMIAMEATIFTGWIYDYLLPHAETVKVAHPLMLRAIAAAKKKNDKIDASKIADCLRCDFLPESYMASTEIRDRRRTLRYRNLVLKQMVQMKNRVSGLLMESGVSYDKQRLHKMGYFTQLFSTSEEISDSIRPLLRLGREHIQRAQRLDRALTSSLEHDPLLSERLRRLRTIPGVGPITALTWALEIGDYRRFRSVKEAISYCGLCSAEKSSADKVMRMPISKQRNKHIQHVLVEAAKMAPRYSHELALVREKEMQRGNKNRATLAVARKMVAYMLAVERRQLDFLPCEDMAGKAVA

SEQ ID NO: 62937 - protein, 281 aa, unidentified
METMYYIGLDVHKKTIDYCVKDGSGRIYAAGSIRATRLELDMWMKTLPRPWTAAMEATIFTAWIYDHLQPHAAAVKVAHPLMLRAIAVAKKKNDRIDAKKIADCLRCDFLPECYMASTEIRERRRTLRYRNLLVRQAVQMKNKIAVLLMEAGVSYNKQKLHKVGYFRELLATNQDIDEGLKPLLRLCRETVVRLGKTESALVQSLQRDSLLMERVERLMTIPAVGPITALTWALEVGDVQRFSSIKKAISYCGLCGAESSSADITNARHCRNNATNICRRF

SEQ ID NO: 62938 - protein, 422 aa, unidentified
MLTRTHDDEQIIERVAALDIGKAELMCCVRVPDEDHPGKRLQEVASYSAMTRSLLGMSDRLACLGVTRVVMEATADYWKPVFYLLEAAGFDTWLVNAKDVKHLPGRPKTDKLDCIWLCKVAERQMLRPSFVPPPPIRRLRDLTRYRADLVAARTAEKQRAEKLLEDACIKLSAVITDIFGVSGRDMLAALVAGERNPKVLAQLARRSMRAKITVLEEAFTGHFTDHHAFLLGAMLARVDAITADIATLDAAIAAQAAPLADLVARLDEIPGISLAAAHVILAEIGTDMTRFPTAGHLVSWARLAPGIKESAGKKKGKGSTGHGNAYLAAILGNAAAGAAKTDTFLGERYRRIARRRGSKRAIVAIGRSILVITWHLLSDPAARFHDLGPGYYAARIDPERRKRNHIRQLEALGYTVTLKPAA

SEQ ID NO: 62939 - protein, 392 aa, unidentified
MRERITEMQMMIEGQSHFQPFGLSYWGFEDLNKGVGSMTASYEYHIGVDYHKSYSHLVVQDSSGKTLRSGRVKNDRQSLGGFLERYRENSHAVVEATRNWMVMYDWLDDICDDVVLAHPLKVKAIADAKIKTDKIDATVLAHLLRADLVPEAWAPSERSRDLRVALRERMFYVRLRTMTKNRIVTVFDRYPEQTAQLKKLGDLFGKAGRVQLAQVNVSEIDRIQIDRGLAFIGDIDMRIKQSEATIRAMTKANANVKLLKTIPGIGEFFARLIDAEIDDISRFRQPKKLAAYAGLVPSTYSSGGKTFHGKIIKQGNKWLRWAFVEAVTPAIASDPQLRAQYEHLKIKGINKARVAIARKLLTIAFQILRDQRAYEPRGTATMEGASTISRLS

SEQ ID NO: 62940 - protein, 412 aa, unidentified
MQVLRPRCAGLDVHKKTIAACILLTASDGTVTQHAGDFGTMTEDILKLLDWLKAHDVTDAVMESTGVYWKPIYNLLEGQVAIALVNAQHAKALPGRKTDQSDAEWLADLHRHGLLRASYVPERPQRELRELVRHRTNLAQRRAQALNELHKILESTNLKLTSVVSEVSGVSALDMLQHLLAGQADPTVLAELARGKLRNKKDQLRAALRGDLRAHHKLIIGQLLADLSWCEEQMSEVSAEIEQRLADQQELLDRLDEIPGVNQRVAEVIVAEVGSDVSRFPTDNHLVSWAGLCPGNDQSAGKRRSGRIRGGNRSLRGAIVEAAQAGRRKKGSFLSARYARLAGRRGKKRAVVAVGRTILKSVWHMMDKGVGYHDLGADYYERRNPEQRAQGLVRRIERLGFKVTLVPVAQAA

SEQ ID NO: 62941 - protein, 366 aa, unidentified
MLIHVPPGVPVLAMDVHKNTISAAVLEPGSTTPVVDKISSDDESVRRLMARFAEPSRVWACYEAGPTGYELARVLRLAGMRCEVIAPSLIPARPGDRVKTDKRYARNLALLFRAGQLSSVRVPAVAEEAVRDLCRARADMVLDQTRARHRLGKFLLRHGRVWRDGDNWTLKHQVWIRAQRFEDPALTATFGHYQATLTAREAAVTAIDADLAQWFTRPPFADPVARLAAYRGITALGALTLASEVCDWHRFPTAAMFMGFCGLVPSEHSSGQRTQRGGITHAGNTHLRTQLVESAWAYKSRPAAGATLHKRQEGLDPEVVARAWAAQLRLCGKFRRLDERKTNRKVVVTAIARELAGFVWAEMTAA

SEQ ID NO: 62942 - protein, 356 aa, unidentified
MKEVSYLNFTNHHIYVGLDVHHKQWNVSIISGNILLGRMSREPNTASLVKYLRTNYPGSEYHCVYEAGFCGFWPYYELTEAGIDCIVVNPADVPTTHKEKDRKNDKVDSRKLARSLSNGELEGIQILDPQSYEDRGLLRTREALVKDQTRCKNRIKGLMKFFKIEVKDKDIKSHWSNKYINYLEQIDTMDVNLKTSLISYLGQLRHLRKTISEVTKQIRSLAKTEKYSKNVELLCSIPGISILSAMILQLEIGDIGLFRNSEKLRSYVGLVPSEHSSDEKKSQNHMTRRGKGILKKTVIEASWTAIRKDPGLLMVYENLLKRVRGSRAIITIARKMIGRIMFVLNNNEPYKFLQIK

SEQ ID NO: 62943 - protein, 354 aa, unidentified
MTADTILAIDLGRYKSVACAYSRSTRAHAFRTFDTAPDDLGQLLARHPGAVVVVEACANAGWVHDRAVAAGHPVKVANTAAESWKFQHLKRKTDKDDAKRLAELEAIGQLPTVALPDPATRQRRMLIAFRQELVGRRVACQNRVRALFAGQGLATPRGHRAWTAAGLEWIEAQARPLADCGPDELWRGMLHLALAEYRALAERIGEVEGALDRLAGSDGRTKLLETIPGVGRRTAEAVAAHLGDPGRFASAKQVGAYAGLVPRQYQSGVTDRKGRITRRGPGLLRKLLVECAWCMLRYNPWARAQYVRLTAGGATRKKPAIVALARKLLVRCWAMLRDGKPWRADPAPAAGASG

SEQ ID NO: 62944 - protein, 430 aa, unidentified
MKSNTQNAKIEAITEKTLVLGIDVGSETHYARAFDYRGIEYSKKPFKFSNTEAGFVTFKEWILDIKERHEKDKVVPGMEPTGHYWFNLGKYLQDNEMKPVLVNPHHVKKSKELDDNNPTKNDRKDPKVIAGLVREGRYMIPYLPDGVYADLRTASNIRFQLQSELTRIQNRISRWFNIYFPEYKTVYGKPDAKSGILILKAAPLPEDILTLGIDGVNQIWRDAKLRAVGKARAKTLIEAAEHSVGSKEGAVAARMEIRMLLEDYESRSIRLQEVMTLIEGLVKQIPMAEKLLEIKGVGIRTVSGFLAEVGDISRFNNPKELQKLAGLALVENSSGKHKGETTISRRGRKRLRYLLFEVAMSLVAKNPEFRELHNYYTTRRLNPLKKMQSLMAIAAKLIRVFYVMLTKGVNYDPKKMVNDIKRPAVYLQTA

SEQ ID NO: 62945 - protein, 414 aa, unidentified
MDVVYTHAAGLDVHKKTVVAAIIVPAPGGGWHREQRTFGTMTADLLALSDWLLGHGVTHVAMESTGEYWKPVFNILEDNVEVLLVNAQHVKAVPGRKTDVTDAEWLAELLKHGLLRASFIPPKGQRELRELTRYRSTFVRERATLVNRVQKVLESANVKLASVASDVLGVSGRAMLEALIAGQASPTEMAELAQGRLREKRDQLAQALAGRVQPHHRFVLTELLCQIDSLDETIARFDTQIETYCAPFAEAVTLVDTIPGVGQAIAEIIVAEIGTDMSRFPTADHRAAWAGVAPGNNESGGKRRSGKTRKGNRALRTALVQAAQAAARTKGTYLAAQYHRLAGRRGKKKAIMAVAHSILVIVYHLIQRQETYRELGGDYFDQRRPEATAKRLVKRLEQLGYQVTLQSPSVAAAA

SEQ ID NO: 62946 - protein, 348 aa, unidentified
MLSITDWFCYVGFDYHNCFVQVCVLDSNGAILGNQRVVNDVRAIIEYVDNIRDGRLIKRAAIETCCGASNLAEQLLDQEWPIELAHAGICEKMKRSPDKSDYADAHLLADLCRVGYLPSVWLPPKAIRDLRRLTRFRQQLADQRRDIKLRIRAMLREERIEVPAGVGNVWSKSWFKWLRETKSLTGHSRWVMDNHLSDLERVVAKIAATEERMEAATKDDQVVQKLRATKGVGLVTAVVMRAEIGDFDRFTNGKQLARYCAVTPKNSSSGKRMADGGLVKAGSLILRTMLVETAHRLARYQPQWKALKEQLKERGKPASVAAAAVANRWVRKLFWEMREVEVNEEVAA

SEQ ID NO: 62947 - protein, 343 aa, unidentified
MGDVITIGLDIAKSVFQIHGVDADGAVVIRKRVSRAKVLEFFAAVPRCLVSIEACPSAHYWSRKLEVLGHTVRLMPPSYVKAYLKRSKNDANDAAAICEAVTRPSMRFVSTKSEQQQSGLMLHHSRRLLVRQRTMLSNAIRGHMAELGIISAKGRNGTAELLEIIANAKDNCIPAAARFSLEVLARQYIAIATEIGVLEKRIHAWHRSCEESRRLEEIPGVGPIVATALIAEVGDWKAFASGRSLAAWIGLVPKQHSTGGKERLGGISKQGNRYLRWLLVAGAMAVIRYARRHGTKRLWLTRIMERRPIKVAAVALANKIARMAWAIIVRGERFREPRLLLAA

SEQ ID NO: 62948 - protein, 338 aa, unidentified
MNKITTIGLDLAKDVFHVVCCDARGKIVRKRMLRRSQVLAYFGNLGHCLVGMEACAGAHYWGRELEALGFEVKLIPAQYVKAFVRGNKNDYNDALAITEAVVRPEMRFVMIKTPAQQDIQALHRLRKGCVDARTNLCNQIRGLAGEYGLVAPRGVAALRQQIPQWLEDGDNGLSDLFRRLLSESFARLQAFDSHDAFYTEEVERQSKQDEACQRLQTIPGFGPIVSSVFHSQIGEGEAYRRGRDVSAAVGLVPRQHSSGGKDTLLGISKRGDRYLRSLLVHGARAVVSRAEHKDDRLSLWINKIRAERGFNKAVVALANKMARIGWAVLAHNTVYQAA

SEQ ID NO: 62949 - protein, 406 aa, unidentified
MFYGGIDVAKYRHEICIVDESGNVILQIFVDNTRNGLDKLIHNLKRLEIEVSNVEFCLEATGHYWLSLYYHLTELGYKIHVINPIQSDALRNFYVRKTKTDRKDAHLLADIARFGHISETKLASETVLKLQNLSRLRFEFVRQVGGLKNRVLGILDRIFPEYPQCFSNVFINTSRELLKSFTAPEDLAEADLSELTAFLNKHSRGRLGVDRAKQIQALAKGTFGINIALDAFTLELRLLVEQIEFIEEQISVIEEAIDQVMEEMRPSKDTAYRHVLETIPGIGPVLAASIIGEIGDINRFPNAKALVAYAGLDATVRSSGQFEGTRNRISKRGSPVLRHSIWLAAVSARRFNPEMKEFFEKKRSEGKHTLVATGAVARRMVHLIYSLWKDNRPFDPNYQWSPTNSR

SEQ ID NO: 62950 - protein, 408 aa, unidentified
MQVLYPRCAGLDVHQQTVVACARIVTEQGVAQHVETFETTTQGLEKLRDWLAAHGCTHVAMESTGVYWKPVWHVLEGHFALVLAHAAHIRNVPGRKTDVNDAMWIADLLAHGLIRGSFVPPTSVQELRDLTRTRKQLVREIAQHTLRLQKTLEDANIKITGVISNLLGQSGRALLQALIAGETDPERLVALTSGRLKAPRAVLVEALRGRVRPHHRFLLKLHLDQIDALQHAVSEVEARLGESDEPHRAAVALLDTIPGVNQIAAYVIVSEIGIDMTRFPTAAHLISWAGLCPRNDESAGRRRSTRVRKGAPWLKTTLVQAAWAAVRTKDSYVRAQFLRIKARRGPMKAIVAVAASILTAAYHMLRTGALYEDLGGSYFDTRDRTKLVRRLVRRLSDLGVEVEVKTAA

SEQ ID NO: 62951 - protein, 349 aa, unidentified
MTEQRRSYAGECVYVGVDVHKETYTVTCVCHQQIVKTATVQAEPAGLAASLLRWFPGATLYSVYEAGFSAFVLHRVLTTAGITHIVVNPASIAVAANDKVKTDRRDAKKLAIDLADGRLRGISIPTEAEELARLLPRTRAQIVEHRATIARQLKAKLHQFGLIAPSSRRKISNRYLREIAAWSLAPELRVSLTLLAEQWRFATRQLIEIRRLLQEQAAAQAELATVYRSVPGIGAVVARTLATELGDMTRFANERALFSYTGLTPSEYSSGASVRRGHISRQGSGRVRHLLIETAWRALPRDMVLQEIFDRIAATRGKKRAIVAIARRLTGRIRACFRQGTTYAVGTYA

SEQ ID NO: 62952 - protein, 342 aa, unidentified
MGFYSGIDLSARDNSMCVIDEQQMILKEKKLRNELRLIIPELEPYKRDLQIVVESTFNWYWLVDGLRKAGFNVCLAHTLGLHLITGAKVKTDRRDAYSLAKLLRVNMIPKAYIYPAETRPIRDLLRRRLSLVRQRAYEYSSIRHLLMREGNLDHSRNQMKGIDEQDLEKWFKHPLIRLHACQEVERINLYTAQIDELEERILTEARPNKEIARLRSVPGIGPILSLTIFYEIGEISRFKTVRNLSSYCRLVPGVAQSGTVSRRGRASKQGNPYLKNAFMQAAVTAVRCYPEVERYYENHLKTRGGKASKLVTYNIVAHKLAQAVFHILRDGGSYQKQLLFGN

SEQ ID NO: 62953 - protein, 350 aa, unidentified
MKYYAGLDVSVKETSVCIVDESGKLCREKKVVTHPDDLVAVLSDPAFNFERIGLEAGPLSQWLFEGLAKAGFAVVCIETRHTKAFLKAQQLNKSDRNDARGIAHMMRVGLFKDVHVKTLTSQKRRALLTARKLLQEKAIAMENDMRGLLRNFGLKVGTIRAFKFDERIRELVEAAPDLAEIIESLLAARQKLREEFVKLDRKVRGEARVDPVCRQLMTVPGVGPIVALAYTSTIDIPSRFRHSRAVGAVLGLTPVLNQSGESSRIGHVSLCGDGMLRGLLYEAAQVLLIRVKKWSWLKAWAMNVAKRHGIKKAIVALARRLAVVLHRMWVDRSEFRWTREATPTTTDATA

SEQ ID NO: 62954 - protein, 336 aa, unidentified
MGRYVGLDLHRRRSVIVVLDESGERLWSKRIENDPVALAAEISRAGPSPEVVLEATWGWYWAADVIAAAGGRVHLAHPLGIKGFENRRVKNDHLDAELLADLLRMGRLPEAWIAPQSTRELRELVRYRRKMSQLRAGLKSQVHSVLGKEGLLQPMGLWTKGGAGWLDDLELADGFADRVDSLRRLIKTYDREIAKIDARLHARLKGDTGYEAVQAIHGVGRVFAAVFVAEIGDVHRFDNSKRLCSWAGLTPRHRESDTSITRGPITKQGSRLVRWAAVEAVVKSHGGDPIKDHFRRVAERGGVNKGRVAAARKLLTLVFYGLRDGEIRCLAKPDAA

SEQ ID NO: 62955 - protein, 363 aa, unidentified
MTDATTRTEAERELSLRVITVGLDISDQFTSLCVLDSSGEVIEEARLRTKTAAFSQRFSSMSPCRVILEVGTHSPWISRLLSGFGHEVIVANPRRVRLIADSTRKNDRSDAETLARLGRIDPVLLSPIAHRPEQAQADLAVIRARHALVGARSSLINHIRGAVKSSGARLPACDAYMFHKKVLGAIPPELMPALGPVLAMIADLTAQIDGMDKTIAALIRDRYPEAQFLQQVPGVGPLISLTFVLSIGDPARFTKSRQLGPYLGLVPRQRESGDNSPQLGISKTGNAYLRQLLVNGSQYMLGYRGADTDLRRWGLQHAAVGGRSGRKRAVVAVARKLAILLHRLWVTGEVYVPIRPTEGAAIA

SEQ ID NO: 62956 - protein, 322 aa, unidentified
MSTSVLGIDIAKQRFEAALLVTGKIKNKSFKNTPEGFESLALWLRKLGIERVHACLEATGNYGEDLAIYLHEAGHTVSIVNPARIKGFAQSELIRTKTDKIDAGIIARFCLAMQPDPWIPPSAEIRVLRALVRRADSLIDMRSQEKNRLSTAHESVIPLIKEHIDYLGREIEKVRSQIAGLIDRDPTLRQKKELLVSIPGIGKVTIATILAELDDLEKFHHVRELVAFIGLAPKETLSGSSIKGKPRLCKIGHVRLRKALYMPALVSIQCNPVMIAFYNRLKEKGKNGKVIVCAIMRKLVHIIFGILKSGKKYDPNYKPAFA

SEQ ID NO: 62957 - protein, 421 aa, unidentified
MKKIKPKKTRMVNQNVLIATVDGGRDKHYGYYRCPDGTECKAFEFWNSGRGFYEFWERISLAARTHGLEEIIVGFESTGPYMEPLALFLRNKKSARLVQVNPMHTKRLKELSGNSPLKTDRKDPKVIADIIELGHALTVVIPEGPAAELRRLTQGRERTITSRTRLFNQLQCLLASFFPEFLQVMKDVTTTSAQHLIKHYPTPQDIMNLGEPALAALLRKISRGKLKPDRARALFEVSGASVGIRDGRDSMLQEVRLIVDTIASYDRFIEGLETDMVRYLGQIPYSHVILSLRGIGPVTAAGLIGEVGDFTKFGTISEVLKLAGLDLYEVSSGKHKGKLRISKRGRSHMRKLLYLAALSAVRKGGVMHEWYQGALGRGMIKTKALVAVSRKLLMIIFALVRDHSVYVENYKKQKPIFQEAA

SEQ ID NO: 62958 - protein, 345 aa, unidentified
MLHVGMDLSRHRLDVRVLEDDGATVAEVAVAPTGEELRRLAARFSLEGPVRGVIEAMNGARFVHDTLELAGWDVEIADAQKVKGLAPLACKTDRIDAWVLAELSRRDLVPAIWLPDPAVRAHRERARFRLHLVQHRVGLKNRIHASLIAFGHPCPTSDLFGVHGRERLAELAFPEPWRSDIAACLELIDHLDTQITGIEADLRREGADHRYVPLLLTVPGISWILAYTIAAEIGDIGRFENPKKLAGYSGLCPRVWQSGEQDRRGRLTKQGPKHLRWALVEAAIHAARHPLYVDHYQATKVRLGRQRGAKVARVEIARKLTEAIWHMLTKGEPFAPAGPTKRLAA

SEQ ID NO: 62959 - protein, 425 aa, unidentified
MRITQKLHEIKLNQVLDVSVDVHKETLNFFFSLEGKEYRDECPNRTKSIEKRLSDYHGIARGQGIDRLRLICEATGDYQNKLLRTARRHGHLTCLVNAESVYKFRVVETNDTGKTDTKDPKVIATLGRLNKVIRHRMLNEDYIVLRKLGRIYHEQDSEITSLRCKIDRLLIALFCDFSFTKDFLYGNSGRVLIDRFGCNPYRIIETGYETFATMMKQAIPRIRRDTITRLWQDSESSILNELPTGYRDVLEEQFRDLITQFRDRENRKEQIVEQIRIIFRRLRDDDPRIPPPTAGVISEKNLALLIAETGPIADFRNWRQLMRYAGLNIRMRQSGKYQGKNKISKKGSPLLRKVMNHIVLPLVRKGYLYGDYYHKKRETEKMAGTKAMTIVSRHFLRKFHGWYMSGAAFNEKRYFACEAEFLKAA

SEQ ID NO: 62960 - protein, 455 aa, unidentified
MKHEPEEIPDAEHELVIERVAAVDVAKASGKVCVRVPGKAGRRVSRVWDVAATTAAVTELAEDLVELGVERVTVESTSDYWRIWYYLLEAAGLEVQLVNARDVKNVPGRAKTDKLDAVWLAKLTEKGLLRPSFVPPTEIRRLRDYTRLRADLTHDRSRQVQRLEKLLEDALVKLSTVATDIMGVSGRAMIEALIAGQRDAKVLAGLARGRMKTKRAALIEALSGRFDDHHAELARMLLAQIDALTAQIDMLTARIEQLLAAMPEAQPVDPRRDGPTSGHPVGVTADTLAECARLTTVERLDEIAGIGEHNAQVIIAEIGLDMSRFPTPAHLVSWAKLCPRTIQSGPVTRGGRTGKGNPYLKGVLGDAAAAAAKTNTFLGERYRRIVKRRGKLKALVAVARSILVIVWNLLNDPTARFHDLGPDYHTNRIATERRMRNHIAQLTAMGYRVTLEPAA

SEQ ID NO: 62961 - protein, 317 aa, unidentified
MSCVGIDIAKKTFVAAVEVSDKVKIKSFNNSVLGFNEFIHWLNEFRLSKLYFCMESTGKYGDELALYLYEQNYSISVVNPARIKYFAKSQLTRNKTDSIDAKVIMQYCKFFKPSLWKPAPIEIKNLETLVKRVDSLNEMIIQETNRLEKCDIAIKSSIEKHIQYLKKEVDEMERQIAQHIDSHPKLKKDAELLDTIPGIGKRTANKLLTILGGNQKFNSAKEVAAYVGLNPEHSQSGTSLNSVHLSKTGSSEMRKMLYMPALTAIKYNPILRKFYEKLISKGKPKKLAICAVMRKFWHIIYGVLKNQSAFNEKILDV

SEQ ID NO: 62962 - protein, 343 aa, unidentified
MQTITTVGLDIAKSVFQVHCVDADGEVVLRRQLKRRYVLAFFQKLPPCLVGIEACASSHHWSRELQALGHTVRLMPPAYVKPYVKRHKNDAADAEAICEAVTRPNMRFVPTKTPEQQSCLTLHRTRHLFIRQQTAVINSIRAHLAEFGIVAPVGRNGMEQLLEVVADAKDTRLPEIARACVAALGTQLLALRAQILAFDRRIMAWHRSNETSKRLDEIPGVGPALATALVASVADPKAFRSGRDFSAWIGLVPKQNSSGGKDKLGSISKQGDRYLRSLFTAGALAVIRYAKLHGTKHRPWLTALLARRPTKVAAIALANKMARMAWAMMTRGERYKEPVALAA

SEQ ID NO: 62963 - protein, 321 aa, unidentified
MTYVGIDVSKATFVVAYSSAKSSKTKTFKNTTKGVHEFIQTLSASEHHCVLEATGNYSSLLVYLLSQVGITVSLENPLKIKNFARVMLSVTKTDETDARLIALYGEKMQPAPYRLRSDAILTLKQKRTVIRQLKKQLIATRNLKGSMEALPFFDPKCKKAIEKTIAFLEKQVKNLEEELAVLAQCEYKKQMDLLISIKGIGVTLAAALIMATGGFTYFDNAKQLTRYLGLSPTYQQSGTSVNVKGHINRNGDSSLRGQLYIAAMASLRCNAECKECFDRLRSNGKPGKVAVVAVANKLVRQAFAVVSQENPYVDGFKSEKP

SEQ ID NO: 62964 - protein, 441 aa, unidentified
MAMRKRDDDLVFPNAAGIDVGGSSHWVAVPRHAADEAVREFGAMTDDLNAMADWLLACGVDTVALESTGVYWIPVYEVLEQHGLKVFLVDARQMKYVPGRKSDVQDCQWLQRLMSQGYLRAAFRPGDEVCVVRAVARQRDVLIASQASWVQRMQKALVQMNIQLTEVLSDVMGTTGQAIIRAIVAGERDAKALARHRHSRVKASEHDIAKALTGNWRDEHLFVLRQALAMYDDIARHLAECDAKLQGLLSELGSAKVDLGRAPRAGSKSRAEFDTRQILANWAGVDLTRINGLGLAAVMKILSEIGPDFSRFANVKHFCSWLGLCPGTKISGGKVLSAKTKRSANRVRQALKMAAMSLSHSDSALGAFYRRMSARMDKPRANTATAHKLARMVYFMITRGEAYVDQGQQHYEEQQRQRSIAALKRRAAALGFAVTPTTTPA

SEQ ID NO: 62965 - protein, 339 aa, unidentified
MNITTVGLDLAKSVFHVVCFNEHFKEVKKRMLRRKQVLQFFNQLPPCQISMEACASSHYWGREIRALGHDVKLIPPQHVKPYLRGNKNDYNDARAIAEASTRPAMPFVSIKTVEEQDMQAIHRMRAQCIRDRTALSNSTRGLLGEYGIVLPKGLATLRKSIHGLLEDADNGLSDRFRNLLARRYEQLVGLDEHIAFYTNELELLSQQDDACQRLQTIPGFGPIVSSAFRSTIGNGTAYARGRDASASLGLVPRQHSSGGKNVLLGISKRGDRYLRGQLIHGARAVVLQAARKDDSLSRWINRIREERGWNKAVVAVANKMARIGWAILRHNTSYQPASV

SEQ ID NO: 62966 - protein, 385 aa, unidentified
MSQPNDLSRSLTSLEQDSTIIAVIEMSQSSWLVAGIVPGIERHPLKKIEPSEEELICLLMRWRAEATKHGRTITRIAVAFEAGRDGFWLARWLRARDIEIYVIHPTSVAVSREHRRAKTDRLDTGLLKRVFIGWLRGEPDHCHMAAIPTLAEEDAKRPNRERERLVGERTRIVNRMKSCLVRFGVRNFKPTLRKAPERLETLQTPEGVPLPPNTLLELRRDMARLRFVMDQIKQVEEARAQRLEQAPQEKSHAMVRLLARVIGVGIETADMLVHEVLARNLRDRRAVARYAGLTGAPDESGSKRREKGLAKAGNARVCRGMIQLAWRFLIFRKDSALARWYQTRTASVGKKRKTMIVALARKLLIALWRLVTTGEVPAGVVLRAA

SEQ ID NO: 62967 - protein, 359 aa, unidentified
MTKTTSPSLPTTYVGIDVSKDHLDACRKSGDQDPGDQNLGNQSPKEQRDARRFPNTPAGHRRLLGWLATSSSGKVQAVVESTGRYSLDLTLALYEADDTEVMVANPKALRGFAKAQMRRTKTDAVDAAVIADYTRRMSFSPWEPPPEATRELRAIARRIQALTVERTREKNRLQSLTDSRSASSVVENDIEVNIRHLKRRINELLRQAMACVNSSEPLTKAYGHLTSVRGIAEKSAVLLLGELAMLPSDMSVREWVAHAGLDPKKWESGTSVNAPERISKIGNARIRRALYMPAHSAIRYEPRVGAFYEKLLRRGKAKMVAVVAVMRKLLHAIYGMLKHGQDFDGEKFYATPETAPSTP

SEQ ID NO: 62968 - protein, 318 aa, unidentified
MAATHSSGYIGIDVGKTWLDVASFGDANVWRVKNNAEGIQTILSRLSQGVVELVVIEASGGYERGMVSGLQLANVPVAVANPTRVRALAKATGKLAKTDRIDARLIAEYACRIQPAVQEPREEQEERLRALITRREQLVEMRAAEQNRLDTSHPSTLDVLREHIAWLSEQINGCAAQINALVDLMADWRELADLLESIPGVGRVTAVTVLADLPELGQLNRQKVAALAGLAPFNRDSGQMHGKRRIFGGRKGVRRVLYMACLSGIRCNPVLKEFFERLTKKGKLFKVAITACMRKLLTIMNAMVHQRLAWQAFGPLLP

SEQ ID NO: 62969 - protein, 437 aa, unidentified
MGTLTIEDLKLIRSPSKTKGVPTMKKHTYRSKNVNKINFSQVKERLANESVVFAIDIAKEKQYGLLSDAKGTVSEFIWWNHPEQTLELLNALKGLECQIDIVIESTGTYGDALRFQFRNCGFEIYQMNAKRVKDASEVYDGVPSQHDAKSAMIITRLHREGLSKLWIELSDDERTMNALRREYDMHQSQYQRNQNRLEAYLSRHWPEVGYLLSLDSVTLEKLLIEYGSPAGIAADAENAAKSMRIWGRHLLSDAKIEAVISSASNSLGQPCIESELSYLQALATEMSHSRLQQKQAKQALEESIKSNSDLKELGVLIGMVTTAVLLSCHLDPRKYDCARSYQKALGLNLKEKSSGRHVGQLKITKRGSSVARSYLYFAALRLIKSNSVVKAWYLNKVDPKAKNKTVIAVMRKLSKALWYVGRGDKFDATKLFTVAGM

SEQ ID NO: 62970 - protein, 354 aa, unidentified
MIIIGVDFHPEFQQIAWVDTDSGEFQEKRIGHREEAEKFYRDLAAPGMKVRVGMEASGHARWFERLLAELNFEVWIGDAAEIRTKRVRKQKTDRQDAQLILRLLLEDRFPRIWVPSWENRDLRQLLWHRHRMVQARTRIMNQLQAVALNEGLRCKKRLWREQGRQQLESFQLTPWASRRRRDLLELLDRLNPTIAELSQAIEHEVEKYPEAQRLMTHPGVGALTALAFVLIIGKAERFQCGKQIASYLGLAPLEESSGNRRRLGHITKQGSSILRFLLVEAAQVTVRSLPEWRSKYLHLMMRRGRKTAKVAMARRLAVGLYWMMRKEWDYQQVKKFGSHAGQSGNRHGVQQNTE

SEQ ID NO: 62971 - protein, 335 aa, unidentified
MHYLYYVGLDVSKETFDASLVAFEDANEMAHRKFANSRKGICSCLHWVEKRHGIRLDDVIFCAEDMGSYISEMAVCASDRTLNFNFSLISPLVIKYSMGIARGKTDRVDARRIAEYAITHYRKIALYLPAEKELCQLRTWLILRAHLAKQRVAKLVLLEKLDYKEKFADVSIQRSMLQEEIAYAETHMKTIEREMKELIAADSNICRNYKLLTSIKGVGPITASVMLCSTLNFTKITDHRKFACYCGLAPFEHSSGTSVRGGCHTSSMANRDIKVQLNRSALIAIRCDPQLKAYYERKVAEGKHKFSVLNAVRAKIAARCFAVVRRGTPYVALQI

SEQ ID NO: 62972 - protein, 312 aa, unidentified
MAELSFCGIDVSKDRLDVVVLPAEYVFSAGNNLTGLVELVSKLRCLSVATIGIEASGGYERSAVRALLAAGFSVRQINPFKLRQFAKASGVLAKNDRLDARLIAMFVATMPTRPVQRNAATERLAEILMARRQLSEQKVAAENASRLFEDVVLMRLYRRRIARLEADIALLNKRLTELVAADSALAQRYALLISMPGVGPVLAITLIALLPELGQMSRKQVAALVGVAPYDFDSGKLRGVRCIRGGRAPVRRVLYMAALIASRCNPALKLFHDRLDSAGKRSKVVVVAVMRKILTMLNAMVRDNIGWRPKSA

SEQ ID NO: 62973 - protein, 416 aa, unidentified
MKIVRPICCGMDVHKNIIVATIGITNKKTRITEYIQETFSTLNPDLLNLKQWLINHKCFDACMESTGKYWIPIFNILEDKINIYLTHPKYVKAIKGKKTDKKDSKWICDLFKHDLIKFSFIPPKEIRALREISRYRYKLVGMRSSERNRYQNCMTVSNIGIGSVFSDPFGKSAQAIMKEVLESDIIEDEKILKCIHGSCKNKDRILDSIKHCNIETDQRFKMNESMSHMEELQVHIDNCEIEIIKRAAPMFDQFMHITQLPGISTLSAILIISEIGVDMKQFESDKQLTCWAGLAPANNESANKKKSVRISKAGQYLKPLLVQCALGAIKDKEGYFGIKYSRIKKRRGHKKAIIAIARMMLVSIYHMILTGETFNPSDYESFRNPKPPIKQQDLTEESAIEFLKKSGFDVSKLTKQ

SEQ ID NO: 62974 - protein, 344 aa, unidentified
MKIRTVGIDLAKNVFAVHGVNEHGRTVLRKVLKRDQMAAFFANLPTCLIGMEACSSAHYWARKLQGMGHTVRLMAPQFVKPYVKTNKNDAADAEAICEAVARPNMRFVPVKNIEQQSVLSLHRVRQGFVRARTAQANQIRGLLSEFGIVIPQGIAHLARLVPELIEDATNELTGSFRLLIQRLLDHLKDLDRQVRELEQQIQAWHRSDDTSCRLASVPGIGPLTASALVASIGDAKSFKNGRQLAAWLGLVPKQNSSGGKNVLLGISKRGDTYLRTLLIHGARSVMQAAERKQQKGGWLHELLQRRNANVAAVALANKNARIIWALLAHGREFRPDYTPATAAA

SEQ ID NO: 62975 - protein, 309 aa, unidentified
MPPSLFAGIDVSKSRLDVALGDQFFSVEHTEEKLSELVEKLEAGSPQLIVLEASGGLESALVAYLAEAGLPVVVVNPRQVRDFAKATGKLAKTDKIDAKTLSRFAEAIKPQRRPVKDAERRQLSDQVTRRRQIVGMISQEKNRLSRASVQVRSDIEHHIAYLKERLDRSDKDIEKIIKSSPLYQDTAELLCTVPGVGPVTIASFIAFCPELGSLDRRQIAALVGTAPLNRDSGSRSATRCVWGGRKAVRNQLYMATVSAIRCNCKIREFYLRLSAAGKPKVAITAWMRKLLTILNAMVKQRKYWQFNAV

SEQ ID NO: 62976 - protein, 337 aa, unidentified
MEKKFKYYVGVDVSKNTLDYSVVKENKEVLCFQSENSDKGIKSFIKELKSKGIVNINELLFCAEHTGIYNNPLVYFLKEKGGSIWLESALHIKRSIGMQRGKNDKVDAQRIAMFAYKNREDAKIFEAPREVIRQLKGLSGLRSQLIEVVKGFNVRIKEIKGFESKELARSIEGNCKKTIAALNADLKRIEQEIQNIIQSDEYLNQLFTIIKSVDGVGNVTATEVIISTNEFKNINDPRKFACYCGVVPFDHSSGTSVRGKSRVSSMANKVLKTLFHMSALSAIRVKGEFKDYFERKIKEGKNKMSVINAIRSKIIHRIFACIRDNRLYQKEYSNLFV

SEQ ID NO: 62977 - protein, 343 aa, unidentified
MQITTIGLDLAKSVFQVHGIDATGQVVVRKSLRRSQMLPFFAKLPSCLVGMEACGTSHHWARELIKLGHEVRLMPPAYVKPYVKRGKTDAADAEAVCEAVTRPTMRFVPVKSSEQQAALSIHRTRDLLVKQRTQLINMIRGLLAEFGIDIPRGLERALLMARQIVNGKAPDVPIEAAKIVATLSQQALDTHVRLREIDRDLAVWLRGNDVARRLMTIPGIGPIGATALAASVTDPHQFRSGRQFAAWLGLTPLQKSSGGKERLGRITKMGDKYLRKLLVVGMTALVRRARQNPEGDPRLADLLARKPTRVATVAMANKTARIIWAIMTRGETYHAGHRPALAA

SEQ ID NO: 62978 - protein, 340 aa, unidentified
MDNVTTIGLDIAKSVFQVHGVDAVGAVVIRRKLTRGRLLWFFEKLPRCLVGIEACSSSHYWARELMARGHDVRLLPAQYVKPYLKRQKNDAADAEAICEAVTRPTMRFVPVKTPEQQSVMMLHRVRLMLNRQRTQISNALRAHLSEFGVVAPIGRNGIEQLLVVINDETDTRIPADARLCLRMLEAQLKVVKAQILENDRRVRASARQTELGRRLMEIPGVGPLLASAFVATVADVHAFKSGRCLSAWIGLVPKQNSSGGKEKLGSISKAGNRYLRQLLVVGAMAVIRYAERNGTRRPWLVQLMARRTTKVAAVALANKTARMVWALMTSGERYQEPNIA

SEQ ID NO: 62979 - protein, 417 aa, unidentified
MAEEIEWFVGIDWASQTHQVCLVDAHGECLGERAVAHGGPGIEELCDWLITRTGATPEVIGVAIEKTQGPIVEALLERGFCVYGINPKQLDRFRDRFTVAGAKDDRRDAHVLGDSLRTDRHAFRRLSNDEPVIVKLREWSRMADDLQQERNRLASRMREQLWRYYPQLLELADDLAADWFLDLWSRAPTPAMAVRLRETTIERFVKAHRLRRWQASEVLSILKQKPLSVAPGVVEAASDHIRTLTVRIRLVNQQLKAAHRKLDELCAQLIPSEEDEPGQQCEQRDVVILRSMPGLGRIILAVLLAEVWQLLRRRDYHALRSLSGVAPVTRRSGKTRVVVRRYACNKRLANALYHWARLATQHDALSRRRYAALRRRGHSHGRALRTVADRLLSVACTLLEQQTLFDPTYEVRDAASG

SEQ ID NO: 62980 - protein, 391 aa, unidentified
MSMYFVGIDISKYKHDCCIISAADQHIISKFTITNDKDGFEQLLTALNSLSNPEDIKIGFESTAHYALNLELFLENAHHSFMEVNPVLIKEYKKSTTLRRTKTDSVDCESIARWLITVEYKPHSKGFYHAYSLKSLTRLRDRLIRQRSFYLVKITNVLDHTFPEFKPFFNERLSKTALYLLENYGSAEKMARMNSASYDKLRCISRGKFSIQQFLRLKELAANTVGVNNSIFDLELNTLLTLYKSLSDEINTLETEIIKLIEEVHPHYMSIPGIGPISAAVIYAEYGDISNFSNPGQMLAFAGIEPGINDSGTESHGGRMVKHGSSQLRYVLLNSCLPLIRFDLTFATYYAKKRAEGKKHRVAITHVAKKLIRVIYALERQDVDFNVQKLR

SEQ ID NO: 62981 - protein, 342 aa, unidentified
MRIIGCDLHAAQQTIAMLDCDTGEISGRTITHEGEQVRTFYAGLPPPVVVGIEATGSMRWFLGLMSELGITCHVGHPAKIRQAETRRQKHDRRDAALLLELLREGRFPSIWMPTPELRDLRALLLHRHQWVRIRTRVMNGLQGVALAQGLRRRAGLWNRAGQATIAALPLAPHAGDHRSALQALYEHLNTQILELDQRVRVQAQERPQSVRLMTHPGVGPVTALATEVFLGDPVRFPDGKAVASYVGMIPSEYSSGARQRLGGITKQGNSLLRLLWCEAAMHAERSDPILRRFYRRKLQQKGVGKARIAVARKLGIRLWILLRDQIDYDEFCRRGCARATER

SEQ ID NO: 62982 - protein, 385 aa, unidentified
MKEQNFVPREFEIFGGLDVDKKSIAVTFMSHQGILQSFSMPYRAEHLLSYVGKHFEGKKIAFAYEAGPTGWGLYDRLTREGHVCVVAAPSMIPKVPGQRVKTNRLDSQKLSEHLRGGQLKSVHVPSESYRQLRQLTGLRDTFVQDIVAMKLRIKALLLFEGLEFPPAPPGSQWSLIVRGKLKTFSCSSAVRFKLDRLLESLESSEKQALQTIQEIRRFYQQDNELCQAMKYLKSIPGIGEIVASHLLARIGDPQQIGNVRQLAGFIGLAPSEHSTGDRVARGHITRSGDGRLRSKLIQAAWSAIRQDPELREFYRSVYQRHPRDRAARKAIVAVARKLTTRIYAVLKQQRPYVVREIVHSAPLTQEETSPQGTTRRRGEPGEILS

SEQ ID NO: 62983 - protein, 333 aa, unidentified
MGEVSTIGLDIAKSVFQAHGVDVDGIVVIRKRVSRAKVLKYFGELAPCLVGIEACPSAHHWGRELQRLGHTVRLIPPSYVKAYLRRSKNDANDAAAICEAVTRPSMRFVPIKTTGQQTVLMLHRTRQLLVRQRTMLSNALRGHLAELGIISAKGRNGTAELLKIIADGEDSRVSPLVRSILEVLARQYGAIGAEIASIDKSIKALHRVCEASRRLAEIPGIGPLSATALVAEIGDWSTFSSGRSLAAWIGLVPKQHSTGGREKLGHITKQGNRYLRWLLVVGAMAVVRYARKYGARRRPWLARLMERRPTKVAAVALANKIARVAWAIMVRNE

SEQ ID NO: 62984 - protein, 343 aa, unidentified
MQTITTVGLDIAKSVFQVHGVDVQGEVLIRRQLKRRYVLAFFQKLPPCLVGIEACASSHHWSRELKALGHTVRLMPPAYVKPYVKRQKNDAADAEAICEAVTRANMRFVETKTPEQQSGLVLHRTRHLFIRQQTAVINAIRSHLGEFGIVAPVGRNGVEDLLDVVADPSDKRVPEIARACLAALGAQLHRLKEQILEFDCMIRAWHRSSEMSLRLDDCPGVGPVLATALAATVADPKAFRSARNFSAWIGLVPKQHSSGGKNRLGSISKQGDRYLRNLFVAGALAVIRYAKIHGTKHRPWLTALLARRPTKIAAIALANKIARMAWAMMAKGECYKQPVALAT

SEQ ID NO: 62985 - protein, 335 aa, unidentified
MHYLYYVGLDVSKETFDASLVAFEDANEMAHRKFANSRKGICSCLHWVEKRHGIRLDDVIFCAEDMGSYISEMAVCASDRTLNFNFSLISPLVIKYSMGIARGKTDRVDARRIAEYAITHYRKIALYLPAEKELCQLRTWLILRAHLAKQRVAKLVLLEKLDYKEKFADVSIQRSMLQEEIAYAETHMKTIEREMKELITADSNICRNYKLLTSIKGVGPITAIVMLCSTLNFTKITDHRKFACYCGLAPFEHSSGTSVRGGCHTSSMANRDIKVQLNRSALIAIRCDPQLKAYYERKVAEEKHKFSVLNAVRAKIAARCFAVVRRGTPYVALQI

SEQ ID NO: 62986 - protein, 478 aa, unidentified
MIYSVGIDLHKGQHRVYCLDEKAQPCDAFSFQTAPEGLAALEQRIFRDGSNPIVVFEPAGLTWLIVAAYLRSCHPECHVVRAKGQKVAALRRYLRGPVKSDRIDALTLAKMPFIDPERLDEVYLAPAQTHALQRLTRQRKRLEDQITTHKKRIGSIVDGYLPGVRQAFSHPWSVQVRAFLHSQINPFAVIRAGEEALHSFLTQAKPGNRGGRVERHLVYQACQKVLALQELCAAAGTLNEEFFVYLQDEIDRELRLMEAEEAESKALDRRIEELYRELHPSDNLRTIPGVGEHTAPVFVANIGDPTRFPGQSEFANWTGVVPAARQSSNVESKGLRMTKAGPATVKWALYQAGQIGRRWDPQLASVYYRQMVYHGKNHKQAMGAVMSHIAARVFTVLREDRPYELKDTEGKPISVLAARDLIMAKYRVPEDIRQERRKSKGRKANAPGLQKKMGTAAGREHEAAIAPQPATSLPSPVI

SEQ ID NO: 62987 - protein, 429 aa, unidentified
MNYTQNEKIEQVTDSTMVVGVDIGSQIHYARAFDNRGRELTKRIFSFHNNLEGFNSFNLWAETLKTENKKTAVLIGCEPTGHYWFAFAKYVNDHQKRLVMVNPFSVKKIKELDDNSPKKTDSKDPKTIAKLVVDGRYSIPYMPEGIYAEIRDLVYSRDRIMKQHNISANRIQRWLAIHFPEYLGLYTRFDAISGLAVLEKAPLPKDVIALGVNGIRKIWHDKKMRGRGVTEDRAKTLVEAAHNSVGLDGGIGTKSELYMLLEEHRLWTSQLEAVNKVLEEMILKVPHVEKLLAIKGVGSITIAGFIAEVGDIRRFDSPKQIQKYAGLELVENSSGKHKGRTRISKRGRRKLRKILYQVMVPLLARNKEFRGIYDYYVTRVKNPLKRRQAMVAVSCKLIRVFYAVLTKGVEYDRFKMMSDIHRKSDIIAA

SEQ ID NO: 62988 - protein, 487 aa, unidentified
MKVLYERVAGIDVHKEMIKVAIRSPGEKPWTRTTEILEFRTFYGVLQQMARELRKRGVTHVVMEASGVYTEPVYYALCEQDFTEVAVINPAHAKALRGHKTDARDCARVAELFECGLLRGSYIPPAQLKEVRDLTRYRIKTVQARTSEIQRLAKALESAGIKLGSVASDITGVSATAMTGSLTGGERRGAVLADLARGRMRTAGKLADLSMALTGRFTGHHALLCRLHRDRITVLDDAVAGLEERIAVKAAPWQREQDLLTSLPGFGDAVAQAWLGAIGPAPHRHFASCEKLASWVTLCPGNNSARKRKHGRTGDAGTYIKPMLIQAAWAAIRVRGRLQARYNRLVRRFGGDKNPGAKKKAITAIAHTLLKIACQVLKTGTPYQDLGTDFCTRRESPGRSRPGWNASCKGSTPAAPSPSPSARRRPPYNPRLTTSPYSSQPRSSRRSRHPRPTRRTSQRHRPRPRRRTGQGSLTAARPSETQLSCQF

SEQ ID NO: 62989 - protein, 403 aa, unidentified
MIFVGDDWAEDHHDVHVMNETGRRLASRRLPEGLSGIGQLHALIAEHTEEPDQVVVGIETDRGLWVAALVAAGYQVFAVNPLAVARYRDRHHISGAKSDASDAKLLADLVRTDRHNHRSIAGDSADAEAIKVLARAHQSLIWTRIRHTNALRNTLREYYPAALETFDDLAHSDALAVLDRAPSPEQAARLPLAAIQSALKRGGRQRNIADRAREIRATLRTDQLTASAPVSAAFAAATRATVAIIAELNRQITDLEATLAQHFETHPDADIYLSLPGLGVVLGARVLGEFGDDPNRYTDAKSRRNYAGTSPLTVASGKKRAVLARHVRNRRLYDAIYRWAFCALSTSPGARAYYDQRRAAGNTHHQALRALGNRLVGILHGCLRHHTNYDENIAWPHRTAVAA

SEQ ID NO: 62990 - protein, 407 aa, unidentified
MDVVIERACGMDVHKDNITACILTPEGKEIKTFSTKTVFLLQLVDWIKEHNCTHVAMESTSVYWKPIVNLLEAEDNEFLVVNAQHMKAVPGRKTDVKDAEWIAKLLRHGLLKASYIPDRNQRELRELVRYRRSIIEERARQHNRIQKVLEGANIKLGSVVSDVLGVSARDMLDAIADGEEDPEKLANFARRSMKKKKEELELALKGYINSHQRLMLKTILTHIDFLTEQIEMLDQEVAERVSTHQEDIERLDSIPGIATRMAEQILSEIGTDFKKQFPTAAHMCSWAGLVPGQNESAGKRKSAKTKKGNKYLRSALTEAAHSVRGSKNYLGALYRRTASRKGKKRAGIVVAHAMLRISYYLLTQKEMYVDLGEDYFDKQRQQSLVRHSLRRLESLGYTVTLEEPKAS

SEQ ID NO: 62991 - protein, 358 aa, unidentified
MARNSLAGLHQFVAGFENESFYVGVDVHKRSYHIALRRADGRSLSLVSPASPQSVVELLTGLGIVIGTVAYESGPTGFSFARALHKVGISVIVAAPSKIPRAVTPGAKCDRLDCLKLADYAARGMLKPIAIPTPQEEARRTLLRRRHILVDSVRRCKQRIKSHLLFLGIDDPKELEHWQNGVDNVLLALPMDATAHMTLESYLRELMFHQEELRRVEHQLKAVAKSNELVKSMACLQSVPGVGPTVATTFALELFRPDRFKRPEEVASYLGLAPVVRQSGSKTPSGRLVPVGQTRLRSLLIEAAWMWKTKDTYADALYSRFLSKMGIAQKAITAVARRLAIILWRLYVEQRPYRHAIA

SEQ ID NO: 62992 - protein, 392 aa, unidentified
MLYLGIDIAKNNHVATLIDAGAKPLFKAFSFTNTTDGGESLISKLNEHINSVSDIEIGMEATGHYWLSLYSFLTEKGFVCHVINPIQTDGWRKGIEVRKRKTDRIDSFLIADLIRYGNFVQTSLASEDMMSLRNLTRFRSYLVSSISDLKRKIISVLDQVFPEYQSAFSDIFGQTSKELLLNFQTADDFANISALQLEQALENVSRKSFAKNKITQISALAANSFGLKFCSDSFSLQIKFLIEQIKFIEAQVSDVEAEIDIILKKIDSTITTIPGIGVVTGAAILSEIGDINKFSNPAKLVAFSGIDASVSQSGESNAYGYKMSKRGSPYLRKALFQAAMVASNCDPVFNTYYRKKRNEGKHHLTAIGAVARKLCYTIYAILKNNTTYQIRS

SEQ ID NO: 62993 - protein, 451 aa, unidentified
MAKRAEKRERRSMVLQPDAAGIDIGAEEIFVAVPPDRDQESTRRFSSFTRDLHALADWLGRCRIQTVAMESTGVYWIPLFQILEERGFKVYLVNAHYLKSVPGRKSDVSDCQWIQYLHSVGLLRASFRPPDAICAIRTLWRHRGSLLQMAAEHILHMQKALSQMNLQLHHVLSDITGTSGQAILDAILSGKRDPVELAQLCHSRVKSPRDKVAQALVGDYRPEHLFTLKQSLAGYRYYQKLILELDQETARLMQALPSATEHPMPPRTKATAYHRQGNDPQFDLRSELYRIAGVDLTDIPGVSAATAQVILTEIGTDVSRFRHASAFASWLGLCPEKRVSGGKMLSCKTRKVKHRAATALRMGANSLCRAKGYFGEFFRRMRAKLGTAQAITATAHKIARILYHVLLTKEPYAETIFHRYDEQAQRRAEMRLRKQAAHLGFQLLPITTTGK

SEQ ID NO: 62994 - protein, 411 aa, unidentified
MEQIHDRVAGLDVHRDQVAVCVRTPGPRGGVHMDKARFDTTAGGLAALAEWLAGQAVALAAMEATGVYWKPVYYALEGRLEVWLCNAHHVKNVPGRKTDMSDAEWLADVAAHGMVRPSFVPPPPIRELRELTRYRKTQIDVRAAEIARLEKVLQDAGIKLTSVASKVLTQSGRAIIEALIAGQRDPAALAGLAKGKLRPKIPQLTAALRGHFGAHHALVAARILAHLDFLDETIGALDAQVAARVAERCQPAARLLADVPGLERRSVEVIVAETGADMSRFPSPAHLASWAGLCPGNHESAGKRRRVATTPGNQWLRRALIESARAAARTKDSYFGAQYRQIARRRGPNKAAVAVAHSLLDVIWHLLTTGEVFADLGADYFTSRQDKEHQARRLISQLEKLGYTVQLTDAG

SEQ ID NO: 62995 - protein, 294 aa, unidentified
MDHFAGLDVSVNETSVCIVDDAGRIVREVKVASEPDSLLPVLTSPAYHFKRIGLEAGPLSQWLFSALAEAELPVVCVETRHMQALLKAQINKTDRNDARGIAQMIRVGLYRPVHVKTLRSQKLRMLLTHRQLLQSKAIAVDNDLRGTLRNFGLKVGMVGATRFEARIRELVEGLPDLAVLVEPLLVVRRVLREQIAVLHRRLLAVVRDDEVCRRLMTAPGVGPVVALTYRATVDVPARFRKSKSVGAVFGLTCARDQSGERDRAGAISCCGDKMMRAMLYEAAQSMLVHTATGN

SEQ ID NO: 62996 - protein, 421 aa, unidentified
METVAGVEPLAFVGVDWASEQHAVCVLGVDGRNRDAFAIAHSKDGFAKLIRRLGGLGSPRQVPVAIERPDGRLVDALLEAGHAVVPVSPNAIKSWRESEVLSGAKDDPGDAEVIAEYLRLRAHKLTVLAPFRDDTRALRAVVRARDDLVEQRVAANNQLEACLDAFWPGAKAVFADVCREIALAFLERYPTPASARSLGEKRMAAFLAKHGYSGRRPAAELLERLRAAPDGIAEGAETEARRDAVLGYARVIRALNTSIKNLDRSVSAHLGEHPDGEIFASLPRSGRINAAQMLAEWGDCREAYDCPDAVAALAGATPVTKKSGKHEAVHFRWACNKRFRKAITTFADNSRHASPWAADVYQRAIARGCDHPHAVRVLARAWIRVIWRCWTDRKPYNATNHAAAVRLAGLANNNQKKRLAA

SEQ ID NO: 62997 - protein, 347 aa, unidentified
MKTTINMLAIDLAKSSFQDCAVAADGAVLSNRVFSRTRLTALLAEHPACVVAMEACATSHHWGRVAQEHGHEARLVPAAYVKPFVKRQKNDRADAEAIAEAAMRPTMRFVAVKSAETQGRAVAFRTHQCMVRQRTQLINALRGHLAEFGLVAPKGPASLKLLENALGEQTSDLPSPVREMGRIYVEQIARLTEVIERLADEVDSASKTDEELRRLCTIPGIGPVTAGAVAAFAPDLDTFDSGRNFAAWLGLVPRQRSTGGKTRLGSVSKMGQTDIRRLLIVGASRRRRGSRATSVIRWVVRKGGSTNRWLAAIVARKPKMVAAVALANKMARMIWAVTTKQEDYRMA

SEQ ID NO: 62998 - protein, 329 aa, unidentified
MNYKWFVGIDIAKKTLDVVLYKKELQKKSPYCQIQNNNDGFNDLNKWLKEQNVEPKFTLFCMESTGVYGMAFANFINAKANYCIESPLHIKRSLGLTRGKSDKIDAFQIARFCYLHRDELVPSRTASKVMLTLRSLINERERLVRTRTIDKTIVKELNYNENRSCIERAKNRINILTEDISQIEKEIKAVIKENIEIERNFLLAKSVTGIGLVNAVMFILFTNNFNSITDARKYACFSGIAPFEHTSGTSIKGKTRVSKLSNKRIKVNLTNGARSAILNDPELKLYYKRKTDEGKEHGTVMNAVKFKLITRVFATVKRGTPYIKLRQAG

SEQ ID NO: 62999 - protein, 415 aa, unidentified
MDWKDRTTFVGFDWASDHHDVVVVDGDGRIAEDFRFDDTAEGWQGFRKKLSAYPHPAVVIETSSGSVVERLLESGYAVYPVNPHAAKRYRERKAPSGTKTDRIDAWSLADALRMDGQAWRVLKPDDPLTVELRMLCRDEIALIQQRTALICQLRAALGEYYPVALEAFDDWTLPSAWAFVEAFPTPEALVKAGQRKWEKFLHVHKLYRPETYEKRLELFAQAQSFCGSAATTKAKSMLAVAVAAQLRVLQEHLDKFRERIQERFKQHPDHALFGSLPGAGQKLAPRLLAELGDDRERFDSSEALQCYAGTAPISFQSGQIQKARFRRACQKGLRQTVHLWANLSRIKCPWAEAYYQKKREQGQGHACALRCLGQRWLKILWKMWQMRKPYDAELHQRNQLKHGSWVIALMPAPTA

SEQ ID NO: 63000 - protein, 333 aa, unidentified
MYYLAFDVSKNKLDGILTNLRTKNEYFQIDNNYQSIADWLNRSGLPKKLICGCESTGGYHLLVRKLFVEKGFIFKVINPILVKQFTRTTIRKKKTDMTDSLIIAKLLAQGEGYQINSGELDLTAKILQRGSNKLINEKHKLHLMRKSLNFQEQNEAILSLSDKFKEIEDKIEKTINEHISSLKKGYSKEPVMELLESIPGIGFKLAFTIWTEVGDINRFEDSSKLVAFSGLDPKIRQSGHCLNNQGKLTKRGSPHLRRALFVAANVARMRDPELKLYYEKKRKEGKRFTVAVCAVARKLISRIYAVWIRQTPYVKKEVYSLNTSKTAAEMATA

SEQ ID NO: 63001 - protein, 339 aa, unidentified
MSKLFKNFVGVDISKTWFDAALIKADDPSVVIHEQFAQKPEGFKKMQVWLHTHHVLLDEQTLFCMEYTGIYNTGLVHYLVKAKAALWVEMPLRIKKAGGFERGTDDKAAAVKIAWYALRYKDQVKLWQPIDSNIESIKNLIAQRDRIVNAINLLTVPVNELKACGCAEDAKTLEKLQKAPVAALQKSKLSIEALIAKTIQQDEQLNIKVKRVASIKGIGPVTSVALMVYTKGFTAFENGKQLACYCGVVPFTKSSGTSVRYKSTVSPFANMKLKKLLHLCAMSAIQNDPEMKAYFERKVAEGKNKMSVINAVRNKLVHRVFAVIRDERDYGNNYVRNCA

SEQ ID NO: 63002 - protein, 411 aa, unidentified
MSQMLVGIDVSLQSHHVQFMDGDGGALASFSIHNNRQGADTLIQKIVDTSDRIKSQSLRIGMEATSNLGWHLAHYLQEQLQTTCPQKDTQIYVLNARKVARFKKGYDTLPKNDRIDAWVIADHLRFGRLPHAMKDIIQYEALQRLTRTRFHLMQNITRDKTYFLNQVFLKFSGLRQDNPFSNLFGSTCLAVIQELEPEQIVAMSMEELVDFLKDKGKNRFDNPEEIALYLQKIARSSYRLNKAMADPVNISLATMLNVIKHMESEVKKLDKEIAKIMKGLPQTLTSVKGIGDVFTAGIMAETGDIQRFKDHNALAKYAGLTWNQHQSGEFEAEDTSRTRTGNKYLRYYLIQAADSVRKHVPEYKDFYQKKYDEVPKHKHKRALVLTARKLVRLVFSLLNTRQLYTSPERRG

SEQ ID NO: 63003 - protein, 371 aa, unidentified
MTNDTTVFVGLDVHKDSITAACVGSDPADSPVDLGTRGTQQYSIDRLIRKLSGRGPLRFVYEAGPCGFWLQRYLRSVGQECLVAAPSLIPRRPGVRIKTDRLDARNLALALRAGTLTAVHIPAPEEEAFRDVVRAWQQCKRDVTSAKQRLKAFLLRNDIRYQGRATWSAAHRRWLARLVLPSPAQQIVFQELLDAVLERERRRDRLEQQLDTLAPAWPGYPLATALLAFRGIQKTVAYTVVAETASFTRFAHPSRYMAWLGFVPSEHSSGTSRRQGPITRSGNRWARTLLVEAAWAYRYTPKVSPIIEQRAQHIDPDLRALAWKAQLRLCHKYRRLIARGKHANVAVTAVARELAGFIWDAARLVDSSQRV

SEQ ID NO: 63004 - protein, 423 aa, unidentified
MMKLKYSICCGLDVHKNVIVATIVITNKDGISEYLQKSFSTINSDIQRFHNRLIENNCYHVCMESTGKYWIPIFNYLENDIDVCLTHPKYVKAIKGKKTDKKDSKWIADLYKFDLVRCSFIPPKDFRQLREIARYRFKLVCMKSSEKNRIQNCMTVSNVGIASVLSDPFGKTATEIMSYLLEHTADSIDEKAVRKLIKKGAKAKSDEIIEAIKGYNIETDQAKKLELACGHLEYLDDMITQTEVELYVRIKPYYEFVEFVSTMPGMTELSSTIVLAETGVDMNIFDDAKHLCSWCGLSPANNESAGKKKSVRIAKAGDYLKPMMVQCALAAIKSKKQPYFAIKYGRIKKRRGHKKAIIAIARMMMVCIYHMVSERNPFTPTDYEELMDPQNHVERVILNENNVFAYLESLGYDSSKLVKRNDN

SEQ ID NO: 63005 - protein, 310 aa, unidentified
MTGEMAHHTFIPQYFDVFAGLDVDKTSISVTFMNHRETIRSIRIAHSAEHLLNYVRKRFTDQKVAFAYEAGPTGYGLHDKLTDQGYLCLVAAASMIPRAPGQRVKTNRLDSQKLCEALRGGQLKSIHVPSVSYRQLRHLTQLRDTFIRQVAANKCRIKALLLFEGIAFPQAPPGSQWSTMVIGQLKQLSCPEAVRFKLDALLRNLQFAQQQALESMRQIRRFCHNDPELHRCIEYLRSIPGIGWIVASHLLARIGDWRQIQNVRQLSAFLGLVPTEHSTGETVQRGSITRSGDSRIRSKLERGQVACCPK

SEQ ID NO: 63006 - protein, 341 aa, unidentified
MQITTIGLDIAKNVFQVHGIDATEKVVVRKQLRRGQLIKFFEALAPCLIGMEACATAHYWARELTKLGHDVRLMPAKDVKAYVKRNKNDAADAEAICEAVRRPTMRFVMVKSAEQQGRLMQHRVRDLLMRQRTQLINALRAHLAELGIAAAQGREGIKELLAIVAQDGGSRLPVDAHASLIVLAAQLQAVQTMIGSIEKRVVGQHRSNEESKRLETIPGIGVIGATAIAATVPDPKVFRSGRDFAAWIGLVPREDSTGGKQKLGPISKQGDRYLRRILVVGACAVLKQARQQPEKYPWLTQLLARRPFKVVAVALANKMARVAWALLAKGGTYRAPRLKAA

SEQ ID NO: 63007 - protein, 417 aa, unidentified
MADLEYFAGIDWGSEVHQVCIVDSEGRVLGERAFRHGGAGLAEMADWLVATADAEPHAIGIAIEVPHGPVVETMMERGFAIHALNPKQLDRFRDRFSPAGAKDDRRDAHVLGDGLRGDRHAFRRLDASAPEIVELRAWSRIANDLTGERTRLANRAREQLWRYYPQLLKVEGDLTKVWARDLWSLVPTPEKARRVRLKTIAALLKHHRVRRIDAETVRETLREPAISVAAGTTEAAVAHLEVVFSQLALVTQQLVRAYREIDRLTAALARAAPSSEDEPRKQGQRDVEILSSLPGVGRIVLATLLAEAHGPLQRRDYQALRCLSGTAPVTKRSGKSVIVVRRLAAHNRLRNAVYHWAGSAIQHDAVSKAKYAALRARGHCHARALRSVADRLLAVACAMLENQTLFAPDHSGRRHAA

SEQ ID NO: 63008 - protein, 339 aa, unidentified
MPLYSGIDLHSNNLTAAIMDETGKRILKKRLINDSEVVLTMLEPYHTELVGIVVESTYNWYWLVDALMDHGYPVHLANPSAIRQYSGLKYLDDNHDAFWLANLLRLGTLKEGYIYPKEDRSLRDLLRKRWHLVKLRTSLIISLKNILARNFGMQMSASRIKNDELHAFVSRLPQEDHVTLVVRTSKASIDFLTAQIDEVESAVLKQAKKKPFYSKLLELPGVGKILAMTIQLETGPTSRFLKAGNYVSYCRKVESRWFSNEQAKGRGNAKNGNKYLAWAYSEAAEYARRFHPASRTFYDRKLNQGNAAIAHNALGHKLAKAAYYIMRDNVPFEEAKMFS

SEQ ID NO: 63009 - protein, 477 aa, unidentified
MSHDGQKQSKPDQGRQKKKRRKGMRIEDRPILEKNAAGIDVGAREMFVAVPPDRDEHPVQIFDTFTEDLQRLADWLVSCGVTTVAMESTGVYWIPLYDILEARGLKPCLVNARHMKNVPGRRTDWHECQWLQYLHSVGLLRGAFRPEADVCAVRVLIRHRAELVQSASQHVQHMHKALTQMNLQIHHVISDITGLTGLAIVDAILEGQRDAAALAKLRDPRVKANEETIRKSLVGNWKPEHLFTLRQSRELFRTYQEQVVKCDREIEQRLGDFKPWADPKQKPLPPDRKRNRSSQKRRKKTGHEGTGFDLRTEAYKLFGVDVTQIPGIETIALPLFSEVGRDLSKWPSTGHFASWLGLCPDNDISGGRVLWKGVRNIKNRAGQLFRLAAHSLHRSLTPMGSYLRRMKAKLGPAAATTATAHKIAIIFYTLVRRQLEYDETIWAARNAERQKRLEQNLKRQAERLGYKLVLVADTPTL

SEQ ID NO: 63010 - protein, 344 aa, unidentified
MDYYAGIDVSLEQSSVCVVDATGKIVCEAKVASEPEALVRFFGQLSVRVTRIGLEAGPLSQWLHAGLSEAGLETVLLETRHVKAALSAMIVKTDRKDARGIAQLLRMGWFRPVHCKSADAQEVRALLVGRKLLQSKLRDVEFSIRGILRGFGLKVGEVSKGRFAARVEELIAGHAMLEAVVGAMLTARTGLHSEFMRLHRQVLAIVRTDDVCRRLMTVPGVGALVAVTFKATVDDPGRFASSKAVGAHFGLTPKKYQSGETDVTGGVSKVGDAMVRTVLYEAANVLLSRTTRFSTLKRWAMEVAKRRGVKRAKVALARKLATVLHRMWVDGSEFRWGKETPVAA

SEQ ID NO: 63011 - protein, 481 aa, unidentified
MSKPTQHSKKPGQKKTAAGQGKRGRRRKGMCLEDRPILEVNAAGIDIGAREIFVAVPPDRDEDPVRVFSTFTEDLEKMSQWLVSCGITTVAMESTGVYWIPLYDVVEKHGVKPCLVDAHGMKNVPGRRTDWHECQWIQFLHSVGLLRAAFRPEGDVCAVRSLMRHRNDLVQMTNQHIQHIHKALTQMNVQIHHVIDDITGVTGLAIVDAIGDGQRDPLELAKLRDRRIKASEETIVKSLQGTWRPEHLFTLKQSRQMYRQYQEQIAACDKEIEKLLVAFQPRVDPAEKPLPPDRKKRKRGSQKKNAKTKQGFDLRSESYKIFGVDLTQIPGLMAMVLTLFSEVGRDMSRWKTAGQFVSWLALCPDNDITGGRVAWRGRRRVHNRAGELFRMAAYSLHHDKSPLGDFLRRMKSKLGPAGATTATAHKIAVIFYTMVKHQVEYDATLWAERDTQREKRFESKLKRQAQQLGYKLVPIEEKPAA

SEQ ID NO: 63012 - protein, 343 aa, unidentified
MERYYYIGLDIHKKIIAYCVKAIDGSLIDQGKIVADRQSLEVWVKELPGPWIGAMEATMFTGWVYDFLKPHAIALKVAHPAMLKAITTAKKKNDRADAEKIADLLRVNLLPECHMLSEEIRELRRILRYRNHIVRTAVKMQNKMSGLLMEVGAPYSKKRLHGKKYFRELLERVDEIPASVKELLQLSRSSYEMFRSFQKRLIETLRTNQLIRDRVHRLMTIPGVGEITALTWTLEMGDPGRFSSIRKAVSYCGLCSAQKESAGKEQRGPISKKRNKHLQTMLIEAAKLAPHWNEQLAIVHERELKKGNRNRATLAVARKLVAYMLAVDKKQADFKLPAETQAA

SEQ ID NO: 63013 - protein, 387 aa, unidentified
MKTFQVFYIGLIKSGGANAYVALRLIQPICIMYTHVYIGLDAHTRNCVLGAIDADANVVSVHDFPTSETGLIRHVKALPATFKYLALEESSLAGWIAGVLTPHVTELIVCDPVQNALIRRGGSKDDVRDSRKLARLLRLEELKPVYHNHDPSRVDFKMVAQQYLSITNEIVALKNQIKSKYYQGGVLKISGSLVYRKAHRHSYLKHVESEAMKKVILNFYDPLDCMVRVRENALLLMQELGKKYGEIEQFQRIPGIGVVGAHVFSAFIQTPHRFATKQQLWKYCQLGIRVRQSGGKKLSGECLDRSGASVLKAISYQCWMSSLPAKESNEVSLFYHASAKRTQDLTRARLNTQRNVLATLWTIWRKNVDDHPHLFYRPPVSARKAKQ

SEQ ID NO: 63014 - protein, 318 aa, unidentified
MDQQSQWVGIDVSKANLDVYLRPSGQQFQVQNQTSGIIELIEQLQSFKIQQVILEATGGLELEVAQALQAQGFAIAIINPRQARDFAKASGKLAKTDRIDAAVLAHFGEAMQPAVTILATANEQALQEAVTRRRQLVEMLTAEKNRQSSLRGKMRQDVDEHVEWLEKRIRQLDDEIGQLSQAHEQWQSRLTLLTSVPGIGKVIATTLIAALPELGKVSDKRISALVGVAPLNRDSGKYRGTRTIWGGRANVRAVLYMGALVAVQHNPVLQAFYTRLVSQGKAKKAALTACMHKLLRILNAMIRDGKPWQLPPLATEEN

SEQ ID NO: 63015 - protein, 450 aa, unidentified
MMQIATTAMEPRQPVSPQGSEPEFAALVAIDWADQKHEVLLLPAGSEVKESFTLEQKPEALSDWIAQLHNRFGKGKIAVIVEQKRGPLIYALLPHPNLVLYPINPKMSAKIREAFYPSGAKDDPLDTGVMLDILRCHRDRLEAWKPDEPTTRQLQLLVESRRRLLADQVRLANRLRSTLKSYFPQALELAGEDLATPMACAFVEKWPTLAAAQKVKPHLLRKFYYGYGCRSEGMIQERCRLLSQARPLTTDVAVTAAQSLLAQSVARELAPIFAILKEYDKRIQELFKAHADHDLWDSFPAAGAALAPRLAVAWGTQRERFEQSQDMASLSGIAPVKKASGKSLYIHMRLACPKFLRQTFHEYAACSIRFCVWARCYYEGQRESNKEHHAAVRALAFKWQRIMWRCWQDHTPYDDAKYVGALKRSDSALYARVRAAQAEPADEKEERGRE

SEQ ID NO: 63016 - protein, 365 aa, unidentified
MERIYIGVDFHARQQTICYLTTEGGEILFHELKHQDKEVVRQFYAQFSGQVIVGLEASGYSFWFERLLEDLGCEVWLGNATQIRRRARSRHKNDRRDAELILDLMLHNEFPRLHIPPPQSREIVRMLRYRQKLIKLRTLNKNSLQALALQAGLAKGSHLFSKAGRKELLTAAMTPAMQWQRDQWLQLLEPLNQQLLQTMVWLKQQSQGDQRISRLRTHPGIGLLTALCLVHSLEPVTRFRNTRKVAAYAGFDPLDRSSAERLRSLGISKAGSRVLRYLLVEAAHTSVKKDDDLRRFYKRLTERRGRPKAKAAVGRKLLIRAYIMLRDEIDYAEFQRRAVAARLARQSPGPTMPVTLIGQSASPGA

SEQ ID NO: 63017 - protein, 394 aa, unidentified
MKLIGIDIGKNKHFFCVMDQQTGEIISQPVSFSNDKEGFDFLVQKIKSYPKDSILIGMEDTGHYHFALLKYLLDLQYTVDLINPKTTDFNRKMQGGITKNDKLDTINICDVLDTPERKKQYRITKVNSFDLYEQKQLTRHHHNLKEEENVYKNRLQKCIDIVFPEFNKLFNSKYGIVYMNILKMFGSAENIANTDIRTIRKCFEIEGRGNRISLTPERLKECARSSIGISSSAEVIQIKHLSAQIELIEEQLTEIDKKIEEFSIQNNSPILSIPGISHFSGTSILAELGDISNYSKPSQIIKFAGVAPLHYESSQFNAQHTAITKKGSKYLRKTLYQIILPVIRHNPVFNKYYQLKISQGKGHRCAQGHCVRKLLRIIYHLLKTNQQFDPQLLR

SEQ ID NO: 63018 - protein, 349 aa, unidentified
MTIVEDARVITGGVDTHAGLHVAAALDPLGGLLGVQEFPATAAGYARLLDWLGGFGTVALVGVEGTGSYGAGLARHLAAAGVPVVEVDRADRQDRHRQGKSDPLDAVSAARAAQSGRASGAPKGRDGAVEAIRALMVAKRSARHERTQAINQARALIVTGPDELRARFAGHTPAALVEAIAALRPRPGDVPGHATRVALRELGRRAQFLDAQLDRLDELIGPLVAARAPGLLSLHGVGPDTAALLLIAAGDHPERLRSESSWAHLCGVAPIPASSGKVSRHRLNRGGDRQANHALWRIVITRLSSRPGHPATRAYAERRAKEGLSKKEIIRCLKRYVAREVYHQLRGGA

SEQ ID NO: 63019 - protein, 345 aa, unidentified
MNEFYEGQQFVGMDLHRRRSVLVRMTETGEHLETVRIVNTRDRLAEVMTRAGESPEVVLEATYGWYWAVDALAELGASVHLAHPLGVKAFSYRRVKNDQRDAADLADLLRMGRLPHAWIAPPETRELRELVRHRAKLVAMRSRCKAEVHAVLAKGGVWVPMTDLFGIEGNLLLDTVTMPAPYLARIASLRRFVEAFDAEIDLFTGLAQRRLTHDAGYTAIQQIPGIGPVLAAVFVAEIGDVHRFDGPAKLTCWAGLTPRHHESDITVHRGHITKQGSRLVRWAAIESVKILPAASRIGAIRDKVAHRRGNRNIGAVAAARKQLELVFYGLRDHHVRALHRSPRAA

SEQ ID NO: 63020 - protein, 429 aa, unidentified
MNSCEQTAQDWLAHRGFGGLDWASQKHNVVVVDPRGKVVEDFEIAHSALGWKKFRERMAPYGAIPFAIETSQGSTVEQLLEAGMKVYPINSKSAKSYRERKAPSGVKDDWLDAWSFADACRIDGQGWRALRPEDPLVKELRLLCRDEVELIQQRTSFICQLRHALGEYYPTALEAFEDWGSMSAWMFIQRFPTPQLLQAAGKRQWEKFLHARHLWRTESGPRRLELFAHATELCGTVPMANAKSQLALSLISMLLALEKQLGIYRRRIEELFSRHPDHDLFGSLPGAGPKLAPRLLSEIGDDRGRFEEGPQALQCLAGSAPVTRRTGKCKVRANPDHWPCHQRWACDKHLRHAMHLFSEHSLGQCVWAQIYYQHHRQKGSSHADALRRLAQRWLKIIYRMWMDRKPYDAMLHHQNQVKHGSWVFELKTA

SEQ ID NO: 63021 - protein, 333 aa, unidentified
MQNFYFIGIDVSKKKLDICVMSNSKVLKEEQVSNHPQAIATVIAGIKEELSMSNDSLIICAEHTGQYTYPLICACKSVGSKLWLENASQIKYCSGVTRGKNDKVDARRIAEYAMRFFDKAKPYQRPTEELMRLKQLEAERSLYLTDLAKYKAQLSDQEGFMEDKIFKRKAKRLKEMIKSLEKTLKEIAQEMADVIYSSEELSRQMRLLKSVEGVGPVVAMNMIIATEAFTRFDNPRQFNCYVGVAPFAYTSGSSQHSRNRVSQRAVKYIKCLLHMAAVAIAHKKTGDLKTYFERKVAEGKNKMTVLNAVRAKLVARMFAVIRNNRVYQPILSV

SEQ ID NO: 63022 - protein, 389 aa, unidentified
MKIYVGIDIAKLNHFAAAISSDGEIIIEPFKFTNDADGFQLLVSKLESFDKNSLIIGLESTAHYGDNLVRYLVTELYQVCVLNPIKTCQMRKNNVRKTKTDKVDTYVIAKTLMMQDNLRFVSFFDLDMMDLKALGRFRQKTIKQRTRLKIQLTTYVDQVFPEIQYFFKSGLHQNAVYALLKEAPSPKEIASMHMTHLANLLKVNSHGHFTKEQAKELRVLAQKSVGANDSAISIQITQTIQQIELLDSQLEKIEAEMTDIMKFNDSVIMTIPGIGYINGGMILGEIGDIHRFSNPNKLLAFAGLDPSVYQSGNFQAKTTRMSKRGSRVLRYALVNAAWNVVRNNATFKAYYDAKRAEGRSHYNALGHCAGKLVRVIWKMLTDEVEFNLE

SEQ ID NO: 63023 - protein, 367 aa, unidentified
MKKISTAAAKQTRKFQDQKLTIGLDLGDRTSWYCVLNGAGEVVLEQKLSTIPKAMKEVFGGMPRSRIALETGMHSPWVSRLLSELGHEVIVAHARNVRLIGESRKKDDRLDARTLARLARIDPQLLTPVKHRSAQAQSHLMVIRARAGLVRARTSLINTARGLTKSYGERLCGCNPRNMNPEKAQGLSPELQAALAPLLVAIESLSEQIREYNERIEGLAQQSYPEVALLKQVKGVGTLIALTYLLTLEDPHRFRKSRDVGCYVGLQPGRRNSGQSEPQLHISKEGDPYLRTLLVQGAHHILGPFGVDSDLRRWGLKLAERGGKNGKKRAVIAVARKLAVLLHRLWVSGEAYEPLRNCQEVAVPVAA

SEQ ID NO: 63024 - protein, 391 aa, unidentified
MDILYPRCAGLDVHKDTVVAGVRLAGDGPVRTEVRTFSTTTPGLLALSAWLAEHGCTYVAMEATGVYWKPVWHILSDGEFTLILANAAHVKNVPGRKTDVADALWLADLLAHGLIRPSFVPEAPTQELRALLRTRKQLVREQASHVQRIQKTLEDANLKLSSVLTQIMGKSGRAILEALVDGEADPDKLLTLVQRGVKAPPETLRAALQGRVTLRHRFLLRLHLRQVDALDAAIAEIDMEVGRDLDPFRQAVRLLSTIPGVSDLTAQVIVSEIGIDMSRFPTSGQLISWAGLCPRNDESAGKRRSTRLRKGAPGTASPCLPPADRFAMVEDHARAVRLGRGSQKGQLSASPVPAPASPPRTQEGDLCRRRLDPERRLSHAPRRHLLPRPRP

SEQ ID NO: 63025 - protein, 425 aa, unidentified
MNSISNKKINQVTDQTLVVGMDIAKKKHYACFVDERGRVLKKPFPVLQSREGLEWLYQCIVEAMKEFGKTEVIVGIEPTGHYWLNLAYFLDEKGIPLIMTNPMHVKRSKELDDNLPTKHDAKDALVIARLVKDGRFSYPRILKGMEAELRVGATFRSKLVEEQGAVRNQMIRWLDRYFPEFSQVFPSFGKMALAVLEYTPFPSDLAGKELEEVLALYRQSEGLQSPQKPKAKKLMELAQHSIGVTEGQQMARIEIATLVRRYRQLEEEIEALTEQLIELVQTSVEYEWLKTVPGLGDATIVELLSEIGSFSHYQDPRQLIKLAGLTLREHSSGQHKGQKRISKRGRRRLRALLFRVMMPMIRHNEAFRQLHEYYTTRPDNPLRKKQSIVVLCGKLLKVLHAVCTKRQAFDVKRMMQDIFGLETAA

SEQ ID NO: 63026 - protein, 343 aa, unidentified
MKLHVLGIDLGKTVFHLVGLDSTGKVVIRKKCSRTQLLAFTANLQVQLIGMESCSGSHFLGRALREQGHEVRLMPAQYVKPYVQTNKSDFLDAEAIAEAVQRPRMRFVPIKTEEQLDLQALHRVRERWVMRRTAVVNQIRSLLLERGLTLPKGRSYVDRQLPRILEDGELRLSGSFRVLLAQLKLELGQLTARIEEMDRVIQKTAKENEDCQRLTEIPGIGPVTATALIAAVGNASAFQKGRNLAAWMGIVPGEYSTGGKQKLLGISKRGNKYLRTLFIQGARSVLQQRHKQAPGLSHWLAQLLGRTHQNVVIVALANKLVRMAWAVLCKNERYRAPVLAVTT

SEQ ID NO: 63027 - protein, 334 aa, unidentified
MKKRYFMGIDLAKASFDFCLLSSHGAVLWRGHLSNDANGIKEFLGQLKAGRWKVSLIHFGLESTGVYGNRLISGLHQAGLALSVLNPAQVKFFAISLLRRTKNDRLDAQIIARFCLERKPLATRPLRPIEEQLKLLVHERESRVCEQTRERNRAKKDPFQIQLPLLISHQRQDHLKQLQKELTQLDRAIHKLMASDLDLKTQSKRLCSIPGIAETTAAKLLSELAGKEFHSARQLAAYAGLTPSQFLAGGSCYGKTHLSKIGNAFLRKALYLPAAVARRWCKPLKPWVTLLERRKLSDLAIRGAIMRKLLHIAFGVLKHQTTFDPSLVFLPKTI

SEQ ID NO: 63028 - protein, 401 aa, unidentified
MAEDQPGVIGGVDTHRDAHVAAALDTAGRLLAVASFSATHIGYGRLLRWLRGWGELGCVGVEGTGSYGAGLARFLSAEGVEVKEVIRPRRQTRRGAKSDPADAEAAARAVLSGEASGLPKSADGAVEAIRMLRAARRSAVKARTCAINQLKALLVTAPEQVAAPLRGSSTAALMAACCGLRPGGGEAVAAAKMSMRCLARRHRALSAEISELDAEIARLCAKANPALIAARGVGADTAAALLIAAGDNPQRLRSEASFAALCGACPVEASSGRTVRHRLNRGGDRQANNALWRIATVRLRCDQQTKDYAARRRAEGKNDREIIRCLKRYIAREIYRLLTDPPVVPHGADLRQQRQLNAMTLDTAAAALNAWPTRISHLERGLIHDRDLAERYQQHLTQITT

SEQ ID NO: 63029 - protein, 408 aa, unidentified
MQVTFGIDVSKSTSTVCELIGESKNELTITNDHSGFIQLLKELSAFSKHPQIIFEVTGVYSRRLQAFLEDYDYDYVIINPLKAKKEMDLGLRHNKTDKTDAYHLALIQRLHHHPVNHLQSQTYKQLNSLSHFYDQLTSDLVMAKNRLHQALQSTFPEIETLFCSAKGKNYWQILLHYPHCDLVRKNDKKQIINWLVQLKGVGFKHAQKTADKLITLAYKAYPVVSCDSVEVEQVQYYAHRLLSLSEYREKIIERMVQLAKSLPNHDLENLESIPGFAQTTAVRVLSELGNLRRFSNPNKINAFIGIDPGRYQSGEMDSNLSITKHGNAVARKLLYRAIGQIDNASKTNPCHIADYYESKKLSSQTKGFKKIAIASIHKLIRTIYALIINDQLYDYNVATHNQKDFSRN

SEQ ID NO: 63030 - protein, 352 aa, unidentified
MVVTVGIDVHKNTHCAVAVDEAGRQRELPLTVRATDAGHRQLLRWAGQTFAEDRVEFAVEDCRHVSTRLERALLDAGQSVVRVPPKLMAQTRSSARTRGKSDPIDALAIARAALREPTLPRAEHTHASRELKLLVDHREDLVQIRTKAQNRLRWHLHELDPEFDLPARSLDLRRHQDRVQARLEELPGSLVRRLALEILTDIRELTGRINALEKEITGLVHLQAPQLLALPGCGPLTAAKLVGETANPARFRSEACFAMHSGTAPIPASSGKTDRHRLARGGNRQLNAALHRIAVTQTRLDGLGRAYYQRRRAQGDTTMEALRALKRRLARIVFNLLRPTDQTAAAALPQAA

SEQ ID NO: 63031 - protein, 410 aa, unidentified
MPKIVYPICCGIDVHKSFVVACIATTDKNLVTTYKRKRFSTFTGDLRRLAEWLAQNNCRDVCMESTGKYWIPVYNILEPTCKIVLAHPKYARAIKGKKTDKRDAKWIADIFKHDLINGSFIPPADIRQLRDLVRYHVKLTSYTTGEKNRAQNCLTVSNIKLDDVFSDVFGKAASAITERLIESNEPFDVKPYLTKNIKASPEQIQAAVDGAMCANQAEKLRIIRSHMDSLTLCKVNLESEILTVAEKFLPQINLVLTVPGIKSFSAVAIIGEIGVDMSVFETSRHLCSWAGLTPQNDQSAGKKKTTRISRAGVYIKPLFVQCALAAIGSKKHPEVRNRYHSIKKRRGHRKAIIAIARMLLTAIYNILKKSEPYNAELYRQADKPPTQREVSLAQAIFIIQRQGFIVTAPA

SEQ ID NO: 63032 - protein, 516 aa, unidentified
MTLKEPTPPDAILVAIDVSKARNDVLIEKPGSARRRRLVVPNTRIEHDRFIALLTSLGASVIAGFEATGNYHRPLAFRLLEGGISLRLVSSVALARTREALHNGWDKNDPKDAQVILHMLKIGATQTYADPLVSGINDIQELSKTHEIISKAKTKLWHRLLTHYLPLYFPEVARFAGNSRSDWFLAFLEAFPTPASITALSKEAFIDAAWAVVGRKVSKARLLGDIYETAASSIGLPVALDSAAIGMFRVVLTEGRSLIRQRDLIESQAHAMLAGHPDYQRLRQIPGIGPIIALTVLAEAGDLRRFGHHRQFLKFCGLDLATYQSGQFRGQTKLSKFGNARLRRAFWVAAQVAIRQTDNSFRAKYERYIARDRDNADLKRKALTAIAAKMARTAHAIIKSGSDYRPFVEGPVPGGRTSLSRSRGPTTSSRIAPRMVERFACSWCSTSSRADAWPSSSPVSPTAPRRRRSRPPSTRCRRSWPSLGAVEATARRRRLHRGYRRMAHYHGLRRRIGLAA

SEQ ID NO: 63033 - protein, 344 aa, unidentified
MPIITVGIDLAKAVFAVHGVDEAGKATLVKPKVARDQLVPLIAQLPPCLIGMEACSGAHHWARVFAEHGHTVKLMAPKLVSPYRMSGKRGKNDAADAAAICEAVTRPSMRFVPVKDEHQQATLCLHRTRQGFIEERTSTYNRLRGLLSEFGVVMPQSPERLRKEIGPFLDSLPGWARRCMSELLEHTSHIEDRLVELDRAINQIAREDDRSRRLLQLRGVGSTTASALVATIGDGHDFRNGRQVAAWLGLTPSQYSSGGKQRLGSITKAGDAYLRSLLVLGARSVMANLGNKQDPLSRWIRNLIERRGYWRAAVAIAAKNARMAWAVLHYGDTFKPEQAEPTGA

SEQ ID NO: 63034 - protein, 344 aa, unidentified
MILIGCDFHPSWQQVCWADTETGETEENKLVHTPGEAEKFYRRFAAPALIGMESTGNSQWFVEMATAAGHEVWIGDAAKIRASDVRQQKHDRRDAALLLQLLMEGRFPRIWTPSSQQRDLRQLLIHRHKLVRLRAQVKNELQHLALNQGVQKKRRLWSAAGQKLLREIPLKPWAGRRREDLLKLMEMLDQQIQLLDQAVQEAAGHDRQARLLMTQPGVGPVTSLAFVLTMGDVSRFPRGKQVASYLGLIPREYSSGGRQRLGSISKQGNRFMRMLLVEAAQVAVRCHPQLRSEYLHRCHQKPKGVAKVAAARKLAIRLYWMLRTQKPYPEIVRIESSSRVPLVG

SEQ ID NO: 63035 - protein, 408 aa, unidentified
MQVEHPVCCGIDVHKDTLTACLRCVDTNGHVSKEGREFATTYTSLLTLSDWLVEQHCPIVAMESTGVYWKPVYHVLVGTVEVYIGNAHELRSRPGKKTDKRDAAWIAELLAHGLIRPSFVPPPDMCALRDVTRTRVALVQTRSQSKNRVHKLLEDTNLKLGSVVSDLFGVTGRRMLAALVAGERDPQVLASLALGSLKHKRPQLELALTGQFTAHHGTLLGLLLELIEVLDRQMATLDQQIGALVAPLHAQIAQLDSIPGVDIIAARDIIAEIGTDMSRFGDAARLASWAGVCPGNHESAGKRYRGKTRKGNRYLRRVLVQCAWGARKTPTFLGRTFRRLEVRLGKKKAALAIAHKILVIVSHLLAEGTCYEEARYDQWNPRQEARERQRAIKALERLGYTVTVARAA

SEQ ID NO: 63036 - protein, 409 aa, unidentified
MSQNHFNWYVGIDWGSKKHRVYVMDAQGNRLGHRWIEHDGAGMKELLEWLHSFCGEQPEQTAVAIEVPHGALVETLVEQNFAVFSINPKQLDRFRDRYSPAGAKDDERDAMVLADSLRTDQHCFRRVHLAPADILRLRELSRLQESLGKECQRLQNQLWDLARRYYPQLLQLMSTPDQPWHWDLWQAAPLPAQGAKLSLNKITRILKQHRIRRVDAAKVHQILSAPALRLAPGAAEAASEHVLVLLPLVRLLHRQEAEVAQRVASLLEKLAAPQGENEHSDAAIFLSIPGVGPKVAATLLSESFQAITERDGASFRQQAGVAPVTRRSGKKTVILMRYACSCRLRDAMHHWAGNNMQRDPRSQQIYQQKQRAGKSYARGLRGVGDRLVDLAFSMLRHGTLYDPKRRMVA

SEQ ID NO: 63037 - protein, 352 aa, unidentified
MRTSQKITGIVTTIGIDIGKNTFHLVGFDQRGAIILRQKVSRSQLERRVANIPRCLIGMEACSGSHHIGRQLAEIGHDVRLIPAQYVKPFLKGHNKNDYRDAEGIADAVQLPTMHFVTIKTPEQMDLLALHRVRSRLVGRRTGVINQIRGFLIERGITVRQGPMPLRKALSEILSSDTDALSPRMVGLIADLAQDWRRLDERIAAVSAEIEALAEQDHSCQRLMTVPGVGPIISSAVVAAIGNGTGFKQGRDFGAWLGLVPKQESTGDRTILGKISKRGNKYLRTLFVQAAHVVLERRPSAAMRGLWPWVEQASKRLHRNMLAIALANKLARIAWAVLARGGTYQPRITHAA

SEQ ID NO: 63038 - protein, 365 aa, unidentified
MKEEKQADTRFVGIDLGKRTYEMAIVGKGGKVAMNNGKTFVAGRQSLYKKLRPSDKVALEAGNMAFMMAKEIQAAVGCRVYVLNPSQLAVIYCSMKKTDKEDALKLAHILEDCREERLPVVPVPSDKELGRRKLLANYRRAQQSRNRDINQLHALFVAQGITTKVKKDLCTCEFRKEEVLELVGIEREEAEYLLKRLELCEQRIVELEKQMEREAAGDEVIELLQSIPGVGPKTAFAFVAHVEVGRFDNASQVGNYLGLVPRVYKSGETVRYGHITKRGNGYLRALLVQAAWALTNTKRGEKLKLRYLYMTVEKSKSKKKAIVAIARRLAEMMYAMMRDKDWYASRPFTPGKQDIEKQAELALGV

SEQ ID NO: 63039 - protein, 321 aa, unidentified
MSRILVGVDVCKDFLDAHARPTGIQKRFDNTPAGIEQLVAWVESLAPERVVFESTGPYQKAAVGALLAADLPAVVVNARQVRDFAKGTGQLAKTDVIDASILAHFGEVVATVVRPLPPQEILEFRELCDRRGQLVRMLASEKNHRHAAQGASPKVIKNIDKHIAFLKRQIDDLDERMDHIVADSETFKAKDDILQSIVGIGPQISRTLLVHLPELGKGTRRSIAALVGLAPFADDSGTSSRIRHIRGGRGKVRIALYQAAVAAIRYCPTMKRFYASLKARGKATKVALIAVARKLLVLANALLRAGIPYQQPTNSVCLKNA

SEQ ID NO: 63040 - protein, 335 aa, unidentified
MKHYAGLDLSMGSTQVCIVDENGRKLVSEKVESSPEAIAGKLKRYGSIERAVIESGRMSPAICLGLRELSVPVVCIDARQAHQSLKAMKANKTDPHDAAGLAQLARTGFYKEVHVKSSAAHGVRSVITARSHLVKARVGLDNTIRGICATFGYRPGPGQGKAFLARLMEAAHIPGLGDAISSLLSVRAELVEQVKEMDRRLRVIASQSQACEILMSIPGVGVQTSAAFAAAVDDAGRFRQSRNAGAYFGLVPRRHQSGEVDWTGRITKQGDATVRKLLYEAANSILSRCQQTFALKTWAMKIAKRRGFKKARVALARRLAVIMHAMLRDGTLFQA

SEQ ID NO: 63041 - protein, 523 aa, unidentified
MAHSSTRKRTRARRVDVVQKPSGTFHPRVQQVGPEHFGIVTIDCAKLRSKWMLADFYGNVLIPPSPLAHNRPALSAAIDQLRQAIRDHDLKDVLVAIERTGRYHRAAQQAFAAAGFDTRIVHPFATKQFRQPADPGNKTDDTDLAALHRATVTGFALVEVGRDEAWTTFQLLIRHRRELVRKSAMLRCQIREHLDAAFPGFAANFADLWARGCAWHLIRHFATPADIHAAGLDGLCRSLDAADVRYQRRTLETILTWAEQAALPDLAATARRRFALALDDDLVQKAREIQAIERDIAAALCRTPYILLLSFPGVNVVSAADFADEMGPIEHYASSRAITGRAGLRPSRYQSDEVDRPNGPLVRCCNRKLRAAILRVADNLIKCNHHFNVLAHKWRTEKKDPRHTHVKVVLRFCRIAYQIVAGRQVFRHPCLQERHYVLAKLMAFQREHDTGSTESLRDLQAALDQVPQQEHRAEAKPLHEELERIQRGGRHGPQVLGDILPIVLARLGIGDVQSTESGEEDPA

SEQ ID NO: 63042 - protein, 429 aa, unidentified
MNSNPTDPAPDFAAFIGLDWGDATHALALYDPATGQSESATLAHSAENLHQWLDQLEARFGGRPVALALEGTRGAIFPVLLERPWLHVFAVHPATSARYRAAFTPSGAKDDQPDAQILLELLQRHRDKLTPLSLADAATRELAGLCEARRDLVDRRTQLLNQLLSLLKKYYPQARELVGDNLASPLALDFLSKWPDLIALKSARPATVKSFYYIHNVRRPETVQARLDFIAPARALTTDAALVGVAVRQLRVLVEQLRVVQKHVGQFDAAIATAFAAHPDAALFRDLPGAGAVLAPRVLLAFGTERDRYPDPGSLQKYAGLAPVREKSGGALWTHWRWHAPRFLRQSLVEWAGQTVVYCPWAKAYYEQMKAKDKGHWAILRALAFKWVRILWKCWQERTPYDEARYLKQLIKRRSPLAKILSQSQPANP

SEQ ID NO: 63043 - protein, 385 aa, unidentified
MQKRHDDSKACLTAFVQDNTVIVIIEMSLRSWLVAGMIPGIDREPLKKIAADPEVLLRLLYRWRDEAIKAGKEITRIAVAYETGRDGFWLARWLRDRGIDAHVIHATSVAISREHRRAKTDRIDTAMLRRGFLGWLRGERGHCSMAVVPTIAEEDAKRPHRERESLVKERTRTINQMKAILTQFGVRNFKTASRKATEKIDDVRTPEGVPLPPNAGAALRRQIEHFRLINGQIKTIEKTRLQRLRQQPTDKFNAMVFLLVRIIGLGIETAEQLVHEILSRKLRDRKAVARYSGLTGSPDESGARRREKGLSRSGNGRVRKILIQLSWRMLQFQPDSSLVRWFKDRTANSQRSRKPMIVAFARKLIIALWRYVNTGVTPEGFKLAK

SEQ ID NO: 63044 - protein, 444 aa, unidentified
MRERSGEGRVQEVTDEPLYRDRVCGIDIGKAGLVATIRVPSDRDPARRMQETRSFGTTKREVLALADWLRSWQVPAVVMEATGDYWKGPSCRLEAEGFECVLADAKQVKNLPGRPKRDPADSRWLAACFERGAITSCFVATPEFRIIRLHTRYRRDLTEERTREKQRAEKLLESAAIKISSVLTDLHGVTGRDIMDHLIAGERNPKVLAQLARAAARRKISQLEEAVEGAEFFTADHGALLAKVLARIDRLSADIDDLSKAIERLLAPYEEQLQQAESMPGWQRRAAQDAVAETGVDMSRFRTGPHLVSWAGRAPQDHQSGKRKGRAKAKKGNRYLGAITGETAVAAGRTQTREGARHRRLARRRGAAKACVATGNTQLKVYHKLLSNPGMRYEDLGPDYYERQRDTRRQVAHHVGKLGSLGFEVTLCRISEPDPDGTDPAQAA

SEQ ID NO: 63045 - protein, 355 aa, unidentified
MNGLRYIGLDVHQDTVSAAVLDGAGKLLMQSIFATRAAAILDFLHGIKGTLHVTFEEGVHSAWLYDLLQRRVARVVVCDPRKNKLLKSGNKGDLIDARKLAELLRNNSLSPVYHGGMSALEVQHRTRSYTMLTEDTTRVMNRLRAVFRSQAIRVHGRKLFRSDLRESHLAQLATPGLRQRAESLYRELDALHPLRLRAKREMLAECRKHPAMKWLRSVPFLGKVRTAVLIGRVQTPHRFRTKRQFWSYCGLALETHDSAEYRVVHGQVQRKSRPAQVRGLNWNHNHELKGLFKSAATMAAFRKGIFREFYSGLLAKGIRPEMARLTLARKIAAITLKIWKEGETFNAEHIKPQAA

SEQ ID NO: 63046 - protein, 312 aa, unidentified
MPETHTTYIGTDIAKLNFVADLSGTTETFEQSPRGFAQFRKRLAKNACVVCEATGGYEQPLVNDLHEAGIPVILVMPRRVRFFAKSLGLLAKNDPIDARLLTRYAKANAEALRLHKPAPCAQAQLRELLRAREELVEQIKLHANHAEHPSDIPLLVKQAAQRKRLLEKQLEEIESAIDRLVAADETLRTKAENLQRIQGIGKITARTLLAEIPELGALEKGQPACLLGVAPFCRESGERAAPRSISGGRPRPRRVLYMAAVSAIRCNPVLKVFYLRLRARGKLPKVALVAVMRKLIELTNLALKNPNFSPCP

SEQ ID NO: 63047 - protein, 356 aa, unidentified
MNRNVYGIDVGKQCFHVVTLNAAGTRTERQKLNRAQIVAYFAKLQPGIVAMETCPGAHYLGRHLERFGHDVRLLACQFVSPYRKSQKNDFNDAEAIAEAASRPTMRFQRIRPTEQLDLQAIHRVRQRLISERTGVINQVRAFLLENGVAVATGKLQLARQLPRILAEAESCVSPRMQRLILQLVQRWRQIDAMIDELTRDLAAAAKSDQLTKRLLTVPGIGPIVASALVATVGNAANFRGARDLAAWVGPAPIHHRRQTAVARLAIYRPGLPPVSHHPRGSVRGASAESLPRSARQMGRATGAARAHQHSHLRSRKQDRPNCLGGTTKKLGVRYAYCRNCVAASVSTQRRKTAGRN

SEQ ID NO: 63048 - protein, 350 aa, unidentified
MLIIGCDYHPAFQQIAFVDTDTGELQEGRLQHREEAEKFYRDLAAQGMKVRVGIEASGHARWFERLLAELNLELWIGDAAEIRAKRVRKQKTDRQDAQHILSLLLEDRFPQIWVPSWENRDLRQLLWHRHRMVQARTRIMNQLQGVALNEGLRCKKRLWRESGREQLEAFRLARWASRRRHDLLEMLDRLTPTIAELTQAIEQEVEKCPAAQRLRTHPGVGPLTALAFILIIGRAERFQCGKQVASYLGLVPLEKSSGNQRRLGHITKQGSSLLRFLLVEAAQVTVRSLPEWRSKYYHLTMRRGRKIAKVAMARKLSVRLYWMMSKEWDYGQLTKFGSHAGKLGTGDGVK

SEQ ID NO: 63049 - protein, 307 aa, unidentified
MNSGDNYLDIHRRIDPASESLHVAYDEQGVKEVCRRLTKVAPTLIVMEATGGLETRLASVLVAKGLPVAVVNPRQTRDFAKATGELAKTDRIDAAVLCRFAQAIRPAVRPFQDADSRDLEDLVNRRHQLVANRVQETLRLGTAASKALQKSLKSHITWLDRQIATLDDDLGKRLRASDAWKAQDDLLRGIPGVGAVTSLTMTAKCPELGQLNRQRIAKLVGVAPLANDSGKHRGKRFVWGGRADVRAALYMATVSAIRCNPAIKPFADRLKQAGKPAKVVIVACMRKLLTIMKAMVKNNAPWDPKRA

SEQ ID NO: 63050 - protein, 332 aa, unidentified
MDKFYFIGIDVSKKKLDICVMYGSKVLIEEQVSNSTKVITQAIKHIKKELDITNDMLIICAEHTGQYTYPLICATKSIDCKLWLENPTQIKYSCGMTRGKNDKVDARRIATYAFRFFDKMKCYVRPSEAIIQLNQLQAERSMYVTDLAKYKAILTDQSDFIPKDIYIQKAKRIKVLMASLQQAISVLEKKMNEVISASAMLSRQMSLLTSIDGIGRVIAMNMIVATEAFTRFENARQFCCYAGVAPFSYTSGSSQRSQNRVSLRADKSIKSLLHLAAVAIAHRKDGELKEYFLRKVEEGKNKMTVINAIRAKLVSRMFSVVKNDRYYLPVLA

SEQ ID NO: 63051 - protein, 451 aa, unidentified
MKKEKPRKGIVKMGSGLPVFNPCAAGIDIGDTLHCVAINDGNGGHEVKTTSAFTCDLHEIVDYCKSNGVTTVAMESTGVYWLVLYLLLEEAGIEPYLVNAKHAKNVTGRKKDDTDSIWLQKLHTCGLLQKSYQPDNEIRLLRSYTRQRKNLILLGSDSIRRMQKALELMNIKIHTVISDILGKTGMGMVKAIIAGERNPEILSTLCDPRIKASREDIIKSLDGIWKEEYLFMLEQAVDNYEFLQKQVKSCEQKIQQQLLKQVALLKDGDITGLEETPKKKSKAKKNQFDYSLLPYLKSIAGVDLCQIQGISEVTALEFISEVGADMSKWKSSKHFAAWLNLTPNTKISGGKIISSKMIKKNNKAGQLLRQAASCLITNKTPIGDYYRVMRARLGGKGAALATAHKLARIIYAMLSKKTEYNSGMIVDNQEKIKEEKIQKLEKQLARLKQAA

SEQ ID NO: 63052 - protein, 321 aa, unidentified
MTYVGIDVSKATFVIAYSSAKGSETKTFKNTVKGIREFIQTISPKENHCVLEATGNYSMLLVYLLSKAGFVVSMENPLKIKNFARVMLSVVKTDEIDARLIALYGERMQPAPFKLRNDSILLLKQKRTVLRQLKKQLTANTNLEGSLKVLPFIDSKSKKVLEKTIKFLQKQIKEMEEELTSLAEIEYKKQMDLLTSIKGIGATLAAALIIATGGFTYFDNAKQLTRYLGLSPTYQQSGTSVNVKGHINRNGDAHLRSQLYIGAMASLRCNTECKACFDRLRSNGKPGKVAIIAVANKLIRQAFAVVTQEKPYVDGYKSVKP

SEQ ID NO: 63053 - protein, 347 aa, unidentified
MPYHAQEEVQVFAGIDVSAGELNVACLRPEKDKETTATFTNTRSGHNALLAFLLRGNQRVRVCLEVTGNYSLDLALALQAHGQFEINVVNPRRARRFAESLGERSKTDPVDAHVLCEYALRMPWVPWQPPSSTALHLRAVMRAVEDLTSILTQEKNREHALAASHALPSLVLTELKRHQRYLKNRLTRLRREALRLVARDLQLSRRFQLMQTTPGIGENSALQILGELAVLPDTLDARQWVAFSGLDPRRFKSGTSVEQRPRISRAGSRHLRRALYMPALVALRHDPHLGSFYQHLLKHGKARLQAVVAVMRKLLHAFFAMFRSDQPYDGSRLCPFELANKLVDSCG

SEQ ID NO: 63054 - protein, 419 aa, unidentified
MTKKSKNSTLIQIVHPICCGLDVHKDKISACLITVDDNGKEQHEIREFSSFTQDLQKMKTWLIGNNCPVVAMESTGVYWHPVYNTIEDTIEVVLVNARHIKNVPGRKTDICDSKWLAGLLRHGLVKGSFIPPEQVREWRELSRLRKIYTESLADYKRRVHKLFITANIKIDSVVSDLFGVTGLNLINLLCKNDEVTLEKVQECTKGSLKKKIPELYLSLHGYFKDHHRFQLIGMMEAIEMFQRQIEQINSRLEILTRDHENLLERIDEVPGIDKKSAQSVLGEVGVTLDEFKSMVAFVAWAGLCPGNNESAGKRKSGRNAVRNHPFKTILIQIAWAAIKTKGSYYKAKYYQLKARRGAKKAIVAIAHRIAKAIYNIIKNGDRYKDLGEEYLSKPNKQRMLKNLAKKADELGMKLVPCEG

SEQ ID NO: 63055 - protein, 337 aa, unidentified
MMYSGIDLHSNNSVVAIIDDADRIVAQKRLPNDITKIVGFLARWQDDLAGVVVESTYNWYWLVDGLQDAGLHVHLANTAAIKQYDGLKHSGDETDAQHLAHLLRLGILPTGTILPREHRVVRDLARKRMQLVNCRTTHVLAVENIMARQLGERMTSNQIKQLTADTIDSLPLAADVGLAIKANVAVIATLQSQIEVLEKRLQERVKPRPQYGLLTSVPGIGQTLATVIFLETGPIDRFADVGNFASYARCVDSVHTSNRKKKGEGNVKNGNKYLAWAFVEAANFARRFCPEAKRFHERKRAKTNNIVATKALAHKLARACYHILKEGKPFDVTRCFA

SEQ ID NO: 63056 - protein, 351 aa, unidentified
MLSETTAVPKLFIGMDVHKKSWTVHFKTDLFDNKTVTMPAQPSALINFVGKNFSGHQVSCCYEAGCCGYWIARALKEKGWQVRVVNPADVPRNNKQDWQKTDKIDSRNLCKHLSDGNLKGIFIPEEEQEQLRSLFRRRIHLSRQLRSIKNHIKSQLLYYGIQLPEQYDNPSWSREMKIWIGNIKWKFNSAAESMKSRLKQLEFIWYEELHISNELRAYCRKHYKKDYYLYKSVPGIGGITAAGILSELGDIRRFNRLDELAAIVGLVPGIYQSSENKINLGLTKRSNHQLRSLLVEASWVAVRTDMALQQYYRKHAHKEPNKAIIKVAHKLLSRIRAVIISGIPYQTRLIK

SEQ ID NO: 63057 - protein, 375 aa, unidentified
MNNNNTLYVGLDVHKESITVAYAINSEPVELMGKIGTSPTDIQNLCKRLRSKSSQVSIVYEAGPCGYGLYRRLVKSGFDCMVCAPSLIPKKPGERVKTDRRDAIRLVRSLRAGDLSAVYVPGIEDEAFRDLARAWASARDDLRHARQRLKSFLLVHGVHYVGRADWGPAHRRWLSKYSFESPWRQLAFDEHRRTIEDRQAQCERLESALKEAVTEWRLYPVVEALQAMRGIQFITAVGLISELGDLTRFEHPRQLMSWFGITPSEYSSGGSRHQGSITKAGNSYARKLLVEAAWSYRHPAHISPAIQKRQENLPRPVIDRAWDAQLRLCKRYRKLQAKGKNVNITIVAVARELAGFIWDMGRIAMSVAQQPQCHK

SEQ ID NO: 63058 - protein, 410 aa, unidentified
MDAILERCAGLDVHQETIVACVMFGPLDKRAKKEIRTFGTTTKELLQLQDWLAEYNCTDVAMERTGVYWKPVWNILEGSFHLWLANPQRIKNVPGRKTDMKDAVWIAQLLRCGLIEASFVPPEDIRDLRDLSRYRRKLLGDATAEKNRVHRILQDANIKLTTYVSDIFGVSGRALLESLVNGEVLEPHEVERMVKTQLKRKVPQLIDALNGRIRFHHRKMIQKHLKHLEYLEKEIEVLESDIAQLLSPYQEAVDLLVTIPGIQKDAAAGILAEIGCDMSMFPSEGHLASWAGVSPGNNESAGKKKSTRTRNGNKGLKSILCQAAWAAAKAKNSRLSSFYHRLVKRRGPKKANMAVSHLLLRIIYQMLLRNQPYSELGWDYLPKKEKSLEYWVQRIKTLGYNVVQLQPEIT

SEQ ID NO: 63059 - protein, 313 aa, unidentified
MSQNNLPILYVGLDVAKASLQLDLAGQPHTLANDAKGHAKLLKLLRDHPTAQIVCEATGGYEQPAVRTLHAAAVSVSVVEAGRVRHFARAKGQRAKTDLIDAAVLSEYGRAFEPAPTTAPTAQQTRLAALSTRRGQLLQTRLAEANRAEHYVDKLCLSQSRQLLRTLDKQIAAGEAAIAELIAADEILQAKATRLDAIPGVGAITAGTVLAELPELGQISDEAVAALAGVAPYNQDSGNMTGTRHIAGGRRSVRCALYMATLSTLRYDKILKAFYLKLRAAGKKPKVALVACMRKLVVLMNRLLKNPEFQLAN

SEQ ID NO: 63060 - protein, 346 aa, unidentified
MDIIGCDLHTRYQVVAWVEQESGEIMTRRLEHESGEVRAFYAQWPRGGVVGVEATFPALWFERLLAECGHELWVGDAARIRASEVRQQKTDTRDAEHLLDLLRTDRFPRIWVPSLAERDLRQLLVHRMKLVRTRTAVKNQLHALAISQGVCRKGRLWSARGRAELQSLALLPWATRRRKELLGWLDQLDESVAELDQAVEEAARGRAEVALLRTHPGVGAVVGLAFVLTLGPVERFPNRRKLVSYLGLNPREHSSGGRQRLGAISKQGNSMMRWLLVEAAQTAARFDPQLRRAYQRLKFRRVSGVAKVAIARRLAVRLYWMLRARRNYAQLVRMSGSPSSAVVPVS

SEQ ID NO: 63061 - protein, 380 aa, unidentified
MSQVTIVGCDLHDRSMLLRVALGSKEPHEKSFANDIDGRWVMIQHLTEFARKHGSERIVFVYEASGQGFGLYDLLQYHGIEAYVLAPAHLPKTAKGKKNKTDARDAQMLLEQARGYVLAGNQLPIVWTPPLRLRNDRELVRGRLEAAEAVTRIKLQIFSFLKRYGIVTPEWFRKSRVWSRRFVRWLKEQAERMDQVLNPVLLALVERFELMRGQVTTLDRHLRQLAKTDRYRVPVDSLLKIPGVGRLTALTFLTEMGDLTRFSNRRQVAAYLGLCPSSFETGLADDRKGHITRQGTGRVRKVLCQATWTGIRRDTATAEAWQRIRGDKPGRAKKAVVALMRILAITMWHRALDAGVSEELTSPPPKPPSWITPPSGSLAG

SEQ ID NO: 63062 - protein, 408 aa, unidentified
MTFVGLDFHKRYITACALTVDGTVLAEVRQLPVSVDALSAFLRGLATPITVAMEATLYWPWLHDQLEALGHTVRVADARQVKLIWQARSKTDPIDARKLAELVRVNLFPAIWIPDADTRRRRQLLHGRAFLVRQRTQVKNRIHGRLTAENLLFPRSDLYGRAGRTWLATAPVSAGLRTHIDRLLRIHDALTAEIGALDAEVKALHRDHPMIERLHTIPGVGLFGALFLVAEIGAIERFQSSHQLAAYAGLVPSTRSSGGKTAHGGTGHASNRWLKWIFIEIVQTLKRGPGPVGDHYRRLLRAKGKPKATTAAARKLCCYIYWMWREGRSHDAWLAQRHGGTTERRSEVRPGQLLGAVVAKRSCSSGWCGGGSTFGGRRTMKHAPWCRSHSGARSTAVSKRLDFQRCRS

SEQ ID NO: 63063 - protein, 370 aa, unidentified
MERFHGIDRHKAYSTISVLNREGVEIAFHPCIKDLRSYLDSLGSEDAIVLEASTGSFWWADYIEAKGITCFVLNPYRFKIIKDSWNKTDKRDARNMAKALWVYMVTGEFGLPTIYKPSIAVRELRKLFTYYNLLNRQIRMLKNGVQALLTENGIILEEADRKLLLKKNGDNTVVEKLDLTPSSILIISGELELLRNLLERKDKLTEAILLAGATFQKQVELLITIRGITPLVSLAFLADIGDINRFSSTRKMNAYLGLVPQCSDSGGKERHGHINRESRKLTRTILTQTLVQVADASPQFRKFYDELKERRGAGRARIALIRKLCGIMRRMVIVGEEYRDKEDNLFSKKAIQYRKILEQNKKECISKKTA

SEQ ID NO: 63064 - protein, 486 aa, unidentified
MANRKQSTFERLSSDRLNRQQRRELARKLTAENPGLEIVNRNVAGIDVGNESHYVAVAPGCDPQPVREFGSWTADLERMADWLKACGVEMVVMQSTGVYWMALYDSLEARKFKVCLTNARHTRNLPGRKSDVQESQWLLKLHTYGLLRDSFHPPEEIRALRSLWRLRDRHVKEAGRAIQHMQKTMTMMNVQLSNAISDISGATGQAIIRAILNGERDPWKLAKLRDRRIKATEEEIARSLEGNWRADNLFELKQAVDAYDFIQNQIAECDQRLQTLLAALPERDVRGTEVQAEAPLRESVRRKQKRKKSRADGNAPRFDLQAELKRVCGVNLTSIDGIDIMTAQTIVAELGTDYSRWKNESHFTSWLGLTPSRDISGGKIVKQESRKIKSPVATMLRMAASSLIRSESYLGARYRSLRTRLGAGKAIKAMARYLACLVYRMFTHGQDWVDRGTKEFENKRTQRELLSLQRKAANLGYRIVAEPASA

SEQ ID NO: 63065 - protein, 458 aa, unidentified
MNRKRSKAKIDRKMPMINPNAAAIDVGATMHMAAVRADRTPEPVRSFGTFTTDLHRLVDWFTECGVETVVMESTSVYWIPIFELLDARGFTVFLVNARDAKHVPGRKTDVSDAQWLQRLHSYGLLRASFRPKGQIAELRAYVRQRERLLEYAASHIQHMQKALTEMNLQLHHVVADITGATGLRIIRAILAGEHDPKVLARLRDYRCHASAKTIEKALTGSYRAEHLFALEQALALYDAYHEKVSACDARIEAVLKELSIGRGRRSDSVLSPRRPRTDQMNGLAFDVRAALFALLGKDLTQIDGLGPYLSLKLVAECGDDLSAWATTKHFTSWLGLAPSNKISGGKVLSSRTRRCGSRAAALLRLAAVTVGRTDTALGAFYRRLSARIGKAKAVTATARKIAVLFYNAIRHGMEYVDPGASYYETRYRTRVIDNLHRRAKVFGFVLQPMEAAPGVAVS

SEQ ID NO: 63066 - protein, 403 aa, unidentified
MNSVGIDISKGRSTIAVMRPFGEVVISPFEVRHTDSELSELARQLKSLDGETRVVMEATGNYHAPVAKLLHDAGLYVSVVNAKLVHGYGNNDLRRVKTDKKDAVKLANYGLDRWLTLPRYVPEEDTRLLLKNCYRQYRQYSKVQTVLKNNLISLLDTVFPNANRLFSSPIRGDGSEKWVDFVAEFWHCRCVSEKSERAFTSKYLRWCRKHGYNFSEAKAHTIYAEASGHIGVMPKSETTKLLVEQAVSQLRATSTALAALKHEMQSLASMLPEYPVVMDLFGVGPTLGPQLIAEIGDVRRFYSKKALVAYAGLDAPPNDSGDVTGRHKSMSKIGASSLRRTLFLVMSVYLQTAPLDEPVYQFMDRKRAEGKPYRVYMMASANKFLRIYYATVKAYLESLEHTA

SEQ ID NO: 63067 - protein, 347 aa, unidentified
MLYAGLDLSRQRLDVHVLDEDGRTIEVTAVRPDRDALRTLVAVVGRRGQEVTAAIESMNGARFVHDQLELAGWDVEIADALKVKGLAPLAAKTDRIDARVLAELARRDLVPAIWLPDPETRAERERARFRLHLVRHRVALKNRIHATLIAFGHPVPVSDLFGVAGRELLERLDIPEPWATTLDTSLRMVDELERDIEACEAELRRLGADHPDIPLLLTVPGIGWVLGYTIASEIGDIGRFASPKKLAGYTGLCPYVRQSGGRDDRGPLAKNGPKYLRWALIEAATNAARHPAYQERYERTKRRLGKQRGSKVARVEVARELATAIWHMLTKREPFAPGRPHAWPLVA

SEQ ID NO: 63068 - protein, 349 aa, unidentified
MRFYNRPHRHYCGIDLHVKTMYLCILDATGQVLLHRNVATAPEAFLTAVAPYREDLVVAVECMFTWYWLADLCAAHGITFVLGHALAMKAIHGGKAKNDKIDAHKIAVLLRGGLLPQSYVYPAAMRATRDLLRRRLHLVRKRGQLLAHIQNTRAQYNLPAFERRLAYPANREGVSLHFPDPSVRKSVEVDLALIDQYDTLIADLEQTLVREAKYDDPDAFHRLRTVPGIGPILALTILYEIHHIGRFDRVQEFASYARLVKCAHQSAGKTLGTGGAKMGNVHLKWAFSEAAVLFLRHAHAAPVAKFMGRLEQHHGKAKALSILAHKIGRAVFYMLARGTVFSMPKFLAA

SEQ ID NO: 63069 - protein, 343 aa, unidentified
MQSISTVGLDIAKSVFQVHGVDAFGQVVIRRQLKRRYVLEFFQKLRPCLVGIEACASSHHWSRQLQALGHTVRLMPPAYVKPYVKRQKNDAADAEAICEAATRPNMRFVPTKTVEQQSCLVLHRTRHLLMRQQNSVINAIRAHLAEFGIVAPVGRNGVEQLLRVVADSKDSRLPEIARACVAVLGAQLQMLKAQILDSDRMITAWHRSSEVSKRLDEIPGVGPVLATALVASVVEPKAFRSGRDFSAWIGLVPKQNSSGGKERLGNISKRGDRYLRSLFTIGALAVIRYAKIHGTKHRPWLAAMLARRPAKVAAIALANKLARMAWAMMARSERYKEPVALAA

SEQ ID NO: 63070 - protein, 349 aa, unidentified
MDSTTYGLDIAKNVMQLHWVDAETGEIGRKKLARAKLAEYFAKLRPARVVMEACGSAHHWARVLGKLGHEVELLPAAQVRPFVRSNKDDAADARAIWLAAQHRDIRRVPQKSTEQQAVLALHRTRSHWISVRTATMNALRGLLYEFGVVLRGGRKAGLKALSEQRAQIDEQLPQVMRALVDGQLQTLSQVQQRIDQLEHEIAAVQKQLSKARELRQVPGIGVLGSTALAATLGDGRAWRSGREFSASLGLVPAHSGTGGKVHTGHISKRGDSYLRTLLIHGARSVIEHAKDKPKWLQQMLARRPPNVVVVALANKMARTAWALVAHGRAYQRDWQSAKPGCSTAQAAAA

SEQ ID NO: 63071 - protein, 368 aa, unidentified
MSDIIRIGVDTSKSVFQLHGVDAAERPVLRKKLRRRDFLSFFAQLPPTKVGLEACGGSHYWARELMALKHEPKLLPAQHVRPYVRRNKNDKQDADAICEAMSRPRMSFVRIKSAEEQAAQMLMTTRQRLIDYRTQLINTIRGHAAEFGLTAAKGPAHVEPLLARVAKDVTVPALAKELFAIHGQEYDRLKIELREIEAKLKAWHRGNEMSRRLAEVDAIGPIGGCLLVIKAADPQTFHCARNFAAWIGLTPKDHSTAGKMRLGVITRAGDEALRRTLVVGATSVIKQVRNGKAHPSPWLRDLVARKPPKLAAVALANKVARIAWKLMVSGERYDAARAGIVSPTARVAPCSRRQGRCAPPAAVACGQP

SEQ ID NO: 63072 - protein, 530 aa, unidentified
MRADHLAACRNNGSSSAGFARAIDPYTASVASRRSGERRLACRGEKQEEETRRPSMAAKGLLTRGPKRSEPPEAHPQSVPVGKRTALKVQEKVAPRRAGIRATCRSRSAAASAVPEGGGPVRYHLGVDWADQTHAVWVVDERGTKITARTVPHTAEGLSEWGRELDEWRAHGIELWAAIERPEGRVVDFLLDHGIVVYPVNPKALDRARDRFRQSGAKDDPFDARVLADFLRTDHAHLRPLRPSSEAAQELKLLTEDYQRQVRQQTRLVNQLTITLKAYYPRALEVAELTTGLAQAFLQAYPTPAAVAALTERQWQRWARAHRLSATRTRELWEVLQRPQLPVPAHVVRAKARLMRSLVAQLTPVVAAVGEYREAIEDFFARMSTAQWIRTLPIGDHGITAPTLWARLGDAPGRWEAFRHLQAQAGAVPVTKRSGKQQRVVHFRVACDKALRYVVDQVAFLSLRSCEWARAYYDQQRGRGHSHRRALRALGAKWLKIIFVMWQRHASYDEPYHLATMARQQLRQPQTKIA

SEQ ID NO: 63073 - protein, 421 aa, unidentified
MTHGAHEAFAAFVGIDWADTKHAVCLQTADSTKRECFQLEHTPEAIDAWVTTRRTRFNGQPVAMCLELNKGPLVSALRKYDFLVLFPINPLTLARYREAFTPSRAKDDPTDAALQLELLLTHRDKLQPLRPQSPTMRALAQLVEHRRRVVGDKVRITNRLTSTLKNYFPHVLQWFQEKDTAIFCDFLSRWPTLKAAQLARRSTLETFFRAHHVRYADVIAQRIQAIKSATPLTTDDGVIAPNALLVQALIAQLHATLQAIADFDTAIAQRAQSHPDFSLFQALPGAGPVFAPRLLVAFGEQRDRYTSAADLQKYAGIAPVTERSGKKSWVHWRLQCPKFVRQTFVEWAAESIRHSFWAGIFYQQQRDKGKAHQAAVRALAFKWSRILYRCWQDRTPYDESVYLQALNNRGASLLQNLVHQS

SEQ ID NO: 63074 - protein, 366 aa, unidentified
MGKSSTVFVGMDVHKESIELATADEGEARHYARIGGEAAAVDRVVRKLRSVHRELVFVYEAGPCGFWIYRRLRAQCLACMVVSPSMTPRRAGDRVKTDRRDCLMLARLARAGELQPIYVPDAKDEAMRDLVRTREDAVCMQRQARQRLQALLLRNEIRYVGKTAWSAAHRRWIAGLKLPDPAQQIAFEEYVTALEEAGARLERLAQAIGTQLEHWRWRSLVGALQALRGISAIHAVRIVAELGDLTRFVSPRKLMGYLGMIPSEDSSGSRRRQGSITKAGNSSARRALVEAAWAYAHPARVSWVIARRQTGLAKSTTDLAWRAQLRLCARFRRLAARGLNRNKIVVAIARELSGFVWAIGQSVKPL

SEQ ID NO: 63075 - protein, 613 aa, unidentified
MATSAPLDRIGVGIDTARYGHRVSFRRPDHQPAAKPLTVMETRAGYQALREQLERLHQQHPQAHFHVRIDAAGQYAANLEHFLRGLALPMTLSIGEPKRNKDYQKAHFPKRTTDDTESQAMARFAVVELPKASLPLPPPMVLLREVTGRLQAQVKQTTQAINRLHNLMARVFPELATLTNDIAARWVLRLLDKYPTPERIAQARLTSLEKLPHLPEDKAEPLHQAAQQSVGALAGAVAETLVRDLVSQVRHCQHAEHNMRQLLTIAFADLPASGHVQLLTIKGIGEATAAVLTAKIVDIDRFETPDEIVGYFGVFPEENSSGVAKLGKPLPAGTLCMSRKGNDLVRHYLWNAARVGIRYNPALRALYRRLKAKGKRGDVAIGHCMRKLLHLVFAVWKTNRPFEEKHFPWEGSDSQVSTSVAAEGVVTSDSQVSTPSSDAAASAAVGAVQADSNNKAAGHKRDRPAQKVVTTANSSVDATPPAVNTPPASAPPPPAAAPAKARPQVDFALVRQQITREQVLRHLGFFESLRGCSQQRRGPCPVHGQPTDRKGTFSVHLGNNVCQCFQADCAIQGKVLDLWAAIHRLPLYEAALHLADTFHLHRNREEEHVKGTR

SEQ ID NO: 63076 - protein, 376 aa, unidentified
MENDSTLYVGLDVHKDSIMVAYAIGMGDVELLGKTGTTHIEVDRLCKRLQSKARHIVVVYEAGPCGYGLYRRLTEKGFDCMVCAPSLIPRKPGERVKTDRRDAIKLVRSLRAGDLSAVHVPTVEDEAFRDLARAWSSAREDLKQARCRLKSFLLSHGVRYVGRPDWGPTHRRWLSTFSFDSAWQQLAFNEHRRTIEDRLAQCERLEVALREAVPNWRFYPAVLALQAMRGIQFTSAVGLASELGDLSRFEHPRQLMAWLGVTPSEHSSGGKRRQGSITKTGNSYARKLLVESAWSYRHPARVSIDIQRRHEGIPKPIIDRAWDAQLRLCRRYRKLVARGKSAHVAIIAVARELTGFIWDIGRLGMSLASPLGPRSA

SEQ ID NO: 63077 - protein, 411 aa, unidentified
MRIIRKRCLGLDLHKKQITAHLRVHRGSDLEPETVDVQFGTMPEELERMRKWIRAREVTDVVMESTGVYWMHVYELLEGITTPAVVNASHVKKVPGRKTDVNDAQWLAELHAHGLLRLSFIPPKPIRELRALTRYRTKLVANRTAIKNRTIKLLEMAGIKLSSVVSSVFGKTGRAILDGLSQARTIDLTKAAKGTLREKLPQLEAALRCSLTDAQRELLQMHLRAYDSVDAQVAEVELQLLTRAKPYATMVEQLDPIPGINPLAAITLLAETGMDMSVYRNERHLTALAGLAPGNAISSDKRRRIAVRKGNRYLKRICVQIAWAASRKKDSFQRMRFLRLQSRIGRNKAIVAVARQILVLVFQVLSTGQPYQDLGACFYDARDKQRDVERYTTRLTALGFLVQLQTKNLDA

SEQ ID NO: 63078 - protein, 404 aa, unidentified
MVDTTAIDLFLGLDLGKEFHHAHGRTGDGRTVHDKRLPNTEPKLLELFSKLVAKFGTVLVVVDQVANIGALPLTVARAAGCRVAYLPGLSMRRAADLHPGEAKTDARDAFVIAETARTMPHTLRAVDRDDEVLAELTMLTGYDNDLAGEVNRATNRLRGLLSQIHPSLERVLGPRLAYPYVQALLQRHGSPARLRKLGRTRCEALLKAHGSRKAHHLTTEIFDALAEQTLVVPGTEASALIVPGLAAQLAAAHAQRQVTEQEIAALLEALPLFHLLTSLPGMGVRTTAAVIVAIGDGSGFPTAGHLASYAGLAPATKSSGTSIRGEHAPHRGNRLLKRALFQAAFAAIGCKSDLSSRVYYDRQRARGKTHTQAILRLARQRVNVIHAMIRTGTFYEPRTLDLAA

SEQ ID NO: 63079 - protein, 391 aa, unidentified
MVCVGIDVAKDKHDCCILDSDGMVRADCFTIPNNMDGFKQLLQTIRNCTKKSDKIKVGLEATGHYSYNILGFLLDNDLAVYVMNPLRTNLYRKSLSLRKTKTDRVDARTIATMLLSDVDLKSYTDTAYHNEELKSLTRYRFDKVRERAKLKQSVSRLVTILFPELEKLVPSLHIASVYALLSEYPGAKQISEIHLTKLTNLLTTASKGRYGKEKAIQIRDAARTSIGSVMPAKSLELKHTIKLIRELTSEIDEIEDSIQQIMNELNLPILSIPGMGVNSAAVILAEIGDFSNFESPDKILAYAGCSPSTYQSGKLTNCYAHMEKRGSRYLRYALYNATKYVCHWNPVFAKYLAKKRAEGKHYNVALSHATKKLVRLIYALQKSGKAYLTAA

SEQ ID NO: 63080 - protein, 322 aa, unidentified
MTSMGHAEKMSDNLPQTIGIDISKASLDCHAHPIGVERQFTNTAKGHKALIAWLRQWPVERIAYEATGTYHRALEAALTNWPCVKLNPERARRFAQATGTLAKTDRIDAMLLARMAATLQPPVRPARSAQQAQMAELINARDGLVRDRTALKNREKNLTIAFLKRQCRQRLEQIDRHIEALDAEIANLIAADAVLARRHQILTSIAGVGTLTANQLIATMPELGSLENKQAASLAGLAPVARQSGQWRGKSFIRGGRANVRQALYMPALVAARYNPDLKAKYQQLVTAGKPAKIAITAVMRKLVITANALLKADRCWAQSQT

SEQ ID NO: 63081 - protein, 326 aa, unidentified
MTTASFAYLGLDIAKAKFDAALRQDGRTHHHLFANTQVGFAQLLVWLRARVTVPLHACMEATGCYGEALALFLHQQGVRVSVVNPARIKAFAQSELLRNKTDKADAALIARFCAAHQPPLWIPPPPERRQLQALVRRLQALQAMRQQERNRLDLEAAGSLIGSGLHEHIAYLERQMAALEQQIQAHMRAHSSLRQQAELLQSIPGIGERTAIKLLAEVPLLGQYRSARQAAAYAGLSPRQRESGSSVRGKTRLSKVGNAAVRRALYLPAVVAVRANPILREFAARLLAAGKPKMAVIGAVMRKLLHQAHGVLKHNCPFDPNYAATT

SEQ ID NO: 63082 - protein, 410 aa, unidentified
MTEITIAQDAPVFVAIDIAKARHEVLIAVPDKKRRRRLTALNQLTDFNRLIAALKEYGRPVRVAFEATGNYHRALAYHLATAGFEVKLVSSVALARTREVLNNSWDKNDPKDAQVILHMMEIGNEQFYHDPLVQGTNDIQELSKTHDIVSKSKTELWHPVLTHYLPLYFPEADRFHRSSRSDWFFAFLERYPSPHFIAAMGKDAFTADAWDVVGRKVAKERLLADIYETSRSSVGLPVAPDSDAISMFRLVLGEGRSLIAQRNQIEDRAVALLKDLPDYQLLTSIPGIGPINALTILAEAGDLRRFGHHRQFLKFCGMDLATIQSGAFRGQTKLSKYGNARLRRTLWMAGQVAILQRTNGFRDKFERYIAKDRQNTHLRRKAYTAIAAKMARTVHGIIKHGEPYRPFFEG

SEQ ID NO: 63083 - protein, 340 aa, unidentified
MSLVLQSILPYPHSCQGTSPHQQGWDTKMEKLSYGGIDVSKERLDVVVLPEGRFFSVSNDAAGWAELAARLRPLAVSAIGLEPSGGYERGIIRALLAAGLSVRRINPNKLRQFARARGVLAKNDRLDARLIAEYVAIMPTRVVQRDDAVERLAEIVTMRRQLCDEHVTVENQAAHLEDAMLRRLSKRRLTRLAADIRLLDKRLAEMVATNAAFAQLYELLTSMPGVGPVLAFTLIALLPELGKMSRKQIAALVGLAPYDFDSGKLRGHRSIYGGRMPIRNVLYMAALSASRYNPALKAFSNRLADADKKSKVIIVAVMRKMITTLNAMLRDNAAWQPQSA

SEQ ID NO: 63084 - protein, 379 aa, unidentified
MEEAIKQCVGIDISKATFTACVCQKFADGRIRLSPVESFDNGKTGFNQLVKWGRKLGAPQLELLFLMEATGCYFEPLAYHLHRLNQPVSVILPNKVKHYGKSLNVKTKTDAVDARVIAQLGAERHLPLWEPPQPIFRQLRGVTRLRADLVRERTAFQNRITSGESAESVERQVSRGLKAVVKELDRQIDRCDQELEKLVQKEDWLWQKMTKLQSIKGIGLLTVATVVAETQGFALVKSRKQLASYAGYDVVQRDSGTSVKGKTKISKKGNSRIRAALHMPARSAALHSKSMREFYLRVNEGKPSKRVGEVAVARKLLLLMYTLWKKDEAYQKTTFGNQEAKPLLRQGEESEKKVGSPTELPTQDGLSYNQSAEVLLRRP

SEQ ID NO: 63085 - protein, 426 aa, unidentified
MKVMHDRVAAIDVHKDMVKVAVRVPGERRGTRKTDVLEFRTFYGVLEEMGRELRRRGVTHVVMEASGVYTEPVYYALAGLDFTEVMVINPAHAKALKGHKTDARDAIRLLDLYECGLLSGSYIPAPDLKEVRDLARYRMKTVQARASEIQRLQKTLETAGIKLSSVVSDVTGVSATAMIEALIDGERRGAVLADLAQGRLRTAGKMADLSMALAGRFTDHHALMCRLHLDRIQALGEAVAGLDGHIAPLAARHAREAGLLKSLPGFGDVVVAGWLGAIGPAPHQHFATAQRLASWATVCPGNYMSAKKSKGGRTGDGGNYIKPLLVQAAWAAVRVPGRLQARFHRLVRRFGGARNKGAIKRAIMAIAHTLLKIAYQVLKTGTPYTDLGADFYASRETPQARQDYLIRQLQKLNPGCVITVTPAEAA

SEQ ID NO: 63086 - protein, 408 aa, unidentified
MEIMYPRCCGLDVHKRSVAACVRRLEADGCLDQETRTFGTMTRDILEMADWLAAAGVTHVAMEATGVYWKPIYNLLENRFTLLLVNARHVKHVPGRKTDVKDCQWLAQLLQAGLLRPSFIPARPQREFRELTRHRSQLVAEKARVANRLQQVLEDANIKLGVVATDILGVSGRDMLRSLVAGEQDPGKLADLARRQLRSKIPELRRALEGKVTEHHRFLLGQLLAQVEHLEGQIEALSRRIEELSGPFAPAREAVVSLPGFEQRAAENVLAEIGADMSVFPSEHHLSSWAGVCPGSNESAGKRKSGKTTKGNRWLRSALVQAAWAATRKKDSYFQAQYRRLAARRGKKRAILAVAHSLLVVIYHMLKTGSTYQDLGGDYFDKLNKNRLVPYLVRRFKDLGFRVTLEAA

SEQ ID NO: 63087 - protein, 337 aa, unidentified
MERQYVGIDFHRRRSVIVRLNAAGDRLAVTRVANDPLAISAAVAEAGPVPEVVIEATYGWYWVVDLLRANGATVHLANPNALNWGERRVKNDVIDATDLADMLRLNRLPEAWIAPPGIRELRELVRYRAKLVGLRSGLKARVQAVMAKEGVLPTVADMFCAAGNAQLDAMTLGPNYELRVASLRELIAIYDREVAMLERDIHRHLRHHRSYAAVQAINGIGRTIAAVLVAEIGDVMRFPNPEALCSWAGLTPKHRESDVKARRGEITKQGSRLVRWSLIEGIARYHGGPKLSSDYHRIAKRRGVNKARVAIARKVLTLVYYGLRDGEIRCLARAAAA

SEQ ID NO: 63088 - protein, 346 aa, unidentified
MLSIPCVDEKVVGGIDTHKDLHFAAVVHVSGELLGERAFATTRQGYRALVKWMTSFGRVQRVGVEQTGSYGAGVVRALALEGIPVLEVTGPDKAERRARGKDDPLDAVAAALAALNGQRIRPAKRRDGRTEALRVLRTTRQTAVKARRAALQQLRNTIVAAPDKTRDRLRRRTRMQLIRGLAASRPDPLAFRDPDSATQIALRSLARRILELDDEIADLDELIAPLVKELAPELLERVGFGIEVTGQLLVTAGDNPDRLTSEAAWAMLCGTAPLPASSGKTRRHRLNRGGDRAANSALHMAAICRLRLDPRTKAYAARRQAEGLSKRETLRCLKRYLARESYHLLT

SEQ ID NO: 63089 - protein, 420 aa, unidentified
MDTLNTTSFTAFIGIDWADAKHDICIQSAADDDEREFDVIPHKVELIDEWACTMRQRFGSPIAVAVELSKGPIVYALQKHDCFVIFPVNPSTLTRYREAFQPSRAKDDPTDVELAVDLIIRHHERFKPLQPQSVEIRMLVSLVEQRRNLVADKIRITNRLRVALKQYYPQMLEWFDHIDTLLFCDFLTRWPTLLQVKRARQSTLRKFFHEHSMRFEHVLEQRLIAIKAATPLTLDEAVVVPHRLQALVYVEQLRVLLDAIKRFDIQIESVAKQHDDYALFTALPGAGPSLAPRLLVALGEQRERYKSAAEVQKYSGVAPVTERSGKKHWVHWRWQCPTFMRQTFVEWAAQTINKSYWAGEYYRQQREKGSTYQAAVRALAFKWIRILYRCWQTRTPYDEVTYLKALERRGSPLLAARKLT

SEQ ID NO: 63090 - protein, 436 aa, unidentified
MRVTDYLKPVLCRSDHREVFVEQPVYRCVAGIDVHKKMLAVVIRRPTGDSVEYIKRKFGTMKREIDDHLAAWLREHGVSEVVMESTAQYWRPVWYGLEAHFALHLTHPLKTRAPRGRKRDFRDAQRLADRWYSGDLEDSFIPGAEQRSWRWLTRSRVQLKRMVGVIRNQVEGLLEQGGIKLTAVATDPFGVSGWAMLELIAKGETDVSVLAAEARGVLRKKEASLKEALAGRLDPVYRLLLRQHMDQVELLRRQIADLNEALARAMSAHVAALHRLSQIPGVDLYAAQELLAEIGPGAVAFPSAEQFVSWVGVCPGSQESAGVCYSHRSAKGNRYLRRLLCQIAWAAIHTKDTFFAGLFARLKPKVEGKGAAWAVAHRIAKVIWLVMHQGVEYEEKGTAPPNPRTMVRKFRRLVREFGRQGVDVKALLDQELAANA

SEQ ID NO: 63091 - protein, 373 aa, unidentified
MSRTEEEKRLCVGVDLHKTQFTVCAVLGDEEIVLEEVFRTDEDGYRDFISRMHGFEEDRECSVELAIETTGNARFFKNMMESEGFTVVVVNTNRFKVITMSTRKTDANDAATLAFYLYKEMLPEAHICDQTSEEIRRMLRTRTILVRATVKLKNQIHGMMLGYGIETKGAQLQSKKKRQELFRDLADHGYSKFTASSLEVTLGILDDLDKQIKVVEKQLAEMVAQNEDVPLLMTVPGIGIIGATTIAAYMKDIGRFGGDFRRFAAYMGIVPGVHNSNETVHLGKITKRGPVELRTAFVQVALGMVRMPRVTAQWRLLKDYRLMKTDKGSGRAIIALTRKVARIVFTMIQTREPFNPDLMVREKFEPRKELMGA

SEQ ID NO: 63092 - protein, 341 aa, unidentified
MKNLFIGVDFSKEKVDVAIIFADGLTETAARVFNEFKTTVSGYKQLVKWVEQNSYGIDSSLWLFCGENTGDYSKGLCNFLYGKGYDMWLENAKSIKDASGLRRLKSDRADASMIAEYAMRNYDKAIMYEPLSESLAQLRELFLYRQMVVRHRCSFQVRRGEKRLTMEKSPIKTMISQSGRHIVSELNKEVEKIDKRIAELIKSDEELTEVFTIVTSVPGIGTQNAVCLMVYTDNFHRFNYDSRKISCYYGIAPFGKDSGTSVHSDPRVHYMANRQIKAMLTQAALAAVNFNPIMARYYMRLVERGKKKQVALNNVKNKLVHLITAMVRNRQLFTTEYKITA

SEQ ID NO: 63093 - protein, 391 aa, unidentified
MSMYFAGIDISKYKHDCCIIAAADQSVVAKFTFKNNKEGFDQLLTTINSLSSPEDIRIGFESTSHYALNLELFLENASLTFMEVNPVLISEYKKSTTLRRTKTDSVDCESIARWLMTVEYKPHSKGFYHAYSLKSLTRLRDRLVRQRSLYLVKLTNVLDHTFPEFKPFFNERFSKTALYLLENYGSAENMSAMNETDYNEIRRISHGKFSPQQFLELKRLATDTVGINNSIFDVELESLLSLYKSLAKEINTLESEIIRLINEVHPHFMTIPGIGPISAAVIYAEYGDISNFSSPAQMLAFAGIEPSVNDSGTESHGGKMVRHGSSPLRYVLLNCCLPLIRFDMTFATYYAKKRHEGKPHRVAITHVAKKLLRVIFALEKQNIDFNSQKLR

SEQ ID NO: 63094 - protein, 319 aa, unidentified
MAQNGLVVAGIDIAKDKADVSIRALSQRQTFSSTAEGRRQLISWLRKHKVTKAVMEASGGYEREWAEALREKDIEVRVVDPKRVRHFAQSAGRLAKNDVIDADTIAWFAETFGETPSQAHDAARETLRQLVNARQGLLDIRTVLSNKGEHDVPEPVQKSHARLLKAIAVELAKLEAAIAAMIKATPHFAERAEIIESVPGIAGTTSAGLIAAMPELGQVSNEAISALLGVAPYDDDSGKRRGERQIKGGRRKVRNLFYMACLGAATRHNPVLKAFYRRLIAKGKKAKVALVACMRKLIVILNIMIARGEKWDANRYAVD

SEQ ID NO: 63095 - protein, 437 aa, unidentified
MTATASECPPPPFQAPALPVGEFAALIGLDWGDRKHAIALRPRSVGPAAVETLDLEHSAENLHAWIKEIGERFGHQPVAVAVESSKGAVVAALMEYPWLVLYPIHPSTSRRFSTAFTPSGAKDDRPDAQILLEIIESHRQRLRALVPQDAATRRVAMLVEVRRKLVDSRTHATNQITSLLKNYYPQALELTGESLCAPMAMDFLGRWPELAVLQRAKAQTVRDFYRAHNVRRPELIEARLALIKTACPLTEDRALCEVSVLHLAALVAEVRALSAHVAKADAAIATAFASHPDAQIFQSLPGAGPALAPRLCVLFGANRERWSNASELQKYYGIAPVTERSGRQKYVHWRWSAPVFARQSLVEWAGQSIKWCEWAKAYYLQQKERKNRHSSILRSLAFKWLRILWRCWRDSKTYDDALYVAHLRERKAPLLAFLPAA

SEQ ID NO: 63096 - protein, 375 aa, unidentified
MDQHNRAFVGIDTSKLRNAVAVAEEGRGGEVRYLGEIDTAEAATRKLVAKLAAKYRQLTFCYEAGPTGYGLYRLIRKLGHDCIVAAPSLIPKKPGDRVKTNRRDAVGLAKLSRAGELTAVWVPDERHEAMRDLSRAREAARKDLKGKRQQVSSFMLRLGRHYPGKKTWGPAHMNWLMLQKLEHREQRIALEELLGAVRQESERVERLEQAIRDAVPEWSLAEVVTALQAMRGIDLVAAVTVLAEIGDLSRFQNPRELMGYLGLVPSESSTGDTVNRGGITKAGNGRARRILVEAAWSYRHPPRVSREKQIKVAAAPRAVREIAWKAQMRLCGRFRSLTRKGKRPTVVATAIARELSAFIWAINREVVESHATANQ

SEQ ID NO: 63097 - protein, 343 aa, unidentified
MVDNKSFSITKGGIDELLTFLLGVELTIDRIGIEGSGFLGQPLVLALAAAGYDVREVQANRTAERRKRRRRAKTDAEDAEAIAREALSDPELPPAGKHTAPSPTWQTLTVIRDWRESLVLQRVRLLTESEAVLVTLPVAIRATLPSTSRVLPQLQSLVDGVANPDLLSPAERLKLDRLAASLNDIITLTARIKELDRQIPALLSDLGCTLTEVRGVGVVTAMDLLVEIGDPCRFTTEAQFARWCGIAPVALSSGEGHGPARRHRLDLGGNRAVNSVLHIVHVTQVRCHPPAKEYMAKRVTDNKTKREARRSHKRQLANIIIRHMWTDARRSTATTPTSSAAAA

SEQ ID NO: 63098 - protein, 423 aa, unidentified
MGQWGARAVVSLTDRTSIDGNTKVDKAQTAWAGIDVGKTHHWVCVLDAEGNKLSSMKVANDQTEITATIATVGALADRIVWAVDIIGAPSAMLLALLIQAGQSVRYASGRVVAAMSAAYSGEGKTDAKDAYVIAETARIRRDLTVIDPGTDLVRNLELLTGHRADLIADRVRMINRLRDVMTSVFPSLEREFDYSSCKGALVLLTGYASPERLRRVGETRLAGWLQRRRVRNYAAVAARAIAAARAQSVTLPGQEIAAAMIAELATNTLALDQRLTELDAQIAATLDEHPQAEIIQSMPGFGPILGATLLVAAGDLAAFPSAGHLAAAAGLVPVPNDSGRRTGNLHKPRRYSRPLRHVFYLSAQTSMMRDGPNRDYYLKKRDRGRTHTQAVIALARRRIDVLWALLRDERIYTAIPPTLAQAA

SEQ ID NO: 63099 - protein, 403 aa, unidentified
MDCALLAYDVYVGIDIGKFTHHALAQRAEDQKIILSKKLKQDEAEIRSVLEELGAIGRILVAVDQKSSIGQLVVSVTKAMGIDIGFLTPNDFYHFSKGYSEVKSDIKDAFVISDVAMRFTDRLSAITESDEEKASLKAMCASRKALVEENTREKNRIRSFLVQTHPSLERTISRDALDKTAYLRILERYGGFLGIRRAGQKRFEGFVAKQPYYKKKAPEIAERIFEALRKQTVVMPGTEAKEATIKQSASSIIGRSAQITPLEAEIAALYHSFSESAILSSIPGVGAVWGPVLLSEIGDINQYKDAGHLAAYGGVAPSRRQSGTTLDSSKKKVKCNRRLKEAFCQSAWSSVPRDEWSAWYYSKKIAEGKVHQQAILALARHRTDIIYAMLKNGSMYEPKTMKR

SEQ ID NO: 63100 - protein, 355 aa, unidentified
MREVRKISFKEKSIFIGIDVHKKSWKVCILCEEIEHKVYSLETSASVLGKYLRRNFPGAQYFSVYEAGFCGFWVHEALQSEGINNIVVNPADVPTTDKEKKRKTDGIDCRKLARSLRNGDLSSIYIPERDKQEDRSLVRLRTLMVKDQTRSKNRIKSVLSTFGIIIPEEKVGSHWSKKYIEYLRQEIKKSATLSHTIEFLLADLEKNRNMVAEVTRKIRQLSLEPRYLRKVDILRSVVGISILTAMTLLTEFGDFRKYKRLDKLVSYVGITPDERSSGEKENKLSITKRGNKFLKHVIIEAAWTAVRKDPALMLAYKNYSKRMLKTKAIVKIARKLINRIRFVLLNEVEYKLSTL

SEQ ID NO: 63101 - protein, 342 aa, unidentified
MVEISTIGIDIAKNVFQVHATGPDGGTVLCRRLRRDNVAKFFASIPPCLVGIEACGTSHHWAREIAAFGHDVRLMPPRYVRPYVKRNKNDSADAEAICEAVRRPNMRFVPVKTTKQQAVLIEHAVRDLLVCQRTQLVNALRGHLAEFGIVAPQGLHRVRELTAIVDSSDVRLPDAARAALRFVLDELVGVDARIAAIEAGIAKSAKADQTAKRLMTIPGIGPIIASRLVATVADPGVFRSGRDLAAFIGLVPRQHSTGGRARLGRITKQGNGALRRLFVNGAMAAMRQSKVLSADPWLLRLRGRKPPLVVAVALANKMARAAWAVMTREEDWRPRLGEAATA

SEQ ID NO: 63102 - protein, 360 aa, unidentified
MTTSIPSKTTVSYDSVKLGIDAHAKYYWVSRQLDGATPQPVQKMTYDELLLFVVKQQKLTPNLVTCYEAGAFGFHLHRTFEQLGIKNYVVQPQDWDERGKGVKNDRLDAAALCQRLDRYQRGNTKAFSTVRVPSEDQERERAISRQRQQLMRERQRISAMGRSLLATHNIHVTGKWWKGKTWTVVQKLAPAWVVERLEVFIIILKPLEEQELKLMHQLQEAAQEQKIPRGVGPLTFEILRREVGDWGRFNNRRQVSSYTGLCPREHSSGGKRRSGSVSKSGNPRVRAMLVEMVWRMMRWQPEYKPLRKWAHVLYSPTPNAAAKKKAVVAIARQLAVDLWRIFTGQCKAETYGLIYLPEAA

SEQ ID NO: 63103 - protein, 343 aa, unidentified
MQAVTTIGLDIAKSVFQVHGVDAAGQVLIRRQLKRRVVLGFFQKLPVCLVGIEACASSHYWSRELQALGHSVRLMPPAYVKPYVKRQKNDMADAEAICEAVARANMRFVPTKTPAQQSCLMLHRTRHLFIRQQTAVINSIRAHLAEFGIVAPVGRKGVTELLHIVADPSDKRVPEVARACLAALGNQLLSIKEQIVEFDRMIMVWHRSNETSKRLHYIPGVGPMLATALVASVAHPRTFRSGRNFSAWIGLVPKQHSSGGKDRLGSISKQGDRYLRSLFVAGALAVIRYAKIHGTKHRPWLTALLARRPTKVAAIALANKLARMAWAMMAKGERYKEPIALAA

SEQ ID NO: 63104 - protein, 319 aa, unidentified
MAEEVFVGIDVRKTELVMATRPSGQSMTLSYDRAGLKQLAARLNQLHPALVVVEATGGLRQRQVVAALWTAGIAVAVVNPAWVRSYARGRGSLAKTDRVDAQLLALFAERERPPARPPLDAETQALQELATRRDQLVEMRVAEEHRLQRVGAPLRKELRQHISYLERRIRQVEDDIDKTVRRSEAWRLKHDLIRSFPGVGKVFSLTVLAKMPELGTLSAKAAAALVGTAPFPDHSGTRHGRRRIVGGRYQVRNKLYMCALAALRCNPTLKQFYAGLIARGKLPKVALVAVMRKIIVTLNSMLKTNTKWSAPATPMLMQN

SEQ ID NO: 63105 - protein, 310 aa, unidentified
MENCVGVDVSKHHLDWALGGEGRVARVPNTPAGVRQMVAKIRHREVALIIVESTGGYERVLTEALTEADLPVALVNPWRVRRFGEGLGVLAKTDSLDARILALYGERARPTRRPLPGPRQRQMADLVRRRRQLIAMIVAEKNRLDTASGGIRRDIQALVKLLERRVGKIDERIDAAIAADPEKAENYERLQSAPSVGPGVARALIVDLPELGALGRKQISSLVGLAPFAKDSGRKSGNRRIRAGRTGPRTALYLAAMNGARFNPVLKEMYDRLIAAGKPPKVAFIALARKLLTILNAMVRDGTTWQQAAR

SEQ ID NO: 63106 - protein, 315 aa, unidentified
MEGVGGFVGIDVGKDFVDVAAGAASPRRYSNDAEGIGEVVAGLRARKPQLVVMEASGGYQRQLLASLCAAGIAAVAVNPRQVRDFAKAVGRLEKTDRVDAQVLRLFAERIQPAVRALPDQETQRIEELVGRRRQIVEMLVAEKNRLQQALVAEVRFDIQEHIAWLKKRLRDADRDLDTQIKRSPSWNAKVELLEELNGVGRVTAVTLLSAVPEIGTLTRRQIAKLVGLAPLSNDSGKHTGQRQIWGGRADARATLYMAALVATRHNPVIRAFYTRLLGAGKLKKVALVACMRKLLTIANAIVRKHLAAQISAASA

SEQ ID NO: 63107 - protein, 410 aa, unidentified
MEVVHAHCAGLDVHKDTVVACVRHMTDGKVTTTIKTFNTATQELLALSDWLSAENATHIAMEATGVYWKPVWNILSDGEFELVLGNAAHIKNVPGRKTDVKDAAWLADLMAHGLVSGSFVPDQTTQEMRDLLRTRKQLVRERTSHTQRIQKTLECANIKLDSVVSNVVGVSGRRMLEALIAGQTDPKELAAMAHGRLQATPAELEAALRGRVTAHHRFMLRLHLDQIDSFDEAIARIDKEVNDNDQNFRAAVELLKSVPGVGSLAAEVIVSEIGIEMNRFATAGNLVSWAGLCPKNDESAGKRRSNRLKAGAPWLKTTLVQCAWGAARSKGTYLHAQYVRIRARRGNQKAICAVAASILTTVYHMLKDGTFYEDPGPDYFDKRNKNQQANKLVNRLHNLGFNVTIQPAAA

SEQ ID NO: 63108 - protein, 355 aa, unidentified
MNSIKYVGLDVHRDTISVAVLNAEGKLMMQCVIATHASAILDFFRGLRGSLHVTFEEGTHSEWLYDLLVRRVAYLVVCNPRKNALLKAGNKSDAIDARKLAELLRAGMLSPVYHGQNSTLAVKHLGRSYAALTEDTTRIMGRLKALYRSQAIACAGAKVFGSRHRDEWLAQLADSGLQRRARRLYQELDVLQQLRREARRDLILECRKHNETKLLRTVPWLGPIRVAVLIGRVQTPHRFRTKRQFWAYCGLALETRSSADYQMVDGQLERRKKPVLIRGLNRNHNHDLKNLFKSAATTASGSEGPFRPFYENLLKKGMRAEMARLTLARKIAAITLHVWKKGEAFDAEHLKSQAA

SEQ ID NO: 63109 - protein, 455 aa, unidentified
MKVKAVSALRSKRGLHRVSGVEPQVVGLTPQTTDERKTDTMKTYILRDPKPVEPQKSTRPPRPKPAAAVTAAGLLPRPSATIKDPVLFIGLDVHNDSIAVSLAPSDATEVRRYGIIGGEHEDVLKLAKKLAEAHPGTTLKFCYEAGPRGFALCRCLQAHGWDCMLVCPSKIPRKPGDRVKTDRRDADQLARLFRAGELTGLYVPEPVDEAMRDLIRARFQVGRQQHRARQQLKMYLLRHNLRYGGQTSWTPAHLRYLAKLKMPFPTQQIVFQEMLDVISEATARLERYDQEIERAVPGWRWAPAVRAVMSLRGMALLHAATLVAELGDFNRFEHPGRLMGYLGLVPSEHTTGTDRQQGGITKMGNAPARRALVEAAWQYRAPARLSPHLKKRQEGLPKAITDIAWEAQRRLHHRYTHLTRVGKKKSQVAVTAVARELAGFVWAIARQVKPVATTP

SEQ ID NO: 63110 - protein, 470 aa, unidentified
MRKKSRKSIKMEIVNPNAAGIDVGSRSHYVGIGQGLSDVREFGVYSVQLKELVAWLLENDIDTVAMESTGDYWQNLFSEIINAGIKVYLVNGKYTKNPSRKKTDVLDCQHIQKMHALGLLNASFLPDEATEKLRTFCRQRLNMIELRSRTNMKIQKYLKLLNLRLDTVVKDITALTGMKIIRSIVSGESDPKVLASYRHYNCKKTEEEIAMALVSNGRADYLYCLEKELDLYDFHTSQLLEQDKRISIEISNYISSMEEVVDDLPSEKKHKKLNKNSIRTIDLNIASYQYFNGVDLMDIPGVSYSTILTLMSEIGPKGMKKFPSAKHFASWLRLSPNNKVSGGRVMSSKVQKGSNRLKIAFRNAAYSISRLKNSPLHKFYKKIAFKKGSTKAITATARKLAVIIWNMITKKVPYKAQEAYVYLDQKRKQLADLRKKMIKLGLDPNEHDIFTRPEYREKWLQQQVSKQSIS

SEQ ID NO: 63111 - protein, 367 aa, unidentified
MTKPFSTPTGAVLVAIDMSKHRQEVLIERPEGGRRRRVTVMATKPDYDRLATKLSAIARPILVGFEATGNYHRTLAHRLLTAGFELRLISSVALARTREALHNGWDKNDPKDAQVILHMLRIGATQAYVDPLAAGINDLQELSKTHETISKAKTQTWHRILTHYLPLYFPELARFAGNSRSDWFLALIERFPTPGSIIALEREAFVAEAWPLVGRKVSKARLINDIYETACSSIALPVPEESTAITMFRMIIGQARGLIRERNRIEEIAQATLADHHDYQLLRRIPGIGPINALTILAEAGDLRRFGHHRQFLKFCGLDLATCQSGTFRGRTKLSKYGNARLRRTFWMAAQVAARQRDNSFRDKLGR

SEQ ID NO: 63112 - protein, 448 aa, unidentified
MFIMHYKRLLTFIDGVSSYLSVGLDVGADFTWMSIALPNGSFVGKPFKIIHSDSRSRDLAVTKIKEAQETYSLKSRCFLESTGIYHIPLLCFLRDKGFDCSVINPIITKNSTNINIRKLHNDKFDSKKAALVGLNVSLKTSILPDDSVVDLRNLVRDYYYFKDLQSAVSLKLTAELKVSFPAYAKVFSKVTTQSSLKLLSSYPLPADMLAASKEDIVDIIRSTARFGEAYALRKYDAIIAAAQDAAVFGRALPSNAVRIRLYIDTYQEYQKHLDALLKALHETVEKLQDTLIYDQICLLQSLRGIGFLSAVVLIAEMGDFKLFSSPKKLYAYFGLDPAVKQSGKLNGDKVHMSKRGSSLARRVLHMAALNNVKVDKGSGTPVNPVIYDYYTRKCSGKKKPVAMGAVMHKICNIIFAMLRDNKPFEIITPEEHCRRFATEHPDKIRKAA

SEQ ID NO: 63113 - protein, 456 aa, unidentified
MSRKRRSSKKTGTPVLHSLNPNAAGVDIGATEIYIAVPADRDPQPIRHFSTFTEDLHAAADWLKSCNIETVAMESTGVYWIPFFQILEARGLQVFLVNAHHVKNVPGRKSDVSDCQWLQYLHSVGLLRGSFRPEQEVCTVRSILRHRDGLVQMASSHVQHLQKALDQMNLQLHHVISDITGMTGLAIIEAILAGERNPQTLAKLRDRRIKATESTIAKSLVGDYRREHLFTLNQSLAAYRHYQELIGACDKEIEQYLETFESKADPPEDPKWKSQDGQKTRGGRPAFDLQSHLYRIFGVDLTEIPGVHTLTTQTLLGEIGPDLSRFANAAAFTSWLGLCPDNRISGGKILSVKTRKVKNRAATALRMAAQSLYRSQSYLGHYFRRMRAKLGAPKAITAAAHKLARVIYHMLTTRQPYDETICGQNELQNRQRLEARLRKQARDLGLEIVAARTGAV

SEQ ID NO: 63114 - protein, 386 aa, unidentified
MKRNDLSRSLIAFDQATTLVAVVELSRGSWLAAGLVPHLTRQPLKKLRSDPDALLGLLLRWRDQAIKAGGRIKRIVLAFEAGRDGFWLARWLRARGIEAYVIHPASIPVSREHRRAKTDRLDAGLLMRAVLGWLRGEPKHCNMAAIPTVTEEDARRPTRERETLVREQTRAVNRIKSTLIRFGIRTVKVRLRQASKHLEELRGPEGEPLPSNTMAELRRDLARLQLIRGQIREIERARLERLKRAPRQGTHPMMRILARIMGIGIETADMLVHEVLSRKLRDQRGVARYGGLTGSPDESGNKRRERGLARAGNARVRHGMIQLAWRWLQFQNKSALAQWYRTRTAGAKPGLRKAMIVALARKLLIALWRYVTIGEVPAGAVLRPAA

SEQ ID NO: 63115 - protein, 379 aa, unidentified
MPSLMHRRRVLGDRITYIGLDVHKDGIVVAVAEGGRRGEVREYGRIGNTPAALQRLASKLGREGVELRFCYEAGPCGYGIQRQLSAHGHECIVVAPSLIPKRPGDRVKTDRRDAASLAKLHRAGELTAVWVPDRRHEAMRDLVRARLDAVRALRRARQQLSGFLLRQGCHYGRPAWTKLHRRWLAGLRFEQAVHHIVLEDYIAAVEAAEARRDRLTAQIEAMLPDWTLAPVVAALQTMRGMALVNAATLVAELGDLSRFANPRQLMAYLGLVPSEHSSGASVKHGGLTKAGNSAARRLLIEAAWTYRFPARVSRELRLRQEEQPRPICEIAWKAQLRLCARYRKLARSGKPANVVTAAIARELAGFIWAIARCQPPAAG

SEQ ID NO: 63116 - protein, 339 aa, unidentified
MKLYAGIDLHSNNSFISIIDENDNIITKKRVPNDLFTILNLLKPYANQLEGIVVESTFNWYWLVDGLIENGFSVRLANTTAIQQYQGIKCTNDDTDATWLAQMLRLNVLPEGYIYPKEERGVRDLLRKRAQLIHLRTTNILSIQTIIMRQTGNKIKGDDIKNLDPEGLMKILNNNPEVYLAAKANLRILQELSLEIIDIEKYIKSKVKLRPEFKNLHTVPGIGDILALTIMLETGSISRFKEVGNFSSYCRCVGSIRLSNGKKKGENNRKNGNLYLAWAFIEAAHYAIRFEPAIKKYYQKKSKNTKNVVAIKAIAHKLARACYYIMRDGVSYDLTKGFK

SEQ ID NO: 63117 - protein, 340 aa, unidentified
MNATTYGLDVAKSVFQLYWVDAQTGEIVNRRFARRDLIKFLTCRLPGRVALEACGSGHWWARKIRTMGHEVVLLHAKFIRPFVQTNKTDAADARAIWTAVHQPGMRTVAVKSEEQQAMLSLHRMRTLLLKFRTMQVNQLRGLLYEFGATFKAGRVAGLAEIRAHMAEFESQLPGTMLSCLQEQVARIDGLQQDIDRLEARIAAWQKQDAACRAIADVPGIGKLTATALVATMGDATMFKSGREFAAFLGLVPRQSGTGGKVRLGSISKRGDPYLRTLLIHGARSVMYHTKVPTPWQREIQARRPANVVAVALASKMARTAWAILARGQAYQRNFVSVKPA

SEQ ID NO: 63118 - protein, 395 aa, unidentified
MYSLLVGIDVSKDFFATAGIDFEGKESISRSYSMDSNGFDDFLKTIRSHCEDLSRVMVAMESTGCYHINLFSFLASQGIRTMVVNPLLIANFAKLSLRKTKTDKKDAMTIARFLMDHHEEVSHLSLSQDHQDLRDLSRERESLCHLMAATKVEIKRVLRTIFPELESIGNLYTGAMLRFLQQYPSARLVRGAKPRAIAKALKGPYVGDKLTFSAEDILGAAKTSIGTVSPAKEIILQGKIATLLHFQERLDEMTKLLTDLCKATRIDDLKILRSIKGVGLKTAAPFLAEMGEVQHYASHKKLIAFTGIDPSLHQSGNYIGMSKLSKRGNRHLRRAVYLMTAAVASKNPFFKAYFLKRKREGLPPQKALFATAHKLIRVIFAMLTQRTYFNPKEVI

SEQ ID NO: 63119 - protein, 359 aa, unidentified
MNTRLSKKQMFFNKVKLTKDDNLYIGIDVHKESYGVALWLNDTPAIDFIMPADTEKLLKLLEKVRIALKRIVYEAGPTGYSLARTLQKANLPTAVVAPSKTPRQSARDSKTDQLDAKTLARYAAKGLLRPIAIPTMRQEADRQLTRTRDQLVSKQSEVKLQIKSFLLQHGIEQPPAVRAWSANAVRALDALKLSKQLRFCLDLLVQELQFQQNQLTTMEEQLKQTFDNDRHAREVALLKTHPGVGPVIARQYTAELFNPKRFKHTTEVAKYVGLAPTIIQSGQSLRDGPVSKTGRPRFRSNLIQGAWVWVTKDPKAHITFLRILHNTGSKNKAITAMARRLAVHLWKMLCDNKPFTNIA

SEQ ID NO: 63120 - protein, 376 aa, unidentified
MTTTTRSGFSSVSEPTLYVAFELGKKEWKLAMTSGFGVAPWLRTVASGDLRAVARALEQGRRHLGLPAQAGVVSCYEAGRDGFWIHRALVQMGVANRVVDSSSIEVNRRARRAKTDRLDALKLVQMLVRVCYGERRVWSEVHMPTVAEEAARQVSRERTALTDDQTRLINQMRGWLATWGCTLPARRRPGWWTTMRDWAGAVLPVELQARLARAEARLEVVEGQIAELEARQQAAVTTAAPASALRQLVRVKGVATTSASVLLAEGLVWRAFRNRRQIGGLLGFAPTPHDSGGSEREQGISRAGNHRLQAISIQLAWNWVRWQPDSALTQWYRAHFGTGKRARRIGIVALARKLMIALWRYVTTGVVPAGAILKVA

SEQ ID NO: 63121 - protein, 344 aa, unidentified
MKIAVLGIDLGKNVCSVVGLDPSGAVVLRRRVRRDTLIDLVAKLPSCIVGMEACCGAHHLGRLFAAQGHDIRLMSPEYVRPYVKAQKNDDRDAEGIAEAATRPTMRFVEMKTEDQLDMQTLHRSRERLVGERTALINQLRAILLDRGIVVPQGKRKLEQYLVILMNEHGGEGLSARMRMLVADIRAQWQELDRRIGEFDAEFVRWAKENEDARRLVTIPGVGVTISTALIAAVGKAETFEHGRDLAAWLGLVPRQWTTGGKPRLMGISKRGNKYLRKLLIHGARAALPYVAEKDTALGRWAKSLLSRVHQNVAVVAFANKLARICWAVLRSGQKFAAQETPLVV

SEQ ID NO: 63122 - protein, 427 aa, unidentified
MSEIGSIQPELQFAAFIGIDWADQKHIWCLQTAGSAKREIGELEHTPEAVESWVAHLYQRFAQRPIAVAVEQSRGALVFMLSKYEPLHLFPVPSQMASSMRQALYPSGAKDDPRDADLLLDLLLQHRNKLRRLSPDSEATRRVQNLVEERRKLVDEKTAQINRLTDHLKVYFPQMLEWFGRLDSDVVCALLERWPALEELQKAPPASLRAFLRKHRCRDREQIEHRMEAIRQGIPAIRDRAVIEAKSAAVRVIVRVVCVLGEGIEDLDGQIEEAAAAHPDFFIFNSLPGAGPVMAPRLLAAFGSQRERYRSADEVQSFSGIAPLTETSGKRKWVHFRWACPKFLRQSFHEWAGHSIAQSEWARAYYQQQRSKGNTHHEAVRALAFKWIRIVFRCWQDRVAYDENTYLAALVKRGSPLGAIVAMGKTL

SEQ ID NO: 63123 - protein, 412 aa, unidentified
MDVVYRCCCGLDVHKDSVVACVRWAGDNGQHRQEKRKYGTFTRHLLELSDWLKLCGVTHVVMESTGVYWKPVWHVLEGSFELLLANAQHVKAIPGKKTDRRDAGWLAELLQHGLLHGSFVPPEPIRGLRDLTRYRVSLAQECNRIANRIQKVLEDANLKLASVATDPLGASGRAMLQAIVAGEQEPEKLAELSRGLLRRKIPQLQLALEGRVSAHHRFLLKELLDHLEFVEGKMTKLEKEIAVRMAPYADQLQRLCAVPGIDRVSAWGIVSEIGVDMQQFPDAQHLASWAGLCPGNRESAGKRQSGRTRKGSAWLRRHLCQSAWAVSTKRNSYLSAQFRRLAGRRGVKRATIAVAHSLLTIAYYILKSPAQFRDLGADYFDQLHPDQLKRRLVKRLQGLGYQVTLVPSPQSP

SEQ ID NO: 63124 - protein, 323 aa, unidentified
MAKHITICAGIDTGKRKLDVAVEGRREQLQVENTSEGHAVLLAWLRRHRVKRVGIEASGGYEQPVVAELRRKRFVVVVFQPAQVRAYAKFHLQRAKNDKIDAALIAACTAAVRKIHPAPDPRLQPFAEQLTMIDQIGEDIARLKNRIESCRNTQIKGLWEEDLARLAKREKVELKALIASIRKHPDLAKRLDLINSIDGIGLPTAVAILVRMPEIGQITREQAAALAGLAPYDDDSGEQVGTRHIEGGRQRLRHALYAAALAASFRWNKQLITLYRRLIAAGKEHKRALVACARKMLVFANTIVARGTPWQDRPPENAALTAS

SEQ ID NO: 63125 - protein, 441 aa, unidentified
MDLLHTHGAGLDVHKQSVVAHARITDAKGRVTRHTRTFGTMTVDLLALAAWLLSLEVTHVAMESTGEYWKPVYNLLEGSFTLLVVNAQHIKNVPGRKTDVKDAEWIADLLCHGLVRGSFIPPQAQRDLRDLTERRTNLVRDRATVVNRLQKVLEWANIKLAAVVSDVVGVSAREMLAAIVDGQSDVSVLADLARGRMREKRAVLEAALHGRVRDHHRFVIASHLEQIDFLDAQIASFDTQIVECVNEQVPPNPPAATATPPPAAPPSTGDTDDLSWEDAIEIWDSVPGIGRRLAEQLVAEIGPQMREFPSAAHLASWAKVAPGNRESAGKRLSGKTGKGNRWLRTSLVQAAHSAVKVKSSALAVYYRRLAKRMSGKKAMMAVAHKILTIGYRLLSKRELYSEPDVRVRDTRRTEQLAAQMQRRLERLGYSVHIEPLTASAT

SEQ ID NO: 63126 - protein, 366 aa, unidentified
MPLPAAPGCEMVKVGGLTATGEDNMNDVTIIGVDLAKRVFHAHGSHSDGSVAFRKRLSRSQVLTFFAKQPRCTVAMEACATAHEWGRAIGELGHEIRLIPPAYVKPFVKRQKNDTSDAEAIAEAAARPTMRFVAVKTEEQQARSMIFRTRDLLVRQRTQLINALRGHLAEHGVIAPHGPANVRLLAAALNDADRSLQSLVRDIGAVYLEQISILNGKIGDLEKVLRREAQRGADTSRLQTMPGIGPITAMAIETFAPPMQTFKRGRDFAAWLGLVPVQHSTGGKQRLGRTSKMGQRDIRRLLIVGAMSVIRWASRRGAPEGSWLSRMLARKPLMLVAMALANKMARTAWAMLIKQENYRVPVMMAA

SEQ ID NO: 63127 - protein, 394 aa, unidentified
MATIGIDIGKRQHIAAVHHEGEREARKAILRFNSDRGGFAELARWLQRQGEVSRAVLESSGHYHLNLAAALQRSGVPVAIVNPLESKYFAKRRLQRSKSDPADARTLATLAMVDQPAVRDVLAGAELREAARFAMSLVDELGRIDQRICRLVELGFPELERAYDDPTCVSALAVLRSAPTAAAAARKRTATLAQAARPGGGRRIGAKKAEQIHTLAQDTIAAPELADQIGFQIRLLIAQHDLLEAQIAEAEAHLGTLMDGELVRRLRTIPGAGPAIVATLIAEIGDIARFSDFDKLVAYVGVHPAEKSSGEKGKDPETSWRMSKAGNAYLRTALYRMAIVGIQHNPLIKAHYARKRAQGKSKMNAVGHCMRKALAIVWGVWRSGTDFAAPPSLP

SEQ ID NO: 63128 - protein, 309 aa, unidentified
MERFVGIDVAKDRLDVHLRPSGEAFAVARDGEGLAQLVEQLSRLAPQLIVMEATGGYETIVASVLAAAQLPLAVVNPRQIRAFARATGKLAKTDRLDAAAIAHFAEAVQPPARPIADAQALALSELVARRRQVIEMMVAERNRRRMATQRRVLKAIDRHLVLLQAELSELDGDIDGAIRNTPAWQEEADLLDSVPGIGPVTRRTLIAELPELGQLTRRKIAALVGVAPINRDSGNLRGRRAIAGGRAPLRATLFMATLVASRANPVIAPYYQKLRAVGKTGKQALTACMRKLIVILNAILRDRKPWQTA

SEQ ID NO: 63129 - protein, 338 aa, unidentified
MDHFVGIDLHSNNSYIAIIDTDNTRIFKKKARNNLKEILKFLVPFKNQIKGIVVESTYNWYWLVDGLIDNEYKLHLANPSAIKQYEGLKHSDDITDAFHLANLLRLGILPEGYIYPKHERPVRDLLRKRMHLVRQRTAQILSFQNLVARNLGKKMNANTIKKLNEEDLDNLFEDEHLLLSAKVSISTIHFLKSRTIHLEKVIHKASRLKNEYKLLKTVPGIWNTLALTIMIETGTIERFEKVGNYASYCRCVQSNRLSNSKSKGKGNRRNGNKYLSWAYVEAANHALWNYNYVKKYHQKKTSKTNTVVAIKAIAHKLARACYYIIRDQKEFDPARAFA

SEQ ID NO: 63130 - protein, 391 aa, unidentified
MATAQRVVIGMDPHKRSVTIEAMTADESVLDGGRFGTDVAGFASMAEFVKRWPDRVWAIEGCNGIGRHVAMRLLADGEEVVDVPPRMSARARVFSTGQGRKTDATDAHSVALVGTRMAGLRPVVADDQLTVIRMLADRRRSLGEEHTRKVSQLHALLLELLPGGAKKDLSAAQARALLAKVRPRDQVGKTRRRLAAELVADLEKIHARKKAADKELRELVAVTGTGLLDLHGIGPSGAARLMAEVGDITRFPDRNHFASWTGTAPIDASSGDVVRHRLSRKGNRQINRTLHIMATVQLRNATDGRAYFDRKKAAGKSSNEAMRCLKRRLSDAVYRSMLDDAVKAKVTGSGGHQGNDSDSSAAGSQPRTSSSEKPHRSPSGTQPRTPLPAAS

SEQ ID NO: 63131 - protein, 377 aa, unidentified
MHKDGSAFVGLDTSKLKISVALAEEGRQGEIRVFGDIENTPGAVRNLVTKLTGKYSKLQFCYEAGPTGYGLHRQLTDLGQDCVVIAPSLIPKRPGERVKTNRRDAVSLARLHRAGELTAIWVPDAEHEAVRDLVRAREAAMLELREKRQHLQSFLLRHGRIYAGRRPWTKVHARWLSNLTFSHPAQYLVLREYRQSIEDAEVRLERLTDQVAEVVSSWSMSPVVDAYQAMRGVAFLTAVIFVAEIGDVRRFETPRQLMAFLGLVPSERSTGETVRRGGITKSGNPRARRVLVEGAWTYRYAARLSRPLEVRQERLPKTVRAIAWKAQLRLCARYRRLAAAGKRQTVVTTAIAREMAAFLWAIGREVEPLQPKQVAAC

SEQ ID NO: 63132 - protein, 396 aa, unidentified
MVIVGIDIAKRSHEAVLLRKDGEVIGKSFKFANSCTGFNNLLRRIREVTTDKADVEIGMEATGHYWLPLYARLKNEGYIIRVINPVQSDALRGLYIRQTKNDSKDAFIIAEVIRFGRYTDTAVLPEDLHALRELSRHRFYIVDSVSDLKRKVIALLDQVFPEYGDFFTDTFGATSTELLLNYTTPEEIIAVDTDKLCELLNTASRGRIKQAKAEEIKEAAVNSFGIILASDSIGLLIRQYIEQIRFVERQIKEIDREIARLFQPFGTYLTTITGIGPVLAAAILSEIGDIKRFDSSAKLAAFAGIDPRVRQSGEFIGTQNKMSKRGSPYLRRAIWLASSMAVLHDPAIKAIYQRKRAEGKHHYTVIGHICRKMVSIIYAVLRDNKPYVPAVSENRC

SEQ ID NO: 63133 - protein, 338 aa, unidentified
MTIETLGIDIAKNVFQLHGVNHGGRAVLKRRVMRDQLLDALARIEPCTVVVEACTGAFYWARKFEALGHRVKIVSPQYVKPFVRRQKNDSNDAEAICTAARQSHMPFVPKKSLEQQDIQALHRARQRMVNHRTAVVSQIRGLLLDRGFAFAKSITRARRMVPEILSDLDNELTDLAREAIGELYDLFRDLDRRIASFDKKIDRVFRDSEVCKRIAGIKGVGPKTATAIVAAIGDGAEFKNGRHLAAWIGLVPRQFSSGDRKILMGISKRGSQHLRSLLVHGARAVVRTAPNKTDPNNQWVNQLRERRGFNRATVAVANKNARIIWAVLRTGEPYRSAF

SEQ ID NO: 63134 - protein, 357 aa, unidentified
MLIIGCDYHPGFQQIAFVDTETGEYEERRLQHRQEAEQFYRDLAAQGMKVRVGMEASGHARWFERLLAELNFELWIGDAAEIQTKRVRKRKTDREDARLLLRLLLEDRFPRIWVPSWENRDVRQLLWHRHRMVQARTRIMNQLQAVAVNEGLLLKKRLWRERGRQQLESLSLARWASRRRQDLLQLLDRLNPTIAELSQAIEQEVEKCPEAQRLMTHPGVGPLTALAFVLIIGRAERFQCGKQIASYLGLVPLEKSSGNRRRLGHITKQGNSILRFLLVEAAQVTVRSIPEWRSKYFHLMMRRGRKIAKVAMARRLAVRLYWMWRKQWDYEQLKKFGSNAGQLGNRHGVQLEHRVID

SEQ ID NO: 63135 - protein, 405 aa, unidentified
MFCGIDWASERHAVCVLDDAGRKATALEIAHTGDGFDHLVTRLRRFGDPATLPVAIERPDGRLVDRLLEAGHPVVPVQPNAIKAWRDAEILSGAKSDPGDAALLAEYLRLRHHRLRVLQPFSAQTRALRAVVRTRDDLVDQRVAATNQLAACLDAFWPGAKAVFADVESPIALDFLTRYPTPESAARLGEQRMAAFCVKHGYCGRRPAAELLARLRAAPAGLTGTVEVEARRDAVLAMVGVLRALNQAIKDLDRAVVAHLGEHPDAEIFTSLPRSGQISAAQVLAEWGDCRQAYDGPDAVACLAGAAPVTKRSGKHTAVHFRWACNKRFRKAITTLADNSRHASPWAAKVYADAIARGHDHPHAIRVLARAWIRVIWRCWMDRMPYDPAKHGAARRLAETTTSAA

SEQ ID NO: 63136 - protein, 320 aa, unidentified
MEKVIFDQVVKVGCGIDVHKGIIVATIRKSESKLETKEFTSFTSSLTELREWCKSESVTHVAMESSGVYWKSVFNILEDGDFEIILVNARHVRNVPGHKTDKQDSKWLSKLLLSGLLKASFIPPVEIRDLRDLVRYKKKVVAQASSEKNRIIKILEDANIKLSSVLTNVDGAVGTKIIDDLIVGKTDINDLMKHYHGKIKAGKTEFRLALEGRLTKHHQFMLRVIQESIADKEKLIAKIETQIDELAKQYSVEIDLLQTIPGVAYDSAVSIISEIGANMSQFSSEQHLSSWAGMSPGNNESGGKKKAQPPSTGTNTYNQP

SEQ ID NO: 63137 - protein, 340 aa, unidentified
MGEISIVGVDLAKQVLQVHGAAADGQVLFRKKLSRAQFAKFMASLPPCVVAMEACATAHYWGRELSRLGHEVRLIPPIYVKPFVKRQKNDAADAEAVAEAAQRPTMRTVAVKTADQQARAMLFRTRDLLVGQRTRLVNALRGHLAEHGIIIGQGVGNIARFVACLDQDTLPELVRDLGRLYLDQIAQISDEIDKLDKRIATAARENSTARRLQTMPGIGPVCAMAIASFAPAMREFRRGRDFAAWLGLVPRQHSSGGKQKLGRTSKMGQRDIRRLLIIGAMSVVHWRGRHGGRPGSWLSRMLARKPRKLVAIALANKMARMIWAMLAGETDYRDPTGAIC

SEQ ID NO: 63138 - protein, 372 aa, unidentified
MKNGSIFVGLDAHKESIDIALVEGDRNSTVRYYGTIGGDLADLDKAVMKIKKAHPEASFHFVYEAGPCGYGIYRYLTKAGHECMVVAPSMIPKRSGSRIKTDRRDSIMLASLHRAGELTPVYVPKEEDEAMRDLVRARQDAVKAGRVAKQQLKGFLLRHGIKFSGKGDWKQTHVNWLAGLTMPNPAQQIVLQEYINAVKDCMERVARFTFQIQEVLPLWELAPVVKALQAMRGVSLQVAVTTVAELGDLKRFDNPRQLMSYLGLVPSEHSTGGSRRTGSITKAGNGHVRKALVEAAQTYRLKARISKELLIRQDGLPKQICDIAWKAQVRLCGRFRKMAARGKKHQTIICAIAREICAFMWAIAREVKPTTA

SEQ ID NO: 63139 - protein, 345 aa, unidentified
MSIVGGLDIHRKQITFDYLDTVTGQVRRGQIAPADREHLRAWLARFAGRDDVAFAVEGCAGWRYVAEELAAAGIAAHLAEPADTAFLRGRKRHAKTDKTDARHLRMLLAEGRLPECWIPPARILECRALLELYNDLRRERTAWAQRIHAVLFHQGAPVLGEGALRTEKGVAALRAAAAAHLSPAGQLQVATALEVIDALEARLHVVRHQLLDAARHLAGAKVLAARLYGVGPVTALAITCWLAGAGRFSSSRQAVRFAGLDITVSSSDRKGPPGKLSRQGPPVLRWAVYEAGKTHARTSAPDHRYYAAVKDRKNSKRACLSEARKILRQAHHILAELGDDALSAA

SEQ ID NO: 63140 - protein, 323 aa, unidentified
MQGQSQLEARSAQPVYVGIDVCKDRLDVHLHPLDQSFAVDNRPHGIRRLKHELARHDVALVVLEATATFHRLAHRSLSQSGIPVARVNPLRARLFAEALGTRAKTDRVDARMLALLGHSLAPRAAPPAPEAIETLQELVHARSAATAERTALANRLGASNTPFLKRELRRRLASLDGHIGRLDTEIAGHIAQEPALARRHAILVSIPSVGPTVSATLIADLPELGTLDRHAVACLAGLAPFADDSGDTNRPRHIKGGRGHPRRALYWAALSAARHNPDLAIFYKRLRDNGKNPKVALTAVMRKLVVLANTLVKEDRTWINHHP

SEQ ID NO: 63141 - protein, 402 aa, unidentified
MLFVGWDWASATHDVTVLDDTGAVVDRWAFRHTEHDLATALDRLAGLSEPAALPVIIERTSGLVVDRLVAAGHPVVPVHPTAFWAARPRWGASGAKSDAGDSYKLADYLRTDGHRLRRLDRSDPGLRELQALVRLREDHVRARTAASNQLGALLEAHWPGPKAVFYRLASPIALAFLADYPTPQAAAHLGEARMASFCRRHSYRGGKPPAVLLARLRSAPTAPVGIPPATLATLVGAQVQLLRALLGTIAEVEAAITKRVAGHPRAKLLVSLPGVGTINLAQLLAEVGPILDRVPSAEHAAAECGAAPVTKASGKTSGVYFRWAANRRARKALTAFTHNSRLASPWAGRLYADARARGKRNPHATRIVARAWLRVIWACWHQATPYNPALHTAALRAAARPT

SEQ ID NO: 63142 - protein, 402 aa, unidentified
MITVGIDIGKEKHAAAILGADGRLLAKPAFFDNTHDGAKKLWAQIARHGGGDGVRVGMESTGNCWKPFHDFLAAKGATVDVINPIVTSASMAGDVRGRKTDKQDAVVIAGIVARGERAARRPEGEGERDLKCLTRQRRYLVSDRSGSKNRLRDQLMESFPEFPALFNDLFSRLPLALLEKWPGAAELARARKDSVAKVVKANSRGKDAEKEAARIIAAAKDSICFAHPPPKSAARCILSTLRALRALDENIEEIDAEIQECERPEVARLMDGIKGAGKTMPMVIASEFGGFERFEASPTTGKGADMAKRMLAFAGCEPRIRESGKWKGRIKVSKRGSGQLRLALYLVANTIRMNDDYFRAVYDEKIKTKHHSVALFYVIRKLLEVLCSLHKSGRTYSIAKPN

SEQ ID NO: 63143 - protein, 347 aa, unidentified
MNFYNNIHPYYCGIDLHARILYISIVDQEGNTCAHKEISADPEKLKQILEPYIGNIVVGVECMHCWYWVSDFCNDLCVDFILGHALYMKAIHGVKAINDRIDSFKIANLIRGGNFPLAYVYPKEMRATRDLLRRRMKIVQHGADLKAHVVNTTSQYNLPPNKVNLKNKVAREQLRSTFSDLSVQKNIDLDMVILDCYAEQLSKVEWYIQQQAKQHKPNHFHLLKSVWGIGPILALTIIYEIGDIDRFDSVQKFASYARLVKCKAESAGKTYGTQGNKIGNAHLKWAFSEAAVLYLRGNEKAQKYLLKLQKRMSKAKALSALAHKLGRCVYFMLKNETVFDESKFLKG

SEQ ID NO: 63144 - protein, 338 aa, unidentified
MQVMKKIHVGIDISKEKCNLCYRSGLEIVREEECPNEVKALKKTIKAALKVLGVSLGDILVCAEYTGRYIYPLTVACQELDIFLWLDDPTRIKNSMGLTRGKNDAIDAARIAEYAYRYSDKAVRYRIPDAALVSMKNLLSDREFLLTDRKRFQSQLSDQKKYMAPGDFKHKNSRWKKVIKSIDEQIAAIDAEIEALIAADPVLARQKELLVSIDGIGDHIAINMIAITGGFTRFQNARQFCSFAGLTPYKYDSGTSVRSKAKISKRANQTMKALLHLAAVSAATHMKGGEYKEYYERKTKEGKHVMCVLNVIRAKLVHRMFSVIKRDAEYTKEYKTAS

SEQ ID NO: 63145 - protein, 320 aa, unidentified
MSASSVVVGIDVAKTHVDVAVLGAQLGAQRFDNQAEAHSALAAALKPLSVALVVMEATGGYETALACALQAAGLPVAVVNPRQARDFARSMGCLAKTDAVDARMLAEFAAVLLRREDLARFLRPLADPQQQWLAALVTRRRQLLAMLLAERQRLQITPKGLHPSIEAIVAAIKAQLDEIEGQMVGHVREHFTELDRLLQSASGIGPVASATLIAELPELGRLNRREIAALVGLAPMANDSGASRGRRRIQGGRFDVRRVLYMAALTASRRNPVIKAFYERLIAAGKLPKVALVACMRKLLTTLNAMVRTSKPWDHALHRA

SEQ ID NO: 63146 - protein, 428 aa, unidentified
MNCNTQNTKIASITEKTLIVGIDVGSETHYARAFDWRNFEFTRKPLVFSNTQAGFLTFKAWIEEIQEKNGKTAVIPGMEPTGHYWFALGKFLQDNGMKPVHVNPHHVKKSKELDDNNPNKNDRKDPKTIAALVNEGRFSYPYIPTGIYAEMRSLSNLRFQTQEEVTRIKNRIARWFAIYFPEYKDVYRDLKAVSGRMILKAAPLPEDIGKLGVEGVNQIWRDAKLRGAGMKRAKTLVSAAEHSVGSKEAPEAARMELKNLLDDMDVYTSRLEELVQKIEGKLKEIPYIDKLLEIKGIGMVTVSGFIAEVGDIRRFDNPKQLQKLAGYAIVANDSGKHNGESRISYRGRKRLRYVLYEAAISLVGKNAGFREIHGYYRTRKENPLKKMQSVVAVACKVIRVFYTILTKGVDYDAARLLGDIKHPQMQTA

SEQ ID NO: 63147 - protein, 412 aa, unidentified
MTEESFTWFAGVDWGSEKHHACIIDTRGTVVGERQFPHSGVGLAELGDWLLSIAGTTATVAVAIEVPHGPVVDSLIDRGFVVYAINPKQLDRLRDRFSVAGAKDDRRDAYVLGDGIRTDRRLFRRLHVADPRIVELRAWSRLTEELQEERVRLGNRVQQQLWRYYPQMQKITNDLAAPWFLALWAMAPTPGKARQLRRSTVEQILKKHRIRRIDADTVLRMLREPAIKVAEGIAEAASIHLRSLIARLHVVNRELRQAEQKLDQLCAGIGETEGAPGECLQRQDIMILKSVPGIGRINLAALVCEASGPLRSRDYPALRTLCGAAPVTKRSGKSQIVVMRYAAHARLRETVYHWARTATQHDAKSRCRYAALRQRGHSHGRALRGVADRLLGLTCVLLQRQTMFDPHFGQAG

SEQ ID NO: 63148 - protein, 348 aa, unidentified
MGLLASKVDFVVGVDTHKKSHTASVVEPTGAQIAQVSVTADASGYRRVLKFGCTHAPGRRVWAIEGSGSYGSGLSTYLLEQGEWIVEVDRPVRPARRNGAKSDELDATRAAREALARKHLAQPRRRGDREALRVLLRTRDGAVKGRTRAILHLKALVVTAQEGLRCHLRRSPTDEMIVRCSRLRTRAQHSVEHRATVIALRSTARRILALEHEANDLESHIQSIVSRLAPELLDQTGIGPISAAQILISWSHAGRFRSEAAFASLAGAAPIPASSGQVIRHRLNRSGDRQLNRALYTIVLSRLGTHPETRAYAARRTAEGKSSREIKRCLKRFLARRIFKLLEHTMTT

SEQ ID NO: 63149 - protein, 345 aa, unidentified
MKILALDLGNYKSVACIYETASLSHKFTRVVTRPKGLHDLLVEEEPDRVVIEICPLAGWVSDLVRALGIELQVASTTHDAWRWKNVKRKNDRQDGLKLAQLSALGQLTLVHVPEAGVRQWRALINYRQRLVSRRTRIQNHIRALLLRQAVAMGAGHRGWTRAGVAQLGALAKPLNEVEREELWRGELALELEGLKALAEPLRQVEQKLDELGAADKQVQLLRTIPGVGPRGAEALAAVIDKAQRFKRGKELGAYLGLVPKQIQSGESNRLGRITRQGNRLLRSLLVEISWSGLRYNSWMRSVYEQVRRGSNARKKIAIVAVARRLLIRCWAMLRDGTTWRPATST

SEQ ID NO: 63150 - protein, 418 aa, unidentified
MDKNDDSRLEEFRQLKRDIRGSTRHLVVGMDIAKERHHAFFGTPAGKVLLHRLVFDNTRDGFEKLCFQADILKTQHGLAHVVFGMEPSSDYHKPLGEYLIEHGHGVVLVAGTAVKKNRELLDNRWDKHDTKDAANVADLVTQGKCLFYEFPSLSLRELRSLLSLKRRLKKSEQGYKVRIRNHLIAQYFPEMDAYFNYAEGLVRCLDPKKLAGLHLQEFARMVSLGNAHQMSRLEEIHTKAAVSIGCAAHPSVAFEASLLLDGLKSLHLMILETDRRIAEVCKKFPEYPCLLSIPGFGPDISAKVLGALGNPHRFENHRQVLKMAGLDLSADRSGKRTDVTPVISKKGKADLRYGLYQAALIASTRNTQFMTYFTNKLKGREREKGIGTKMRVKLSAKMLVIAWTLMKKKEMFDPGCLG

SEQ ID NO: 63151 - protein, 339 aa, unidentified
MMTSFVGVDLHRNNFTYCIRVNGEERKIGKCDITELKGFAAMLGKNTAMAVEATGNTFMFCRSLKPHVGRLVVVNPSQFKVISMSTKKTDKHDAKVLAEFLEKDMLPEVRVKDDLQAKISSLTQTREKLVQLRTVLKNKVNNLLAANFIVLKREELSSEKGLLKALSYHFDPITDTEMLVVVEQIRSLNKSIEKLDKAIEDHGSKMDGFDNLKSIKGIGSKGAAILLATIGNIHDFRSSKHLAAYIGIVPRVSNSNDTVCHGRITKNGSKIARTALVQCGLIAKRYNPYLNAFHESVKSRRGGAKANIALARKFLDIVYRTLKNNWMFEDFTQFKLVKN

SEQ ID NO: 63152 - protein, 315 aa, unidentified
MEAAPVFIGIDVSKAQLDVAERPSGERAVMAHTEESITTLVERLRQRQPTCLVLEATGGLEVPLASALAVAGMPVAVVNPRQVRDFARATGQLAKTDAIDAQTLARFAEAVRPAPRPLPDDAMQAFSALLTRRRQLIEMLVAEQNRMQRAPHPIQQQIQAHVTWLKQQLAALNEDLTHRIQSTPIWREQEDLLRSVPGIGPVVSRTLLAELPELGTLTHKQIAALVGVAPLNRDSGTLRGRRTTWGGRAVVRAALYMSTLVATKHNPVIKVFYQRLRAAGKAPKVALVACMRKLVTILNAIVKHRTPWRLAVQNP

SEQ ID NO: 63153 - protein, 452 aa, unidentified
MKEEVKNKSALTNDQFVLEIINKQSGAIDVGSTMMMISYTDSEGKNHLIEANAYTDDLTEVAVHLKEAGVEKIGMEATGVYWMALYEILERHGIEVTLVNPKHFKNVAGQKTDVLDCQWLHQLHAYGILRASHIAPDIYRELRTYIHERNILQKQKSDTLNRIHKLLTKMNVKFQHLISDIEGVSGMSLLREIASGITNPENLLAKIDITKLKADKADLIKSLKGIYSPSNIYILRKTLESYDFFKRQMKEYEILIESVLKKMLPPDSKKEIKKKTSYVRKNQYSINVKEYLKRITGIDLTQIDGLDEICILEIISVTGLNLNKWPTADHFTSWLNLSPRKKITGGKVVGHQKRFTNNPATQCFRMAAQSMWHNKSSLGHLYRRLSYQKGSKKAIKAVARKLAVIFYHMLKNRQEYDPKRLQIDTERQKMIKIDRLKREAAKYGLKLQNVAA

SEQ ID NO: 63154 - protein, 310 aa, unidentified
MDRIIVGIDVSKDRLDVVVRPSRETFAVERNAAGVEKLAARLRELSPHIVALEATGGFETMVAAALGAAGLPLAIVNPAQIRAFAKAVGQRAKTDPIDAGVIAHFAEATNLEPRPLPDEQTRLLAALVGRRRQIVAMIGAERQREQRLTAPRLRKSIARLVKALEKELASLDADIGDTVKGSPVWRAKEELLTSVPSIGPVISRTVVAELPELGQLGNKQITALVGLAPFTRQSGKWRGKSFIGGGRTAVRAVLFMGALVAKKYNPSLKAFFDRLIAAGKPKMVALIAVARKLLTILNAILRDNRPWQTA

SEQ ID NO: 63155 - protein, 347 aa, unidentified
MEIRTLGIDLGKSVFHLVGVNSVGKVVVRKKCSREKLLHFTANLRVERIGMEACAGAHFLGRALRAQGHDVRLMPAQYVKPYVMTNKNHYIDAEAIAEAVWRPKTRFVPIKTDDQLDMQSLHRVREGWVHRRTSLVNQIRGLLLERGITIRKGRRHAEEALSEILEDPDTNLSWPLRTLLAQLQDELSQLQREIEEADAVILRTASEHEACRRLMAIPGIGPVVATATIAAVGNGADFEKGRGFAAWLGLVPRQYSTGGKQKLLSISKRGNRYLRHLFVHGARAVLRYREKQSSGLSAWLGKLISRVHHNVAAVALANKLARMAWAALAKGETYRPPLLIAVDPVAA

SEQ ID NO: 63156 - protein, 343 aa, unidentified
MQTITTIGLDIAKSVFQVHGIDAQGKVIIRRQLKRRYVLAFFQKLPPCLVGIEACASSHHWSRELQALGHTVRLMPPAYVKPYVKRQKNDAADAEAICEAVTRANMRFVATKTPEQQSCLMLHRTRHLFIRQQTAVINAIRAHLAEFGIVAPVGRNGVEELLDVVADSSDKRVPEVARACLAALGAQLRALKTQILEFDRRIMAWHRSSETSKRLDEIPGVGPALATALVASVADPKAFRSGRDFSAWVGLVPKQHSSGGKEKLGSISKQGDRYLRSLFTAGALAVIRYAKIHGTKHRPWLTALLARRPTKVAAIALANKIARMAWAMMAKGERYKEPVALAA

SEQ ID NO: 63157 - protein, 379 aa, unidentified
MSTTATARVSHRTESEVCLFVSFELGEKEWKIAWATSLGEKPRLRTLRARDTKRLLEEIEKARIAATAQRVLSCYEAGRDGFWLHRFLHAHGIENRVVDSASIEVNRRARRQKTDRLDAEKLLSMLLREALGEADLWSVVNVPGAEDEDARSLQREYRTLVKERTRSANRILGLLASQGLAPERIDARLPEWLATVRLWDGSALPPGARQRIEREFERWQFTHAQLLAIEKERRDRTQDLEEPGLEKVRRLFALKGIGLGAAWTYGLEFFSWRQFRNGKEVGALAGLTPTPYQSGDSERELGISRAGNRWVRGLSIEIAWGWLRHQPRSALSLWYQQRFARGGPRARKVGIVALARKLLVALWRYVEMGVLPEGAELKA

SEQ ID NO: 63158 - protein, 369 aa, unidentified
MKESTTVIGCDIHKEKITAAVLPLAATRPTEIVTVENHPKAITRFVKRLAHNAHPLFVYEAGPCGYELQRQITQLGHQTVVIAPALVPRRPGDRVKTNRRDAEKLARLYRAGELTEIRVPTRAEEAARDLVRVREDALTDRLRARHRLSKFLLRHGRVHHETKGWGVVHRAWLRAQRFDAPLLQSTFEAYLHALEDVEARLASLEQQVLALAQTDPYRAPVQYLRCLKGIDTLGALTLVVETQDFRRFHEAPGYMSFTGLVCSEDSSGEAKRRGAITKAGNAHLRRILVEAAWCYYHRNTTGPQLVQRRRGCPPDVVRIARRAQDRLHRKFWRLLSRSKLNQIAAVAVARELAGFVWAIAQRFPQEVPV

SEQ ID NO: 63159 - protein, 417 aa, unidentified
MKTNWTEQPYFAALDWAKDHHDVIVVDRLGAIVADFQFAHTSDGWHDFDQRMQPFGKCPLAIETSSGLAVDQLLQRAYPLYPVNPKAAKRYRERKVPSGTKTDRHDAWSLAEALRTDGQAWRALRAQDQATTTLRLLCGDEIALIEQRTALVNQLQAALADYYPLALESFEDWTQPFAWAWVKQFPTPTALRAAGKRQWEKFLHCHKLWRPQTAPQRLASWAQGQALNASPAVVTAKSLLAQSLVRVLETLQQQIQEYRRRITEAFAAHPDHDIFGSLPGAKQTLGPRLLSGLGSSRERFPDTQSLLCQAGVSPVSYESGQIRKAHVRWACDQSLRHTVHLWANASRKKCAWAQAYYQTKRAQGHSHASALRCLGKRWLKLLWRLWQDRVCYNEQIHLKSLQCHGSFVWQKLQAPAA

SEQ ID NO: 63160 - protein, 298 aa, unidentified
MKLYCGIDLHSNNHYLTLIDDHDKRILEKRLPNDLSQTLKTLKPYREKITAIAVESTFNWYWLVDGLMDAGYCLKLVNTAKARQYEGLKHTDDRYDAFWLAQQMRLGILPTGYIYPKAERAVRDLLRVRRRLVRQRTTHVLSTQCTLWRHTGIKPSAKMIVGEKQTPWPRLPNTSDELGVEARRAAINVLSIQIERIERTVLKALKPRADYKALLTVSGIGEVIAWTILLESGDLKRFKDVGHFASYARCVDSKRISNEKKKGEGNAKNGNPYLAWAFFEAAHFAIQFLPAARRFEVA

SEQ ID NO: 63161 - protein, 396 aa, unidentified
MISIGIDVSKLKSTFCILNEYGEVLQTAREISHTETDLNELIRQVKSFGGKDDVRVIMEATGAYSKPVLYSLIEEGIFVAEINPLAMKKYRSNINFRGVKNDPIDALAIASYGIDKWHRLKEYQKADKEYAAMKALSRQYLSYMKPHVSLTQNLDHLIDQVMPGIKDEFDGYDPATGKDRLTDFLEEFVHYDCIRSLGPKRFDERFKRWAKKKGYRPRQGKSGKIYSLAKEGIPTLAYDPISRLLVKQAAQALRSMNHVLNEILSQLRSLAKQRPEYPVIRAMSGVGDVLAPLLIAEVGDPRRYHSGSALIACVGIDVPPYESGQFKASERGITRKGSKQLRKLGYLMVKNLRKIKPVKDTSVYDYYLKKKSESKKDKQAIVAAMNINPKRKIVRL

SEQ ID NO: 63162 - protein, 374 aa, unidentified
MREITTWVGLDVHQEEIVVAVLEGSGREVTEFRVSGDDRGARKLVRRLKGFGSRVECAYEAGPCGYTLERRLEAAGIACAVVAPSLTPVKPGERIKTDRRDAKKLAEHLRAGLLTAVCAPSEEQEAVRDLCRCREDAREDLMRARHRLSKMLLRRGHVYRSGSNWTHKHRRWLLSLTWDREAERTVFGDYLQAVEHIEERLRGLDAALEAQAQEDPYREPVGWLRCFRGFDTVNAMTVVAELHDIVRFGSARKLMAYLGLVPSEHSSGGSRRQGGITKSGNRHVRRALVNAAWNYRHRPGVGAGLRKRRQGQPAAILALADRAQKRLNRRFLYLVLTRGKPPQKAVVAVARELTGFLWAALVVYPMIQQQEATD

SEQ ID NO: 63163 - protein, 399 aa, unidentified
MLGNHDDVEVFIGVDVGKGEHHAVALDRAGKRLLDRALPNDEARIREILAGLEHHGRILVVVDQPATIGALPVAVAQAAGTLVGYLPGLAMRRIADLHPGEAKTDARDAFIIADAARTMPHTLRSVQLADAQLAELSMLCGFDDDLAKQATATSNRIRGLLTQIHPALERVLGPRLEHPAVLDLLRTWPTPGALRHAGRRRIANRLTKLAPRMGERLAEDIIEALGQQTVTVIGTNAATIVLPQLADMLARIHEGRATVYAQVEALVEAHPLHQVLMSLPAVGIRTAARILTEVAGKDFPTAGHLASYAGLTPVTWRSGSSIRADRASRKGNKVLKRTLYLSAFAALKDPLSRAYYDRKRAEGKHHNQALIALARRRCDTLYAMLRDGTLYQAKSPTAA

SEQ ID NO: 63164 - protein, 333 aa, unidentified
MQFESVIGIDVSKLTLDIALVTQDAEVESFKIENKPLAIKKFFQNLSKTLDLESTLICAEHTGHYCYPLQKTCLEEGYSLWIEGGAEIKQRSGVTRYKNDKVDAIRIADYAKRYQDKAKIQKTEDYTIESVRSLSSERELFTKERAKYKTQVKDLKGFMDEVLFKARGKRLKKQIDSLTKLIQEIDKQIKVLMQSNKELANQKKLLISIDGIGEQTAIHTIVATGGFTKFNSGRKFGCHVGVAPFSFESGSSQRSRKKVSSRANKDLKTLFHMCALSAIRMKGELKEYFERKVGEGKNKMTVINAVRSKLINRIFAVIRDNRKYEKNYTVTLA

SEQ ID NO: 63165 - protein, 430 aa, unidentified
MKKKNHSNEKLEAITFKTLIVGVDIAKHNQWARFVDCRGIEHHKALKFENNRNGFNAILARIYEICKKEDFNKVIVGMEPTGHYWKAFANFLLKQAKITVVLVNPYHTKKAKELDDNSQTKSDKKDALTIARLVKDGRYFETYLPHDVYAELRGLTTTRHSMNKRKKSIMNTMTAVLDEYFPEFESVFKHPFKGKASMHLLKICPIPKFVLELGEEGVLKEIKKAVKKTVGRKKAAQLIEAAKASIGVDYGEYAARFKIQKLMEELELISSQLEVLETEMAETLKKTEISEYLLSITGMGVVSLATCLGELGDPLRFEDARQMSRLAGYNLIEDSSGKNKSGTCISKRGRKNLRSVLYQISLTMVATNKEMRQLYEYLKTREDNPLKKMQALVVISKKVLTLIFTLSKKKEYYQPELVFGEYRKRQLSAA

SEQ ID NO: 63166 - protein, 344 aa, unidentified
MQATTIGIDLAKNIFQVHGADAHGKKIFNKALKRDQMAAFFVNLPPALVGMEACGSAHYWARKLQSMGHTVRLMAPQFVKPYAKGNKHDAADAEAICEAVTRPTMRFVPIKNAEQQAVLSMHRARQGFVRARTAQANQIRGLLSEFGLIVPQGIAHITGRVPPLIEDASNELPGGLRILIDRLLEHFKALQAQIQQLEAQILAWHRSNPASKRLEQIPGIGPITASALIASLGDARSFKDGRQVAAWLGLVPKQHSSGGKQNLLGISKRGDTYLRTLLIQGARSVIYHADRPSQEASATCQWVCRVAQRRKKNIAAVALANKNARICWALLTGDKDYDERSQTA

SEQ ID NO: 63167 - protein, 413 aa, unidentified
MQVVYERCCGIDVHKRTVVACAIVPGADGQAVKETRTFDTLTAHLEALAGWLQGLEVTHVAMESTGVYWKPVYNLLDGRFAILVVNAEHIKALAGRKTDVQDAERIADLLRHGLLKGSFIPSAELRALRDLTRYRTRLGDERVSEINRVQKVLEDANIKLASVATDVMGVSGRAMLDQIVQGQADPAVLAELARGRLREKQDLLQQALSGRVQAHHRFMLAQHLSHIDFLEEAIARLDQEIAEQMRPFAAALEAWDSLPGINQRIAEIVVAEIGADLAPFEDAAHLASWTGMCPGNNESAGKRYSGKTRKGSPWLRRALVEAAHGAARTKNKYFQALYRRLAARRGKQRAAMAVGHSLLVTGYYLITRQTKYEDLGGNYFDERDREAVKRRSVKRLEQLGYQVQLAPAAIPTG

SEQ ID NO: 63168 - protein, 410 aa, unidentified
MEAMIERCAGLDVHQKSVVACVLYGSLDKRPKKEIKTFQTTTSGLLELNDWLTSMKVTDAVMESTGVYWKPIWNILEGNFQLILANAKHVKNVPGRKTDVKDAEWLAKLLRSGLIESNFVPPEDIRDLRDLTRYRTKLVHNCTQEKNRIHKILQDANIKLTSVLSDIFGASGRRILKAIISGEKMEEDSLRHIVHPKTRASISEIADTINGRLRRHHRYMLRQHWEHMEYIEQNIKELEEQISHCLKPYQKELELLDTIPGVNKNGAAIIISEIGVDMSVFKSDKHLASWAGVSPGNNESAGKKKHSRTKKGNKALKTLVAECALSTLSQNNRISSFQKRIMKRQGKMKARIATANLILKIAYNILITHEPYQELGPDYMKEKQVSKELKMVEYLKRKGYKITPTDQEIA

SEQ ID NO: 63169 - protein, 409 aa, unidentified
MELMYTRCAGLDVHQKTVVACARVVDEGKVSEELRTFDTTTSGLLALSAWLEEKGCTHVAMEATGVYWKPVWHVLEPTFELLLANAAHIKNVPGRKTDVKDATWIADLLAHGLIRGSFVPPTPVQDLRALMRTRKQLVREVARNTQRLQKALEDANIKLTGVVSDVLGKSGRAILDALVAGETDPERLVDLAGGRLKTPRAELVEALRGHVRDHHRFLLKLHLEQIDGLKKAVRDLEARVGEQLDPFRKNVELLTTIPGISETAARVMVSEFGADMSRFPTSGHLVSWAGFCPRCDESAGKRRSSRIRHGAPWLKTTLIQCAWAAVRAKDSYLRAQFHRLKSRVGAMKAIVAVAASMLTATYHMLTSGQEYRELTGSYFDKRDSTKLAKRLVKRLETLGLKVTVTAPAA

SEQ ID NO: 63170 - protein, 362 aa, unidentified
MSESTTIIAFDQHAQSVMAAVLGPHEAEPALHALTSDLPTIGRFIRRLLEHGPVRCCYEAGPCGFALQRFLTAHDVPCEVIAPTLIPRRPGDRIKTDRRDARQLAVLYRAGALTPIHIPSEQEEAIRDLLRCREAMNADLLRARHRLKKFLLRHDRRYTHTKCAWGARHTAWLRSLQWPLPALEQTFGAYLRAVEETATRLAILDETVRTYFACEPFAEPVRRLRCFRGISDLGALTIAAELGDARRFPTASRVMGFVGLVPSEHSSGARRGRGAITKTGNAHLRRILLEAAWHYRHPPQVGVKLRERQRGAAPEVISRAWAAQHRLSRTYRRLTGRGRPPQIAVTAVARELVGFVWATLAS

SEQ ID NO: 63171 - protein, 421 aa, unidentified
MTPTSHDTFAAFVGIDWADAKHDICLQAAGTAKRECFQLDHTPEAIEAWVTTLRTRFSGQPVAVCLELTKGPLVSALRKYDFLVLFPLNPLTLARYREAFTPSRAKDDPTDAALQLELLLTHRDKLQPLQPQSPPMRALAQLVEHRRRVVGDTVRITHRLTRTLKNYFPQVLPWFQDKDTHLFCDFLSRWPTLKAAQLARRSTLETFFRDHHVRVGDVLAKRIHAIKTATPWPTDEGVIAPNALLVQALVSQLRVTLDAIEAFDHAIAQRAQRHPEFPLFQALPGAGPVFASRLLVAFGEQRERYTSAAARQKYAGVAPVTERRGKKAWVHWRLQCPKFLRHTFVEWAAESMRHAFWAQVYYQQQRDKGNTHQAAVRALAFKWIRILSRCWQDRTPYDESVYLQALNRRGSSLIHNLAEAS

SEQ ID NO: 63172 - protein, 347 aa, unidentified
MSIRMIGLDTAKTVFQIHGVDEAGKAEIRRKLRRNDLIAFFEKQATCTVVMEACGAAHHWTRMLTGLGHSVKLIAPEAVKPFVKKGKKNDAADAAAICEAASRPDVKFVPAKSVEQQGILALHAARSLLVKQQTMLANAMRGLATEFGLTVPKGIHKLDELMAVVDADEIIPKRAKQAIAGLHDCCNNLSDGVETFETEIVAHARRDETARRLATIPGIGPITASLIAATVGDINLFKTARQFAAWLGLVPRQSSTGGKTRLGRITKTGNREIRKLLVLGATSMVYRADGWNSAVGAWLRSVLERRPVRLVTVALANKMARIAWAVMTRKEVYRPKGGVAAVAQAAA

SEQ ID NO: 63173 - protein, 387 aa, unidentified
MLLDHPSDGPAAIRTQIGAIFVSLELSRSTWLVTSLSPGKGEKMSKHSVKAGDLAELLKLFAELKCKAQARTGESYPIITIQEAGLDGFWLHRALQQEGIESHVVDPASIATPRRRRRAKTDRLDGETLLRTLLAYKRGEVRVCAMVVAPSPEEEDRRRLCRERRTLIAERIEHVNRIKGLLFAQGISDYVPLRSNRRARLEALRTGDGRLLPAHLKVQISRELDRLELLLSQIAAVEAEQDALLAASKPSDEETAPDPVTMLLALKGMGPNFAAVLWFEAFYRQFANRRQLASYAGLAATPWCSGGIEREQGVSKAGNPRLRTTMIQLAWLWVRHQPQSALTQWFKANSQRGRKRAIVALARKLPVALWKYVTAGVVIEGAEMKTA

SEQ ID NO: 63174 - protein, 316 aa, unidentified
MATRSSVFVGVDISKKSLEVATHNGNSLQNFSNDTMGIPKLVDLMLEIQPVLVVVEATGGYEQALVHAFHQASIPVAVVFPKLIKNFARARGLIAKTDKLDARNIALFGFSINPRPTPPASSPRNRLAALVDRRRQIVNMIKVEKNRLKMVSPDMLPSFLDHLEWLNEEEDHLSSEIRLLIENQPEMKAKSEIVQSARGIGMVTASTLVAELSELGALDRKKISALVGVAPLNNDSGNKHGKRRIHGGRRNVRSALFMATLVAVKYNPVIKAFYDRLLARNKEKKVALIACMRKMITILNAMVRDNQPFRYQASMA

SEQ ID NO: 63175 - protein, 410 aa, unidentified
MQTLVERGCGLDVHQATVVACLLIVRKDGKVRKQMRTFGTTTRELLSLREWLLSEGCTHAAMESTGVYWKPVYAILEGGLEIVVANAQHVKKVPGRKTDVKDAEWIADLLGHGLLRSSFVPPKPIRELRDLTRYRRKLVESQAAERNRLLKLLETANIKLASVATDVFGVSGRLMLEALVEGKSTPQEMAELAKGRLRQKIDELGPALEGKLEEHHRFLLRLQLHRLEAAEKDLAVLEQRLQEKLKPYEGQLTLLDEIPGVDWTLAAVIIAEMGVDMSVFGSVSQLASWAGVCPGNNESAGKRKSSRIPKGNVYLKTALVEAANAAAKAKGTYLRDKFYRLKARRGYKRAAVAVAHKILVAIYHMFSHQVCYNELGDAYLDKRNKHHLTRNLVHRLERLGYTVTLEQKAA

SEQ ID NO: 63176 - protein, 325 aa, unidentified
MTSSSLTDNNFIGIDVGGSSLDVAWHRGDSAHYANRPDAIAALVERLKRQTVTRIVVEPTGGYEKALVKALRQASLPLEIIHTSRFKAYRELLGVKAKSDTSDARLLAAYAAAPDEVRGRRADYVEVPQDTVREALAELAARRHQLKHMMHAETCRLGTVRLAELRQAITAHLEALKGEDKQIHKRMLELVGGRPALKRDQRLLATIKGIGPISALTLLASVPELGRIDNKVAAALIGVAPFVHQSGTMVAPARIRGGRAAVRSILYMAAVTASRHNPVLRPFYDRLIAKGKPAKVALVAVLRRLVVFANAVLKSGQPWKGAAAA

SEQ ID NO: 63177 - protein, 342 aa, unidentified
MEITTIGLDLAKSIFQVHAVDAAGTVVVCKALRRSQVVPFFTKLPPCLVGIEACGTSHHWARALAKLGHEVRLMPPAYVKPYVKRGKTDANDAEAICEAVTRPTMRFVPVKSPEQQAALALHRTRDLLVKQRTQLVNMIRGLLAEFGIEIVRGLHHAIELAARIAKGDAPEVPDLAVRVITGLAGQIGDVQVRLVALEKELLAWHRSNELSQRLGTIPGVGLISATALGASVTDPGRFRSGRQFAASLGLTPLQNSSGGKERMGRISRMGDRYLRRLLVIGMTSLVRRARAKPDSVDPRIATMLARKPARVVTVAAANRTARIAWAIMARGGTYRAPIGMAA

SEQ ID NO: 63178 - protein, 339 aa, unidentified
MREVSTIGVDLAKKVFQVHGVDAAGETVVRRVLRRARVLAYFAQLPPCLIGMEACATAHYWARELGKLGHRVKLIPPAYAKAYVRRNKNDAADAAAICEAVSRPAMRFVEIKTEAQQAAAGIHKVREMLMKQRTMLINALRGLMAEFGIVVAEGTRHVGELAAMLADPEEHRIPALLKDGLRRMAEMLRALERQLEGIDKQIVDWGRGNAACRHLITAPGYGPILSSAMAAIVVNPAVFRSGRDFAASLGLVPRQDGTGGKVKLGPISKRGNGYLRRLLVNGAMSVLNSKRAKQDPWLIKLLANKERKVAAVALANKMARIGWALVTRQEDFRATPAAA

SEQ ID NO: 63179 - protein, 341 aa, unidentified
MKNKSFIGIDISKNVIDASIFCEGTPIKDFPHAVFNNSHKGFGEMCTWLKKNHVVLSNSLFGMEFTGSYSMELEKFLNARKYQFCMLSTHVVKHYPMGPKDKSDKIDSAKIADFLYRYDGTECVKPYKMPDKTMQRLKALTKERKFLVEQRTCFMNRRQLCTTKEAAQLYDGYIKEFSHDIENIELKMQNLLETDDSLSTTYKNLLTIPGIGFVNAMNVIVITRNFTAFETARQYASYIGVAPHFHTSGTSVKWRPRPSARCDGQAKANLSMAASVAVQCDAELQSFYNRKLGGKQDSDTKRKALNAIKFKLVLRMFAIGKQNREWEPLDSKSSNEKLAIS

SEQ ID NO: 63180 - protein, 416 aa, unidentified
MLFIGDDWAEDHHDVELVDDEGRRLARARLPEGLEGITRLHGLVAEHGAASWGDLPPEEVAAQVVIGIETDRGPWVTALRAAGYQVFAINPLSAARYRQRHSTSGAKSDAGDAHVLAEIVRLDRDHHRAVAGDSDLADAVKLLARAHQTAVWERTRHVLRLRSTLREYFPAAIEAFEDLAAQDALKFLERAPDPGRAVKLSRSQLMVLLRAARRHHVEAKADVLLAVLRAPALRQQPTLEGAYASVVAAQISIITALNEQIAQLQKVVAEHFGRHPAADIYLSQPGFGVVLAARALGEFGDDSSRFTDAKSRKNYSGQSPITRASGKKTVVLARYAGNRRLGTALHLQAFAALGASPGARAYYEALRGRNIGHHAALRQLANRLVGILHGCLKSGTAYSEETAWQHHQKEVPAAAA

SEQ ID NO: 63181 - protein, 351 aa, unidentified
MPRRSTVRAVSTIGIDMGKNTLHMVGLDSLGAIVLRERVSRGRIKSRLANLPPCLIGIEAGMATHYVARELAALGHDVKQVPPAYAKPFRQGHKNDFRDALAVAEAVQRPTTRFVPPKSNEQLDLQALHRVRSRLVSQRTAVIDQIRGFLLERGIIVRQGLRFLRQLLPDILAKRTDVLSPRMVRIVSDLAGDWRQLDDRIETVTDEIETLAKADDNCRRVMTVPGIGPIISSAMVAAIGNGSAFAKGRDYSAWLGLVPKQMSTGDRTILGRLSKRGNSYLRMLFIQAARVILVRPANWPKHGFGVWLVRAIQRLHPNVLAAALANKLARIAWTVLAQQRSYEARVTKAEA

SEQ ID NO: 63182 - protein, 335 aa, unidentified
MSELPTVGIDLAKSVFQIHGVDENGLVLVRRQLRRSQLLAFFQNRPRCLIGMEACAGAYDWGLRLQEMGHDVRLMPPSYVKPYVKRGKTDAADAAAICEAVTRPSMRFVAIKSESCSLVMVLHRTRDFLVRQRTQIGNAIRAHMTEFGIKTAKGAQNVKRLKEQVDQLPQAARMPLILLFEQLSEADMRIERLTGEIEETYSQSETSQRLAMIPGVGLSATIIAATTPNVDNFDCARDYAAWLGLTPKPHSTGGKQRVGGISKMGNRYIRRLRYLGAMAQIMLRRRLKRESGSDRLSGMLMRKKTKIVAIALAHRMARMIFAVLRDGSRYEPQAA

SEQ ID NO: 63183 - protein, 348 aa, unidentified
MSKDITLTVDYHDRACVIRWLDHSTGKDQVFTEVLTTKQALNRIVDQARLAAGPKGRVVWIQESTSGWARVKELLLDRVDFRLANVLQMPLPPKGRRRKTDKIDTARIQREHLNGSLPLAYQPPAQWRHLRRLVAYREGLVNRRTALRNWINRYLAHETWFESMSRWSPTGQKRLRSLLKHLSRTDALVIGQKLDELSRLEDQLGVALKELLSAYGEYPEAQRLDAIKGIDVVSAISIVARIGPVERFHNADGLIAYAGLAPGISESDQTRRNGRIGGGGTDTHLRHYLIEATVWARKIPRYKHAYERIKKGAVRKWAAWLWLGCWSGVSTKSSRRGWNSTPGRRLPR

SEQ ID NO: 63184 - protein, 329 aa, unidentified
MFYLGIDVAKAKIDCCLILEDSAGKKKTKTFPNTPKGFEQLQAWLNHHAAGPAQAIALMEATSVYHERLARHLFDAGFQVCVANPARARYFAQSMSRLNKTDKADSEVLARFAMTADLHFWQPLPGHIQLLNALLDRRAVLGEDLQREENRLEKAESTFTIEPVLQSIHKNIKQLSRHIQDLDRQIDDHIDQHPDLKNDKALLSSIPAIADRTSLLMLSFLRSHAFERASQAAAFAGLVPIQRQSGSSIHGRSRLSKAGPSKIRAGLYMAAIVATRHNPHIKGMNDRLLANGKTKMMAVGAAMRKLIHLCYGVLKHQRPYQENYCANSQ

SEQ ID NO: 63185 - protein, 349 aa, unidentified
MVVVGADVHKRSHTFVAVDEVGRELGHRTFEATTPGHYKAVAWVRERFGSEVRWAIEDCRHLSTRLERDLLASGQSVVRVPPKMMAEQRRIARTRGKSDPIDAAAVARAALREPDLPVASHDETSRELKLLVDRRDDLVKVRTATINRLLWRVHEIEPAWAPKPRSLDRAKHQQILADKLAGVHGIVAELARDELADVVALSERIRDLERRITSLVAPVAPTLLAMPGVGALTAAKIVGETAGVARFKSEAAFARHAGIAPIPVWSGNTKGRVRLTRSGNRQLNAAIHRIAVTQMRINGLGKIYYEKKRAEGKSTPEALRCLKRRLARIVFNHLTTDQTMAATALAVAA

SEQ ID NO: 63186 - protein, 343 aa, unidentified
MELYVGLDVSLKETSICVIDRDGVIVAEDTVLSEPEAIAGYLAVEAPGVSRIGLESGPTSTWLWHELKARHLPVICIDARHAKAALAMQINKTDRNDAIGIARIMQTGWYREVQVKRLSCHEVRAALNSRALLVKMKRDIENQIRGLLKNFGLMIGKVGRSVFPVRVRELLVERPILERAVLPLLGLREQLKAEITGFDRMLLQLTRDNDVARRLTSVPGVGPITALTFISAIDDPARFRRSRSVGAYIGLTPKRYASGEIDRTGRISKCGDAMLRCYLFEAAGVLLTRVPKWCSIKAWGVRLAKRIGFKKAKIAVARKLAVIMHRMWCDGTEFFWTNKEART

SEQ ID NO: 63187 - protein, 484 aa, unidentified
MQSKTANQAESPKRLTRRRRKELARRIWSDKPGLDVVHRDAAGIDIGSREHYVAVGPDRDAEPVRVFGCFTTDLRRMAEWLQRCGIKSVVMQSTGVYWIPVYDVLEQSGLEVWLVNAQDTKNLPGRKSDVQESQWLLKLHTYGLLRRSFRPAPEIRGLRTCWRERGEYVQQAGSCIQRMQKALTEMNLQLATVLSDLSGETGMSIVRSIVAGERDGKRLAEFRDPRVKASKQTIAKSLEGTWLPEQLAVLQRQLGDWDHIQRQIAACDVDLQAMLQQIPTAKVQHQPALAPATAPVGKRKRKRKKNGKWSKNEPKFNLAAELQRVTGVDLSRIDGIKAMTIMTVISEAGLDMSKWATEDHFVSWIGLSPRNDVSGGKVLKRKTRKVKSRLATALRTSATALRQSDSYLGAQFRRLRGRLGPPKAITAMAARHARLVYRMLKYGQEYVDKGAVIYEQKYREQQIRFLEKRAAQNGFALVPLHQNA

SEQ ID NO: 63188 - protein, 402 aa, unidentified
MNAVGIDVSKGKSTVAIYQPGDQVVLKPCDFQHTQSGISSLIGIIKELEGETKVCMEHTGRYYEPVATWLSDAGIFVSAVNPILIRSFGDDTLRSPKTDKADAKKIARYTLDRWTRLKQYSHMDETRNQLKTMNRQFGFYMDQKTAMKNNLIALLDQTYPGANAFFDSPARSDGSQKWVDFVYTYWHVDCVRGKSLEAFTEHYKNWCKRKGYNFSAAKAEEVYYDSADLIAVFPKDANTKMLIHQAVDMLNLTSKTVESLRTEMDQTAAMLPEYPVVMAMNGVGPTLGPQLIAEIGDVTRFVKRGSLTAFAGVDPGKNDSGKHSQKSVPTSKKGSPHLRKTLFQIMDGLIKRSPIDDPVYAFMNKKRAQGKPYYVYMTAGANKFLRIYYGRVNEYLSTLSED

SEQ ID NO: 63189 - protein, 420 aa, unidentified
MRNAGIHANSLLEVRRMYNAVGIDVSKGKSTVAVLQPGGTVIRKPFDVSHTSQNLNELADYLSSLDGTTKIVMECTGRYHEPMVKALSEAGLFVSIVNPHLIKNFGNNSLRKVKSDPADARKIARYTLDNWTELRQYSGMDNTRTQLKTLNSQFSFFMKQKVAAKANLIALLDNTYPGVNKLFDSPTREDGSEKWVDYAYSFWHADCVRKIGLKAFTERYMSFCKKHHYIFQQDKPEKLFNASKELVAVFPKEKTYKLLIQQSIQQSNLASEHVERLRREMNELASTLPEYSTVMGIYGVGKTYGPQLIAEIGDVSRFTHREALTAFAGVDPGVDESGQHKSKSNRASKVGSARLRKTLFQIMTTLLQNAPEADPVYRFLDKKRSQGKPYYVYMTAGANKFLRIYYGKVKECLRNLEQTE

SEQ ID NO: 63190 - protein, 378 aa, unidentified
MNRIIKIGMDVHTSNYTLCIFEPSFEHDGTVHCITQVKPEVKNIIHVIETFKKKHENEELNIVCGYEAGCLGYSLYHELKEKGIECVILAPTTMKTEKGGRKLKNDYRDAKMIAECLAYGGYSAVHIPTELDNSVKEFIRMRDDIKENLKSIKQQIIAFLTRNGKQFEGKSFWTRKHIDWINTVSFSEPLLQDTLKEYMIEYNHLCNRIETLDRQIEEISLKEEYVEKVQQLQCLIGIKTHTALSLIVETSDFNRFKKGNMYSAYLGLIPGDDSSGGHENKLGITKAGNSHLRRLLVEAAQGYTRGRVGFKSKDLKSRQEKCSSEVVAYADRANERLRRKYYRMTLRGKKFNVAKTAIARELACFVWGIMTDHIDLCN

SEQ ID NO: 63191 - protein, 373 aa, unidentified
MPKYSTAFGMDVHLRSTTVCALDADTGEAVTRRFPGNPWGEIAGWMDGFPGPSLAAYESGYLGFAPQRELAGLGVECVVAAVSKIPRSAADSASKNDRNDAARMAKAILAHDISPIWVPSPEVEGIRDLAGAYDGATARLAAAKQRLLAFLARRGYAYGGTTPAGNPRKYWTYDFLRWLDKVRPEDDGGVRTLAALRNEVEAAAEARADLLSEYRAAVDASPIAAEVAALQSIKGCAFALAAAFSAEVGDFTRFRSGRQVTAYFGLAPSQRSSGDSVRLGGISGAGNALVRKLAVEGSWCYAAARHQPKLMPRDTGVPLEIRMHGRKGSERLLRRREEMLARGMPAAKANAATAAELVRWLWALGMMCREGAE

SEQ ID NO: 63192 - protein, 370 aa, unidentified
MAECSEVFVGIDTAKMRHAIAVADAGRDGEVRYLGEIDSAPATVERVIKKLGRRYEKVHVCYEAGPTGYGLYRQVRELGYECTVVAPSLIPRKPGERVKTNRRDAVSLARLFRAGELTAVWVPDAVHEAVRDLVRAHASAAADVRKKRQQLLSFLLRHGRVYSGTKHWTKAHARWLANQAFEHPAQQIVLQEAINAIEDCAGRLQRLDEQLRAIVPTWAMAPVVAAYQAMRGVSFIVAATFVAEIGDVRRFDTPRQVMAFLGLVPAERSTGDNVRRAGLTLSGNQRARRVLIEGAWSYRYKARVSAVLQRRSEELPKEIRDIAWKAQVRLCGRYRRLAAKGKKMPVIVAAIAREMAAFLWAIGQRVSPVS

SEQ ID NO: 63193 - protein, 349 aa, unidentified
MTIVEDRPVITGGVDTHADLHVAAALDPLGGLLGVQEFPATATGYAQLLDWLGGFGTIAVVGVEGTGSYGAALTRHLAAAGIGVVEVDRADRQDRHRQGKSDPLDAVSAARAAQSGRACGAPKGRDGAVEAIRALMVAKRSARHERTQAINQARALIVTGPDELRARFAGHSPAALVEAIAALRPRPGNVPGYATRVALRELGRRAQFLDTQLDRLDELIGPLVAARAPGLLSLYGVGPDTAALLLIAAGDHPGRLRSESSWAHLCGVAPIPASSGKVSRHRLNRGGDRQANHALWRIVITRLSSRPGHPATRAYVTRRTKEGLSKKEIIRCLKRYVAREVYHQLRAGA

SEQ ID NO: 63194 - protein, 332 aa, unidentified
MENFYFIGVDVLKKKLNFCVMFEGKVVHEEETSNHQGAIMSLLHHLEEDYGIASGQMLVCAEHTGQYTFPLACACKAVECRLWLENAAEIKYSSGVQRGKSDKVDAKRIAIYASRFQDKVRYYERPTEDIERLKQLESERTLYVTDFAKYKGQMKDQKEYMPKSLYERKMKRLQALMDDLEEAIQSITDEMDEVIASCPVLFRQRELLMSIDGVGRVVATNMIIATEAFTRFDDPRKFNCYAGVAPFSYSSGSSQHSKARVSHRADKVMKRLLHLAAVAVTHRIGGELKKYYERKVAEGKNKMSVINTLRAKIVARMFAVIKRNERYKPILS

SEQ ID NO: 63195 - protein, 342 aa, unidentified
MENIFVRCAGLDVHKESVEACVRRIEPNGCVHSETRHWGTMTRDLLEMADWLAAKGVTNVAMESTGVFWKPIFNILEIRFTVLLVKARHLKQVPGRKSDIRDCQWIAQLLQCGLLKGSFIPPRAQRELRDLTRHRTQLVEEKTRTINRIQKVLEDANIKLASVASDVMGVSGRAMIQRLIEGETNPFKLADLAQRQLRGKIPELQKALEGKLTDHHRFLLKLLWKELSQQEERIVDLDSKIEEHTRPFAAEIEHLDTIPGVDHRVAEVLLAEVGPDMKPFPSDEHLSSWAGMCPGNEESAGKRRRRRITPGNRWLKQTLAQAAWAASHAKNTYLAAQYRRLC

SEQ ID NO: 63196 - protein, 345 aa, unidentified
MDLHTIGIDLGKTVFHLVGLNLRGEVVVRKKFSRTQLLRFTANLHVELIGMEACGGAHFLGRALREQGHEVRLIPAQYVKPYVKTNKSDYIDAEAIAEAVARPTMRFVPIKTDDQLDLQSLHRVRERWVMRRTAVINQIRGLLLERGITLRKGRHHVHAALPLILEDADAKLSGAVRMLLAQLKLDLDQLAVRIDEADAVIRKTAYENEACRRLVAIPGIGPVTATALIAAIGNGGAFHKGREFAAWMGVVPGEHTTGGQQKLLGISKRGNSYLRRLFVQGARAVLQQRTKQSSGLSAWLAQLTSRTHRNVAAVALANKLARIAWAVLAKNEQYRPSVLADVAAA

SEQ ID NO: 63197 - protein, 391 aa, unidentified
MICVGIDIAKDKHDCCILDSDGTVRADCFTIPNNMDGFKQLLQTIRNCTKKSGKIKVGLEATGHYSYNILGFLLDNGLPTYVINPLHTNLYRKSLSLRKTKTDRVDARTIATMLLSDVDLKSYTDIAYHNEELKSLTRYRFEKVRERAKLKQSVSRLVTILFPELENLVPSLHGASVYALLSEYPGAKQISEVHLTKLTNLLVTASKGHYGKEKATLIRETARASIGSVMPAKSLELKHTIKLIQELTSEINEIEDSIQKIIDELNPPILSIPGMGVNSAAVILAEIGDFSNFSSPDKILAYAGCSPSTYQSGKLTNCYAHMEKRGSRYLRYALYNATKYVCHWNPVFAEYLAKKRAEGKHYNVALSHSMKKLVRLIYALQKSGKTYLAAA

SEQ ID NO: 63198 - protein, 473 aa, unidentified
MVPVSLCESLVAEGIVGPREPWIVAFEHECQNPVYIPPPRNTFLDKGIRVRVGTGMGWSVMDVVHPRCAGVDISKRDAKVCVRIQGSGKRRTSSMVTTWAAMTNSILGLREYLLEQKVTCVVMEATGDYWRPFYYLLEEHFEVMLVNARDVKTVPGRKSDVADCAWLADLGAHGLVRASFVPPEPIRALRDLTRARTVITQERGREIQRLEKLLEDAGIKLSSVATDITGVSGRLMLRALIEGRDDPAGIADLAKRRLRSKIPQLTEALRGHFTAHHAFMARLFLGRIDAHTADIERLSSRIEEAMEPFAAARELLVSIPGFSRIVAEVFIAETGGDMTQFPTAGHLASWAGTAPGSNESAGRVKSTKTRPGNRYLKRALGVAALSASRSKNTYFNAKYKRIAYRRGPMKAVVAIEHAMLVAAWNMLRNGEFYRDPGADYFTRRIPAKTKARAIGQLESLGYQVTLEPLADTA

SEQ ID NO: 63199 - protein, 341 aa, unidentified
MDEVSTIGMDLAKSVFQLHGADAAGAVVFRKKLRRSQVLSFLAAQPPCTVAMEACSSSHHWAREISTLGHAVRLIPPAYVKPFVKRQKNDAADAEAICEAAQRPTMRFVAPKSEQTQAAALVFRARDLLVRQRTQTINALRGHLAEFGIVVAKGPAHVSQLVQAVENPDEPLPEIAQPILQILIDTLHRLDEQIALLDREVAQRAKADETARRLMTIPGVGPVTAVALTALAPPAQTFRRGRDFAAWVGLAPLQHSTGGKQKLGATSKMGERTLRRLLIIGASAVVRWAARHGAPAGSWMARMLACKPPMLVRVALANKMARIVWALMAKGGIYQAPAVSP

SEQ ID NO: 63200 - protein, 401 aa, unidentified
MNAVGIDVSKGKSMVCVMRPFGEVVLEPFEVLHTAQSLNDLAGKLKALDGETRVVMEATGNYHKPVAFVLHDAGLFVSVVNPVLIHDYDNNSLRRVKTDRKDAVKIANYTLDKWTRLRQYLPEDDTRLALKNCYRQYQQAVAIRTMLKNNLISSLDLTFPDANKLFSSPAKSNGCEKWVDFIGDFWHSECVSSLSSDAFAKKYLKWCQKHGYNFTRSKSDEIYACALNSASLPKSPTSKLLIQQQVAQLKAVSQSVAAFQQEMLRLSQQLPEFDTVMEMYGVGPSLGPQLMAEIGDIRRFQSKKSLIAFAGIEPQPNDSGKVVGNDSGISKVGSAVLRRTLFLIMTVILKTQPQDEPVFQFMNKKRSEGKPYKVYMMASANKFLRIYYARVKAVMDSKHSK

SEQ ID NO: 63201 - protein, 323 aa, unidentified
MQGQKSPERSAQPGVYVGVDVCKDWLDVYLHPIGQKHRVANAPEGLKALKRRLAELPVELIVMEATGKFHRQAHRTLHAAGFAVAVVNPLRARLFAEAVGQLAKTDRLDARVLALMGQALEPSAIAPAPEAIEALQELARARSAAKANQTALSNQRGASQTAFLKAELGRRLKTLAGHIERLDAEIERRLGADPALKRRYDILITIPGVGPVAALALVIGLPELGACSGKAAALLAGLAPLACDSGEKAGQRHIKGGRAFVRTSLYLAAIAAARFNPQLSDDYKRLRDAGKKAKVAITAIMRKLVVLANALLKANRTWSPKPA

SEQ ID NO: 63202 - protein, 450 aa, unidentified
MEGSFAGVDWASEKHDVVVQNAVGEELFAGTFMHDEAGLRALCRQLVRLNVQLVAIERPDGVLVERLLDAGLRMLALHPNQVAAARARFRVSGGKSDRFDAFVLCELARTDQHRFRVLEPDSDQTKALRALCRGREDLVQTRVAITNQLRAELERFWPGAVKIFRSIDSPIALAFLQKYPSPLDARTLGEQRLAAFLARQHYSGRKTPAELLRQLRSAPEGRAGDAEIHTRRQLVLTLVELLTPLVAQIKQLERHIAQALAEHPDGELFRALFRDPKSVITASELVAEIGDCRARYPTSDALAGDAGQAAVAIESGKRKVACYRWACNKRLRDAVCTLADSTRHWHPWAADHYARAIARGHDHPRAIRGLGRAWCRVIWRCWQDQTPYDPARHRALQQHSTVTVPTPPGPRPDTAATQRMLGTAVTHKAARRAEREALDGTPTSATPRGG

SEQ ID NO: 63203 - protein, 351 aa, unidentified
MKEGITIGMDMGDKNHKAVVLGTDGRELERREVANTEGEVSAFLGGYAGATLAMETGTHCRWVGALAARLGLRVLVANARKVEAVWKSSRKNDWRDAEMLAKIARAEPSLLGPVRLRGADDQRLMRLAKARDALVRCRTRIVNQVRGFCKAEGVRLRKCSAERFLALEGELPAEVAGVACHLFETLGHLNGEIRAYDGILREAVLRLRKGDAEAVMQVQGVGEVTAAVFLAAVGDAKDFKRPRDAGAFLGLVPRQAQSGGGDPQLRITKEGNAMARRALVTAANYILGPFAKDSDLRRHGLRIAERGGKNAKRRAKVAVARKLAVTMLALARNREAYRPLAEGTAAARAAT

SEQ ID NO: 63204 - protein, 378 aa, unidentified
MKSTTIIAFDQHAATTVAAVLLPKQQTPALHPLGSDSDTILKFVARLRRAGPVMCCYEAGPCGFELQRAMQARDIPCDVIAPALIPRRAGDRIKTDRRDAAQLAVLYRAGALTAIHIPTAQEEAARDLLRCREDIRADLLRARHRLSKFLLRHGRRFTGTKKAWSKRHDVWLRAQTWPLAALDQTHRAYLRAVEEAMARLRAVEDDLRDLLTLEPLQRRVQRLRCFRGIDDLTALTIAAELGDPQRFATAPRTMAYVGLVPSEHSSGTKRAQGGITKTGNSHLRRVLVESAWHYRHHPFVSATLRARQRGAPAAVVAQAWTAQHRLHRRYARLTARGKPKQHIVTAIARELTGFVWAALTQPSDRPTVERRTLDISMR

SEQ ID NO: 63205 - protein, 345 aa, unidentified
MNEFYEGQQFVGMDLHRRRSVLVRMTETGEHLETVRIVNTRDRLVDVMSRAGEAPEVVLEATYGWYWAADALAELGASVHLAHPLGVKAFSYRRVKNDQRDAADLADLVRMGRLPHAWIAPPQTRELRELVRHRAKLVAMRSRCKAEVHAVLAKGGVWVPMTDLFGGEGTLLLNRVTMPAPYMARIASLRRFIEAFDAEIDLFTGLVQRRLARDPGYTAIQQIPGIGPVLAAVFVAEIGDVHRFDGPAKLTCWAGLTPRHHESDTTVHRGHITKQGSRLVRWAAIESVKILPATSRIGAIREQVAHRRGNRNIGAVAAARRQLELVFYGLRDHHVRALHRSPRAA

SEQ ID NO: 63206 - protein, 309 aa, unidentified
MQTYDLVAVDIGKDSLQIQTTSQAFILPNTPQGLRKLLAHLPTLPHPLVVFEASGGYERKLLDALREASIAHRLINPARIRAFALSEGIKAKTDPIDARLILRFAQEKKLQAGAPLSARQQILADLLDRRNHLSEQSGREKNRLEKASKTTAGFIRKMLKAVESQMQAVERAIRLHIGSDSKLASQVREMTSVEGVGEVTAWTVLAYLPEITTIGRNQLVALAGVAPFNRDSGHTQGKRFIFGGRAKLRRVLYMATLSGATHNTVIRDYVHALLARGKAFKSALVAGMRKLLLHLQSRLKQLEQKTLAA

SEQ ID NO: 63207 - protein, 346 aa, unidentified
MKHYAGLDVSVKETSVCIVDETGKICHEVKLVSHPEDLTAVLKHPALHIERIGLEAGPLSQWLFEGLARAGLPVICIETRHTKAFLKAQPNKSDRNDARGIAQMMRVNLFRPVHVKTLTSQKRRALLTARKLLQEKAIAIENDIRGLLRNFGLKVSVVGAVRFEDRIRELLEGRSDLAEISTPLLAARRKLREEFSRLHRKVLEIARDDVICNRLMTIPGVGAVTALAFTSTIDIPARFRNSRAVGPALGLTPVLNQSGESHRVGRVSLCGDAMMRTLLYEAAQVMLTRVKKWSWLKAWAMNLAKRSGHRKAIVALARRLAVIMHRMWSDGTVFRWTRDSMPIATS

SEQ ID NO: 63208 - protein, 512 aa, unidentified
MAPSSPPTKRRSSPSRAKASVGTLAASTPKHRKGGPNVSQKQYVGIDLHRRRSVIVRVSESGEKLATYRLDNEPVLITAAIKEAGEKPEVVFEATYGYYWLADLLEEMGCVIHMAHPSGLNWENRRVKNDERDALELVKKLRLGELPEAWIPPPEVRELRELVRYRVKLVRLRTGLRSQVHAVMAKNGVLPSRYDMFGPGGNAQLDALELPAAYGDRIESLRELIRRYDREVKLVERELHILLKDHPGYHAIQAIPGVGKLFAAIFVAEIGDVSRFASAEKLCSWAGLTPKHRESDVKVVRGRITKMGSRLVRWAAIEATAKSRGTPTIRSNFAAIAERRGKPKAHVAVARQLLTLVSHPDLGRVHRPCRRRPGCSHSGGTRRSPFRPTRCGGARSEACQGPALGGGIHEREQGQRAMEGRRVSYGSGGNGRVRTRLPPSGDQRPRGPCDSRGHHGRHRHHRPRRHICRADRPSDHGRQAHKDCRRSVPTRLPAHFRPGLPDHGWSERAFEA

SEQ ID NO: 63209 - protein, 358 aa, unidentified
MIDVYTCGIDVHKLILQIAIVDKHGRVVHKEVCKYTPERVIALAYKLLKHQCKLVAMESSGVFWVQVFYSLIANGLRVILVNPFSTRAYGKKTDLLDAIRIARNALAGAIISSYVPKDFRVIVLRSMLRRRLFEDINRVLNRIHKLMVISGVFADRVVKPNSRAWLNSLRRLANGESVVEAFGSKGALYSFRDKLSVEETIMLSKLLNLHDLLRDSCKELEDEAIKLTRELYGELYDLLQTVPGIGRVLASYILAEVGDISRFPSARHFKSYCGLVPKVRESGGKVRLSRCRPGNPYLRWAFYQAAVVAVRVDPELRVFYERLVSRGKSRRVALVAVTGKIAVRAWFVFVNRVPYRAS

SEQ ID NO: 63210 - protein, 423 aa, unidentified
MMKLKYSICCGLDVHKNVIVATIVTTNKDGISEYLQKSFSTINSDIQRFHNWLIENNCYHVCMESTGKYWIPIFNYLENDIDVCLTHPKYVKAIKGKKTDKKDSKWIADLYKFDLVRCSFIPPKDFRQLRELSRYRFKLVCMKSSEKNRIQNCMTISNVGIASVLSDPFGKTATEIISYLLEHTADSMDEKAVRKLIKKGAKSKSDEIIEAIKGYTIETDQAKKLELARGHLEYLDDMITQTEVELYVRIKPYYEFVEFVSTMPGMTELSSTIVLAETGVDMDIFDDAKHLCSWCGLSPANNESAGKKKSVRIAKAGDYLKPMMVQCALAAIKSKKQPYFAIKYGRIKKRRGHKKAIIAIARMMMVCIYHMVSEKKPFTPTDYEELMNPQNHVESVVLNENNVFAYLESLGYDSSKLVKRNDN

SEQ ID NO: 63211 - protein, 410 aa, unidentified
MEVLYRHCAGLDVHKDTVVACIRHMEGGAVKREVRTFKTTTKDLLSLSEWLASERCTHIALEATGVYWKPVWHVLSDGDFVLVLANAAHVKNVPGRKTDVNDAAWLADLLAHGLIRGSFVPDEQTQEMRNLLRTRKQLVHERSSHVQRLQKTLEDANIKLDSVISDVMGKSGRAMIEALIAGESDPSRLAGLAHRRIKVPPEDLCEALRGRVRKHHRFLLRLHLQHIDAIDGAIAEIDSEVEAHIEPFRTAIERLTTIPGVSDLSARVIIAEIGQDMSRFPSQGHLISWAGLCPKNDESAGKRRSTRMRKGAPWLKTMLIQCAWAAARKKDSYLKAQFHRLRSKRGAKKAIGAVAASILTAVYRMLIDGTLYQDLGPDHFDKRGKTAQTKRLLARLQNLGYAVQITPLPA

SEQ ID NO: 63212 - protein, 342 aa, unidentified
MQITTIGLDIAKNVFAVHGIDAAEKVVVRKQLRRGPMLAFFKALPPCLVGMEACATAHYWAREFTKLGHEVRLMPAKDVKAYVKRNKNDAADAEAICEAVRRPTMRFVRIKSAEQQGQLMQHRTRDLLMRQRTQVINALRAHLAELGIVAAQGDRGVKELLALVTDKEDTRLPIDARASVIVLVAQLEATQTVIGAIEKRIKMQHRSNEASQRVETIPGIGVIGATAIAATVADPTVFRSGRDFAAWIGLVPRQDSTGGKQKLGPISKQGDRYLRRILVIGAHSVLRRAMQNPEKYPWLTRLLARRPFKVVAVALANKMARMAWALLAHGGTYRAPALVAVA

SEQ ID NO: 63213 - protein, 347 aa, unidentified
MGIVVALDVHRNQITYKLLDRDTGEVRRGRVAPAARVDVRTWLAQFAGHEVEFALEGTTGWRFVVEEIERAGYRAHLADPAETAAKRGRKRRAKTDNADCDLQLRLLLAGELPESWIPPAHILELRARVRMRKTLIDQRTAWLQRVQAQLFQQGVPAGLRLRSEVGRQALAAADLSPAGRELVELGLRMIDALDQELVPLTRELGVFARRQPGCRALIARLYGVGPVSATAILAELGDARRFSSSDDAVRHAGLDITVHQSDSKRAPGHLSHQGPEVLRWALFEAALSGARVGSPDHGYYLQVAERIDHTRACLSLARKLCRRAYHVLRELGDEALAPVEEAIAAAA

SEQ ID NO: 63214 - protein, 343 aa, unidentified
MNISRVGVDLAKSVFQLHGVDAQGKAVWKRRLSRNKWIGTLCKALPRGCEVGMEACAGSHHWARVLIGHGYSVKLIAPQFVTPYIKSNKNDANDAEAICEAMSRPNMRYVKIKSIEQQDIQAIHRVRSELKSHCHAKANQIRGLVTEYGLVAPQQLSSLRAAVPCWLEDADNGLTDRFRALLKGLWDDLTYLDQRMDDLNRDIETIAKTDPMARRLQQLRGVGPLVSTALIAAVGNGDQFSRGRQMAASIGLTPKQFSSGGKERLLGISKRGDSYLRSILIHGARSTIHHAKHKDDRLSKWITSLAERRHPNIAAVALANKTVRMAWAMMQSEEDYNPDRAVA

SEQ ID NO: 63215 - protein, 428 aa, unidentified
MNVEESNRLKEFRQLRKEIRGSKEHLIVGIDVAKNKHHAFFGMATGKTLLRRLVFENDLAGFEKLHMHMEALQVQHCLAKVVFGLEPTANYHKPLAEYLIRCGHAVVLVSGVAVIKNRELLDGRWDKNDDKDSANVADLISQGKCLYYDYPSIPIRDLRSLLSLKRRLKKQEHGAKVRIRNHLLAQYFPEFDRYFGKGGSEGLSIVKWCLKPSIIANLEYDEFVHLVAPRVKTIGQENRLKAIWDLAIESIGCSAGEALGFEGKLMVEDLQQIKESIRAVDDHIKDICLGFPEYSYLLTIPGFGPDVSSKVLGAIGNPFRFDNGRQVLKLAGYDLSANRSGKTSDSGVPVISKRGNAYLRYALYQAAFIASTSNRYFIVYYTNKLRSREREKGIKTKMKVKLAAKMLIIAWTLMKKKEPFDTKFLDID

SEQ ID NO: 63216 - protein, 354 aa, unidentified
MKVVSVIQIQWRGPMSNIKVLGVDLAKDVFQLHGADAKGKQVLSKRLNRQALAEYVTQLQPCLIGIEACMGAFYWARVFQKMGHTVKIMAPQFVKPYVMANKNDRNDARGIAEAVTRPDMKFVAVKSIEQQDVLLSHRVREQLMKQKTAQVNQIRGLLMEYGVVIPKGIKHMVTLTEVLENNAEKLTQKAITVFKQMYEQFKIYEQQIALYDKEIAQDVAQNNVCAEIMKIGGVGPITASAIVATVGDAKEFKNGRQMAAWLGLTPKQHSSGNTIRLSGISKRGDGYVRKLLVHGARSVVNNCQKKTDRKSKWVADKKNRIGYNKASVALANKNARIIWAIMATGECYRTPIAA

SEQ ID NO: 63217 - protein, 325 aa, unidentified
MQNHIIGADLSKRTIDLFCNSHLQIENSKVGFKQMIGWMKEQHINPSEAMIVMEHTGLYSYCFEAFLHQQHIAFCKVNAYLVKRSVGLARGKSDKIDARRLASYGQEKRETLTIEPVAGKELQRLQLLYTTRERLVRHKAALLNAVDEYLNIGLSANDVLITAQKRVIRSFENEIEKLQAQMDQIIATNPSIQQNQHLLQSIKGVGKVLSIATIIKTKNFTRFSTARKFACFCGTAPFEHTSGTSIRGKTKVSPLADKTMKTLLDLSAKSAIQYDKELREYYLRRTGNGKSKMSTINIVRNKILYRMFAVIKRQTPFVENFLQAA

SEQ ID NO: 63218 - protein, 462 aa, unidentified
MSKKRTYGSADVEHVDVAALVAMLTVGCIVAVDVAKTKFVAAIAKATGEVLKIVRFSHPVQTLTFLKLVEAIRDAKLSPRVVMESTGTYGDALRYQCHLRGVAIEMILPKHTHDFAEVVDGVPSTHDAKAAVTLVQLTLIKPGRRWTPDDDGRRDLRALLDQRSLQTKELDVYHGHLEAYLARHWPELLSLIDVREQRSWMTLLKAYPGPHRVAEAGSEAAKLLHTASHGRFSKEHIKAIVDAAGTTFGVPMRQSEEAMLRFLVENMEEHTKGIDALDDELAQRVKEDDVASRLAAVVGPACAASIVSRLGSPTLFASAGALEKAMGLNLKVRSSGEKQGQLHITKRGPAQVRQLLYFAVLRMLQADPIVAAWCKARKSYDGESGKRKAIVAVMRKLVRALWHVAKGPRFDASKLFDVRRLDLTSASAESKVSPPTSVPQLAPTRAPSRSRRRAKDISQQVA

SEQ ID NO: 63219 - protein, 329 aa, unidentified
MNHIAIDLGSINSQVCIRQSDGTIIQEEKVRTDCLGDLLGQLEPGRVIVETCAESLHVVKQAKAVGHDVRLVPSTLAPELGVGRRGIKTDIRDARHLSEASCKIDLGSVHIPKDSSMLLKQQCGARDSRVKARTMLINTVRGWLRQSVLRPKSGVTSTFPARVMALMESEQLDTPLHIASLLTMITHLSEQIKAADVTLLAWCKQSELATRLMTVPGVGPITTVRFIASIDTVERFPNAHRVQSYLGLTPGERSSGTKQHRTGITKAGAAATRRVLVQAAWVIKRTQKGSPLVDWNAGVEYRRGKQISAVAMARKLAGILFVDDTRHPL

SEQ ID NO: 63220 - protein, 489 aa, unidentified
MNLALVAVVNRRLSLELAEQHRDPRRQLRTPKEVSMIAAVVERCAGIDVGKKFLKVCVMVGPLSEEPRYEIRRINCKQSDFEKLREWLKGEGVTHAVMESTGPYWVPVFNVLEGEIQVVLANPVEVKNRKGHKTDACDAWWLAHLLRHGMIRASFIPEKAIRELREMTRRRKKLIGQVAQERNRVQKQLEYGNVKLGNELSDVFGLSGQLMLRALVEEEWTAEQVADLAQGSLKRKKAQITEAIRGQRLSATQKDLIRSGMRHMVFLEMEIRELDKMIAKSVGSPERQEAYRLLQTIPGLKQEAAANVLAEVGTEMKQFPDAGHMSSWGGVCPGNNESAGRHKSRHTTHGNPWFRATLIESAWAASRKKGSAFQQRYASLKPRLGHKRALVVVAHALVKAIYYVLATGQPYREAVPEPPNEAQKQRMIRHHTRRLHRLGCWLSADSLAPIKEWYTSHCIPDLDPPPDKRRGRKPKAVVNAQAAAPYGEA

SEQ ID NO: 63221 - protein, 405 aa, unidentified
MEIIIEKGCGLDVHKGTVVACIMGTGIKKEIRTYRTVTNDLLRLKEWIQEAGITHVAMESTGVYWKPVFNILEDHFEVILVNARHVKNVPGRKTDVQDSEWLCRLLRSGLVSGSFIPPRDIRELRDLTRHKRKLIQAITAEKQRVEKVLEDANIKLASIASDTFGASGKRMIEELIKGELEPGGMAELSKGRLRQKRGDLKEALVGQVREHHKFMIKVSLKHIRAMEKILSDIERRIQEKIDYHYKEEYALLQTIPGVKGEASTLIAEMGVDMGRFPSEDHLSSWAGMSPGNNESGGKKKPGSTTYGNKCLKTMLTEFAWVASKTKGTYLRSKYHSLVGRRGKKKALVALGHKILIMCYHILKYRCAYKELGVDYLDQRRKDKIARSYIKRLNHLGYEVILQEAA

SEQ ID NO: 63222 - protein, 327 aa, unidentified
MYLCILNQAGAIVLHRNMKADPDSFLTAIAPYRDQIAVAVECIFTWYWLADLCAREKITFVLGHALYMKAIHGGKAKNDKIDAQKIAGLLRGGMIPEAYVYPETMRSTRDLLRRRMQMMHQRAQLLAHVQNTNHQYNLPDIGKKISYRGNREGVAERFADASARSNVAFDLKRIGFYDGLLNEIELEIVRHAKQHDPNSLYLLDTVPGVGKILSLVLLYEIHDIGRFPSVQDFASYCRLVKPRKESAGKVYGSSGGKIGNAHLKWAFSEAAVGFLRHNPEGQAYLARLEKKNGKGKALSILAHKLARAVYYILRRKEAFEMKRFLNR

SEQ ID NO: 63223 - protein, 343 aa, unidentified
MQTIMTIGLDIAKSVFQVHGVDAGGQVIVRRQLRRRYVLTFFQKLSPCLVGIEACGSAHHWSRELQALGHTVRLMPPAYVKPYVKRQKNDATDAEAICEAVTRANMRFVPTKTAEQQSGLVLHRARHLFVRQQTSVINAIRAHLAEFGVVAPVGRHGVEELLDVVTDPNDKRVPDIARACLSALGDQLQSIKKQILEFDRLIRAWHRANEMSMRLEAAPGVGPVLATALVAAVADPKSFRSGRNFSAWIGMVPKQHSSGGKNRLGNISKQGDRYLRGLFVAGALSVIRYAKVHGTKHRPWLTALLARRPTKVAAIALANKIARMVWAMMATGERYKEPVALAR

SEQ ID NO: 63224 - protein, 297 aa, unidentified
MTLNETTPHFLGIDVAKAKLDCALLKDGKCRNKTVPNNPEGFAELSQWLARQGAAQAHACMEATGVYWEDAAQALADAGHTVSVVNPALVKAHARSCGVRTKTDAVDARVIADFCREKRPPAWTPPPTSQRALRALVARHQALVGMQTQEKNRLESTREEARDSVDTHLAWLAGELKRIEKAIAQAIDDDPGLRAKRDLLDSIPGLGDRSISTWLAYCADAGRFASARQVAAFAGLSPQHHESGSSVRGKPRLSKIGHAFLRRALYMPALVALYKTNWGRRFRERLAANRPSSSSAP

SEQ ID NO: 63225 - protein, 425 aa, unidentified
MSEKIVVGIDVSKAFSDICILSPNNDIIKRLKISNDINGMKSLIYVLEKVEDEYEDRAVIIMEATAHYHQILANFFRKHNYEVIVINPIQSGALKNINIRKIKSDKTDAYNIALLYRIKNYNETITHSDTVNSIKKLCRQHKELTDEIVEHINRLIAFLDISFPDFKKVFTDLQGKTPLSLLEKYPTIQEVLSPENKQDIIQMIKENSHKSSSYAEAKYENLLKAAKKSIEVCIVNLSSAVLIQTTVKVIFSLQEALKAIDDEIKRLSLLDEKFHKEIVLLQSIPGFGDYTACVVLSELGDISNFSKPKELVAFFGLDPGVSQSGTYNRKNNKISKRGSPHVRSILHMLAKSNVYPNRNREYLNPVMRAYFEKKIAEKPYKVVMCAIMRKMVQIIFAVLRNQKSFELRTPEEHQKLIREKSKLVA

SEQ ID NO: 63226 - protein, 341 aa, unidentified
MTEYIGLDVSMKETAVSIRRDGKRIWRGKCASDPNIIAELVRKRAPAAKRVVFETGPLSVWFYHALRAEGLPAICIDARHAKAALDMAANKTDANDADGLAHLAEAGFFREVRVKGFDSMLTRTLVAARTRLVRITIELSNQIRGIMKTFGLLVPAGKGTTFEKNVRSLLIDQNELVPIVLPMLEAWRSIRIRAAELGRQLVADARQSQACRTLMSIPGIGVITATSFVTAIEDPSNFKKSRSVAAWIGLTTRRYQSGEVDYDGHISRRGDRHLRGLLYEAAAVILTRCSTESSLRTWGLKLRERIGFKRAAVAVARKLAVIMHTMLKTGELFNPSAGATR

SEQ ID NO: 63227 - protein, 362 aa, unidentified
MKKSIRERESEWKQRPDRTVGVDLGDRFSHYCVLNGEGEVLEEGRVRTSEEAFRRHWEAEPGQRMVMETGTHSPWISRLLRGFGHQVIVANARKVRAISENESKNDRQDAEMLARLGYCNPRLLKPIQHRSAERQRDLNLIRARDTLVRARTMLINSMRGLVKSAGGRLPPASSESFAARVSAAVPAELGTATHPLLHQIAGLTVEIRGLDQAIEKLAERYPEIRILRTAPGVGPVIAAAYVLTLDGVDAVEHSRSVGAFLCLRPKQSQSGDSDPEHNISKTGNIYLRRLLVQAAQYILGRFGPDSALRRWGLKLAQGGKRTKKRAVVAVARKLAVLLHHLWRTGQHYQPFPEAAAAAGSAA

SEQ ID NO: 63228 - protein, 465 aa, unidentified
MGHGNNQTRSAIPQAAWCQLNRGRIRRLLGSHCTVEAAHLSAVGIDVHHDQLICCFQKLDPIAGELTSEHRSFGTTIPQLLEFAAWCRVRESSVILMESTGVLWFSPYRSLEDVGFDNDTLALVNARDVKAAVGRKTDAQDAKRLAEYARLGKFHKSFVPSRPFRDMRMVSRDIIRLSDDISRQKNRYNKNLNSVGCRATSVFSDVHGKAAGKILDAYIRGDRDFEEIVRSARKQLRATQQEILEAINFAMSDALRELLRSSYEHLQYLIARRDSQIALLERMQAPYQEYIDRLMTIPGVKELSARLLFCEFTNEQQSFPDAAHFASWLGLCPGNNKSAGKSSSGKTPKGNRWARKTLTEVAHGIGLMKRGALKALFQAFKERRGARRAVVAIAHKVAMIMFAMIWDGSEYVETTCSALRDTRVKRLLQTSKNLREQRTVITLSGQIVDKDTGELIGQLSVDAAT

SEQ ID NO: 63229 - protein, 329 aa, unidentified
MKLTQFLGADLSKDSIDIFCHDLTSHVKIKNSVAGFKEMLRWLSAQRIDKASVFLVMEHTGLYSFHFENFLHQRQITFAKVSGLGIKRSLGLIRGKNDKIDAQRIARYAFEKSDVLVPEKPMDPGLQRLQMLHTTRARLVKQRSSMLCAIKEYLVVLSPGDPLVKLQLKLVAGFTKQIRAVEQQIKQCINSAGDQLSQDFQLLNSIKGVGPVVATATLVKTRNFSRFKNARKFSCFCGSAPFDHTSGKSIKKRTRISHLADKEMKTLLTQSAKTAIQYDKELKAFYERRIAMGKSKRSTINIVRNKIIFRMFAVIKRQTPFVTEYSNVA

SEQ ID NO: 63230 - protein, 344 aa, unidentified
MDHFAGLDVSVKETSVCIVDDSGKIVREVTVASEPEALLAVPKRPAYRFKRIGLEAGPLSQWLFSALAEAELPVICVETRHMRAVLQAQINKTDRNDARGIAQMMRVGLYRPVHVKTLRSQKLRMLLTHRKLLQSKAIAIDNDLRGTLRNFGLKVGMVGKVKFEARIRELVENFPDLAELVEPLLVVRRVLHQQIGILHRRLLAIVRDDDVCRRLMTVPGVGPVVALTYRATVDVPARFRKSKAVGAVFGLTCSKYQSGEIDRSGRISRCGDEMMRVMLYEAALSMLHSKKWSWLKAWAMQIARRRGIKKAIVALARRLAVILHRIWVDGTEFRWTRDQAPAAA

SEQ ID NO: 63231 - protein, 363 aa, unidentified
MAESTTFVAFDQHAATTMAAVLLPGQRTPALHPMTSDLGELRRFVRRLRASGGLRCCYEAGPCGFELQRALATDGVPCDVIAPALIPRRPGDRIKTDRRDASQLAVLSRAGALTTIHIPTEQEEAARDLLRCREDIRADLLRARHRLSKFLLRHGRRFTGTKKAWSKRHETWLRAQTWAAIPALDQTHWAYLRAVDEAVARLRAVEADLQALLTLEPLRARVARLRCFRGIDDLTALTIAAEFGDPRRFPTAPSTMAFVGLVPSEHSSGGKRAQGAITKTGNAHLRRVLVEAAWHYRHHPFVGRALQRRQTDAPPDVVARAWTAQQRLHRKYARLAARGKRKQHVVTAVARELTGFVWAVLTQ

SEQ ID NO: 63232 - protein, 384 aa, unidentified
MEKSSTLFVGLDVHKDSIDIATADAGRDGEVRHVGSLGGDLAGLDKALRRLISKGHRLHVVYEAGPCGFVIWRHLQAQGIECEVVAPSSIPKRSGDRVKTDRRDAMMLARLSRSGDLTAVRVPGTADEAMRDLARGREDAVRECRNARHRLKALLLRNGITYAGKSAWTAAHLRWLATLKLEHAAQQIAFQEYLHSVTEATARIARLEQAMRVALLEWSLAPVVQALQAMRGVQLVAAMTLVAELQDFLRFDNPRQLMAYVGLVPGEHSSGPKRRQGSITKAGNSAARRMLVEVAWHYQHSPRVSPIIATRQDQLPKEVTDIAWKAQLRLNAKFKRLVARRVMKNKAVVAVARELTGFVWAIGREVQISGWQGIKVEPASGNAG

SEQ ID NO: 63233 - protein, 320 aa, unidentified
MSVSSVTVGIDVAKAHIDVCVLGAKSQAQRFANDAQGHSALAALLQPLDVGLVVMEATGGYEAALACALQATGLPVAVVNPRQARDFAKSMGRLAKTDAVDARMLAELGSVLACREDLARFVRPLADERQQWLAALVTRRRQLLTMLHSERQRLQITPKKLHASIDAIVKAIKAQLDEIEAQMVIHVREHFGELDRLLQSAAGIGPVASATMIAELPELGRLNRREIAALVGVAPMANDSGKSKGRRRVQGGRFEIRRVLYMATLTATRYNPAIRAFYERLKAAGKLPKVALVACMRKLLTTLNAMVKTGKHWDTSIHSA

SEQ ID NO: 63234 - protein, 356 aa, unidentified
MTNTTKYIGMDVHKESISIAVRNAAGKIVMECVIETKANIILQFIEGLSGDVHVTFEEGTWAAWLYDLLRPHVTKLLVCDPRRNALLQEGNQNDRVDARKLAELLQNNQLRSVYHGDHGLRTLKELVRSYLTITQDLTRVMTRVKAIYRSWAIPCSGKQVYGTRHRGEWLGKIVEVGVRQRAEFYYRQLDELRLLRQQVRRDLLAESKKHKAWKQLCEIPSIGPIRAAVLLGILQTPHRFRTKRQLWTYSGLGIEVHSSADHQVVKGQLQRKKKHVEVRGLNENCHHDLKNLFKGAAVVASTKSGPFEKFYAALLTKGMRPEMARLTLARKIATIVLIVWKRGVCFDANHLKPQTA

SEQ ID NO: 63235 - protein, 375 aa, unidentified
MTFKEWILDLKDRHEKDKVVPGMEPTGHYWFNLGKFLQDNEMKPVLVNPHHVKKSKELDDNNPTKNDRKDPKVIAGLVREGRYMIPYLPDGVYADLRTASNIRFQLQAELTRIQNRISRWFNIYFPEYKTVYGKPDAKSGMLILKAAPLPEDILTLGIDGVNQIWRDAKLRAVGKARAKTLIEAAGHSVGSKEGAVSARMEIRMLLEDYESRNMRLQEVMVLIEELVKGIPMAEKLLEIKGVGIRTVSGFLAEVGDISRFNNPKELQKLAGLALVENSSGKHKGGTTISRRGRKRLRYLLFEAAMSLVAKNPEFRELHNYYTTRRRNPLKKMQSLMAVATKLIRVFYAMLTKGVDYDPKKMVSDIRRPEAYLQAA

SEQ ID NO: 63236 - protein, 332 aa, unidentified
MIKMNLQDRVANGDRPNCGIDMSKQHADACWGSNELRISNDPEGRKELIARLLVDQVDLVVIEATGGYERELVCEMQQAGLTVARLNPRQARDFAKSLGYLAKTDRIDARALRDFADFLSRHRDRHKYITAPTDAARDELAALMTRRRQLVDMRVQELNRLDLAGKRARRSIQSVIRMLDKQIEGIDQDVQRHIDDHFDGQRNLLDSFKGVGPVMILTLLAALQELGKLNRRAIAKLVGVAPLADDSGPRKGKRRIFGGRSEVSSVTYMATIAAIRHNPVLKAHYHRLVAAGKPKKVAIVACMRKMLTILNAMMRDGTVWDMTKHATPAPTA

SEQ ID NO: 63237 - protein, 350 aa, unidentified
MTSMTSTRRVVTVGVDTHSDVHHAAVIDEVGRPLADVGFPTTPDGYRRLLAWAGAHGEIAAFGVEGTGAYGAGLARHLRAAGQLVIEVDRPDRKTRRQRGKSDPIDAYAAAAAVLSGAAAGTPKSRDGRVEAIRTLRVARRSAIKGRTQAINQLKALVLTGPAELRHALAGQSTRQLLATCKRLRATERLTEAADPITAATKLTLRRLARRIAALTEEIDELDAELRPLVTATAPALMAVYGVGPEVAAQLLVTAGDNPDRLRSEAAFAQLCGTAPLPASSGRTTRHRLNRGGDRHANFALHIIALSRLSSHQPTQDYAARRRAEGLSNLEIIRCLKRYIAREIHHVLTA

SEQ ID NO: 63238 - protein, 304 aa, unidentified
MDVAKATLDLHVPTQPQPHTRQFANDTRGHRALARWLQRFGPVQIICEATGGYERIAVVALQSTAIPVAVVNARQVRDFARAQGRLAKTDRLDAAVLADYGRCLQPSASAAGSEAQRRLAELIARRQQLQRVRRAEGNRLEHLSQPEIRRQLQRHLVALDRQLEQIDAWLSEMLREEESLAQKVARMCLVCGVGRITALVLLATVPELGTMNRREAAALVGVAPFNRDSGPRRGYRAISGGRAAARQALYMAGLVAAFTNPRLKQFYQRLVAGGKAHKVALVAVMRKLIILLNHILQDPTFQPT

SEQ ID NO: 63239 - protein, 369 aa, unidentified
MGKHSEVFVAFDVAKKTHAVAIAEAGRDGEVRFLGDVENAQLPIERTIKRLADRYGQLHVCFEAGPTGYGLYRQVQALGHDCMVVAPALIPKRSGERVKTNRRDAVTLARLHRAGELTGVWTPDAAHEAVRDLVRAREATSEDLRRKRQQLLSFLLRHSRIYSGRGHWTLAHRRWLAAQKFEHAAQQIVFQDGIDAIEDALQRLRRLDRQLALIVPEWSMAPVVKAYQAMRGASFLVAVTFAAEIGDVRRFDTPRQLMSFLGLVPAESSTGDKVRRKGLTLAGNRRARRALVEAAWTYRYPARVSETLRTRLEELPKTVRDIAWKAQVRLCARYRRLSAIGKKLPIVVAAIAREMAAFLWAIGREVAPT

SEQ ID NO: 63240 - protein, 345 aa, unidentified
MELHTIGIDLGKTVFHLVGLNPHGEVVVRKKFSRTQLLRFTANVHVQLIGMEACGGAHFLGRALREQGHEVRLIPAQYVKPYVKTNKSDYIDAEAIAEAVARPTMRFVPIKTDDQLDLQSLHRVRERWVMRRTAVINQIRGLLLERGITLRKGRCHVGGALPGILEDADAKLSGALRMLLAQLKLELDHLDLRIDEADALIKKTACENEACQRLVAIPGIGPVTATALIAAIGNGGAFRKGREFAAWMGVVPREHSTGGKQKLLGISKRGNSYLRRLFVQGARAVMQQRTKQSSGLSAWLAQLTSRSHRNVAGVALANKMARMAWAVLAKNEQYRPPVLADVAAA

SEQ ID NO: 63241 - protein, 344 aa, unidentified
MDHFAGLDVSVKETSVCIVDDSGKIVREVKVASEPEALLAVLKNPAYGFKRIGLEAGPLSQWLFSAFAEAELPVVCVETRHMQALLKAQINKTDRNDARGIAQMMRVGLYRPVHVKTLRSQKLRMLLTNRKLLQSKAIAIENDLRGTLRNFGLKVGMVGKVKFETRIKELVENLPDLAELVEPLLIVRRALREQIVILHRRLLAIVRDDDVCRRLMTTPGVGPVVALTYRATVDVPARFRKSKAVGAVFGLTCSKYQSGEIDRSGRISRCGDEMMRVMLYEAAQSMLRSKKWSWLKAWAMQIARRRGMKKAIVALARRLAVIMHRMWVDGTEFRWIREQAAAAA

SEQ ID NO: 63242 - protein, 345 aa, unidentified
MSQITRIGIDTSKAVFTLHCVDEGGKAVLRTNLRRAQMVPFFKKLPPAEIAMEACGSSHHWARELGAFGHNVRLIPPQYVKPFVKRAKNDRNDAEAICEAAGRPGMRFVRVKSAEQQAQGMVMKVRETLIGQRTQLTNSLRGHAAEFGVISGKGIKQITPLLDAIEAETAIPAEAREMMAILGREITHLDTKLAELEVKLTVMHKTNPLSRLLATIPGVGVIIALTFAAEIDPAEFKSGRHLAAWIGLTPKEHSTGGKQRMGGISRAGNERLRRLLVIGATAVIRFAVRPGNKQATEWLVKLLARKPRKLVAVALANKIARTVWAMMTSGEVYRRQPVVAGAVSA

SEQ ID NO: 63243 - protein, 371 aa, unidentified
MKETITSYVGLDIHKDSIAIAVAEAGRSPPRFIGSTPAELATLCKALTRCGAKRSNTLVVYEAGACGYGWARHLSKQGWRCEVISPAHITRKAAEKRLKTDRLDAVLLARESRAGNLVRVAMPDERDEAIRDLCRTREDARGARHRARLQLKAMLLRHGRAYHGKSSWTLAHERHLASIKFEHPAQQIAFDEYRQAVKDNHERVERLTQALREQCEHWRMKAVVNAVMCLRGMDFVAATVFIAEIGDLSRFAHPKALMKYLGLIPSEFSSGNTRRQGSITKAGNKHARRLLVEAAWTYRFNPRVSRPIEVRQEGQPKAIRDIAWKAQLRLTYRFRKLNAGRKMVQNKCCAAVARELAAFIWDIARRVKIPA

SEQ ID NO: 63244 - protein, 356 aa, unidentified
MDSTKYIGMDVHKESISIAVRNAAGKVVMECVIETKANMILEFFAGLRGDVQVTFEEGTWAAWLYDLLKPHVTKLVVCDPRRNALLQEGNQNDRVDARKLAELLQNNQLRPVYHGDHGLRTLKELVRSYLTITKDLSRVMTRVKAIYRSWAIPCSGKQVYAPRHRAEWLTKISEPGVRRRAEFYYQQLDALRSLRQEVRRELLAESKKHKVWKRLCQVPSIGPIRAAVLLGILQTPHRFRTNRQLWTYSGFGIEMHSSADHEAVEGQLQRKRKRHVEVRGLNENCNHDLKNLFKGAAVVASIKPGPFREFYAALLAKGMRPEMARLTLARKIATIVLIVWKRGVCFDAQHLKPQTA

SEQ ID NO: 63245 - protein, 453 aa, unidentified
MAKKKKKQYKRAQMLRSIQPDAAGIDVGATEIYVAVPEDRVDESVRHFGTFTQDLHDTAKWLKSCNVKSVAMESTGVYWIPIFQILEAYGFEVLLVNARHVKNVPGRKTDVQDCQWLQYLHSVGLLSGSYRPTKDVCAIRSLLRHRDNMVKISSTHVQHIHKALTQMNLQIHNVIRDITGLTGLAILDAILAGERNPQKLASLKHGRIQASDSIIIKSLQGNYLPEHLFTLKQALQSYRHYRRMIRDCDVEIEQYLREFESRIDPDQNPPPQPRIKKRKPTGNEPDFDLRSHLYRILGTDLTQIDGISVLTTHVLFSEIGPDVTKFPTVNHFCSWLGLCPNNKISGGRILSSKTRPGSGRAAQALRLAAQALWKSQSYMGHYYRRMRARHGTPKAITATAHKLARIVYHLLKTGKTYDETVFADQEILHRQRLERNLRKQANFLGFQLVPGQP

SEQ ID NO: 63246 - protein, 358 aa, unidentified
MKIVGCDLHARQQSIAMLDTESGELTEKVVRHEGNAVREFYAALEGPIVVGIEATGSMQWFLQLLEELGIQYRVGHPAKIRAAETRKQKHDRRDARLILDLLVMEDRFPEIWMPSLEQRDLRTLLRDRHQWVKMRARLQHTMQSMALNHGLRQGPGLWSGAGQSALQALPLAPYTSQRRNALLSLYGQLQKRIQELDKVVEAEAESRPQACRLLTHPGVGPVTALTTEVFLGDPNRFRTGKQVASYIGMIPGEHSSGKRQRLGKLSKEGNALLRYLWTEAAMHAVRKDPELKRFYRRKLIQKGMGKARVAAARKLGIRLWIMLRDQIDYAEFCRRGRSQQEGETHAGMPAFNSGPAMQ

SEQ ID NO: 63247 - protein, 342 aa, unidentified
MKVIGVDLAKDHCDVIGYDENGKICLRLDGCSYAKLREILANLPQAVVLMEACKGSMFHARSIADLGHEVRLVKGADVKALRNVNHKNDLRDAAYIAKLYFVPGTTYVYIKSQQQQSLQFLQNEYKSLQELRIQVGNQIHAGLEEFGCPVRKSSKFIKTRMVAHLEKHAELIPEDVMASFKRRREIWLNLLQQEEEAQRRMEQVAATDANAKRIMTVPCVGPQTAVGLLVHIGVDIGRFKNSRQFAASLGLVPKQNSTGGNSRLNHITKCGPKRLRSNLVQCAQLVLMHADKWKGNFGDWVRKMRDSGKKHGVIVCAIAAKLARIIYRLMKDKVDYTPVLSC

SEQ ID NO: 63248 - protein, 340 aa, unidentified
MTVYAGLDLHATNTYVAMIDQENKVLYKQRHRNELPTILAALDPFKKDLQGVVVESTFNWYWLVDGLMDQGYVVHLANPSAIKQYEGLKQIDDKRSSLWLANLLRLGILPSGYIYPKEERPTRDLLRKRLQLVRHRTSHILSVKNILARNLGLRMPSVDVKKLLDAEVKRLFPDKEMRTAVLSSLGLIRHLAEEITKIETMIEKKVKVRKEFAKLMTLPGIGKILALTIMLEVGNIRRFPTVGDYSSYCRCVKSIRTSAGKVIGHGNRKNGNKYLSWAYVEAAQAARRFHETVRSYYEKKMAKTNKIVAVKALSHKLTRASYYVMRDQVDYDPARLFGQG

SEQ ID NO: 63249 - protein, 367 aa, unidentified
MKKVSTAVSKQSRIFSQPTQTIGFDLGDRNSWYCVLDEAGQIQLEQRVRTNAKALREVFVEMPRSRIALETGTHSPWISRLLSELGHEVIVAHARKVRLIGESRKKDDRLDAQTLARLARIDPQLLCPVKHRSAQAQADLTVIRARAGLVRARTALVNTARSLAKSYGQRLRGCNVRNMNPEKAKGLSPELQTALEPLLACIESVSEQMREYNERIEKLAQDSYPQVVLLKQIKGVGTLIALTFLLTLEDPHRFRKSRDVGCYLGLQPGRRNSGQSEPQMHISKEGDPYLRTLLVQGAQHILGPFGVDCDLRRWGLKLAERGGKSGKKRAIIATARKLAVLLHHLWVSGEVYEPLHNSRRTAIAAAA

SEQ ID NO: 63250 - protein, 411 aa, unidentified
MDKIYDKCCGVDVHKKLMVACFRQGRKQEIREFGATTRELLEMADWLKSGGCEMIAMESTGSYWKPLYNILETSDLKAMVVNAGHIKNVPGRKTDVRDAEWIADLLQHGLLKASYIPNKDQRELRELVKYRKSLTEERTRELNRLQKMLEGANIRISGTIKDINGKSSRNILELIVSGETIDSARYDLLYKQKAIAHNLKASKEQIIDDLNGVMTDLQRKVMRVLLRHVDELTAHISELDDDIDNFMKPEEKQAAKKIQQVPGIGNTSAQAVIAVIGTDMDRFPTQAHIASWAGLCPGDNTSAKKRKSGKTRKGNQLLRATLVNCAHSAVKNKASYFYAQYMRISAHRGKKRAIVAVAHSILIAIFHILKCDYPFRDLGADYYNQFNRERKISAYLKKLKALGWESSPAAC

SEQ ID NO: 63251 - protein, 349 aa, unidentified
MRFYNQQHRFYCGVDLHARTLSLCLLDASGSIVHHDSHPATGRDFLAAVAGFRDGLVVACECMFAWYWLADLCSRESIPFVLGHALYMKAIHGGKAKTDKIDAHKIAVLLRGGMLPQAYVYPKGMRETRDLLRRRSYLVRRRAEALAHLVNTNNQYNLPPLNKKLCYAANRVELDLPARFDDPSVRANIEVDLALIDGYDEQVHRLESYLVKAARVDDAQAYARLQSIPGVGKVLALVLLYEIHDVRRFAEVGQFLSYARLVRCVHESAGKKQATGGNKIGNAHLKWAFSEATCLLVRSSERAKKWLARREKKHGKKRALGALAARLGRAVYHLLRKGEAFDEGRFFAS

SEQ ID NO: 63252 - protein, 347 aa, unidentified
MNFYTHRHKHYCGIDLHARAMYGCLLDQPGTKLVHQNLPTTPEAFLRLITPYREDLVVAVECVFPWYWLADLCQQEGIAFVLGHALSMKAIQGGKAKHDKIDAHKIAVLLRGGMIPQASVYPAAMRATRDLLRRRCHLVQKRAELLAHLQNTTSQSNLPEIGKKLAYKANRAGVEAHFPDPSVRKTVEVDLALLDHYDQILRDMELSLTRSAKVHDGQTYARLQSVPGIGPILALVLFYEIQDITRLPRVQDFGSYCRLVKCAKESKGKRLGTSGKKIGNSHLRWALAAAAILFLRQNQLGKAYCTKLEHQHGKAKALTVLGHKLARAVYYRRTREQPFDLQRFVSA

SEQ ID NO: 63253 - protein, 362 aa, unidentified
MAQVRSWAGLDVHRASVLAATMDRDTGEMRMRRLPGSTEEVVAFCAGLPGPTRVAYEAGPTGFGLARALAGAGVQCVIAAPGKIERPSSDRVKTDERDAQRLLRLLMIDALHAVRVPSIEEEALRDLVRAREDIRGDLMRARHRMSKLLLRHDVRFDGTAAAWTTHHRAWLAKVDLGQRGAQVTLRDYLGAIDALIIRRDTLEHTIGELVPTSPWADTVARLRCLRGIDTLSAVGLCAEIGDWARFPRPAHVMSYLGLVPSEHSTGQTRRLGAITKTGSGHGRRLLVEAAWHYRRAPRNGQVLKRRQAGQPPHVIAISWQAQQRLHRTWQRLDTERGKRRTLVAVAVARELAGFCWAAANAD

SEQ ID NO: 63254 - protein, 387 aa, unidentified
MQAILYCCCGVDVHDKMIETCIVKGFEDEPEIIRKQFQTRPNDLKDFATHLMEHDCFNIGMESTGIYWRPIYEAIEDHCEYIEKIVVTNAAHMKNIPGRKDDASDAEWIATLLQYGLLKSSFVPERIFRDLREVSRLYKKFVGEKSRYTNRIMKLLQAHGFKLSNVLRDILGASGRNILNILADRGSLSASDVASCLRGHTKHSASEIHSAISGSLNLDEQQMLSILLRRIETTEHDLDNTFSLMLKMMEPYRRAVDIVDSVPGFDILAALLLLAEISATPHFYFDSSNKLCAWAGLSPRNDESAGKVKSRKILPSGPYVKSILCQAAWAAVKSRNNPFRDWYWSHVRKMGEKKAIIAVSRKLLVTIFTLLKNDSLYSPEIAAANRK

SEQ ID NO: 63255 - protein, 317 aa, unidentified
MKAPLIFVGIDVSKAQLDIAIRPTAQIVSVPNDKAGIKTLVKHLEKLRPTLVVLESTGGLERQVMHGLVGAEISVVMANPRQVRDFAKSTGQLAKTDRIDAAVLAHYAEAIRPQPRPLPDELTLKLRALTVRRRQLIDMIVAEKNHLATASKAIKKRITAHISYLEQELDDADQDLDRFIEKNPLWKQNQEILCSTPSIGPVSSRTMLAELPELGTLGRKQISALVGVAPFPRDSGTLKGRRTIWGGRASVRNALFMAALVATRFNPVIRDFYKRLKAKGKPTKVALVACMHKLLTILNAMIKNKTRWSETFSLKAT

SEQ ID NO: 63256 - protein, 422 aa, unidentified
MLAESHDEEQIIARVAALDIAKAELVCCVRVPSPAGGKRRLQEVTTHSTMTQALTELANRLVEMGVQRVVMEATSSYWKPVFYLLEAHGLDPWLVNARDVKHLPGRPKTDVLDAVWLCKVAERQMLRPSFVPPWPIRRLRDLTRYRTDLVAARTAEKNRVEKLLEDACIKLSVVASDIFGVSGRAMLAALVAGERDPKVLAQLARARMRGKIDRLEQAFDGHFADHHRFLLSRMLSRIEGLDADIAAIDAQIEAQLAPFAEAAAHLDEIPGIGSVAAAAIIAEIGVDMSRFPTAGHLCSWAKFAPGINSSAGKTKRSASSGHGNPYLARVLGEAAVGTTKTNTFLAARYRRIARRRGQPRAVVAVGRSILVIIWHLLQDPDARYQDLGADHYNRHVDPSAKKRSHIRQLEALGYTVTLTPAA

SEQ ID NO: 63257 - protein, 308 aa, unidentified
MLRPDGRHRSKKFTNTPKGHDELLSWLRSHNVAPAHVCMEATSTYMEDAAASLSDAGFTVSIINPALGKAFAQSEGLRSKTDAVDARMLAEFCRQKRPVAWEAPHPVERALRALVLRHQSLTDMHTQELNRRETAREVQMPSIDAHLLWLEAELKRLEKQIKDLTDDDPDLKHRRKLLDSIPGIGEKTSAVLLAYVGLKDRFGQARQFAAFAGLTPRQHESGSSVNRASRMSKAGHVSLRRALYMPAMVALYKTEWGKAFRGRLEKNGKGAKLIIGAMMRKLAQVAYGVLISGRPFDATLHQENACVA

SEQ ID NO: 63258 - protein, 351 aa, unidentified
MPRTTTVHAVTAIGIDMGKNTLHMIGLDARGAIVLREKVSRGRITSRLANLSPCLIGIEAGMATHYVARELTALGHDVKQVPPAYAKPFRQGHKNDFRDAHAVAEAVQRPTTRFVPAKTNEQLDLQALHRVRSRLVSERTAVINQIRGFLLERGIIVRQGLRFLRQALPDILAKRTDVLSPRMVRIVADLTSDWRQLDERIEVVTDEIETLAKSDGSCRRVMTVPGIGPIISSAMVAAIGSGAAFARGRDFSAWIGLVPQQMSTGDRTILGRISKRGNGYLRTLFMQAARVILLRPASWPKHSFGVWLARAAQRLHPNVLAAALANKLARIAWTVLAQERNYEARIMKAAA

SEQ ID NO: 63259 - protein, 407 aa, unidentified
MDVMHAKCAGLDVHQQTVVACARLAIGRSVTYDVRTFATTTPELLALTDWLTAHGCTHVAMESTGVYWKPVWQVLDGSFELVLANAMHVRNIPGRKTDVNDATWIADLLAHGLIRGSFVPPAPVQELRDLTRTRKQLVREIAQHTLRIQKTLEQANIKLTGVLADILGVSGRAILHAIVTGEADPERLAGLANERVKAPRADLVAALHGRITAHHRFMLKLHLTQLEALHIAVRDVEARLGEALAPFRAAVDRLITMPGISETVARVIVAEIGFDMSRFPTAAHLVSWAGLCPRLHESAGKRLSNRTRPSNPWLKTTLVQAAWSAARHKHSYFRAQFLRIKSRRGPKKAVLAVAASMLTAAYHMLKTDSDYRDLGVDHFDRRDKAKLAKRLIARLHDLGLAVEIRAA

SEQ ID NO: 63260 - protein, 335 aa, unidentified
MKLTRVGVDLAKQVFQVHGVDRAERPAWCNRLKRSRWIADLERDVEPGCEIGMEACGGAHHWARVLQSKGYRVKLIAPQFVKPYVKTNKTDANDAEAICEAMSRPSMRFVAVKTVEQQDLQAVHRVRSSLIRERTAKANQLRGLVYEYGLVAPREISSLRRAVPQWLEDAENGLTPRFRALLSGLYGDLRLLDDRVRDLDREIAAITREHEPVRRLMQISGVGPLTASALYALVGDARQYRNGRELAVALGLTPRQHSSGGKEKLLGISKRGDKYVRTLLIHGARSALRTAPGRGSDQSLGTGTGGALTYERRGDGARQQDRPGRLGDAAPRNEL

SEQ ID NO: 63261 - protein, 344 aa, unidentified
MTYYTGIDVSLRSVSICVVNDKGKVCLEAKVAAEIDAIVDRLRRFSSDVKSVGFEAGTLTQYLTYGLQAAGFEVICLEARQVSVTLAAMRNKTDRNDARGLAQILRTGWYSRVHVKSLHSHQVRALLASRKAILKKCVDLENELRGLLKVFGIRLPSRVGHGSFDAELRDTVSGDEMLACALVPLLDARTVLYKTYLKLDNAVKGLVRVDPICRRLMSIPGVGPVTALTFKAAVDDPSRFKSSRTVAAHFGLTPRRFQSGELDNPGHISRAGDADVRSALYVAAHSLLTRNAQWSTLKAWGVGLAKVRGHRRAVVAVARKLAVILHRMWIDGSEFRWGPAPASA

SEQ ID NO: 63262 - protein, 348 aa, unidentified
MMIIGCDYHPSWQQVCWFDTATGETGEVKLEHTSGEAEKFYRGLAGHALIGMESTGNCQWFVEMATTAGHDVWIGDAAQIRASEVRQQKHDRRDAALILKLLMEGRFPRIWTPSGQEKDLRQLLIHRYKLVRIRAQVKTELQHLAMNQGVTRKRKLWSKAGEKVLRELPLKPWASRRREDLFKVREMLNGQIALLDQAVVEAAEKNEKARLLMTQPGVGPITSMAFVLTMGDVNRFQRGKQVASYLGLIPREYSSGGHQRFGSINKQGNRFMRMLLVEAAQGAVRCDPGFRNEYLHRCHKKAKGVAKVAAARKLAVRLYWMLRTNTGYPEVVRVESSSRVPVVVRHGG

SEQ ID NO: 63263 - protein, 356 aa, unidentified
MNKVNANFENQKVFVGLDVHKRSWNAAIFLGDYFVRNIHQPPSPQALQHFLTRNYPGAHYTCAYESGKFGFWIQRHFKQMGIDCLVVNPADIPSTQKDNVYKTDARDARGIGQALSSGQLKSIFVPHQEQEADRQLVRQRKKLWADLVRCKNRIKAFLDYMGIVVPDRFDNPNWSLNFIRWLRELEFEHVTSRVTLNYQLDEMELLRKQMLSICNAIRKLMRSKKYNQLYYLLRTVPGIGPLTAASLITEIGDINRFKDFYNLNSFIGLLPMEHSSGEKEIRSRITIRKHRQLRSDLIECAWTAKRTDPALALYYTEQVKKGKNGKAAIVKVARKLVSRIRYVWRTNQPYQCAVVK

SEQ ID NO: 63264 - protein, 414 aa, unidentified
MRALVERCCGLDVHQDTVVACLLIGEPGKPLRQEVRTWATTTRALEALRDWLQAEKVTHVGMESTGVYWRPIYAVLEGPFVLIVGNARHIKTVPGRKTDVKDAAWIADLVRHGLIAPSYVPPQPLRELRDLLRYRRKLVEGRASERNRLLKLLETANIKLASVMSDVFGVSGLAVLKPLVAGETSPERLADLGKGPLRKKRADLVRALEGKVEEHHRFLMGVQLRRLDAADHDIAALDERISERLKPYAAEHALLMQIPGVDGLAAAAIIAEIGVDMAVFLSAHHLAAWAGVCPGNHESAGRSKSGRTRKGNVHLRTILVGAAISAGRCKGTYLRDKYHRLKARRGALRAALAIAHKILIAAYHMLARGVSYRELGEAYLDQLSQTRTAAHLKRRLERLGYHVTLEPKTVAMVT

SEQ ID NO: 63265 - protein, 314 aa, unidentified
MILPLRCVGIDVSKRMLDIFDDAVGTPERIANASQPITEQVARWRCGNVFVVFEATGVYDRELAEGLRQAGIRFARINPARARDFARASGQLAKTDAIDARMLAAFAHAMVPAADRAPKPERNTLAALAKRRDQLVHMRAQEKNRRSEAHDRTMIEHIVRHLDFLNGEIKAIEVEIKALIKSEPEISEQARLIRSAPGIGPVACMQLIAQMPELGQVGPKQVAALAGLAPLNVDSGTYRGKRTIGGGRKRVRDALYMAALNAVRRDSSIKAFYQRLRTAGKPAKLALIAVARKLLTTLNAMLRDRKTYLQPLPT

SEQ ID NO: 63266 - protein, 343 aa, unidentified
MKLNRVGVDLAKNVFQLHGVDRHGKAVWKRRLRRDQWLKALLDQAEPGCEIGMEACGGAHHWARELEARGYVVKLIPPQFVKPYVKSNKNDANDAEAICEAMSRPNMRFVTVKSVAQQDIQATHRIRTELKDQRNAKANQIRGLVAEYGLVAPLTLCALRAAIPAWLEDADNGLTDHFRSLLHGVWLDLVALDERMTELDQTIKQLANSNEVTKRLQQLRGVGPMVATALVATVGDASQYHQGRQMAASLGLTPRQCSSGDKHRLLGITKRGDVYLRTLLIHGARAVVSQAKHRDDRLSRWVTGIAQRRHPNVAAVALANKTVRMAWAMLRNETDYDPDFVIS

SEQ ID NO: 63267 - protein, 427 aa, unidentified
MKKADLLSTLFVGIDISSRENVVVLLEFESKKPLLSFAVSNNYPGAAILAQKLAEFLSSHHELSSIIIALESTSFYGIHIANYLSSCQLLMPFNTAVYCVNPKMIANYKKSFIDLGKNDYIDAFVIADFARVGRITIKPWRGSQFLALQRLTRHRLHLAKALTREKTYMLSNIFLKFSEFSMLEEEQQPFSDNFGATATSVLTDFLSTEEIINMPIDALISYVCEKGHNRFPNPENTAKLLQQAARNSYRLDKCLYEPLTIAIASSFNLITTYTKEMKAVNAAIEKTLKGLNPNAYQSLLSIPGIGPVMSAGILAEIGCIDAFKSQDALAKYAGLVWRENQSGQFKADDTTLSKAGNAYLRYYLIEAVSHIKKHCNEFAVYYQKKFDEVKLHQHKRALVLTARKFVRLIFGLLAKNQLYSSSRVDQI

SEQ ID NO: 63268 - protein, 413 aa, unidentified
MVNTARKEGLMDFYVGIDVSKFKHTVAIIDEEGEIRKKSFDISNSREGFDSLLNELGLLGEKEQIKIGMEATGHYMSCLVRCLISNGYQVQIYNPSLISMFRDSESVNLAKTDNLDAMLIAKYVATHPFTSSPQISYLIGEIRKISRAKYFLFGDKASCYNHLLRYLDEVFPEFVSFFKKNEDGSRKNMGRNLFESPTIRWLLSEYTSPQKMARMRSETGETLRRMSKGSISFNKFNQLRELAKNSIGYSTEADEQIIRNLVTQVRIIDEEIDMLNELLEPLMEELDSPILTIPGIGINLAAMIIGEIGDISRFSNPEKLIKFAGLDVKVYQSGTINHKGHIRKRGSPILRYALSLGVQKLRIHSPVFSEYYYSKLRQGKATNVAIIATTRKLIRVIWKMMTTNQVFENIKRD

SEQ ID NO: 63269 - protein, 366 aa, unidentified
MKKISTVQVLGNEILKEQKLTIGVDLGDRWSFYCVLDEAGNIIMEQKVATTPEAMKQTFGKMPRSLIALETGTHSPWASRLLTELGHEVLVAHAQKVELITKSNRKDDRHDARTLARLARIDPELLGPVRHRSAKAQIHLTVIRARAELVSARTALVNAARGLVKSYGQRLPKCGTQQVNRELAVGLHTELREVLEPLLKEIESLNEHIKEYDERMEKIAKEVYPEVFLLKQVKGVGTQIALTYVLTIEDPYRFEKSREVGCFLGLKPGRRNSGNSEPQKKISKEGDRYLRTMMVQGAHYILGPFGEDSDLRRWGLKLAERGGKNAKKRAVVAVARKLAVLLHRLWVGGEVYEPLRNSQKAMRAVA

SEQ ID NO: 63270 - protein, 386 aa, unidentified
MQRNDLSRSLVAFDQNSTLVSVIELSLKTWLVAALAPGLARQPLKKQGADEDALLALLYRWRDEAIKAGSKIERIVVAFEAGRDGFWLARWLRSRGIEAYVIHPTSIPVSREHRRAKTDRLDAGLLMRAVLGWLRGEHKHCSMVAIPTLAEEDARRPNREHENLVGERTRIVSRMKATMVRHGIRTFNVKLRKASERLEGLRSAEGVPLPPNTLAELRRDMARRRFISEQIKEIEKMRLERLQRAPREAAHPMLLMLAKILGIGVETADMLVHEVLSRGLRDEKAVGRYAGMTGAPDESGSKRREKGMARAGNARVRRGMVQLAWRWLMFQKDSALTKWFLARTADARRDIRKTMIVALARKLLIALWRYVTTGEVPAGAVLRPAI

SEQ ID NO: 63271 - protein, 316 aa, unidentified
MPTIRNDQTIGVDISKDTIDVYMHPKGLRTRVPNSKSGFRALSEWLSTSEISQIIYEPTGQYHLAFEAYFLRLGVPLGKVNPRQARRFADAIGVQAKTDPIDAELLAQYGAMITIRPVAKRATKFNEMRELQSARRALIKDRIAASNRAASRICSLLKRQAKERISQIEQQLRAINAALREHVCSDELLKARFDILLTIPGVGETTAITLLVEMPELGELDHKAAASLAGLAPIARDSGTFRGRRFIQGGRAHLRQALYMPALVSIRHNPEFRAKYDLLISAGKAPKLAITVVMRKLLILANSLLRDGRLWTPSAT

SEQ ID NO: 63272 - protein, 416 aa, unidentified
MSLALPPAEFFVGVDWAAEVHAVCVINIEGKVLSQFTVAHSADGIALLLRRLAKFGEPIDIPIGIERRDGRLVDLLLEAGHPVVPVSPNAIKTWREGEVLSGAKSDAADAAVIAEYLRLRRHRLTAAAPYSAETKAVRTVVRTRDDLVQMRVAAVNQLAALLDAYWPGATAIFADLESKIALEFLSRYPTPTAAAHLGEKRIAGFCAARGYSGKRSAAELLTRLRAAPAGTTEPHLTVALHDAVLALVGVVKAVNTAIKDLDKSVAARLGEHPDGKIFTSLPRSGQINAAQMLAEWGDCRQAYEAPDSIAALAGCTPVTKASGKHKAVHFRWACNKRFRVAITTFADNSRHASPWAAKIYNDARTAGKDHPHAVRILARAWIRVIWRSWHNNTPYDPTRHGAAQPLSAHSSVNLAA

SEQ ID NO: 63273 - protein, 343 aa, unidentified
MLYVGLDVHKEFCQACVMNEGGEVISNERFNSTREELDEFLSRFEDARFVLESTGIWEFIYEGIENRGFEVVLAHPLKVRAIAEARVKTDKVDAETLAHLLRANLIPQSHVPSREIRNLRQLVRQRAYLVRQSTSFKNRIHAELLRQGVRRPKSLKKPFTNKSIRWMRSLNIPTINSNIDCLERLQEQIEKLNSILLMEFEQRRNAQLISTIPGIGFYGALLILAEIDDIRRFSHPQKLCAYAGLVPTVHQSASSVRYGGINKDGSKYLRWILTESVHTHTRFCPDSKLSRFHARIARRRGKQIAIVATAKKLLHVIYWMLLKQEPYHGQGSNPVSKPAPTSA

SEQ ID NO: 63274 - protein, 327 aa, unidentified
MFMETKKLCCGIDVSHTKLDVCYQNNLGELFHLQVGNNNNGFAKILEHTGIDYHFVMEATGVYYIRLAFYLHQQGCKLSVVNALSIKRYIQMQLERNKSDKKDAGWICRYAIEQRPSYWEMPDSAYFESKQLYNTIREYAEQVKRFNNQLHSLKLLPVPSKDTIRSLEKIKLQLEKEIDSLEQKLEALLQKWQPAQLKSVSSIKGIGKRATAMLIVFTQGFKNTHSHRQLISFAGLSPTEYSSGSSIQGKPRIYKRGGKNLRDVLYMCSMNAIKTNTACKILYDRLRTNGKTGKQALIAVCNKLLKQVFAVVKNKSLYQPNYCSAKR

SEQ ID NO: 63275 - protein, 341 aa, unidentified
MAKFIRTAIDLGKNYFQVHGLESEGGQSISRKVKRSKMHEFYSQIEPCRVGMEACGSAHYWARQLTAMGHEVVLIPPAYVKPYVKRGKNDAVDAAAICEAMSRPDMRFVPIKSADQQAVLMLHKTRELLVKQRTMAVNALRGHLAEFGIVAAKGIGRVDELLARAKVDAALPHIAGAAVACMAQHLEGLDLSIETVDQEIARAHRQNPTSRLLDEIPGVGTLIASVVAASVPDPGVFKSGRDFAAWLGLTPRQNASGGKEKLGAITKQGNRYIRKMLVTGATSVLRVAARRKGALADWINALRARKPERLVAVALANKLARICWAVMTTGEDFRTDTYVKA

SEQ ID NO: 63276 - protein, 317 aa, unidentified
MKTVPFEQVILRGCGIDVHKDMVVATISGEGLKTETRSYKTFSSSLTELKEWLLSSGITHVAMESTGVYWKPVYKILECPDMKVWIVNARHIKYVPGHKTDKKDSAWICKLLLAGLLKPSYIPEREQRELRDLTRYRNKLIQHVSSEKNRIVRILEDCNIKLSSVVCSLDGVVANKLIDMLIDKGHVTMDDITCIYNKKIEETNEILYQACEGFIEPHHIYMLQTIRKDMEQTKAIIADLTCRIKEVLSPYENVMELLQKIPGLSRKTVEDLIAEIGVDMEAFPTEKHLASWAGVCPGNNESAGKKKVVEPPMATNS

SEQ ID NO: 63277 - protein, 344 aa, unidentified
MVVTIGIDAHKHTLAVCLVDELGRELASREFANEPRAHRALHAWVLRQAPGSRRFGVESTGWVGRGIACFLLGKGEAVVDVRGTLTDRQRQRMRGNGKSDPRDALAIARVTLREPQLPPPRADSPARDLKLLCDYRLQLIGERTRTANRLHVDLVSLRPGYERSVPRLDSLPRLDEAERLLGRDRGVQTTLARRRIEALRRLDLEIRQLEREIAQSVHAIGSRLPQLVGIVYLSAARIIGEVGDINRIATKARFARMNGTAPIPASSGKTQRHRLNKGGNRRLNHALHMMALTQARMDPRARAYVERRQSEGRTKRDAVRALKRHLSDVVYQQLRQDAALAMAD

SEQ ID NO: 63278 - protein, 338 aa, unidentified
MTVVTVGIDLAKNVFAVHGVNAAGKAVLVKPLVRRAKLLELIATLPACLIGIEACTGAHYWAREFQKMGHTVRIMAPQLVSPYRMGGRHGKNDAADAAAICEAVTRPNMRFVPIKSVEQQGQLFVHRAHQGYVSERTALINRIRGLLSELGIVLPQAFKAFLSGVAQVLEDLPGYCNQVIGDLLNELYHIEEKIKNSEKIIQQLARDNSAAQLLMQFRGIGPMTATAIVASIGNGHDFKNGRQFSAWLGLTPRQQSSGGKARLGRITKAGDSYLRILLVLGARSVLLGAAKNDDPVSRWALQLKERRGYGRALVAIAAKNARMCWAMLHLRDEFRFPA

SEQ ID NO: 63279 - protein, 326 aa, unidentified
MEHELHYIGIDTAKEKLDVDVLRPDGRHRTKKFANTTKGHDELVSWLKGHKIDHAHICIEATGTYMEPVAECLYDAGYIVSVINPALGKAFAQSEGLRNKTDTVDARMLAEFCRQKRPAAWEAPHPLERALRALVVRHQALTDMHTQELNRTETAREVQRPSIDAHLLWLEAELKRLEKQIKDLTDDDPDMKHRRKLLESIPGIGEKTSAVLLAYIGLKDRFAHARQFAAFAGLTPRRYESGSSVRGASRLSKAGHVSLRRALYMPAMVATSKTEWGRMFRDRLAANGKKGKVILGAMMRKLAQVAYGVLKSGVPFDASRHNPVAA

SEQ ID NO: 63280 - protein, 412 aa, unidentified
MDVIHERCAGIDISKVDVKVCVRAPSTGKRRRSEVRTFPAVTSGLLAMRDWLLAEGVTVVGMEATGVYWKPVFYLLEHDIECWLLNARHMKSVPGRKTDVKDSEWIARLVEYGLVRASFVPPEPIRQLRDLTRYRTEVIRERTREIQRTEKLLEDSGIKLSSVVSDLTGKSARAMLEALIGGERDPGRLADLALGSMRRKTADLVEALTGNFTDHHAFLLRAMLDRIDACTAMENRLSERIDAQVRPFRRRIDLLITIPGVGTRAAEVILAEIGAQMERFPTAGDLASWAGVCPGNHESAGKSSSGKTRHGDPWLKAALGQAAVAASRTKDTYLASRYRRLVGRRGKKRALVALEHSILVAIWHMFTNDAEYADLGGDYFLERTGKTRATRRLISQLNQLGYQVNLQPIGVL

SEQ ID NO: 63281 - protein, 383 aa, unidentified
MRKNTTAKKNQKALTKTSRKQVRELAAEQRLTIGLDLGDHSSRYCILDAGGEVVSEGQLPTTKTGLNSLFEKMPRSRVALEVGTHSPWASRHIASLGHEVIVANPHQVKLITQSVRKNDRIDARKLAQLARVDPKLLAPIRHRGEIAQGDLAVIRARGELVEVRTGLINCARGLAKPMGERLKPCDADQVIEGLAEGLSGAVQTAIGPLLKSVEAISEQLAVYDQRIEAIAQRYPEVALLTQVYGVGTLIALTFLLTIEDAGRFAHSRDVGCFLGLQPRQRESGNSQPELGISKTGDRLLRSYLVQAAHCILRKGAPDSDLRAWGVAKLGPAGKNAKRRVIVAMARKLAVLLHRLWAAGEVYDPLYNRKAAQAAAQRRAKVAA

SEQ ID NO: 63282 - protein, 412 aa, unidentified
MSRKFTRSDRCRDGKVSGKAVFFVKRLFCGIDVAKYEHVASIYDPATGEYILDSLHFGNDEKGFDSLFSHLSKLKKGQEILIGFESTGHYHMALFSYLTGKKYTCYLINPYMTSRFRSVSLRDTKNDDIDSRTIAAFLSFEYSRLENEEFINNELKELSLQRHFLKEDIAKMKIKLKAYLDRVFPEMEKLVNISTEAIRAILKEYPTAKDIAGVRIDKLKNLADKASKGKYPPSKIIRLKEAAKVSVGYPSEAIGLNIRHCIETLEVKERQIEEIEMMIRIHPLVAQSPLKQLKGMNDIEIGYIMSAVISISRFSSPKKLVAYAGLDPKVRQSGTWEAKTTRMSKRGNRLLRYALIWSAYNMTRCEGPLKDYYELKRSQGKSHYNALGHCAAKLCRYIFWILNHPEEEFLYR

SEQ ID NO: 63283 - protein, 316 aa, unidentified
MIVVGVDVSKDTLISVAIDRSIKVRNSYTTKNNKEAIATWLLELTGTYKKLLLSCEATAEYHRVLALSALSSKIPLRLLNPIVTKQYTKATVRKKKTDAADALTIAKLAMQGEGRVVTAQTFAVAKTYERTAIKLTHAKQRLQLMKQHLEEIEVDEGSLVEQLSTCISQIEKSIEVFRAKAKHSVDPKQVKLLCSIPGIGETIATVLVSEIGDINDFSSAKSLVAYAGLDPKVKQSGGSLHHNTHITKRGSPYLRQMLYTGASIAQRHDKELKEYYEKKRSEGKKYKEATIANARKLLSRVHAVLKRKTPYISQTG

SEQ ID NO: 63284 - protein, 406 aa, unidentified
MTAATSFKVIIGLDVGKTGHHACALSADGSRRYFDKPLPQDESKLRDLFTSLQAHGPVLLVVDQPNTIGALPVAVARDCSVAVAYLPGLAMRKAAALHPGTAKTDKRDAFIIAETARTIPATLRKVDHNDEALSTLKALAGFDEDITRDCSRTINRLRSALLQIHPALERVFAGGTITRSAVLDLLEHYGGPTKLRAAGKSRVTAWINRRCRGDHTDLVAAIFHALDQQTVVVPGTSAIERTIPLLASNIKMFKKQRDLIAAEVNEVVDALPLYEILTSIPGVGVGIATSILMAVGDCSDFPDATHLASYAGIAPTTRRSGTSIRGEHPSRAGNKRLKNALFRSAWISTNCHEASRDYYQRKRREGKRHNAAVMCLARRRCNMIYAMLTRKEFFRDEPRTPILAAA

SEQ ID NO: 63285 - protein, 435 aa, unidentified
MTRYVGIDLHKHLIVGHVIDAAGKKVDTFRYESVGAVTLEHIGRNRLKPEDEVVLEATTHCWAVVRALEPFVARVVVSNPMATKAIAKAKVKTDKVDAAVLSHLLRLGYLPEVWQPDPATRDLREWTAHRSRIVGQRTSVINRLRSTLAQRLLHCSYEMTSPAARRWIAGQEVDDDMRWLLESDLRLMDSLQAELDAMDKLMAKRGMVDPRVKLLMTLPGVSQHTAQSLLAAIGDITRFRDGDALASYLGLVPSTRQSANHCYHGPITKQGRGHTRCMLIQAAQSVRTHPGPLGHFFRRLKKRKPHNVAIVAVAHKLVLLAWHVLTKGEPYRYALPQATQRKLSRMRVQATGERRRSGLPAGTPKRPARLPGGSHRIKPLAEVYASEQVPAARPAPAGELRHLANLKLNEFVDGLQRAHIVPLHRTPPEGAAGSR

SEQ ID NO: 63286 - protein, 377 aa, unidentified
MKRVKFVGLDVHAETIAVAVAEQNGEVRSLGVIPNREDSVRKLVRKLEAVEELRFCYEAGPTGYVLYWQLARMGAQCEVVAPTLVPVKAGDRVKTDRRDALKLARNYRAGELTAVWVPDAAHEALRDVVRAREAAKKDQLRARHRLNKFLLRHGRRPPAGVKPWTMKYLEWVKREVHFEQMAQEATLLDYLNEVEHAAARIARLDGAIEEAVKVAPPKMRAVIEALQALRGIAQVSAVTVVAELGELSRFSRATQLMSYGGIVASENSSGERTRRGNITKAGNAHLRRVVVEAAWNYRHRPAVGATLRKRQEQVSEEVKEIAWKAQQRLHGRYRKLLAKGKNKGVVVTAVGRELLGFVWAIGIKVEAARKESLQRVA

SEQ ID NO: 63287 - protein, 410 aa, unidentified
MEVLYPRCCGIDVHQSFVVGCLSVVESGQRHKEIRQFSTQIGELRAMRDWLVGAGCTHVAMESTGVYWRTVYRQFYGSLEQVVANPQHIKAVPGRKSDVQDAEWLADLLQHGLLQSSYVPPVEQQDLRDLTRLRSTLVQDRARLVNRVLKTLEMAGIKLRPVLSDVMGVSGLSILRALVAGERDPHRLAGLAHPSLLRKHDQLVAALQGGGLQPHHSFLLRELLTVIEALEHSISHVESEIQDRLRPFGETLERVEHITGVGQHTLEVLFAEVGWNMDPFPDAAHLASWAGMCPGQHESAGKRLSGRVRKGNKWLRSALVQAAHAAARTQTYLGEQYRRLSKRRGSKRAAIAVGHSILVIYYHMMKTGEPYQERGVEYLKQMDKQRLQRHLVQRLESLGYQVTVQAPPAA

SEQ ID NO: 63288 - protein, 368 aa, unidentified
MLYLAIDQHSKQLTVNLRNEAGEVLLRRQVSTRGDAPRQFLGDVQQRSAAEGGYVTIVEVCGFNDWLLELLPQCGCQETVLVQADKRSKRKTDRRDANKLGELLWVNRHRLSAGKPISHLRRVRILTRREREDRRVTQVRKSIGRELTRTINAIKTILRRENLEQHCPTKGIQTQAAAKWLRSLSLAPLDRMEMNQLLARWELLKQHKQQVEEEIARRAAAHPDAPLVKTLPGAAAYAALGLASRVGPIERFPRPRSLANYWGLTPSCRNSGEATDRLGSISKEGSTLARYLLGQLVMHVLRKDPVMRAWYKRIKQRRGSKIARVAVMRRLATIIWHMLKKREPYQIGGPPRRKLKRHEPAGVGAGPA

SEQ ID NO: 63289 - protein, 306 aa, unidentified
MYLGLDVAKDTVVLASEPAGVAGTFATDVAGLTALVAQCQAQGIALCVLEATGGYEAPVAAALAAAGLPVAVVNPRQVRDFAKALGRLAKTDAIDATVLALFAARVRPTPRALPDDATLELQAVLLRRRQLLDMLQAERQRHLRSHGRVRANLRSHIHWLERSLADTDDQLRELITSSPVWRVQDELLQSVPGVGPTLASTLLALLPELGQLDRRQIAALVGVAPLARDSGTLKGRRTCWGGRAPVRAVLHMAALVAARWNPMLRVFYHRLRAAGKPAKLALTAVARKLLVLLNAMLRDGQPWRHA

SEQ ID NO: 63290 - protein, 362 aa, unidentified
MEKVHFTNLAERHSIPLEVVMTEIKYCVGVDIASSTFTVAVGEMPWKVLLKPQVFENTEDGYQMLLEWFVQQHLSTSNTVVCMEATGVYSEGLAYFLFAKGYRVAVQSPLEVKRTFKPYGPKSDAVDSLQIAEYTCRHTDKLSFWKPRSEILEQVKALLAVREQFVSQNVAHKNALQAIQRKVVRTPFAEQAYLQLIQQIKQQIQAMDTEVRRLIESDPTFKEMLLLLLSVPGVGLLLAAHFILLAQFSLEYKLLTSFLGIAPNEHSSGTSVYKHATSRHFGPPAIRKLLYLAACSVCTHRPQFRTYLTRKTKEGKPARLVLNNVENKLIRIMCAVLNSKTAFIENYHAVQPLALQKVLTAS

SEQ ID NO: 63291 - protein, 385 aa, unidentified
MVAQLLAIPAEGPVWDQAVMGWTPPRRRWCARVVAFLTTEQEASVSEASTIGLDLAKRVFQAHGADASGKVVFRKRLRREQVLAFFAGRAACVVAMEACSSAHYWAREIGELGHTVRLIPPAYVKPFVKRQKNDATDAEAICEAAQRPTMRFVSVKSEVAQANAVVFRTRDLLVRQRTQAINALRGHLGEHGVVVAKGPSHVAKLIAHVEDPATGLPEAARTVLRVLTASLQFLSERIDLLDREIARRAREDKEVRRLTTIPGVGPVIATALAALAPPADAFRRGRDFAAWVGLTPSQHSSGGKQKLGATSKMGERTLRRLLIIGASSVVQKAIKHGTPSGSWLGRMLARKPRMLVIVALANKMARTVWALRATGEIYRAPVVAA

SEQ ID NO: 63292 - protein, 315 aa, unidentified
MSEVDCFAADVSKRELVIAVYPGEVGVKRIANQDAAIRAWLDTLAADSVIAMEATGTYHRRLADLAHARGLVVYVVNPRDVYYYARGMGARGKTDPSDAKLLARYVAHERAHLHPYLPPSALCERLVTLLERRAVLVRTRQALTQSLAELPALGREKRNLFKAVAALVSGIDRELAALGCADPLTATLVSRLKTISGVGPLVASLLCALFKRFAFRHADALIAYLGLDPRPDESGQHRGRRRLSKRGHPEWRRLLIAAAMSAARTQAWRDYVKRQRAKALPATAVHVILARKMLRTAFAMFKNGQDFVPPSVQPT

SEQ ID NO: 63293 - protein, 423 aa, unidentified
MMKLKYSICCGLDVHKNIIVATIVTTNKDGISEYLQKSFSTINSDIQRFHNWLIENNCYHVCMESTGKYWIPIFNYLENDIDVCLTHPKYVKAIKGKKTDKKDSKWIADLYKFDLVRCSFIPPKDFRQLRELSRYRFKLVCMKSSEKNRIQNCMTISNVGIASVLSDPFGKTATEIISYLLEHTADSMDEKAVRKLIKKGAKSKSDEIIEAIKGYTIETDQAKKLELARGHLEYLDDMITQTEVELYVRIKPYYEFVEFVSTMPGMTELSSTIVLAETGVDMDIFDDAKHLCSWCGLSPANNESAGKKKSVRIAKAGDYLKPMMVQCALAAIKSKKQPYFAIKYGRIKKRRGHKKAIIAIARMMMVCIYHMVSEKKPFTPTDYEELMDPQNHVESVVLNENNVFAYLESLGYDSSKLVKRNDN

SEQ ID NO: 63294 - protein, 370 aa, unidentified
MKQYSEAFVGFDTAKKKHAVAIADVGREGEIRYLGEIDSSPAAVERMTRKLAGRYEKLHFCYEAGPTGYGLYRQVGALGHDCTVVAPSLIPKKSGERIKTNRRDAVTLARLFRAGELTSVWVPDTVHEAVRDLVRAREAASQDLRRKRQQLLSFVLRHGRIFSGRQHWSRAHLRWLAQQKFDHSAQQIVFQDAVDAIDDAATRLRRLDEQVVAIVPSWSMAPVVAAYQAMRGVSFVVAVTFVAEIGDLRRFDNPRQLMAFLGLVPSERSTGERVRRAGLTLAGNKRARRVLIEGAWSYRYPARVSQTLQARLEGLPKAVRAIAWKAQIRLCARYRRLTAAGKKVPVVIAAIAREMAAFLWAIARHVAPAP

SEQ ID NO: 63295 - protein, 394 aa, unidentified
MKLFGIDIGKNKHFFCVMDQQTGEIISQPVSFSNDKEGFDFLVQKIKSYPKDSILIGMEDTGHYHFALLKYLLDLQYTVALINPKTTDFNRKMQGGITKNDKLDTINICDVLDTPERKKQYRITKVNSFDLYEQKQLTRHHHNLKEEENVYKNRLQKCIDIVFPEFNKLFNSKYGIVYMNILKMFGSAENIANTDIRTIRKCFEIEGRGNRISLTPERLKECARSSIGISSSAEVIQIKHLTAQIELIEEQLTEIDKKIEEFSIQNNSPILSIPGISHFSGTSILAELGDISNYSKPSQIIKFAGVAPLHYESSQFNAQHTAITKKGSKYLRKTLYQIILPVIRHNPVFNKYYQLKISQGKGHRCAQGHCVRKLLRIIYHLLKTNQQFDPQLLR

SEQ ID NO: 63296 - protein, 347 aa, unidentified
MLIIGCDFHPGFQQIAIFDNRTGEMQEKRLQHRAEAEQFYRSLAGQEVRVGMEACGHYPWFERLLAELGFELWFGDAAQVRASVVRKQKTDRRDAEHLMHLLIEDRFPRIWVPSLEVRDVRQLLVHRHKQVQARTRTKNQLQAMALSHGVQKKYKLWTQAGRAELEQLPLLPYAAQRRQKLLEELDAGEAEIGELDRRVAEEARQRPEAVRLMTHPGVGPVTALAMVLTLGPAERFESAKQVGSYFGLIPSEESSGGKQRLGKISKQGSSFLRFLLVEAGQTAARYDPQLKRFYRRLASRKNRGVAKVAVARKLATRMYLMLREGWTYAQLNQAVMSVSPSHSVAGE

SEQ ID NO: 63297 - protein, 421 aa, unidentified
MRELRTKRVRTVKEGTLIATVDIGATTNTGYCTCADGRDIKVFKFGNTREGFEKFWHMIVAARNRFKCDDVIMGYESTGPYGEPLVHYLMDKPVSIVQVNPLHTKRLKEVNDNSPGKTDDKDPRVIADIIRLGRALSIVVPEGDAAYLRRLNNARERHVGERTALLNQMQQLVFLIFPEFKTVIPQMIGKTVRFVLKNYTTPERIGSVDKMVLGEEMRKRSWGKLGSKDAELLIDAAQQTVGIKEGVAGIVLDIQHIIAQLEVVERFISEIESEMVVTLGRIPCSARLLSIKGLGVVSVAGLIGEVGDFSKFRTQSEIIKLAGLDLYEVSSGKRKGQKRISKRGRSLMRKILYFAAIQMIKKNGIMHEYYESLIGRGMLKMRALVAVMRKLLGIIHAILRDDRDYVGEYCAPKRRVIKRAA

SEQ ID NO: 63298 - protein, 347 aa, unidentified
MLADELDFVIGVDPHRDRNAIAFVRCPTGQVIFEASAAASSAGYRAVMRLAQQHAPGRRAFAIEGSGSYGKGLARFLSEQGEQVVEVGRLKRGGRSGGKTDALDAVRAARSTLAEQKQAQPRSSGKREALRALTVAREGALSAKRAGLCQLHGLLVTCPEPLRGELRSLTRARLLTRLGSLRPARRKVPELQGTLLAMRAVARRVQQLTLEERDLKREIETLVEQLAPALLAEPGVGPVSAAQLLISWSHPGRFPNEAAFARLAGTAPIPASSGQTNRYRLDRGGDRQLNRALHTIIMIRRHAHAPTQAYIARRTAEGKTSREAVRCLKRYLARHLYRLLQGAPITT

SEQ ID NO: 63299 - protein, 409 aa, unidentified
MELIYQRCCGLDVHKSIITACVRLLLENGSIHQETRTFGTMTRDLLELADWLAAADVTHVALESTGSYWKPVYNILEGRFKLVLVNARHIKHVPGRKTDVKDCQWLAQLLQAGLLRGSFIPERPQRELRDLTRHRSQLVAEKSRAANRIQKILEDANIKLASVATDILGASGRDMLRALIRGETDAEKMADLARRQLRSKILQLRPALEGKVTEHHRFMLGELLAHLEYLESRIEEFSRRIEEVSRPFAPAIARVATLPGFDQRSAQNVVAEIGSDMDVFPSAQHLASWAGICPGNNESAGKRKSGRTTKGNRWLRSALSQSAWAATRKKDSYFQAQYRRLAGRRGKKRAIVAVAHSLLTIIYHMLKNASGYRELGGDYLDKLNAKRLLPHLLKRIKDMGYQVTLQEAA

SEQ ID NO: 63300 - protein, 401 aa, unidentified
MKYVLAIDVAKNKSMVSLFASGGVAFIEPYEINHSLSDFKNIVERIKDLDISDEEVTVFMESTSTFHYPVKRYFKEETNCEVMVINPLHSAAHKRNLRKTKTDKQDCYNLADLYFTGKVKNYNDHEQYYLNLNVLARQYDFLLFDNVRFKNRYKTLVNLCFPEYENLFKGQLIYSGTALSFIEKYPHPDIIKETRVDALSNFMAKLNNRHENYYLRKANSIKEVAKVSYPSVSKDDDIVTNLVTTTRMLKYQIKEIEQLREIIISKAKECYLFETINSIFGFGELTTALVIAELKDINRFKNIKELTAYCGLDPSIKQSGSSVNGKGHISKTGNSYIRRILFNTIQNIIMQASRSNKENEILLYYRKKRNEGKHHYVAVISCTTKLLRLILAKCKNIQNNM

SEQ ID NO: 63301 - protein, 344 aa, unidentified
MKHYAGLDVSLEETAIAIVDETGRTVREAKAASEIEVIDAWLRKTGIAIARLGLEAGPLSNWLYAGLQERGWPAICIETRRLRAVTRAMPVKSDRKDAEAIAQVMRTGWYRAVHVKSLASQQLRVLLRHRKILQAKRQDLENELRGTLKAFGLKLGTVGRAKFAQRVSELVAGEPWLERLAQPMLAARAALLKSFGELHATVLRIVKADTVCRQFMTVPGIGAVNALAYKTGIDDPTRFRHSADVGPHLGLTPRRYESGETQYVGAISKCGDAMVRSLLFEAALTLLHRVKAASNLKRWARALAKKVGTRKAAVALARRLAVIMHRMWRDGTDFNPDFVRVATR

SEQ ID NO: 63302 - protein, 451 aa, unidentified
MGAWELSGETVPRLVLRRADGWWDVVPVSTAIRAPQVLLWLADGRSEQRRMAVLFVGVDWGERHHDLCLVDQDGGVLATRRITDGLAGVGALHALVAAHAQDPAQVVVGIETDRGLLVGVLLAAGYQVYAVNPQVVSRYRGRHGSSRAKSDRGDAKVLADLVRTDRHNHRQVAGDSSLVEAVKVLARAHQSLIWARQRHVNALRSALRDFYPGALAALGTHLAEPEALAVLELAPTPEQGRRLTRAAVRRALVQAGRRRNLQGRVVAVHDALAAPQLAAPEQLEAAYREVVGALVTVLGCLNVQVAALEEQLTLRFAVHRDAGIVQSLPGLGVVLGARVLAEFGDDPHRYATAKGRKAFAGTAPVTRASGLRTTVVARAACNQRLVDACYLWAFAALTASPGARRCYDAHRARGASHHQALRALGNRLVGILHGCLARRVTYQEQVAWPAA

SEQ ID NO: 63303 - protein, 385 aa, unidentified
MRGNSFIPRDYDVFTGLDVSKKSMSVTFTNHQGFIRSLNMPHKAEPLLNYVRKHFPDQKIAFVYEAGPTGYGLYDGLAAQAYPCLIAAPSMIPRAPGQRVKTNRLDSKALSESLRGGQLTSIHIPSPTYRQLRHLTQLRDVLVSDLAGMKQRIKSLLLFEGIEFPPAPPGSQWSFLVKDKLRKLPCSGTVRFKLDQLLDSVEFNEKQVLKTITEIRCFCRNDPELSQCMKYLMTLPGIGWITASQLLARIGDWRELKNIRQLAGFLGLVPTEHSTGERIDRGSITRSGDERLRSKLIQGSWSAIRQDAELREFFRTVCRKHPREVASRVAIVAVARKLSVRISVVLMKQRPYEVREKVHSAPLTQEETSLQGTTRRQAEPGEKNS

SEQ ID NO: 63304 - protein, 369 aa, unidentified
MQNIMFIGLDVHKATISVAIAQGDRRGEVRHWGTIPNRADHVRKLADKLGGDGRQLHFCYEAGPCGYGLHRQLTELGHDCVVIAPSLIPVKAGDRVKTDRRDALMLAKLHRAGELTAVWVPDTAHEAMRDLVRARATSVRVTGKARQHLQGFLLRHGRTYPGKKGWTKAYRRWLTTVRFEHPAQQIVLQDYIHAVTDAEARIERLTNQIAVLLPSWSLAPVVEAIQAMRGVAFIVAVTVVAEVGDFNRFDNPRQLMAYLGLTPSEHSSGASVRRGGITKAGSSLARRALVEGAWSYRMQARVSRKLLDRIEGLPPAVRDIAWKGQLRMCQRYRHLMAAGKPKVVATTAIAREMAGFVWAIARTVTPAST

SEQ ID NO: 63305 - protein, 423 aa, unidentified
MSYRIAGIDVHKKMLAVVISDVEVDDEFEFERKRYASNPEQLRLMAEWLIEQQVEEIVMESTAQYWKPVWGALERYWKPNRQKREGAGPKSGTLHLAQALSNRGRRGRKKDFPDAERLLKRLVANELILSFVPDAEQRLWRTVTRRKYQLRREHVRLQNQLESLLEECQIKLSSLVSDLLGASARRMLKALAEGETNPAALAALADKNLRATQAQLCDALGACAELKPIYRRLLKMFLEELQLIDQQISQLDQELASLLKGHQDAVEHLAEVPGLGVDSAQQIIAEVGAKAATFPSAKQLSSWVGACPGDEESAGVSKSHRSPKGNRHMRRILNQAANAAAKSKGTIFEIVYRRLVSRLGHNQTIGAIAHRLCRLIWIILHQNVRYEERGPSVSAKSRQRRTHRMIRELRNLGYRVEPVVTTL

SEQ ID NO: 63306 - protein, 368 aa, unidentified
MRNRTAIERDVFWVGFDDHADRVVAAVLVNDDERLHDRFEVVPDEKGLRQLIKKLKGYEGEVHCIYEAGPCGFVLQRRLAKEGILCSIAAPSLTPRQAGNRVKTDRRDARKLAFLYRAGTLTTIHIPDEEQEALRDLVRAREDAVEDARRARNRLGKFLLRHGHRYRGKTTWSREHWRWIRSIEFEQQHSRQALEAYIAAVVGAEDQLKCLDQQVSEAADRCETVVRAYATLRGIDRLSAITVHAELGDLKRFTGAPEMMSAVGLVPSENSSGNSQRRGSITKTGNAHVRRVLVEAGWHARHRPVVGEALRRRREQQPPQIVAIAKQADVRLHRKFTGLTWRNKRSTVAAVAVARELAGFLWAIGQAL

SEQ ID NO: 63307 - protein, 326 aa, unidentified
MQGKEASEQETKAKCNVGIDVSKHWLDVHVLPAGESLRVANDCAGIRKLKRWLSRVEIALVVVEATGKWHRPLRRSLDASAFPVAVVDPFRVRMFAKAQGIFAKTDRLDARVLALFAAILAPPIRPPAPEALEELKELVVARASAVAAQTALKNQLSAAEGAFLKRQLARRIDRSGKDIAALDKEILRRIKADEGLARRHVILTSIPGFGPVVAATLIASLAELGGCTPKEIGMLAGLAPIADESGERKGVRVIWGGRANVRRILYLAAVTAARANADMAAFYQRRIADGKPAKVAIIAVARKLAVLANTLISQDRTWELHAPRHA

SEQ ID NO: 63308 - protein, 392 aa, unidentified
MIYVGIDIAKDKHDCFITNSDGEVLFKSFTISNNRDGFETLFQKIQSVSDDLTKVKVGLEATGHYSYNLLGYLLDKGLPTYVINPLHTNLYRKSLSLRKTKTDKVDARTIASMIMSDVNLKSYSDTSYHNEELKSLTRYRFDKVKERAKLKTSVSRLICILFPELEKLVPTLHMASVYALLSEFPSAHAVASAHLTRLINLLSQSSKNRYGKDTAVMFREAARNSIGSNMPAKSLELKHTIKLIQELTSEIDEIEAAIKQIMDEEIQSPILTIPGISYRMGAMIIAEIGDFCRFDSADKILAYAGMSPSTYQSGQLDNCYSHMEKRGSRYLRYALYNATKYVCHWDKSFGAYLEKKRSEGKHYNVAISHAAKKLVRLIFAMEKSGKAYLPTA

SEQ ID NO: 63309 - protein, 345 aa, unidentified
MPIVGGLDIHRKQITFDYLDTATGEVRRGQIAPADRTHLRAWLARFAGRDDVAFALEGCTGWRYVAEELAAAGVTAHVAEPADTAFARGRKRHAKTDKTDSRHLRVLLEQGRLPECWIPPAQILECRALLEAYHDLRREHTAWIERIHAVFFHQGAPRLGEGALRTEHGLAALRQAAAIHLSPAGQLQVATALDMLAAVEARMDTLRQQLLHAARHLAGARALQARLYGVGPLAGLAMTCWLGGAGRFSSSRKAVRFAGLDVTVYSSDGKRSPGHLSRQGPEILRWVAYEAGKTHGRASAPGHDYYAAVKDRTDGKIAALSQARKLIRQACHILAELGDDALTAA

SEQ ID NO: 63310 - protein, 404 aa, unidentified
MKGPIVSIDVSKGKSDYQAFKNLNVKYTGSRSITHTKEGFDEIVNLVREMEKKLETEVCVVYEATGVYHRVLKKVLEDNNIKQFIINPLLSAKTRKNDSLRCPKTDKLDPKSIAKTYYSHSLHNSHKQETIYHELRELSRYYEDILVHIRKDKVAFRAQLDIVFPGYDTLYDDLYGPVALAVIEKYPHPEMLQKKKINTVSKVIQSKTCHRQAVSDTMADKAIAYSKTIYSGCDKDDIEVLILQRLIKKLNEDMAEAERTIGEMIKLAQELPDFSIIKSIPGIGDNLAARIIAELGDMTRFKKKNELVAFAGLDPRISESGKNDGDHMHITKKGNKRLRCLLYLAVTCSIRLKRDDNSIKDFYIKKKQQSNPMCSKAAKTACASKLVRIIYSMCKTGELYQYNK

SEQ ID NO: 63311 - protein, 426 aa, unidentified
MNCTQNYKIDQVTEQTLVVGIDIAKRTHYACFVDDRGRVLRKSFPIFQSKEGFRQLYEAIQEAIQAFGKSEVIVAVEPTGHYWLNLAYFLEEHGIPLVMVNPAHVCRSKELDDNLPTKHDAKDALVIARLAKDGRFLVPRLLHEIEADLRVGSTLKEKLRKEQTAVKNAIIRWTDRYFPEFWMVFRDLGKTALSVLEWTPFPADMAGRTAEELIEVYRQSEGLKCPQKAKIQALINAAKDSIGVTEGTTMARFEIAALVRRYRQLEAEIAALDAELKALVQTTMEYQWLKTVDGLGDATIIDLLAEIGSFAHYRDPRQLVKLAGLTLKENSSGQRKGQKHISKRGRKRLRSVLFRAMIPLIRHNEAFRELHEYYTTRSVNPLTGKQSIVALCRKLLNVLFAICTKKQAFDAERMKQDVLSQVQRAA

SEQ ID NO: 63312 - protein, 315 aa, unidentified
MTQTNITTAGIDTSKAKLDIAVHGRTERWQVANALPGWRALAANLAKAGVTRVGIEATGGYERGVVEHLRSVGFTVLLLQPLQVKAFGQVHLRRAKNDALDAILIAACAAALDPPEVAPDPRLSELADYLTFIEQIEEDIRRFKTRLEHIDEPALRRIVNSDIARLKARKSTQIRDIAKRLRAHDDLAKRLKLVLSIPGIGERTALAIVIRMPELGRVSREEAAALAGLAPFDSDSGQHRGQRKIAGGRSRLRRSLFAAALPAAFRWNKALIALYARLTAKGKVHNAALIACARKLLIYANTVVQRGTPWTEKAA

SEQ ID NO: 63313 - protein, 392 aa, unidentified
MKKSHSNVACAGMDVHYKFSNVTFRDGKGEVVQRQRLDHPDRKKLRQRVSQWPPGLQVIMEASFGWGWLSDLLEAQGMHVALSNCFKVEQMRQARGWVKTNKKDADLVSLLGFERSDWWKVWRAPADVRDRREQMRFRADLVAMQTAVKSRIHAVFHRHGIFHAFSDLFGAKGRQFLAALCVNNAAHLPAEALAALRGHVRLLDHLRRQLADVTRVLHRQMARTPLTIRLKTVPGIGLILAHVLAAEVGRIERFRNHKSLAAYSLLAPRSDDTGQDDPSHSPQGRHLGVRGNRTLKWAWIEAAHGAVRSGGRWRALFEKVTDGGRKDRGRGYIKVARELVKVVYAVWSKGVDYRDVRPARVGRDKSKRKNRRKPSRSETGQLYHPMVQALTA

SEQ ID NO: 63314 - protein, 375 aa, unidentified
MSKIRFIGLDVHAATIAVAVAEPNGEVRSLGGIANCLPAIRKLVGKLGPAKQLKACYEAGPTGYVLYWQLTQLGVSCEVIAPSLVPAKAGDRVKTDRRDAEKLARCYRNGDLTAVWVPDAAHEALRDLVRAREDARQDQHRARQRLGKFLLRHGAQPPANIKKKWTAKYMTWLHDHVHFEQPALEATLTDYVQQVQHAGERITRLEKAIDEAVAQAPEQIRCVVAALQALRGVAQMTAVTLVVETGSLSRFQNPRQLMSYSGLVSSEYSSGNRVQRGAITKTGNAHLRRVLVEAAWAYQHKPWVGGFLLKRQPGLDQKIKDIAWKAQWRLCTRYKKLAANGKNKPQIVTAIARELLGFAWAIAVEIEAQPQPQAA

SEQ ID NO: 63315 - protein, 367 aa, unidentified
MKKVSTTASQQSRNISQQRLTIGLDLGDRNSCYCVLDEAGRIQLEQRVRTSAKALQEVFGAMPRSRVALEIGTHSPWISRLLSALGHEVIVANARKVRLIGESRKKDDRLDAQTLARLARIDPQLLCPVKHRSAQAQADLMMIRARASLVRVRTGLVNAARGLAKSYGERLLGCNVRNMNPEKAEGLSPELQRALEPLLSAIEELSERICEYNDRIEALAQTSYPQVELLKQIKGVGTLIALTFLLTMEDPHRFRKSRDVGCYLGLQPGRRQSGKSDPQMHITKEGDPYLRTLLVQGAQHILGPFAIDCDLRRWGLKLAERGGRNGKKRAIVATARKLAVLLHHLWVSGEVYEPLHNSSPMTIAAAA

SEQ ID NO: 63316 - protein, 424 aa, unidentified
MNDTQNKKIAQVTDKTLVVGVDIGSDTHYARAILVRGYEVSKKPFNFENTREGFEKFVSWTYNLAAANQLTKIFVAVEPTGHYWFNLADYLKAYDVKFVMVAPQHVKHSKEMDDNTQRKDDRKDPLVIARLVLEGRYMIPYIPEDVYAELRAAFNRRCDLVEALNRNENRMIRWFDMHFPEYREVYGKASAITGLLVLMRAPLPSDILSLGVDGICRIWREAKARAAGINRAKKLVEAAQKSIGLKGGEAVRQELWQLMEEHELLKKQLSDIMRIIEELLTRIPGADRLLKVPGAGVVTVAGFLSEVGNISRFTDPKQIQKLAGLAVVENSSGKRKGMPGISRRGRSRLRWVLFQLARTTVKINKEMKAYHQYYTTRKENPLKKMQSLMAIAGKITRIFYGMLKNETEYDPAIVMKDFNKEAAV

SEQ ID NO: 63317 - protein, 409 aa, unidentified
MNTWTSLLWKQQRKKTDRGGNQLYFVGIDISKFKHDCAIVDEFGDVITPSWSFQNDREGFSLLKELLDALDGEKKIGLEATGHYGQNLKLFLENNDFSFMEFNPLLINRFVHSKSLRKTKTDSIDALMIAQYLMTVEYKPYPPSFYTLEKLKSLTRFRDSLIRQRSKQLVELTNILDKVFPEFKPFFKGRFSATALYILSHYASPEKISNMNSKSYEPLRRLSRGRFSMVDFVELKTLARNTVGSTCDYLLQEMEITINIYNQLQSKVEEIELQIHDCVLALAPPILTIPGIGAASAAVILSEFGDLSKFNNPSKLLSFAGMEPGYFQSGTSESTGKMVKHGSSHLRYAMMNCAQTVINNEPTFAAYYAKKRAEGKEHRVALTHVAKKLLRVIYTLQTKELSYNPDLVR

SEQ ID NO: 63318 - protein, 438 aa, unidentified
MSNKVIFNLDDLFISVGIDVGADFSWMSIALPNQQFVGKPFKILHNSIDSLTTAVSKIKEAEELYSLESRIFLESTGIYHYPLFCYLRDKGFNCSVINPIITKNSTNINIRKVHNDRFDSKKAALVGLKPDLKVSLMPSDLALNCRNLCREYYDLMDNRGAYVNKLQGELRMAFPQYLGIFSKVTINTSLTLLETYTSPSAFLEADKQEIIDIIKSTARFGLTYAQNKYNAIIQAATDANQFGYIIDSNIKRIRLYISFIRKYDEEINNILESLHELVDANEDTDFVKQIHLIKTFKGAGFLSAVSIMGEIGDFSAFSKPKQLFAYFGLDPAVKQSGKFEGTKVQMSKRGSAIARRVIHTLTLQSISISRNGEAKNPVLREYYLKKCDSKPKLVAMGAVSHKVCNMIFAILRDNKPFKIIAPQEHIKQYNAAKCDMTA

SEQ ID NO: 63319 - protein, 370 aa, unidentified
MQTVRSFVGMDVHKETISISVAEDGRNGPVRFLGVIPNQPDDIAKMAKRLAKHGELDFCYEAGGCGYNIYRQLTALGHSCTVAATSLIPRKPGERIKTDRRDSQKLAILHRSGDLTRVWVPDATHEALRDLVRARVDASMHLMRARQQLLAFLLRHGRSYPTGKHWTQRHRSWLAGQTFQLEVHRIVFQDYVETVWTAQERRDALIDRIAAMTANWSLGPLVEALRGLRGIDLLSSATFIATTGDLSRFESPRMLMGYLGLVPSEHSSGGTIRRGGITKTGNREARRMLIEAAWSYRYPARVAKEKAEILVRLPKNIRDIAWKAQTRLCARYRTMIARGKKPTVVVAALARELAGFIWAIGQEMRIGTTT

SEQ ID NO: 63320 - protein, 343 aa, unidentified
MDTHARTHTLSVLEAPTGGFIDSAQFPSTPAGLKRAIAWAARRTVGDLDALWVIEGIGTYGALLCRAVLESGYDAVEAPRMAARSNRGLGKSDELDARRIAAAALPLTENELRVPRTSDGERAALRVLVTAREHMTTERTAAINALTALVRAMDLGVDARRPLSAKQITEVSRWRARKEEIGAATARAEAVRLASRVQALDDDLSTNATRIDALVRTTPAAGLLEKAGIGPVTAAVALTVWSHPGRVRSEAAFAAIAGVNPIPASSGNTTRHRLNRGGDRRLNRALHMAVITRMAHDPATRAYVARRTAEGSTTREIRRCLKRYLARHIYRYLNAAAVPLLTT

SEQ ID NO: 63321 - protein, 352 aa, unidentified
MLIIGCDFHPGFQQVAIFDKGTGEIEEKRLPHREEAESFYRGLRGQEVRVGMEACGHYPWFERLLAELGFELWFGDAARVRAAEVRKQKTDRRDAELLLRLLLEDRFPKIWVPSLEVRDARQLLVHRHKQVQARTRTKNQLQAMALSCGVQRKRKLWSQAGRAELEQLPLLPYAAERRKRLLEGLDELEAEVVELDRRVGEEARRRPEAVQLMTHPGVGPVTALAMVLTLGPAERFASGKQVGSYFGLIPSEDSSGGKQRLGRISKQGSSFLRFLLVEAGQTAARYDPQLQRFYCRLAKRKNRSVAKVAVARKLATRLYLMLRQGWTYAQLNQAVMQVSPSHSVVEQEKPTV

SEQ ID NO: 63322 - protein, 342 aa, unidentified
MTMIGIDPHKATHTAVAVDENEVVLDEFKLRASPVQAQRLQQWAESFEKRQWAVESANGLGYLVAQQLVAAGETVFDVPPVLASRVRVLGSGRSQKNDPNDARSVAIAALRSDRLAQVRPDDHTAVLRLLAKRHRDMARLRNKHCTRLHALLLELEAGGISSEITVTKANQLLEAVTVTDEVTRHRVLIANELIDDIAHLDTVLKTSKKRVSAAVSASATTLTEIVGIGPICAAIIIGFTGDIGRFPTRGHFATYNATAPIEASSGPNAKHRLNPRGNRKLNHAIHIAAISQLRYNSEGRAYYDRKITEGKSSKEAVRALKRRISDRVYRHLTADAHRVSTS

SEQ ID NO: 63323 - protein, 410 aa, unidentified
MESLIERGCGLDVHQATVVACLLISLAKGKVKKVIRTFGTTTRELLTLRDWLLSEGCTHVAMESTGVYWKPVYALLEGSFEIVVANAQQIKKVPGRKTDVKDAEWIADLLRHGLLRPSFVPPQPIRELRDLLRYRRKLVESQTGERNHLLKLLEGANIKLASVATDVFGVSGQLMLDALLEGTQTPQEMAELAKGRMREKIPQLELALEGRLQEHHRFLLRLQRRRLQQVEKDLAELEQRIFEKLQPYAPQHTLLLEIPGVDRILAAVIIAELGIDMSVFGSASQAASWAGVCPGNDESAGKRRSGRTSPGNIYLKTALVEAANAAARAKGTYLREKFYRLKARRGHKRAAIGIAHKILVAAYHMLSDQVSYNDLGDAYLDKLSKTQLTRSLVRRLDRLGYQVSIRPKAA

SEQ ID NO: 63324 - protein, 331 aa, unidentified
MNYSYFVGLDVGKKSFDASLMSSDEEELGHRRFANSESGIHCLLDWVSSRVTTIDETLFCAENMGSYVTGLCSCSQQLVFSLALECPLAIKKSIGLQRGKNDRVDAFRIASHAVSRHRKLKLYKLPDKNLVQLRAWTCIRNNLVKQKVSVNKLLEITSETSVLTNLSACRTFLEEQLSMIKEKISRVEQEMEKIINSSVSLAENYELLTSIKGIGMINAIVLLCVTDNFRRFSDPRKFACYCGVAPFEHTSGTSIRGKTRTSQLANREVKVYLTRAAITAMVWDPQLKAYYKKKTGEGKHKASVINAIRAKIIARCFAVIKRRTPFVTLGA

SEQ ID NO: 63325 - protein, 348 aa, unidentified
MRFYTRTHKHYCGIDLHARSMYLCILDARGEILLHRNFKAEADAFLQAVAPYRDDLVVAVECIFTWYWLADRCAEEGIAFVLGHALYMKAIHGGKAKNDKIDAHKIAVLLRGGMLPQAYVYPKAMRATRDLLRRRNHLMHKRADLLAHIQNTASQYNLPPLGTRVDRKGERPHIPAHFPDPVVRRSIELDLALIAHYDELLGKLEQALALMAKGHDAFAYHLLRSIPGVGRILTLVLLYEIQDIGRFPRVQEFLSYARLVKCQKGSAGKILGHSGKKIGNVHLKWAFSEAAVLFLRGNPAGQQYVERLARKHGKGKALSILAARLGRAVYAMLKRREPFNREKFLAYS

SEQ ID NO: 63326 - protein, 407 aa, unidentified
MQVLYPRCAGLDVHKDTIVACVRCVSAPEHHEVQSFPATTNGLLALSDWLTSHRCTHVAMEATGVYWKPVWHVLENSFELVLGNAAHIRNVPGRKTDVNDAMWIADLLAHGLIRSSFVPPAAIQELRDLTRTRKQLAREIAQHCLRIQKVLEDANLKLGSVLSDVLGGSGRAMLKAIVSGEDDPVRLASLAQGHARRKTSELREALSGRITAHHRAMLGLHLQVIDALEHTLADLDAAVGLALTPIRQQVQLLKTIPGGGDLTARVLVAEIGVDMTRFPDSAHLISWAGLCPRNDESAGKRRSTRVRKSGTWLKTALVTAAWAAVRAKNTYLHAQFLRIKARRGAKKAIVAVAASMLTAAWHMLRNGVEYTDLGPDYFNRYDIQGTVKRLLKRLTDLGYPMQPASSS

SEQ ID NO: 63327 - protein, 345 aa, unidentified
MDHFAGLDVSVKETSVCIVDDTGKIVREVKVASEPEALLAVLTNPAYHFKRIGLEAGPMSQWLFSVLAEAGLPVICVETRHMRAVLKAQINKTDRNDARGIAQMMRVGLYRPVHVKTLRSQKLRMLLTHRKLLQSKAIAIENDLRATLRNFGLKVGMVGMVKFEARIKEFVENLPDLSMLVEPLLIVRRVLREQIGILHRRLLAIVRDDDVCRRLMTVPGVGPVVALTYRATVDVPARFRNSKAVGAVFGLTPAKYQSGESDRTGGISRCGDEMMRMMLYEAAQVMLVRSTKWSWLKAWAMQIARRRGLKKAIVALARRLAVIMHRIWVDGTEFRWTREQAAAAA

SEQ ID NO: 63328 - protein, 346 aa, unidentified
MDIQFFVGLDFHKNVAELCIQDASGRIVDRLRIKPEHLLKQLANRQACWIAIEASGAVFDMAAKLRAAGHRVSVIHAGKFRGIGIGGKKTDRRDAEALATALRLGFIPEVHQKSLYSRRINSLLASRDLVVQSRTALTNHVRGILREYGLPMPAGSTKFWEHIEATLSALDCELVRDALSQVVKVARDLLEQEQMVEERLEQLIRNDERIERLVEVPGIGMLTASALVAAFDEPGRFDGNAKRAGSFLGLVPREHSSANKRRLGSISKSGPELVRRYLVHGARTCLRHKGQDPARRWAAKLESRIGTNKATVALAHKNARIAFALLRDGTRYGQYKGRAKKVQVAA

SEQ ID NO: 63329 - protein, 373 aa, unidentified
MDNSITYVAMDTHKKEHKIALHYPGQQEIVNLTVKNTSSEISKMVKRILRKSQGEVCFCYEAGVCGFNLKRRIEALDCKCAVIAPSLTPTKPGDRIKTDRRDAVRLLAMFKAGLLTEVHAPDPQQEAARELTRLHQTARENLMRIHHQLLKFLTRHGYIYTDGNHWTGKHLRWLRSLEFEEPLLQEVFDSYFTEMQHCMQRLDSLAKQVEQLAEAEPYKEIVGLLKCFHGIKTLTAISIITEIFDFGRFSNPRELMSYLGLTPSESSSGEKQKKGPITKSGNKRVRRLLVEVSWHYRHPYHISKALKQRRKNQPQWVIDIADGAGHRLRKRYWYLINHGKMQCKAATAIARELVGFIWSVFREYRVRNMEKAA

SEQ ID NO: 63330 - protein, 346 aa, unidentified
MEIIAFDSHKRYTLASVETPDGRLVREERIKHRRGNISGFLSKCQAGSAVAVETIGNWYWIVDEIEQAQMVPKLVHARKAKLMMGCINKTDKLDVRGLNRLQRAGTLPTVWIPPGDLRDKRELLRTRMVFAAERTRLKNRIHSVLAKYGLTDFGELSDIFGKSAREIMREYLKRLPAETRYTSRGLLGQLDVVQREIDRIEKRMMQVFETNRDIKLLMTMPVVGFILAVVIWLEVGDVSRFGGPERLASYSGLTPRVHSSGDKVRYGRLRPDVNRYLKWAFSEAGNRERLVFRHVSKLYNRIRAKRGHSKAIGAVGRHLSEATYWILKKKDPYFERGTEQVSSTEA

SEQ ID NO: 63331 - protein, 343 aa, unidentified
MNISRIGIDLAKNVFQLHGVDRRGKVVWKRRLKRDQWLQAVSDQAEPGCEMGMEACGGAHHWARVLEARGFTVRLIAPQFVKPYVKSNKNDANDAEAICEAMSRPNMRFVAVKSVAQQDIQATHRIRADLMTQRTAKSNQIRGLVAEYGLVAPLTLRALRAAIPRWLEDADNGLTDYFRSLLHGLQADLVALDDRVLELDRQIQKLANSNEVTQRLQQLRGVGPMVATALVATVGNAEQYHRSRQMAAALGLTPRQHSSGGKDRLLGISKRGDVYLRSLLIHGARAVVFQAKHKDDRLSRWVTSIATRRHPNVAAVALANKTARMAWAMLRNETDYDPDFAIR

SEQ ID NO: 63332 - protein, 300 aa, unidentified
MAMQVGKLIVGADVAKAELVIHHDDRDEIIRLKNSKLEIRRWLKQQTLNTAIAVEATNVYHLDLVELAHSLGFEVYVIDGFQLSNYRKSVGGRVKTDPSDARLLSRFLKNEGEDLRPWSPPPAVYGKLQSLLRRRAALVTARTAMTQSWANESLLKAAFETFVKSIDRLDQLIQKKIKEVLRDAGLQEQVARCQAVEGIGFLTAAALVMAFTRGEFKSSDSYIAFLGMDLRVSDSGQKNGRRRLTKRGCSEIRRLLHNAAMAASRSAAWKGLYEQHRSSGKATTQALVILARKLARVAFA

SEQ ID NO: 63333 - protein, 394 aa, unidentified
MKLIGIDIGKNKHFFCVMDQQTGEIISQPVSFSNDKEGFDFLVQKIKSYPKDSILIGMEDTGHYHFALLKYLLDLQYTVALINPKTTDFNRKMQGGITKNDKLDTINICDVLDTPERKKQYRITKVNSFDLYEQKQLTRHHHNLKEEENVYKNRLQKCIDIVFPEFNKLFNSKYGIVYMNILKMFGSAENIANTDIRTIRKCFEIEGRGNRISLTPERLKECARSSIGISSSAEVIQIKHLTAQIELIEEQLTEIDKKIEEFSIQNNSPILSIPGISHFSGTSILAELGDISNYSKPSQIIKFAGVAPLHYESSQFNAQHTAITKKGSKYLRKTLYQIILPVIRHNPVFTKYYQLKISQGKGHRCAQGHCVRKLIRIIYHLLKTNQQFDPQLLR

SEQ ID NO: 63334 - protein, 489 aa, unidentified
MKILYRCCAGLDVHRDTISACVRRRVKGQSEPLVKEQVFGTFTTRVGAFAYLAAEEQSAAGGNGFRSCRLNAANAPLAAMESTGVYWIPVWNVLEASKQLHLMLVNPATVRALQGHKTDRIDARRIAEYLQYGLLRGSFIPPKPIRELRELTRMRVHIQQDRNRVINRMARLLEKVNLKLASVASNIVGASGRAMLRLLASGVEEPARLAECARGLLRLKRSALVQALEGRPDAHFRWMLSELLRKLDGLDEERARLDARLDELAKPYADLLRRLATIPGMDKTTALVLLAEFGTDMTQFPTAGHLASWAGLCPGNAESAGQRFSGRTRKGDRCVRRILVQSAWAASRKHNCFLAALFFGTAQRRGRKKAAVAVAHRIVIIAWHIMAESGVEYVERGGDHFDRRNPERTARKLTRRLEAIGYKVTLAAAPEPKPARPRGRPSGRKPGEAGPPADRAVCPKCAAWRIPCIHVRNAKLGTIIPLTPEASKT

SEQ ID NO: 63335 - protein, 342 aa, unidentified
MGEVTTIGLDIAKSVFQVHGVDTDGQVVLRQRLTRARVLAFFRKLPACLVGIEACATAHHWARELQSLGHDVRLMPPAYVKPYVKRQKNDAADAEAICEAVGRPTMRFVPVKTVEQQSVMMLHRVRLMLTRQRTQVGNAIRAHLAELGIVAPVGRKGLASLLAIIADAADARLPAAMRGCLAMLAEQLQRLNAQVLENDRAIRETIRTSEVARRLMAIPGVGPLLASALVASIADPATFKSGRNLAAWIGLVPKQNSSGGKERLGSISKQGNRYLRQLLVVGALAVIRQAQRYGSKRAWLIGLMGRRTTRVAAVALANKTARMAWAIMTSGEPYREPNAATA

SEQ ID NO: 63336 - protein, 322 aa, unidentified
MSVSVLGIDIAKQKFDVALLVDGKTKHKACKNSAEGFENLMLWLEKQGIQKVHACLEATGNYGEDLAIYLHEAGHIVSIVNPARIKGFGQSELIRTKTDRIDAALIARFCLAMRPEPWIPPSPEIRTLRALVRRADSLIDMRSQEKNRISTAHESVTFLIKEHIAYLDQEIEKIRKQIAELIEHDPNLKQKKDLLDSIPGLGKVTIPTILAELDDLEKFTHVREVVAFIGLAPKETLSGSSIKGKPRLCKIGHTRLRKALYMPALVSIQCNPVMIAFYNRLKEKGKNGKVIVCAIMRKLVHIIFAILKSGKKYDPNYKPASA

SEQ ID NO: 63337 - protein, 407 aa, unidentified
MGIDIAKRTHYACIVDDRGRVLQKSFSVPQAGNGFELFYQRVLAAMKEHEKSEVIVGIEPTGHYWLNLAYFLEERGIPLVMVNPMHVKRSKELDDNLPTKHDRKDALVIARLVKDGRFSYPRILKGMEAELRVGSTFRSKLTEELGAVKNMIIRWLDRYFPEFVQVFPSFGKMALAALECTPFPSDLYQKQPDEVLSLFRKVEGLKSPQRPKTVRLIEVAAGSIGVTEGLEMARIEIATLVRRYHQLEQDIESITGQLIELVKTSAEYEWLSTVPGLGDTTIVDLLAEIGSFSHYQDPRQLIKLAGLTLRENSSGLHKGQKRISKRGRRKLRALLFRVMMPMIRHNEAFRKLHEYYTNRQVNPLRKKQSIVVLCGNLLKVLHGISTKHKPFDAQRMMRDIPGLAEAE

SEQ ID NO: 63338 - protein, 343 aa, unidentified
MKDTIYDHYIATDWSIKNMAIARMTKKSNKITAIDVPSDIEDLQAYLKNLRGTKILTIEETTTSQWLYTELKEFVDRILICDPNRNKLLDEGPKTDKIDATKLVQLLKAGLMKEVYHSTDKFLYLRRMVSGYEDLVKAGVRLKNQRYALLRACGKSGDEKIGSTLDSQGEQFVLGCLDRQIEAYEEEKEGYEKEFEKLARSHPEIKHQKSLPGIGVINAVKIVARVVTPYRFADKGHYLSYTGLIKLEKTSGGRSYGKKNPRYSRQLKSVYKSGVLAAIGGNNPINDYYAHLIQEDGYPEHNARQKACRRLATLSLGVFKSGKKYQPYRRDHVKGGKEGTSGL

SEQ ID NO: 63339 - protein, 360 aa, unidentified
MEPEGKTSRITGGVDTHKDTHTAAALDATGRVLGNATFPASAVGYEELLAWLRRFGPLDRVGVEGTGSYGAGLMRYLRESEVPVIDVNRPNRQARRQHGKSDPADAEAAARATLSGDASGVPKSQDGTVEVIRMLRLERRSAIHARTQAANQLHAVVSTAPEPLRTKLRALSLAALLDHARKCRDVLPTDTVSATQRVLRGLTARWQHLDREVNQLDAQLAALVKTAAPDLVALRGVGIDVAGALLVAAGDNPERLAHEASFAALCGVSPVDASSGRQRRHRLNRGGNRDANRALWVVALVRMQRDPRTRAYVLRRTGQGLGKREILRCLKRYIAREVFKLLCASSVVAGDGETRLEHVA

SEQ ID NO: 63340 - protein, 418 aa, unidentified
MIDDVQWFVGIDWATQSHRACLLDVEGRHVSEHDFAHDGAGLTELRDWLLEKTKAAPGQIAVAIETPHGPVVEMLLDHAFLVFAINPKQLDRFRDRFTVAGAKDDSRDARVLGSALRTDRHAFRRLVVDDPVVIELREWSRMADELQQERIRLANRVRQQLWRYYPQAVELTDDVADDWFLALWQQVPTPVTAAEVPEEAITRILKDHRIRRLDATTVLQTLRKTPLFVAPGTTEAACAHIRAVAARLSLVNQQIKQTHRALDGLCAKLEAATESPSGQNREQHDVMILRSWPGIGRIVLATLLTEATEPLRRRDYHALRALAGTAPVTRRSGKQCFVIRRLACNKRLQNAVHHWSRVAIQHDTAARRRYDALRRRGHGHARALRTVGDRLLYALCTTLERQMPYNPNCQTAQVTVGL

SEQ ID NO: 63341 - protein, 430 aa, unidentified
MPYRITGIDVHKKMLAVVVSDVEVEGEYHFERRRFGSNPEQLRSLAAWLLEQEVEEVVMESTAQYWKPVWEALERHWKPLRQKQEGASRRSGTLHLAQAQSNRGRRGRKRDFPDAERLVKRLVARELILSFVPDTEQRLWRTVTRRKYQLTRDRVRLQNQLESLLEEVHIKLSCLVSDLLGVSAQRMLKALADGETTPAALAALADRKLRATPEQLCDALGACTDLKPVYRRLLKMVLEQLQSLDQQIGQLDQEMAMLLNQHQDAVTRLAEVPGLGVDSAQQIIAEVGPTATTFPSAKCLSSWVGACPGDDESAGVNYSHRSPKGNRHMRRVLNQTANAAARTKGSIFEIVYRRCVPRLGHNQAIGAIAHRQCRLIWLILHQGVRYEERGPAVTKQSKQRRTARMIRQLRALGYRIELPNTQHSSPAQVQ

SEQ ID NO: 63342 - protein, 349 aa, unidentified
MKILAIDLGKYKSVACNYVTATGTARFATVVTHVLELDRLLLRESPDLVVIETCSIAGWVHDLCCQRGVKCQVANPHGEAWKWKNVKRKTDRDDALKLAQLAALEQLPTVHVPAPETRQRRALLKYRQSLITRRVAIQNHLRAIAQRQGILLDRGSRAWTVAGLEAIQHLAKPLEECSAEELWRGEAALELQALRAVVKLLREVEHKLEAFAASNGSVKLLRSIPGVGRCTAEVVVAYLDNPQRFENGRQVSAYAGLVPKQFQSGETNRQGRISRRGPSLLRKMLVEAGWILLRYNPWAQRLMLRLSRGQKTRRKQAIVALARKLLVRCWAMLRDNTEWREPPPATATA

SEQ ID NO: 63343 - protein, 358 aa, unidentified
MRNSTRNVTRMTIGVDLGNRFCTIATLKADEESVSRERIPTTRDAFESHFRSLRPSRVVLECGTDTPWICPLLEDMGHEVILANPRQLPLISKSLKKTDSSDAETLARMGRADPKLLSPVKPRSPEVLADLAIIDARNQLVRTRTKLVNFVRSKLKTCGIRVKMSCTSAFPDHAALLVPDDLRPALDPCIEMIRHLTQDIRSYDRKVETLCEKKYPQTGALRQVAGVGSLTALAFILVLYDPKRFPKSRQVGAYLGLTPRKDDSGDHTSQLGITKAGNSSLRVLLVSAAHYILGPFGPDTDLRRHGQAIAARGGPNAKKRAVVAVARKLAVLLHRLWVTGEVYEPLRNHRRREAKTEA

SEQ ID NO: 63344 - protein, 342 aa, unidentified
MTPPASARITVGVDTHAEVHVAVANDNFGRRLDVISVPTTPVGYGELLGWAQRLGPINAWGIEGTGSFGAGLTRFLHRHGQVVVEVNRPDRAARRRRGKSDPLDAEAAARAVQARQGAVPKAGDGQVEMIRSLRVARATAMKARTQAINALKALVVTAPDELREQLRALSAVRLVQIAASLEPDPVTTPAAAAGLGLRTLARRYQALSAELAVLDAELDRLTRAAAPKLVALFGVGSDSAGALLVAAGDNPDRLRSNACFSMLCGASPIQASSGKTQRHRLNRGGDRQANAALYRIVIARLRHDQQTKDYLDRRIREGKSKKEAIRCLKRYVAREVFAVLRP

SEQ ID NO: 63345 - protein, 359 aa, unidentified
MIVIGIDPHMKTHTAVALDAATGRTIAERTVACSDEGHDDLLAWARSLPDDHYFAIEDCRHVSGRLERHLLPRGERVVRVPPKMMAGARHSARCYGKSDPIDAAAVARAALREPGLPEASLSGPEHDVRLLVDHRDDLVYERKRIQKRLRWHCHDLEIELTLPPRVLDRYVWLDRLEGVLCALPQSTRRRIALDQLGRVRELTKDVRSLERELRGLVGELAPDLIAIPGCSAINAAHLIGQTAGATRFSGEAAFAMHVGCAPLPVSSGQSNRHRLNRCGNRRLNSTIHMIAVTQARMHPPAIVYMERKQTEGMSYREALRCLKRQLARVVFKTMLRTERASVGHVLRARFSADCVAIAV

SEQ ID NO: 63346 - protein, 421 aa, unidentified
MKQEAPEEFAAFIGLDWADSKHDVCLQAAGSAKREYFILTHTPEAIDAWVSTLRTRCNGHPIAVCLELNNGPIVSALRTYDFLVLFPINPLTLARYREAFTPSRAKDAPTDAALQLALLLTHRDKLPPLKPQSPAMRALAPLVAHRRRVVNDRVRITKRLTSTLKNYFPHVWQWFQEKDTSVFCDVLSRWPTLKAAQLARRSPLETFFRDHHVRSADIIGKRLQAIKTATPLTSDAGVIAPHVLFVQTLVSQLRVTLDAIETFDHAIAQRAQSHPDFPLFQALPGAGPVFAPRLLVAFGEQRARYASAAALQPYAGIAPVTERRGKKSWVHWRLQCPQFVRQTFVEWAAESIRHSFWAQLYYQQQRDKGKAHQAAVRALAFKWIRMLSRCWQERTPYDEATSLQALTRRGSSLLQNLAKVS

SEQ ID NO: 63347 - protein, 387 aa, unidentified
MSFDHRPTQTAIRTDLGAIFISMELSRSTWLITSLSPGTGEKMSKHATPAGDIAGLLMRFAQLQEKAQARTGQVPPIIAIQEAGLDGFWIHRVLLSEGIESYVVDPASIATSRRRRRAKTDKIDGEALVRTLLAYKRGEPRVCAMVKAPTPEEEDQRRVSRERQTLTAERVQHVNRIKGLLFAQGIRDYEPMRRDRRQRLDALTTGDGRPLPPHLKTQIRRELDRLELLLEQIRTVEAERDALLERARTAEAAPAPGLLLGLKGIGADIAGILWAEGLFRPFANRRQVAAYAGLAPTPWKSGSIDREQGVSKAGNPRLRTIMIQLAWLWLRHQPHSALSQWFKDRVRASGSRQRKTTIVALARKLLVALWKYVTTGVVIEGAKMKAA

SEQ ID NO: 63348 - protein, 465 aa, unidentified
MAKKNNKSAAKSAKKRKTAKLKPADGTQGMEVIHSHAAGIDVGNEEHYVAVPPGLDENSVRTFGCFTEDLKAMAGWLSKIGVTTVALQSTGVYWIPLYDVLTERGIHVFVVNARDTRNVPGRKTDVLECQWIQKLHAHGLLQSSFRPGQEVCNMRTLWRQRQQHVADAARCTQRMQKALTQMNVQLHNVISDITGVSGMTILEAILQGERNPERLAELCQPEIKASRATVTKSLEGNWREEHLFVLRQEVQTYQHFQRMIEDCDAQLHQHFRSMEPKADPQALPKVERHKRPRGNAVESFDLRKELFRVVGVDLTRIDGINIMTAQTVLSEIGYDVSAWQTEGQFVSWLNLAPRDKISGGRVIGRDGRKIINRAGQALRLAANSLRQSDSYLGAQYRRLRGRLETSRANKAMGAKLARVIYRMLKYGQEYVDKGAEYYERNRKEQQFRNLTKQAAKLGYTITKAA

SEQ ID NO: 63349 - protein, 366 aa, unidentified
MKKTITVAKNRNEIFKQPQLTIGVDLGDRISHYCILDETGNVILEQSVPTTPKGIQQVFSKISRCRIALETGTHSPWVSRLLTQLGHDAIVAHARNVQLITESSRKDDRLDARTLARLARIDPELLGPVRHRSAKAQIHLTVIRARATLVSARTALVNAARGLTKSYGERLPKCGTEQMNREIAKGLSPELRDVLEPLLGEIESLKERIAEYDRRIEQIAKEVYPEVALLKQVKGVGTLIALTYVLTLDDPHRFRRSRDAGCFLGLRPGRRNSGMSEPQMHISKEGDAYLRTLMVQGAHYILGPFGQDSDLRRWGLKLAERGGKNAKKRAVIAVARKLAVLLHKLWVSAEVYEPLRNNHKVVSAVA

SEQ ID NO: 63350 - protein, 377 aa, unidentified
MGEFFRQCVGIDISKDKFTACLYMYDRASDEGCCTKSINFANTKSGFNQMVRWSRKEAIKGYSLTYLMEPTGVYYEHLAYHLHKIGQTVYVVLPNKARQFCESEGIKTKTDAMDARCLALMGCVSRKLKAWSPPAAIYRELRQMTRFHADLWEVRTSVTNRLEALRHMEGLSKTVRRNCEKLIEEIDTLIEKNDKAIMQKVAEDKELEARVKRIATAKGLGEATIVCVIAETEGFHLIENRKQLTSYAGLDVEARQSGNDDPRHRISKKGNAHIRAALYMPALVAIRYNRQIRAAYGRVCQKHPKEKMIGVAAAMRRLLLLIYTLWKSGEVYDETRDTTRTPRKKSPELEHGPKDSITTTEEHVDWNAVGENRQALF

SEQ ID NO: 63351 - protein, 391 aa, unidentified
MVCVGIDVAKDKHDCCILDSDGMVRADCFTIPNNMDGFKQLLQTIRNCTKKSDKIKVGLEATGHYSYNILGFLLDNGLPTYVINPLHTNLYRKSLSLRKTKTDRVDARTIATMLLSDVDLKSYTDIAYHNEELKSLTRYRFDKVQECAKLKQSVSRLATILFPELEGLVSSIHGTSIYALLSEYPGAKQISEVHLTKLTNLLTTASKGRYGKEKAIQIREAARASIGSVMPAKSLELKHTIKLIQELASEIDEIEDSIQKIIDELNPPILSIPGMGVNSAAVILAEIGDFSNFSSPDKILAYAGCSPSTYQSGKLTNCYAHMEKRGSRYLRHALYNATKYVCYWNPVFAEYLAKKRAEGKHYNVALSHAMKKLVRLIYALQKSGKTYLAAA

SEQ ID NO: 63352 - protein, 428 aa, unidentified
MKITHAAEKINLNNVVDIAVDVHKDTLCFFFEIDGKEFSDECRNRTTIIEKRLRSYHEIAKEHGRKTLRIICEPTGQYQNSLFRTARRLGFFTCYVNAESVAKFRLVESNDNNKTDKKDPRVIGTLGKLNKVIKYRLLGEDYLMLRKLHKMYDECDVAITSMRCRVAKLLVELFCDYSFKKDFLYSNSGLALIEQYGCNPYRIVEDGFKAFSQKMRRKAPRIRKDTLERLWADAVSSALNEMPAGYVEVLEMHFYDLLDDYFRQVDRKEDITRQMVEILARLREKDPNIPPPTPHVISDKNLARLLGETGPLSDFDNWRKLMRYAGLNLRTRQSGTFQGQNKISKKGRRLLRKVLQGIALPLVRKGQLYGEVYHKKKDETKMPGNKAMTVIARHMLKKLYGWYRSGEEFNEQRFFTSKSRYRKIAEAA

SEQ ID NO: 63353 - protein, 344 aa, unidentified
MSVTTIGLDLAKSIFQVHGVDAQGRAVLKRRIRRRDLLAFFEELPSCLVGMEACSSAHHWARELVALGHDVRLIPPQYAKPYVKRNKTDAADAEAICEAVGRPNMRFVPIKSKESQGLLTLHRVRSLLVRQRTAAVNSARGLLSEFGIVAAKGICRVAVLRREMEAADEQVLPREARAALDALFEHLDALTLKLDAVDREILAWHKASEASQRLATAPGVGPLTATALIAAVGDASQFPSARHFAAWLGLTPRMSASGNRAHIGRISKGGDRYLRTLLIHGARAMVGTSFRRGVKPRPWLQALIARRPVNVASVAVAHKTARALWAMIRREEAYRAPTVFEAAA

SEQ ID NO: 63354 - protein, 330 aa, unidentified
MFTERTSVGLDVHARSVAAAAIDGVTGELFQTKLTPSHEHIISWVQDLPGPVAVTYEAGPTGFDLCRALSAAGVRCEVAAPSKLQKPSGDRIKTDAKDAVHLAKLLRLDQITGVAIPRVDQEAARDLVRAREDCRGDLMRARHRLSKLLLRHGIVYYGGKAWTGKHDMWLCHDAAAQLTSRATRLAFDSDYETVLATKARRDRLDVAIGEMAADSEFTPLVHRLGCLRGISTLTGFALAVEIGDWHRFTGNTIGSFVGLVPSEHSSGSSRMQGSITKTGNTHVRRLLVEAAWHHRTRYTAGKTMRDRWDLAPAAARVRGDEGNRRLHQRW

SEQ ID NO: 63355 - protein, 369 aa, unidentified
MKHSIIFVGLDVHKDSIDIALADDGRNGEIRFYGTIGGDLASLDKAIRRFRRTGTELRFVYEAGPCGYEIYRHLTAQGFRCDVIAPSMTPKKSGDRIKTDRRDAVTLARLYRASELTPVYVPREDDEAMRDLVRGRGDAVNATRKARQRLSAFVLRHGFRYSGRKAWSVAHLRWLADIKMPHPAQQVALQEYIHSVEECSERVDRLTEQILKLVPTWRMAPVVTAFQSLRGVAPIVATTMVVEIGDLRRFENPRQLMAYLGLVPSESSSGQTTKRGGITKTGNGHARRALIEAAQAYSFPARVSRALRKRQEGLPREIKEISWKAQVRLCGRFKKLMAKGKNRNRTVTAIARELSGFMWAIAKEVPMAA

SEQ ID NO: 63356 - protein, 403 aa, unidentified
MNNVAGIDVSKGKSMVSVLRPFGEVVAKPFSIGHTGSELKELADYLKSLDGETRVVMEHTGRYYEPVARFLHDEGVFVSAVNPKLIKDYGNNTLRKVKTDKADSRKIARYGIDNWAELRQHTPMDTIRMQLKTLNRQQSLYTKTKTMMKNNLIALLDQTYPGVNALFDSPVREDGSQKWLDFATAFWHVDCVRNMSLTAFAERYRKWCKRHGYNFSQSKAVEVHTGAQDLIAMLPKDALTKTMVRQAIDALNAVSASLERLKAEMQALAAQLPEYPVVMAMHGVGDSLGPQLMAELGDVARFTHRNAITAFAGVDPGADQSGTHEAKSTRVSKSGPPELRRALFLVMDCLLKTQPQDDPVYRFMDKKRAEGKPYLVYMTAGANKFLRIYYGRVKEYLASLEEN

SEQ ID NO: 63357 - protein, 341 aa, unidentified
MPIVTIGIDLAKNVFAIHGVDASGKPVLVKPRVPRDQLLTLIAQLPPCLIGMEACSGAHHWARVFQQYGHTVKLMAPKLVAPYRMSGKRGKNDAADAAAICEAVTRPSMRFVPLKDEHQQATLCLHRTRQGFVEERTAAYNRMRGLLSEFGVVLPQSPERLRREIATHLDALPGWVRRCVSDLLEHVGNIEDRLAEYDRAIGEIARTDERSKRLMKLRGIGPTTASALLASIGAGHDFRNGRQVAAWIGLTPSQYSSGGKERLGTITKTGDAYLRNLLVLGARSVMASLGDKQDRFSRWVRNLVERRGYWRTAVAIAAKNARLAWATLKYGEAFKHEPATA

SEQ ID NO: 63358 - protein, 310 aa, unidentified
MDAVYVGIDVSKDRLDVHVRPSGQAFAVARDGEGLADLAERLGGLGAAIVALEATGGFEMVAAGALAAAGLPVVVVNPAQVRAFAQALGKRAKTDPIDAAVIAHFVEATKPEIRPLPDEQTQLLADLIARRRQIIQMIVAERQRERRTTVARLKRSIQRLAAALERELSEVDQDIDDSVRGSPAWRQNEDLMQSVPGVGPIIARSLLAELPELGTLDRRQIAALAGLAPWTRQSGKWKGKSFIGGGRSAVRTVLFMGALAAARYNPTLKAFRQRLIDAGKPKMVAAIAVARKLLTILNAIVRDQKPWQSA

SEQ ID NO: 63359 - protein, 413 aa, unidentified
MSFTPATTPARVCAGIDWASTDHAVCILDVDGTILERFFVVHDAAGLKTLIRRLLNAGVDEVGIERADGPVIDALLQAELTVLVIAPGQVKNLRSRYGSAGNKDDRFDAYVLADVVRTDRTRLRPLERDSAATTAMRTTVRARRDLIKHRVAAANQLRAHLQNVFPAATTVFAAVDSAINLTFLERFTNQVQADWLSPKRLATWLNRVGYSGRTDPEILHARLLAAPRGTTGTDAEIHAATTSAYVALLRVLNTQIATLEDNLTAQLKTHPDAHIYASLPRAKTLRVARLIGEIGDARGKFPTPQSLAALAGVAPSTRQSGKVKAVTFRWGCNKQLRDALCDLAGDSRHDNPWAADLYDRAIARGHDHPHAVRILGRAWAHIIWRCWHDNLSYDPSQHRALQNVLANTAQQAA

SEQ ID NO: 63360 - protein, 340 aa, unidentified
MEKRYIGIDLHRNRFTCCIRLENERTYLTEWELEDLGKFVKKLRPNDEVAVEITGNTRLFFDAVAPHVARVVVVNTNQFRVIRQSVKKTDPNDARTLALYLSKNLLPEVRMKDKEHGQLASLTQTRDTLVKLRTALKNKINNILSARGLNLAKESLSSEKKLAEVLELPFDEIVRIELRVIVGQIRSLNQSIGELEKAIGEEGVKLEGHKGLSSIKGIGRITGAILLSVIGDVNDFADEGHLASYFGIVPRVANSNETEHSGRIHKRGTKLGRTALVQSALIAANYSPYLKRFYEQVKARRGAGKAIIALARKFLGVIYRTLKNKWVFEDFPNFVLAEAS

SEQ ID NO: 63361 - protein, 416 aa, unidentified
MKIVRPICCGMDVHKNIIVATIGITNKKTRITEYIQETFSTLNHDLLNLKQWLINHKCFDACMESTGKYWIPIFNILEDEINIYLTHPKYVKAIKGKKTDKKDSKWICDLFKHDLIKFSFIPPKEIRALREISRYRYKLVGMRSSERNRYQNCMTVSNIGIGSVFSDPFGKSAQAIMKEVLESDIIEDEKILKCIHGSCKNKDKILDSIKHCNIETDQRFKMNESMTHMEELQVHIDNCEIEMMKRAAPMFDQFMHITQLPGISTLSAILIISEIGVDMKQFESDKQLTCWAGLAPANNESANKKKSVRISKAGQYLKPLLVQCALGAIKDKEGYFGIKYSRIKKRRGHKKAIIAIARMMLVSIYHMILTGETFNPSDYESFKNPKPPIKQQVLTEESAIEFLKKSGFDVSKLTKP

SEQ ID NO: 63362 - protein, 434 aa, unidentified
MTRYVGLDLHKHIVQASLINEQGKRLESHRFACTQESLLAFARERLRPEDQIALEATTNTWAVVALLRPFVARIVVANALRTRAIAEAKVKTDKVDAESLAQLLRCDYLPEVWQPDQETQQLRELSVQRSGLVADQTRLKNRVRSLLAQRLISAPMPTLFGVAGRHWLRQAVLTPTDRVIIDGFLHLLEGLEAEQERIEKRLAELSYPKEEVRLLMTLPGVGAAAAQALVAALGDWRRFADGDVAASYLGLTPRVHQSANTCHYGRITKAGNPQARWLLTQAAQQVAQHPGPLGVFFRRLKAKKNHNIAVVATARKLVVIAHLMLKNREPYRYAVPATTRDKLAGLRVAATGVRRRKSGPLREPMQSQPEGIRVHKTPALNEVYSDEGLPAAKSLSELGAGETKMLTEMKLLEHASNVQMRKQRFCRRHTQKTG

SEQ ID NO: 63363 - protein, 342 aa, unidentified
MGEVVTIGLDIAKSVFQVHGVGADGEVLIRRRLTRARMLPFFAKLPRCLVGIEACNNSHYWTRELTALGHDVKLMPAQYVKPYVKRGKNDAADAEAICEAVTRQTMRFVAVKSPEQQSLMMLHRVRLMLNRQRTQISNAIRAHISGFGVVAPVGRLGVERLLEVVADAGDDRVPEDARLCLQMLAAQLEVVKRQILENDRRVLASARRTELGRRLMDIPGVGPLLASAFVASVPDPTVFKTGRDLAAWIGLVPKQNSSGGKDRLGSITRAGNRYLRQMLVVGAMAVIRYAQRHGTKRPWLVQLLAHRPAKVAAVALANKNARIIWALMISGERYREPVPMAA

SEQ ID NO: 63364 - protein, 317 aa, unidentified
MSALPVFVGVDVAKTELVTGLRPTGEAWTVSNDETGIQELLQRLRPHVPVLVVIEATGGYERGVVAALAAAGIPLVVANPRQVRDFARSTGQLAKTDRIDAQVLALFAERVRPEPRPLPDEATRTLTALLARRRQILEMLTAERNRLEHAVPAVRRDLVQHIRWLERRLRDVDHDLDRTVQSSPIWRAKENLLRTLPGVGPVTSRTLIGSLPELGFLNRKQIAALVGVAPLARDSGTLKGKRLVWGGRAPVRAALYMAALVASRRNPALRAFYARLVAAGKPKKLALTACMRKLLTILNAMVKNNSAWQWIDHPKTA

SEQ ID NO: 63365 - protein, 362 aa, unidentified
MKKGTKLQPAPAPQANTQPAITVGLDLSDRNLHFCEIDADGEIIAESRIPLTAAALRKQFGGREKLRIALETGAQSGWVQRELQAMGHEVIVANARAVESIHGNRHKGDQRDARQLARLARVDPALLAPVQLRARQQQLDLLRIRVRALLVEMRTMLVNGVRGLAKQEGERVPSTTTDRFAARARQSLTGALREILEPLLAVTQKVSDCIEKSEEDLDKIAETKYPDTRWLRQVPGVGNLTALTFLLTIGDPTRFAHSRDIGPYLGLTPARRQSGDSDPQLRITKCGDRYLRKLLVQCAHHILGRWGKDSALRDWGLKHTGGSRSSKKRAIVAVARKLAVLLHRLWTTKEAYKPYPNQVMAA

SEQ ID NO: 63366 - protein, 266 aa, unidentified
MNQSSTISIDLAKSVFQVAVFNRHGKRMSNQAMSQKKMLMLINQHPNSTICIEACSASHYWGRTFQDRGHTVKIIPPQKVRPYRNGNKNDANDAIAIYEASLRSDIHVVPVKTPEQQDVAMLLSLRQSYIKQRTAVSLRIRGYAAEHGITFPQGINKLREMIPLAIEDAENELTSVARFVLRELYAQLLSIDEPIERVESELIEFARQIPACQLLITLRGVRWIIASAIFARMGDASAYRNGRGASASLGLVPTHRGSGGKNKTTE

SEQ ID NO: 63367 - protein, 384 aa, unidentified
MQKPNDLNQSRIVLKQDSTLIAVIEMSLSSWLVAGIVPGVERQPLKKLAVDESALLKLLNRWREEAEKAGRRIERIVVAFEAGRDGFWLARWLRARGIEAHVIHASSVAVSREHRRAKTDRLDTELLKRAFLGWLRGERDHCKMVAIPTTKDEDAKRPNRERQSLVGEQTRIVNRMKAALIRLGIRGFNPKLKKAAGRLEDLRTPEGEPIPPNTLAELHRDMERRRLVSDQIRQIEEARLERMEQAPGDGPHAMVRLIARVIGVGIETADMLVHEVLSRKLRDRRAVARYAGLTGAPDESGSKRREKGLAKAGNARVRGGMIQLAWRFLLFQKDSALAQWYRTRTEGGRNRKTIIVALARKLLIALWRLVTTGEVPAGVVLRAA

SEQ ID NO: 63368 - protein, 325 aa, unidentified
MKLPVMGADISKTWFDIDIPQVKLKKQFSNDIKGFSQLLKQLKKSGNTKIRVCMEATGLYFEPLAEFLYAHGHEVVVVNPQCIKSFSRSELKRSKTDPIDAALIAQYCEEKYDRLNLWKPLEPEYKKIRELLRRRTALVADSTAEKCRLKAGFSCNDNIDSIKRHLVWLQEEIDALEILVQETIAAHPELSKAVTLIDTIKGIGWLTAAIVLVEVPQVLWDGRLASAFAGLVPHKRKSGTSQNSTYLSKVGSEHLRAALYMPALSAKCSNPLLKLFYDRLRKRGLKHKQALTAVMRKLVHLIFGVLKNGQAFDQNYQAKRRPTTA

SEQ ID NO: 63369 - protein, 326 aa, unidentified
MNGSGRVISNERFLSTQDALDKFLDRFDKAKFVLESTGIWEFIYEGIEKKGFEAVLAHPLKVRAISEAKVKTDKVDAETLAHLLRADLIPRSHVPPRDIRNLRQLVRHRAYLVRQCTSIKNRIHAELLRRGIRRPDDLKKTFTFKHVGWMRSLGILTVTSSLNCLEGIQAQIREVESFLLVEYNSRRDAQLIATIPGIGFYGALLILAEIDDIHRFSHPEKLCAYAGLVPTVHQSASRSYNGSITKNGSPHLRWILIEAVHVHTNYCPGSKLSKFHAKVAQRRGKQRATVATARKLLHTIYWMLLTKEKFHCQGFNLVEKAASMNA

SEQ ID NO: 63370 - protein, 345 aa, unidentified
MLYLGLDVHSKWTTIKGFNPETGEIVEHRQVSNEPEAMEAVLGGLPGPLVGALETGTNSWAMYRQLRPFFERLVIADPAQIWDRKRDRGAKTDPRDALRMAQKLHRGEIKGIYVPDEHTQDLRVLVRSKVRATRWVTKLTNELGSLLRSWGYVGPRSLLSKKGTMHLNQAQLPTHSARVLKLWREMLEKAQEIQAELEAAVKEEADADPMCAQLRTIPSVGPFTALVVRAEIAEVDRFPGSPSLISYAGLAPRVFQSGERCHYGSIGHWGNRWLRYALVLLANRMAYHGQGSRLHKLYWRLQLREHRNGAKIAVARKAAHLIYHMLRSGQPWRELSEERRVKAIV

SEQ ID NO: 63371 - protein, 343 aa, unidentified
MMVIGIDAHKRTHTAVAADQAGRHLSTKTVGTTSKDHLALLQWATEHGDDRLWAIEDCRHLSRRLERDLLAAGERVVRVPPKLMANARDAARTYGKSDPIDALAVARAALREPDLPVARLDGADREIRLLVDHREDLVAERTRIISRLRWHLHELDPAWRPPTKLDRTSAFDKIGAHVATFSGLVADLALRLVEHLRRLTVEIDELAAEITSRTTMLAPSLLAIPGCAALTAAKIIGETAGIDRFRSKDSFARHNGTAPLPVWSSNHARHRLSRTGNRQLNAAIHRIALTQARCHEDARALLARRKAGGDGGMEALRVLKRRLSDVVFRAMVADQSSLMDLAA

SEQ ID NO: 63372 - protein, 360 aa, unidentified
MRPEECCGKPSAFGEDAEGYAYLFHLLGAPKDCLVALEATGHYWRNLFVSLVTKGYEVAVLNPLRTRRFAEEELERTKTDAIDALGIARFAAQKRPAPTMLPEPAAEELRELVRLRERLLGDLGDQLRRLHRAVDLGFPEFTNHVRTLESDLAISILSRYPTATAYRNVSPKKLARLCYDGRHEVGEQLARALVNTAKNSVGRHHSDTYRREIAYACEDIVALRGRLRELADDIKQKLEQHALGKLLTTINGVGVQTAAYLIAELGDPARFHNAAALASYVGVAPRLRQSGKRRFSGTAVVRLGNARLRKALWMPVLTAVRFNPWLRAYYDRLVSRGKPRKVALVAAMRKAARRGLERCN

SEQ ID NO: 63373 - protein, 340 aa, unidentified
MTTIIGIDPHKATHTAVAIGCDEAELATVTVRATSQQTDKLLSWAEPFKERTWAIESAGGLGYLLAQQLVDAGEHVLDVPATLASRVRVLGTGRSDKNDPNDARSVAIAALRSPGLRSVYAADHAEVLRLLAKRNSGIGALRTKLVCRLHALIAGLEAGGIAKELNASDADGLLRSFEGSSPAEHTRHQLALELLADIRHLDHQLSESHKRIKLAVQASGTSVTEVFGIGAVIACSLIGYTGDVSRFTSRDQFAAYNGTAPIEVSSGGRVAHRLSRRGNRQLNHAIHMAAISQIRQTHSEGRAYFERKVAEGKTKREAIRSLKRQISNTVYRHLVLDAQK

SEQ ID NO: 63374 - protein, 310 aa, unidentified
MDVFIGIDVSKDRLDVCIRPSGETFTVTRDGEGLERLGERLCALAPVLIVMEATGGYETVAASALAAAHLPLAVVNPRQIRDFARSTGKLAKTDRLDAAAIAHFAEAIRPPAQPVADDEAQALGELVARRRQVIEMIVAEKNRRRLAGQPRVLKAIDRHVDLLQAELSDLDRDIDGAIRKSPAWQADADLLASVPGVGKATLRTLIAELPELGRLDRRKIAALVGVAPINRDSGVWRGRRTIAGGRTTVRTALYMAALAASRANPVIAPYYQKLRASGKSGKQALVACIRKLLVILNAIMRDRKPWTLSA

SEQ ID NO: 63375 - protein, 432 aa, unidentified
MSPLALDVVTKTDKTPVLGRMLSKYVGRKTSSIENGITKARNHSRQRGNIMRVVFGIDVSKASSEVAILVNGEKVHGYTIPNDAIGFNRLLGDLKTVHQPEIVFEATGVYSRRLQAFFEDNSYTYTRLNPLESKKQLDSLRVRKTDKIDAEKLAMSQFILNRKPSYVQEALYQELRDLSRFYQNLTEDIVCAKNRLHKVLQITFPELENILSAPTGEQYWNLVITFPCNSFVLESDDATLTAIIRQSTAKRISEKRVTYLVDKLTKLANQSYCAVKKTSPVIEEVKYYAGELLRLSEHRQGVVEEMVTLAQSLPEYEILLSIPGIAETTATSIIGELGDIRRFHSANQINAFIGIDLRHYESGNFLAKEHITKRGNPYARKILFKCIHNIASASHTNPCHIADFYEKRKRQSQVTSTKPHTIASIYRLIITS

SEQ ID NO: 63376 - protein, 358 aa, unidentified
MNRNTGMSAGQIIGSMNGLQVMGLDIAKHVFQLHSVDMGTGEIVNVQVKRAKVLEYFVNKPRSLIAMEACGGAHHWARELTALGHTVRLLHAKIVRPFVSGNKTDATDARAIWLAVQQPGVKFVGIKTAAQQATLTLHRQRELLVKMRTMQTNALRGLLYEFGATFAQGRKALFKDVEQALEDLTGQLPQMVRDSLREQVGRIKEMGDAMLAIEKRLALQLKADPHMQRIAQIPGVGLLTATAAIATMGEASAFKSGREFCAWLGLVPKQTGTGGKVRLGGISKRGDTYVRTLLIHGARSVLSHAKEPGPWLEQIKQRRPANVVIVAQAAKMARTIWAVTAKEQSYQRGFQSVRPQAA

SEQ ID NO: 63377 - protein, 342 aa, unidentified
MGQANTIGLDTAKQVFQAHGADCVGNVVFRKKLPRGKLLAFFAAQPPCVVALEACGGSHYWAREISKLGHEVRLIAPKYVKPFVKRQKNDAADAEAICEAAQRPTMRFVAVKSEAAQASGLVFRTRDLLVRQRTQTINALRGHMTEYGVVVAKGPAHVERLIERLEDSLLQMPDAARSVLQLLASSLRDLEAKIAELDVEITKRAKEDDVARRLTSIPGIGPITATAISALAPPTESFSKARDFAAWVGLTPLQKSTGGKQKLGATSKMGERTIRRLLIIGASAVVRQAALRGAPPGSWLGRMLTRKPRMLVTVALANKMARIVWALLTKVEVYKAPIAVAA

SEQ ID NO: 63378 - protein, 340 aa, unidentified
MGEYIGLDVSLKETAISIRRGGKRVWRGKCQSDPAIIAALIRKHAPAAERVVFETGPLSVWFYHALTAEELPAICIDARHAKAALDMAANKTDANDADGLAHLAEVGFFREVRVKGFDSMLSRTLVAARTKLVRATLDIANQIRGLMKTFGLIVPRGIGGKFEANVRSLLVDHAELARIILPLLEAWRSLRIQATELGRQLLAEARRSEQCQLLMSIPGVGAITATAYLTAVEDPANFSRSRSVGAWLGLTTRRYQSGEVDYDGHISRRGDTHVRSLLYEAAVVILTRSHAESDLRRWGMKLREKVGFKRAAVAVARKLAVIMHAMLRSGELFTRTAAAA

SEQ ID NO: 63379 - protein, 352 aa, unidentified
MDYYAGIDVSLEYSSVCVVDASGKIIREGKIVSEPEALIAWFAAFGHALTRIGLEAGPLSQWLYARLKEAGLAVELLETRHVRDAFKSMPVKSDRNDARGIAQLMRLGWFRPVHCKSLAAQEVRALLTARKQVQSKLLDIENSLRGMLRGFGLKVGKTTPSGFAKRIRELVAGHPTLQTIATTLLSVRQVLSQEFNALDKLVRATACASGKAKLLMSTPSVGPIIALTYAAAVDDPTRFKSSKRVGAHFGLTPKKYQSGETDRSGRISKIGDAAVREALYQAAHIMLTKPLAGCSQLKGWAMRIARRAGMRKAKVALARKLAVIMHRMLADGKVFNPNAKTEVKSMAKALAA

SEQ ID NO: 63380 - protein, 313 aa, unidentified
MVAEIFKYSVGCDISKDAFNVCILEVSQDMQSKVKASHKFKNETKGFKEFDAWVKKHKKHDVQTGFYMEATGVYYENLAWYLFEQEYNVFVLLPYKTKHYLKSIGIKSKNDKIDAQGLARMGSEQKHSPWRPHSKSIYILRALTRQHESVTKLKTSLQNQLHANEYSAVRNAIVKKQLNATIKLLEKQLTELSDEISNLIDADEKLNEKYCHIESIRGISKLSWATIIAETSGFETFENQRQLVSYAGYDVVENQSGKHVGKTKISKKGNSRIRRILYMPSLVSVRLKEPALFNLYQRVHERTGIKMKGYVAV

SEQ ID NO: 63381 - protein, 323 aa, unidentified
MTGIICGVDISSSSLEARIGREGAAASFPNHAEGIALLAAFCHSHEVELVAMEATGGYEQQAFAQLSAAGLPVAILNPRAVRQFAQSMGRLEKTDRIDAGMIAWYAEVKQSPPVCLAPQSQQQLRALVTRLRQLTEIRTAQLNQQRLVSERCVRASFTKLLALVARQIRDLEQRIAALIGQDPLWRELDQQFRTIKGVADRTVCRLMAEMPEIGTLSNKTISKLAGVAPLAHDSGKYQGKRAVRGGRAAVREILFIVASVVGRYEPDFMAFQQRLRAAGKPPKVVRIALAHKLLVRLNAKAREVRQRLVALQPGSSALLLQTN

SEQ ID NO: 63382 - protein, 343 aa, unidentified
MQTITTIGLDIAKSIFQVHCVDASGQVVIRRQLKRRHVLAFFQKLPPCLVGIEACASSHHWSRELQAVGHTVRLMPPAYVKPYVKRQKNDMADAEAICEAVTRANMRFVPTKTPEQQSGLVLHRTRHLFIRQQTSVINAIRAHLAEFGVTAAVGRKGIEELLRVIADPSDKRVPDAVRACLAALGNQLLSLKKQILAFDRMILAWHRSNQTSKRLNCIPGVGPLLATALVANVADPKAFQSGRNFSAWIGLVPKQHSSGGRPRLGSISKQGDRYLRGLFVAGALAVIRYAKLHGTKYRPWVAALLERRPTKVAAIALANKLARMAWAMMAKGERYNYPASLRV

SEQ ID NO: 63383 - protein, 336 aa, unidentified
MSYIGVDLHTTQLTVCYLKSLDDYQFKQYRLSEIEAFLASLEAEDELAVEACGNSRWLVSLVERRVSRVVVVNPSGFEVVKRSVKKTDQRDALNLARFLAVDMLPAVRVKSELAEAVGRMNETRNKLVGVKTSLMNKIHALAVSRGWKLKKESLSSKKGLTKVTEFQWTAIERVELEIIIEQIGNLKASIKRLDEVIAETGAQLSGFENLISVTGIGARSAGVLLSVIGCVEDFETADKLASYFGIVPRISNSNERVNHGRITKRGSKMGRTTLVQCALVAIRYSPYLKKYYEQVKGRRGHGKAKIAAARKYLGIIYHTLKNNWVFEDFNNFVLAE

SEQ ID NO: 63384 - protein, 350 aa, unidentified
MEKRSMKHYAGLDVSVKETSVCIVDEAGKVCREVKVSSHPEDLVQVLKDPSWRLERVGLEAGPLSQWLFSGVAEAGLPVVCIETRHTKAFLKAQVNKSDRNDARGIAQMMRVNLFRPVHVKTLTSQKRRALLTARKLLQEKALAIENDIRGLLRNFGLKVGVVGLIKFEERIFELVEGMPELAEIMASLLDARRKLREQVAKLHRKLLSIVREDEACRRLMTIPGVGPVVSLAFTATIDIPARFKTSKAVGPALGLTPILNQSGESNRVGRISQCGDGMMRTLLYEAAQVMLTRTIKWSWLKAWAMNIAKRRGRQKAIVALARRLAVIMHRIWSDGTKFLWTTERAPAAV

SEQ ID NO: 63385 - protein, 362 aa, unidentified
MPDGIRWVGLDVHAHESTIAIFDQGTGELTTRRVVGRPHELMPWLRAVVRPAPMVYEAGPTGYGLARRARAESIELVVCAPGRADRAPTERVKTDKRDAIRLARRLAAGELTIVTVPSVEHEQLRDLVRCREDIRGDLMRARHRLGKFLLRREIYYEGPTAAWTRKHRAWLASLRFADLASQLTIADYLHAHDLLLARRDRIEAELEQLAASSPWTQTIGRLRCLRGIDTLSALGLCAEIGEFDRFEHPDSLSAYLGIVPSENTTGQQRRQGSITKAGSTHARRLLIEASYHYQRNPAIGLTLERRQRGQSPDIVNIAWRAQRRLNARWRTLKHARKKPNGVVAVAVARELAGFCWEIALAD

SEQ ID NO: 63386 - protein, 380 aa, unidentified
MNAPRARIGECRVQANHRSRGEVELAVYVGIDVHKKYCQAALMDESGRIQRELRFDNTLEGASGLVNLARSIDPHVKAVVEPSANYWIKIYDRLEDEGVQVKLSNPLRTKAIAEARLKMDKQDAKTLAYLLRGDLVAESYVPNKKNRERRSLIRHRASLMRMRTEIKNRIHALLDKYDLTYEYTDLFGKEGLEWLRNLTLPSIDQQILQSNLQILETLTTEIRNADIQIAKDAVNEEQAKLLMTMPGVDYYAAMILLSEIGDVKRFASREKLASWVGLAPQVHQSGEARWTGHITRKGSKRARWILTQCAQSARQHDPKMRAFYERIEQKHGSSKAIVAVARKMLAIMYVMLTRNEPYHGENPQLTEQKHKRLERIANTA

SEQ ID NO: 63387 - protein, 323 aa, unidentified
MRFIGLDIHRDFCEVAISEGGKARRAGRVASRPAELELFAQSLGADDRVVLEATGNALAIARIIEPHVGEVVLAHARKVRAIAEAKVKTDAIDACTLAELLAADLVPGVWLGDERTRLLRRLVSRRRQLVKQSTRTKNEISAVLLRTLQGRPPVSDVFGKGGRAWLAKLELAIDERETVDAGLRQLDFLQHELAHVDRTIAEQALASPEIRRLMTIPGVDVTTAAALMAAIGDVTRFPSPRHLAGYLGLEPKLRQSASRSRGRAASPRRARLRQGTRSSKRPGRPRRRRDRCEPSRRAPPPDAAATSPRSPSRASSPCSRGIC

SEQ ID NO: 63388 - protein, 411 aa, unidentified
MEKVYDKCCGIDVHKKLIVACFKKGSKQEIRDFGATTRELLEMADWLKEGGCEMVAMESTASYWKPLYNILETCELKAMVVNACHMKAVPGRKTDVKDAEWIADLLQHGLLTASYIPDKDQRELRELVRYRKSLVGERNRELNRLQKMLEGANIKISGTITDINGKSARNILEHILTGRQIDSAEYDILYEKKIIAHNLKATKEQIIDDLNGVMSELQRKMMRILLDHLDELNAHIKELDDDIDSFMKPEEKKAASVIQDIPGIGNTSAQAIISVIGTDMERFPTDAHISSWAGLCPGNNESAHKRKSGKTTKGNALLRDTLVVCAHSAVKNKNSYFSAQFARISAHRGKKRAYVAVAHSMLVAIYHILKDGVIFKDLGADYYNQFNKERKINAYLKKLKALGWEAPVVAA

SEQ ID NO: 63389 - protein, 348 aa, unidentified
MTIVGCDLHTRKQQVAVLHTDTGEVVEQELLHEGDAVEQFYRTLPRPVTVGIESTGYALWFHELLQRLGHTLLVGEAAKIRAMVVRKTKTDRRDAQHLLDLLKHERFPTVWIPDPATRDLRALVTHRVRLVRIRTMVKNGLQAIALNRRLALGSKLWSQRGRAQLTALDLPRHTAQRREDNLELLTWLEAHIADLDARIADAARAHPSARLLLTHPGGGALTALTTVLVLGPAARFPGRKHVVSYVGLAPAVSASADTCHLGQITKQGSALLRWVLGQAAPLAARADDDLHRLYRTLIHRRGRPKARVAVARKLLVRLCIMVRDQIDYAEFRRRGRLPPRQDLHPRPA

SEQ ID NO: 63390 - protein, 398 aa, unidentified
MKKRKDEYTKVAAVGMDVHYKFTTVAMRDEKSRLVRRERLDHHDRGQLRQVLSRWPKESRFVMEASFGWGWLADLMEEVGLQPELSNCFKVEKMRKARGEPKTNKRDAGLTSRLPFETDEWWKVWLAPPEVRDRREWMRHRTSLVGVQQSTKNRITAVLHRHGIIHEFSDLFGVGGRKFLDELRREGRVGEVFLPSGAWTALDDLLSLLDHARGQLAAIARELRKQLERTPLAKRLDGIPGFGLILVHTLIAEIGEIERFASHRHLASYSGLAPMASDTGESDGKAPLGRHLPPRVNRTLKWAFIEAAHGAVRTGGRWREMFDAATNNGKKNRGRGYIKVARELVKVVYAMWTKGTEYMDKPPSRPGSKSARSRGRRSQDTRSGTGQFYRPMVPASQA

SEQ ID NO: 63391 - protein, 315 aa, unidentified
MSDVPCFIGIDVAKAQLDIALRPSGERWAVPNDASGVAMLVERLQTLHPTLIVLEATGGLERAATSALAAAGLPVVVVNPRQARDFARATGQLAKTEALDARALAHFADVIRPTPRPLPDAQTQELRALLGRRQQLIGMRTAEQNRLAGASERLTKDITAHITWLNVAIATLDDDLETMLRASPLWRANDDLLQSAKGIGPVSAHTFLLELPELGTLTRQQIAALVGVAPLNCDSGTLRGKRTIWGGRAHVRTVLYMSTLVATRFNPQIKVFYERLLAAGKVKKVALTACMHKFLTILNAMLKHRTPWQPQEVQS

SEQ ID NO: 63392 - protein, 443 aa, unidentified
MSQKKQTHLRGERGQAFADKIRGIPLEQVLCVSLDIHKYFHVVMIHNALGEIVTATFEIDIFQTGFDQLCQAIDDAVTRTKAQVVLVGLEPTGHYFENLARHLDQRPQPVTLINSFAVSRNREQQMMRREKDDEIDVAAIGDLLRRGEGTPFQPISGIYLEMQHLSRVRLSKVKMQAALKNQILGHLDRIFPGLVLQGQVVRERYVPLFVADFWSCQTLQHLIRVCPDPRRLAALTPQELRTAFHAHGFALGTQTAAKIITYAQKVLLPDPEVVAIRCELLARDLALLEEVERLVAELEDRLRILLQQTPYWVWTKVKGLSVTQVASLAAAIGDPSHYTHAAQVFRRSGLVSGRNDSGTRRHKGKGKRVVKTGDVYLRQALMTAVISLIRHQPVLRDYFNELLRTKHAGVARVATARRAMGILWAMQRDQHSRTLVLKRGAEM

SEQ ID NO: 63393 - protein, 330 aa, unidentified
MKQYTKFFGVDVSKKMVDIVFTDKEVLVHQKFTNNQEGMGKLTHWLTQNRASPEDTLFCMETTGLYCFTLTHFLCSKSIDVWVEHSAAIKKSVGLTRGKNDKIDAQRIALYATKNLDRLQLWHPQDATLEKIKHLATLRDRLVDTVKRLTVPVREFEAVGNPSMARLLTKSMKKTLDALDSDIAKVESQIIEIVDQDENLRKLYKIITSVVGIGFVTAINLLVHTHAFTIMDDARKLACYCGVAPFEYSSGSSIRGKTRVHSMANKKLKCNLHMASITAVKFDSQLKQYYERKVSEGKNKMSVLNAVRNKLLARVLACVNNQREYMKIAA

SEQ ID NO: 63394 - protein, 386 aa, unidentified
MKTTTLVHESTASAAITTTTTITLLLAFELGERTWKLGFTTGFGQRPRLRSVPAGAVDRVLEEITRAKRRLKLADATPVVSCYEAGRDGFWLHRYLVAHGVTNSVIDSSSIEVNRRARRAKTDKLDLAGLLNLLARYLAGDRRAWRVVRGPTVAEEDARQLHRTWETLQKDRTRLICRLQGLLVIHGVRLPITDDFLAQLEAARLWDGTPVPAGLRARLTRAWQQLALLNTQLDELDAARAALRVDPATVTGRYVTRLPTLRGIGPVGAWVLATEIFGWREIRNARQLGGLVGLVPAPFQSGETDHDQGITRAGNKHVRRLMVQLAWSWRRWQAASALTRWYEEKFGRGSRRLRRIGIVALARKLLIALWRYVETGVIPEGATLKA

SEQ ID NO: 63395 - protein, 309 aa, unidentified
MKEPSVYVGVDVAKEWLDVAWGTERQRVTNCRRGWKQLGDWLGESEVPVHVICEASGGYERGLVKALQGYGIKVSIAQATRVRQFARAAGIAAKTDEIDAQVLCAYGYALRPCVSATLGPEQEKLRELERQRRHLTRLLVAEQTRALQLCEAVTRTSNRSLIRQLTKQIDSIDLLIEKVIDQSEELTAKAKKLTAISGVGRRTAALLLAQMPELGLLNRGQAAALAGLAPLNRDSGKWRGKRTIFGGRRAVRSGLYMAALVATRHNPILAAFYQRLRAAGKPPKLALTATMRKLLLILNSSLKPQSMYA

SEQ ID NO: 63396 - protein, 367 aa, unidentified
MTEHKAMYMAMELSAKKWHLCFWAGSAKRKITVDAGNLEGTLETIKLAKRKLGLAADCQVYSCYEAGRDGFWIHRFLTNSGINNQVVDSASIEVNRRQRRQKTDRLDADKLVTMLFRYWELNERGVWKIVQVPSKEQEDDRQLHRDIERLKAERKQHNVRIRSLLVKFGIKVKQPHRCNLSELRDWCGEPLPEDIAGVLIMEQQRLKLVINQIKKLEEARDQRIAEPRNDSDRKAEKLIRLKAVGPVSGWCLAKEFFGWREFQNRKQVGGLAGLTGTHYSSGDSTRDQGISKAGNPRVRHLMVELAWTWLRLQPQSELSKWYNERYANSTKRMRRVGIVALARKLLIALWKYVEKDEIPEGAVLNRV

SEQ ID NO: 63397 - protein, 342 aa, unidentified
MDIYIGCDLHKRTSNLCIKTKDGRLLLETKLHTTKEAFTTCLRAYTGAHVVFEPVSQSWWLGDILEELGLIVYLANAREVKAIAHARVKNDKIDANVLCDLLRSDLLPESYRSSKVAREWKELVRFRASLVGMRTQIKNKIHGLLGRNGIVAPFGMVFGVKGQAWLKSLELSAVHRMHLDSYLSLLDTYEAAIAKATDQIETTVTADTTTTLLMSIPGISYVSALSIMSEVDTVYRFSDGKQIASYAGLVPSVYASGDTVRYGRLTKRGSKTLRTILIEAAHRQGRLKTAIGLKPYFERIKERKGVRTATVATARKLCVLIYHILESGIPFDDTRLVAGMRT

SEQ ID NO: 63398 - protein, 411 aa, unidentified
MDVRTNEEFITVGIDPHKNTVVAFFFNVTTKEKWTYRFPATPLAITAFAQNCLKRNMLVGIEEGPNAYAIASILKEYVDRLLIICREKRSGKVKTDEIDAEEIAIALATSTYKSRWIPPLALERLRRLIHSRDSIARKVAGQKNRIRSFLAQELIRLEANDPFSKKGIAEMKQLAYKSLPMDKGLNLLIEVVIYEFLSHILRMFDDFLRSLGKDNPVVQTLISMPGIDVIAAVYLIAEMGDPSRFPSPKKLAKYAGLVPSLYQSGERSRNGRITKAGRKLLRWIMVQIANNAVRFPGHIQEFFLRLKAKKGYAVAIVATARKLLCAIWHMLTKNELYRDYVARLYKKKLRALERTKKVELPKAPNLEMLFKEIEKFLKERGIVWKAEEGLMFGLIEHIIDWEMLLPKNLYP

SEQ ID NO: 63399 - protein, 351 aa, unidentified
MKYYQTTTEFNCGIDLHTRQMYICVMNRAGDVLVHRNIRDNDFEFFLKLVEPYRHDLTVTCESCFVCFWLADACEDAGIEFVLAHAYYVKSIAANKHKNDKEDARELAECLRTNRIPPAYVCPRDLRPIRKLLRRRNKYVKNRAVLTGHSTCEVMAAGNQPLNISSNSKERWREGIRDSFDDPLDSFTVDAELFMIESYDRVIMQMEQRIEKYAKNFQLQDYRLLRTVPGIGKILALTILYETVDIKRFSSEKNFVSYSRLVAGTNESGGKDFGGKGRKMGNPYLKWAFMQAAILCKRADKNMNAYFEKLNRQKGKHVANAIIAAKIARAVYFMLDRKTGFSREMLLKGRR

SEQ ID NO: 63400 - protein, 312 aa, unidentified
MAKDTIGIDVSKDRLDAFWHSRTEACCLPNTPEGFGQLCDWLGKEEDILIVFEATGAYHRGLERHLSLAGLPFIKVNPKQARRFAQAIGRLAKTDSVDARMLARMGVVLDLTPQVVEGEDVHDLRELLTARRALVKDQVTAKTRLATALNPLVQEQLARRIEDIAADIQALDEVIAQMARQRGTLEERIRRLMTIPGIGRLTATTMLIDMPELGHLESKKITALAGLAPITQQSGKWQGKERITGGRSSIRRAIYMPALVAIRFNRDLHDKYQQLLKAGKAKKVAITAIMRRIIVLANTLLRERRDWLPDRP

SEQ ID NO: 63401 - protein, 407 aa, unidentified
MDVINRRCAGLDVHKDSVWACVRVEGRQFIEKFGATSSELLRLGDWLVGHGATVAAMESTGVYWKPVWNLLEDRMALMLVNAQHVKKVPGRKTDISDCAWLAQLLECGLLKASFVPPRPQRELRDLTRQRTQLQGDRARVINRIQKTLEDANIKLASVATDITGKSGRAILDALAEGKLTPQQMAELVHRSMEAKKPAMREALVGKVTPHHRFMLSQLLGQIDALDQLILSFDQRIGEVMSPLEKAAIERLDGIPGFDLRTGQKVIAEIGADMSRFATPRHLASWAGMCPPNHESGGKRKSRHINKANKWLKSALTQAAWAASRTRRSYFSAQHRRLTTRRGVKRANIAVAHSLLVVAHCILSDQTTYTDLGAGYFDKMRDPERQAEQMVKRLEKLGYAVEIKKAAA

SEQ ID NO: 63402 - protein, 386 aa, unidentified
MKDETFVPREYDVFAGLDVDKKSIAATFSSPQGFIRSLHMPYSVDYLLNHVRKHFGDQKVAFVYEAGPTGYGLYDGLVAQGYRCLVAAASMIPRAPGQRVKTNRLDSRGLSESLRGGQLKSIHVPSPIYRELRHLTQLRDTVVREAAAHKQRIKALLLLEGIGFPPATAGRQWTLRVKAQLRKLRCSRTVRFKLDQLLDSLEFCEKQVVSSTKEIRRFCKEDVELFQSIEYLMSIPGIGWIVASQLLARMGDWREIDNVRQLGSFLGLVPTENSTGDSVDRGSITRAGDGRLRSKMIQAAWSAIRQDGELREFYRSVCQRNPRGKGARIAIVAVARKLSTRIYAVLKKQRPYIVRKQVHSAPLTQEETSPQGTTRRCAEPGETDNS

SEQ ID NO: 63403 - protein, 324 aa, unidentified
MQGKEASEQETKVQSNVGIDVSKCWLDAHVLPGDERLHVTNNCAGIRHLKRWLSRYAIALVAIEATGKWHRHLHRSLAASAIPVAIVDPYRVRMFAKAQGILAKTDQLDARVLALFATMMAPPVRPVAPQTMAELAELVVARASAVEAQATLKNQFSTAESTFLKRQLDHRISRADKDIAALDREILKRIKADGSLARRYAVLTSIPSFGFAVAATIIACLAEIGSTTAKQIGMLAGLAPIANQSGDREGIRVIWGGRPAVRRVLYLAALSATRFNADMKAFYKRLIDNGKPPKVALIAVARKLVVLANTLVSEDRTWQPSAPI

SEQ ID NO: 63404 - protein, 433 aa, unidentified
MPTNHPYDLVIGLDRSDRKADLQLIDTRNTNTQKQTIATSPEELHDWLARLRQDHPQARVAICLEQPAANLILFLETYSWITLYPINPITLQKFREAFVTSRAKDDGKDAEYLAQLLLSHHDKLKAWQPDDSQTRQLQQLVSHRRAVVDERTGLSNRLKALLKQYFPQALDLCGEDLWRPLATAFLLKWPTLQSLKKAREESLKQFYYLQGSRSQKLIEQRLERIGKAVPLSDEIALLQSYTLRVQLICKELQLLLRTIQQFEEQIAKVFQQHPDRQIFEAFPGAGPILAPRLLASMGSERERFARRENLQCFSGVAPVTKQSGGKCHIHRRYLCPKFLRQSFHEYAKESILHSRWAASYYGQQRNKGCSHHTAVRALAYKWQRIIWKCWQSHSIYKEEIYEAALKKSRSPLIGLLDQIELGKFPVKTRVKKT

SEQ ID NO: 63405 - protein, 341 aa, unidentified
MSIMTIGIDLAKNVFAIHGVDENGKAALVKPKVTRDQRLPLVVQRPPCLIGMEACSGAHHWARLFRQHGHTVKLIAPKFVTPYRMGGKRGKNDAADAAAICEAVTRPNMRFVPIKEEHQQIILSLHRTRQGFVEERTATYNRLRGLIAEFGIVLPQKVTCLRKTIGAHLEDVPGYANRCIGDLLAHADQLDARIADYDQAIAQAAREDARSKRLMQRPGIGPVTASALLASIGNGHDFKNGRQVAAWIGLTPGQHSSGGKARLGRITKAGDSYLRRLLVMGARAILAGLGDKQDGFSRWARTLVERRGYWRAVIAIAAKNARLAWAVLKYGEDFRLHPSAV

SEQ ID NO: 63406 - protein, 387 aa, unidentified
MQAETPATVVATTTPSDVDTLFASLELSKSKWLLTVNSPGGEKFSKHQLGGGDSGSLLGLLARLRTKAEQRCGRPVRVMAIQEAGLDGFWLHRLLIDNGVESTVVDPASIAVDRRHRRVKTDSVDGETLLRTSMAFARGERRVCSMVRAPSPEEEDRRRLTRERGTLLKERIQHTNRIKGLLNGQGVRDYDPLARDRIARLEAVRTGDGRALPQMLKAEIRRELERIEMATAQLAIVERARDAQLRTQAEGRENPAAMLLEIKGIGAEFASLLWLEALFRNFANRRQVAAYAGLAPSPWQSGAIDRDQGISKAGDRRLRRTMIELAWFWLRHQPSSALSRWFQERVGAGRGRIRRIAIVALARKLLVALWRYVAQGIVPKGAVLKAA

SEQ ID NO: 63407 - protein, 358 aa, unidentified
MRIIGVDLHTRQQTIAMLDMKTGEVVEKTLQHEGEKVREFYAALPGPVRVGIEATGSMHWFLNLMEELRIDCQVGHPAKIRTAETRKQKHDRRDAALLLKLLAEDRFPSIWMPSTEQRDLRALLLHRHQWVRMRTIVRNGLQAVALSNGLRLGSSLWSQGGQHTVESLPLAPHAAKRRTELQTFHRQLGGQIEKLHEQISEQALQRPGAQLLMTHPGVGPITALATEVFLGDTARFGNGKALASYVGMIPSEYSSAGRQRLGALSKQGNSFLRFLWGEAAMHAVRKDPDLKRFYRRKLIQKGLGKARMAAARKLGIRLWIMLRDQIDYEEFCRRGQMRQKNGGAYAGIPETDTGSANQ

SEQ ID NO: 63408 - protein, 455 aa, unidentified
MTKQKSQPRMKAPVNALEQINAHAAGIDVGSEEVYVAVPPDRDVESVRSFPTFTADLRQLAEWLKACRVETVAMEATGVYWIPLYELLEEHGFEVCLVNARHLKNVSGRKTDVLDCQWIQQLHTYGLLRASFRPPEEIVAIRSLVRHREMLVQYRSAHIQHMQKALTLMNLRLTNVLSDITGVTGLTIIRAILAGERNPQRLAAMRQAGCKKSEAEIAKSLEGHYKREHLFALKQALELYDFYDRQLKACDAELEAMYSEFDPPEDPGTPPPAPRTRKRRKNQAHFDLAPALYRLTGVDLTQIDGVDELTAQKVLSEIGTDMSKWPTVKHFTSWLRLCPNNKITGGKIIQTGVQPTKNRASAALRIAAASLKNNDSALGAYYRRMRARLGTPAAITATAHKLARVIYFMLKERKPYHDCGADQYEQQYRARILRNLNRRAAKFGFRLEPAVPEVS

SEQ ID NO: 63409 - protein, 428 aa, unidentified
MEQQKNTATSPEPEFAAFIGIDWADKKHYWSLSTGNGKIERGTLDNTPEAVEVWMMEIRRRFEAGPVAVALEQRKGALVTMLGKYGHAYLYPVHPRTVAKLREAWYPSGSKDDVKDADLLLEILTKNRDRLRRLDPDTKEMRLLQFQVENRRKLVDERTALANKLKDTLKIYFPQIPLWFPDVSTELVCDLLTKWPTLEQLRKARPATLEKFFHEHRCRDEETIGQRIEAIRSAVEATGDEAVIVSSLTMVAPWIGQLAVLRQAIRELEKGIADLAEKQEDWAIFDSLPGAGDVMAPRLMAAMGSQRERFESANELQCFSGIAPVKEASGNSVWIHFRWACPKFTRQTFHEWAACSIPQCEWAKDLYDQLKARGKDHHMAVRVIAFKWMRILYRCWKDRVPYREDVYMASLAKRSIPIKKLKAAVQMP

SEQ ID NO: 63410 - protein, 338 aa, unidentified
MYYTGIDLHKFTSFLTTIEPDGNILKKENFKNSPQNFIQYFNSIPGQHLATVESTMSWYWLNDLLDSINIPLVLAHAKYVKAIAYAKVKTDKVDSHTLAQLLRMNYIPVAHKISNQYRFLRDALRARLKIVQRHTSVINSMHLILAKFNFQSPTELNGIPKFQYDQLYELQTLLKEQIIDIEKQLRPFLIPNQDIQRLLWIPGIGIMNAFTILLEVDDINRFPELKNFFSYSRLTPSARNSAGKSKQRASKDGNKYLKVAFSDAAIRAIQYYPVIRKYHSSLLRRKNKFVAKTIIAKEIAQIVFYLLKYKSDFNNKFKGQELIHRKSLQWPRITSPGA

SEQ ID NO: 63411 - protein, 338 aa, unidentified
MAWTVAIGVDTHKDAHVAVALDVLGVELDHCVVEATLAGYKRLLSWAALLGEPAFAVEGCGSYGAGLARFLEPRGYLVCECERPRRGDRKRGKNDLIDAELAARRLLSGSGLSTPRGGGQREHLRVLLVERRGAIQARTAALNQLHALVVTAPDALRERLSGLPNARLVKTAARLRSSPDGLCEVLRRIGKRAECLSREIAEIDQALMRLITELAPQLLAECGVGAVCAAQLLVSSGDAKRMTSEASFAALAGTSPVDASSGKQQRHRLNRGGDRQLNWALHVIAIQRVRRDAETTAYYQRMLSSGKTTREAKRCLKRALARHFYHQLRQLPQTPLTT

SEQ ID NO: 63412 - protein, 437 aa, unidentified
MNFNAAGVDVSPKELQVCVPSDRDEKCNRTFGVYTKDLHEISGWLRRCGIDTVVMESTGVYWLPLFRVLKADGFEVMLVNPKDAKNYAGKKTDEADAHWLMVLHTYGLLKPCFQPENITRQIRTLSRHRDNLIRSSSREVLHLQKEMEQMNLKIDNAFSDILGKSGQAIIKAILEGERDPERLASLADRRCKKSKEEIMQSLEATWDEDHLFVMRQCQDLYEYYKKQIAEVEAEINRLVSQYTAQVDTEKAGKMERSKKQKQLHNEVSFDIEQHAYGLWGVNVMRMPAMSKNSLLRLVAELGAEFTDKFPDARHFQSWANLVPDNKISGGQLLSSRVPKRKNPVGQVFRQCANALCRSKEPLGDRFRQIKARSGHKQAMVAVGKTLAGIFYTMVEEKKEYDATIYTKHRKQVLDRSIERLQAKILRLQNESAACAFS

SEQ ID NO: 63413 - protein, 353 aa, unidentified
MAETLKTAAAVGIDIGKNSFHVVGLDRRGAIVLRQKWSRGQVETRFANMSPCLIGMEACVGAHHLSRRLKALGHDARLMPAKYVRPYSKGQKNDFRDAEAIAEAVQRPTMKFVATKTVDQLDLQALHRVRERLVSQRTGIINQIRAFLLERGVAVRQGLRFLRTELPRILAAPSDVVSPRMVRLIEGLAGDWHRLDERIEGLSGEIEAIARQDAGCERLMSVPGIGPIISSAMVAAIGTGDAFSKGRDFAAWLGLVPRQISTGDRTILGKISKRGNRYLRVLFVQAAWAVLIKPKSWERHGFKSWLETARKRLHYNVLAIALANKLARIAWSILAHGRTFEASKIDEATAQTA

SEQ ID NO: 63414 - protein, 384 aa, unidentified
MSEVIVAVDPAKRSHTVEVLDRDERVLATLRVENTTAGYRELRAFARRWRQRRWAVEGARGVGRQLAQRLVADGERVIDVPAKLSTRVRVLDTGHGRKNDPADAHAVGVAALRRRGLTEMTLDDETVALRLLSDRRRELVRTRTQTLNRIHQLLMELIPSGAPKRLSATKAKQLIATVRPRDVAGRTRRAMVVEMIDDVVILDRKIKAVTKQIRDAVAATGTSLTDIIGVGPVIAATILGEVGDVSRFPSRHHFASFTGTAPVEASSGEVVRHRLTRFGNRQLNHSLHTAAIVQLTHDPRGRAYYDRKKAAGKGSLGALRCLKRRLSDAVYRALVADQAAKSPGGQLGATLQSSAADLIPMASTSEQPLSGLTADLTPEVVAAS

SEQ ID NO: 63415 - protein, 464 aa, unidentified
MPTRPAPPVPPLVPSFQAPAPSAPTRPLSGVGYLGLDVSQAEVTACLLLPDGREAVRRWTVPNSQPGAEALATRVALLAAEQQLAGVSIGMEATNLYWWHLACVLRDTPLLAGLWHEVYVLNPALVAGLKRAYPAGGKTDCRDAFFIAERLRVGRLPAPFQVDVLYAPLQRLTRFRAHLAQSLAREKNYFLSFLWLKFSAFSQEHPFGDPFGATSAMVLDQYAVEDLVQWPVNELAAFLQQQGRGRFEDPAAVATALTRAARDSYRLDHVLAEPVSLVLATTLTTIRTLQAQLKLVDKTIARELAAIPPVRRTISSVPGLGPVWTAGLVAEIGNIHRFADDGAVARYAGLVWHPYESGAFQAQDTSMSKAGNAYLRYYLVEAANSVRLHCAEYQAFYAAKLAQSPKHDHKRAVVLTARKLVRLIDALLRAGALYQPQDREEGQTAPHAARPRPQRRARLATAAS

SEQ ID NO: 63416 - protein, 346 aa, unidentified
MSYLGVDLHTNSFTVCRRTKQGKNSIRTFRITRIADFRKTLRKRDLLAVEATGNTAWFVSQVRDRVKKVTVVDPFKFEVIRRSAKKTDKNDARTLALFLSKDMLPEARMKSKEESQLHSLATTRDKLVKQRTALINKVHNVLNSYGIKFKKEALGSEKGLKSVWSYHWDIIVRIELEVLIEQIRSLNKSIKILDKEMTDHGQKLKGHKNLTSIKGIAGRSATVLLSVIGDINDFADENKLSAYFGIVPRVSDSNETVRHGRITKHGSKLGRTTLVQCTLVAKRYSPYLRRYYERIKSHRGSGKAIIATARKFLGIIYNTLKNDWVFEDFPNFVLASSCAKKQKILE

SEQ ID NO: 63417 - protein, 362 aa, unidentified
MFTERTSVGLDVHARSVVATAIDTTTGELFKERLVPSNEVVLDWLTRLPGPVAVTYEAGPTGFGLARAMTGSGIRCEVAAPSKLSRPAGDRVKTDARDALQLARLLRNDDITSVRVPTVTQEAARDLVRAREDVRGDLMRARHRVSKLLLRHGHVYYGDKTWSKKHHAWLHRIRFAELGTRCAYEADLEAIEFAVARRDRLDALITQMAADSEFTAVTRRLCCLRGISTLTGFALAVEVGDWTRFNGHSIGAYLGLVPSEHSSGQSRRQGSITKTGNSHARRLLIEAAWHHKARYTVGPVLRARWDQAPEPARVRAHVANTRLHQRWASYTRRHKKHTVANTAIARELAGWCWSLATLEQAV

SEQ ID NO: 63418 - protein, 417 aa, unidentified
MQHPNMAHVYVGVDIHRRTHTATIINCFFEKLGEITFRNRPSEFPMLEAEVAKHTAGGLTPIYGLEECASLGRELTVYLLGKGHTVKYVNPSLAKSERNSQASLHKTDSFDSLCVARVLLAKLGTLPDARTDDRLFALNELVTKRSYLVKMSVALKNQLHNHISHHYPSYKQFFSAFECKTALAFWENYPSPRKLKEAGLIGLTKLLQEESHHFYALDKACEIFASVEEDGYMGNEMQDTCDFIVTLSVKQLREVYEYIALLDEKIKGLLPSFGYKLHTMKGISHTTAAALIVEIGDIDRFKTSSQLAAYAGVSPAEYSSGLSERNISNKRGNRNLNKLLFFLAVSQINDHGPKGGPFNGIFAEYYQKKMAEGKTKKQAIKCVERRLINIIFRLMKDRCEYKPPALPCEKSLPQKIV

SEQ ID NO: 63419 - protein, 418 aa, unidentified
MGKINERCAGIDVGKRFLLCCVLTGAAKEEPSMRTLRFDTTVAALIRLREWLLAERITHVVMESTGSYWVPIFNILEDHFVVVLANPEEVKNRKGHKTDRKDAEHLADLLRHDHLRSSYIPPKAVRELRDLTRRRLQLTQDATRERNRVEKLLEHVNIKIGNVLSDVFGVSGQNMLLALIDGNATPEQIAGLARGQAKRKIPQLTEALNGHGMSDHERFLIRSCLRHMACLEEELEEVDGEILRQMQTPLFQEPFLLLQTVPGIGQLAAAAILAETGVDLSPFPTVEQIASWAGLCPGNRESAGIRKGSQTTNGNPYLRTALVQCAWAATRKQGSVFQARFQQLSPRRGQKRAIVAVAHQMLTILYRMLKQGIPFRGSETAPQQRRRQRRAHHHLRCLRRLGLAVQIVAGTDLLNATS

SEQ ID NO: 63420 - protein, 340 aa, unidentified
MKKRYFGIDLHRNRFSCCVRLANGRTYFSEWSLEQLPRFVKKLRPTDEVAVEVTGNTRLFHDAVAPHVARVVVVDTNQFRVISRSVKKTDERDAALLALYLSKGLLPEVRMKDKQHGQLASLTQTRDTLVKLRTSLKNKVNNILSARGINLRKEALSSEKKLREVLSLPFDEIVLVELGVLVDQIRSLNKSIAELEKTIGEEGSKLEGHKSLTSIKGIGKITGAILLSVIGDVNDFPDESRLASYFGIVPRVWNSNETERSGRIHKRGSKLGRTALVQSALIAANYSPYLRSFYERVKARRGTGKAIIALARKFLGVIYRTLKNRWVFADFPNFVLAEGA

SEQ ID NO: 63421 - protein, 319 aa, unidentified
MGTSQVLFDQVVSRGCGLDVHKKVVTATIDGEGVKKQTRDYPTITSSLKELRDWLLGNGITHVAMESTGVFWKPVYNVLEPAGLTVWIVNAAHIKYVPGHKTDKKDSAWICKLLLAGLLKPSYIPPKEQRELRDLTRYRTKLIQGNASNKNRIMRQLEDANIKLSSMLSSTSGVVATKLINKLCDGKEVTMQDVEEVYHKKIGASKEDIYEACQGFITEHHIYMIGIHRQEIAHSEQTIANLNGRIREILQPYDNVLELLKKVPGISSKSVEDLVAEIGLDMSVFPSEKNLASWAGMCPGNNESAGKKKAEEPPREINR

SEQ ID NO: 63422 - protein, 403 aa, unidentified
MNAVGIDVSKGKSMVTILRPFGEIVSSPFEIKHTSSDIHSLIKLIHSIEGESRVVMEHTGRYYEALAHQLSAADLFVSAVNPKLVKDFNNDSLRKIKSDKADSVKIARYALDKWQSLEPYSITDELRTQLKVMNRQFHFYVKQKTAMKNNLIGLIDQTYPNANTYFNSPTRSDGSQKWVDFVSTYWHVDCIRKMSLNAFVEHYQNWCKRKKYAFNKSKAEEIYTKTKELVPVFPKNEITKHIIRQAIDQLNSTSVTVETIRTLMNETASKLPEYSIVMQFKGIGPSLGPQLMAEIGDVTRFTHKGALTAFAGVDPGVNESGSYAQKSVPTSKRGSSHLRKTLFQVMDVLIKTMPQDDPVYQFMDRKRTQGKPYYVYMTAGANKFLRIYYGRVKEYLSVLPDPS

SEQ ID NO: 63423 - protein, 428 aa, unidentified
MTVKDCTNVKEFWQLKKEIRGSKDHLIVGIDVAKDDHKAFFGTANGKTLLKRLIFKNDIEGFEKLLARVKEMKVRHRLDELVLGVEPTANYHKALGDYLVKCGHMVVLVSGVSVKRNRELLDGRWDKNDTKDSANVADLISQGKCLYYEYAPLVLKDLRGLLSLKRRLKKQEHGLRIRIRNSLLAQYFPELDKYYRKWEPEILSVVRWCLDPSVIAGLEYDQFVSLVSPGRKNIRQQGRLEWIWKKAIDSIGCDAGEAAEFEAKVMVEELRHIREVIKETDAKIKDVCVKFPEYDYLLTIPGFGPDVSSKVLAAIGNPFRFNSGKQVLKMSGYDLSAKRSGKTSESAVPVISKKGKASLRYALYQAAFIASCKNKYFIAYYTNTLRGREREKGIKTKMKVKLAAKMLVIAWTLMKKKEPFDPGYLKID

SEQ ID NO: 63424 - protein, 372 aa, unidentified
MNYNTVYVGMDVHKESFTLCSCKYEDEKASHYQRTPASYKNVLRYLAFLRTIYGEDTRFVCGYEAGCLGYSLYHQLENFNVECVILAPTTMLEQRSKRRIKTDKRDAEIIARSLAQHNYSPVHIPTETDNQTKEFIRMRDDHKAELKKIKQQILSFCLRQGYQYDGSGNWTAKHVKWLRSLKPAGLYKEILDEYLLTYTILTDKLNRLDQRIEELASKEEYTESVSKLTCFLGIKTHTALSVIVEVGDFQRFVSVRKFAGYLGLVPGQHSSGDDRNGLGITKAGNTHVRRLLVESAQSYTRGKIGYKSRVLRSRQAGNSPQVINYADRANERLRRRYYKMVLKDGKKYNIAKTAIARELACFIWGMMTDNIY

SEQ ID NO: 63425 - protein, 422 aa, unidentified
MEHHSEAFVALDTAKLRNAVAIADAGRDGEIRYLGEFDNTEAATRKLVAKLASKHARLTFCYEAGPTGYGLYRLIKSFGHDCMVVAPSLIPSRPGDRVKTNRRDAVNLVKLLRAGELTAVWVPDERHEAMRDLVRARDAAVKDYKIKRQNVSSLLLRLGRHYPGKKTWGRAHINWLTSLKLEHREQRIAFEEMLLAVRQVRERIERLEQAMREAVADWALAPVVEAVQALRGIDMVGAVAFLAELGDLSRFENPRQLMAYLGLTPSERSTGESVKRGGITKAGNTCARRLLIEAAWSYRFPPRVSKDMQTRIGAAPRTAREIAWKAQMRLCGRFRTLTRKGKRPTIVVTAIARELSAFIWAISREPRPSFLRLWARTMRTALPSNSKSTSVWGRSPACSRISAGIVTWPLEVIRIVSPYSYM

SEQ ID NO: 63426 - protein, 349 aa, unidentified
MVIVGIDAHKRTHTAVAIDEAGRKLGEKTTHATTTEANLELVRWAGGFDPERRFAVEDCRHLSRRLEADLLAGGEELVRVPPKMMAHARDSARTYGKSDPIDALAVARAALREPKLPIARLDGPSRDLRLLVDHREDLVRDRTAQINRLRWHLHELDPSWDPAPRALVRFKHLDGLAARLVGLEGTVAFVARDLVARIRELTVAANDLQRLIVEKVARLAPALLEIAGVGALTAAKIVAEVADVRRFRSKDAFARHNGTAPLPVWSSNRIRHRLSRTGNRQLNAAIHRIAITQMRIHDDAKVYLERRIGMGNTKMEALRALKRQLSDVVYRALMTDAVSTQAACFGEAA

SEQ ID NO: 63427 - protein, 343 aa, unidentified
MEYYAGIDVSLKESSVCVVDTNGKIVREAKVASEPEALCDLIARLGFFVSRIGMEAGPLSQWLREGLADAGFEVVLLETRHVKAALSAMTVKTDRKDARGIAQLLRMGWYRPVHAKSAACQEVRALLVGRKLLQAKLLDVELSIRGILRGFGLKVGEVSRGRFEARVRELADGHAMLETVIGAMLQARAALWNEFTRLHREMLKIARTDHVCRRLMSVPGVGALVAITYRSAVDDPERFTRSKTVGAYFGLTPKKYQSGETDIDGGVSRVGDAMVRTALFESAHIMLTRATRFSALKRWALGVAKRRGMKRAKVALARKLAVVLHRMWVDATEFRWSKDAATA

SEQ ID NO: 63428 - protein, 350 aa, unidentified
MIIIGCDYHPGFQQIAFVDTETGEFQEQRLAHREEAEKFYRDLAARGGKLRVGMEASGQARWFERLLAELKIELWIGDAAEIRAKRVRKKKTDREDARHILRLLVEDRFPRIWVPSWENRDMRQLLWHRHRLVQMRTRIMNQLQAVALNEGLRCKKRLWRQNGRKQLEAFPLAPWASRRRRDLLELLDRLNPTIAELTHEIEQEVEKYPTAQRLMTHPGVGALTALAFVLIIGEAERFQCGKQIAAYLGLVPEEDSSGESRRLGHISKQGSGLMRFFLVEAAQVTVRSDAEWRSKYFHLAMRRGRKIAKVAMARRLAVRLYWMWRQQWDYEQLKKFGPHAGQPGTGVGVK

SEQ ID NO: 63429 - protein, 415 aa, unidentified
MVDVIVERCAGLDVHRDTVVATVRLPGKGKSRLRRSQETRTFGTTIGQLERLSDWLSECGVTRVGMESTGCYWKTVFYALEDRFECWLVNAKHLRNVPGRKSDVIDSRWCCELVELGLVRPSFVPPPEIRRLRDLTRLRSTQVQERTRTIERLEKVLQDAGIKLTSVASGVYSVSARAMLEALLGGVTDPFVLAELAKGRMRKKIPQLQEALASRFDVTHHGVLVAGLLAHIDALDQATGNLEARIGIATAPYADLIELLCTIPGVGVRIAEILIAECGVDMTVFPTVAHLASWAAICPGTNQSGRKRGSGKTRNGDTWLCTALTQAAHAAVHTKNSYLASHYWQLRGRRGEAKAIGAVRHDILTAYYHIVRDRVAYRELGPDWLTRRHSPEHRTRRLVKQLEALGHHVTLQPAA

SEQ ID NO: 63430 - protein, 415 aa, unidentified
MDRQKTVAGLDVHKDSIYLCVMGHDEAIIFQKTYGTLTPDLRQMCADMVSHGVTEAAMESTATYWVPVWNALCDSMSLKLVNPFFIKQLPGRKSDVKDAQWIAECLLKNLIKGSFVPDSVVQDMRKYNRRIFDLNDDMVYNTNKLDAALQRCGFRLSNYVTHVKGKSYQSCISAIISGITDPFELAKLVHGRTINKHGKDVVMAAVTADFHQADIDLIRQYKEMIDIIDRQIKECQSALTALCKEHFPTQYERLQTIPGVRERAATAIIAETGADMSHFHKSTNLVGWCGLRPRNDESNRKIKSNKITHGNKFLRKILIEIAWTASRTRNCFFSNFSYVQCTVKRKTKMKVQVAIARKILVAVWHMFSNDENFFDVYLKRLEKEAEDSDFFKNPFNRLNCPWSTKIIHNIPLPTT

SEQ ID NO: 63431 - protein, 324 aa, unidentified
MIDGILGIDVSKNTLDASMSSCNKVRARSFANSSDGWRHLLDWLITQKIRRVHACLESTGRYSLGIACALYEAGHVVSIVNPAQIRDFARTKLGRNKTDGVDASHIREYCELFKPQPWAPPSEAHRRLGELQTIRAGIVAGLTEWKNRKNSGMVDAVAQSLADATISHFTSQLGAVEKAIAQTIDNDSSLRRKRDLLLSVSGVGETLAGVVLAELPGPDVLRSSAEVVAYAGLNPRQHQSGTSIDRVTRISKIGNAVLRAALYMPAMSAMRFNPAIVALVTRLKSRGRLSPKQIVVAAMRKLLVLCFGVLKTGKPFDPAMAMGC

SEQ ID NO: 63432 - protein, 309 aa, unidentified
MGTYVGIDVSKDRLDVHVLPQDEAFCVERNGKGLAALVERLKPLAPSLVAVEATGGFESTTAAAVAGAGLPLAVVNPAQVRHYAQALGKRAKTDPIDAKVIARFAADVRPEPRPLPDEMTQLLADLVARRRQIVEMLQAERQREKRAAVKRLRKSIARLIAALEKELAELDHDIDDAVRGSPVWREKEDLLASVPGVGPSTARTLIAELPELGTLDRKQIASLAGLAPYTRQSGTWKGKSMISGGRKAVRTALFMAAMVGARFNPVLKAFRDRLVAAGKAKMLAIIAVARKLLTILNAILRDKTPWQHA

SEQ ID NO: 63433 - protein, 374 aa, unidentified
MIMTNVTFPQLIQRGCGIDIHLKVVVATIDGVGIQKETRSFNTFTSCLTEMKEWLLANGITHVAMESTGVYWKPVMRVLEEEIPNVWIVNARHIKNVPGHKTDKMDSEWICKLLLAGLLKPSYIPPKEQRQLRDLTRYRNKLIQAMAAEKNRMMRVLEDCNIKLSSVVANTSGVTATALIDMLCEGRKLTIEDIESVYHKKLSASPQELLEACTGFVEEHHVYMLQMIRKSIAQTQGLVNELSKRIKDILVKYDNVLELLKEIPGFNTKVVEDLVSEIGLDMSAFPSEKHLASWAGICPGNNESAGKKKRKNNSRQQTSKGCPDRGSMGCDPYQEHILQRTLPPHQCQTWEKACLDSCCPLSIDCHISDTQHRS

SEQ ID NO: 63434 - protein, 339 aa, unidentified
MDITTIGFDLAKTVFQVHGADGEGHPVLRRKLRRGKVLAFFAGLPSCLVGMEACASAHYWAREIQALGHEVRLIPPQYVRPFVKTNKNDAADAEAICEAVTRPTMRFAPAKSAEQQSVLMLHRARELLVRQRTMVINALRGHCAELGLIVAQGASRVEELIAIIEDPDDARLPPLAREALGMLVAQLRSAQARIKELEVALLAWHRSSEASRRLATIPGVGVITATALVATIGDGAQFRSGRQLSAWLGLVPRQHSSGGKDRLGRISKRGDGYIRRLLVHGARTVLRWRRAKPDTRPGWTDQLLARRPTNVVLVAMANKTARVAWALLRYERIYQPVSA

SEQ ID NO: 63435 - protein, 343 aa, unidentified
MKAKRYIGIDLHRNCFTACLRLENGREYLKTWKLERLETFASKLRPTDEVAVEVTGNTRLFHDAVAPHVGRVVTVNPSQFKVITHSVKKTDPNDARNLALYLAKDLLPEVRMKDKTRAQIASLTQTRDSMVKLRTALKNKVNNICSAHGVNLTKESLASEKGLKAVLAMQFDPLVNLELRIIIDQIRSLNASIAELEETIGQEGRKLEGHQNLTSIKGIGGLSGSILLSIIGDISDFADEGKLAAYFGIVPRVANSNETEHSGRITKRGTKLGRTTLIQCSLIAQRYSPYLRTYYEKMKGRRGTGKAIVALARKFLGIIYRTLKNKWVFDDFPNFVLAEEATA

SEQ ID NO: 63436 - protein, 315 aa, unidentified
MSKIRFVGLDVHADTIAVAVAEPGAEVRAVSVIPNKLKAVRKLVSKLGPVHQLKVCYEAGPTGYVLYWQLTRLGVACEVVAPTLVPTKAGDRMKTDRRDAEKLARCYRAGELTAVGVPDAAHEALRDLVRAREAAKKDQLRARHRLGKFLLRHGQRPIEAGKAWTKKYLEWIKTHVRFDQPALEATLAHYLHEVEHAAEQILKLEKAIDEAVAQTSPEIRAGIEALPALRGVAQMTAATIVCELGSFSRFQSPRQLMGYSGLVSREHSSGNRIQRGAITKTGNAHLRRVLVAAAWAYQHRPHVTGFLLRRQKSLV

SEQ ID NO: 63437 - protein, 407 aa, unidentified
MYFRKKMLAVVVADSAREGELHFERRKFLSGPGELRKLAEWLDQLQVQEAVMESTAQYWQPVWQALEGRCHLELAQAQSNRGPRGRKSDFRDAERLVRRYMADELILSFVPDPEQRLWRTLARTKQQLTHDKARLQNRLEALLEEMRIKLSSLVSDLLGVSGRRMLKALADGEKDAARLAALADSSLRATQQQLCDALSAAATLNGHYRRVLRQFLDRLELNERQIAELEQELATTLKEHESAVARLAEVPGLGVDSAQQIIAEVGPKAETFPSAAQRCSWVGTCPGKEESAEESKSDRSPKGNRAMRRILNQSANAAVKAKGSVFQGLYRRLKGRNPKGHKRAVWAVANRLCRIIWKILHDGVRYQERGSGPNTRAVRKRAQRLLRELRGLGYQVQLTTTQHAALT

SEQ ID NO: 63438 - protein, 427 aa, unidentified
MQYALPQVLPDVPAGGVCAGIDWATADHAVCVVDLAGRVTDRFSAAHDKAGIAAIITRLRRGKVTEVAIERGDGPLVDALLGAGMTVVVITSRQVKNLRSRFGAAGAKDDRFDAFVLADTLRTDRARLRPLVPGMPATISLRMAVRARRDLVAHRVAAGNQLRAHLAVAFPAGTRLFHDLDSPISLAFLARSGSQDAAAGLDEQAIGAWLATIAVRGRPAPASELHARLQAAPPGATGTDGAARAGVTAALTAALTALSAQIKSLETQIAGQLAAHPDGPIFTSLPRPGTVRAARLLAETGDCRSRFPDPESLAGLAGVAPVTRRSGTRIAHGFRWAVNRQLRDAVCDFAAGSRHASPRAAAIYDDARARGKDHPLAVRITARAWIYVIWRCWHDGVAYDPAKHNALRAILAGQAAQAAGPAPQEDQ

SEQ ID NO: 63439 - protein, 420 aa, unidentified
MPKYSTAFGMDVHLRSTTVCALDADTGEAVTRRFPGNPWGEVAGWMDGFPGPSLAAYESGYLGFAPQRELAGLGVECVVAAVSKIPRSAADSASKNDGNDAARMAKAILARDISPVWVPSPEVEGIRDLAGAYDGATARLATAKQRLLAFLARRGFVYGGTTPAGNPRKYWTYDFLRWLDKVRPEGDGGVRTLAAPRNEVEAAAEARADLLSEYRAAVDASPIAAEAAALQSIKGCAFALAAAFSAEVGDFARFRSGRQVTAYFGLAPSQRSSGGSVRLGGISGAGNALVRKLAVEGSWCYAAARHQPKLMPRDTGVPLEIRMHGRKGSERLLRRREEMLARGEGQRGHRGRAREVALGPRRDVPGGRGIDMAPVPASRAAFGDTPYFAVRAEPSACASTELGNPAEGMECGPTERYPRI

SEQ ID NO: 63440 - protein, 366 aa, unidentified
MDDQLQNEVVLGVDTHLEVNVGAVISHTGKFLGTFAAETSARGHLELVEWARSLGCIRRAGVEGTGTYGAGLARVLREQGIEVLEVNRPNRSKRRLRGKSDPTDAENAARAVLAGEATAIPKSQSGGAEAMRTVSVARRSAIKAKTQAINQLRAILVSAPQEIRERLWKTKAEKCVAACADLEQLGTTTVLMALTTTLRLLAKRWLTLADELKELDNTLDKLTSQFAPSLRQQFGVGPQTAAILIAVAGDNPERLRSESALAALCGVNPLPASSGKTIRHRLNRGGDRQGNNALWTIAMVRMRSEPRTRAYVERRTTEGMSNKEIHRCLKRYLVRELYRVILRDLQVAGSTSVSSGCKLIQAAIEN

SEQ ID NO: 63441 - protein, 434 aa, unidentified
MDEVGDEPLYRDRVCGIDIGKAGMAVTIRVPSGKNPGRRMAETRTFGTTRREVLALAGWLRCWQVPAVAMEATGDYWKPVYYRLEAEGFECVLADAKQIKNLPGRPKRDPSDSAWIAVCFERGSITPCFVADPEFRLIRLHTRYRRDLTGERTRDKQRVEKLLEDAALKISSVLTDLHGMTGRDIMDHLIAGERNPEVLARLARKRARAKIAQLEEALEGAEFFTAAHAGLLKAMLERIDRVTAEIGQLGQVIEELLAPYEEQLQQAESMPGWARRSAQDAIAETGADMTRFADGAHLASWAGRVPLDRQSGARAGKARRKRGNRYLGAVLGETAVAAGRTQTREGTRHRRIARKRGAARACVATGNTQMKVFYALLSNPGTRYTDLGPDWNDNARQAARRIKHHIGALGAMGYEVTLSRTPQAAPGQEPAPAT

SEQ ID NO: 63442 - protein, 350 aa, unidentified
MMIVGCDLHTRYQQIAMLDDQTGELTERRLEHEGGQARAFYAGLASPVRVGIEATGYTQWFERMLGELGQELWFGDAAQIRASAVRQQKTDQRDAALILDLLLTNRFPRIWVPSAAERDLRQLLWHRHKLVRMRTMVGNQLHALAMGQGVCRRAKLFTKKGRAELAGLGLGPWASRRREELLRLLDQLDPSIAELDRAVLEQARGRQDAVQLMTHPGIGPVNALAFVVTIGPVRRFRRSKQVVSYLGLNPSEHSSGGRQRLGAISKQGNTLVRWLLLEAAQHAARFDPQLRQDYQRLKFRRGSAVAKVAIARKLAVRMYWMLRSGADYARLVRMQGSPGATLVSTATPLG

SEQ ID NO: 63443 - protein, 373 aa, unidentified
MSNGTSYVAMDTSKRFFAVAALYAGQPGYTEWEVVNEPAAIKRMVRKAQREAGGEVVFCYEAGPCGYALQRQIEAMGVRCVVVAPSLIPVKPGQRIKTDRRDARKLVELFKAGLLTQVRPPTVEEEAVRDLVRCREDVLEDLARCRHRLGKLLLRRGYLFGPGRSNWTLSHRRWMLAIRWEQEADRVVFSDYLLAVDQAQSRLADLTAQLEAFAQKEPYSMAVGALVCFRGISTVTAMTIVAELHGIERFTSPRQLMAYLGMVPSEHSSSEKVSRGSITKAGNVHVRRVLVEAAHQYRHSPSVGAILRKRREGKPASIIALADKAQQRLYRRYRCLFLRRKPYSKLIVAVARELVGFVWAALQESAAIRRQAA

SEQ ID NO: 63444 - protein, 316 aa, unidentified
MDISILGIDVASRKLDLAWSDESGFQHATVDYTTEALDAFLASHPSCTSAATTVGLESTGDYHLAASQYFIAAGFAVRLLNPILTKHYTRLTIRGAKTDVRDAELICRLVADGHDTSLSWHDVTNRPKELLRLSQHLTRVGAQLKQRLGSTRRKQIPDTKRIEAKLERLIGRVKKLSDELVAEATKNQSVEERLITSIPGFGTKLAALVHHELGEINRFRNVRALIAYAGLEPRMRQSGARLNTTGRISKRGSAELRHALFIAANVACRWEPELKAYYQMKRAQGRTHVEALCIVSRKLLRRINAVLRERRPYLSR

SEQ ID NO: 63445 - protein, 338 aa, unidentified
MLYSGIDLHKHSLVIHTVAEDGTTVREAEMATARPALTSYFATLPGPHRAVVECLGSWYWVRDLVVPQGIDLRLGHAKYLKAISYAKVKTDRVDARTLAQLLRVGLVPEAHMISAELREVRDLLRARLKLVTRATRARQAISGLFTQYNVRVASELPALVQLQVRLLEDEYALLAGQVKRCEQELRPRLLPRADVQRLVWIPGIGAVIAYTLVLEIDDVHRFPTARHFHSYCRLVPGADNSAGKTRHKRSRDGNRYLKLAFHHAAVRAIQYVPEIKQEYQRWRRRKGKGIARALVAKELATIVYAVLKKEEAFNGTFKGHVLTTTKRSQWPRLASPPA

SEQ ID NO: 63446 - protein, 342 aa, unidentified
MDKVSIIGIDLAKRVFQAHGAAPDGSVVFRKKLSRGQLLLFLAEQPRCTVAMEACATAHDWGREIGKLGHEVRLIPPIYVKPFVKRQKNDAADAEAIAEAASRPTMRFVAVKSEEQQARSMIFRTRDLMVRQRTQLINALRGHLAEHGVVAPQGTAHVKRLADVIGDETTALPATVRQIGSLYLEQIDVLSGRIDELGKKLRAEAGQAEATRRLQTMPGVGPITAVAIESFAPPMETFRRGRDFAAWVGLVPRQNSTGGKQRLGRTAKMGQRDIRRLLIIGAMAVVNSAARHGAPEGSWLERMLAKKPKMLVAIALANKMARGVWAMMTKQQDYRYPEAVAA

SEQ ID NO: 63447 - protein, 342 aa, unidentified
MEQIRVVGLDIAKSVFQVHGVNGEGAVVVRRQLKRSRVVPFFGSIEPCRIGIEACATSHFWARELGALGHNVKLMPPAYVKPYVKRQKNDAADAEAICEAVTRPTMRFVPVKAVEQQGVMVLHRVRELLMGHRVRLSNAIRGHMAEFGLIAPIGRIGLQRLIETINDETDERVPPGARLCIKMLAAQLQLVNAQVLENDRQIKTSARATEVGRRLMEIPGIGPVIASALVATVPDPKAFRCGRNLSAWIGLVPRQNSSGGKERLGGITKQGNRYLRKMLVVGAMAVIRYAQRNGTRRPWLVQLMARRTTKIAAVALANKTVRMAWAIMVSGERYREPVALAA

SEQ ID NO: 63448 - protein, 371 aa, unidentified
MNSILYVGMDVHKENYTLCCYSFDNDQLQYKQTIAPDYKMVLKYLESVRKRYPEEIEFVCGYEAGCLGYTLYHQLTDHGVKCVILAPTTMAVTNKNHIKTDKRDAGNIARCLAFHTYSEVHVPTPEDESVKEYIRMRGAQKKLLKTIKRQILALVLRMGFRFADGRNYWTVKHVAWLRSLNLGGVLQESLQEYLVTYDYLTDKIERLDKRIEELAGDERYRDKVKKLICLLGVKTLTALAIIVEIGDFVRFPKAENMAAFVGLVPGEDSSGGKQNRGPITKAGNSHVRRLLVEAAQSYTRGRIGYKSKDLKRRQDGNTPQVIAYADKANERLRRKFYRMVLNNKANRNVAATAIARELACFMWGLMTDNIA

SEQ ID NO: 63449 - protein, 338 aa, unidentified
MQYVGLDVHKHKVYGVIMTEQGKIIKEGLFPNKKESYLAFLKGTGEASIALEALSFSHPPYDLLEEQGYTVKLAHPLKTRAIAEAKIKTDKIDAQILAHLLRSDFLPTSYLPPPDIRDLRNMVRQRAYLVKLRTELKNKIHAELHKHWIEAPYKNIFTQQGKHWLHTLKLPSIHPYLSLLENLEEQITDSSTQITTRAKGNRDAQLLMTIPGIGPYSALLLVAEIGDITRFRDSHKLCSYAGLAPSTRQSGHNIHQGHITKTGDKWIRWVLTQSVHIHIKYNTHLTQFYHHIAQRRGKKIAIVATASKLLRVIYWMLKNQEEFHPSGLSHNGSSSFYL

SEQ ID NO: 63450 - protein, 401 aa, unidentified
MRFAGIDVGAERHMVAMVGEQGEVLCRSSPFGEDASGYAHLFELLGPPGGCLLALEATGHYWRNLFVALLAKGYAVAVLNPLRTRRFAEEELQRTKTDAIDALGIARFAAQKRPPATQLPDIATEELRELSRLRDRLQEDFASRLRQLHRAVDLGFPEFTRHVRTLESQLASTILSRYPTAASFRGASVKKVGRIVYDGSHKIGEELARALIEAAANSVGSHHSEPYRLRIEYLCEDLRVLRRRLKDLARDIESKLDDHEVGKLLTTIDGVGPLTAACLIAELGDPARFRSAAAIASYVGVAPRLRQSGKKRFSGSPTIPFGNARLRKALWMVVLNAVRCNPWLRQYYGRLRAAGKPGKVAVIAAMRKLLAAVWSVAIHRRPFVPHLSPIPATADAVTNNV

SEQ ID NO: 63451 - protein, 343 aa, unidentified
MLTNNVIAIDLAKNVLQACHISVHGELLSNKPLSRQKMKEFLAKAKPSIVAMEGCCGCHYWGQLAEKHGHQVRIINPKKVKGYLEGHKTDHNDALAIANAAIQIGIKYSRPKSLEQQSMHSLESSRRFLSRCVVSLGQHIRGTMLGYGVANPRGEKGLKASVQTALDGETSIPANVVSVLSMLWNQYKELKAQLIAFEKEKNALTRQIEPCQRLMEIEGVGETTAAMLYTTLGDGKQFNNGRQASAFVGLTPKQHSSGGKVFMIGIDKCGGVKELRSLLCLGAMSYVGRLPEKPKTQKDAWLRSIIDRIGFKKACIALANKVVRTAWAMLRYETEYKPVLLAN

SEQ ID NO: 63452 - protein, 343 aa, unidentified
MSITMIGLDTAKSVFQIHGVNETGKAELKRKVRRSDLIAFFEKQECCTVVMEACGAAHHWARVLTGLGHTVKLIAPAAVKPFVKKGKKNDAADAAAICEAAARPDIKFVPIKTVEQQGILALHTARALLTKQQTMLANAIRGLATEFGHVVAKGLHNLEPLVALVGADDAMPEQARQAIADLFKRFGELATGIQSCEAKIVKHARNDATARRLATIPGIGPITASLIAATVVDISQFKSARQFAAWLGLVPRQNSTGGKTRLGQITKAGNKEIRKLLVLGATSMLGHAEGWHSALGAWLRDILQRRPARLATVALANKMARIAWVVMTRNEVYRPAGGVAAKA

SEQ ID NO: 63453 - protein, 368 aa, unidentified
MSSLRFVGLDVHQATISVAVAEEGQGATRFVATIPNEPRAVRQLLRRLGSARQLRCGYEAGPCGFAPYRQLTDWGISCQVVAPAELPRKAGDRVKTDRRDALKLALGLRAGALTPIWVPSPDDEALRDLVRAREDAQQDLLRHRHRLSKFLLRQGIKAPMQAWSQKHRVWLASLAWPHRAQQVTFDDYQLAIDQATDRTARLDRQLRDLAGESRFVAIVAAFEALYGVGFVTAITVATEVQDFRRFRPRSLMGYSGVCPSEHSSGGSQRRGPITRAGNAHLRRVLVEAAWHYRHRRKDSPRRRREEAQLPEWLRAIARRAEERLSGRFARLVARRLPPQKAVLAVARELLGFLWAIGYEIEQRQLTAA

SEQ ID NO: 63454 - protein, 242 aa, unidentified
MYVRPTSLRQRFDNTAAGIAAFVAWVRPHAAERIVFESTGPYQKAAVGVLLAEGLPAVVVNARQVRDFAKAMNYLAKTDRIDAAVIAHFGEVATTTVRPLESQEIRDLRELYDRRGQLVRMLAVEKNQRHAATVAQASPQVLQNIAQHSDYREGQIRDLEGRMDRIIESSATFQARDELLQTLTGIGPQVARTLLAYLPELGRSSRQSIAALVGLAPFNDDSGTHTGQRHIRGGRSKVRVGL

SEQ ID NO: 63455 - protein, 318 aa, unidentified
MKSEIVHIGVDVSKEKLDVYNPITGEVSELPNDAAGFREVRAMARRGKAVVCCEPTGGCELDMVLFLQRFGVPVAYCDGYRVRHYALSTGEFSKNDRVDARMIARFADCTPVRTLAKKDLAHLELRRRWKLYQTLVDIHVVLAQKASSEQVAEMRSMLRAESAKMERKAAKALRSCVELAKGDERMSYLLGRFVEIDGVAEKTAIAVIVGVPEIGSIGDAALSKLVGLVPMDNQSGANDHAKKIRGGRKDVRRALYLATLPAVQHNHILAAYYKEVKKRIPSKRAAKWAFVPVMRKLIHLMNRLARDPEFRLQKKQSA

SEQ ID NO: 63456 - protein, 390 aa, unidentified
MKPDGDKHSSFSIPNNRPGAEILVDRIVEVLHRLFIPKVVIGMESTSVYGDNLMYFLRETGKFSGFEKKLHMLNPKQVKKFRDTYSDLPKNDFVDAFIIADHLRFGRINKEVYMGDYRYEALKALTRARHQTVQSLTREKQRFLNQLFMKFSGLSQEKIFSNNFGATATAVIENFESLDELAYIDSDELADFIKKHGRGKFEDVDGIVSDLRKAAQNSYRPPTVIADSVNQILAISMSTIRLLQGQVKEYDKAIEKQLSTIPNTLTSVKGIGLVYAAGIIAEVGDINRFPSQASLAKYAGLTWTQRQSSEFEAEDTRLIRSGNHHLRYYLCEAANSLRKCDPEFRRFYNLKFHEVSKHQHRRALALTARKLVRLVYALLKTNRLYIPPEE

SEQ ID NO: 63457 - protein, 416 aa, unidentified
MKIVRPICCGMDVHKNIIVATIGITNKKTRITEYIQETFSTLNPDLLNLKQWLINHKCFDACMESTGKYWIPIFNILEDEINIYLTHPKYVKAIKGKKTDKKDSKWICDLFKHDLIKFSFIPPKEIRALREISRYRYKLVGMRSSERNRYQNCMTVSNIGIGSVFSDPFGKSAQAIMKEVLESDIIEDEKILKCIHGSCKNKDKILDSIKHCNIETDQRFKMNESMTHMEELQVHINNCEIEIMKRAAPMFDRFMHITQLPGISTLSAILIISEIGVDMKQFESDKQLACWAGLAPANNESANKKKSVRISKAGQYLKPLLVQCALGAIKDKEGYFGIKYSRIKKRRGHKKAIIAIARMMLVSIYHMILTGETFNPSDYESFRNPNPPIKQQVLTEESAIEFLKKSGFDVSKLTKP

SEQ ID NO: 63458 - protein, 339 aa, unidentified
MSRFVGVDLHKNMFTVSYFNPGTGKHQLKGYPIQNIGSFIKELNRDDTVGVESTNNTRYFVNQIRDCVKEVKVINPSQFKVISKSVKKTDKNDAKVIAEFLSKDMVPEVRMKDKKTAQINSLANTRDKLVKLRTALKNKIHNILSSHGILLKKEYLSSDKALERILNQPVDPTARVELEVIVTQIRSLNEGIKKLDKELEDKGKELPGHENITSIKGIGNKSGSILLSVIGDINDFENEKKLAAYFGIVPRVSNSNETEWQGRITKRGSKLGRTTLVQCTLIAIRYSPYLNSFYQRIKAKKGSGKAIIATAKKLLGIIYITLKENIIYEDFPNFVIKTT

SEQ ID NO: 63459 - protein, 421 aa, unidentified
MYVAFCGRKDGSRMDVLHDRCAGLDVHKEWVYVCVLIGQGSRQGRYKQKFGTFHHQLIALRTWLLEHGVTHVLMESTGVYWMPIYDVLEGYVEVVVGNAQHIMNVPGRKTDESDAEWLAKLLRFGLVKPSFVPERSFRELRQLTRYRRALVQARASEQNRIEKHLQIAGIKLSSVTSKMFGVSGTDMLKHIADGKTEASTLAALARGRLRKKSEALEQAFAGPISGHTQKLISLQLAELDRLSSTIAEVESNISRKARPYEAAIALLDPIPGINIPAAIDIVAEIGTDMTHWQTHRQLAAMAGVCPGNYISAGKRLKNRSRQGNPYLKSILVQCAASAINKNGSYFQAKYKRLRQSRGHKRAILAIAHALLVTIYYILKRQEPYRDLGANHLEAVDHTRKRTSLVRQLERLGFRVELNAMT

SEQ ID NO: 63460 - protein, 362 aa, unidentified
MAKGMTLVGLDVHARQTHAAVLNPDTGELGVSRLRMAPVEVASFLDGLGPGVRAVYEAGPTGFGLARAGRERGIDVRVAAPGSIPKGPGDRVKTDRRDAVRLARLLAAGELSFAFGPSVADESFRDLVRCIEDIRGDLMRARHRLGKFLLRRGERYPGPGSAWTVKHLGWLRSREFNYACSQATFADYLAAVELLAGRRRTLIEALEEAVPESGHAAVIARLRCFRGIDTLSAAGLAAEVGDFGRFGRPSLLAGFLGIVPSERTSDEKRRQGSITKAGPGHARRLLVEAAHHYRYQPRIGQTLARRQQGQDPRLIEIAWRAQRRLHQRWARLRIERRKPAGVVAIACARELAAFLWEAATVD

SEQ ID NO: 63461 - protein, 344 aa, unidentified
MKFTRCGLDIAKQVFQVHGVNERGAVKGRQQLSRAKVLEYFAQLPPCLIGMEACAGAHYWARELGKLGHTVKLMGAQFIIPYRKRGKNDANDAEAICEAVGRPNMHFVAVKTEEQQAVLMVHRARSLVVANRTAQVNQIRGLLGEFGLVVPKGIRKLRAQLPQLLEDAENGLPALAREVLAGLLEQLRELDRHAHRYDLKLRELAQQSEPARRLMQVEAIGPQTATALVASMGNPGVFKSARSYAASLGLTPRQHSSGGRTRLGQITKQGDRYLRTLLVHGARAYLRVVDKKTDGKSAWVRRLKERRHINVAAVALAAKHARIAWAMLAKGTEYRPAPALGAAT

SEQ ID NO: 63462 - protein, 346 aa, unidentified
MKITTIGVDLAKSIFQLHGVDERGHAGVRRAMKRDDMLPYFANLEPCLIGMEACGSAHHWARKLMALGHTVKLMAPQFVKPYVKSNKNDARDAEAICEAVTRPNMRFVPVKNAEQQAVLSIHRAREGFVKARTAQGNQIRGLLSEFGIIIPTGLANVYKRIPEILEDGENGLPGNMRQLIQRLTDHLKELDEQVAALEKEIKKWHTANESSRELAEVGGIGPLTASALAATVGDAKNFNRGSQMAAWIGLVPKQHSTGGKTVLLGISKRGDTYLRTLLIHGARAVIRHAEHKPGYAESWLGKLIARRGKNVAAVALANKNARIAWALLSKQSKFRPGYAAVQPTAA

SEQ ID NO: 63463 - protein, 431 aa, unidentified
MDDNYANRLHWFRQFKGNAEKRRNILIVGIDIAKDKHHAFMGTVDGHSIRRRLIFENTLNGFSDLVSHAERHVKDESFKDVVFGVEPTSVYHKPLAEYLITMGYMVVYVTNNAIKKNRALLDGRWDKNDTKDAANVADLVSRGKCHFYDFADINLRDIRNLLSLRKRLKKQEHRLMSRIRNNLVAQYFPELDRAWYSCQHENLSIVRWCLWPEKITQIGFDEFCRLVTTRRRGIGQYQRLRHIYQVADVSIGCATGVSVDLEAKLLVENLQSTRDQILLVQQNIEAICQNYLEYEILQTIPGFGPFVSASVFGAIGYAQRFENAKQLLRLAGLDLSANRSGKGSKSAVPVISKIGKADLRYALYQAARVATGITTEFKAYFAYLMKGREKEKGIVTKLRVKVAAKMLVIAWAMMKTMRPYKPGLLRYDEPD

SEQ ID NO: 63464 - protein, 316 aa, unidentified
MDIASKSLEARIGQQGAAGSFANDAEGINALGDFCRTHQAELVAMEATGGYEQQAFAQLSGQGLAVAILNPRAVRQFAQSMGSLEKTDRIDAGMIAWYAEVKKSQPACLAPENQQHLRALVTRLRQLTDVRSAQLNQQRLVTDRKVQASFKKLLTLLARQIGELEQSIAVLLEKDPLWRELDQAFRTIKGVADRTVARLMAEMPEIGTLSNKTISKLAGVAPLANDSGKHQGKRAVRGGRAAVREILFIVASVVGRHEPDFIAFRERLRAAGKPPKVVRIALAHKLLVRLNAKARQVRQAVAALEYGTVAVQIECA

SEQ ID NO: 63465 - protein, 481 aa, unidentified
MSQQEKQCKPLCEEKTATGKGKRGRKRKGMCLEDRPTLEANAAGIDIGAREIFVAVAPDRDEHPVRVFSTFTEDLEKLAQWLVSCGITTVAMESTGVYWIPLYDVVEKYGVKACLVDARGMKNVPGRRTDWHECQWLQYLHSVGLLRAAFRPEGDVCAVRSMMRHRSQLVEMASQHIQHMHKALTQMNVQIHHVISDLTGMTGLAIVDAIIAGQRDPVALAQLRDHRIKASEETIRKSLVGNWRAEHMFTLEQSRKSYQHYQEQIRACDEEIEKMLVTFVPRVDPNERPLPPDRKRKQRGRKPKNANPHAGFDLRTESYKLFGVDLTQVPGLMAMVLMLFSEVGRDMSRWKNAAHFASWLALCPDNDISGGRVLWRGMRRVHNRAGELFRMAAYSLHRDPSPLGDYLRRMKSKLGPKGATTATAHKIAIIFYTMVKKQVEYDATLWAQRDAEREKRFEAKLKRQALQLGYKLVPIEERPAA

SEQ ID NO: 63466 - protein, 338 aa, unidentified
MPLYGGIDLHANNSVVVLLNEQDQRIYHKRLPNDLATIVEQLAPYHADIEGLVVESTYHWYWLVDGLMDAGYRLHLANPAAIQQYSGLKYTDDHSDARWLAHLLRLGVLPEGYIYPKAQRPVRDLWRKRAHLVEQQTANVLSVQNIILRNTGARLSANRIKSVSQAEVDTLLPNADQALAVSSALAVLHCLAEQIKTVETRVRTRIQSTPLYELLQTVDGIGPILAQTILLETGDIGRFPSVGDYASYCRCVDSTKVSNGKRKGQGNVKNGNPYLAWAYAEAAHFARRFNLQVQRYYQRKQAQTNVTVAHKTVAHKLARACYHMMRHQAPFDAAKAFG

SEQ ID NO: 63467 - protein, 404 aa, unidentified
MGQVFVGHDWAEEHHDIDIRDSEGHRLERVRLPEGVEGVARFHALVGALVEHPGEVVVATETDRGLFVGSLVAAGYEVYAVNPMSVARYRERHCTSGAKSDPGDAAVLAELARTDRHLHRPIAGDSHLAEAIKVLARAHQSLIWTRQRQLNQLRSTLREYYPAALELGDLHGPDALGVLTVAPTPSLGRALSRKRIGSAIARAGRQRRVEERAADIQAVLRTDQLSPPAVIGEAMGASVSALVAVIGELNTQIARLEAELSEGFDQHPDAKIVRSLPGLGTILGARVLAEFGDDPNRYDSAKSRKNYAGTSPITKASGKSKVVLARYARNRRLADACYLWAFAAITASPGARTFYDSRRGAGDTHNRALRALANRLVGLLHGCLRHHTLYDAHAAWDHRQERAA

SEQ ID NO: 63468 - protein, 413 aa, unidentified
MDVVHPHCAGLDVHKKTVVASIIVPREGGGLYRETRTFETMTGELLALSDWLLEKRVTHAAMESTGEYWKPIFNILEHSFDILLVNAQHIKTVPGRKTDVKDAEWIAELLRFGLLKASFVPPEGQRELRELTRFRSTFIQERATLVNRLQKVLESANIKLASVVSDVNGVSGKAILKALVEGTSKPEDMAELAKGRLKEKREFLVRSLEGRVKPHHRFLLSELLCQLESLDESIHRFDQQIEEYCRPFEESVVLVDTIPGVARKVAEVIISEIGTNMSCFPTADHLASWAGVAPGNNESAGKRLSGRTTKGNRALVSALTQAAHAAARSKHTYLSAQFHRLAGRRGKKRAIMAVSHSILVIAYHLIKSKEPYHDLGPDFLDKRKSQATAKRLIQRLHEMGYAINLDLSATVAA

SEQ ID NO: 63469 - protein, 403 aa, unidentified
MKFFAGLDWGGTTHAICVVNEAGQVVLQAEVHHDARGLESLQKQLIKIAPPGAIPVAIERPSGLIVDALLAFGHQVVPIHPNAVKACRPRYSSSGRKHDLGDAYLLADVLRTDGHRFRPLAPPSDALKALRALVRTRDDLVNHRIALTNQLQALLDSFWPGPAALFYQIGSAIALAFLQRFPTPSSATRLGEKRLAAFLKGEGYSGRHSATELLARLRAAPVGQIGKLEEQAKGELVLALTRVVAPLLEQIAAVTARIEAEVAQLEDGVLVMSLPYAGHLTAAKILAEIGNVRERLTTADQLAAEAGVAPVTKQSGKSRSVTFRWACNHRLRVALTLLADNSRRGSPWAEHIYAAARARGCRHPHAVRILARAWIRVLWKVWTTRVPYDIRRHTAACALAGAV

SEQ ID NO: 63470 - protein, 450 aa, unidentified
MSPLALDVVTKTDKTPVLGRMLSKYVGRKTSSIENGITKARNHSRQRGNIMRVVFGIDVSKASSEVAILVNGEKVHGYTIPNDAIGYNRLLGDLKTVHQPEIVFEATGVYSRRLQAFFEDNSYTYTRLNPLESKKQLDSLRVRKTDKIDAEKLAMSQFILNRKPSYVQEALYQELRDLSRFYQNLTEDIVCAKNRLHKVLQITFPELENILSAPTGEQYWNLVITFPCNSFVLESDDATLTAIIRQSTAKRISEKRVTYLVDKLTKLANQSYCAVKKTSPVIEEVKYYAGELLRLSEHRQGVVEEMVTLAQSLPEYEILLSIPGIAETTATSIIGELGDIRRFHSANQINAFIGIDLRHYESGNFLAKEHITKRGNPYARKILFKCIHNIASASHTNPCHIADFYEKRKRQSQVTSTKPHTIASIHRLIRTMYYLITHNKLYDYTSIQNR

SEQ ID NO: 63471 - protein, 365 aa, unidentified
MPSTTNKITNFEGQRFYIGIDVHKKSWTVTIRSMHLELGHFSQLPNAEPLARYLHSHFPGGRFLSAYEAGFCGTSPHHALCNSGIQNIIIHPADLPQSDKQKNNKTDLHDSRAIARYLEGGMLSGIHIMPKDQQERRGLYRCRQSKVIDVTRSSNRIRSLLYYAGVELPERFKEKEYINKNFIDWLNKLKLSTLQGTQVLQHYLEDLIYQRKQLLTITQKLKTAIAAHYKERYTSLLTVPGIGPITAIALLSETGDLSRFKDPDEYCSYLGLVPSEQSSGSTIYTNHLQPRCNTHLRPLLIEAAWTSIRRCPVLLLYYKKHAGKNSKHAIIKVARKLALIAKGVAINKTVYQADYIQLKNPIVTN

SEQ ID NO: 63472 - protein, 344 aa, unidentified
MALADLRKLAPGESPACSCRTETIMAKQVEECTIGVDVAKGWLDIYAADRDDLQRIDNSEDAIEKWLCGLGGPARIAIEATNRYHELFIERAFALGHRIFVIDAFKLSRYRDAVGHRAKTDRHDAELLARYLRQEQEHLQCWQPRDPRQARLWRLLKRRATLVQTKVRLQQSLADIGALDDAAKELIRHCQQLVRRIDRELQAQARQLGWQQDLQRSGGVPGLGPTTSLALVATFHRHNFRSADAFVAFIGLDVRVRDSGKFRGRRKLTKKGDPEIRRLLYNAAMSGCKDPHWKHYYQSLRNRGFSGTAALMALARKMVRVCYALLQKQLSFDPGIRLIACSAT

SEQ ID NO: 63473 - protein, 430 aa, unidentified
MNQINRNRLEEFRQLRKEIRHSEEYLIVGMDIAKDRHYAFFGTATGKTLLKRIVFSNDHEGFRKLLDQAEALRVQHGLKKVVYGMEPTANYHKPLGEYLINLGRMVVLVCGVTVARNRESLDGRWDKHDGKDSANVADLISQGKCLYYEHPSAELRGLRGLLSLKKRLKKQEHGYRVRIRNQLIAQYFPEMDRDYERLGVEGLSIVKWCLPASEIAQLDVDPFIDRVTSRRIRMEKRRRLEEVWEKAGESIGCEGVPGVDHEAKIMVEGLKQIREMIKETEDKIKELCKQFPEYHYILTIPGFGPDVSAKVLGAIGDPDRFQNGKQVLKMGGLDPSADRSGKDSDKAIPEISKRGKADLRYALYQAALVASLQNRDVMIYYTNKIRGREREKGIHVKMRVKLAAKLLVIAWTLMKKKEAFNPACLSAELN

SEQ ID NO: 63474 - protein, 340 aa, unidentified
MKEVTTIGLDIAKQIFHAHGAGSSGAPVFSRRITRQKLIQFFASQPRCVVAMEACAGAHHWGRELMRLGHEVRLIPPAYVKPFVKRQKNDAADAEAICEAAQRPTMRFVPVKSEAQQASAAVFRARDLLVRQRTQLLNALRGLLAEHGWVAPKGLFHASAMMAKIEGPSCELPASARDVFLVMIASVRALDERIHLLDREITKRAREDETARRLMTIPGIGPITATALLALAPAPESFRKSRDFAAWVGLTPLQRSTGGKAKLGSITRMGERTLRRLLILGSAAVVLHASKRGAAKGSWLEQMMARKPRMLVTVAFANKTARIVWALLAKGGVYRAPAVA

SEQ ID NO: 63475 - protein, 343 aa, unidentified
MQTITTIGLDIAKSVFQVHGVDAGGQVVIRRQLKRRYVLAYFQKLTPCLVGIEACASAHHWSRELQALGHTVRLMPPAYVKPYVKRQKNDATDAEAICEAVTRANMRFVPTKTPEQQSGLVLHRTRHLFIRQQTAVINAIRAHLAEFGIVAPVGRHGVEELLNVVADPNDKRVPEIARACLSAFGNQLRRIKEQIREFDRLIRAWHRSNEMSMRLDEAPGVGPVLATAVVAAVADPKSFRSGRNFSAWIGIVPKQHSSGGKNRLGNISKQGDRYLRGLFVAGALAVIRYAKIHGTKHRPWLTALLARRPTKVAAIALANKIARMVWAMMVKGERYKEPVALAA

SEQ ID NO: 63476 - protein, 354 aa, unidentified
MMIIGCDYHPAFQQIAFVDTDTGELQERRLQHREEAEKFYRNLAAQGMKVRVGMEASGHARWFERLLAELNFELWIGDAAEIRAKRVRKQKTDRQDAQLILRLLLENRFPQVWVPNWENRDLRQLLWHRHRMMQARTRIMNQLQAVALNEGLRCKKKLWREAGREQLESFRLAPWASRRRHDLLELLDRLTPTIAELTQAIEQEAEKCPAAQRLQTHPGVGALTALAFVLIIGRADRFECGKQIASYLGLVPSEESSGQRRRLGHITKQGNSLLRFLLVEAAQVTVRSDQEWRNRYFHLVLRRGREIAKVAMARRLAVRLYWMWRKGWNYEQLTKFGSHAGEPGNPDGVQSSTE

SEQ ID NO: 63477 - protein, 405 aa, unidentified
MIEPVIKRVAGLDVHKMVVVGTVLLEHEDGSLQHETKEFGTFKRERRKLCQWLKGHDVELIVMESTGIFWKSLYSSFEKAQLKAYVVNARHVKNVPGRKTDVSDSHWLAALARIGLLKPSFIPPQDLRELRNITRQRIKLDGMLSAEKNRLGKILDDAGIRLSGVVTDIDGKSARDIIDGLIDGASVEEMLECIRGRLKNKSEQLKACLDEELSPRHLFLLNKIRDHINYLKSEIKSFDEYLFAAMIPYQKQWEILQTLPGVDKIAAAILIVEIGTDMDEFGSADCLSSWAGMCPGNNESAGKRKSGRTRKGNVFLRSILCEVANAARKTRSQFKGKYESLIMRLGHKRTIIALGHKILRIVFSLLKNLKPYHDPEIDYEKLMVDKNAPRWLQALKKFGYLPQAA

SEQ ID NO: 63478 - protein, 386 aa, unidentified
MRGKTFIPQDYDVFAGLDVDKRSISVTFINHEGVIRSLRMPYSVEHLVNHVRKHFPDQKIAFAYEAGPTGYGLYDGLVAQAYRCLIASPSMIPKAPGQRVKTNRLDSVGLSENLRGGQLKSIHVPSPVYRELRHLTQLRDTFVSELVAMKLRIKSLLLLEGIRFPPAPPGSQWSSRVKAELRRLPCSGTVRFKLDQLLDSVGFCEQQIRKTTREIRRFCQSDAELSRCIRYMMSVPGIGWIVASQLLARIGDWRELHHGRELAGFLGVVPTERSTGESIARGSITHTGDGRLRSKLVQAAWSAIRQDGELEEFYRTVARSHPRDRAARVAIVAVARKLTMRIAAVLRQQRPYVVRAKVPSTPVTPAETVPQGTPRRQAEPGAAQGS

SEQ ID NO: 63479 - protein, 358 aa, unidentified
MNRNTGMNAGQIIGTMNGLQVVGLDIAKQVFQKHTVDMGSGEISNVQIKRAKVLEHFVNTPPCLIAIEACGGAHHWARELRSLGHTVRLLHARIVRPFVSGNKTDATDARAIWLAVQQPGVKFVGIKTTTQQATLTLHRQREALMKMRIMQTNALRGLLYEFGATFAKGKKALFKEIEATFERLADKLPQMVADSLREQVLRIKVLDVDMQAIEKRLQVQLRQDPQMQRVAQIPGVGLLTATAAIATMGEASVFKSGREFCAWLGLVPKQTGTGGKVRLQGISKRGDTYMRTLLIHGARSVLSHSKDAGAWLEQIKGRRPANVVIVAQAAKMARTIWAVTFKDQDYQRGFQSIRPHAV

SEQ ID NO: 63480 - protein, 408 aa, unidentified
MNPLYVGIDVSSKSNVVYFMLPDGSKHSNFSVANSHTGSSQLVKRILSAMPSCSLDSVLIGLEATSVYGDNLVYFLREDAALARFNSKIHVLNPKQVSKFKEAYNDLPKNDLIDSFVIADCLRFGRINKEVYIGDYRYKALQNLTRARYFAVSNLIKEKQRFMNILFKKYSTMTQEKVFSDTFSTTALAVYDEFESAEALADMDLHELTAFIMEKGKNRFPNPNAVAKAIQKAARSSYRLPKTVNDSVNQVLSISITSIKALEAQIKEFDKAIAAQMELLPNVLISIPGIGPFFSAGIMAEIGDINRFHNQAQLAKYAGLAWKQHQSGDFEAQTTRLINSGNRFLKYYLCEAAFSLVRCDKEYSDFYHLKYKEVNRYQHKRALALTARKFVRLVFRLLKDNRLYTSAE

SEQ ID NO: 63481 - protein, 392 aa, unidentified
MIYIGIDVAKDKHDCCIVDSDGVIINDSLRISNSRKGFELLYSSILSALPDKDISNVKIGLESTGHYSTNLQNYLYAKGLKLSILNPLATNLFRKAQTLRKTKTDKTDALVIAKMLFSDDTKSYSPVSYQIQELKSLTRHRYRLIGYRSKLKLSITRLVDIIFPELPKYVWSIHQKSSYCLLSELSSPKDVANCHITKLTNILIKASRGKYGKDKAIALKEAASNSIGTSTRSLSFELQQTIRLIQSVQAEINALDLQIKEVITEINSPIMSIPGISYTLAAIILSEIGDIERFSSSAKLLAFAGLDPSTYQSGKYNASHTPMVKRGSTYLRWAILTASRTVSMRDSTFSAYLSKKQTEGKHYYVAMSHVAKKLIRVVFYLLKTNTAFVSQM

SEQ ID NO: 63482 - protein, 408 aa, unidentified
MNAVGIDVSKGKSMVAALRPMGEVALLPQEFLHTEVGLEQMAYAIVALGEDTRVIMEATGRYHEPIAAALHEYGIYVCVLNPLFIKQSGGGSIRKVKTDKADAMKIAKYGLDNWVELREYTPMDTVRQQLKLCSRQYNLYMKTVVSLQNNLISLTDKTFPGVNELFSSPERADGHQKWVDFVMTFWHCDCICRVSEKAFTDRYQKWCKRKGYHFSTEKALDLYAGSCGHFTTLPKNDNTKLLITTAAQQLLAGKTTLAALRAEMTRLAKQLPEYDTVRAMYGVGETTAAQLMAEIGDVRRFPRRSSIVGFAGVDPAVDQSGKHSAKSVPTTKRGSPHLRKTLYQIVCTYLKRSPADEPVYQFLDKKRAEGKPYFVYMTAAQNKFLRIYYARVKECLEAFDERQDTVQN

SEQ ID NO: 63483 - protein, 337 aa, unidentified
MYAAIDHHKAVFQAAMLDPQTGVAADERFEGSRDGLASWVERWQGRVTDVAIEASTGWRWITQELEAHGIRVHLADPAEARAKRGRTKKAKTDKLDARWLVLLLAKQDLPEAWIPPEEIQQLRAQTRLRKALADDRTRWAQRLHAVLHHEGWPCRRSQLLTKKGRQWVAALRLGGAARQQVTAYLFLIETLEAQLQPLENELRHFAEGDPRCQALRTLFGVGPIIACHLLAEIGSALRFRRSRQLVRLSGLDPIVEESGERRRRGKLAKQGPPLLRWAAVEAAQHGRRYNSPDRHLWAVSNRRSGPTRATLTVARKLLRRSYHVLRRIELGQQEVAA

SEQ ID NO: 63484 - protein, 358 aa, unidentified
MKRNILKVTLGVDVSKENLAVCLCRLTVNLAKEFETPFEVSNDLSGFKKLVRWLDKEVASREDVWIVMESTGVYHETLVYYLYEAGFNVSVMQSGRVKRYAQSLNQRSKTDALDSRMLAMLGCERELPLWTPPDPKLRELKGLSRERSFLLKEKQIERNRLHAMEHAAYKNNRELRRYKQRLKLITKQLEEIEKEMALLIHNTTDLKRRIKHLESIPGISFVSAATVIGETLGFTGFTNAKQLTSYAGFDVVLKESGAYKGKTRISKKGNKNIRRALYMPAMTAVRCNPTLKKFYERVKPTKAKPMIALIAVERKLLLLMYSVWKNEMNYDPEYEQKKTARTEVLAAQDRSNLALTSS

SEQ ID NO: 63485 - protein, 355 aa, unidentified
MKNQAIQYLALDVHQATVVGTVRDGNGAIRMRATVATRPKEILGLIRAAGVRVHVIFEEGAQAQWLHDLLEPEVERVVVFNPRGRQVLGNKSDRIDADKLSELLRLGSVKSTYHGSRSVLTLKELVRNYNNLVGDMTRVMLRLKALFRARAIPTPGSSVYRASERERWLAQLKQRGARLRAESLYAELDLLSELRPMAKAAMITEARRHSAWKVLRPIPFFGPIRVAQMIAIIGTPFRFRSKRALWPYAGLAVVTHSSADQEFVNGTLRRRRRAPLTRGLNRNHNPELKAIFKGAANAAALKPGPLKDYYEACVARGVREELAKVTLARKLASIVLRLWKKGERWDPNKLTMQAT

SEQ ID NO: 63486 - protein, 375 aa, unidentified
MTRIAENAQPGQRRARRVPERVVYGGVDTHKELHVAAVVDAGETVLGTRSFSTTRAGYRALLAWAGEYGQLARIGVEGTGSYGAGLTRHLAKAGVTVLEVDRPDRSDRRRKGKDDDLDAINAARAALHNHRTTIPKSKDGAVGALRVLRTARAQAVRERRNALQLLRMTIVAAPDEVRDHVRNLTRMQLIRVVAAWRPDVSNAADPITAYRVGLKSMARRYLELTDEITGLDDLITPLVEALAPQLLARLGIGIEIAGQMLVTAGDNPARMKSEAGFAMLCGVAPLPASSGMTQRHRLNRGGDRQANRALHLAVVSRIRMDPKTQAYMARKTAEGHSKLEIIRCLKRYLAREIYYLLNPGQQHIARRPYRRRTAA

SEQ ID NO: 63487 - protein, 403 aa, unidentified
MNAVGIDISKGKCMVAILRPFGEVVASPFEIQHTAHELRRLVERLKSLDGETRIVMEHTGNYYLPVARHLHEAGLYVSVVNAILVHDYGQNSLRRVKTDKKDAVKIASYALSHWLDLPQYAPEEDVRHMLKTCARQCNQYVKQSVMLKNSLIALLDQTFPSVNMLFSSPPRKGDGHEKWIDFVGKFWHFECVNSLSKNVFTQRYQKWCKRTGYNFLSTKAAAIYDFACIQVSTLPRSTFAKQLITQAVSQLNSLSETLALIRQQMLSLASGLPEFPVVMAMQGVGNVLGPQLMAEIGDVRRFNRKQSLVAFAGIDAPPFQSGAFEAQSTGISKRGSSSLRKTLFQVMDCLLKHAPSHDAVFQYLDKKRGEGKHYYVYMMAGANKFLRIYYARVKEHLGSLAVQ

SEQ ID NO: 63488 - protein, 346 aa, unidentified
MTADSVVAQLFVGIDIAAATFTTAWSHTDTPVSPAHTYTQTPHGFAALQTQLAATTVAPADTLVVMEATGSPWIALAVALHTAGYRVSVINPLQAHHFAKARLRRAKTDVLDAQDLCRLAAVLRPPVWTPPPAVYHEVRQRLLVRDGLVTMRQQARNQHHALTQWPVVVVGAAEQLTAVIADLDARIVVLEGEIAAALAASEWAESLGYLTSAPGIGLLTAAWLLVTTVNFTLGATPEAVVAGCPLGRTGLAPVPRQSGTSVRGKPQIGHGGNGRLRTAAYLATLSAVRYNPMLRVFYQRLRAAGKPVKVARCAVARKLLHLAWALVTKQQPFDPLRHLAPVPVEA

SEQ ID NO: 63489 - protein, 368 aa, unidentified
MTGVFTPNNAEGFDTLLQAIRRSTRPEDKIKVGLEATGHYSYNILGFLLDKGLPTYVINPLHTNLYRKSLSLRKTKTDRVDARTIAAMLMSDVDLKPYTDTAYHNEELKSLTRYRFDKVRERAKLKQSVSRLVTILFPELEKLVSSLHSASVYALLSEFPGAKQISSTHMTHLKAVLKNASQGRYGQEMAETIRNAARSSVGSVMPAKSLELQHTIRLIRELDAEIEDIETAIQAIVDEMQSPITTIPGMGVRMGAVILAEIGDFSRFDSPDKILAYAGMSPSTYQSGQLSLSGAYSHMEKRGSRYLRYALYNATKHVCHWDPTFAAYLAKKRAEGKHYNVALSHAAKKLVRLIFAMEKSQRPYCAAA

SEQ ID NO: 63490 - protein, 331 aa, unidentified
MNILETVGIDVSKLVIDARVHSNQCFSQFENSPKGFKQMYAWAIKSSGFSPDEILFVFEHTGLYSHNLAVYFSGHKVPFFMVPGLEIKRSLGIARGKDDRIDAAKIARYAYRLRDEIEPYRLPSKQLLELKALLSLRDRMVRQRAGYKTSLREQKRVYKGKGNSVLLKAQEHLIKDLNKQIDAVDKEMLDIVCSNDELQRIYKLITSIKSIGPQTALFMIAYTDGFTKFKDSRKFAAYCGIAPFPNSSGTSIRGKTKVSHLANKKIKSLFDLCAKNAIIHNQEMKKYYNKRVEQGKNKMCVINIIRNKLLSRIFAVVNRKTPYVDLLTYNI

SEQ ID NO: 63491 - protein, 322 aa, unidentified
MESQEIRFTQVVEIGCGLDVHKDLVTATIRKSNDDLETKEYNACTSSLKSLRDWCKKEKVTHVAMESTGVYWKPVFNVLERDFEVILVNARHVKNVPGHKTDKKDSRWLSKLLLSGLLKGSFIPPVDIRELRDLTRYKKKVTGQAASEKNRIIKILEDANIKLSSVLSNVDGSVGTKIINSLIEGQTDIDELMKFYHGKIKTSRKEFRLALEGKVTKHHQFMLQLHKDSIAEKERLIERIDAEIEEATKAYQVEIDLLQTIPGVGKDSAIRIISEIGVDMNRFPDETHLSSWAGMSPGNNETGGKKKCKNSPRQQIPAKHIS

SEQ ID NO: 63492 - protein, 341 aa, unidentified
MDTTTYGLDIAKPVFQMYWVEPETGEIMNRRFSRQQLIEFLGQRVAGRVALEACGSAHWWARKIAALGHEVILLHAKFIRPFVQNNKTDAADARAICIAAQQPGMRFVAPKTADQQATLALHRLRSLLVKSRTMQVNQLRGLLYEFGVVLTAGRVAGLADVRERLHEVEQVVPGTLFDALRDQLQLIDRIDGDIKKLEKQLATWQRQESACKKIAGIPGIGPLTATALVATIGNPAAFKSGRELAAYLGLVPRQTGTGGRVRLGGISKRGDNYIRMLLIHGARAVLFKSKNKGPWCDQILLRRPVNVATVALANKMARTAWALLAHDQTYQHDYAAMRQAA

SEQ ID NO: 63493 - protein, 353 aa, unidentified
MNKKIVKQIAGIDVAQKELVVCFGRMYDDWTPELCSHKTFPNTEKGFAALVLWAKNMGSEDVVVRFVMEATGVYHESLAYFLDDKGYELVIVLPNKISNYSRTLNVKTVTDKTASEAIARFGLERKLDKWERPKKTFKSLRQLTREREQVVQMRTMAKNQLHAEQAEAEPNSSTLTRVKKQIAFLNKQELEIKAEITALCRQDEKIKETIKLLSSIPGVGQLTAATVLGETNGFELIRNKRQLTSYAGLDVKEKQSGTSVKGKPKISKKGNKYLRKAIHMPALAAIRHDERFKAVFARLVSRHGIKMKAAVAIQRKLLEMMYTLYKTNTIYDKDYFTKLGAEKLLIQQQTEKN

SEQ ID NO: 63494 - protein, 385 aa, unidentified
MGKRVAATRVPHTSDGIAALVAFLRGIGDVDAHPAHLACVVETNRGLLIAALLDAGVPVYPVNPKTVDRQRKPSGAKTDAIDAYLLARTGRSDLADLRRLTPDSPLVAELKMLTRDQDGLIQGQTRLVNQLTACLKAYYPVALELFGKLHQGVTLAFLQAFPTPDEARAATAERIAAVLTAARYATAQVKGHEIHQRMRLPQLTADPVVTRAKARLMLTLTAQLQVLVTDIAAYDREIIRVFAQHADSNAFASLPRAGKRLAPRLLAEWGDDRGRYADAASVQALAGTSPVVFQSGNYASVHKRYACSKPLRNALHQFAWQSTLQEDWANAYYRRERREGKSHTKAIRALVNQWVRIIHALWHKRETYDPTIFVAVQQAHAPRAA

SEQ ID NO: 63495 - protein, 344 aa, unidentified
MLHAGLDLSRRRLDVCLLSGSGEPVAEFAMPADADGLGGLARRVSGQRVRAVIESMNGARFVHDTLEEAGWEVLVADAKKVKGLAPLACKTDKIDARVLAELSWRDLVPAIWLPDPAIRRERELARFRLHLVRHRTTLKNRIHATLITFGHPCPVSDLFGVAGRQLLDRLAIPDPWRRNVDIALGLIDDLELQIARLTVELKRQGADHRYIPLLVTAPGLGWINAYTIASEIGDIERFPSPTKLCGYTGLCPRVIQSGASDRRGPISKHGPRYLRWGLFEAAMNACKHPLYAERYQRTKRRLGRQRGPKVAQIELSRKLTEAIWHMLTRNQPFAPAGAGFRLAA

SEQ ID NO: 63496 - protein, 313 aa, unidentified
MPSASFVGIDVAKDKLDIAVRPSAEQWVAPQTEDGISTLVARLVAVAPELVVLEATGGFELPVAAALATAGVPVAVVNPRQVRAFARGIGQLAKTDALDAAVLARFAEVVHPTPRPLPDAQAQELSALLARRRQVQAMLIAERQRLGTALLAVRPHISRHIRFLEAELEDLERQLRDAVQASPLWREQEDLLRSTPGIGPATAVALLAEVPELGRLDRKKIAALVGVAPFPCDSGTLRGKRIVWGGRARVRSALYMATLVATRHNPLIRAFYQRLCAAGKPKKVALVACMRKLLTILNAMLRHQTPWAAAATP

SEQ ID NO: 63497 - protein, 392 aa, unidentified
MIYAGVDIAKVDHVIGAVDETGAEAARPMKFKNSEAGFERCIAWLESVAESEDDVFVGMEATGHYWMACFAYLTAAGYRVCVVNPMQVHAMRRLKGLCGVKNDRIDSALIAETLRQGDYDQTRLATDEVQALKRLTRYHQGLKQELATVKTQAICVLDAYFPEYAGLFSDMFGTASLKVLAECPTPSEASRKRTSSIARLLSEGSHGRLGAERAAEIKSAAKSSVGIRLGEDAASFQIKTMVTQVEFLNRTIAKVEREVASLLEKVEPNITTVPGISTTTGAQIVAEIGDVKRFKGAASIVKYAGLNSGVDESGMFSAEGVPITKHGSPYLRRSLWLAANRARQYDPRLKAFYDKKRREGKPHRVAVTAVARKLCHVVYAVMRDGEPYDPSK

SEQ ID NO: 63498 - protein, 427 aa, unidentified
MKYKQNEKILQLTEATLIVGIDIAKYKHVARAQDFRGIQFGKPLTFENSFTGFTSLMTWVESLKMKQGKTEVVFGMEPTGHYWLPLAYWLIDKELKVVVVNPAHVKKSKELDDNSPTKNDVKDARVISRLIEDGRYSEPNLPKGMYANLREGMNLYDQLMKDLQAVQGRVHQWIDRYFPEYLQTFSEWEGKASLQVLRMGLFPDEIAKCQEEEILVEIRKEVKRGVGIKKVRQLKDAARSSIGIKEGRDLARLKLKTLLAQYDLIQREIATVWERIEELLQQIPGVEEMTGILGVGEKTIAAFFAEIGAIENYDHPDQIIKLAGLNLKLATSGKWKGKTVITKRGRPKLRSLLYKVILPLVAKNPAFKALHHYFTTRKDNPLKKKQSLIALCSKLIRILFVIGKKQVAFCPEKMLKDIPHFRLQEAA

SEQ ID NO: 63499 - protein, 372 aa, unidentified
MNYNTVYVGMDVHKESFTFCAYTIDAEKGSRFQRTEADYKNVLRYLEFLRTVYGNDANFICGYEAGCLGYTLYHQLTEHHVNCVILAPTTMLEQRSKKRIKTDKRDAEIIAKCLAQHNYSPVHIPTAADEETKEFLRMRDDHKLALKKVKQQILAFCLRHNYRYDGNSHWTAAHIKWLKSLKPEALYKEILDEYLLTYTALSDKLERLDKRIEELASKDEYKESVKKLCCFIGVKTHTALSVLVEVGDFHRFASAQNFASYLGLVPGEDSSGDGQTRLGITKAGNRHVRMLLTEASQCYARGQIGFKSKELKSRQAGNSPQVIAYADKANERLRRRYYKMVLGKSKKPNVAKTAIARELACFMWGMMTDHVA

SEQ ID NO: 63500 - protein, 367 aa, unidentified
MQKVRFVGLDVHKESIAIAVADGDGSAPQDVATIPNEATALLKRLRKLGDGAKVRCCYEAGPTGFVLQRVLSAAGIECIVVAPSLVPRTAGDRIKTDRRDAVKLARFLRSGDLTAVHVPDAATEAMRDLERSRDDAKRAERNARHQLSKFLLRHGRIYGGKTAWTGMHLDWIRSQVFDHEAHNRVLVDSIQAVENATARVDRLTKDIVELVESWSLRPLVKALQALRGVQLVTAVILAAELGDFARFASAPALMAYLGLVPSEHSSGEAKKRGRITRTGNGHVRRILVESAWSYRFRPSMSRAIRQRNEGVAPAVQAIAWKAQQRLNGRYKKLLGRGKNKQQTVTALARELAGFVWSIAQQPQLLAN

SEQ ID NO: 63501 - protein, 421 aa, unidentified
MEILYQRCAGIDVHKDQITVAVRLPGSGPGGRDTQVRKFRTFYGVLREMTRWLASLGVTHVAMEATGMYTMPVFHALLEPAGFEQVLVCNAAHVKNVPGRKTDAVDAAWLAQLLECGLLAGSFIPPENVKALRDVVRYRKKLVEQRSSEVQRLGGVLQDAGIKLDSVASAIDTVSGLDMIRALIDGERRGAVLADLARGRMRAKIADLSLALEGRFDDHHALMCTLHLEHIASLNEMIARLDAQVEKMMAPFARQRDLLVTIPGIAARIASVIISELSPQVTAYFTTDAHLASWTGLCPGNHESAGKRKHGKPRKGNRHLKAALIEAAWSAVQSDGRLKARYHRLVLRFGGYKNKAAKKKAIVAIAHTLTVIIWHVLAAGTPYAELGADFYTRRIDPRHETRRLIARLEALGHKITIQQAA

SEQ ID NO: 63502 - protein, 332 aa, unidentified
MTGFAWLGIDIAKQKFDVALTWNTRRRAKVFSNDGEGWQALLRWLKDLGIGQVHACLEATGRYGDGLAIALYEAGHRVSVVNPAQIKHFGRVKLGRNKTDRADAALICDYCRLFEPAAWTPPSAALRQLRDLVRTREALSASRVEWANRRASGQGTAVADAAMAKVIAQLEKEITALDQAIEDALGQDDDLQAKHDRLVSIPGIGTHTAAVILCELPGPDVLRTAREAAAYAGLNPSHRQSGSSLDAPARISRIGNATLRAALYFPALAALRWNPLVAALRQRLKDQGRLKPKQIVAAAMRKLLHLCFGVLKTGKPFDPEHTTSTEEAASTV

SEQ ID NO: 63503 - protein, 344 aa, unidentified
MLYVGLDLSRKRLDFDARLVGGELFERGAVPPDGDGLAGLVRRLGDAEVLAVIESMNGARFVHDRLELHGWDVRIADAVKAKGLAPLACKTDKIDAWVLAELARLDLVPEIWLPDPEVRAERERARFRLHLVKHRSALKNRVHSILIAHGVPNPSSDLFGVGGRRLLERLLLPEPWRSTTTASLALIDTLDEEIDHCERELRRLGADHRYVPLLMTCPGIAWILAFTIASEIGDIGRFATPVKLVGYSGLTPKVNQSGENDRRGPLRKNGPNHLRWALVEAAHTAARHPSFQPILERKRAQLGHKRGTKIAAIEIARRLLRAIWHMLTRGQPFAPAGATRPLAA

SEQ ID NO: 63504 - protein, 344 aa, unidentified
MDHFAGLDVSVKETSVCIVDDTGRIVREVKVASEPEALLVVLTNPTYHFKRIGLEAGPLSQWLFSALAEAGLPVICVETRHMRAVLKAQINKTDRNDARGIAQMMRVGLYRPVHVKTLRSQKLRMLLTHRQLLLSKAIALENDLRGTLRNFGLKVGMVGKVKFEARIRELVESLPDLAVLVEPMLIVRRMLREQIVILHRGLLAIVRDDEVCQRLMTTPGVGPVVSLTYRATVDIPARFRKSKSVGAVFGLTCAKHQSGEVDWDGRISRCGDEMMRTMLYEAAQAMMRSKKWSWLKAWAMQIARRRGMKKAIVALARRLAVIMHRIWVDGTEFRWTREQAAVAA

SEQ ID NO: 63505 - protein, 462 aa, unidentified
MINYKEAYMKNEDKIKNNSKRGLSMINSDAAGIDIGSREHYVCVPADRDEKNIIAFKTFTSDLKKMAAWLKKCGIKTIAMESTGVYWVPVFQVLETSGFEVILVNARHVKNVPGRKTDVKDAQWIQQLHSYGLLSASFRPEDQICELRALTRQRDRLTKSASTHVNRMQKTLNEMNIQLHHVISDIAGVTGMNIIKAIINGERDPIKLAQFRNVNVKSDENTIIKALEGDWRKEHLIVLKQELEIYEFYQKQISECDVAIESCYKEFDKHSNGDLTTGKKQRKNKNSPQFDLQQSLYDAAGVDFTTIPGLSELTVQTIVSEVGLDMDKWKTEQHFASWLGFSPTNKTTGGKVFDTRTRKVKNKASTAFRMAALNLGRGKTAIAAFYRRMKGRLGTPKAITATARKLACMFYRLLKYGHEYVERGIEAYEKKYKETMVANLQKQAIRLGLSVVKTESSVKALC

SEQ ID NO: 63506 - protein, 341 aa, unidentified
MKNLFIGVDFSKEKVDVAIIFADGLTETAPRVFNEFKTTVSGYKQLVKWVEKNSYGIDPSLWLFCGENTGDYSKGLCNFLYGKGYDMWLENAKSIKDASSLRRLKSDRADASMIAEYAMRNHDRAIMYEPLSESLAQLRELFLYRQMVVRHRCSFQVRRGEKKLTMEKSTIKTMISQSGRHIVSELNKEVEKIDKRIAELIKSDEELTEVFTIVTSVPGIGTQNAVCLMVYTDNFRRFNYDSRKIACYYGIAPFGKDSGTSVHSDPRVHYMANRQIKAMLTQAALAAVNFNPVMARYYMRLVERGKKKQVALNNVKNKLVHLVTAMVRNRKTFTPEYKISA

SEQ ID NO: 63507 - protein, 403 aa, unidentified
MSPEHSIDIFLGLDVGKSEHHACALDRDGNKVFDKPLPQLESELAGVFHQLQKLGTVLVIVDQPNTIGALPIAVARDCGCEVGYLPGLAMRKAADLYPGRAKTDKRDAFIIADTARTMPHTLRAVDRNDEVLSALKMLSGFDDDIARDCTRTVNRLRSVLTQIYPSLERVFAGSTLTRTPILELLIHYKGPQGLKRAGYQRVLNWMIKRTRKDPTPLVDDIFTALKAQTVTVPGSDAAELVIPQLAANIQALKEQRNTIAEQVEEMLADFPLCEVLMSMPGVGIKTAAQILLAIGDGSDFASAGPLAAYSGIAPVTRRSGSSIRGEFPARSGNKRLKNALFYSAFAVIRSHEPSRRYYERKRAEGKRHNAAVICLARRRCNVIYAMLKNKEFFREIPPRPVAA

SEQ ID NO: 63508 - protein, 351 aa, unidentified
MDQFAGLDVSVNETSVCIVDETGKIVREVKVASEPDALLTVLKNRTYHFKRIGLEAGPLSQWLYSALAEAELPVVCVETRHMQAVLKAQINKTDRNDARGIAQMMRVGLYRPVHVKTLRSQKLRMLLTHRKLMLSKAIAIENDLRGTLRNFGLKVGMVGTVKFEARIKELIENLPDLAVLVEPLLVVRRVLREQIGILHRRLLVIVRDDAVCRRLMTVPGVGPVVALTYRATVDVPARFRNSKAVGAVFGLTPSKYQSGEINRTGAISKCGDEMMRVMLYEAAQVMLTRTNKWSWLKAWAMKIARHRGMRKAIVALARRLAVILHRIWVDGTDFRWTRKVAAACVVKDQMR

SEQ ID NO: 63509 - protein, 319 aa, unidentified
MAQNDLVVVGIDVAKDKVDVCIRSLSLRCTFASTVDGRRELVSLLRRKKVGKAAMEASGGYEREWAKALRDARIEVRIVDPKRVRDFARSAGRLAKNDAIDSEMIAWFAETFGEAPAQAYDAEREKLAQIVNARQGLLDLRTTLQNRGEHAGPEPVRKMHARLLKTIAAEVVKLEAVIAAMIKATPHFAELAEIIESVPGLARTTSAGLIAKMPELGQVGNKVAPALLGAAPYDDDSGRRQGERHIKGGRRKLRNLFYMACLGAATRHNPVLKAFYDRLIAKGKKPKVALVACMRKLIVILNIMIARRQKWDPKLHVLG

SEQ ID NO: 63510 - protein, 345 aa, unidentified
MSSMYYIGLDVHKKTISYCVKDASGKIHQEGKIGATRRELNSWMRTLAQPWTVAMEATIFTGWIYDHLLPHAAQVKVAHPVMLRAIALAKKKNDCLDAAKIADCLRCDLLPECHMVSSEIRERRRSLRYRHLLVRQMVQMKNRVSGLLMETGVSYNKQRLHKVGYFRELLSSNEEIHPSIRPLLQLSRETIVRLQKTEYALVSSLQRDPLLVERVERLKTVPGVGPITALTWALEMGEVSRFRSIKQAISYCGLCGDERSSAEKVLRTPLSKQRNKHTQRVLVEAAKLAPREDHHLALVYESEKQKGNANRATLAVARKMVAYLLAVDRGKREFVPAEEHRGAAA

SEQ ID NO: 63511 - protein, 348 aa, unidentified
MEKSLFIGIDFSKKMFDVSVIHQNNLQAVDYQQFENSKEGCVALLKWIKTLTKEPGKRWLFCGEHTGLYSVCLSEYLIKKGLFIWLENPLQIKQSSGIKREKNDKADSREIAFYAYRFRDRASAYCLPDKALKSLELLLSFRERLVSNKQVLLVSAAEIRRVMTRDTTARFIYEQSQKDIERINKEIKEVERRLLEQIESDKELQENYELVSSVKGIALINTAAILVATQNFTRFENSRQFACYSGMAPFGKQSGTSINSKPRVSRLANKKIKVLLTQAAKSAIIHDPNVKHYYERKLAEGKDKWLIINNVRNKLIHRIFAIVRNKQPYFVDYLNINLQKNQKLSKAI

SEQ ID NO: 63512 - protein, 350 aa, unidentified
MTSLAEIADIVIGVDTHVDTHTAAIVDTTTGAVLDEMTIATTPPGYQDLLTWADDHCPARAWAIEGTGSHGAGLTRALTSAGEVVVELDRPQRAARRHGAKSDPLDAIRAAREALTRPVLGTPRAGGQRQALSVLLAARRSAVDAATVAQRQLFSLIVAAPETLRATFRGVTGPERVKRAAVLRAHRGDDVETATTRQVLRTLARRVQALTTEVDTLEKQITVLVKAWRADLLDLLGVGPIVAATVLCAWSHPGRIHSEAAFAMLAGIAPIPANSGRVTTRYRLNRYGDRQLNRAIHTIVLARQRYDEATKTYTARRTAEGKTPREIRRCLKRYIIRDLYRTLESGPTTP

SEQ ID NO: 63513 - protein, 315 aa, unidentified
MADPTTVGIDASKDHLDVAARPGGRFRVKNDPGGLAELVERLGRLAPALVVLEATGGYEAEALAALLAAGIPTAVVNPRRVRQFAAGVGQHAKTDPIDAAVLAHFAAVVAPPPMAPADPERVELAALLDRRRQLLGMRVAEGNRLRPGLPTAVRAGIDAHLAWLTEQIRAIDKEVAAAVRRVPAWREKDRLLRSIKGVGPVVSRTLLADLPELGARPPGKLAALAGLAPFASDSGRRRGERHIRGGRREVRRALYMGALAVARVPGPLRDFAQRLKARGKPSKVVLIAVARKLLRIANAVIRDGRPWEANRATAA

SEQ ID NO: 63514 - protein, 317 aa, unidentified
MNNTEIQTPVNVGVDVGKANLDIALHPSGQFYTIPNTEAHIRRFVRILKNYSIERIVVEASGRYEQALVQACDQAGLPIIIVNPISVRRYAQAIGVLAKTDRIDAQVIAQYAATLKPEFKPIPDKTSQKIKDLLVRRSQLLEMSTMEKNRLQILPKPLHRSIKSMLRMLQSQIETVTRQIEQEVAKVDQWRSKMEIMTSVPGVGKVLAYTFLSELPELGSLNRKEIAALVGVAPINRDSGKLNGKRRIRGGRHRVRTVMFMAMLSSIQCNPVFKRFYERLKAQGKISKVALIACMRKMIVVLNTMIKNQESWRAEMA

SEQ ID NO: 63515 - protein, 364 aa, unidentified
MGFATIIALDLGKFKTVCCVMDVASRTHAFETIDMSPANVRDLLARRLTLPPADTLVVFETCDTAGWVHDLCTTLGTSVTVVNANDERWRWRRVKRKTDRDDALKLARLALLDQLGAVHMPGPPARQRRRLMLHRRSVVSRRTQSRNAIRSIFNQQGLALARGGKQWTLAGVAQLREHARPIDQCVDALDLWRGRLQVELDLIAATDAQLKLLDDKLDELAGADPRTRLLRSFKGVGPRLSEAVVLYLDDPRRFKTAAEVACYAGLVPKQLESGQMSRNGHITGRGPGLLRSLLVEAAWTVYRCHDWARAWVEKVSRGGRGRRKLAIVALARKILVICWGMLKTNTPFRQSAITPALASPAALE

SEQ ID NO: 63516 - protein, 402 aa, unidentified
MVYDYVIGMDVGKYFHHACVLDIDGAQVLSKRINQNEQSLRALFSDFCSGNNKVLVVVDQPNNIGRLTVAVAQDLGIDVRYLPGLAMRQLSRIHAGNAKTDIRDAFIIAHAGKNLPASLRSVDRVDKAFCQLKVLNGIDEDLARSYTRLINQIRSALVGCYPQFEQAIRGQIIHRKWVLHLLARYGGPTKIKRLGKTKTIAFARRHKARNPEPVIDAIFAAIAEQTVSIAGAHYAEMGVAMSAKDALAKRDHRKDIEKEVIDLIDDIPHTQILLSMPGIGPKTAAQILMTVGDMSDFPTPGHLASYAGLSPRTNQSGTSIMSNSLNRAGNKKLKNALWQSSFASIRFHERSRQFYERKRKEGKRHNAAVVALARRRINVLYAMMRNHEYYRDPAPAKEAAAA

SEQ ID NO: 63517 - protein, 336 aa, unidentified
MREITTLAIDLAKIVFQLHGVDARGVCVLRKQLRRGQLLSFLAQLPACLVAMEACGGAHDWGRRIRALGHRVKLIPPQYVKPFVRGDKTDRNDAQAICEAALRPGMPEVAVKSEEQQGMLALHRLRELIDKQRKQLANQLRSLLAEFGEVMACGIPTLRRELPERLERVPAVLQGVLREGYDRLLELQEHSQAHTRRIHELAKADPLCQRLMRERGIGAICASAYVAHIGDPTRYRNGRQVSASLGIVPRKHGTGGKEVLLGITKRGDRYLRTLLIHGARAVIRQVRGKSDPLSLWLQQLIARRSVNCAAVALANKTARRLWAIWRAEQPQLLAVA

SEQ ID NO: 63518 - protein, 306 aa, unidentified
MASTFSSLPHKVFPNTPTGFLQLSAWLSKQKVERVHACMEATGTYGEALAVNLHDAGHVVSVVNPAAIKAYGQSRLSRTKTDKADATLIAQFCLERQPPQWQPLPAEIRELQALVRRLDALLEMRQMEANRLEVSAGATAVRESLVGHLAFLDEEVAATEKLIHTHIGSHQGLLEQHDLLVTIPGIGSTTAAKLLGEILDVKLYRGARQLAAFAGLVPRLHESGTSIKRKARLSKTGAPRLRKALYFPAIVAIKHNPQIRALGMRMKGRGKCSMEIIAAAMRKLVHIAYGVLKSGRPFDPEMAKTA

SEQ ID NO: 63519 - protein, 422 aa, unidentified
MLEETQETEEIIERVAALDVGKAELTCCVRVPGQGGSDRRLQEVRTYQTMTRWLLVMADRLQELGVTRVVMEATSDYWKGVYYLLEAAGFETWLVNARDVKHLPGRPKTDTLDAVWLCKVAERGMCRPSLVHPRPIRQLRDLTRYRRALIQDRTREMQRVEKLLEDAQIKLSSVATDIFGVSGRAMLEALIAGQRDPKALAQLARTRLRAKLGQLEEAFTGHFSDHHAFLLARMLGRIDQAGADIAELEAHIDQEVAPFAQAVDRLDEITGVGRTAACAIIAEVGVDMGRFPTPGHLASWARFAPGVKQSAGKTKGKSSTGHGNPYLARVLGEAAAAAGRTDTFLGERYRRIARRRGAKRAIVAVGRSILIIIWHLLADPDARFHDLGAGFYHTHINPERAKRNHIRQLEALGYKVTLEPAA

SEQ ID NO: 63520 - protein, 344 aa, unidentified
MDHFAGLDVSVKETSVCIVDDTGKFVREVKVASEPEALLAVLKNPAYHFKRIGLEAGPLSQWLFSALAEAELPVVCVETRHMQALLKAQINKTDRNDARGIAQMMRVGLYRPVHVKTLRSQKLRMLLTHRKLLQSKAIAIENDLRGTLRNFGLKVGMVGKVKFEARIRELVENFPDLAELVEPLLVVRRVLREQIVNLHRRLLAIVRDDDVCRRLMTVPGVGPVVALTYRATVDVPARFRKSKAVGAVFGLTCSKYQSGEIDRSGRISRCGDEMMRVMLYEAAQSMLRSKKWSWLKARAMQIARRRGIKKAIVALARRLAVILHRIWVDGTEFRWTREQAPVAA

SEQ ID NO: 63521 - protein, 322 aa, unidentified
MIFVGIDMSKLTFDVAVLLDGRYQSRQFENKTSGFSQLSKWVTSFKKPAYLCLEATGIYGLALAKQLYKTDQKVIVANPLQTHAFAKMEMVRNKTDKADAMSIARYCQYLFNKGEIDKDLFIPRSAVFERVQFLVTRLDQLSKMKSQENNRLSVSLDKTAAQSVKSMLMSIDKQITSMKKEITRIVKQDEALAAQLKLLVSINGIGDKTAWALLAYIGDITLFENAKQISSYAGLNPSITQSGTSINHSSLSKTGSARLRKSLYMPAMVAIRFNPLMVAFYNKLLSKGKPKKVALAAVMRKLLVLAYGVLKSGKPFDVNYQH

SEQ ID NO: 63522 - protein, 346 aa, unidentified
MVLIGCDFHPSWQQVSWLDRGSGETGDEKLLHEAGAVEKFYKRFPAGSRVGMEATGNCQWFVETVQRTGHELWVGDAARIRASDVRQQKHDKRDARLLVQLLAEERFPRIWIPSREEKDLRQLLIHRHKLVRIRVQLKNGLQNLAMNQGLLKKRKLWSEAGQRALCELPLAPWASRRRADLLKMMSELDGKIDVLDRAVVDAAESNKKARLLMTQPGVGPITAMAFVLTLGEASRFPRGKQVASYLGLIPREYSSGGKQRLGSISKQGSSFLRMLLVEAAQVAVRCDPQMRSEYLHRCRRMAKGVAKVAAARKLAIRLYWMLRTNTAYPEVVRVESSSRVALAGAS

SEQ ID NO: 63523 - protein, 402 aa, unidentified
MNAVGIDVSKGKSMVAIMRPFGEIVSAPFEIKHTASDINSLVELINSVEGESRIVMEHTGRYYEVLAHQLSEANLFVSAINPKLIKDFDNDSLRKVKSDKADAVKIARYALDKWQNLKQYSVMDELRNQLKTMNRQFGFYMKHKTAMKNNLIGILDQTYPGVNTYFDSPARSDGSQKWVDFASTYWHVDCIRKMSLNAFIDHYQNWCKRKKYNFSQSKAEEIYGKAKELVPVLPKDAITKLIIKQAVDQLNSASTTVESLRTLMNETASKLPEYPVIMAMKGVGTSLGPQLMAEIGDVSRFTHKSAITAFAGVDPGVNESGTYEQKSVPTSKRGSADLRKTLFQVMDVLIKTHPEDDPVYQFLDKKRAQGKPYYVYMTAGANKFLRIYYGRVKEYLSSLPES

SEQ ID NO: 63524 - protein, 412 aa, unidentified
MFYVGIDIAKRSHVACVMREDNSLEIKPFEFSSTKSGFEKLKAQLTSLACDVSEVLIGMEATGLLFDNLYRFLRSLEYRVVLLNPYQTAKFREMDTMKRVKNDNIDAKMIAALIKSGRFNEGYVNDDQLQSLRTLYRHRATLDDQLKAIKRQTQTILTVVFPELEQILSDPFNITGLALLEKYPTAKHYEYASEKRILKTFRCIKGNNFNDAKAKKLLALSKESIYSGAGKEGYEATIRSNISLIRLLKEQIQSVEEAMLALFETKETTKEEQEEIAKLIDNLRTIPGVSDKTILALLAECGNLDRFHNTKALVGYLGLYPTLEQSGDTQKNGRLAKRGARLAKKAIYLATIAAIRHNKELKQVYMNYRSKGRAKKECIIITARKLLAIIYAIYTHNTPYDPNRVFVAQPNT

SEQ ID NO: 63525 - protein, 349 aa, unidentified
MPKQIAVDLAKSVYQVAESVRAGQVSLRRRLSREAFRRYIQEQAEPVEWLMEACGTAHYWGRFAQSQGHRVTLLHARYVKPYRRRNKTDRNDCDALLKAARCAGIHPVPVKSHEQQQLQQLHGLRETWKKSRTQRINLLRGIFREMGLEAPAATAAFLRAAHELVDCPEVVALRGQLQIVLAEINLYEQQCMAECEQQLARWHADDAIVGKLDEVSGIGVLTASALKTADGQPERFASGRQLSAWLGMTPREFSSGNNCKLGHISRQGNVYVRTLLIHGARAALLAAQRLHSRAPERLTRLQRWAVATAARIGHNKAAVALANKLVRICWAVWCHERRFSGDWQSSRPA

SEQ ID NO: 63526 - protein, 367 aa, unidentified
MSKSTSKKNSLSANNLSACTTVAVDLAKSVFQVAGEDHLGQVIYEKRLKSREAFSTFLRQLPPGTSVLMETGPGAQAWARLLLEQGNQPRILPAQHVAKHRSGPKNDRNDVLAILRAGRDERAHAVPVKTVAGLEMQALHRVRRRYVKEHTAMGNQMRGLLLEHGFSIPQGKAAIDRNVTQLLEDSSQPIPALLHELIAELLAEWKHMAERIEVMTGRLERAVREDDTAKRLMTVRGVGPIFSSAVIAKQTEPERFANARDFAAYFGTVPEQYSSGNTIRLGKMAKRGDAYIRSLAIQGAHAVLRQLNPSSDHPDDRRLQRWLGRHGQKGAAVRLANRNLRIIWVLLQNKDTYHRQPAERQEVVIGQ

SEQ ID NO: 63527 - protein, 385 aa, unidentified
MSQPSIYVEALQYDHTLVLAIELSSKSWVLAAQIPGLQKTKAKRTIEPDKLALRSAIDGYRARAAAAGCQVDRVVAAYEAGWSGFWLARWLIAEEIEVHVIQPSSVPVDRRMRRAKSDGIDAELLLRTLLAWLRGEPRVCSMVPIPDEADEDTRRCVRERTELVSERVGLANRIGAVLATLGINDYNPLLKNRRRRLITLRTALGEPIPPNALAKIERLLSRLELVLAQIAELERERDAVAESSSPDKAGKMIQQLCSLRGIGVQSATVLVREAFVRRFANGKALGSYAGLTATPYSSGGIEREQGIGKAGNRRLRTVMVELAWLWQRYQPGAALINWFRERTGSTGRRGRKVMVVALARKLLIALWRFAVDGVVPEGAAMKPGI

SEQ ID NO: 63528 - protein, 300 aa, unidentified
MDNKVIDFTGSNIYAGLDVHKKSWYVTILTDEMEHKTFSQPPESLVLSKYLHKHFPGANYYSAYEAGFSGYVHHRELLSQGIQNMVVNAADVPNTNKDLTTKTDKVDSRKIAKGLRSMMLRPIHVFDRKHEEFRSLSRQRHIFQRDLRRYKQRIKSFLLYYSFHIPQDIDASSWNLDLEAWLKGIKMETANGEAVLKNLLEGYLFHKQQVRSLSNELRRCTRKEHKEAYYLLRSIPGIGPLTAITIIAEIKDMQRFSSIDKLSSFVGLMPMSYSSGQTERIGGMTYRSNTYLRTMVIESS

SEQ ID NO: 63529 - protein, 343 aa, unidentified
MDHYAGIDVSLEQSSVCVVDAAGRIVREAKVASEPEALITFLRDLNLPLVRIGLEAGPLSQWLQAALVKAGFEAVLLETRHVKAALSAMIVKTDRKDARGIAQLLRMGWFRPVHCKSAPAQEVRALLVARKQLQAKMRDVELSLRGLLRGFGLKVGEISKGQFAPRVRILVAGHTMLERIAEAMLQAREALKVEFGKLHRAMLAIVRPDAVCRRLMTVPGVGALIAVTFTSGVDVPERFARSKGVGAHFGLTPRKYQSGETDITGAVSRVGDVMVRTALYEAAHILLTRAVRFSALKRWALEVAKRRGMKRAKVALARKLAVILHRMWVDGTTFRWGREATVA

SEQ ID NO: 63530 - protein, 346 aa, unidentified
MIYIGMDISSKSFTVHAINERKEVVFKGDIEPTRAGLREMINRLKDQPKLIVFEAGNQLKWIALTLKKMKDVEVHVVHPNEIKWINQSSGKTDKIDARKLAYLARGDMLPRKVHIVEGKARELRELISARHRLQSKRVALINAIRGNLKQEGYKLPGKFFQSKKWREELEKVRVGETLKLILKSYMSGIESLKRAEEELTARILEIEGKDIELVESIPGIGGLSSRVLVSAIDDVSRFDDKKAVAKYGALTPRIYQSGDVVHLGRINRDGRHEVRRVLLQCAHTVTRMKTHAVKPLKLFYEKIRNRRGKKIAVVALARKLLTIAYGVLKTGTAYNPEVLGVASPTS

SEQ ID NO: 63531 - protein, 425 aa, unidentified
MTACQLHYLGCDRSDAHLDFTLLGTDIAPESVRLLARAADVEAWLGRWRRRFPKHQLCVCFEQPAANLIVLFSRFEFVRLYPINPATLKSYRETFVVSRAKDDKTDGYWLADLVRTHSDQLPSWAPLSPEVRKLTALVEGRRDLVDQNTAWSNKLISLLKDYFPEALDLIGEHASSPLAVAFLRRWPTLQQAQSAGWPAVERFYREQHCGRATALARRREVIKQARPLTDDPAILEPATLRLEAILGQLEPLTAAIGRYDQQIAAVFAAHPDHLIIASLPGVGPVLGPRLLAALGDDRSRLPDARALQCFSGIAPVLIRSGLSTIVSRRHACPRFIRQSFHEHASESIRHCHWARAYYQQQKDRGKKHHTITRSLAFKWQRILLRCWQDHTPYDDALYMRSLKDRNPTLYQLALTTKLPREEKAA

SEQ ID NO: 63532 - protein, 384 aa, unidentified
MAFKIFRKNCCGLDVHKTWIYACMGITDTNGRTEYKQARFSSFTKGLQKLADWLAKYDCNDVCMESTGKFWIPVFNILEKTCWVTLAYPKYTKPQKGNKTDHKDAKWICDLYMCDMVNPSFIPPPDIRQLRDLMRYRSKLTNIMTSEKNRALNCLTVSNLKLDDVFSDVFGKSSRSVIRYILEHPGETFQVAPFIDRRCKHPVEEIQAVIDGTISHQQAVKLRECLQHLDELEVHKTNVEKEILCLVQQYPYQLELLQTVPGFSGNIMTAIALISEIGADMSVFPSAKHLISWAGCCPRNDQSSKKVKSTRISRAGVYLKPLLVQVAIQPFTANADKLSAAGALEIRCQICDGRFLSMWAALFIFLGCPLPPCPKNSSMSTMAG

SEQ ID NO: 63533 - protein, 378 aa, unidentified
MKAARFTADEIERVAYLTSKGYLPVAVDVASRVFQVCYYDLGAKHIRNYQLSRVKFFEFIDDTQTPRKLIGIEACGSCNYLCRYIEEHNHKCHILPAQKVKAFLHLDKTDRIDALGILKALITPSMQHIPARSQENQYLLNLITVREQLNKQFVQTVNAAHAFLYESGVVAGTVSVKSANKVTEALKALGNTETEKDHSEDDCSYSHLNCISESLLSNIESLQTKIKEINTHLLSYASNNEICSNLQTVPGIGKLSAVALYSAMGDPERFSSSRAFAAFIGVAPVTTGTGGKTTVLGIRKSGIQSIKKMLYMCAMVYLSQAMKNGTESSWLKQKLNQNRSKKIIICAIMNRLARIAYAIAKSGQPFDENKCNMIKKLR

SEQ ID NO: 63534 - protein, 411 aa, unidentified
MRAVGRSIGLDVHRDFCEVAIAEDGVVRSAGRIETTPEALELFARSLGADDRVALEVSGGAWEIARILEPHVERVIVVSPDDTGIRQARAKTDRLDARTLARLLAAGELDAVWMPDERTRVLRRRLARREQLVRSRSRAKNEVHAVLMRRLKGRPPVSDLFGVKGRRWLRGLELPLEEAETIESALRHVEFLDQEIAAVERLISGEALESAEVRRLMTVPGVNVICAATFLGAVGDIRRFRGSRQLVAYLGLDPRVRQSGTEPARSGRISKRGSASARWVLVEAAWSVVQQPGPLHAFYQRIRARRGHGIAVVAVARKLAALFWCLLSRGEDYAHQQPSLTAKKLRLLEIRAGAKTLKGTNTGLFATRQRMRQAERELAQQAEASYKRTVSDRQAAAAKKRAGASVTPGRA

SEQ ID NO: 63535 - protein, 361 aa, unidentified
MAKARTLVGLDVHASKVVAAMLDAETGEIHFSRLPGEMDRTLALCAGLEPPVRAAYEAGPTGFGLARALGAAGVDCLVAAPGKIPRAAQARVKTDRRDAEHLVRLLLAGKLEAVRVPSGAEEALRDLVRAREDVRGDLMRARHRVSKLLLRHDRRFSDGQKAWSQGHRDWLARVELDDPVAQLVLCDYLAAVEAQVIRRDELERRIAESVPGSPWSELVPRLRCLRGIDTLSAVGLCAEVGDFERFARPGELMSYLGLVPSEHSTGDKRRLGAITKSGSRHARRLLVEASWHYRLGARPSRELAKRQAGQPEHVVAIAWKAQQRLGRTWRRLAEERGKRRTLVAVAVARELAGFVWAIARA

SEQ ID NO: 63536 - protein, 310 aa, unidentified
MTWPRPRLTSAVRPTGQRWVVSYDETGVGELVSQLEGLGPSLVLLEATGGLELPLVAALAIAGLPVVVANPRQVRDFAKATGALAKTDALDAAVLAHFADAVRPKVRPLRDAETQVLNSLVARRHQVMTMLVSEKNHLGTAISAVRHRIEAHIAWLEQELNDLDQGLRQTLRRSPVWWEKDDLLRTVPGVGEQLSLTLLANLPELGTLDRRQIAALVGVAPFNRDSGTMRGKRTVWGGRARVRSVLYMGAMVASQHNLVIRDLYQRLLAAAKPKKVALVACMRELLTILNAMVKHRSPWRDLTVNVGNSS

SEQ ID NO: 63537 - protein, 351 aa, unidentified
MAKDSDGALQVIGVDLGDRHSQVCVLDIDGEVTEESRLSTTAAAFSRHFGGRPRSRVVLETGTHANWVHDLLAGAGHEVLVANARKVRAISANERKSDTVDARMLARLGRADVTLLCPVTVRGEDLRQDLGLLRARAGLVVARTMLVNSVRGLAKAAGHKLPACSAASFHKQELHETLGGALAPMLKILECMSHEIQSYDKALESLCEQRYPQTKLLRQVKGVGPLTALCFVLTIGDPARFKDARAVGAYVGLVPRRDQSGAKDPQLRISKAGDPMLRTLLVQCAHHILGPFGVDSDVRRFGLKLAVRGGKSAKKRAVVATARKLAVLLFALWRSAETYEPLRNSALAKAS

SEQ ID NO: 63538 - protein, 393 aa, unidentified
MALYVGIDVSKEKFDACGIGDEGKKLFSLSCSMNRAGFEKFIVQLTKMNTAALLLGLESTASYHIALFSYLTAKGYRVAIINPLLIANFAKLSLRKTKTDKKDAFTIAQFLLMQRAAVTTKTESPRLTELKDLSRRRERLVDQMTSLKNDMKRILAVTFPELETITGIFTKSTLRLLSEFPSAHSITQAGYDAVAAIVTSRSKGRKSRASVKMLMDTAAASVGVASPAKDVILKQEASLLLALEDQASEIMKLIRSLADDTMQRDAKLLTSLRGIGEKTALNFLIEMGGDIKAFEHDRKLIAAAGLDPTTYESGKYKGQSKISKRGNRHLRRVIWLMTTKTIIADPMFRAYYFKRREEGLIYKKAVLATAHKLIRVMFSMLVHQKPFDPERRK

SEQ ID NO: 63539 - protein, 387 aa, unidentified
MSRNARVPVPVTTLDQDSTLVVVLELSARSWLVGARVPGIGRMSRYALAPSAEALAAWLGTAKARAGAAGRTVVRVVLAYEAGRDGFWLARYLEARGVEVYVIQPSSVLVDRRARRAKTDALDVEMLMRTLLAWLRGEPGVCSMVPIPDVAEEDGRRPVRERQGLIGERLALLNEIDGLLATFGITGYRPLRQDRRAQLAALRTPEGNPLATNAAARIGRILARLELVMQQIAELEQARDAVLAKEAASGAAETMIRGLARLKGIGAELATVLVWEAYVRSFPNRKALGAYAGLTGTPFASGSTTREQGISKAGNRRLRSSLVELAWLWLRYQPDSKLAAWFRSRTGSVGSRMRKVMIVALARKLLVALWRFCRDGVLPEGAALKAT

SEQ ID NO: 63540 - protein, 429 aa, unidentified
MDHATSLTPAIVAWIGLDWADQKHDVCLQAVGSTDVEHTVVEQKPEALHAWVAELHRRFPHGPVALALEQSRGSLFYALMNYEFLRLYPIPPKALADYRRALYPSGGKDDPTDAQLLLEFLRKHPERFRPWVADDVETRQLALLNEHRRSLVDDRTALTNRLTALLKGYFPEALRWAEDLRRPLAWDLLAQFPSLERAQQASRLEVLKLYRVHTRRSPEQLEALCDEIRTARPLTTDRAILESSVLMVEILVEQLRALAAGIERVDKQLGNLFAAHPDRPIFQSFPGAGKALAPRLLAAWGSDRKRFATAANMQCFAGPAPVTVRSGKSKWVHRRFAGPTFLGQTFHEFAAQSRLKSPWAQAYYQQMRDKGVDHHPAVRALAFKWVRIMFRCWQDRAPYNEARYQQALKRRGSPVATTLSRLAIPPARA

SEQ ID NO: 63541 - protein, 427 aa, unidentified
MAKVEHTSDARVLVGIDISKHRHEVLIAAPGKTRRRRLTITNSTDDFKRLIAILREYGLPVRIGFEATGNYHRVLMYHLGVAGFDLKLVSSVALARTREALHNSWDKNDPKDAQVILHMLQIGAVQIFQDPMVAGTNDIQELSKTHDAVSRSKTELWHRILTHYLPLYFPEADRFHRSSRTDWFLAFLEMFPSPHMISALTKEEFTNAAWEVVGRKVEKTLMLSDIYETAKVSAGLPVSPDSDAIRMFRMMLAEGRSLIRQRNTIEDRAVELLGKRADYQLLRTIPGIGPINALTILAEAGDLRRFHHHRQFLKFCGMDLATVQSGMFRGRSKISKFGNARLRRTLWLAGQTAVLKKTNSFRDKFERYIARDRHNPDLRRKAYTAIAAKMARTIHAVIKSGEPYRPFFEGTSPGGRTPLCRAVEAAS

SEQ ID NO: 63542 - protein, 347 aa, unidentified
MDVHKESISSAVMNASGKIVMECVIETKASMILQFMNGLRGDLHVTFEEGTWASWLYDLLKPHVTKLVVCDPRRNALLKDGNKSDRIDARKLAELLYLNKLNPVYHGEHGTRALKELVRSYLTITKDLVRVMTRVKAIYRSWGIPCTGKQVYAPRHRGEWLAKISELGVRRRAEFYYQQLDALRSLRQEVRRDLLAESKKHQAWKRLCQIPAIGPIRAAVLLGILQTPHRFRTKRPLWKYSGFAIETRSSADHRSVHGQLQRSKKQISVRGLNQNCNHDLKNLFKGAAIVASSKPGPFQEFYAALLAKGMRPEMARLTLARKIATIALIVWKKGVCFDARYLKPQTA

SEQ ID NO: 63543 - protein, 371 aa, unidentified
MNTIVYVGMDVHKESYTLCCYSYDRDKVEFKQTIPSDYRLVLKYMERVREQYEGEVKFVCGYEAGCLGYSLYHQLTDHAVDCKILAPTTMAITSTNRVKTDRRDAGNIARCLAFHTYSEVYVPDDEDNAVKEYIRMRDDQKLMLKKIKQQILAFVLRKGKRFEGGKTYWTITHLKWLKNLELEGLDKETLSEYMITYEYLTDKIQRMDERIQSLAEGERYCEQVQNMSCLLGIKTHTALSLLVEIGDFDRFEKASRFSAFLGLVPGEDTTSDNVKRLNITKAGNSHLRRLLVEAAQSYTRGAIGHKSQDLKKRQSKCSPEVIAYADKANERLRRKFYRMTLQKNINRNVAATAVARELACFIWGMNTGNIA

SEQ ID NO: 63544 - protein, 373 aa, unidentified
MVHSSEAFVGIDTSKLRHAVAIADGGRTGEVRFLGEIENTAAATAKLVRKLAAKYERVTFCYEAGPTGYGLHRQIKSLGHECVVVAPSLIPKRPGDKVKTNRRDAVGLARLLRANELTPVWVPDGRHEAMRDLTRARETAMLELRSKRQQVSALLLRQGRSYPESKKTWSKAHTSWLASQKFDYPEQRLVFEEMMLALRQAQERLERLEQAIRAAVPDWSLAEVVTGLMAMRGLDLISAATFLAEIGDLSRFQTSQQLMAYLGLVPSEESSGDTIKRGSITKAGNRRARRMLVECSWSYQHPPRVGIVKQHKVDAAPPAVREIAWKAQCRLYRRYRALIRKGKLKTVAITAIARELAGFIWAVSRQIAPAAAR

SEQ ID NO: 63545 - protein, 429 aa, unidentified
MNSTQNKKIEQVKETTLIVGIDVGSEKHYFRAFHWRGIELTRKPVAFSNSMEGFNSFCNSVVELIQKNELKEALVGIEPTDHYWFDLGQFMGEKNIKFVMVNPHHVHKTKELDDNSPSKNDRKDPRVIAGLVRDGRYFYSYMPTGVYAELRNASNRRFVLVEEQTRAKNRLQKWIAVYFPEYKGIYTHIDAKGGLLVLKQAPTPEEIVRLGVEGIIKIWKDAKLRGNGHKKAMLILNAAMKSIGLKAGLTEARMEIQDLIEDYELQTKRLERVNDLIKELCQQVRYADKLLEIKGIGITTVAGFIAEVGDITRFDSTKELQKLAGLELVADSSGKHDGKTKISKRGRKRLRYLLFEAAISVVGKNEEFKEIHRYYTTREKNPLKKMQSLIAVACKLIRVFHVILTKGISYDASKMLKDIRRPGEQLKAA

SEQ ID NO: 63546 - protein, 359 aa, unidentified
MSEHMFIGLDVHARSVAAGLLDAGTGEVKSCSAPARSAELVPWLRAQGESISVAYEAGPTGFGLARACVAAGIPCLVAAPSRIARAPGERVKTDRRDALRLAKLLRLDELTAVRVPSACEEGARDLVRAREDARSDLMRARHRLSKLLLRQGLVWEAGAWTQAHERWLATQRFAERGLQIAYGEALAAVASVRARRDALDAAIVEEAAEPRWAEVVGRLSCLRGVSTLTAFGLAAEIGDWERFDGRSIGAYLGLVPSENSSGERRRQGAITKTGNGHARRLLVEAAWQQRRPSSHPSRELTRRRAGQPALVRVRAEAAGRRLHQRWRRFDARGKRSTVAAVAVARELAGWCWSLAVMDA

SEQ ID NO: 63547 - protein, 355 aa, unidentified
MTQLTYHPKDYNAFIGLDVDKSNYSFTICNDTPQKISKRIPSNPEHLYNYIKKEFDCKKVICAYEAGPTGFHLYDYLRRKGISCFITSASSIPKAPNERVKNNRIDSGKIADHLMSGKLKPIRVPEGIYRELRHLAMIREEYSAKRKVAKQQIKALLLYENLYPLIKDAGSDWSNRYLHVLKIIPCSFAVRQRLDRLLDDLDYAHQKLLGINKTLTIFCQEHEELKTYIHYLQSIPGIGFVIAVSLLGKIGDPAYLRDQRELAAFMGLVPVEHSTGDSVQKGSITRLGDKTIRFMMIEAAWVAIRLDKQLGQFYYRIKAKHHRQYASKVAITAVARKLTQIIYRVLKDKREYIKY

SEQ ID NO: 63548 - protein, 391 aa, unidentified
MPMYFVGIDISKYKHDCCIISAADQQIISKFTITNDKDGFEQLLTSLNSLSNPEDIKIGFESTAHYALNLELFLENAHHSFMEVNPVLIKEYKKSTTLRRTKTDSVDCESIARWLMTVEYKPHSKGFYHSYSLKSLTRLRDRLIRQRSFYLVKITNVLDHTFPEFKPFFNERLSKTAIYLLENYGSAEKMAHMNSASYDKLRCASRGKFSIQQFLRLKELAANTVGVNNSIFDIELNSLLTLYNSLCKEIKTLEAEITKLIEEVHPHYMSIPGIGPISAAVIYAEYGDISNFSNPGQMLAFAGIEPGINDSGTESHGGRMVKHGSSQLRYVLLNACLPLIRFDITFATYYAKKRAEGKKHRVAITHVAKKLIRVIYALERQDVDFNVQKLR

SEQ ID NO: 63549 - protein, 409 aa, unidentified
MDLVITRCAGLDVHQATVVATVRVPGDAGDRRIVTETFGTMTADLLALRDWLQAYGVTHVALESTGVYWKPVYYVLEDTCTLLLINMQELKHVPGRKTDVKDSEWLAQLLECGLLRASFVPPPPIRELRDLTRYRVKQVRDRSQEVNRLYKVLEDAGLKLTSVLTDVMGASGRAMLTALVQGTTDPTVLAELARGRLRTKLPALRRALQGRFRPHHAFLLEQGLAKIDFLDEAVERLTAEIDRRLVPFEPLLTGLDTIPGVNRIGAVSILAETGGDMTRFPSAGHLCSWGAMCPGQNESAGKRRSGKTRKGNRYLRATLIQAALGAMRSNGTALQARYHRVKRHRGHKKAIVAVGHQILEIAYYIMRDGVTYGELGADYFDRRHAERAVRRHVRQLEALGFHVAIEKAA

SEQ ID NO: 63550 - protein, 388 aa, unidentified
MPKIDTAAAPETAIREQDDAFLASLELSQSSWLVTVLQPITRKFSKFTVKAGEAGKLLEKLRQQQQKAQRQAKRPLRLVTIFEAGLDGFWLHRLLDAEGIEVHVVDAGSIAAPRRKRRAKTDRLDGEALIRVLASWLRGEPRVCSMVAVPTPDEEDERRLSRERQQLATERTALTNRINGLLLSQGVRGYQPLKRDRRERLEQCVTGDGRALPRHLKAELLRLLDRLELVLTQLKAVEAERDALIRKSAPDSRIAMLVGMRSIGEQSAYELCTECLYRDYANQRKLAAYGGLVPSPWRSGSIRHDQGLAGSGNPRVRKLMIQLAWLWQRNQPGSELSAWFRDKVKGQGARQRRIAVVGLARKLLIALWRYVTQGVVPAGAVLKPAQAG

SEQ ID NO: 63551 - protein, 345 aa, unidentified
MQYVGIDYAKLRSHFTVMTPEGRVVKRGYVANTPEALAMFMDALPLDQRAVVIEACRNWTVIHDLVEPYAQAITLAHPLKVKAIASARIKTDAIDSRTLTDLLRADLIPAAHIRPPAVRARQHVLRQRAFCTKLRTGVRNQIHTLLDRQAPALRVAYHAFKDVFTKAGREWMQAVALPEAERTLLTRYLAVEQTLVEQVATTTAEVTAWVAEDRPMQLVDSIPGIGAVLAALIAVEIDGIGRFGRAGQLASYAGLVPSTHSTGTVTRHGPITKQGNRWLRWALVEAVWPAIRANTALRRFYERIKARRGANPAKVATARKLCELVFQVLTRQTPFEVTRRVVQTT

SEQ ID NO: 63552 - protein, 319 aa, unidentified
MAQNDLVVAGIDVAKDKVDVCIRSLSLRRAFANTAEGRRELASWLRRQKVGKAVMEASGGYEREWAKALRDARIEVRIVDPKRVRSFARSAGRLAKNDTIDAEMIAWFAETFDEARAQTYDVTREQLQQMVNARQALKDMQSKLTSQDEHAVPAAVQRIHARISKTIAVELVKIEAAITALIQATPRFAELAEIIESVPGLARTTSAALIAAMPELGQVNNKIVASLLGVAPYDDDSGRRRGERHIKGGRRRTRNVFYMACLGAATQHNPVLKAFYDRLVAKGKLKKVALTACMRKLISILNIMIERRQKWDAKRYALS

SEQ ID NO: 63553 - protein, 349 aa, unidentified
MLADEVDYVVGVDTHRDQHVLAVVVAGTGVVVARRSVRSSARGYAEALRFAQAAADGARVWAVEGAGHYGAGLARHLSGRGETVLEAGRGPRDQRRLQGKDDSLDAVRAARTALASETPALPRTGQQREALRLLLLARRSAVDVRRLALVQLRSVIVTCPDQLREELRGLPAGRLVERCSRLRRSPSHTPDELAATLVLRSLARRIQAATVEAAELEREILAHVRALAPQLLDEPGIGPIVAAQLIVSWSHHGRVRSEAAFARLAGVAPVPASSGQTTRHRLSRGGDRQLNRALHTVILHRRQHDPATKDYIARRVAEGKTRRDAVRLLKRYLARHLYRVLDNQGPLMT

SEQ ID NO: 63554 - protein, 346 aa, unidentified
MTSMPEMITGGVDTHLDVHVAAALDGVGGLLGVEVFPADAKGYRALHRWLASFGEVVLVGVEGTGSYGAGLTRHLHRQGVKVVEVDRPNRQVRRRRGKSDPSDAIAAARAAMSGDASVEAKTRTGNVETIRVLRIVRHSARKDRTRAVNQMRSLVSTAPEEIRHDMRGLPIAPFLERAASFRPAGRNDVLGATKTALRMLARRALSLAEEIKALDAILDPIVEAVAPELVAQPGVGPDTAGALLVAAGDNPERLRSEASFANLCGVSPLDASSGKQQRHRLNRGGDRQANSALWRVVMTRMTFDPNTQAYIARRTAEGLSKREAMRCLKRFVARDLYRHLPHPKLA

SEQ ID NO: 63555 - protein, 356 aa, unidentified
MYYAGIDAHKRTCTIVIIDDRGNKIKEGVVKTEENEIRGFLAQHREQTVAVVETCLNWIFIHRTLRGYVREIKVAQTYKLRIIAEAKVKTDSIDANTLAQMLRIGYIPEIYVPDDKTLKLRELIRARVYLVRLKTRLKNKIHSILDKNGFQNHPGTDLFGKAGRNFLRTLTIGKPEEGIIARYLELIERLEENIEAFEIAVSNNVDETPEIKLLRSIPGIGKISSHLLLAEIGEIKRFRTKERLCSFAGLCPRIYCSGEVEQRGHISKAGNAYMRWILTECAQVASRHSPGLRKLFCRIQRRHGTKVAIIAVARRLLEIVFCVLTKEEEFSEVKAFPNFSRHASYLTISKRDHIIV

SEQ ID NO: 63556 - protein, 315 aa, unidentified
MSDVPCFIGIDVAKAQLDIALRPSGERWAVPNDTSGVAMLVERLQPLHPTLIVLEATGGLERAATSALATAGLPVVVVNPRQARDFARATGQLAKTDALDARALAHFADVIRPTPRPLPDAQTQALRALLGRRQPLIGMRTAEQNRLAGASERLTKDITAHITWLNAAIATLDDDLETLLRASPLWRENDDLLQSAKGIGPVSAHTFLLELPELGTLTRQQIAALVGVAPLNCDSGTLRGKRTIWGGRAHVRTVLYMSTLVATRFNPQIKVFYERLLAAGKVKKVALTACMHKFLTILNAMLKHRTPWQPQEVQS

SEQ ID NO: 63557 - protein, 375 aa, unidentified
MQNKVRFLGLDVHAETIAVAVAEPDGSVRSLGTTANRADSIRKLVKKLGPVEQLKACYEAGPTGYVLFWQLAELGVQCEVIAPTLMPVKAGDRVKTDRRDAERLARSFRSGDLTAVWVPDAGSEALRDLVRAREAAKQDQLRARHRLSKFLLRSGQRPAAGLKAWTQLYMSWVRRLRFEQAAQESTRLDYLHEVEHMAERVVRLEKAIAEAVKLASPEIQEVVKDLQALRGIAQISAVTIAAELGNITRFESARQLMGYSGAVPREDSSGKRTQRGSITKTGNAHLRRIVVESAWSYRLRPGVGPALRKRQEGVPEELKEIAWKAQNRLHKRYSKLTAAGKDQRKIITAVGRELLGFIWAIGTKAEAAAKQRKEA

SEQ ID NO: 63558 - protein, 401 aa, unidentified
MISVGIDVSKGKSTVCFMKPYGETLHRPFEVKHTESDLKHLVNQIKTLTEEARVVMESTGAYHFPVLTYLKEHGIFVTVVNPLVMHKYVNVAIRKGKTDKLDAIKIANFGLDHWFHLVDYTPTADVYDELKTLNRQYLNYLSMRIQAKLTLTNLLDRTMSGIKTLLWNRSDAPERDKLCHFVNEYWHFDSITCMPEDQFIDNYNEWAKSKGYRASTKKAKKIYALALDGIPTLSSNTPSTKMLVKEAVKVLQMIDTTLVSILARMRELAKSLKEYEVVMSMPGVGEILGPRLIAEIGDVRRFHSAGALIAFAGLDAPPFQSGNFTGTKRSISKRGSSSLRKTGYEIMTYIKIHKPSEDNAVYLYMLKKETEGKPKKVAKIAALNKFLRIYYARVKEIYAET

SEQ ID NO: 63559 - protein, 342 aa, unidentified
MKDTMIGVDLAKNVFQLHGASMTGEVKFRKKLTRPQFMAFMADHPAAVVVLEACGSASYWARELSKAGHEVKLIAPQYVKPFVKRQKNDAADAEAIVVAAQRPEMRFVPPKTEEQQARAVLFRARERLVHQRTELSNALRAVLYEYGHAVPQGSVHLKRIVEIIEAETCDLPELAREEARDLLEQIAEKTVRIEAKTRKIAAQAALTPTARRLQTMPGVGPMTALAVEAFAPAMETFKCGRDFAAWLGLVPRQMSSGGKERLGRISKAGQSDIRRLLIIGAMSRLNWMGARSIREGSWLDRLRARKPKMLVAIALANKMARTIWAMLTKQQDYKDPVPAGAA

SEQ ID NO: 63560 - protein, 403 aa, unidentified
MNRNAVGIDVSKGKSMAAILRPYGEIVSSPFEIKHTSGNIQSLIQQIKSIEGESRIVMEHTGHYYEPLARELSLAGLFVTAINPKLIKDFGDNSLRKVKSDKADAVKIARYTLDSWTELKQYSLMDEIRNQLKTMNRQFGFYMKHKTAMKNNLIGILDQTYPGVNTYFDSPAREDGSQKWVDFAAAYWHVDCIRKMSLNAFVDHYQKWCKRKKYNFSRDKAEEIYGAARELVPVLPKDDLTKLIVKQAIEQLNTASKTVEELRTLMNETAAKLPEYPVVMGMKGVGPSLGPQLMAEIGDVTRFSHKGAITAFAGVDPGVNESGTYEQKSVPTSKRGSSSLRKTLFQVMDCLIKTKPQDDPVYAFIDKKRAQGKPYYVYMTAGANKFLRIYYGRVKEYLMSLPE

SEQ ID NO: 63561 - protein, 316 aa, unidentified
MDGTNQVSIGIDVAKATLDLHLLPSGQTQTLPNTKAGCEQLKQALPDPATCLIVLEATGGFEREVVAELTDAGYRVAVINPKRARDFAKALGMLAKTDRIDARVLALYAEKVQPAPIEKTPEKQVEIQQLVARRRQLIDLRTQESNRWDVTQAKAARKSIQAVINTLEAEIRGINKLIEALLESDDDWQNKIRLIQSVPGLGNVTAATVVADVPEIGKLNRQQISALIGLAPFNRDSGAMKGKRSIGGGRKSVRCVLYMAAMTAKRFNPVIKAFAARLTQHGKPHKVIITACMRKLLVILNSIIKSGRPWMAQTTS

SEQ ID NO: 63562 - protein, 376 aa, unidentified
MTTTRTLPGSVREPLLSVAFEVGGKSWKLGMTSGFGTRPWVTSVVAGDWAAVRRVLVRAKARFGLSATAPVVSCYEAGRDGFWIHRALIGEGIGNRVVDSASIEVNRRARRAKTDRLDARKLVLMLVRVLLGEEGVWREVHVPSTADEAARHRSRERTQLVQDRTRLINQMRSWLATWGARLPARRGAGWWTAVRDWAGVPLPGEVQARLARAEARLAVIATQLTALAGAQAAAAKCAPAASAQGRLVRLKGIAATGASVLLEEGLVWRGFRNRREVGGMLGFGPLPYQSGEQARDQGIDRAGNRRWRAISIQLAWNWVQWQPTSVLAQWYRRRFGGGGARLRRVGIVAVARKLLIALWRYATTGQVPAGAILKTA

SEQ ID NO: 63563 - protein, 354 aa, unidentified
MNDAKYIGLDVHQATISVAVRDSAGKLVMEAVLETKAETILQFVRGVRGSLHVTLEEGTWAAWLHDLLLPHVTRVVVCDPRRNSLLKSGNHNDRVDARKLAELLYLNELNPVYHGEHGLRTLRELGRSYIAITRDLTRVMARLKAIYRSWAIPCAGEQVYAPRYRAEWLAKISEGGVRCRAEHYYQQLDALAALRQEVRRELLAESRKHHATRLLRQIPSIGPIRAALLIAIMQTPNRFRTKRQLWGYCGLALRTYTSGEYRFVKGQLKRSKKVLAIRGLNLNHNHDLKNIFKGAATRAAAVGPFKNFYEACVARGMKPHLARLTLARKIAAITLLVWKKGVRFDAKHLKQQAA

SEQ ID NO: 63564 - protein, 310 aa, unidentified
MSQKARLDVMVIPTGERLAVSNDPDGLATLVQQLSLEAPTLVVCEATGGWERPLVAACVEAGLPIRTLNPWQVRDFAKATGRLAKTDQIDAQVLACFAQAIRPEVRPVSDAATRHLQALVRRRRQLVGWMTAERNQLSSCQDDRIRSSISGLLAHLADLCAALERDLLQAVKGDPLWGHHFELLCSAPGVGPIVAVTLIAALPELGQLSRREVTALVGVAPFNQNSGQRRGQRGIWGGRAELRTTLYMATLVAIRFNPAIRAYYEQLLDRGKRKMVALIACVRKLLVCLNAMLKTEQPWRHPVPPAVLLR

SEQ ID NO: 63565 - protein, 408 aa, unidentified
MLEEKPAPQRFFGLDIHKYYLVAIAVDAAGKKVYGPRRVVWADLESWCSKTLSPQDAVVIEMTTNTWQVYDELRPHVHSITVVHPPRVQVNMQAQVMTDRIAAFNLAILLSKGLLKGIWIPSEEVRELRALLAQRSKMTRLSTQAKNRLHAVLHRRHIPVGEGNPFLPGRRSWWLSLPLSASEKVRATCDLDTLAFARQQIAALDAHLRQIAVQEPRLTLLVQLPGFGVLNALTVLAAIGDIARFPDAKHLVGYAGLGSRIHDSGQTTRTGKITKAGRRDLRAALVEAAQAAANHHPHWKAELARLEPRLGRNKAIVAIARKLLIAIWHVLTFQVADIHAEPLRIARKLMQVAYQLRIANLPDGLTAAASVRAQLDRLKLGRELSAIPYRTERKSVLLTPSTQPPISA

SEQ ID NO: 63566 - protein, 340 aa, unidentified
MAIVTIGIDLAKNCFAVHGVGPSGKPELIRPEVRRGKLLELIANLPPCLIGMEACSGAHYWAREFEKFGHTVKLMAPKFVAPYRMGGKQGKNDAADAAAICEAVARPNMRFVPVKTEDQHGQLFVHRARQAYVDERTALINRIRGLLSELGIVMPLSANTVRKEACKHLEDLPGWCNTVIGDLLSDLSKLDERIAEYDHHIARMAKEDDRARQLMKLGGVGPTTASAIVATIGNGKGLDFKCGRQFSAWVGLTPSQHSSGGKAKLGRITKAGDSYLRSLLIQGARSMLLRAKGKDDSLSRWVVQLQERRGYWRAAVALAAKNARMCWVMLQRGEAFQMPR

SEQ ID NO: 63567 - protein, 356 aa, unidentified
MPTQVTKKIDFTGKQLFIGLDVHKKSWSVTILVDGTEHRTFTQPNDPESLNSYLQRMLPGAEYNSAYEAGFCGYAIHRRLNQLGIKNIVINAADIPTSQKDKLQKRDPVDSRKIARSLEKGSLRGIHIFDRALEELRSLNRTRFYLMRDLRRSKTRIKSFLQYYGEPIPVELDNNQWSLKFVSWLKQVKMQTMSGQDAFSNLISSYEYHRGQLLTLSRQIRERIREYDRELYTLLKSVSGIGPLTASALITELGDINRFSNIDQLGSYVGLVPRIRESGETTHTGGITFRCNSFLRTLLIESSWQAIRMDPAMMQYYHGHLVNNKGHKVVIKVARILLNRIRYVMKNRKPYVTGVV

SEQ ID NO: 63568 - protein, 416 aa, unidentified
MNALSPPTVERFLAVDLHKAYVMVGGVNARQEVVLAPRRIELATWPRWSQAHLEKTDALVVESTSNAWDFYDQVAPLVGRAVVANPRLVKLIASARVKTDKVDTLALAKLLAAHLIPEVWVPPLEVREARGLLAHRRRLVKTHTMAANRLQSVLQRHNLPGPTGEPFSATNRAWWAALKLSPIETLRVRQDLATLDHLDQQIAELEVEINRLSTSTPWAEQVPYVMQLSGFSVLLTMTILTAIGDIKRFPHAKPLVGYAGLGASVHSSGETHKTGHITKTGRRELRWALVEAAWSAVRYHPYWKAEFERLARRMPDNQAIVAIARKLLVAIGHVLTEQVADKHADEKMVATKLMRWSWELTDEQRGGLSTRQFVRLQLVRLKLGENLTHFTYGGMPRRIASVEEVLALKPELRARD

SEQ ID NO: 63569 - protein, 338 aa, unidentified
MAIVMGLDQHRAQITAEWIDTDTGEVSRARVAPALRPDVRRFVKRFAGQRLEVALEATTGWRFVVEELRAIGADVHLAEPAETAARRGNKKRAKTDRADARHLRELLMIGRLPESWIPPEHLLDLRARVRLRHTLVDQRGEWQQRIQAALYHHGFPQRNGLLTAENRTWLEGLPLPERAQQQVAVALVMIDALDAQSAPITRRLRLYARRQPGCRALMKHYGIGELTAVTILAELGDARRFSSSRHAVRYAGLDITVHQSDQRRAAGHLSRQGPPALRWALFEAAQAARRPGSPDRPYYDQAAERLGGNRACLALARNLLKRSFHTLRELGDEAMQPA

SEQ ID NO: 63570 - protein, 357 aa, unidentified
MVFVGVDVHMSYLEIAEIDKDGKLESRRRIGNTLESIDAFVESLDSDAKVAMESCSYFYPLYNRLEEAGIEAKVAHPLKVKLIAESRIKSDKIDAMVLAQLYRMNYLPTSYVPPKEIRQVRALLRHRTALVRQRTQVKNRIHHLLEKNGVKTKGLGCSDIFGKGGLTRIHRVDLPTIERSILNTDLGLLEYFTKTIDQLGSDLARIASENLQARLLMTIPGIDYYAALLLLMEIGDINRFSDPKKLCCYSGLVPGLYQSGQVARYGHITKQGNKWIRYILVEAVGHTVRHDPESEIARMYERIKARKGHSVAKVACARKLLKVIWFMLTRNEPYRYSDPQLIRRKERRLVRKAGKCY

SEQ ID NO: 63571 - protein, 427 aa, unidentified
MSGIENGGQEPAFAAFVGIDWADQKHVWCLQGQDSTKRESGELEHTPEAVEAWVAQLCQRFGNRPIAVALEQSRGSLVFMLAKYEPLHLFPVPSTMSASMRKALYPSGSKDDPRDADVLLDLLLQHRNKLRRLSPDTEATRRIQNLVEERRKLVDEKTEHTNRLASHLKIYLPQMLNWFEHLDTELVCALLERWPTLEELQKVPPSKLRKFFGKHHCRNQELTEWRILAIRQSIPAIRDRAVIEAKSAAVKVIVQLIRILLEGIADLDERIEEGAAAHPDFIIFKSLPGAGRALAPRLLAAFGSQRERYRNADEVQTYSGIAPVMEKSGKKQWIHFRWACPKFLRQSFHEWAGHSIGYSVWARAYYRQQRGKGVDHHGAVRALAFKWIRIVFRCWKERVAYDESKYLAALTRRGSPLVAVVATAKAL

SEQ ID NO: 63572 - protein, 430 aa, unidentified
MEIVYPRSCGVDVHKSFIVAVICISESVKPKYIKKRFSTFNNQLIQFKNWLIENNCQNVCMESTGKYYIPVYNALEGHISNVVVANPKWVKAIKGEKDDNKDAKWIADLFKFGIVRSSYIPEKDIRVLREFTRYQYKLVNMRSSEKNRFQNALTTGNCKLDIVFSDIFGKSASAIVDTILSNDPYTSEDILSKVHAGCKASHEDILSAVDGIQLNQFQKDRIKIVQKHMEYLDSLLDEIQHHIDLMVANYEEYIQILCTIPGINRKSAITIISEIGTDMSQWSSHRKLASWAGLAPGCNESAGKKKSVKVSKAGVYLKPCLVQVAHAAVKDKNCDYYAAKFKKISKRRGKKRAIIAIARKILTAVYHLLKTGEVFNPTDMADVETTKKQRIEYVKNNLRNAFNQLSHTGLSEAEILQLIRKESTNSPQIE

SEQ ID NO: 63573 - protein, 320 aa, unidentified
MTNDSTIIAGIDTGKAKLDIALRPGGETLQVDNTRAGHRDLLAFLTQHQVSTVGIEASGGYERAVLAVLCAAGVRVVLLQPRQVRAFAQYKLRRAKNDRLDAGLIAECVAGLTVRQTGFDPRLAQMGEALRRIEQIEADIVRAKTRRESFHDARLRKAQTREVERLQRLQKAELKRLVAEVDAVPALAARLSLIESVEGIGRRTALTLLIDMPELGQLSREQAACLAGLAPFDHDSGTHKGVRRIGGGRASVRRALYAAALPASFRWNAALCQLYQRLITAGKPHKKALTACARKRLTYANAVLQRGTPWTTTEPLLNGC

SEQ ID NO: 63574 - protein, 310 aa, unidentified
MNKIHAGIDVSKATLDVAVTGQKEVRNFPNSESGIKQITNYLMKQAPALTVMEATGGLEKLLAASLVQESVPVVVVNPRQVRDFARARGKLAKTDTIDAEILAEFAREIHPEVRPLPDKQTEEIKALLVRRHQLIDMVTMETNRLWSADRRVKPSIEEHIGWLKQELKNMDSDLEKKVQNSPVWREKDNLLQSVPGVGPVLSMTLLGSLPELGHLNRKQIAALAGVAPFNRDSGRLRGKRTTKGGRLRVRTALYMATLVATRFNPLIKGFYNRLLETGKVKKVALVACMRKLLTILNAMLREHHPWQYAN

SEQ ID NO: 63575 - protein, 348 aa, unidentified
MTAAYDGPQVVGMDLHRRRSVLVRMTADGRKLETARITNSPAELRRVIARAGKRPQVVLEATYGWYWAADTLAAAGAQVHLAHPLGVKAFSYRRVKNDEKDAADLADLLRMGRLPEAWIAPAEIRELRELTRYRIKVVRLRTSCKDQVHAVLAKLGIEVTCSDIFGVAGSVWLDGLELPQPYAGKVASLRALAGGLTAEITLLEAAIGDLLEHHDGYHAVQALPGIGPVLAAVLAAEIGDITRFATPARLCSWAGLTPRHRESDVKVRRGHITKQGSPLVRWALVEAIQHVPAGHPLRQRKDDILARRGDQAKHIAKIAVARQLLTWVFYAMRDGQVRALAPPTPKAA

SEQ ID NO: 63576 - protein, 338 aa, unidentified
MKLYCGIDLHSNNLVLKLVDEEGRAVWGKRVATDLQVVADVLEPYRADLVGIAVESTFNWYWLVDGLMELGYRVHLANPSKMVQYEGLKHRDDDSDACWLAQLLRLGLLPEAYIYPKEDRPLRDLLRKRTQLVRQRSALLLSLQNSWYRNTGGRMSAPALMSLDRERVREQLKQANLILSVESTLEVLLCLDRQVQRVEQEVLRQVKPDPVFRLLTTLPGVGNILGTTIRLETGPISRFASTGCYASYCRAVSSRQLSNGKGKGKGNTKNGNAYLSWAWLEAAVFAIRYHEPVRRWYQRKLSRTHRVVALKAVAHKLARAGYHVMRDGVPFEMRLAFG

SEQ ID NO: 63577 - protein, 353 aa, unidentified
MEQFIGCDAHKKFSVFVAVNEKGQAGEALRVMHDRQLYREFLARLPAHSAIAVEASGSYSWLVDEMERSGHRPKLCNPLEAKRRMGLTKKTDPLDAKGLAILLRNGTLPEVWIPPSELRDQRELLRLRIFLVRLRTRVKNRIHGTLARHNVQVPGADLFGVGARLQLGTRLPELPVHSREAVEQELATLDFLEMQIKSAEQRLEAIMKVSVEADLLKTLPCVGKILSMVLMLEIGRVDRFPTAAHLASYAGLVPRVHSSGGHTRMGQVCGNVNRNLKWAFVEIGNLVVVNQRWLAGAHVVRLYHRIKRSKNHQKAVVAVARHLAEAAWWVLTKQEVYREPQGPRQQALSSTHG

SEQ ID NO: 63578 - protein, 354 aa, unidentified
MDKIYDKCCGIDVHKKLIVACFRCGKKQEVREFGATTRELLELADWLKDGGCEMVAMESTASYWKPLYNILESSDLNAIVVNARHMKAVPGRKTDVKDAEWIADLLQHGLLQPSYIPDKDQRELRELVRYRKSLVGERTRELNRLQKMLEGANIKLSGTVSDINGKSARSILEYLLTGKSIDGSKYDEMYEQKIIAHNLKATKEQIVDDLNGVMSPLQRRMMKELLVHLDELNIHIKNLDDEIDNFMKPEEKQASQAIQDVTGIGNTSAQAIISVIGSDMGRFPTDRHISSWAGLCPSDNESAKKRKSGKTRKGNALLRTTLITCAHAAVKNKKSYFYAQYVRISAHRLSLIHI

SEQ ID NO: 63579 - protein, 392 aa, unidentified
MYIVGIDIGKNHHEASIVSPEGKQIGRSLRFATTHKGADSLMSFIFKNIGNSPCVFGMEATGHYWYPIYSFLKAKGYTIYVINPIQSDSLRKMYIRQTKNDSIDSFLIAEVIRFGQFGTTSMADENILAMRQLCRYRDSVISSRTEIKLRIGTIMEQIFPEYEKQFSSLWVSTSMGILEKYLTPENIENAPIDELFEIIKDKSHNRLTKAKAISIKEAAADTFGIKIAQDAFSFQLKQLIDRMNFLDKQIEALDCQILEYYEKFDCYLHTIPGIGMIAAAAILAEIGDINRFKSSSALVAFAGIDPTVRQSGEFSSTHNHMSKRGSPYLRHAIFLAATTCSFHNSPLNAYYKKKREQGKHHLTATGAVARKLTTVIYAVLRDGKPYEPKKFC

SEQ ID NO: 63580 - protein, 347 aa, unidentified
MRFYTETHKHYCGIDLHARTMYVCILDQEGKVLLHRSLPCDPERFLRTIGPYRDDLVVAVECIFSWYWLADLCAQEGIAFVLGHALYMKAIHGAKAKNDKIDSKKTAALLRGGLIPQAYVYPPEMRATRDLLRRRLHFVRHRGQLLAHIQNTHHQYNLPAPGKRIAYRSNREGIGEGFEDVSVQTSLAADLALIDHYDVVIRDLELTALRQARGHDLDSYERLKTIPGIGKVLALTILYEIHDIGRFPRVQKFASYSRLVKCQKSSVGKVLGTSGSKIGNAHLKWAFSEAAVLLLGKCPEGKKLLARLERKHSKGKALSILAHRIGRAAYFMLARKRAFDLERFVRS

SEQ ID NO: 63581 - protein, 410 aa, unidentified
MSERPYAFYVGVDWASETHQFTVLTPERHLEAERRIEHTGRALSEMADWLTALADGEPARIAVAIEVPRGPVVETLLERGFHVFAINPKQLDRFRDRHSPAGAKDDRRDGFVLADSLRTDRPAFRQVHVDDPLLIQLRELSRAEEELQTELRRLSNRLWEQLQRFYPQVLRLSPAVDEPWIWALLQLAPTPVAARALRRATLARLLARHRIRRVTAATVLAELHSPALRVAPGTTEAAREHIALLLPRLQLLHEQRGRCARRIEQLLDALEGSDAEHRDVTVLRSLPGVGRVIAATMLAEAARPLAERDYHAVRTQGGVAPITRQSGKSVLVSMRYACNHRLRNALYHWGRVSAQHDPSTRRHYRALRQRGHGHARAIRGVIDRLLVVLMAMLRTGTTYDPARRRVPAAA

SEQ ID NO: 63582 - protein, 343 aa, unidentified
MEITTIGFDLAKHVFQVHGVNASGQAVVRKRLRRTEVLPFFASADPCLVGMEACATAHHWARELTMLGHTVKLMPPAYVKPYVKRGKNDATDAEAICEAVTRPNMRFVPLKSTDQQAVLMLHRTRALLVRQRTMLANALRAHLAEFGIIVAQGLRSVGALIGKIFGEGVETAALPPLARIALQPLAGQFLQLHPQIKALEGEIVAWHKTNEESRRLETIPGVGVLTATAIAATVTDPSHFRSGREFAAWLGLVPRQNSSGGKQRLGRVSKMGDGYLRSLLFVGATAVIRFARSKSSPGTAWINRLLARKPAKLVAAALANKMARIAWAVLARQEAYRAPALAA

SEQ ID NO: 63583 - protein, 410 aa, unidentified
MNLTTLFVGIDVSKTTNAVRFMDGGGDTLSLFSVPNNHDGAVKLQEKLRYTLLHTDYSKVTIGMESTSVYADHVAAYLQNDEFLQKWECKIYIVNAKQISNFKKSYPDIPKTDSVDTLIIADYLRFGRLPKTIFRDEKYLALRNLTRARFQAAQSLSREKTRFVETLFQKFSTLDSSKVFSNTFGATALAAACDFLSVDEITYMPVDELAAFINSKGKGKFADPTDVAKALQAAARSSYRIPKTVNCSLGQLLAIRLVGIRSIETQIKSLDKAIESYMGAFQNVLISIPGIGKVYSAGIMAEIGDVKRFEGQASLAKYAGLMWRRYQSGDYEAANTKLINSGNKYLKYYLLEAANMVRMHDAVFESYYRSKFREVPKHQHKRALALTARKLVRLVYSLLSNNRLYTPPTQ

SEQ ID NO: 63584 - protein, 317 aa, unidentified
MEASFVGIDVSKDRLDVAVHPQAESFAVSRDAGGLHALNQRLVALNPALVILEATGGYESIVAASLAAAGLPMVVVNPAQVRAFALALGKRAKSDPIDAAVIARFGAATRPSPRPLPDAETTRLSDLLGRRSQIIAMMSAERQRQKRLTEPRSQRSIARLLTALQKELATIDAEIDDAVRGSPAWQAKEDLLASVPGVGKTIARTLIAELPELGSLDRRAIAALAGLAPWTRQSGQWKGKSFIGGGRVRVRGALFMGAMVAARHNPALKVFRDRLLAAGKPKLVALIAVARKLLTILNAVLRDSIPWQEARHASTSN

SEQ ID NO: 63585 - protein, 433 aa, unidentified
MNKWYLGIDIAKAKFDAALLNEHKECIKHEVFEQNYEGFHGLLKMVRGHCENREQVWVGMESSGHYHYNLFEFLKEKLTPNITILNPSLIAKYCKMTLRPCKTDKKDACKIAQYLIETEVNPTVLDKVLQQLSYYDKEREHYVTKLAECKVRIRTWLALGFPELERQIGSLSSRYLIDFLEEFPSAASISAMSQRDFIEKFHEILPAKTKNMKLRPEEIYSLAKQSIGREIEGYRKLFRSTIEIMHSLKKTIQTLEEEQEQLCTKHYSLQRVIVQSIPGMGPVSAISILSHLPVVENFENYRKLIAFVGTDPVIRESGMYRGRGRISKKGNPHLRRRLYLCAMRVIQKDGIFKDYYQRLREKGKPAKVALIAVANRLLKILYALLSKGEMFDADYHQQFITRDQSIVENTRQSVEKAHNISNSKSTTSCRSTV

SEQ ID NO: 63586 - protein, 373 aa, unidentified
MFHFTTLFIGMDVHKESFSLCYYDMMTNQFKHSTKVGPNVSYIVNYVNELRRLYGQDAEVLCGYEAGCLGFTLYHQLQAHGIPCIVMAPTTVMKEGSKRVKTDKKDAAQLAKALAFRSYRPVHIPTVEDEQVKEYIRMRTDHKVALKKIKQQIFAFCLRHDFRYTEGSSNWTQKHVRWLHSLNPKGLYAEILTEYLLTYEKLVDQIERYDARIEQLGQSDSYQEKVSRLSCFIGIKTLTALSIVTEIGDFNRFATAQHFASYLGLTPSENSSGDKERRGAITKAGNSHVRRLLIEAAQSLAKGTVGYKSKELKRRQSGNRVEVIAYADKANERLRRRYRTLVLGKNKQQNVAKTAIARELSGFIWGMMTGRIA

SEQ ID NO: 63587 - protein, 441 aa, unidentified
MVAVRNNVLFYVPSRKRSRASRKYDWAGPPTITWISSSVFPGVTRATCDTTDRRTPVEDQPMSPSIIYLGMDVHKESITIAVLPADAPAPTRLERLPNDAVKLRRFFDRLADQGELRACYEASGACYVLQRAMRAWGHACEVIAPSLIPTKPGVQRKHDKHDAIQLARLYRAGELTPVRIPTEAEERVRDVVRCRETFQREILKSRHYILKFLARRGFIYRDGKHWSPKHMAWLRALAAVRSPLAAEDALVFGAYLALLDYKLSRRDELDRRIAALALTPALATAVGRLQCFRGLQRHGAMVLATEIGDWRRFARPTQLMAYLGLVSRENSTGERERKGSITKAGNSHCRHVLVQAAWSYRHRPQVGTHLKGRQQGQPAAVITHAWKAQHRLHKLYQHLAYRKQPGIAAVAVAREFVGFLWAVMRDLEPAGSDVHTAATAA

SEQ ID NO: 63588 - protein, 426 aa, unidentified
MRAIGIDVHRDFCEVAISEGGRLRSAGRVPSTPEALELFAASLADDDAVALETTGNALAIARIIEPHVARVVVASARELHAISDAKAKTDRLDARTLARLLAAGMLAGTWLPGEQTRALRRRLSRRAQLVRQRTRLKNEVHATLYRNLKGAAPVSDLFGAAGRRWLEELELPADERETVAGCLRVLDFLGGEVAHLEKGIARQAIDSPEIRRLVTIPGVNLITAATLMAVIGDVRRFPSARKLVGYLGLDPRVRQSGSSPARMGRISKEGAAAARHVLCEAAQAAMRTPGPLRAFGQRVGARRGRQVAVVAVARKLASLAWRLLTSGEDYAYSSPSRVRLKLRRIELLAGEARQRGRQLAATPSSTQEQERELALAAERAYQHLVSDWQGRAFTGTGAGAAPGRASDGSSQDQAARQTEQPLTPAL

SEQ ID NO: 63589 - protein, 466 aa, unidentified
MKHNRRRSPGKPRVSPTVLDRLNPNVAGIDCGSAEHFVAVPPDRDPTPVRSFTTFTTDLMRLAEWLIACRVTSVAMEATGVYWIPIYEILEARGVEVLLVNAWHLKNVPGRKSDVSDCEWIRELHSVGLLRGSFRPPDAIVALRAYLRHRQTLIESAGTYIQRMQKALVQMNVQLPLVVSDITGVTGLRILRDIVAGQRDPHRLAEHRDHRCHASKAEIIAALTGNYRAEHLFVLQQNLELFDGCQAHLEACDRVIDAHVHTLTVRLTSPAAPLPAPRVTKKPRANEPRFEIRAPLHQLTGGIDLTQIDGIAPYTALKLISEIGTDMSRWPTEKHFTSWLTLAPKNKISGGRLLSSRTQPSANRAAAILRMTVMSLNRTQTALGAFYRRLAARIGKPQAITATARKLAVLVYRALKGQLVYQDPGADAYDLQQRTRVLRHLRQRAATLGFELVNRETGEILPAGVS

SEQ ID NO: 63590 - protein, 421 aa, unidentified
MQVLYERCAAVDIGKDVIAVAVRLPADGPDGRATHKRTFKTFYGVLREAARWLNSLGVTHVAMEATGIYSMPVYHALIEHGKFEQVLVCNAGHVKNVPGRKTDLADAEWLVHLLECGLLRGSFIPPAEIKAARDVIRYRTKVVQSRTSEVQRLGNVLQDAGIKIDSVASSIATKSGRAMIEALIDGERRPRVLADLAKGKMRVKIPDLTLALEGRFGDHHALMCRLHLDHIGHLDAMIARLDTQTETMMAPFRTERDLLTTIPGIGMLAAAAVLSEIGANVTEYFPDAAHLASWAGLCPGNHESAGRRHSGKRRHGNQHLQHILVEATWAAVRHDGYLKALYHRHVMKWGGYRSPTAKKKAIIVAAHAILVIIWHILAAGKPYDELGTDFFTRRLDPERETRRLIAKLEALGHQVSLQPAA

SEQ ID NO: 63591 - protein, 425 aa, unidentified
MDCNQNEKINQVTEMTLVIGMDIAKRTHYASFIDVRGRALKKAFPVLQSKEGFETFYRSVLEAMEEYKKTDVIVGIEPTGHYWMNLAYFLTERGIPLVMVNPMHVKRSKELDDNLQTKHDAKDALVIARLVKDGRFSYPRILAGVEAELRVGTTLRKQFVEEQIAIRNKLIRWLDRYFPEFSKVFPTFGKTAMAALECTPLPCDVVGKTVEELLHDYRQVEGITSPQKHKVMRLTQIALDSIGVTEGLEMARVEIATLVRRYREIENEIKELMSRLTNLAKNSEEYDWLSTVPGMGDATIIELLSEIGSFSYYQHPRQLIKLAGLTLREHSSGQHRGQKRISKRGRRHLRALLFRVMMPMVRCNEAFRQLHVYYTTRSKNPLRKKQSIVVLCGKLLKILHALSTKQVEFDAQRMLADIPSLEGAL

SEQ ID NO: 63592 - protein, 367 aa, unidentified
MKKISTLAAKQGRNISQPTLTIGLDLGDRNSWYCVLDESGQIQLEQRVRTNAKALREIFGGIPRSRIALETGTHSPWISRLLSELGHQVIVANARKVRLIGESRKKDDRLDAQTLARLARIDPGLLCPVKHRSAQAQADLTVIRARAGLVRARTALVNTARSLAKSYGERLRGCNVRNMNPEKAEALSPELQRALEPLLSAIEELSQRISAYNERIEALAEQSYPQVKLLQQIKGVGTLIALTFLLTLEDPHRFGKSRDVGCYLGLQPGRRNSGQSEPQMHISKEGDPYLRTLLVQGAQHILGPFGVDCDLRRWGLKLAERGGRNAKKRAIVATARKLAVLLHRLWVTGEVYDPLHNSNRVIVAAAA

SEQ ID NO: 63593 - protein, 370 aa, unidentified
MKHPTTLFVGLDVHKDSISVAHVFEDRSAEVTFVGPIGTRQGDLDRLVRRLQSKASRLVFAYEAGPCGYVLHRSLTRKGFTCLVVAPSLIPKKPGDRVKTDRRDAVQLARLLRSGDLTSIYIPTVEDEAIRDLTRAREDALKDLKATKLRLKSFLLRLGIHYTGKANWSDAHLRYLAKVVCPTPSQQIVFQEYRRAVSELVERLGRITTVITEQVPSWRLSPLVSALQALRGVQDTVAVTTLAEIGDLTRFHTPRQLAAYLGLTPSEHTTGNQRLLGSITKTGNSHARRALVEGAWAYRFPAKVSESIQKRLEKLPKPIQDIAWKAQVRLCKRYRRLIARGKHPNVAVTAIARELAAFMWAIAREVPITA

SEQ ID NO: 63594 - protein, 402 aa, unidentified
MKQYELLHSLFVGIDVSMKENVVHAMPFSPEDHPGHAHLRFSAPNTPAGSVGIVEKVSDFLKFYPDVIQVVIALEATSVYSFHLATFLSVAHFNGHIPAIVYSVNSKEIHAYKKTFTDVGKDDYVDAMVIADYARSNKIRSRPWKGPELLGLRVLTRLRFRIAKLMGIVKNSTGNSIYLECSGLMTGENPFCNVWTTTCQELLTTFQGPDEILSLSDEELLNFITEKGHGRFSHPLDVVEKVKKAARNSYRLDKRVYEPLTSGLSVSFFIIHSLEAAIKKLDKSIETMAKSFSSDSYQILLSIDGVGPVIAGGLLAEIGDIKRFKTDDALAKYIGLTWRGKQSGQSESPVKHLSKAGDVYLRYYVLLATALNIARHMNVFAVVRPYFHTGPHSISLLERSSG

SEQ ID NO: 63595 - protein, 407 aa, unidentified
MIFVGNDWAEDHHDVWVMDEAGERLGYQRFPEGIDGVAQFHELVGGLVKDPDEVVIGVETDRGLWVEALVGAGYQVYGVNPKSVSRYRDRHTVSGAKSDRGDAKVLADMVRTDRHNLRHVAGDTDQVLGIKVLARAHQRLVWDRQRQVNRLRSTLREYYPAALETFPRLAHQDSVAVLAIASTPDAGACLSKPQIKAALKRGGRRRNLDLKAAEYQTGLKAEHLEAPPAVASAFGMITASTVGIISELNRQIEDLATELSNRFREHPDADIYLSIPGCGDVLGARALGEFGDDPERYADVKCRRNYAATSPLTIASGKNKTVIGRYIRNNWLFDPILRIAFSSLTASPGCRTFYDEHIAKGDTHYQALRALANRLVGILHGCLKTRTLYNEDTAWAHRQPQGIQQAA

SEQ ID NO: 63596 - protein, 340 aa, unidentified
MEHLAIDLGLRESQVCVRSADGTIVAEGRVRTSLLGSYLGRRGKSRVVVETGSGCFKVADAALQCGHEVRVVPATLVRSLGVGARRTKNDRRDAQVLSEVSCRMDLPSVHIPSAWSRQAKAICSTRESLVGARTQIVNCVRGWLRTQSIHLQSGSVTTFTRRVRAHLGTQLPTFIDRQVETVDHLTGQIKKADAELAELAQLDPRCARLMTMPGIGPVSAVRFAAAVDDVTRFPHAHAVQSYLGLVPSEYSSGEQQSKGAITKAGAPAVRWALVQAAWNMRYYRRNDPIVLWAREVEKRRGKKVAIVALARKVAGILYAIWRDGSKYDPRRGANANVNHE

SEQ ID NO: 63597 - protein, 353 aa, unidentified
MYYSGIDLHKDNSVITTIDKNGRIIHQSRVTNRDYDILNYFSLIKGDHKVVVESTANWYWLSDLLHHHGIEMILAHSKYLKAISYAKVKTDKVDSLTLAQLLRMDLIPPSHQVSPDRRGVRDLLRTRLRLVQKRASCYTSIHRLLSKFNLGIAEEMQIHNPSGFKQIQEICLDEDYQWQLNAHIEQIQLLSKQIKDLERRLDHILIPVEGVQRLLSIPGIGKITAYTIYLEIDGISRFPDVKNFFSYCRLVPGADNSNRKQKHKSSKDGNRYLKLAFTEAAVRAVQYYKEIRQFHRNKLRKCHKAIARTVVAKELARIVYYVLTEKTEFKTFKGIELSRKKNHQWQHLASPSA

SEQ ID NO: 63598 - protein, 399 aa, unidentified
MTYDFVIGIDVGKYFHHACVLDKDGKQVKSKRIDQSEHSLRRFFDLFLALSSKILVVVDQPNNIGRLTVAVAQDMGITVKYLPGLSMRQLSRVHVGNAKTDVRDSYVIAHAGANLPDALRNVDRVQQVFSQLKVLNGIDEDLARSYTRLINQIRSSLVGSYPEFERVLRGQNIHRRWVLHMLAKYGGPTKIKRMGHARLIAFAKKYKARNPEKIIDGLLDAIKNQTVSIHGSEYVELGVAMSATDALTKLDHRKVIEEKVGALIEEVPHTHILLSMPGIGTKTAAQILMTVGDFSDFKTASHMASYAGLCPQTNQSGTSINTKSPNRAGNKKLKNALWQSSFSAIRYHERSRQYYERKRKEGKRHNAAVVALARRRLTVLFTMMANHSLYQEPEKQKTA

SEQ ID NO: 63599 - protein, 323 aa, unidentified
MMGLPNSLCVGIDVSKNSLDIASNQTISPFSVSNDVDGFDAIIAELKQHSIALVLMEATGGLEAAVACSLQAQGFDVAVINPRQARDFARSMGYLAKTDRIDAAMLAQMAEVINRHPGRVRFIRNLPDAEREVLTAMVVRRRQLITMLTAERNRLHPSHPQSRKSISTIIDALKDELKRINKSMEAHISTHFKTLAEILGGVKGIGAATIATLLAEAPELGHLSRREISALIGLAPFNRDSGNMRGRRTIFGGRANVRSALYMATVVATAHNPVIKQFYGRLVDSEKVKKVALVACMRKLLTILNAMLRKEEEWDPKYHSVNS

SEQ ID NO: 63600 - protein, 348 aa, unidentified
MTIVDVPRAVTGGVDTHLDLNVAAALDGIGGLLEVAEFPATAVGHRRLLGWLAGFGPVARVGVEGTGSYGAGLARYLRAAGVEVVEVDRPNRQARRRAGKSDPLDAIEAARAALSGRACGAAKTRDGNVEAIRALVVAKRSARSTKIKTLNQIRHLSFTAPEELRQRLKEVSRQHLAARAAALRPSQREGADPVMTATKTALRILGRRVLALDEEKARIDILLSELVTQTAPDLLTLHGVGIDTAATLLVTAGDNPGRLRSEAAWAHLCGTAPIPASSGKVTRWRLNRGGDRQANCALWGVVITRLRNDPRTQAYMARRLAEGRSKPEVIRILKRYVAREVYHHLPRP

SEQ ID NO: 63601 - protein, 418 aa, unidentified
METLVERACGLDVHKESVVACVRIARSGGKGASREVRTFATNLRGLKELADWLMTCAVQAIAMEGTGVYWRPVYAVLEALATWTLIVGNAQHIKNVPGRKTDVKDAEWLADLLAHGLIRPSFIPAPWQRELRDVVRLRSAWVSDRTRERNRILKVLQLGGVKLDGVASDAFGKSGMAILRALAVGAATPKQMAELACGRLRKKVDALAVALESPLSATHRALLSIALDGLDATELQLAKYEALIETMLEPYAEPMNLLQTIPGVERVAAAAILAELGPDMSVFATASHAASWAGVCPGNYESAGKRSKGTTNHGNRYLKTALCQAAHAASHTKKGYLRDKFYRLKARRGHGRAVMAIAHKILVAAFSMLQRLTPYRDLGEGYLDRRDIPRTLSNLLARIEALGFAVTATPKAALPAPS

SEQ ID NO: 63602 - protein, 350 aa, unidentified
MMNIIAIDVASEVSSVCILSRSGKVQFEDRVPTKISALKRVLKEVARPRQVVFEEGTQASWLWSELQGVCDDVFVCDPRQNRNLSGQFKSDRNDARNLALQAKSDNLKRVWHGGQELQSLKESVRAYQCLTEANTRLKNQLKAVFRGCGVAVGQQAYATKSREKVIRELRFSAQRERVLRLAAVLDEVTVQRAEALKTMVKYARKNKMYKPLRQIDGIGPIFSAMFISEVGDPRRFRTRSQFWSYAGLAIMTDDTAEYEIKKNGRIVRKDRAAKTRGLVRAYNRTLKYVLKQAAMTLSRSKWRTQYTALLGRSKNANNAQLTLARKLACVMLHIAKTEEKYDVAKVFKAQ

SEQ ID NO: 63603 - protein, 328 aa, unidentified
MKTIFIGIDISKDTLDVAICLNPEEGFLSEFQVENTVAGIQKMIKKCNLYPNPLWFCFEHTGNYGYLLCHQLSSSAFTYSMVPALEIKRSQGLSRGKTDKLDAQRIALYAITHQHKLNAYELKSEVLLKIKNLLTYRSQQVNILRQYKNSLKSHRTTDIVIDNSYIIDDIRSTVEELIAKIKLIEKKIIRLIDQDDSLYKSFNKVRSVTGIGLIIAAYMLVSTNNFSSFDNPRKYTCYAGIAPFEYSSGSSIKGKTKTNKLRNKTIKTLLFNGANTAVRTDPELKAYYKRKADQGKPHQVIINNIACKLVYRMFAVVKRDELYVKLVR

SEQ ID NO: 63604 - protein, 343 aa, unidentified
MDYFAGLDVSVKETSVCIVDDTGKIVRELKVASEPEALLAVLTNPAYRFKRIGLEAGPLSQWLYSALAEADLPVVCVETRHMQAILKAQINKTDRNDARGIAQMMRVGVYRPVHVKTLRSQKLRMLLTHRKLLQSKAIAIENDLRGTLRNFGLKVGIVGTAKFEVRIKELVENLPDLAILVEPLLIVRRVLREQIVVLHRRLLTIVRDDGVCRRLMTTPGVGPVVALTYRATVDVPARFRKSKSVGAVFGLTCSKYQSGEIDRSGRISRCGDEMMRVMLYEAAQSMLRSKKWSWLKAWAMQIARRRGMKKAIVALARRLAVIMHRIWVDGTEFRWTREVVTAV

SEQ ID NO: 63605 - protein, 317 aa, unidentified
MPHETRVVGIDVAKSKVDSCIRSEGLRMAAASTPEGEAELLAWLRANRVSRAVMEASGGYERRWAEALRAAGFEVRVVDPKRIRHFARAAGRLAKNDPIDAETIARFAEAFPDGGAEPHDPAREEIDRLVQARTALKDVEDRIKQQGEHRPPALVVAALRAVARTMRAELRKLDAAIAAKIKARPSLARRAEIIDSVPGLADQTVAGLTAWLPELGHITNEAAAALVGAAPYDDDSGGRKGQRHIKGGRRKLRNLLYMPVMGAATQHNPVLKAYYQRLIARGKEPKVAIIACMRKLIVILNIMLARDETWNPARAAA

SEQ ID NO: 63606 - protein, 404 aa, unidentified
MGQVYVGIDWADDHHDIYVTDDAAIELDSFSISHSSEGMEKLMKRVERCCTSREAVLVAIESHQGLLIYALLEAGYLVYPINPKSMDRYRDRYRMSSSKSDTKDAMVLANILRTDLHLYKSLPRETAADARLRQLTRAHKSLVQQKVKLLNQLTSQLKSYYPVALRLFSRLDHKITMAFLERFPTPEKAAAASMEDLRRFFREQSYSHQWKIDSIYESLQQVGLRAPEEIGEIHQTIVLSLVTVLRSLVGEVAKLASKISHEFKANPVHEVFSSLPAGELTAARINGELGSDGTRYPAREYVQTAAGTAPVTRRSGKTVVVFFRWQCNKHLRAALQDLSRESVKRCPWARQYFAGQMRLGHKPSRAYRALANRWAAIIWKMLQTRQCFDQSRLDKHLTKVPAIN

SEQ ID NO: 63607 - protein, 355 aa, unidentified
MSYATILAIDLGKFKSVLCVMDVASRTHQFVTVESTPPLIRQAVQQRCSVDPAATLVVFETCDTCGWVHDSIVDLGVAIVIVNANDERWRWQRVKRKTDQDDALKLARLALLDQLPMVHLPDPQQRQRRRLMIHRRSIVSRRTQCRNAIRSIFSQQGIALARGQKQWTVAGVQQLQSYAASIETCSVEELWKGRLNSELLLMASINTQLKALDAKLDELADPRMKLLQTLKGVGPRTAEAVVLYVDDPKRFKSGEELASYAGLVPKQMQSGEMNRLGHITHRGPGLLRSMLVEAAWTIYRHNAWAQTFVNKISHGSKARRKLAIVALAKKVLIILWGMLKSNQPFRSPLIVASMN

SEQ ID NO: 63608 - protein, 326 aa, unidentified
MTTFGIDVSKATLDCLWLRDAQTRRIKTRVFKNTPAGHQALLQWAVKQTREAVDSLHFVMEATGIYHEALAQALYTAGARVSVVNPAHIKQYAHSFGRRSKTDKRDSLMIALYGATQQPRLWQPLAPEIRALQALIARLEAVEKDIQREENRLEKAELASATEAVADSIRSVLGHLRAERRRLIELIEAHIDRHPDLKADRERLKSIPGVGPVIARYMTALLRSHTFSSASQAAAYLGLVPIHRESGSSVRARSRISKTGKASLRAKLYMAAVVAIQHNPDIQTHYQRLLQKGKSKMAALVAAMRKLVHICFGVVKHQTPYQVQTR

SEQ ID NO: 63609 - protein, 373 aa, unidentified
MKYTTVYVGMDVHKESFTLACYTNEKEEAEYVQRTEAHYSKVISYLEAMRFHYSDDVTFICGYEAGCLGFTLYHQLTNHHVRCVILAPTSMPVQQGKKKVKTDKRDARKIAKCLAHHDYSTVHVPTAKDEETKEFLRMRDDHKLALKKIKQQILAFCLRHNCRYPGGTKYWTQVHLKWLRDLKPGGMYQEILEEYLLTYSNLVDKLERLDKRIEELASDEVYAESVHKLSCFLGIKTQSALSVITETGDFKRFGNAQQYASYLGLVPGEDSSGDDQNRLKITKAGNRHLRMLLVEAAQSYGRGQIGHKSKELKKRQEGNSPEVIAYADKANERLRRRYYRMVLSQNKRSNVAKVAVARELACFIWGMMTGNVA

SEQ ID NO: 63610 - protein, 406 aa, unidentified
MRVVHERCAGLDVHKSSVVACALLPEGKQLRTFGTMTWQLEQLADWLRSLEVPVVAMESSGVYWKPVFNVLEAAGFELLVANARHIKAVPGRKTDVKDAEWIGDLLRHGLLKPSFIPGREERELRELTRYRRTLIEERAHEVQRLQKVLEGANIKLEDIISNVVGLNGRRFLGALIAGDYDPQAVAATANYGLQRKRELLAQGLRGSIGSHQRFLLDQLLSHIDFLEQRITALDREVKQRSLPFEAAIAHLDQIPGVGTRAAEEILAEIGTDMSRFPTHRHLASWAKVCPGNNESAGKRRSGYAGKGNRWLRSILVECAWCASRKKDSYFKAQYHRLAARRGRKRALLAVGHSLLTLIYHLLREGVLYQDLGSNYFDQRDRSQIARQAVRRLERLGFQVALTEGAA

SEQ ID NO: 63611 - protein, 337 aa, unidentified
MNNIEGCGVEVSARELVVARKGKAGVQLTRFANTAAGHRQLLRALTRGGQRVRVVLEATGLYALDLALLLSAQEQVQLMVANPRAVRHFAQAMMQRSKNDQLDAVVLLEFAERMPFTPWVRPAENTLALWAIARRLQALTKLCTAEKNRAHAMGLSEAIPAMVRRDIARSLQFHQRAMKKLRQQALQCIAADAQLQQRYQLLRSVPGLGEISAVQTLAELLLLPADRDVRQWVAYAGLDPREYSSGTSVRKYTRISKVGNAHLRRALYMPALVASRVEPHLRGFYEHLLARGKTKRQALVAVARKLLHAIYGMFRSQRPYDGTRVYLAAAAQAEKFS

SEQ ID NO: 63612 - protein, 379 aa, unidentified
MSTTETTRMIHRTAPEICLFVAFELGEKEWKIAWATSLGEKPMLHTLRARGTKRLLELIRKAQRQVNATRIVSCYEAGRDGFWLHRFLRAHEINSRIVDSASIEVNRRARRMKTDRLDAEKLLSMLLREALGEENLWSLVNVPSVADEDARSLQREFRTLVKERTRSINRIRGLLANHGLVPERIDERLPAWLAEARLWDGSPLPSGARQRILREFERWKFTYTQVREIEKERRHRTQDLTDPSLDEVRRLHALKGIGLGAAWTYGLEFFSWREFKNGKEVGALAGLTPTPYQSGDSQRELGISRSGNRWVRGLAIDIAWGWLRHQPRSALSLWYQERFARGGPRARKIGIVALARKLLVALWRYLETGLLPEGAELKS

SEQ ID NO: 63613 - protein, 329 aa, unidentified
MSNIIGIDVSKASLDCAYLRDPDQAKAKRKSCHNEVRCFASLLAWAAARSGLPVSALAFIIEPTHVYHEQLVQFLHKAGATVYLVNPGRVRKFAEGIGILSKNDLVDADLLVRYGLMARNLIAYAPVPQELNDLRSLLNRLDVLERNLRSELNRQEKVGKTMVFHRLEHQSIARSVKRLKTEIMTFKRAIGQCIKSTSSLQRNFDLLRTIPGVGAKTAWVMLVILGSRTFRSAPEVASFLGLNPIEKRSGKSQYRRPRLSKSGSGNYRQQLYFPAMVATRKNPDIQALYERLLAADKTKMCALGAAMRKLVHICYGVVKNQTPYRPQSA

SEQ ID NO: 63614 - protein, 372 aa, unidentified
MPDVICTAPSDVRLWVALDVHKFSIVAAVLPPQGGRPEVTRIETTEKAIRRFIKTLGGPEGLAVSYEAGPGGFALWRLLTSMGVACDVIAPSLVPVRAGDRVKTDRRDAKKLVGLFRGGLLRFVQPPTPETEGLRDLLRCRDDIRCARTAARHRVAKQLLRHGRIYRDGKKAWTLTHRAWVNRQRLDDPLAHEALSQMLTHLDSLDRQLATLDAHLEDVAGHDRWAWQVDKLRAFRGIATLTALGLIAEIGDFARFAHPRELASWLGITPSEYSSGDQQHRGHITKSGNRHARRLLTEAAWHYRHAPRRPTSGPDPSDRAWQAQIRLFQRHRHLTSQGKRSTVVTVAVARELAGFLWAEMTQQPARKELQAA

SEQ ID NO: 63615 - protein, 344 aa, unidentified
MDHFAGLDVSVKETSICIVDDTGRIVREVKAASEPQALLKVLGNPTYRFKRIGLEAGPLSQWLFSGLAEAGLPIVCVETRHMQAVLKAQINKTDRNDARGIAQMMRAGLYRPVHVKTLRSQKLRMLLTHRKLLQSKAIAIENDLRGTLRNFGLKVGMVGKMRFEARIKELVESLPDLAELVEPLLIVRRTLRGQIVILHRRLLAIVRDDEVCQRLMTTPGVGPVVALTYRATVDVPARFRKSKAVGAVFGLTCARYQSGEIDWSGRISRCGDEMMRVMLYEAAQSMMRSKKWSWLKAWAMQIARRRGMKKAIVALARRLAVIMHRIWIDGTEFRWTQGPATAAA

SEQ ID NO: 63616 - protein, 348 aa, unidentified
MLIIGCDYHPGFQQIAYVDTETGEMQERRLGHRQEAEEFYRGLKQQQIRVRVGMEASGQARWFERLLAELEFELWVGDAAKIRTKRVRKHKTDRQDAQLILSLLLENRFPRIWVASWENRDLRQLLWHRHRMVQMRTRLMNQLQAVALNEGIRRKKGLWREAGRKQLETVALAPWASQRRHDLLELLDRLSPRIAELSERVEEEAGKCPVAQQLTTHPGVGPLTALAFVLIIGQAERFRCGNQVASYLGLVPEEDSSGEHQRLGHISKQGNALLRFLLVEAAQVTVRSDPEWRRKYFHLALRRGRKIAKVAMARRLAVRLYWMWRKGWDYEQWKRFGPHAGQPGAPHS

SEQ ID NO: 63617 - protein, 368 aa, unidentified
MDRKSSKLFVGMDVHKESIDLATGEAQGEVRHYGAIGGDLGSLARVVRKLESQGRELVFVYEAGPCGFGIYRWLRSRGHECWVVAPSMTPRQASDRIKTDRRDCLKLCRLARAGELSPVYVPDAVDEAMRDLVRSREDAVVMQRQARQRLAALLLRNDVRYNGKTAWTPAHRRWIAELKLPHAAQHIAFEEYVQAVDEAGQRVERLTQAIEAQSCDWRWAPVAQALQAFRGIRAIHGTRILAELGDLRRFARPRALMGYLGMVPSENSSGERRRQGSITKAGNSSARRALVEAAWAYRYSARVSVGIARRQSDLPKPITDLAWKAQLRLCARFRRLCARGLHRNKVVVAVARELAGFVWALGQQVAPR

SEQ ID NO: 63618 - protein, 433 aa, unidentified
MELSKCNETVKVSVGIDVSKGHSTVSFFRTGDKSPSKPFTINHDIPDLKSLERKLDRYKANGTLRIYMECTGRYHLGLANGLYKDGYTVYEVNPKLLADFHDDSLRKPKTDPVDAQKIASYGIQYWNKDRRPFNQMDSKRECLKECERQYKLYTDECVTFTNNLLSLTDLTCPGVNRLFSSNTNQNGHLKWVDFVNTWWHVDCIRKMSMNAFSNRYCKWCQKHGYEFSEDKAEDIMDWAKKALVAMPKSTYIKKTIQIAVNAINDLLETIQNTKKHMNQLASQLPEYPVVMKMDGVGEVTGPIIMGELGDVTRFNKRSQITAFAGVDPKKHESGDDKPKSSRATKIGSPELRRALYLVMTSKLARKPQGDRVYDFIVKKRSEGKKYLVYMTAGANKFLRIYYGTVRDYMQNKQNPSFIQDKAPAGQANVSQTA

SEQ ID NO: 63619 - protein, 360 aa, unidentified
MFTERTSVGLDVHARSVAAAAIDGVTGEVFRARLVPAPREVIGWIEALPGPAAAAYESGPTGFGLARALNAAGIRCQIAAASKLQRPAGDRVKTDARDALHLARLLRLDEIVPVRVPTQVEESARDLVRCREAARADLMRARHRLSKLLLRHGIVYSGGKAWTQVHDYWLLAQSFPLAGTQAAFEDAYQSVVLATARRDRLDAAITAMATDSQFTPVVARLSCLRGISTLTGFCLAVEIGDWDRFTGASIGAYLGLVPSEHSSGARRSQGPITKAGNTHARRLLVEAAWHHRKPYRPTAILRRRWAVAPPAAVARAQLGNHRLHQRWSAYAERSKRPVVANVAVARELAGWCWSLARLGE

SEQ ID NO: 63620 - protein, 325 aa, unidentified
MSEPGVFVGIDVSKASLEVAVEGGESWSAANQAEGIAALVERLRQLAVALVVMEATGGLESLAVAELAAAGIPVVVANPRQVRDFGKASGRLAKTDRIDAQMLALFAARMRPEPRPLASEEAQLFAALLARRRQLTEMLVAEKHRLGATRHAAVRTGINRHIAWLERQLESTEHDLDQRIRQSPVWHAREQLLRTAPGVGPIVSHTLIAELPELGQLNRKKIAALVGVAPLNRDSGVLRGRRQIYGGRHTVRTALYMAALTGVRSDSVLRDFYGQLRQRGKPAKVALTACMRRLLTILNAMARDGRSWSSTRPHARLGPIAQHSC

SEQ ID NO: 63621 - protein, 403 aa, unidentified
MSPEHSIDIFLGLDVGKSEHHACALDRDGNKVFDKPLPQLESELAGVFHQLQKLGTVLVIVDQPNTIGALPIAVARDCGCEVGYLPGLAMRKAADLYPGRAKTDKRDAFIIADTARTMPHTLRAVDRNDEVLSALKMLSGFDDDIARDCTRTVNRLRSVLTQIYPSLERVFAGSTLTRTPILELLIHYKGPQGLKRAGYQRVLNWMIKRTRKDPTPLVDDIFAALKAQTVTVPGSDAAELVVPQLAANIQALKEQRNTIAEQVEEMLADFPLCEVLMSMPGVGIKTAAQILLAIGDGSDFASAGHLAAYAGIAPVTRRSGSSIRGEFPARSGNKRLKNALFYSAFAVIRSHEPSRRYYERKRAEGKRHNAAVICLARRRCNVIYAMLKNKEFFREIPPRPVAA

SEQ ID NO: 63622 - protein, 403 aa, unidentified
MYQNTCITIDVSQNISHIQGFIGPNKPLCKARTMRHSNQGFQFFLTLKDIIESKSNETPLIIFEFTGIYHKSLEKFLISQNLKYHIVAPLRAAKARNSEIREQKTDARDCLTLSKLFYTHSLGIFYSENQTYSSLRKLNRYYDTCMKHLIKIKVNFRETLAVIYPNYNKLFTSVYSDESLTFLKLFPHPSLYTSKSEDEILTILNEKWNHLESWSSSKVKKITPLVDETVSGCSITEPETLILLSYITQIEYYLNQIKATIIKMNQLASKLPLYNLVHSLPGIQDILTCKFIAELGDISRFTNYKQIVAYAGIDPMIRQSGDKDGLHLKMSKKGNKRLRTILHLMVSSLIKANRQPNAIKTKYQKKTHQLNPLKPKVASMACANQLVRIIFYMHKTSSTYQYK

SEQ ID NO: 63623 - protein, 377 aa, unidentified
MQETMIQSVKADKLFIGMDLHKNTSTFVVKDKDGKLINSAKVLTDKNDVTRYINSIKRNSDGRDLSLAVEPVSQWYYYADLIENLGVDVHLAHPMEVKAIAHAHIKTDKIDAGVLADLLRTNFLPEAYFSPAEVRSWKEQCRFRASIINLRSQVKNKIHAILFKHSLKHNFSDLFGKGGRRWLASLELKEPFQGNLNKYLILIDQLTEQVVQAEEIITNTVINCPQAKLLISIPGISYCSALTIMAEIGEIDRFISVKHLQSYAGLIPSTYNSGDKQIHGRITKRGSKWLRWIMIESAYHQMNCKRIPGFGAYYNGIKIRKGTKTAAVATARKLLAVVWRLLKDNRPYEVVDPRCWKSRPIASKISSVSAVVSTMAG

SEQ ID NO: 63624 - protein, 349 aa, unidentified
MKKRITQTIGLDLGDKTSTFCVLDEATGDVIERGEVRTDQVMMELFFACRPAARVVMEVGCHSPWVSRIAERYCAKVYVANSRRLKFIYANERKSDVVDAEALARVGRMDARLLMPVRHRGPKAQKDLALIRCRAQLIETRTELVSSLRGQIKAQGARLPSMDAASIGFRTQERLPLELRDLFKPVLLAIESVTDSIHEYDERIEAVAKKDYPEIDLLTQVWGVATLTALTFVLTLEDPDRFLRSRTVGAFLGLVPGRDQSGAVDKEKRITKRGDSYLRTLLIQCAGVILMKHAPDTDLKRHGERIARDGSKVSKRKAKVAVARKLAVLLLTLWRRGEEYESLRNRQAA

SEQ ID NO: 63625 - protein, 320 aa, unidentified
MLSFGGIDVSKDRLDVVVLPEEECSSVPNDAAGWAELVERLRGFSITAIGIEPSGGYERGAMRALLAAGMPVRQVNPFKLRQFARASGVLAKNDPLDARMIASFVTIMPTRPAQRQTPAAERLAEMLAIRRQLSTEKVAAENASRLLEDAMLQRLSRRRIVRLAADIDLLDKRMVEIVATDDALVHRYRLLTSMPGVGAVLACTLIALLPELGRMSRKQVAALVGVAPYAFESGTLKGRRCIWGGRAHVRQVLYMAAMSASNWNPVLKAFHDRLTAAGKLPKVVIVAVMRKMITMLNAMVRDDVVWADRLSGRHVLPTAR

SEQ ID NO: 63626 - protein, 360 aa, unidentified
MFSERTSVGLDVHARSIVGCGLDTVSGTIARRRLTPTIEGVAAWLAELPAPVAVAYEAGPTGFGLARQLTAAGVRCVVAAPSKLQRPPGDRVKTDSRDALHLARLLRMDQIVEVRVPSVEQEAARDLVRAREDVRGDLMRSRHRVSKLLLRQGIAYYGGHPWTGPHEVWLRGQHFTAPGLQLAYDTALETVLLTAARRARLDRAIAEMAANSEYTAVVRRLCCLRGVSTLTGFGLAVEIGDWQRFTGATIGAYLGLVPTESSSGGKRSQGSITKTGNTHARRLLVEAAWHHRKAYRPSLTLRARWDQAPAAARARGHEGNHRLHHRWEVFTARNKRPVIANVAIARELAGWCWSLAVLDD

SEQ ID NO: 63627 - protein, 356 aa, unidentified
MDRFIGIDVHKDSCTVAVMGPSGKRIRCEVVETNGAALVEVIRLIPKERRVCIEESGQSDWLREILRPHVSEVVVEGTTEKKDRSQQKNDEKDAWGLAERLRTGTVRNRVFGAPRELSELRDAVRSYGIIVEDLVRTKNRLQAVYRSRGIPVEGEEIYRESKREAQLAKLPEGRRILAELLSRELDAQEKLLREAEERIEAKAQAHPAVARLMTAPGFGLIRAAQVVAIGITPKRFRSLRQFWSYCGLAVVMRTSSDWVRQDGQWVRSDNVSKTRGLTRKRQPMLKAAFKGAATVVVGRMKEHPLTCKYRQLCDAGTKPSLAMLTIARKIAAAVFAMWRNEEAYDPGHRSSQLRPT

SEQ ID NO: 63628 - protein, 413 aa, unidentified
MSSEYNEVVAGIDIHKSMLAVVVAGRGQNESEYEKRKFGTGRYQLEELRDWLLELGVKRVAMESTAQYWRPVWYTLEEYFQLILAQPRSTAAPRGRKTDFADAKRIVRRLLADDLTISFVPEAEQRRWRLLTRARTSATQQITQLRNQLEGLLEEGRIKLSGLLSDLLGWSGWRILTALAAGESNPETLAKLAHEQVRASQEQLREALDGKLESAHRLLLKQHLDQIELLRKQIQELEQETMQILQPQHEAMHRLCGMPGINELAASQILAEVGAEAAAFATPGKLASWVGYCPGREESAEVSVNNRCPKGNKAMKRLLNQCAWAAVRNKDCQFYRLFQRWRAQLGVKRAIVAVTHRMVIVIWKLLHEKQDYKDPGCQLSPEAIRRRMKKYVKNLEALGFEVTIKPVSGPTPA

SEQ ID NO: 63629 - protein, 433 aa, unidentified
MHDAVLSIDVSLDQLDVALRTDDTGWQWPHRAYANNRPGFEKLKAELLSELSPLAAAQLTVVAESTGPYWWPAFYQVAHDPELASYQPHLAVLNPQHVKGFRKALPQQDKNDLLDPQLIDRYYQAVGVKHFYQFNDRYLQLRFLSRAYARLIHTLAAEKAYLRSLLFIYASDYQRLEPFSDLFGTSSLAVLDEYDDIQRLADLPLDDLTAQLRLLSANTLPDPQSNAQTLQQVAADSYRLPQALAASLQLILQHSIAHIRFLSDNQKSMRLLIEQQLQQLPEANLALQHRGLGPILVAGCLSEIQDTRRFITGTKFDRKLKRSRPRTYRDGQAAVAKLAGLWWPQNDSGRFQADERHLARERNPYLRYWLVQAAYTLQCYQPEYTAFYWRKFHQVQKHQHKRALILTARKAVRLIFALLHKGQQAGLKEVPTA

SEQ ID NO: 63630 - protein, 379 aa, unidentified
MTTNIDTGDVCCTALELSKTSWVCAFAAPGDSQAIVHKIKAGDVDRLIGILNSSKAKAEHRLGRPLHIVLCYEVGYDGFWLARFLIVRGIRTIVFDPASFLMPRRGRRAKTDRIDAEGMTRTLRTWLSGDREVARDVQIPSVEQEDAKRIERERKYLIEKRTSIVGRIKGLLALHGIWLTGKRIGKGLRERLDTMRTGDGRPLAPFLRRDIERMLRHYDFVSQQIEEVVADRKKALADRSGRFPQAEKVQLLATLGAVGETTATVLVAEVYHRSFETRRHVASFVGLAPSPYNSGDTDRDRGISKAGTKLARQTLVELAWFWLRYQPNSKLSLWWHERFGNMGMRGRKVGIVALARKLAIALWRFVEQGVVPEGATLKA

SEQ ID NO: 63631 - protein, 329 aa, unidentified
MNSICFTDPAATALSVLGLDVAKKSVQAELRISGKKVRFGFANSAKGFSQLAHILQQYNVPKIWAGLEATGPYGHALALWLHAQGHRVSLLNPRRVKDYARSAGNRNKTDQLDAAIIADFVCAHQPVAWKPPLQQVAQLQALVRRREELSLMLQAEKNRLEGVAPNVRCSLQRIITALSAEKARLEKLIIQQIRSHHQLCRDHQLLCTIKGIGSLTAAILLAEMARPGQVKRARQAAAHAGLTPRREQSGTSVRRHRGLGKAGNRYLRKALYMPALVAIKYNVPLRHFASRLRAAGKPKMSILCAVMRKLIHIAFGILKHQKPFNPSLA

SEQ ID NO: 63632 - protein, 440 aa, unidentified
MAMRKQQEEVFPNAAGIDVGGSSHWVSVPRHSCEESVREFGAMTDDLNAMADWLLACGVDTVALESTGVYWIPVFEVLEQRGLKVYLVDARQMKYVPGRKSDVLDCQWLQKLMSLGFLRAAFRPTDEVCVVRAVARQRDVLLAEQASWIQRMQKALVQMNIQLTEVLTDVMGLTGQAIIRAIVAGERDPRALARHRHSRVKASEADIAKALRGNWRDEHLFVLGQALAMYDHIARHLGDCDAKLQRLLGQLGASQVDLGKAPRAGSKTRADFDMRQILANWARVDLTRINGLGLGAVMKILSEVAPDLSRFANVKHICSWLGLCPGTKISGGKVLSAKTKRSANRVRQAFKMAAMSLAHSDSALGAFYRRLSARMDKPRANTATAHKLARMVYFMLPRGEAFVDQGQQRYEEQQRERSIAALRRRAAALGFAVMLSATPT

SEQ ID NO: 63633 - protein, 430 aa, unidentified
MSSIVQTPHRRQAVPDPIQGVVVGIDVSKGRIDWRACCLGQWGSPHRVTQGEAGFLRFEQHLLAAAEGGQEVWVALESTGPYGQCLQEWLLDRGWRVVLVNPYHVKRSRELHDGNPRKDDVKDPGVIADLVWQGSYRRVRRLYGPYAELRVGFGQWCSLAKSRTALRNEAQALLELWFPELVRLFANPLGKSVQALIGRYDSPSALLLAGRRSLHATLKRETHGRGVRYGEGIWKAAQGSVAVRQGQESRVRALRDLLGRLACVEAQQVRLRAELERWLAQTEEGAYLRSVPGLGLLTAAGVLGECGPLAEFHSVRALEKFVGMNLYRISSGKREGQVHLAKRGRQAVRALLVQLAVGQMRVGRLGGAWVQQRKAQGHPSRKTQIALARKLLALCYALAKHRVCFETTRWFAEAKTADGGAPLQGTPTET

SEQ ID NO: 63634 - protein, 444 aa, unidentified
MGTVQRVTQMGLDCHRNFSTISGRDGVSGRVVFRRRLEHEDRQSLREQLRRLPKVPVVLEGSFGWGWISDELTKAGQSPHLASTRKVAAWRRARGIAKSNRTDSDLLGELWDQQPRWWEVWLAPPAVRDQRELLRYRMGLVQVQTRLKNQVHATLHRHGLVNRHADLFGAAGRRWLNALTSDAPASDAPVSDEHSLSDEHSLSDEHSLSDEHSLSDEHSLSDEHSPLRPTARGTLGGLLIHLEQVRRLIAGATRQFRAQAWRSPAARRLMTLPGVSWILAYTILAEVGQIERFKNPRHLASYSLLVPIAHDSGDETDEAPLGRHVGQVGRRTLKWAFIEAAHGAVRRNGRFRSVFDRRTDGGKRDRNRGYIAVGHELCRLSYVLWSKQVDYSGSPPPRPGTPGQAKGEPVEAESAQAGTQKTSLKEKARKVHGSRRTCSRPGTG

SEQ ID NO: 63635 - protein, 412 aa, unidentified
MDVFVKRCAGLDVHRDSVMATVRLPGARRRQRERHTRAFGTTIAQLEVLSAWLAGFGVTLVGMEATGIYWQPVFHVLEPRFECWLLNAQHLHNVPGRKSDVIDSAWICELVEHGLVRPSFVPPPEIRRLRELTRLRKAEIQERTRTIQRLEKLLQSVGIKPTSVASQAYSISARAMLEALLAGTSDPNQLAELARGPMRAKIPQPREALANRFDIRHHGVLVSQLLAHVDALDQAIATLDERIALYTEPYAELIELLSTIPGVKQRTAQVLIAECGTDMSVFPTVRHFASWARICPGNNKSAGKNRSGKTLRGSRWLREALTEAAKAAARTKGTYLASHYWQIRGRRGEPKAIGATRHDILVAYYHIVRDRVPFRELGPDWLARRYSPEHRARRLVRQLEALGLEVTLKAAA

SEQ ID NO: 63636 - protein, 417 aa, unidentified
MQYVPSVLPAEPINGLTCGIDWARDDHAITIVDEHGRQVHRSTVEHSSAGLHELVGLLARTGATEVAIERPDGPVVDALLDAGITVVVISPNQMKNLRGRYGSAGNKDDRFDAFVLADTLRTDRARLRPLVPNSSATVALRAVVRARRELVIHRVAVANQLREHLKRVFPGALGLFEDLDSAISLKFLTRFDCQDRADWLTPKRLGAWLKSVGYTGRTDPATLHTRLTAAPRGATGTEGAAHVCITRALVASLTSLVEQIKTLEKRIGEQLATHADAHTFTSLPRSGTLRAARLLAEIGDCRARFPTPEALMCLAGVAPSTRQSGKMRSVGFRWSCDKQLRDAVCDFANDSRHANPWAADIYNRAIDRGKDHPHAVRILARAWLYVIWHCWQENTAYNPAKHKALQALLEQRENPAA

SEQ ID NO: 63637 - protein, 318 aa, unidentified
MTNKTYHFNIGVDIAKQKFDVAFSDQRVVSFENNLSGFKLLLKEIKNKSQSRVVMEATGGYEKPLAHCLQDQEVAVSIVNAKRVRDYAKALGFLAKNDVLDAKVIRMFADAVNPKLLPTASDTQQTLDALAHRREQLVKQRAIEKQHIETVGNKEVIQSIKRNTKFLDKEIERIEKAIKAIINADSALTEKVDLLSGIKGIGDITALTLIADLPELGQLTNKEISALVGVAPFCRDSGTIKGKRTTWGGRTQVRAILYMAALSAVQYNPPIKAFYNRLIKNGKTKKVALVAAMRKLLTVANSMLRNNTEWNPDHGKLA

SEQ ID NO: 63638 - protein, 334 aa, unidentified
MSLELLAIDLGKRSFHLYGIDTDGVILSQKVSRAKLAEVVANLAPTVIAMEACASAHHWGRCWLAAGRKVRLINPRFVKPFVKGSKNDAVDAEAIFEAAMRPTMRFVPVKSTDQQDLQSLHRARDRLICQRTALINHTRGLLAEYGIVLRQGRWHFATQASAAIADADLSDLARVIFGELLDQLDDLDRRVKRLDATMVALCRTNAICRRLAKLPGVGPVVATAIVAAVNDGRQFRSGREMAAWIGLVPRQYTTGGKPRLGGIGRRANHYLRRQLIHGARAVVSRLPKHDDPRSIWLKALLARRGFNRTIVALANQTARIAWALLSRKEEYALA

SEQ ID NO: 63639 - protein, 429 aa, unidentified
MNYTQNEKIMQVKVSTLVVGVDIAKNKHAARFFDFRGIEYDKAIFFENNEAGFKKLLHWIKKVSEKENKTSVIVGMEPTGHYWLPLEEYLRRKTDFLRVVVNPAHVKKSKSLDDNSPTKTDRKDAKVIAKLVIDGRYSIPHMPEKEYADLRVAMTHRERLVKDIINLSNKIQQLIDKYFPEYQTVFKKWSGKASVAILKELFLPELILEKTEEEIVEIFKKGASRGVGIKRARKLKKAALNSIGIKEGGEFTRYELRNLLEQYELLNSQKELLEEKVEKLFNSMEEAKYMESVKGVGIITVAGFIAEVGDINDYDHPKQIQKLAGLNLKEHSSGKHLGQTRITKRGRPKLRALLYRVMLPILAKNQEFKQLHEYYTTRRNNPLKPKQSMIALACKLIRIFFALGQKHVMYDGEKLMNDIDRNLDLQEVA

SEQ ID NO: 63640 - protein, 340 aa, unidentified
MRQLYAGSDLHGNNNLMGIVDEQGKRIFKKRLPNEPELILEVLKPYKGQMVGIVVESTYNWYWLVDALMDEGYKVHLANPSAIEQYSGLKHADDKHDAFWLAEMLRLGILPRGYIYPKEQRPVRDLLRKRSHLVRLRTSLMISLQNILSRNLGRNMSVNDVKAVKEDRVSPLLEKNEDLALAGRVSKEAMDHLTHQILKIEGVVQKKIRLKPEYQYLPGVFGVGKILSLTIMLETGPISRFPTVGDYVSYCRKVPSRWTSNGKWKGSGNRKNGNKYLAWAYSEASEFARRLHPEARAYYQRKMQKTNTAVAHSALAHKLARSAYYVMRDHVPFEPKKLFG

SEQ ID NO: 63641 - protein, 399 aa, unidentified
MGPHLRVGVDVGAKSHHVGIADREGRILENFVIPHSQEGFARFFARVEKHSAKLGVPVVVAMEGLNGWSRPLDQMILERGYRLYNVNNLKLARFREIFPGGAKTDALDVGKILELWHLQDHLPVAKDVLQEVPEVPPENQKLKRLTRRRRQLVVEKVRVVNRMQSDLLAVCPELLAITGDATNLWFLRFVASRDDLRELRQMVREEVLAIRGIGKKYAGVIAQWQKKARFSAEAEYVGPMIVADARRLLEVLQEIATLEEAIEGLVASSPLAQRIDSIPGFGAISSGELAGEIGTLERFDSERSLALYLGMCPLDHQSGEYKGSKRPRQVNRRAKATMMTAVARHMDSVPQSRAYYKKRAEGKKHNQAVRALDRHLVRVMWAMLTQDRDYALREDSCPG

SEQ ID NO: 63642 - protein, 352 aa, unidentified
MDRYIGIDAHGQSCTLGVVGPSGKRLKSVVVETNGQALVEAVQGIAGRRHICLEEGTQSAWLYELLSPFAEEVVVTVPPESRGSKDDVRDAWKRAEELRVGGIQTKVYKAPAFLAGLRNAVRAYVFAVRDVVRAKNRLRSVFLSRGVSVDAGVYSPDRRGKCLEKLPPAHRQLADRLACQLDELTPFRDEAEEWLLKESKSHPIIRKLKTAPGMGPIRTAIVVSVVVDPHRFRTSRQFWSYCGLAVVTHSSANWIRDRLGKLVRAENTYTRGLTRKRNGSLKAVFKGAATTVITQLPEHPLSLNYQRMLTAGKKMHLAKLTLARQIAAIVLSMWKHGEAYDPKRRVVVTDKI

SEQ ID NO: 63643 - protein, 355 aa, unidentified
MRSTAIQYVGIDVHQATLVCVVKDETGQTTIESKVATRREAIQSFVRGLGGRVRIAFEEGTQAQWLYELLRPISERVIVCDPRKIATKGNKDDQRDAERICELLRLNALKPVYHDHTDQKLKELVRCYEALVDDSLRVMLRIRAIYRSRAISTKGRSVYHPTKRAAWLEQIVDDGGRFRAEQLYIQLDHLLELRRRARTMVLRQACNQRAYRLLRTVPGIGPLRAAEIIAIIGDPHRFRTKRQLWAYAGLGLITRTSGEWIADPRTGRFHRNPRAPLTRGLNPNFNRPLKKIFKMAAHDVTGRPGELDQSYQRMIERGMRPEMAYLTLARKIAAIVLAVWKKGVSFDPRLIAQSV

SEQ ID NO: 63644 - protein, 355 aa, unidentified
MTSAKYIGMDVHKESISIAVRNAAGKIVMECVIETKASMILQFIDGLRGDLQVTFEEGTSAAWLYDLLKPHVTKLVVCDPRKNASLREGNQSDKIDARRLADLLRLNHLYSVYHGEHGLRSLKELVRSYLTITKDLGRVMSRVKAIYRSWAIPCSGKQVYAPRHRVEWLGKITEPGVRRRAEFYYQQLDALRAVRQQVRRELLAEGKKHPAWKRLCQIPAIGPIRAAVLLGILQTPQRFRTKRQLWAYSGFGIETQSSADHRSVNGQLQRVKKQSSLRGLNRNCNHDLKNLFKGAAVVASSKPGPLQEFYTTLLSKGLRPEMARLTLARKIATIVLIVWKRGVCFEAQHLKPQTA

SEQ ID NO: 63645 - protein, 425 aa, unidentified
MEGRSIGLNVHRDFCEIAICEPDGRVRRGPRIATRRAALRELAEQLGPQDRVAMEATGNALQIARIIRPYVKQVIVANTRRLAAIAEAKNKTDRRDARTLAQLLHAGLLEDCWQPDETIRALRRRTARRAKLVRHRARFKNEILAVLHRNLKPRPPMADAFGVAGREWLAALALPVDERDTVNAGLRQIDFLTEEITTLERDLARYTLDSVEAKRLMTVPGVGMITATVFLAAVGDIGRFPDTRRLVGYLGLDPRVRQSGTRPAHTGRISKEGATEVRHVLVEAALTAVRTPGPLKAFYERTRGRRGHQIAIVGHRPQDGDSVLAPADHRTRLRLHDADRNRQEAPRRRTQGRRRPAQARRAPAAAQPPAAPPSRARHRRTRASRLRTHRHRLAPPTTPTRQHDGGNLTFIRPLATSLSARFSSA

SEQ ID NO: 63646 - protein, 416 aa, unidentified
MGVALRLFIGDDWAEDHHDVELMDGAGRRLARARLPEGVAGMARLHAMVGEQLGDQAEEADPGQVAVGIETDRGPWVAALVAAGYTVYAVNPLQASRYRQWHSVSGAKSDAADAHVLADMVRTDSHQLRGVAGDSAQAEAVKVVARAHKTLIWERARHLLRLRSSLRDYFPAALEAFPDLTAPDALELLAQAPDPASAAALTTGQITAALKRARRHHIPAKAAATAAALRAQHLAQPPVVAGAYAATARSAVAVLTVLNEQIQALEGQVEAYFGQHPDAEIITSQPGLGTVLGARVLAEFGDDPHRYADAKSRKNYAGTSPITRASGKKKTVLARYIHNDRLIDALAAQAFAALTASPGARAYYDYHRARGLSHYAALRQLANRLTGILHGCLKTRTLYDEATAWPQHKTSTPTAA

SEQ ID NO: 63647 - protein, 373 aa, unidentified
MAKSELLEAVADLQDTHETGEGNVTIGIDLGDRYSYCCVLSEEANVLAQGRIRTNAATLKKFFEEIPPCRIAIEAGTHSRWVYELLSSWGHEVIVANTGAIQIISSNNRKSDEVDAQMLARLARADPKLLSPIQHRSGSSYEDVVCLNARDLLVRTRVKLINAVRGMVKSSGGRLPTSTTEYFVGKAAPHIPEAFRPALTPLIENIARLTEQIREFDKRIELIARTRYPETARLRQINGVGPLTALKFVLTIGDPHRFRQSRDVGPYLGLVPRRHQSGSVDKQMRISKAGNRQLRVLLVQCAQRMLSRFGQDSDLKRWGMRMASRGGKSSKKRAVTAVARKLAVLLHRLWVSDDVYRPLFNAMCNQGLPQPIA

SEQ ID NO: 63648 - protein, 408 aa, unidentified
MEVLHRRCAGLDVHKKTVVACARLMEGDTIHYEVRTFGTTTSALLALGDWLRAHGCTHAVLESTGVYWQPVWHVLAEELELVLAHAAAVRNIPGRKSDVSDAQWLAELLAHGLVRPSFVPSGPQQALRELTRTRKQLVREVGAHSQRIHKLLESANLKLSSVLTDLLGVSGRAILRALAAGETDPGHLADCLHRRSHGKRAAVIDALQGRLRPHQRVLLGQHLTLVTALEASIRALEEEIATALAPFRRAVAHVLTVPGVNTTAAPVILAEIGTDMSRFPTAGHLRSWARLSPRLDESAGRHRSRRIQRGGRWLKATLIQCAWGAIQVRDSYPRALYHRLVRRHGKKPAIVAVAAALLTAIYHMLRTDQDYRDLGPAHFTDADRQRAANRLARRLRALGYEVSLRPAA

SEQ ID NO: 63649 - protein, 300 aa, unidentified
MSIVGGLDIHRKQLTFDYLDQATGEVKSGRIAPADRRHLAGWLRRFEGVEQVTFAAEACTGWRYVVECLQAAGVRAQLAEPADTAAARGRKRRAKTDRADSRLLRELVEGDRVPQCWIPPRQVLEHRALLELYHDLRREHTAWIQRIHAVCFHQGTEALSLSTEADRAHLRQVAAAQLSPAGQLQVDTYLQMLQALEIHLVGVRRRLVAAARHLRGPKVLTERLYGVGPVTALALTCWLGGAGRFSSSRKAVRFAGLDVTVYSSDGKRSPGRLSRQGPPGAALVPVRGRQAALPPQRQAR

SEQ ID NO: 63650 - protein, 386 aa, unidentified
MSRGLGDVYKRQEIIFEKTYGVLTPELRQMSQDMVARGVTEAAMESTAVYWVPVWNELCGSMELKLVNPYFIKQLPGRKSDVKDAQWIAECLLKNLIKGSFVPDPVVQDMRKLNRRIMDLNEDLTYNTNKLDAALQRCGFRLSNYVTHIKGKSYQSVLSCIIDGERDPEKLVSRVHGRTINKHGRETIMAAVTGSFSDTDIIIFRQTKAVIDLIEAQMAECQKELTALCRRHFPQQYRRLQTIPGVKERAATAIIAETGVDMKMFATAACLVGWCGLKPRNDVSNGRYKSRKVTHGNRYLRQILIEIAWVASRTRNCFFSNFSYVQTTVKKKSKMKIQVAIARKILVAVWHMLTKEQDFIDIYLKRLEEQKKMKEQIKRLEATVNR

SEQ ID NO: 63651 - protein, 405 aa, unidentified
MATGHRVVIGMDPHKRSVTIEVMTADEVVVGGGRFGTDVDGFAAMTEYVRQWPDRVWAIEGCSGIGRHVAMRLIADHQDVVDVPPKLSARARVFSTGQGRKTDATDAHSVALVGTRMAGLRPVVADDQLTVLRMLADRRRALGEEHTRKVSQLHALLLELLPGGAKKDLSAAQAKALLAKVRPRDLVGKTRRRLAAELVGDLEQIYARKKAADKELRALVAATDTGLLDLHGIGPSGAARLLVEVGDITRFPDRNHFASWTGTAPIDASSGDHVRHRLSRRGNRQINRVLHIMATVQLRNRTEGRAYFDRKKAGGKSSNEAMRCLRRRLSDAVYRVMVDDLAETMRTDPGGQPGNDSYSSATSSQPHASSSEKPLPDPSRPSLELRYLQRLDTEGSHVSASAGGE

SEQ ID NO: 63652 - protein, 400 aa, unidentified
MRTVFGIDVSKASSEVAILVNGERVHGYTMPNDIIGFSRLLEDLKTVGNPEIIFEATGVYSRRLQAFLEENSYDYTRLNPLEAKKQLDGLRVRKTDKIDAEKLASSQFVLNRKPTYVQEEVYQNLHDLSRFYQNLTEDIVRTKNRLHKVLQVAFPEIENLLSTPTGEQYWNLVSIFPTKHWVLELSEVELKEVIRNSTSKRISENRVGNLTEKLVGLAKQSYAGISKTSPMVEEVKYDAQELIRLTNRREQVLQQLIALAEPLPEYKILLSIPGIAETTATSIIGELGDIRRFKSANQINAFIGIDLKHYESGDFLGQEHITKRGNPYARKILYKCIHNIASASHTNPCHIADFYEKRKRQSQITSTKPHTIASIHRLIRTMYYLIMHNKLYDYTLAQSH

SEQ ID NO: 63653 - protein, 343 aa, unidentified
MEHFAGLDVSVNETSVCIVDDRGRIVREAKVASEPEALLPVLTNSGHHFKRIGLEAGPLSQWLFSALAEANLPVICVETRHMRAVLKAQINKTDRNDARGMAQMMRAGLYRPVHVKTLRSQKLRMLLTHRKLLQSKAIAVENDLRGTLRNFGLKVGIVGKQKFEARIQELVENLPDLAALVEPLLIVRRVLHEQIAVLHRRLLSIVRDDEVCRRLMTVPGVGPVVALTFRATVDVPARFRNSRAVGAVFGLTPAKYQSGEINRTGAISKCGDEMMRVMLYEAAQIMLVRSTQWSWLKAWAMQIARRRGLKKAIVALARRLAVIMHRIWLDGTEFRWSKDAVAA

SEQ ID NO: 63654 - protein, 350 aa, unidentified
MQGNGRWIGLDLSKKTYEMCYFDQQGKVGRSGGETTKDGRAKLYAKVKPEDIVAMEVNSLAFVMEKEMRAIGCTVVILNASQLSVIYASTKKTDKEDALKLARLVKIYEKEDLPIVDVPTDKEYYRRKLTKECKTLKDDRTQEINRLHALFLQCGITTMKRSNLQTDTNRQKVLPQLFGYEVGQAKRVCERLTLLDAQIKELEQTITKECKADKDIERLKTIPGVGDKTALAFAAYVGDGKRFNNGDEVANYLGLVPRVDCSGSINRYGHITKKGNRIVRALLYQAAWSIVRSKHGGALKAKYFYMTEHGKGKKISITAIARKMAKLMYLIMKNKGEEYKELPAPASRAG

SEQ ID NO: 63655 - protein, 412 aa, unidentified
MQVVYPCCCGLDVHKKSITACVLWAEARGEKRKEKRVFGTFTRDLLKLSDWLRECGVRQVALESTGIYWKPVWNILEGQFEVLLVNAQHIKAVPGRKTDQKDSEWIADLLQHGLLKGSFVPPPAIRELRDLTRYRVNLAEECNRIANRIQKVLEDANIKLASVATDALGASGRAMLKAMIEGEENSEVLAEMSKGLLRKKMPELRGALEGRTTVHHRFLLQELMDHLEFVETKMLRLEEEIAKRTQPFEDAVRRLRQIPGVDRITAWGLIAEIGVDMNQFGDSRHLASWAGLCPGNHESAGKRKSGRTRKGSSWLRRCLCQAAWAVSTKKNNYLSAQFRRVAARRGVKRATIATAHTLLVIAFHILKAPVEYRDLGGDYFDRLHPETLKHKLVKRLESLGLKVTVEPMAQTA

SEQ ID NO: 63656 - protein, 419 aa, unidentified
MTQREDSKIIGIVHPVCCGLDVHKESISACVIYAGKDGADQYDIKIFGTFTDDLLRLRSWLLDHSCPVVAMESTGIYWRPEQNVLEDAVQVVLVNARDIKNVPGRKTDIGDSKWLAGLLRHGLLRSSFIPTKEVREWRDLTRLRKQYVYTAGDYRKRTHKLFESANIKIDSVVSDLFGVTGRNLMNLLVSDQTALSLEDIVRCVRGKLKGKEAELYRSIQGFFSDHHRFILKRLLHTIALLEKEISLLDAQIGNLMQNQNALLSRMKQAAGIADVSSREVLAELGPDLNEFPTGEALVSWAGLCPGNNESAGKRKSGKSPVRKHHLKTVMIEVAWAAVKKKGSYFKDKYYRLKARRGAKKAIVAIAHRILLGIYHVIKDGVEFRDLGEDYLTRRNKSLKLFQLRKQAQFLGFNLVPQTP

SEQ ID NO: 63657 - protein, 316 aa, unidentified
MGEDVTRVLGVDVSKAGLDVACSGDDKVQRLANDKAGIEAVVARAHELDAQRITVEASGGWQLPLVAALLHAGLPVVVVNPRQVREYARATGTLAKTDRIDARVLCAFTLAVQPPLRPLKDQQAEALSALLARRQQLLGMRTAEKNRLTLGATGPVRKNLKAHIKWLDRHLRDTDRELKQLIEASPAWQTKEDLLTSAPGIGNTTARVLIGQLPELGQLNHKQIAALAGLAPFNRDSGTLRGQRMIWGGRHEVRTALYMATVSAVRANPPIRDFYQRLKSNGKPSKVALTACMRKLLVTLNAMLRDQTPWQHIMKA

SEQ ID NO: 63658 - protein, 365 aa, unidentified
MCGEAPVFTERTSVGLDVHARSVVAHGLYGATGEVFTSRLSPGVEVQDWIGGLPGPVAVLYEAGPTGFGLARELRAAGIRCEVAAPSKLQRPAGDRVKTDARDAEHLCRLLRLDEFTPVRVPDAVTEAARDLVRAREDCRTDLMRARHRLAKLLLRQQVSYPGKNAWTGAHMAWLARQRFDDANLQCCFDEYLDQVLATTARRDRLDVRIEQLAADSQWTPIVRRLGCLRGIATLTGFALAVEIGDWTRFDGNSIGAYLGLVPSEHSTGASKQRGGITRTGNSHVRRLLIEAALHHMQPYRKGVVLRARWDLASPAARARGDAGNRRLHARWVGFQARKKRHHVATVAIARELAGWCWSIANIED

SEQ ID NO: 63659 - protein, 386 aa, unidentified
MPQLNDLSRSLVTLEQDATLIAVIEMGQSSWLVAGIVPGVERQPLKKLAVDESALLKLLHRWREEAEQAGHKIKRIAVAFEAGRDGFWLARWLRARDIEVHVIHASSVAVSREHRRAKTDRLDTELLKRVFLGWLRGERHHCKMVAIPTIKDEDGKRPNRERESLVGEQSRIINRIKATLVRLGIRGFNPKLKKAAERLEGLRTPEGEPIPPNTLSELHRDMERRRLVRDQIRQIESARLDHLEHEPGEGAHAMVRLLARVMGIGIETADMLVHEVLSRNLRDRRAVARYAGLTGSPDESGKKRREKGLARSGNPRVRRGMIQLAWRFLMFQKDSALAQWFRARTENARGTRKTMIVALARKLLIALWRLVRDGVVPDGVILRPAQ

SEQ ID NO: 63660 - protein, 417 aa, unidentified
MLAVGIDWAEDADVVALGQPGEGVIEVSSIPHSAEAVATLIERIGTLEPDAAEVRVAIETKHGHLVESLLDAGYTVVPVNPDLVARRRGPARKKDDAEDARILCLLALDRHQALRPLVPHGEAAAELRAIARDDERAARDARRLLNRLRADLIAVHPAALAFAGEDLGAPTLLKLLERWPTQDALAGVSDAELDAFFRQARHGFPDRAVRRLRQALASSQFRPRPHLVRAKAETIRLTCSQLLLLHAQRRAWERRMGELLAALPEVGWEQPGQRLPGGEVYRSFAGLGARLAARIAGEIGDHPWQFESPNSLQCYAGKAPVTRRSGRSELVVACRLACNRYLANAVQQWAFCSLERSGWARDFYDSQRARGKGHHAALRALGNRWLEILWHCLKKGVRYDEAIHVANRNRALGKQAA

SEQ ID NO: 63661 - protein, 364 aa, unidentified
MLGGVYVIYDDGRPLVEAYDGPQIVGMDLHRRRSVLVRMTEDGQKLGTARITNSPARLAAEIARAGLHPKVVLEACYGWYWAADALAAAGAEVHLAHPLGVKAFSHRRVKNDELDARDLADLLRMGRLAEAWIAPPEIRELREITRYRGKLVQLRTSCKDQVHGVLAKLGIEVTCSDIFGAWGTQWLDELRLPQPYSWKVASLRQLIGWLTSEITVLEQVTADLLAGHDGYRAVQELPGIGPVLGAVIVAEIGDITRFRHPARLSSWTGLTPRHYESDTKVIRGRITKQGSRVLRWAVIEAVQRTPAGTPVHELKDAIIARRGIQARNIAKVAAARKLLTCVFYAMRDGHVRALDTPAAEHEAR

SEQ ID NO: 63662 - protein, 364 aa, unidentified
MRIIGVDLHTRQQSLAMLNTETGELIEKTLEHDGDEVRKFYSALPGQVLVGIEATGSMHWFLKLMEDLEIDCQVGHPSKVRAAEPRKQKHDRRDAALLLKLQVENRFPSIWMPSTALRDLRALLMHRHQWVRMRTRVQNALQAIALSHGLRRGKALWSQVGQHAIESLPLPPHTAYRRAELQDLYRKLQGQIDVLDKHVNDQALQRPGAELLMTHPGVGPVTALATDVFLGDPARFEDGKAVVSYVGMIPSEYSSGGQQRLGGLSKQGNPFLRFLWCEAAVHAVRRDPELQRFYRRKLAQKGLGKARVAAARKLGIRLWIMLRDRIDYEEFCRRGQMRQKSGDARAGMPEVGHSPAKCSDCETD

SEQ ID NO: 63663 - protein, 316 aa, unidentified
MHKREAFVGIDVAKKELEVAVFPGADTKTWPNTEEGIGRLVDYLKPLSPTLIVLEATGGLEMPCVGALAAGGFPVVVMNPRQIRDFAKATGRLAKTDPIDAKVIARFAEAVRPEVRELKTEEMQALTALGLRRRQIIQMVTSEKNRLASASKWTREDIKEHISWLEKRLDDVNNELNKAIRNSPVWREKDDLLQSVPGVGPVLSATLLSQLPELGYLNRKQIAALVGVAPLNRDSGQFRGKRCVWGGRASIRSALYMATLVATRFNPTIAVFYHRLRTAGKEHKVALTACMRKLLTILNAMARDHTHWSPVCLGES

SEQ ID NO: 63664 - protein, 407 aa, unidentified
MNRYCGIDWAEGHHDIAIVDQDGTLVSKKRITDDPAGFATLTQLLTEAGDTAENPIPVAIETPRGLMVTAIRATGRPVYAINPMAVARYRERHSVARAKSDHADAMTLANILRVDARMHRQIPADSELAQAIAVLARAQQDAVWRRTKAINELRSLLREYHPMSLATFADNSATSLAKPEVRAVLAIASTPAAAMKLTATRVCTALRRAGRQRGIIELAADIVERLRHPGLRQPELVEKAMGRQCLALLATLNAACSGADDLEQAAAEEFRHHPDYSIITSFPDLADLTGARVLAEIGDDRTRFADARALKAYAGTAPVTRASGRTISITFRRIKIDRLAAVGWVRGFSALSHPGPAREHYLHPAASRHLVNKMLGQLHYCLQNREPFDSIKAFGQAPAHTPEPAAA

SEQ ID NO: 63665 - protein, 359 aa, unidentified
MKKISQEGLINKLKLLVNELIILGVDVHKRSYHIAIWSVQRGLMTTLILPSSSAVLIKLITPFKKHIAQIVYEAGPTGFGLVRDLRASGFKADVIAPSRLPVLPGKQAKSDQKDCVNLSFLAANKLLQPIHIPSREEEAERQVMRLREQTIRKQRCIKQQIKSLLLQHGIEEPEGLENWSLKSLEVLRMLDLGEHLRFCLDTLLDELDWLKSQIATITKRINALAKRERHKTQVEHLRSIPGVGLITAMTYRTELLAPHRFKDGGQVARIIGLAPLVRQSGETSRGGSLMKSGNWRIRSILVEAAWRQIRSDEQAKKRFTRLLGNTGNNKKAIIGVARHLAICMWRISTRNEPYRQKAA

SEQ ID NO: 63666 - protein, 409 aa, unidentified
MQVIHPRCAGLDVHQKQVVACIRVVSRKKVVQEVRTFDTTTRDLLALSDWLASHGCTHVAMESTGVYWKPIWHVLDGAFELVLANAMHIRNIPGRKSDVNDATWISDLLAHGLIRSSFVPPVQIQELRDLTRSRKQFVLESARHVLRLQKVLEDANVKLTEILSDVMGKSGRAIIEALISGETNPEVLAGLACGNRLKATREEFVEALRGRVTPHHRFLLKLQLGQIDSLDSAVRELEVRMGEALSPFRESAELLKTIPGVSDTVARVIIAEVGLDMGRFPTSGHLISWAGLCPGMNESAGKRLSSRIRPGAPWLKTTLAQAAWAAIRTKGCYLRAQFHRLKSRRGPKKAIIAVAASMLTAVYYILKNHVPYRDLGFDHYDRIDKTKAASRLVNKLKNLGFDVALSPAA

SEQ ID NO: 63667 - protein, 390 aa, unidentified
MLKYCVGIDVSKNDLQCCISVIDQLQKVTVKSSAKFANTSTGFIALNQWIISRHKHKEVPLVVVMEATGIYYEQVAMYLFKQQYALSVVLPNKAKKYLQSTGLKSKNDKTDAQGLARMGAEQHLELWQPMDSYFYELRELTRQHQSLQELKTSVNNQLHASQTGMYQSKLVVEQLQTLLTTVDGQIRELATAIERHTEDKEEVKQKVDNICKIKGVGVLTVAVILAETNGFLLFENSRQLVSYAGYDVVENQSGNHRGKTKISKKGNSHIRRAMHMPAFCVVSYQQQPFVGLFNRTLERHGQKMKSYVAVQKKLLVIIYALWKTNSAYELNHTQNKEQHTGEKEQVLSSLPGLAQADPTEQKNSASLQEQTALHKVNLLSNDRSLLPLCQ

SEQ ID NO: 63668 - protein, 352 aa, unidentified
MHASTVAIDLAKEVFELAFADAQGRVIERKRLSRRAFIRSLETRPPLRVLMEACGGAHCWARRFQRQGHTVRLLPARDVRPYVRGNKTDRNDVAGILEADRCAGIAPVPVKTPEQQGIQALHRLREHLKAERTATLNLLRGVLREFGVAVPLGSTKVPAAVRDALEDGDNDLPMALRHSLAEQIDRLSQLARDMLAIEQRLEEFASREVSVQRYRTVPGVGLLTATALRASAGDLSRFRSGRQFSAWLGLTPREHSSGQQRRLGGLTKRGDVYVRTLLIHGARAVLQAARMKQRRGQALDPLQAWALKIQDARGHNKAACALANKLARRLWAMEHHGMPFDPRHVSERPHAT

SEQ ID NO: 63669 - protein, 374 aa, unidentified
MKALHDRTILGKSQAPRKERRCNMANYKLGCDVHKRYSQIAVLDEAGRVCQRDRLVHTPEILQEYFSQFPVGTPVAFETVGNWYWIAEAIEAAGCEPLLTHAAKAKVMMGNVNKTDKLDAEGLATLLHLGKLPTVWIPDAALRDERELLRTRMFLSKIRTGLKNRIHAALSKYALVIEDSDIFVGQGYEHLKRKLLELPTQTYACVAQELDLLDQVQKQIDLLEKRIHQCVQDTPATTLLKTLPGFGKVFSALVAKEMGRVDRFPDAEHFASYAGCVPKVSSSGGKTHYGHLRKEANHYLKWAFIEAANVIVTHRNRPSWRNKHVVRLYERTRQRKGHAVAVGAVARHLAEAAYWMLKKNQPYREPTSDLPRQA

SEQ ID NO: 63670 - protein, 417 aa, unidentified
MRRVLERCAALDVHKKQVTACARIFGEGGELEELTVEFSTMAADLLAMRDWLKQLGVTHVAMEATGVYWKPVYYVLEDDFELLLVNAQHVKNVPGRKTDTGDAQWLCQLLECGLLRASFVPPKPIRELRDLTRYRKALIRERASEANRLQKTLEDAGIKLSSVATDVLGVSCRLMLDALVSGTRDPEVLAELAKGTLRKKIPALERALAGEFKPHHTLIVSHILAHLDYLDEAIATLSVEVERRLTPFAHKAELLSTITAVAERNSQVILAELGPDMSRFPSDRHAASWVAICPGNDESAGKRRSGKTRRGNPYLRAALIESAHAAARSKNTYLRAQYEQVKRRRGHKKAIVAVAHSILIAAYHILNDEVPYQDLGADYFTRRADPARITRRLVAQLQRLGHTVTLETSTADEAVAA

SEQ ID NO: 63671 - protein, 363 aa, unidentified
MSVQYVGMDVDKQKIVLARLGAGRDTRAIEQVIANTPSAVKKYFTSLLGAAEVHATYEAGCFGFGLYRQLSAMGVTVVLAAPGLIPRKPADRIKTDRRDAHSLALALRAAQLTGIYIPTEQDESVRDYLRMYESLRGDVRICKQRVLQFLLRRGIRYDGGGPWTVKHRHWLSALEFSQARDRQTLDMYLSQMQELEAKCEEAATEVESIAAQDCYRQQTKKLTAFKGIKTLIALSFITDIGDFRRFSNARQFMAFLGLVPSEHSSGNKRRQGRITKAGNSHLRRLLVEAAWHYRSYHPSSRDLIERRRGVDPAVLSYANRAGRRLNRKYLHLLLRGKRSQVAVTAISRELAGFLWGAMTDQVA

SEQ ID NO: 63672 - protein, 339 aa, unidentified
MNSNVIGLDIAKNIFHVYTMSAEGKPVRKVLKRKQVLEYFANYPLSLIGIEACGGAHHWARELRKLGHEVKLINAKYVKAFVKGNKNDFNDAEAIFDAVTRPNLREVAVKTLEQQDIQLVHCVREELKKQRNAVVNQLRGLLAERGIVIGKGINQVRKRLPEILEDGENDLSAFSRACFAEHYERLNALDKEIKAQDRCINQLCNSHEQSQRFADVPGIGPLAATIVMADLGTGKGYHNGRMYAASLGLVPGQHSSGGKTVLLGISKRGNRYIRTLLIHGARAVLQHIGGKTDTLSLWLKALVDRRGMNVAAVALANKNARILWALATKAEDYRPARAT

SEQ ID NO: 63673 - protein, 412 aa, unidentified
MQTLIERGCGMDVHQATVVACLLMVRRDGKVQKQMRTFGTTTREQGGLREWLLSEGCTHVAMESTGVYWKPIYAILEGALEIVVANAQPIKKVPGRKTDVKDAEWIADLLCHGLLRSSFVPPKPIRELRDLMRYRRKLVESQAAERNRLLKVLETANIKLATVATDVFGMSGRLMLRALIAGKATPQEMSELAKGLLRKKIPELELALEGKLEQHHRFLLELQLQRLEAAEKDLAALEQRIRQKLEPYAAQLALLDEIPGVDWTLAAVIIAELGVDMSVFGSVSQLASWAGVCPGNNESAGKRKSSRIPSGNVYLKSGLVEAANAAARAKGTYLRDKFFRLKARRGYKRAVVAIAHKILVAIDHMLSQQVSYNDWGDLYLDKLNKHHLTRNLVHRLERLGYTVTLTLEQKAA

SEQ ID NO: 63674 - protein, 493 aa, unidentified
MKQLQKHERSFTMKKRNIYQNRSQELLSLFEEAGNSAKVMCVPMDYAKKDHVVMFCNGHGDILRKPFSVKNSPDGVKYLVDQATRSCQRRGIKKNHVFFGGEDANSYVENFVSTLRSKGWVVAAVNAHDAKKQRANLQASTDRLDLMGIATMLLDCRANCCPAQSGIYRNLRTLVRHRRKLVVMSTEVKNRIHGVVDRLFPGFLNEGKTGIVPFTSSSLYLMEDRFSPRQVGARHLRTTVAQAKKKGLQKPEDCIRKLKIHAASVLEPVPEWVGSLQTALHHEVQLHRNLLECITQADRQVAQLLARTPAAMLTTIHGIGITLAAGTGSEIGPPARQSSVRRLSSYAGIVSRVKQTGGPEGEPRHGSVSRRCNHLLKNAVVQSANHLGQHGPPELKEDHRRRGAGGQHADFGMARRFLRIGMNLMRTGQCYLPPELREHPEPEALKTYYLKAWERLHGIWKKAGALEEAFDPRNPLGQWRDCIQTLYEIELPL

SEQ ID NO: 63675 - protein, 397 aa, unidentified
MYIVGIDIAKRKHEAAVIAGEGAVIIKPFSFTNNCSGYNRLLAMLAKAKLPLDEVSFAMEATGHYWLALFTRLQKEGFRVQVINPVQTNSIRSFYIRQAKTDPRDALLIAEVIRFGHFSESTLHPENIYELRELCRGRHAIVSMQADVKRKVVALLDQVFPEYETAFTNLFGDTSMAILQTCPTPKELSEMPLEELCHLIEVSSHKRFRMAKARELQALARNSFGFAMAGDVFSMMIRLYAKHLDFLKQQVREMDRKIAEIMETLDTPITTITGIGPTLGAYILSEIGDISRFSSAAKLAAYAGIDPTMRQSGEYNGVRNSMSKRGSPYLRHAIWLAASSAVLHDPALKLYFQKKRDEGKPYMASVGHTCRKMVSIIYAVMRDNKAYTPYIPNEISA

SEQ ID NO: 63676 - protein, 369 aa, unidentified
MSDVITYVGIDAHKKDLFIAMLVGQQAKPVAWTVANEPNAVRRLAKKLEREAPGPVQAFYEAGPCGYALQRQLTTPRVQCDVVAPGLIPQKPGERVKTNRRDARKLVELGRAGLLTTVRPPTPAEEAVRDLCRARDDAREDLQRCRHRLGKLLLRRGLQYRVGRHWTKAHRRWIDSLKWPHDAERVVVDDYLLAIDQHETRLKELDQQLAAVAETEPYREPVAWLRCFRGIDTLSAMLILAELHDVRRFPSPRALMAYVGLVPGENSSGEKHCRGRITRAGNALVRRLLVEAAWHYQHRPGVGVALARRRKGQPGRIIAIADKAQQRLCRRFLYLAVMNKPRPTIVVAIARELVGFLWAALQPALVVAN

SEQ ID NO: 63677 - protein, 345 aa, unidentified
MIIGCDFHPSWQQIAWLNTETGETGEQKLVHAAGDAKLFYQQLAAPVLIGMEATGNSQWFIELVQDLGHEIWIGDAAQIRASYVRKQKTDKRDAAHILKLVVESRFPRLWTPDREQRDLRQLVLHRHKLVEIRSRVKNELQHLSLNKGMQRKAKLWSQAGQKLLRELPLKPWAACRREDLLGLLAMLHQQIGKLDEAVQQAAAEHPQAQLLMTQPGVGPNTALAFVLTIGDVGRFPRGKQVASYLGLIPREESSGGRQKLGAITKQGNRLVRSLLVEAAQIAVRFDPGMKKQYLHRCHQKPKGVAKVAAARKLAVRLYWMLRTEKAYPEIVRIESSPRVPLVGAS

SEQ ID NO: 63678 - protein, 392 aa, unidentified
MIFIGVDIAMDKHDVIIINDLGEVIYDHFIIQNNLRGFKKLHTVIKSCTKSINDIRIGMEATGIYHNNLRDYLISRGYTVYCTNPMLVSNSRKSASPRMTKTDKIDAIAVCRHLMHNLDKLHPYTPPLYHLVELKQFTRDYSNNKEILAKEKSELKRLLQIIFPEFLKHFNPFSKWALELLYNYPLPSYYKGLHIDSLANRIGTHTNHFDQAKIIKRIAKESIGNSNGLNSHLIKFCVSNILHFQSQNKELKRVITNTIKLYPKILSIPGIGPITGATILGETGDINRFPNKHKYTSLFGIEPIVYESGKFKRKRTHLSKRGSKYLRTAIFCAATMVCVSPKVKDNKFRRKYHKMMSRDNKHYYTVIFAIAKNMVHTIYKILKTDSFYNDQL

SEQ ID NO: 63679 - protein, 338 aa, unidentified
MGQYVGIDLHRRSTTIHRMTEDGETLGVQKILSQPFELAQAIADAGPEPEVVLESTYGWYWAADVLQECGAHVHLAHALGNNWGNRRVKNDKHDAADLALLLRIGRLSEGWIAPPEIRELRELVRYRHSLSSHRTSAKAQIHGVMAKNGILPVVAELWGPIGQAQLDGLELPEAYALRLRSLRELLAHIEREITKVDAQLHHRLKPDPGYQALVRLPGVGKVLGAVFVAEIGNISRFESAKKLCSWAGLTPKHRESDEVVHHGSITKQGSRLVRWAAIEAVGNYRAKGNEKLRADYRRIAERRGKYKARVAVARKLVTLVFYALRDGQVRCLDTASAT

SEQ ID NO: 63680 - protein, 438 aa, unidentified
MTTIIGIDPHKATHTAVAIGCDEAELATVTVRATSQQTDKLLSWAEPFKERTWAIESAGGLGYLLAQQLVDAGEHVLDVPATLASRVRVLGTGRSDKNDPNDARSVAIAALRSPGLRSVYAADHAEVLRLLAKRNRGIGALRTKLVCRLHALIAGLEAGGIAKELNASDADGLLRSFEGSSPAEHTRHQLALELLEDIRHLDHQLSESHKRIKLAVQASGTSVTEVFGIGAVIACSLIGYTGDVSRFTSRDQFAAYNGTAPIEVSSGGRVAHRLSRRGNRQLNHAIHMAAISQIRQTHSEGRAYFERKVAEGKTKREAIRSLKRQISNTVYRHLVLDAQKWGPGGQAGTTRSLRDRLCTLTAGSSAKSLPDPPNLSQSRPSTAGCAPGRWSSTAGWRRSARAAPTSRPGPSSCRSSSANATMPGSTTRRTAPSSSTAS

SEQ ID NO: 63681 - protein, 323 aa, unidentified
MSQPFLGIDVGKSTLHIALLMPNGKSKPKVIPNTPEGHQELLTWLNHHQVSPVHACLEATGVYGDAVAEVLYQANHTVSIVNPARVLGFAKSELRRTKNDKVDAALIARFCAALRPAPWTPAAPEVKHLQALVRRLEALNVMRQQEYNRLAVSTEQVATLIKEHINYLEQDIQKTKQLIRDHFDQHPGLKQQEDLLRSIPGIGEVTASVILAEVQSWDLFVDAKQLAAYMGLTPQEKTSGTSVRGRSQISRTGNSRLRKALYMPAMVSQRFNPLIKTFCERLLSKGKNKMQVIVAAMRKLAHLIFGVLKSGKPFDPNYLSITP

SEQ ID NO: 63682 - protein, 351 aa, unidentified
MNAMNYVGVDYHKRYSVATVMDKDGSVLGRRRLNNRQDEFARFLEPFGKTKAAVEATRSWAVAVEMLEQTADEVVLANPYRVKAIAQHRFKTDKIDSQILAELLRIDWLPTAYLRNRANREQQLILRIRCFFVRLCTRIKNRIHDLIDRQSEEIRETAAGFSDLFGKKGLAWLRSLDLGNPCGTLLGQLLSSYEGLHKQVLESDKLVQELFDADPDCRRLATIPGIGKFFAVLIKTEVGDVERFAGAARLCSYAGVVPRTASSGGKVWHGPIIKQSNRWLRWALIEAAIPGKTADAELRRLYDYHCRTKGPKAAKVVVGRRLGCIVYRVLREGKPYYSKQECARVQNGIGS

SEQ ID NO: 63683 - protein, 344 aa, unidentified
MKKEEFECIGVDVSKNTLDVALFRGKVDWNEGHIKVENNCVGYKEMKKWLCLKGAEKRQLRVCMESTGLYTHNFRTWLEKEGITYYVVDSKLMHHFAPPQSIKGIRQTKNDKADAFRIAIYCSLFHDAMVPSKLPSAAYFKLKRLLAERRQYLKQSVLYKQQLHDISIYDTVSSRLRKEEELKNLKNHIKQTDAEILTVLETDEAIKRNYNLLISIVGVGLVVAVTTIVLTENFTTFTNPRKYASYIAIAPFPHESGTSVRGATRVSKQGFRQAKADLSISVLSAMSHDPELKEYWLRKKAEGKHAGTILNAIKFKIVLRMFAVVKRGTPYVNTKGYKRMKHGQ

SEQ ID NO: 63684 - protein, 342 aa, unidentified
MDHFAGLDVSVKDTSVCIVDDTGKIIREVKVASEPEALLAMLKSPAYRFKRIGLEAGPLSQWLFSALAEAGLPAICVETRHMQAVLKAQINKTDRNDARGIAQMMRVGLFRPVHVKTLRSQKLRMLLTHRKLLQSKAIAIENDLRATLRNFGLKVGMVGTVKFEARIKELVENQPDLVALVEPLLIVRRVLREQIVILHRRLLAIVRDDDVCRRLMTVPGVGPVVSLTYRATVDVPARFHKSKAVGAVFGLTCSKYQSGEVDRNGRISRCGDEMMRVMLYEAAQSMLRSKKWSWLKAWAIQIARRRGMKKAIVALARRLAVILHRIWVDGTEFQWTREAAAA

SEQ ID NO: 63685 - protein, 427 aa, unidentified
MPYRIAGIDVHKRMLAVVIADVAVEGEYEFERRQVGTSPSELRKLAEWLVEQEVEEVVMESTAQYWRPVWSALEEVWMPPCRNREDAGPVSGALHLAQAQSNRGAAGRKRDFPDAERLVKRYAAGELTLSFVPDAEQRLWRTVMRRKYQLTCNRVQLQNRLECLLEEARVKLSSLVSDLLGQSARRMMHALAEGETNPASLAALGDRRLRATSEQLCDALGACRNLHPVYRRLLRMTLEELRLLEEQITELDQQMASLLSAHQDAVMRLAEVPGLGVDSAQQIIAEVGASAATFPSAKHLSSWVGICPGNSESAGVNHSHRSPKGNCQMRRVLNQAANAAVKTKGSIFELAFQRLVMRLGYAQAIGAISHRLCRLIWKILHQGIRYEERGPTVARNRKQKRAAKMIRDLRSLGYRVEFVASKSECPA

SEQ ID NO: 63686 - protein, 344 aa, unidentified
MNPTTFGLDIAKKVMQVHWVDSDSGEIGRRTLKRSQLVKFFAGQASARVVLEACGGGHYWGRTLSGLGHEVRLIHARHVRPFVRGNKNDAADAQAIWSAAQQPQMRWVPLKSEEQQAVLSLHRVRAQWVKVRTQTVNGLRGLLYEFGVVLPGGRQAGVKAIAASRAEIDAKVPVLMHGLIDGQLAMLRQIEAQVEAIEAQLKGLEEQLDTARRVRSIPGVGLLSATALAGVLGADAKGYYSAREFAACLGLVPRHEGTGGKVRVGKLSKRGDPYLRTLLMHGARSVIFHAKVKSVWLQRLLARRPLNVVVAALANKMARTAWALVAHGREYQPGGFARASLTNP

SEQ ID NO: 63687 - protein, 256 aa, unidentified
MELTSASLPAAGRDVFDLHGSTSGHDQFKNNEKGFAAFLKILPEDSIVVMEATGYYHYRLAQFLYKNNVLVSVVNPLSVKRFIQMKLAKVKTDKSDAKAICEYALANEVPLYSALTDVQAECLQLFRLMDSYLKKRTATKNKLHGEETLGIPSKFVYRSLKRDRKHLDKEIAGIQERLLSLVKMEQQQQLTLLTTVPGIGTKTALFLIVITDGFSKFETAAQLCSYVGITPTIRESGSSVRGRSRISKDMHPTSEF

SEQ ID NO: 63688 - protein, 458 aa, unidentified
MGKKVSNRKKKHLLNQTIHPDAAGIDIGAEELVVAVPSDRDQIPVRTFATFTGDLNTLCTWLDSLKITTVAMESTGTYWIPVYETLQDAGIEVCLVNARHVKGVPGKKTDVCDAQWLQQLHTAGLLKASFRPAAEVVAVRHIVRHRSQLIKDASRHLLHMQKALTEMNLKLHHVFSDLDGASAMSIIEAILDGQRDPEVLWQLRDKRCRTSKTSFLKAMEGNWQPSQLFILKQCHTTWTQTRNAISECDGMIELLMSAIPAQTDSKLPDAPKSKRRHNKNDLSFDIFQEAYRVYGVDLSTIDGISAGTLSILIGELGNAEDILTNFKTGKAFASWLGLCPDNRISGGKILKSKTRHIANRVSAALRMAAQGLGHAKSEMGEYCRRMKGRLGKAEGITAVAHKLARLIYALIQSKEPYNPTKAFRITEKTWARRLKNLEKLAKSMQMELIPAIPINKGI

SEQ ID NO: 63689 - protein, 391 aa, unidentified
MVCVGIDVAKDKHDCCILDSDGTIRADCITIPNNMDGFKQLLQTIRDCTKKSDKIKVGLEATGHYSYNILGFLLDNDLAVYVMNPLHTNLYRKSLSLRKTKTDRVDARTIATMLLSDVDLKSYTDTAYHNEELKSLTRYRFDKVRERAKLKQSVSRLVTILFPELEKLVPSLHIASVYALLSEYPGAKQISEIHLTKLTNLLATASKGRYGKDKAIQIRDAARTSIGSVMPAKFLELKHPIKLIRELTSEIDEIEVSIQKIMDELNPPILSIPGVGIQSAAMILAEIGDFSNFESPDKILAYAGCSPSTYQSGKLTNCYAHMEKRGSRYLRYALYNATKYVCHWNPVFAEYLAKKRAEGKHYNVALSHATKKLVRLIYALQKSGKAYLVAA

SEQ ID NO: 63690 - protein, 342 aa, unidentified
MQVATIGLDIAKNVFQVHGIDATEKVVVRRRLRRCQMLEFFKALPPSLVGMEACATAHYWARELTKLGHRVRLMPAKDVKAYVKRNKNDAADAEAICEAVRRPTMRFVAAKSAEQQGQLMQHRTRDLLMRQRTQVINALRAHLAELGIVAAQGDKGVKELLTIVTDKKDERLPIDARASVIVLAAQLEAVQTLIGSIERRIKTQHRANEASKRLETIPGIGVIGATAIAATVADPTIFRSGRDFAAWIGLVPRQDSTGGKQKLGPISKQGDRYLRRILVVGAHSVLRRAMQNPEKYLWLTQLLARRPFKVVAVALANKMARMAWALLAHGGTYRAPEPAAAA

SEQ ID NO: 63691 - protein, 428 aa, unidentified
MKHHTQSEKIAQVDEQTLVVGIDIGSAKHYARCFNHRGMELSRKAFSFENNEEGFEHFRDWAVKNMTTHGKQKIMAGLEPTGHYWFPLGWYLEEQGIRFGLVAPQHVKHSKELDDNLPRKDDNKDPLVIAKLVIDGRYALPYMPEGNYAELRVAFTRRCELVAEMTRVKNRIQRWFDIYFPEYQGVYSKVDAASGLKVLRKAPLPQDIVALGAEGINQIWRDAKCRAAGMKRAKTLVEAAVHSVGGKQAGQAARMNLWQLLDQLELLTKQLDEMNEQILSILAEIPEAEKLLKIPGIGMVVAAGFLAEVGDVRRFTDPKQIQKLAGLAVTENSSGKHKGQSGISRRGRKRLRWIMYQAAMCAVKSNAEMKELHHYYTERKKNPLKPMQSLMAVTFKLIRVFFGVIKHDSDYDPIKLRQDIRRIEAKAA

SEQ ID NO: 63692 - protein, 388 aa, unidentified
MLPSIHHASTKQTASDRLDPTLYASLELSRATWLVTCLLPERDRISKYSTPGGDGGALLGLLERMRVRAQQLTGRPVKIVVIQEAGLDGFWVHRLLEANGIESHVVDPASIAVPRRRRRAKTDAIDGETLLRTLLAWTRGEPRVCAMVVPPTPEEEDRRRVCRERAILLQERIRHTNRIKGLLAGQGITDFNPLHRDRRQLLDAARTGDGRPLPHQLKAEILREIELIELLLRQIADVEAAREVLAGPKAAKTPSPVVLLEQLKGIGPEIASVLYLEGLFRRFGNRRQLAAYAGLAPTPWRSGTVDQEQGISKAGNPRLRSTMIELAWLWQRHQPTSTLSRWFHTRVGNERGRIRRISIVALARKLLIAVWRYVTQGEVPEGAVLKAA

SEQ ID NO: 63693 - protein, 391 aa, unidentified
MTILVGIDVAKDKHDCFFMNSEGEVLAKSFTILNNKEGFDFLYKKIQSVSSSDKIKVGLEATGHYSYNIIGFLLNKGLATFILNPLHTNLYRKSLSLRKTKTDKIDSKTIAMMLLSDVSLKSYSDISYHNEDLKSLTRYRFSKVEERAKLKTSLSRLAQILFPELEKLVPTLHMTSIYQLLEEFPSASAIASVHLTRLTNLLSKASKGHYDRETAIKIRDAAKNSIGSNMPAKSLELKHTIKLIRALTIDIGEIEAEISKMMDMIASPITTIPGIGRNIGAMIISEIGDFSRFSSPDKILAYAGFSPSIYQSGKLDNCYAHMEKRGSRYLRYALFHAAKLVCHWDKTFADYLAKKRAEGKHYYVAISHAVKKLVRVIFHLEKTKQAFLKAS

SEQ ID NO: 63694 - protein, 376 aa, unidentified
MPETHDICCVALELSQSKWLCAFAPPEAGKVSLHSIKAGDHAHLVEWLDRQRARAELALGRPLQLTVCYEVGYDGFWLARLLLKAGIRTVVFDPASFLKPRRGRWAKTDRLDAEGMTRILRSWLGGDSSVAREVRVPTVEEEDAKRLCRERKTLVNERTRLVGRIKGLCALHGISVPGKRISRRWIDHLDEHRTGDGRPMPPFLRREIGRLLRRYEMIEELLDEVERDSQTALAEPTSPFPAKDKAQRLATLGGIGPTSALLLVAEIYHRSFDTRRHLASFVGLAPTPYASGDISRDRGIGKAGTKLARQTLVELAWSWLRYRPGSAMSEWWRQRFTSAGMRGRKVGIVALARKLAIALWQFLENGVVPEGATIKG

SEQ ID NO: 63695 - protein, 419 aa, unidentified
MKIVFPVCCGVDVHKNVIVATIAITDKSNITHYIVESFSTINADLYRFRTWLLEHRCFNVCMESTGKYWIPVFNILEEANIKVLLTHPKYVRAIKGKKTDKKDSKWISDLFKFDMVRSSFIPPKDIRALRELGRYRYKLVCMLSSEKNRYQNCMTVSNIGLASVLSDPFGKSATDIMRYVLSSDVFNEEHCKTLIHKTAKKKTELILASIRGSRIESDQRFKMNEASAHMDYLEQAILRTEVELYTRIQPHYHLVEHLSNQLPGISQLSAALIISEIGVDMSVFESDKHLASWAGLAPVNNESAGKKKSVRISKAGQFLKPLLVQCALAAVKSTKQPYFATKYQKLKKRRGHKKAIIAIARMMLTCIYHMIQTGETFNPSDYESFNNPAPRKVALTDENAIAFLAAQGYDVSALTKISG

SEQ ID NO: 63696 - protein, 354 aa, unidentified
MSNQSNSTVATMGIDIGKNSFHVVGLDQRGAIVLRQKWSRGQVEARLANMPPCLIGMEACVGAHHLSRKLQSLGHDARLMPARYVRAYLKGQKNDFRDGEAIAEAIQRPTMKFVATKTAEQLDLQALHRVRARLVSQRTGIVNQIRAFLLDRGVAVRKGPRFLRTELPRILSTRCDVLSPRMVHVIEELAGDWHRLDERIKSMSSEIEALADQDPSCERLMTVPGIGPIISSATVAAIGNGAAFSKGRDFGAWLGLVPRQISTGDRTILGKISKQGNRYLRVLFVQAARVVLVRPNSWERYGLKSWIEAAKKRLHHNVLAIALANKLARIAWAVLNKERKFECVRTSAMASRSA

SEQ ID NO: 63697 - protein, 437 aa, unidentified
MGNYAGVDWASQKHDVVVQDEAGEELLAASFAHDEKGLRSLCRALARMKVTLVAIERPDGLLVERLLDAGLRLLPLHPNQVAATRARFRAAGGKSDRFDAFVLCELARTDHHRFRVLEPDSDQTKALRTLTRAREDLVQTRVALTNQLRAELERFWPGPIGLFSDLDNLTSLAFLRRYPSPADAHGLGEQRLQTFLTRHRYSGHKPASELLAKLRRAPEGRAGELEGQAHRAIVLSLVAALEPIVAQIKQLEQQIATAIREHPDGEIFLSLFRSPRSVITAATMLAEIGDCRARYPTRDALAGDAGQGAVALESGKRKVACFRWACNKRLRDAFDTLADSSRHHNPWAADHYARAIGRGHDHPRATRTLGRAWCRVVWSCWQARTPYDPARHRALQQHAQVTVPTPSGPVPDTAATQRMLGVAVTQRADRKVRAQRA

SEQ ID NO: 63698 - protein, 464 aa, unidentified
MPLRLGIDIACRAAHQVSLADEQGRFLWTGRRFRTTPQDLDRLWAMLPDDTDPADLLVVMEPTRNAWVPLAAWFRRRGAGVVLVPPERSADLRRYYAKHTKSDRLDSQLLARLPILHPDGLHAEQGLGPGDALKRAAKLHSTLTHRRSQCLARLDALLEILGPAWHAAIGADLANRTPLKFLAAGYADPHVVKRLGRTRLARFCYRHSRGAWGEPHADALLAAAQETLQLWSGGELDYPDLAEDIAIEARLALQLTEEIKDLDERTALLLREADPTGILTSAPGVAAITAAAILGRLGDPNRFTSLAGARAFTGLVPILDASGLNGRHGGPTKRGDAVLREALFMAAGQARRIDPTLAAKYHRLMIEAGKHHNSALCHIATTLLTRIIACWRAGQPYVLRDVDGTAVTIDQARAIIAERYAIPKDLRARRRTTDPAGTDRRSKESPSAPSTGPSRPNATTPTAA

SEQ ID NO: 63699 - protein, 393 aa, unidentified
MYLVGIDIGKLKHSFCLLEKETGEILVEPVFFKNNRDGFNALLSSFKHLPQKDILIGMEDTGHYNLALLKFLLDRNYQVALINPVATNLTRKMQGGISKNDKLDTLTICDVLSSSQRVKSYRISKYSSFDLYEQKLLTREHHNLKEEENQLSNRLQKCIDVVFPEFNSLFKSKYGIVYMNILKEFGSADAIAHADIRTLRKCFDTGRGKHISLTAEELKEAARNSIGFPSSSEATQIKHLVARIELIKEQIAEIDKKIEEFSLQNNSPILSIPGISHFSGTSILAELGDIHNYSKPSQIIKFAGVAPLTYESSQFTAQHTAITKKGCKYLRKTLYQIITAVIQYNPVFRKFYLLKIAQGKGHRCAQGHCVRKLMRVIYHLLSTGTQFDPALLR

SEQ ID NO: 63700 - protein, 433 aa, unidentified
MEEVQDEALFADRVAGLDIAKAGVEVTVRVPGAAAAGRRRQETRSYGTTRAELESLADWLASWGVIRAGMEATGDYWKPVFFVLEARGFDCQLYHAGQVKALPGRPKTDRADSVWLAKITERGAVRPSFVPPEPVRRLRTATRYRRHLTQARTAEKQRLEKLLEDAHLKLSSVISDIHGVSGRAMLEAIAAGERDPAALAQLARGRMRSKIRQLEEALDCAFFTADHAAILAMMLAMIDCYTAQISQLTTRIEELAAPWLHQLEQLDAVDGIGRAGAADIIAETGPDMSMFPTGSHLVSWARWSPQVRVSGGKRKGSNATGRGNPYLAAALGEAVMAAARTQSFLGARYRRLVRRMPHKKALVATGNSMLAIIYALLSDPAATYHDLGPTYHDQRAGQRRQARNHVLNLERLGYKVTLQAIDPATGEIMPAAN

SEQ ID NO: 63701 - protein, 387 aa, unidentified
MEVRMVNTPSADSNNEPVACYVAIELSKSGWLVGFLTPLSDKTSRYQVKAGDAQALLDLIERVHARVARQLNRPVEVMSCYEAGYDGFWLHRVLEAHGIHNHVLDPASLQVNRRARRAKTDRIDVDRMLRALIRYLRGEPEACSVAQVPRVEEEDAKRLHRERKRLVVERVQHVNRIKGLCAAQGIYNYAPLRPDRWSQLDKLRTGDGRSLPARLKSEIVRELKRLELVLEMIETVEAERDAIIKDPRSRHLNADKIKMLARLRAIGPEFATSLTGEVFYRKFANRRKLGRYVGLDGSPFRSGSVERDQGISKAGNPVARSMMVELAWTWLRYQPDSALSIWFRERVGNLKGRPRRIAIVAMARKLLVALWRYLETGVIPTGAVLKA

SEQ ID NO: 63702 - protein, 429 aa, unidentified
MKKSRAYRAAQVKNVRLDRVMEGREGQRVAVGFDVSKENLLVMLRWDESDFERPWRVNNPLEIGDLMELLLELERGREMVVALEPTGTYGDPLRQALSDSGLTVHRVSPKASHDYAEIFDGVPSQHDGKDAAIVAELAALGKSSPWPFEVSDWDQELAYHVDWLETQRRLLTIWYGRLEGLLARHWPEATRIAPLTSGVLLRCLATYGGPAGLAADAAALDRLRSWGRGHFSQEKAAQLLAAAQHSVGVRQSPIDVRRMQQYAEEALACRRGMSMSKKQLQLLTADHEIIQSQAAAVGVITACVLWVYLGDPRCYDSGPAYRKAMGLNLKERSSGKWQGHLKITKRGQSQVRRWLYFAALRLIQQSGVKEWYEAKKAKHADDPIEVMRGLVGVMRKLALALYRVGTCGEAFDARLLFPGHASSLNKKVA

SEQ ID NO: 63703 - protein, 388 aa, unidentified
MQVAADRRQTPTAIRTDLGAIFVSLELSRSTWLITSLSPAGGEKMSKHSMRSGDVPALLGRFAQLREKAQARTGQRFPIIVIQEAGLDGFWIDRVLQKEEIESHIVDPASIATSRRRRRAKTDKIDGESLVRALLAYKRGEPRVCAMVKVPKPEEEDRRRLCRERKTLTAERVSHINRVKGLLFSQEITGYEPRRRDRRERLEELQTGDGRALPEHLKAQVRRELDRLELLLEQIKAVEAERDVLLAAEHAATPALAAMLLEIKGIGPEFAAILWSEGLFRHFDNRRQVAAYAGLAPTPWQSGSVDREQGVSKSGNPRLRTTLIQLAWLWVRHQPHSALTQWFEERVRRNGGRLRKTAIVALARKLLVALWKYVTAGVVIEGAAMKTT

SEQ ID NO: 63704 - protein, 348 aa, unidentified
MKPATHILGIDIAKRKFDVCLRLLANSQTRHAATFANNSKGFQALLQWLGRQAPGVSEQLHACLESTSRYGDALAQFLHRHGLLVSMVNPRRTRCYANSQLTRTVNDTIDARLIADFCASERDTLRLWEPLNSDHAQLRELTRARQALVQQHDCFVNMLETATGLARKTFQKQVRALERQIQQLDKTLKHFVQQQLCPKLAHQIELADSVPAVGLITAATVLAELPPMEKLTQANQAVALFGLDPLKKTSGSSVDTPARLSRMGSRRGRRALYMPALCALRFNPFVRQLGQRLQRKGRSGKYVVVAAMRKLLRLIFGVVKQGKPFDPNWCNPTAPQQKTQTLLAVQQL

SEQ ID NO: 63705 - protein, 369 aa, unidentified
MTFFIGVDLHKTQFTVHVRTEEESESPDQIRQYPTTPDGYAEFLARISRYKATGSDVKIGVESTGNTRFFKNQVEKAGAEVTVINTLKFKIINESTKKTDKHDASTISEFLSKDMLPESYLCGKETENIRRLLKSRERLVRSTVGQKNEIHALLVSLGLSDELRSLQSKKGRQKILDTLESNNDYVLEAQSVKLMFEIIERIEESVKIIEKQLVELTKEDEMVNRLLTIRGCGKITAWTIRAYTEDIARFATAKKYAAFCGLVPWVQDSNETIHHGKITKRGPQELRTCFVQLVLGIRRCKDTSDWRMMQRYEYMKTHKGSGKSIVAAARKMAEIVWAMLSDKKDFDVQKMIGKYKPMSLAEEALTAMN

SEQ ID NO: 63706 - protein, 359 aa, unidentified
MQTQSNKIDFTGQNIYIGFDVHLKSWTVTVMTEKLTHKTFSQPPKPEVLYNYLAKNFPGATYYSAYEAGFCGYWIHNKLVELGVNSIVVNAADIPTTGKEKVMKTDPRDSIKIARSLRNGDLKPIHVPSIKTLEERGLIRMRSTLVKDLTRYKNRIKSFLYFHGIEYPEVFNRPKTHWSNRFNQWLEAIEFNDLISKATLDMLLGQSNSLRGSVLQITRQVRELAKTDRYKMQEKLLRSIPGIGILTAMIILTEIETINRFSNIDQLCGYIGLIPSTCSSGDKEVIGDLTPRGHSILRTAIIESSWVAARLDPALNKSYHDYCKRMEPNKAIIRIARKVSSRIRFVLKNNQPYVFSVVK

SEQ ID NO: 63707 - protein, 353 aa, unidentified
MKCDKYIGCDLHQATTVVAVLDGEGKVAMETIVATEAAAMIRFLKSLSGPLHITFEETTQARWMYDVVRGYVSEAIVCDPRRNKLLGEGSKADKPDARKLAELLRAGLLRPVYHGHEATRQLKELVRGYETLSADTQRMMVRIKSIYRAHGIRTNGSAVYQRKQREQWLQLLSEPGTRQRVSWLYEELDHLRPLRKQAKMAMVAEGRKHQAFRLLRTIPQMGPIRCAMLVATVDTPYRFRTKRQLWAYSGLAIVTYMSSEYEIKAGRVVRNRKPVATRGLNRNCNRRLKDLFIGAAVAGSRSEPYRSYVERLQQKGIRAEMARLTLARKIAAVALRVWKKGEGFDPKKLNSTT

SEQ ID NO: 63708 - protein, 349 aa, unidentified
MEQNEVILGVDTHLDMHVGAVINDIGRLLGTRSVSTDMAGYLDLLTWASSFGPLRRAGVEGTGTYGAGLARVLRDHEIEVLEVNRPDRAMRRSKGKSDPTDAENAARAVLSGRATAIPKEQSGAAEAMRAVSVARRSAVKAKTQAINQLRALLVSAPQEIRDRLLKVKTAECIKGCIRLRSLGKTPMLQTLTTTLRLLAKRWLTLAEELKSLDTMLDELTSQHAKRLRERFGVGPQTAAVLVAVAGDNPERLKSEAALAALCGTSPLQASSGKTVRHRLNRGGDRSANNALWTIAMVRMRSDPRTRAYVDRRTKEGMSNKEIHRCLKRYIVRELYPLILADLADSTRVI

SEQ ID NO: 63709 - protein, 366 aa, unidentified
MKQVAFLGVDYHTKTITVAVYLDKEKKFYDALRLNNDDKIIKKYMKKLSTQFDLKICYEASSSGYVFQRKMQALGYHCDVIAPSLTPRKPGDRRKNDMRDAKKLAQNYANDLLTIVHPPTQEEESVRSLIRCRIAMKESAKKAKQQINSFLLSQGCRWSKSKWTKQHHLWLSKLEMPNLYLQQVLDEYLGHLSYLESRLQYLEQQIKQIANSELYAPSVKKLRALRGIETLTAMVLIAEITDFRRFPNPRSLMAFLGLIPGEDSSDDTRKDVSITKAGNIRCRTILTESAQHYVKKPRISVKMKQLFSQVDAHSAVTAKKCMYRLHKRYWTLVMKGKARQKAIVAIAREFVGFIWAIMQPVSCAAS

SEQ ID NO: 63710 - protein, 342 aa, unidentified
MQITTIGLDLAKHIFQVHAVDEMGKVAIRKRLRRSEVLPFFAGLRPCLIGMEACATSHHWARELIKLGYTVKLMPPAYVKAYVKRGKTDAADAEAICEAVTRPSMRFVPVKSAEQQSVLMLHRMRALLIRQRTMLVNALRGHLAEFGIIVAQGINRVRELIKLMTDDSADAVLPPLARRALAPLVDQLLDLQPRIRALEAELLAWHRQSQESRRLETIPGVGFITATALAATVPDPSHFRSGREFAAWLGLTPRPNSSGGKERLGRISKMGDGYLRTLLVVGATAVIRYARTKTAADTAWINSLLARKPARLASVALANKTARIAWAVLAKGEVYRAPAPAA

SEQ ID NO: 63711 - protein, 337 aa, unidentified
MKSFKFFVGVDVSKSTLDFSIYQFENLVYHKSIPNEILDIKEILKEFKQIPTYKNSNTVFGMENTGVYCNLLISVLQKAKSNFTVENATHIRNSLGNIRGKTDKIDSQRIATFLFKNRDRLNFWKPKRPIIEELKNLTTLRTRLSSIQVALKTPLKENAIYISKTSTKQHQSICQNTINSISSDLENLNNLIKSVWSSDEKIKNLMKIITSVPSIGEVTALHIILNSNEFEDIKTGKKFACYAGVAPFHYKSGTSVSKKTRVSNIANKKMKTLLHMCAVTAMRSSVEMKDYFIKKTQVEGKNKMLVLNAIRSKLILRVFSCVKANRLYECENFNTDG

SEQ ID NO: 63712 - protein, 317 aa, unidentified
MTKTSTTTAGIDTAKNKLDIAVHGLADRWQVANSVSGWRRLAVDLAKAGVVRIGIEATGGYERGVVGHLRGAGFTVLVLQPIQVRAYARMHLQRAKNDALDAALIAACAASIDPPRIEPDARLADLAEHLTFVEQIEEDIARLKTRLEHVGDKRLRRIVVADIARLKARRAAEMLRIATELRTHDDLAQRLDLVFSVPGIGKRTALALIIRMPELGRVNREEAAALAGLAPFDDDSGKHKGQRHIAGGRSRLRRSLFAAALPAAFRWNKALIELYARLMAHGKAHNAALIACARKLLIYANTVVQRGTPWTERSAMI

SEQ ID NO: 63713 - protein, 327 aa, unidentified
MAHIGIDVSKNKLDCMWVRDLEAGKVKPKVFPNRQDQYPELLRWLQRNTGEAPETLQVYLEATGIYHEPLAYWLHEQGVRVHVLNPAQVRFHAQGMGVRNKTDRKDSMMLARYGIERAPAPWQPEPPEVRELKRLLGRLEALEQDIRREENRLEKAQFSEDALAQESIGNVLEALREEHRRLQQQIDDHFDAHDHLKRDRALLESIPGIGRVLSASMTATLRSRAFTSARQAAAFHGLVPVQQESGISVQRRPQLAKAGSSRLRRKLYMAAVTAAHHNADVRAQYQRLLRRGKAKMAAIGAAMRKLLHIAFGVLKSQQPYQPRCSTG

SEQ ID NO: 63714 - protein, 343 aa, unidentified
MNEVITIGVDLAKNVFQVHGVDAEGGVIFRRQLRRGQVLPFFKKQPACLVGMEACATSHHWGREIEALGHSVRLMPPSYVKPYVKRNKNDMADAEAICEAVTRPTMRFVEIKTRDQQSVLMLHRTRHLFVRQRTTLINALRAHLAEFGIVAGVGRNGLERLLNVIEDGGDDRVPSAARDCLLALRDQLEMVKHQILDGGRRILAWHRSSEVSQRLDDIPGIGPLIATALVASVPDPHAFKSGRDLAAWIGLTPRQNSTGGKERLGHISKAGNRYLRMQLVVGALSVIRRAQQVGYTRRPWLAKLLQRRSTKVAAIALANKNARTAWAMMAHGTYYQEPVSQAA

SEQ ID NO: 63715 - protein, 355 aa, unidentified
MFIVGFDLGKRNSQICVQNADGTVAAELRIKTTRDDIVAALKKYPGRVLIESSTSADWVASALEGAGHEVVVADPRFSLMYAQRNKKIKTDRRDARALADALRLGAFRPAHRKSPEARALYARLLVRQTLIKSRTRMINQVRSLCERAGVQLRRCGAEYFHEAHDGVAMEQWLFDVLAPIMDQIEQLTARINASDKELTAIAKADPVARNLLTARGVGPLTALAFRAVVDDPRRFESAQQLSAYLGLVPSERSSGDKRSRPGAITKSGDPLLRYCLYEGSHAITKRNAPESNLKRWHAATAARCGKRKANVALARRMSRILWAMWRDNTPFTDALTAPQTGPTTTSTNATSTKAA

SEQ ID NO: 63716 - protein, 414 aa, unidentified
MQSWSQITYYAGFDWATDHHDVVIVNRSGQIVADFQIEHTAEGWQRWGEQVAALGAGLAACVETSQGVVVEQLLESAVVVYPVSTTSAKSYCQRKVPSGNKTDHGDAWSLADALRVDGHGWKALAKEDPLVAELRLLCRDEVALIQERTALINQLQSALREYYPAALEAFEDWTLPSAWAFLEAFPTPQALASAGKRKWEKFLHTERLARPQTYEKRMEIFAHATGFVSGQALTRAKSRLALARARMLRVLQSQIDSYHAEIEKLFAQHPDHHLFGSLPGAGPKIAPRLLGEIGSDRSRFEDPTALQCLAGTAPVSYQSGKIHKVYLRRHCNKLLRHAVHLWANLSRQSSPWAAVYYEQLRTRGKNHACALRSLGQRWLKILWKMWQTGTRYDAELHARNQLKHGSWVLKIQHA

SEQ ID NO: 63717 - protein, 462 aa, unidentified
MPGRDDSASSGKSRGQLAGLPIIRRNVAGIDLGSERHWVCAPTRDGSGREVASFGATTAELIRMAEWLKARQVESVAMESTGVYWIAPHEVLEAQGLQVLLVDTRQLAQVPGRDKKTDPSDCEWIQRLHSCGLLRGSFRPEEAVCMLRTLVRDKANLMADSGDWLRRMQKSLDQMNVRVHRAVSDIDGVTGMAILRAIAAGERDAQKLAQLRDRRCNKTEQEIAEQLTGHWREDHLFSLQQALQMYDAVQERIAAYEQEILRKLSEMEREEPHEPTAPPLQNANKARTIKNRGQEAKRQALYRMSGVDMTQIDAIGVETVEVVVSEYGSDLSRFPTEKQFVSHATLAPRVPKSGGKPVRKKKRNSASTRVAAALRMAALSLRHSQTALGAYYRRIAHHRGGDIAVFATARKLATLIYRLLRWGQPYVDEGAAAYENRYRQLRIGRLAATAKQLGYQLTPVSA

SEQ ID NO: 63718 - protein, 344 aa, unidentified
MKHYVGLDVSVKETSVCVIDGGGKTIREVKVATEPEAIVAILADEAFTIERIGLEAGPLSQWLYSGLAEVGLPVICVETRHMKAALSAQVNKSDRNDARGIAQMMRVGLYRPVHVKTLASQKRRMLLTSRGLLQSKALDIESDLRGTLRNFGLKVGMVSTVKFEARIRELVADYPDLAAIAEALLIARRVLREQLGVLHRLLLATVRHDEVCRRLMTMPGVGPVVALTFRATVDVPARFTSSKAVGAVFGLTPRRHQSGEIDRMGSISKCGDAMMRTILFEAAQSMLTRTIKWSWLKAWGMRIARHRGMRRAIVAVARRMAVVMHRMWADGTDFRWTNSATAAA

SEQ ID NO: 63719 - protein, 387 aa, unidentified
MNAINARPAEQVAIHTQLGAIFVSLELSQSWLVTSLSPGNGEKMSKHFVRAGDRAGLFERFSWLREKALAKTGRIFPIIVIQEAGLDGFWLHRALVGEGIESWIVDPASIATSRRRRRAKTDKIDGEALVRALLAYKRGEPRVCAMVRVPTVEEEDRRRLGRERKTLITERSKHVNRIKGLLFSQGISGYEPIRRDRRARLDELRTGDGRPLPQYLKAQISRELDRMELLLEQLKAVEADRDALVAPTTDAAQMPARVVMLMGLRGIGAEFANILYSEGLFRHFDNRRQVAAYSGLVPTPWLSGSIDREQGVSKAGNPRLRSTMIELAWLWTRHQPDSMLSKWFRERTKVDTRRKAAIVALARKLLVALWKYVTAGVAIEGAVMKAA

SEQ ID NO: 63720 - protein, 325 aa, unidentified
MEAKKLCCGIDVSHAKLDVCYQNNLGELFHLQVANSKQGFAKIMEHTGPDYHFVMEATGVYYIRLAFYLHKQGCELSVVNALAIKRYIQMHLERNKTDKKDAAWICRYAIDQRPVYWQMPDSAYFESRQLYNTIREYTEQIKRFNNQLHSLRLLPVPSKDTIKSLEKVILYMGKQIKQLEQKLQQLLEQWQPEQLKSVSSVKGIGKRAAAMLIVFTQGFKHTQNHRQLISFAGLAPTQYSSGSSIHGKPRIYKRGGKNLRDVLYMCSMNAMKTNTACKALYDRLRANGKTGKQALIAVCNKLLKQVFAVAKNNSLYQPNYCSAKP

SEQ ID NO: 63721 - protein, 476 aa, unidentified
MKIGDDPDVARDADLFLVLLSPSLVWRVGLSGPPDCCHEHACQIRQFSEAPGRRWCPSIPLGGFMETVVERPGALDVHKAQVTACVRVPAAHSTGREQHVAEFPTTVAGLLTLRDWLAAHGVTQVTMEATGVFWKPIWAILEDEFELLLVNARHVKQVPGRKTDVKDAEWLCQLAEAGLLKASFVPPKPIRALRNLTRYRKTQIQERQREANRLHKALEDTGIKLDCVASDILGVSGRLMLDALVAGTTDPVVLADLAKGRLRAKLPALREALEGRFDHLHAVWIGAILAHLDFLDEQIASLTETIGEQIAPFESAVELLCTIPGVQRRTAEVIVAEIGLDMSVFPTAKHLASWAGMCPGNDQSAGRRRSGRTRKGSKWLDWALEEAAMAAVRTKDVYLAAQYQRLRPRRGHKKALGAVKHSILCACWHMLATGELYNDLGGDYFRKRDPERTTKRLIAQLEALGHSVTLQEAVAA

SEQ ID NO: 63722 - protein, 352 aa, unidentified
MAMTIVENRTITITGGVDTHLDFHVAAAVDSNGGVLGVETFDTTTGGYRQLVGWLAGFGTISLVGVEGTGSYGAGVTRHLTGKGIRVVEVDCPNRQARHRAGKTDAIDAIAAARAALTGTATGVPKSRTGNIEAIRVLTIARRSAANEWIAVVSQIRHVTFTAPDEIRARFAGMTPITLVRTTAALKPRRTDPDIVRYTTLSTLRELGRRALFLREQKMRLNAEMRPLIREVAPSLLEVYGVGFDVAAKLLVAVGDNPHRIRSEAAFAHLCGVAPIPASSGKIQRHRLNRGGNRQANSALYRIMLTRMSNDERTKAYVAKRTAEGKTMGEIARILKRYIAREIYPHLPSTIG

SEQ ID NO: 63723 - protein, 359 aa, unidentified
MRFYNRQHRHYCGIDLHVKTMYLCILDAAGQVLVHRNVKSTREAFLETVAPYREDLVVAAECMFTWYWLADVCAAEAIPFVLGHALAMKAIHGGKAKNDKIDSRKIAGLLRGGLLPQAYVYPAAMRSTRDLLRRRLHLVRKRGQLLAHIQNTRAQYQLPEFGRRLAYPANRSGVSELFSDPSVRKSIDVDLAVLERYDELITDLELTIVREAKRHDGDAFHRLRSVPGIGKVLALTILYEIHDIARFDRVQEFASYARLVKCAHQSAGKTLGSGGAKMGNVHLKWAFSEAAVLFLRHASGGKRLLGAMRRSTAKAKRCQSLPTRLGEPCSSCCRVARCSRWKSSTRRSGEESGRARRLT

SEQ ID NO: 63724 - protein, 467 aa, unidentified
MSGNATTFVGMDAHKKAINVAMLLPGAHQPIEWQVANEPAAIRRLAKKLEREAPGEVRSCYEAGPCGYALQRELEAAAGIICEVVAPSLIPVKPGERIKTDRRDARKLAELQRANLLTVVHPPTTDEESMCDLCRCREDAQEDLTRSRQRMGKMLLRRGLVFRVCKKAWGKLHRQWLRGLSFEHVADQAVFGDYLLAIEQLEERVRTLEAQLTEAAERDPYREPVGWLRCFRGIDTVTAITLVAELHDFRRFGSARELMAYLGLVPSEYSSGASRHRGSITKTGNRHARRVLVETAWHYRHRSKSGETLRRRREGQPARVIALADRAQERLCRRYRHLVERGKPTPKVVVAIARELVGFLWAALVPAVSSQESVSDARPVTQKSRTSTIVAAGRGGRSTVGGAGAGKAEASAGAAGMVGSTRERGSSSLARRRRPGRRRSGPTAAPTPPRHWLSGSAYRSADAGRPS

SEQ ID NO: 63725 - protein, 356 aa, unidentified
MATQQKQSCMFVGIDVHKDTHTAVGISPYGEKLFEITVGNYKEDFETLEEKVKEHSGVLSPYIGLEDVRGYGERLAGYLYQKYPVYHVPSILVDRARQNATHPEKSDSLDALGVAKVMIQSIDTLLPYTISQESEKAKQLKEISIDREDLVLERTRLKNQVHTLLYRIYNTEYEQKFKDPFSLKALRFWRNAKPKCDPFLLKTMKRKVRRLLDIHVEVSELEKDMEKLLKNNYTIQTASGCGVVLASTIIGEIGDINRFTSPGSLSKYAGCSPRERSSGKKIRHVKSRSGNRRLNCAFHRIALAQISRMGNDRAKRYFKRKISEGKSKSQALVCLRRQMVNIVWMMMKHKTIYRNA

SEQ ID NO: 63726 - protein, 328 aa, unidentified
MEQEYIGVDLHKAFFQVCAIRATGERQWEQRWPTTEAGIAELLTRCGTHSRVAVEASSPTWAFVDRIVDHVGAVHVVDTRKTRIKAGYAAKTDRLDAQRLADALRRDSVVGIYYPPPAVRDLRELCRYRGHLARLQASLKQRIQALLLRQGVRPPMKTVFGKRGTQWLDALRLAGWAGHELRGLQHVLADVRAQLVPLVTTMRSLAADDPIAHALDAQPGFGPVFSVTVRAEVGTIARFPDGAHLASYAGLVPRVERSGGRQWSGRITKTGSPWLRWVLIEAAIHQFRRPDAFGHWARQLAMRKGILKARVAVARALCQELFDAWPRA

SEQ ID NO: 63727 - protein, 413 aa, unidentified
MNKRWDKACGADVHKRFIDATIMTSNGTKKHRRFLTNTNDLLAFRDWMIEENCPIVAMESTGIYWIPIHAVLEGIVKVQVANAYKIKNIPGRKTDLKDSEWIAELCINGMIESSRIFPKEDREVRDLTRAREAIVNSRSQVKNRIHAILDTANIKLSSVFTDLFGKSGIELVKGITSGQPIDAIISGTDNRWIKKRAEEIQQAVKGTLGTTQTFVIKECLEVIKTIDSRIKNIDVEISNRMKARNDDLKIAMSMPGIGFIAGSTILAEIGDIRDFKTPDKLAAWTGIVSSVYQSANKLSLGRITKQGSKHLRWILVEVANAVIKVKGKNKLKKFFLRVKARQGFKKAIVALARKILCILHHLLTNREFYTEDGETPAKKSKIPKENVTVTMTADEMIKILSEAGYVVSKPVLG

SEQ ID NO: 63728 - protein, 377 aa, unidentified
MHSENIAAYIGLDVHKETLAVAIAARERLGEVRYYGTINNEAQAVRRLFQKLQGLYGNILSCYEAGPCGFGLYHQLTAMNIKFQVIAPSRIPKSPTDRIKNDHRDAISLARLLRAGELTPVWIPDLTHEAMRDLIRARAAAKRDSRVARQRILSMLLRTDKRYAGKHWTGKHRTWLANQSFSQPSQQIAFQHYCQSLEQIEDRILQLDQEISRLLPEWSLCNLVCQLQALKGVGQLIAITLVAELGDFSRFSNPKQLMAFLGLVPGEYSSGNSIRPRGITKVGNSELRRLLYEAAWSYRTPAKVGAWLIYYRPDSVTQYSKDIAWKAQQRLCSRYRTLTAKGKKSQVAITAVARELTGFMWDIALAAQSSFSQQKQN

SEQ ID NO: 63729 - protein, 440 aa, unidentified
MEKAVKFEEIHANGAGIDIGSREIFVSIDGEQVVKFGTFTSDYHSCCRYLKKHGIESVAMEATGVYWMSLYAMLEQYGIKVCLVHPREVQQVKGRKTDVKDSQWIQKLYTAGLLRESIVAEGLLKELRILIRERLDLIEMGSTYVNKMQKYLELMNIKLRNVISQIHGASGLRIIRAIIDGERDPLNLVILCHEHIQRKKRADILKSLEGNYHESYILLLKENLRLWDEHQDSIRSIEHQISELLEKMNHNKHIEVISPGKPARHHNPQIKDLHKTMVQLYDGVNLTTVTGINDCTMLRLAGEIGFDMSRFPTVKQFVSWLGLSPKNKQSGKMKKRIKSDANKAGLILRQSAQSLMNSKDSATGVFIRRLKGRKGSPVAIKAGARKLAVALYNALTKGIDYVEQGVEKYAVQIKQREFRLLQQLALKHKFHLVDCEGVIT

SEQ ID NO: 63730 - protein, 355 aa, unidentified
MSQDKYIGMDVHQATISVAVVDSSGKLIMECILETRAGTIVQFIQGIQGNLSVAFEEGTSAAWLHDLLKPHVHDLVVCDPRKAALLKQGNKSDRIDARKLAELLRTHQLKPVYHGEHGVRTLKELGRSYLTLTQDVSRVMSRIKAVYRGWGIPCAGTTVYAPAHRAEWLSKIKEPGVVVRAERLYEQLDLLQPLRQQARRELLIESHKHQAVKLLRQIPSIGPIRSALLVALLQTPHRFRTKRQLWAYSGFAVEVHDSGEYRYVRGKVRRNRERITVRGLNDNHNHDVKNLFKGAAISASTCPGPLCDFYVALVQKGMRPTMARLTLARKIAAISLTIWKKGVNFDPKQLQRQAA

SEQ ID NO: 63731 - protein, 445 aa, unidentified
MDVVFTRCAGLDVHKKSITACRMVPDPTGCEAEGIMELRTFGTLTRDLLSLADWLTEASITHVAMESTGEYWKPVYNLLEDTFTVFLVNAAHVKNVPGRKTDKADARWLAKLMRFGLLQASFIPPKGQRDLRDLTRYRTKLVQERVREVNRVQGVLERANIKLASVIADILGVSGRAMLEALIAGRADPAAMAELAKRRMRSKIPLIEQALTGIVQDHHRQLLAMQLAHIDFLDEQIEALNRAIEASLSALSVDAPASEEKAPLSSPSPVSPPVASPTLTFTRAVELLDTIPGIDQRGAEVIVAEIGVDMSRFETAPRLAAWAGVAPGNDESAGKQRSGKTRKGNRPLRAILTQLAHAAVRTKGTYLSALYQRLAARRGKNRAIIAVAHAIMRSAFYMLSRQEPYRELGANYFDERRRHYTVDRLARRIEHLGYRVHLEPVASVA

SEQ ID NO: 63732 - protein, 359 aa, unidentified
MQTQVKKLDFTGQNIYAGIDVHKKSWQVSVFSEELFHKTFNQPPTPEVLHGYLTKHFPNGTYYSVYEAGFCGFWIHDKLQSLGINNIVVNPADVPTTNKERKRKTDKVDSNKLARQLRNGDLEAIYTHKRAVLEDRSLLRMRRTLVKDLTRNKNRVKSDLHFFGIEIPEQYTRNPSYWSKRFITWLEEQEKHQQWTGKDSFRILIDQVKSLRAQLLEVNKKVRILSGENYYQKRVALLGSLFGVGLITAMTILTEIDDIHRFANLEKLRSYVGLTPTSHSSGDTDLHGEMIHRGNKYLKSAIFESAWIAARLDPVLHMDYINFCKRMKPNRAIVRIACKLLDRVHYVLKNEVPYKSGIR

SEQ ID NO: 63733 - protein, 368 aa, unidentified
MKKNNTCPKSPKRSKTRKRSLTIGMDLGDKTSRYCVLDSDGEIVREGTVTTTKKGMKQRFGSLAGCRIAIEVGTHSPWVSRLLSSLGHEVIVANARQVKLISASSRKDDRLDAQTLARLARMDPQLLRPIRHRSEKAQGDLMQVRVRAALVDTRTGLVNAARGLAKAMGERLPKCDADQMGVAKTQGMSAELSEALRPLLETVEALTKQIKASDQKLEQLAERDYPETELLRQVSGVGCLISLTFVLTIEDPSRFQKSRDVGCYVGLRPRRSESGESRPQLGISKEGDEYLRKLLVQGAHCILSHKSPDTDLKRWGLKLAGKGNKNAKKRALVAVARKLAILLHHLWVNGEVYEPLRNSMLLEQKAVA

SEQ ID NO: 63734 - protein, 388 aa, unidentified
MAKRSTGTSVTERAATRSDGTKRSTSGREENVLPVVGPTWTVGMDLGDRTSHFCVLDGDGVVVERGKVSTTLENLRKRFEERSRMRIALEVGTHSPWVSRLLKELGHEVLVANPRKTRLIYQNRGKQDPVDAEALARIARLDPKLLYPVEHRPESVAQDLAVLRARDALVRTRTLLVNHVRGAVKATGHRLKKCSTRTFSDQAVDQIPPEVREALSSVLTTIEVVSKQILALDGRIRELGKKKYPETALLRQVGGVGPIVALAYVLTLEHPGHFRKSRAVGPYLGLVPARSQSGDSDPQLRITKEGDAFLRRLLVQSAQYILGPFAEDCDLRRFGQALSARGERNAKKRAVVAVARKLAVLLHRLWRTAEVYEPLRRAGTAQDAAAAA

SEQ ID NO: 63735 - protein, 338 aa, unidentified
MQTGQTAQTYALFVGVDIAATTAAVATQRPGAKASQSFIIDQTPEGYTSLLHTLQRTGHAPCQVLVVMEATGSYWISLATRLVHEGFGVSVIHPAQAHHFAKALLKRAKTDVIDAQTLAQLAMVLQPEPWTPPPQIYYALQQRLAQRDDLLNLRQQVRNQLHALVQHPEVIPEVRARMDRLLATFEAQLTEVEREIAAALTQDSAWAAAATRLQSIKGVGWVTAAWTLVTTLNLTSCDTVDSLTAYAGLAPMPRQSGSSVWHRPSIGHTGNGRLRTAFYMATLSAAQHNPVIKAFYTRLREVGKPEKVARCAAARKLLHIAWAVVKKDQQFDPYYARG

SEQ ID NO: 63736 - protein, 412 aa, unidentified
METITERVAGLDVHKDTVVACVHVPGAGGRRESNSHEFSTTTAGLLALRDWLVAHQVTLCGMEATGTYWKPVYYCLEDEIECWLLNARHLRNVPGRKTDTQDAAWICQLVEHGLVRPSFVPPPEIRDLRNLTRYRKAQIEERTREAQRLDKVLQDAGIKLSSVASDLRGVSAQAMLRALAGGERDPEILAELAKGTLRRKLPELAEALVGRFRAHHALLVGEILAKLDYLDEAIGRLSVEIERVIAPFGPQVELLRTIPGVDRRMAEALIAEIGVDMGRFGTSARLASWAGLCPGQHQSAGRQRRGTTRKGSKWLRMYLTQAAKAASRTKGTYLSSQYARLRGRRGGARATIAVAYSILVAAFHILERGTPYEDLGADWFIRRRSPEHHARTLVHQLEALGFDVSIQEHAAA

SEQ ID NO: 63737 - protein, 345 aa, unidentified
MEQLIRIGMDTSKRVFQLHGVNAAEDVVLRKKLRRKEMVALFADLAPSVVGIEACGGAHHWARLLRSFGHEVKLLPPEYVKAYRKRGKNDAADAAALCEAMSRPTMRFVPVKSAEAQAALMLAGLRERLIRQRTQLSNAIRGYAAEFGHVAAKGLDKIEPLLARLAADEDLPELAHELFALHAKEHAELQAKLAAIEAKLMAWHRTNACSQRLDKIPGIGPVSAAMLTMKVPQPQLFRSGRDFAAWIGLTPKNHSTAGRTRLGVITRAGDETLRSLLVVGATAVIQQVQRGRGRPSPWLAALLKRKPPKLVAVALANKLARIAWKLMVSGESYRAAPIPAMPVAA

SEQ ID NO: 63738 - protein, 399 aa, unidentified
MRALTNLTLEETMPAAANLSERPAAIRVDLGAIFVSMELSRSKWLITSLSPSGGEKMSKHVVAGGDLAGLLNLFAALQAKTQARTGHSYRIIVIQEAGLDGFWIHRALEKEGIESHVVDPASITTSRRKKRAKTDRIDGEALVRALLAYKRGEPRVCSMVRPPSPEEEDRRRLVRERKALITERIRHSNRIKGLLFAQGISKYEPLRRDRRARLAALRTGDGRELPAHLKAQISRELGRLELLLEQLKAVEAERDALLAREQVHAKAPAGMLLKLKGIGPEFAAILWSEGLFRHYDNRRQLAAYAGLAPTPWQSGRIDREQGVSKSGNPRLRVALIQLSWLWLQHQSKSALARWFEARVARNGGRLRKSTIVALARKLLVALWKYVNAGVEIEGAVFAS

SEQ ID NO: 63739 - protein, 426 aa, unidentified
MIAHDVKEIHEKRDSMPHRHIGLDIHRDRIYVTELSLLGGSVKQYEISTREKELEAFLGTLQPGDQVALEATRGSSYYVGRLSTLVSSVSVANPGKMKLFNPNAKNDRNDSLNLAIQLAAGILPTVWIPDRETQEDRRLLHYRNTLIQEQTRLKNRVRALLAEHGFIWDGSDIQSDGFQRFLFKLKTRLSGASGEVLAHQMEQLDALEERLHRIDAVIVVRAQRWPEIDLLMTIRGVNVLTAFTILAQIGRIDRFETADSLTNYAGLVPRQRSSAGKSRNGSITKAGSKMLRWALTEAVQNLCKVDGPYRNLCKRLDRKNKGKGIAATACARKLLKAIWCMLTRKEGFRYAEPALVQDKARRRERQLKAALPFVEEQKKRQHLVIQSHAALLLGLASTGKKIPLPRPLLGSFGRRPLPEMAAAASG

SEQ ID NO: 63740 - protein, 455 aa, unidentified
MEGSYAGVDWASDKHDVLVADAAGEKLLAATFAHDEKGLRSLCRQLVRLKVQLVAVERPDGLLVERLLDAGLAVLALHPNQVAAARDRFRVSGGKSDGFDAFVLCELARTDHHRFRVLEPDSDATKAIRALTRGREDLVGARTGLVNQLRAELERFWPGPLHLFSELHSQISLAFLERYPSPTDARGLGETRLAGFLARQRYSGRQKPAQLLAKLRAAPVGRVGERELATRRGLVRGLVAMIKQLNAQIAELERQIATAIREHPDGRIFTSLFKGAVITAAELLAEMGDCRGRYPTRDTLAGDAGQAAVAIESGKRKAACFRWGCNKRLRNAFHTLADSSRHHNPWAQDLYAQACERGHDHPRALRTVGRAWSRIVWQCWQDGVPYDPARHRALQRHVTVTIPPSSGPVPDIAATQRMAGAAVTRRAARRGEREALDGKPASAKPVARPAKRRRA

SEQ ID NO: 63741 - protein, 358 aa, unidentified
MNRNTGMSAGHIIGTLNGRQVVGLDIAKLVFQLHTVDMGTGEIVKVQIKRAKVLEHFANRQPCPIAIQACGGAHHWARELTKLGHSVRLLHAKIVRAFVSRNKTDAADARGIWLAVRQPGVKFVGIKSASQQATLVLHRQRDRLMKMRNMQSNAVRGLLYEFGATFAKRKKALFNEIEETLEGLASTLPQMLADSLRDQVARIKAIKADMQAIEKRLAQQLRLDPQMKRIAQIPGVGVLTATAAIATLGPASAFKSGREFCGWLGLVPKQTGTGAKVRLGGISKRGDSDVGTLLIHGARSVLTHAKEPGPWLEQIKSRRPASVVIVAQAAKMARTIWAVTAKEQEFQRGFKSVRPQAA

SEQ ID NO: 63742 - protein, 316 aa, unidentified
MSESMSFVGIDVSKNVLDVHVLCTGEHWQVGNDQAGCASLVERLKPLGKTMLVVMEATNVFWRMAAAALAGAGLACAVVNPRQVRDFAKSMGILAKTDAIDAQVLAQFAQRVKPPVRALPDAQCQVAAELLARRAQLMGMRVAEKNRLGTASAKKVRKDIEATIAFLEKRLAALDEEIDRWLKSTPIDQSRADLLQSFTGIGQNTARSLLITLPELGRLSGKQISALAGLAPFAKDSGGKRGQRHIAGGRSIVRGALYMPALSAITHNPVIRALYQRLVQAGKHHYVAITACMRKMLVILNAMLRSGKPWKASHHA

SEQ ID NO: 63743 - protein, 437 aa, unidentified
MNREVSTMKSNTQNAKIEAITEKTLVLGIDVGSETHYARAFDYRGIEYSKKPFKFSNTEAGFVTFKEWILDIKERHEKDKVVLGMEPTGHYWFNLGKFLQDNEMKPVLVNPHHVKKSKELDDNNPTKNDRKDPKVIAGLVREGRYMIPYLPDGVYADLRTASNIRFQLQAELTRIQNRISRWFNIYFPEYKTVYGKPDAKSGILILKAAPLPEDILTLGIDGVNQIWRDAKLRAVGKARAKTLIEAAEHSVGSKEGAVAARMEIRMLLEDYESRSIRLQEVMTLIEGLVKQIPMAEKLLEIKGVGIRTVSGFLAEVGDISRFNNPKELQKLAGLALVENSSGKHKGETTISRRGRKRLRYLLFEVAMSLVAKNPEFRELHNYYTTRRLNPLKKMQSLMAIAAKLIRVFYAMLTKGVDYDPKKMVSDIKRPAVYLQAA

SEQ ID NO: 63744 - protein, 422 aa, unidentified
MSYCPVAGIDVSKRFSDMCILSPDNKIFAQEKIYHDETSINRANALLQKAERLFFSKPVIVMESTSHYHLILFQFFSEHGYDVIVVNPLQSNSMKDFSIRKRKTDRVDAFKLAMMYRTKTLRPSQIPQTATRALRQLCRHRAELLNDVSSYKNRLTALLDQTFPGYDKVFSDVGGVTSCAVLVRFPTPTILLVEEESELVEVIAAASKSGYSFAKKKAGLLISAAQKAQTLGIHSCADETLIVCTIQMLRTLSESVLQIEAAIDHLLAQIKEMRNNVSLLQSIPGIGSHSATLLLGEIGDISLFKKPKQLAAYFGLDPTERQSGSFRGTKNKLSKRGSPYARAALHMGVVNAICKHGKDSAANPVLLSYYEKKCKNKPAKVAQAASMHKLVFIIFAVLRDQKPFELKTPEQHAVEQGFVKAA

SEQ ID NO: 63745 - protein, 366 aa, unidentified
MSAVLTIDRRVVIAIDPHKASWTAVAVGESLQPLATLRVSVSRDGYRSLRRFARAWHASMWAIEGAHGMGAPLTAQLVHDGVDVMDVPAKLAARVRLLSTGHGRKNDDADAVSVGIAALNAAHLTTVTVDDAATALRAIVEHREDLVKTRTQTINRLHVLLTKLSPGGASGTLTAERAATLLGAIRPRDAAAKALRALAVDMVAEVRHLDRRIAKAADDIQSAVTTSGTTLTELHGIGTVSAAKIISRVGHVHRFRSAAAFATYTGTAPIEVSSGDVVRHRLSRAGDRQLNACLHVMALTQIRSDTPGRTYYQRKRSEGKSKREAMRCLKRRLSDAVYRQLTRDAHPDEADPGGHSGATLLSRAIG

SEQ ID NO: 63746 - protein, 401 aa, unidentified
MRRRAWVGIDVGKTSHHACAIDETGKVVWNQKVSNEQRAIEQLVTRACKGAEQVQWAIDLTSPMALMLITVLLCAEQSVVYVPGRTVNTMTHAFRGEGKTDAKDARVIAETARLRNDLSNVVLPDELVVELTQLTGYRADLMADWVRGINRLRALLGSIFPGLEAAFDYSTRTPLILVSGLCTPAEIRAAGIDGMTAFLVDNHAWPTGIVKSAATAAALANEQPLALPGEAGTAALVKRLACRLLELDREIKDIDKTITARFRDHPYARIIESLPGFGPGLGAEFLVVTRGDPASFATAGRLASYAGLVPVPKDSGRITGNLRRPKRYNRRLRRVFYLAALSSLRADGPSRRFYDRKRAERLIHTQALLALARRLIDVLWALLRDDREFTPEKPITATAAA

SEQ ID NO: 63747 - protein, 323 aa, unidentified
MSKIIGIDISKSTFDVSYLKKDKWEHKVFKNQSTGFEQFKKIIKSADWIVMEASGPYYVQLATFLNLGNYKVCVLNPLIIRRYSQTRLYRAKTDKKDAKTIAEYGAQYELKRWYPESNHCIEIKQLYTALELLKKQKHQTKRQLESFEVTGVLSNSLKKELKQLLLLLTRRIIKFEKQIEKLGELAYKDTIQRLRTIPGVGIKTAIMISVVTNNFTKFENYKQLTAFVGFSPRLYQSGTSVKGKGHICKMGKPQIRKLLYLCSWSAKRVNKTCIEMYNRLKEKGKPERVIKIAIANKLLKQIFAVAKNKQYYNENYQSLCGAK

SEQ ID NO: 63748 - protein, 405 aa, unidentified
MQVVYERCCGLDVHKKSVTACIITPEGKELRQFGTMTDDLLELANWIKQNGCTHIAMESTGSYWKPIYNLLELENVKISVVNAHHIKAVPGRKSDVKDAEWIAELLRHGLLQDSFIPTREQRELRELARYRRSLINERSREVNRLQKTLEGCNIKLTSVVSDVMGKSAQEMIQQIINGNYDPEVLSKLAQGRLKNKSDQLVRALKGLVGPHQRMMLKAQLQHIQFLDRMIAQLDEEIADRMRPFEKALRLIQTIPGIGRRSAEEIIAETGVDMKQFPSAAHLASWAGVAPGNKESAGKRKPSPTTKGNNALRSALIQVARASARTKNTYLAAQYKRIAARRGANRAAVALARTILVIIYHILTKNQPYMELGADYFDLRKKESVVKNSIKKLESLGYQVILQPAC

SEQ ID NO: 63749 - protein, 451 aa, unidentified
MGVDVSKGHADFVILDSKKQPVKDNFQLDDTFIGHCHLYDRLHKFYINHPDSKIYAAVESTGGYENNWFNSLFKLQSSFNLETARLNPFGVNANSKADLKRNVTDKISAQNVAEFLIAHPEKVSYQQQDYLASLRKQWGFIKMLTKQSTQLLNQIESLIYSASPELLVYCKDGMPDWILKLLLRYPTAANLSKAKVSSVARIPYISSARAKELVATAKKSVASFTDRVTGQLIVATAKQILHLKKSISSQTKIMAKDCSLPEVDLLKTFSGINEFSAIGLMIEIQSVERFSSVKKMASFFSLHPVFKISGDGTSGFRMSKQGRKEPRRILFMVAFSAIRFNPLIREIYQDRVQKGMEKMAAIGLCMHKILRIIYGMLKHNRAFDPEVDLKNREKMAKGQKKIHRDKNRRYQNFDPKAPISRRQKMKRKEWEQSHSDNITKSGIIAPIPVSA

SEQ ID NO: 63750 - protein, 312 aa, unidentified
MPLQESLQFIGVDVAKLSLAIQFPDRLWSTVNTPAGHTALVAELRHFGAVHVVCEATGGYERALVLALHAAGVRVSVINPRQIRDFARACGRLAKTDALDATIIRDYGCRLQPDPDPAPAPGEVEFAELIRSRQDLVGLITEEINRREHTTLPVLLKLSRARQRQLERQLAALDALIDAQVARQAALAAKTERLQQVSGVGRVTALTVVALMPEIGTLRDAEAAALAGVAPMNRDSGQHRGQRRIHGGRPALRRVLYMAALTATVHNPILKAFYQRLRQNGKPAKLALTAVMRKLIILLNRLLKNPQFNLVS

SEQ ID NO: 63751 - protein, 378 aa, unidentified
MKIAIGIDVHMVKCAAYAVYAGMGEPRQRHLDFLEGFNKDFRRFPSDAVGMKELAERVRGHEADILIENSTKSHDVYWMLTNLGLRVTVAHATDLYRITMSKTSNDDNDAIELAGYMRRRMMGENEFAVSHIPSQDVLLQRELCRFDICDRTELSALKRRIRSHLLIRGMKRWHDYADITCARALRELKATGDHILCLDVAKAESLKTRRRQTEKMIRYRMEGSRMFDIIWSIPGFGILSAAYVACMVDDIKRFEDGRAFAASTGITPKLAESADKPKNCGISRRGDPDLRRLLCQAAFVHIFHAEGSFIAEKYWRLKAKGKHHNEALVACANSMARMIWAMIDSDRKYSADPKALTKARALADSDEIEEIMEDAEKE

SEQ ID NO: 63752 - protein, 430 aa, unidentified
MKSNTQNAKIEAITEKTLVLGIDVGSEMHYARAFDYRVIEYSKKPFKFSNTEAGFATFKEWVLDLKERHEKDKVVPGMEPTGHYWFNLGKFLQDNEMKPVLVNPHHVKKSKELDDNNPTKNDRKDAKVIAGLVREGRYMIPYLPEGVYADLRTASNIRFQLQAELTRIQNRISRWFNIYFPEYKTVYGKPDAKSGMLILKAAPLPEDILTLGIDGVNQIWRDAKLRAVGKARAKTLIEAAEHSVGSKEGAVSARMEIRMLLEDYESRNTRLQEVMVLIEELVRKIPMAEKLLEIKGVGIRTVSGFLAEVGDISRFNNPKELQKLAGLALVENSSGKHKGETTISRRGRKRLRYLLFEVAMSLVSKNQEFRELHNYYTTRRLNPLKKMQSLMAIAAKLIRVFYAMLTKGVDYDPKKMVSDIKRPAVYLQAA

SEQ ID NO: 63753 - protein, 416 aa, unidentified
MRVHRNCCGLDVHKLTIAACLISESEDGTSSQQKRIFGTMTQQLRELAQWLAEAKVTAVAMEATGIYWVPVWNVLEPYGFELLLINPEHYKAVRGKKTDLKDGTRIAELLQDGRLAGSYVPPAAIRVLRDLTRYRTKLVQYQSSIANRIQRLLEQCNVKLASVASDVLGVSGQAMLRALAAGETNPQRMADLAKRQLRKKIPALQLALEGCLLPHHRFLLADMLEELDHIGSKIARLEQAIEEQMRPYQKAVDAWMTVPGVKQRLAWNLVAEVGPTVDAFPSAADLVSWAGICPGNNETAGKRKSGTTRNGNRWARKALCEAAWAASKTKATYLQAQFRRLAAIRGCKRAIIAVASTILTIGYHMLKEGTTYRELGGNYFDKRNLLRTTRRLVKRLEALGHRVILAPTPSPLQSSD

SEQ ID NO: 63754 - protein, 390 aa, unidentified
MSQQHFDASRSLTALEQESTIIAVIEMSQSKWLVAALVPGVERQPLKKLDAQEEGLLKLLHRWRTEAGQAGRAIKRIVVAYEAGRDGFWLARWLRAHDVEAYVIHPTSIAVSREHRRAKTDRLDTELLMRAFLGWLRGEKRHCSMVAIPTIEEEDARRPNRERQNLVTEQTRLVNQMKAIFTRFGIRTFQPMLRKAEDKLKGLRTAEGTPLPENTRAELCRHLARLRVVREQIRAVEQERLRKLAAAPAAEYGPHAMVRLIARVLGVGIETADMLVNEVLSRHWRDRKAIARYAGLTGSPDESGKRRRERGLARAGNARVRCGMIQFAWRFLRFQKDSALAQWFAARTADRRASTRKTMIVALARKLLIALWRLVTSGQVSDGIVLRPAS

SEQ ID NO: 63755 - protein, 435 aa, unidentified
MNDQLLIGLKDSPNPLQSSPPLEVYQGPTARPQPARFIGIDAHKHYVTIAAATRDTTPEPVLLTRRLPITELPAWARTHLTRSDAVVLEASTNAWAIHDELLPCVHSITVAHPAHVWLIARAQIKTDSRDAKTLAKLHAAGLIPAIWVPPVEVRELRGLLNHRIRLVRARTQATNRLHAVLHRYHLIPPAGALYAEANRAWWNQQPLSPVERLRVRQDLAQIETLQSQLAEVERLVTELAAGDERVIRLVQLPGIGLLSAMHLLASIGDITRFASAKKLVGYAGLGIALHQSGQDAYTGRITKAGRRELRWVMVEAAWVAVAHHPHWKAQFKRLVGRLGDKKAIVAIARKLLIVAWHVLMERVADRHAQPEAVARKLYTFAESLGRAGRQGQTAAGFTRTALDQLGIGREVTHIQRKRTLQVTLPASALDTPTPG

SEQ ID NO: 63756 - protein, 355 aa, unidentified
MSSRRNGAIAGVIGIDIGKNSFHIIGQDRRGAIVLRQKWSRGQVEARFANLPRCLIGMEACVGAHHLSRKLQALGHDARLMPAKYVRPYSKGQKNDFRDAEAIAEAVQRPTMKFVATKTADQLDLQALHRVRERLVSQRTCIINQIRAFLLERGIAVRQGQRFLRARLPDILAMPPDVLSTRMVRVIEGLASDWRRLDDRVEALSGEIEALARRDAGCERLMSVPGIGPIISTAMVAAIGNGDAFAKGRDFAAWLGLVPKQISTGDRTILGKVSKRGNRYLRVLFVQAAWVILIKPKSWERHGLKSWIQAAKKRLHHNVLAIALANKLARIAWAVLHKGRDFESAKTNATSPQPA

SEQ ID NO: 63757 - protein, 412 aa, unidentified
MDVVYQRCAGIDIGKRTAKVCVRVQGRGSQPTVSTVTSWSSMMPQILKLRAKLVNEGVQRVVMESTSDYWRPFFYVLAEELDVILVRASDVKAIPGRKSDVCDAEWLADLAAHGLVRASFVPPQQQRQLRDLTRARSRLLADRAREVQRLEKELEDACIKLAAVVTDLQGVSARLMLQALIEARDDPAAMADLAIGRMRTKIDQLTEALTGRFNDHHRFMVTFRLKRIDAATAALAELDARIDALIVDAGFDPARDLLLSIPGLGPHSADELLAEIGPDMSVFDAPEQLAAWAGVAPGSHESAGKRKNAPARRGNRYVKRALGIAAKSAARKKTGFLAARFRRLAARRGYQKALVATEHSMIIAIWHMLSTGEYYHDLGGDHYHRLIPARIIRRKIAELEAAGYTVTHEVAA

SEQ ID NO: 63758 - protein, 350 aa, unidentified
MTTMTEARPVVTGGVDTHLDLHVAAALDPIGGVLGTASFPTTTAGYRQLLAWLRSHGQVGRVGIEGTGSYGAALARHLAAESITVIEVLRPNRQVRRRHGKTDVIDAIAAARAVMSGEATGTPKSHDGAVEALRTLKVLQRSANKARTQAINQLRNLIVTAPDDLRARLRNLSIKELLEVCSGFRISADDDSLNAITRLSLRDLAQRILFLDASREQTRCRLDRITSELAPDLLDIKGVGPDVAATLLMTAGDNPERLRNEASFAALCGTNPIPASSGKTNRHRLNRGGDRDANSALWRITIVRLSSDQRSKDYLAKRISEGKSKPEAIRCLKRYIAREVFRALPTQAAV

SEQ ID NO: 63759 - protein, 347 aa, unidentified
MEYFAGLDVSLETVNVCIVNAAGDILLEKKIAAEPAAIVHLLKSFGSPFKRIGLEAGPTSSWLYGELRAAGYGAICLECRHVKAGLSAMRNKTDRNDARGIAQLVRLGWFRQVHVKSEEAQRTRMLLVNRQQLLTKALDIENSLRGSLKVFGLRIGVVARRGFEARVLELVADDPILLAVTKPMLRVRQALLEEFERLDRLCQQLARRDPVCRRLMTVPGVGVVVALTYRTGVDAPERFSKSRDVGAHFGLTPKRYSSGQTDYDGRISRCGDEMVRTALYQAANVLLHHGRWSSLRSWAMRIAKRGSVKGAKVALARRLAVVMHRMWTDGTDFRWSDTSRMTVPTAA

SEQ ID NO: 63760 - protein, 321 aa, unidentified
MDKYTEIYGVDISKDVFDVYGQKAGHKQFNNGDKGFISFLKSLPKSVLVVMEATGYYHYRLAQYLYKQGVFVSVVNPLSVKRFIQMKLAKVKTDKSDAKAICEYGQINEVPLYTALTDVQSECLQLFRLLDNYLKKRTATKNKLHGEETLGIPSKFVYRSLKRDLKHLNKEVTGIEERLLELVKQEQQHQLTLLRSIPGMGVKTALFLIVVTDGFLKFEKASQLCSYVGITPTIRESGSSVRGRSRISKVGNKKLRNLLFLCSFSACKHNKGCREIYERIVNKGKSKKLALIAVSNKLVKQAFAIAKSGIPYDENYVSKLN

SEQ ID NO: 63761 - protein, 424 aa, unidentified
MNFTQNDRLKQVTADTLIVGVDVGSQTHFCRAFDWRGFELSRRVFKFSNDRIGFLTFLRWTEEIMNKTEMKKVIVGCEPTGCYWLTFQKFLQNHDVKLVTVNPFTVNRSKELDDNSPEKSDLKDPKTIAMLVKEGRYSTSYLPEGVYAEIREASVCRDQIMKQHIRLSNQIQGWLQKFFPEYLDCYSDWDSTSGLMLLKSAPLPQDILKIGAGGINQIWRDAKVRAAGLKRAQTLVEVAQESVGLEAGEAARLEIWVLVNDYILKAEQLKRLDEYLEEKIKEVPNVEKLLAIKGVGMSTVIGFVAEVGDIGRFTDPKQIQKLAGLEIVKKSSGKKKGQPRISKRGRRKLRRTMYESARALMNWNPAFQDVFLYYRNRTRNPLGGMQAKIAVACKAIRVFYVILHTGCDFDEEKFRRDIIRPEAA

SEQ ID NO: 63762 - protein, 362 aa, unidentified
MQIIGCDLHARQQTLAMLDTGTGEVVNRTLRHEGNSVREFYSALPGPVRVGIEATGSMKWFLQLMEELGIDCQVGHPATIRAAEPRRQKHDQRDAELLLKLLVEKRFPSIWQPSKELLDLRGLLLHRHQWVRMRTRIQNALQAIALANGLRRGSSLWSESGQRDIASLPLATHTAHRRSELQAMYARFEAEIEKLNEQVLEQAGQRPTAELLMSHPGVGPITALATDVFLGDPKRFNDGKALASYIGIIPRENSSGGRQRLGGLSKQGNPLLRFLWCEAAAHAVRRDPELRRFYRRKLVQKGLGKARVAAARKLGIRLWIMLRDQIDYNEFCRRGQMQQKSGDACAGMPGARYGAKSHRLID

SEQ ID NO: 63763 - protein, 482 aa, unidentified
MKPRQKDKDKRAAGRPTRPSWQEMNRKQRRETMRKIQSEELSLEVIHPDAAGIDIGNESHYVAVPPSRDIQSVRRFGCTTAELKAMAQWLKQCGIQTIAMQSTGVYWIAVFDILEEAGFEVYLVNARETKNLPGRKTDVQESQWLMKLHRYGLLRNSFRPSQEIRTMRTYWRQRNDLVQAGARHIQRIQKALTQMNIQLANVLSDVSGMTGQAIIKAILAGERDPHKLAAFRDPRVKASEEQIERSLEGHWQKDLLFVLKQEQDGYEFCQQQMAECDRQLDQYLQQQEDRSKGASLPEEKRKERLKKKKGNKPRFDLRTGLFRMAGVDLTQIDCIDVMTATTILSEAGSDMSKWETEHHFVSWLRLCPDNRISGNKIIGKGRLPTSNRITNALKMAASTLRTSNTYLGAQFRRLRTKLGAPIAIKAMAAKLARLIYRMLRYGMKYVDQGAEFYELQHRKLQIKHLKSKAAKLGFQIVQAPAA

SEQ ID NO: 63764 - protein, 463 aa, unidentified
MAAVMIGVDPHKASHTAAAIGPAEEPLGGIQVRAVASQAAQLLAWAAAWPERTWAVEGATGLGNLPAQQLVTAGEVVLDVQPKMAARVRLLASGNTNKNDPGDAGSVAVAALRSRAPRRVTAEDHTAVLKVWSKRYRDLGRARTQVACRLHAVLADLVPGGFSREITAGQGASMLKRIRPSGPAARARRELAAEFLGLRRLDGQIRDTRNKLAAAVQASGTTLTGIFGVGPVIAAAILGEAGDTTRFGDRDRFAACNGTAPIEVSSGGRKIHRLSLRGNRRPGHAIHMAAVTQIRYAHSPGRAYFDRKLAEGKTGKEALRCLKRQISDAIYARRWPTPPPAARPPKRRAREGNRGTALSPARPARTPGAGSSEKPLPDHTPAYGRPPRHAAQCKQPRSRPRTEALDNKEVFDRRGPLLHDRVTHRATYLGYLLALGRGWSCPARAACCPRRPWRCWCGHWLGR

SEQ ID NO: 63765 - protein, 349 aa, unidentified
MSAKFNCEIAVIGIDIGKNSFHVVGLDRRGAIVLRQKWSRGQVEVRLSNLPRCLIGMEACVGAHHLSRKLTSLGHDARLMPAKYVRPYSRGQKNDFRDAEAIAEAVQRPTMKFVATKTAEQLDLQALHRVRERLVSQRTGIINQIRAFLLERGVAVRQGLRFLRAELPRILARPCDALSPQMLRVIEDLTGDWRRLDERIEGLSSEIEVLARQDAGCERLMSVPGIGPIISSAIVAAIGGGDAFSKGRDFAAWLGLVPRQISTGDRTILGKISKRGNRYLRVLFVQAAWVVLIKPKSWQRHGLKPWLEAAKKRLHHNVLAIALANKLARIAWSILAHGRTFEASKVQAA

SEQ ID NO: 63766 - protein, 394 aa, unidentified
MNKTLHYVGLDVHKESIAVSIAPANSTEVRRYGLIGGTLDAVDKLVKKLSPPGVELRVVYEAGPCGFVLCRHLRSQGIHCDVVSPSLIPKKASDRVKTDRRDAEQLARLHRAGELTAIHIPDQEDEAIRDLVRARYSAITDQKQARNRLKGFLLRLGYRYTGKSSWNDAHKRYLSGLVMPQAAQQIAFQEYIHAIDDATDRLARLTQAVEDAMSGWKWAPVVRALMSLRGVQVLTAMTLVAEVGDFSRFEDPRSLMHFFGLTPSEHSSGDKRVQGGITRCGNSHCRRVLTEAAWQYRLKPKVSEAIQKRQEGQSKEVRLIAWRAQERLNKRFKQLAARKKSVVVATAIARELTGFVWAIACQVKPARAALPEVIRTCRGKVYQLDAHKKMEQTK

SEQ ID NO: 63767 - protein, 329 aa, unidentified
MYVGLDVSKNEIVCVGKDMDGNILYEDKFGVSQDELNRMVGSIGSDSTFAVEASTKGIFVYDCLHSMNINIKVANPIKMRLIAESGKKTDREDASIIADYLRTNMLPLCYMPNKEDREIRDMVRHRKNMVNTRTVIKNKMRAILAREGIDLPYSDILGNKSLSELQNIEIGNVQKDALNKLGRVAEVLNDEIDDYDKKISERFEDSKEAQLLVTVPGIGKYSAVHIMSAIGDIHRFPSDEELASYAGLTPKVFQSGSTRIDKGIRHGDKLLNWVLIQDAHAAVMRKGKLRKYYLKQKRKKGHQKAIVSTARKMVEIIYCMLTRGEVYKE

SEQ ID NO: 63768 - protein, 407 aa, unidentified
MEVQHARCAGLDVHQASVVACARLVVGREVEQHVETFGTTTRELLRLLAWLAGHGVTHVAMEATGVYWKPVWHVLEGHVTLLLGNAKEIKNVPGRKTDVKDAVWIADLLAHGLIRASLVPPEPIQELRDLTRTRKQLVAERTQHVQRIQKVLEDANVKLAGVLTDILGASGRAMLDALAAGDQAPEQVAQLAHGRVRASRAELAEALEGRVRAHHRFLLRLHLRQIDALASSITAVEARVEALLVPFASVARRLTTIPGVSKVVVAVLLAEIGADMSVFPTAGHLVSWACLAPRQDQSAGKRRSTRTRQGQWLKATLVQAAWAAVRKKDTYLYAQFHRLRARRGAKKAIVAVAASMLTAAYHMIRTDTDYADLGGDFFERRAKKGVAFRLVERLQQMGYTVQLTSAA

SEQ ID NO: 63769 - protein, 408 aa, unidentified
MAAIEFPIYVERGCGLDVHQQTVVASIAGKDIEAQTKTFGTFTEELYQLVGWLQNNGITHIAMESTGVYWKPVYYILEDFFKILLVNARHIKNVPGHKTDKKDSEWIAKLLMSGLLKGSFVPPQHIRELRTLHRHRRKLTGQRTAEKNRLQNILEDANIKLGNVVSDVFGKTGKAIIEALIAGVTDPAQLAELARGSLVKKKDQLKKALNGKITDHHRFMLQLIVNTITHINNQIALLEAQMGIYIESMKQDVELLQTIPGVSIQIATGILAEIGNDMSVFPSHSHLSSWAGVCPGNNESAGKKKSSRVTHGNKFLKTTLIEAAWAASHSKTNPILAIKHRSIAMRRGAKKANLAIGHKILVAAYHILRDKTPFLPSERNQQILQVRRLKRIERLQKELTALKNTSEQ

SEQ ID NO: 63770 - protein, 344 aa, unidentified
MEYYAGLDVSLRSCALCIVDSKGTVLFERELPCEVGDIAECLAGFPHPIERVGFEAGAMSQHLFFGLTAEGFDVVCMEARQVSAALSAMRNKTDKTDARGIAQILRTGWFSPVHMKSREAHGLRALLSTRKALLKKTMDLANEVRGLLKIFGVRLPKTVKHGSFDSVVRPMIEIDDVLAYALVPLLDARVVLYQHYLELDRRVKRAASHDDVCMKLMTIPGVGPIAALSFKSAVDDPTRFKRSRTVGAYFGLTPRRYQSGEHDNPGRISKAGDRDVRAVLYAAANALLMRTMASSQIKSWGMRLMRTKGRRRAVVAVARKLAILMHRMWIDGSEFRQDQVGGMA

SEQ ID NO: 63771 - protein, 317 aa, unidentified
MKDSLIFVGIDVSKAQLDVAIRPTGETLSVANDKAGIKALVKGLAKIQPGLVVLESTGGLERQILCAVVSAELPAVRVNPRQVRDFAKATGQLAKTDSIDAAILAHYAQAVRPQLRPLPDAVAMELRALSARRRQLIEMIVMEKNHLATAAKAVAKDITEHIGGLEQKLQGVDTDIDGLIEQSPIWKEHEDILRSAPAIGPVTSRTLLAELPELGTLDRKQIASLVGLAPFNRDSGTLKGRRSIWGGRASVRCALYMAALVATRCNPVIGDFYKRLKAKGKPFKVALVACMHKLLTILNAMIKHKSRWSDTFSLQTT

SEQ ID NO: 63772 - protein, 411 aa, unidentified
MAIDWADQKHVWSVQAAGSNRRESDEMKHTPEAVGAWVSMLSARFAGKPIAVALEQSHGALVFMLGQYANLHLYPIHPRAAAQFRAALYPSGAKDDPVDADLLLDMLMLHRKHIRPLQPDSEQTRLVQHQVEARRRLVNEKTRQVLRLTAKLKLYFPQVLVWFGKVESPLVGALLRRWPTLPDLQRARPATLRSFFRLHHCRDAERIEERIRPIRQAVPAITDPAVVQPAATVARNLVELIATLHTGIAELDQQIAQATAGHPDFGVFDSFPGAGPVLAPRLLAVFGSRRDRYRAAGEVQRFSGIAPIVKRSGKSKSVHFRRACPKFLRQTFHEWAGHSIGFCDWARVFYQQKREKGFDHHAAVRTLAFKWIRIVHRCWQDGVPYDNARYVESLRRHGSPIAAALAASTPR

SEQ ID NO: 63773 - protein, 309 aa, unidentified
MDTTYVGIDVSKDRLDVHVEPVGEAFAVGRDVAGQADLVDRLRGLHPAAIGIEATGGLESVVAASLAAASLPVVVVNPAQVRAFAIALGKRAKSDPIDAAVIARFVAATQPQIRPLPDEATQLLADLIARRRQIIEMMVAERQRARRATGRSKRSIARLLAALEKELSDLDQDIDDNIRASPAWREKEELLKSVPGVGDVTARTLIAELPELGKLDRRQIAALAGLAPWTRQSGKWRGKSFIGGGRAVVRSSLFMAALVATRHNQTLMAFHQRLLLKGKPKMVAIIAVARKLLTILNAIIRENKPWQNA

SEQ ID NO: 63774 - protein, 439 aa, unidentified
MRFYTQQHQYYCGIDLHARTMYVCILDAASNVLVHKDLAAGPETFLKVIAAYRTDLVVAVECIFTWYWLADLCAQEHIAFVLGHALYMKAIHGGKAKNDRIDAHKIAVLLRGGMIPTAYVYPRAMCATRDLLRRRCRFARQRASLLAHIQNTTSQYNLPPLPQRISYQANRRTVPDHFPDPQVRKSIEADLCLIDHYDAVLTDLELHLVRTAKIDDADTFYRLRSVPGIGKILGLVMLYEIHDIARFPTVQDFLSYARLVKCAKESAGKHYGYSGAKIGSVYLKWAFSETATLFLRNNGLGQAFFTRLEQQHGNAKARSVLAHKLGRAVYCMLHQRTAFDLKKFVGSSTPPPRQALPAPADHPAALDAPRPAAESAGAARPTSPPRSARALGAPAASPTPRKKQGPRSHTREGGKDVAPPNRRQRTQPATRAEEGTATE

SEQ ID NO: 63775 - protein, 327 aa, unidentified
MAKRTTICAGIDTGKRKLDIALDGSSEQLQIDNTPEGYKTLLVWLRRHRVKRIGIEASGGYEQAVVAELRRQRFVVVVFQPAQVRAYAKFHLQRAKNDKIDAALIAACTAAVKTIHDPPDARLLPFAEHLTMIDQIGEDIARLKNRIETCRNLRFRQNWKEDIARLQNRQTVELKALVAAIGEHRDLAERLELIGSVDGIGPPTAVAILVRLPEIGRISREQAAALAGVAPYDDDSGEHAGTRHIEGGRKRLRRALFTAALPASFRWNPQLIALYRRLKAAGKEHKRALIACARKLLIFANTVVARGTPWDHARPPVPSMTTVPQPG

SEQ ID NO: 63776 - protein, 473 aa, unidentified
MRKAQMKVKSRAKAKSKAWRWKKQSSLLEQINFNAAGIDVGSREHWVAVPAERDPQPVRCFGTFTSDLEALADWLLQCGVKSVAMESTGVYWIPVFQILESRGLEVLLVNARQVKNVSGRKSDVSDCQWLQQLHSYGLLAASFRPAAEVCVLRSYLRHREHLVQQASTQIQLMQKALTQMNVQLHHVLSDVTGVTGMAILDAILAGERDPLKLAQLKDPRVRSSVETIAKALTGDYRAEQLFVLKQARESFQFLQAQIAECDVEVNKVLSGWDAKVDLEQQPLPPTRKKNRSQSKHKPLPFNLREQLYRVTGVDLTEVDGLDGLSAQALISEIGLNLQRWPSEKHFASWLGLCPDHRISGGQVLHNRTRPVINRAADVLRMAAQSLKDSQSALGAFFRRLKARLGPAKAITATAHKLARIVYQLLKYGHHYVDPGAQYYEQRYRENILRGLKKRAASLGYTLVENAALNVQVS

SEQ ID NO: 63777 - protein, 461 aa, unidentified
MSANKPTGAKKKSVPKKVDWKALEVVHPDAAGIDVGGSEHWVAVSPDRDPEPVRRFGCFTADLREMACWLVEKGVRSVAMQSTGVYWMPVFEILEQQGLEVYLVNAQHTKNVPGRKSDIQECQWLLKLHAFGLLNNSFQPNDEIRIARTLWRHRGNLVAEASSVVQRMQKVLTEMNMQLSNVLSDISGVSGMKIIQAILDGARDPWELAALVEPGVKATPEDIVKSLEGNWREELLFLLRQHVEFYQIYQNKIRACDLQLRKHLQSLGSKLDLRAQPLGPRPKGKQASRNAPAFDLRTELYRITGIDWSQINGIDVLTAQTVISEAGADLSAFPSEKQFTSWLGLCPTNQQSGKKILNRRTRKVVNRATVAFRNAAMTLVRSQSYLGAQYRRLRTRLGAPKAITAMARKLACLFYRLIKHGQQYVDKGTEYYEARYREQQIRSLAKRAQKLGLQLIIPKTA

SEQ ID NO: 63778 - protein, 332 aa, unidentified
MFLGIDLHKREAQVAVRNDDGEVIEETRVNNEDLEAIAERYSSGEALLEATTNYFYIYDLLSEYLDVKVGHPPKLKAIAQTDRKTDQIDAKELSRLLWLGSVPESYVPTDEIRECRSLVRGRISLLQERTKYANKIHSLLLDNGMTEEVKPLSTSGRAYLEELSLPAPWDGLLASYLSVIETLTEEIDRLDERIEDRAKRLEATRLLMTIPGVSHYTALVIYAELGEIDRFDRAKEVVRYVGLNPVVRESGDSRFEGGISKNGPGKVRWLLVQAVHSAVHTVEDPYLSRFYHRIDRRKNSQKAAVATARKLLVSIYHMLDRGEPYDPPGVTA

SEQ ID NO: 63779 - protein, 376 aa, unidentified
MYVGLDVHKETIAVAVANPGRDEPTYRNEIANKPKAVAKLIGRLSRDTDGAVMLFCYEAGPCGYELYRQILGLGHDCQVVAPSLIPKKAGERIKTDRRDALKLAGYLRSGDLTAVWVPDREQEAMRDLTRARNDMKSQERKARQQLGAFVLRHGHSWPAGKSRWTKGHYNWLESLRFEHEWQQIVLQEYINAAKAATARVAEMTGQMMAVLPNWSLAPVVDSLVALRGIDKISAMVLLAELGDISRFDSPRQLMAYLGLVPSEHSSGGRRRQGAITLTGNGHARRTLVESAWSYRFPARQTAHLKRKAANASKEAREIAWRAQKRLCGRYSTLTRAGKNTKVACVAIARELIGFIWDIVRHEMPKLKVPSARQQAA

SEQ ID NO: 63780 - protein, 342 aa, unidentified
MEYYAGIDVSLECSTVCVVDGSGKIVREAIVGSEPEALIGWFGTLGLGLTRIGLEAGPLSQWLYAAMKQAGLAVELLETRHVHDAFKAMPVKSDRNDARGIAQLMRLGWFRPVHCKSIGAQEVRAVLTARKLIQTKCQDVENSLRGILRGFGLKVGKTTDRSFAGRIQELVKGHPNLETIGAALLSVRAVLLRELNGFEKRVRAMSRLDVKARLLMSTPAVGPIVSLTYAAAIDDPARFKSSKQAGAHFGLTPKRHQSGETDRSGRISKIGDAAVREALYQAAHVMLTKPVKGCSQLKSWAMRIARRAGMGKAKVALARKLAVIMHRMLANRTPFNAAAAAA

SEQ ID NO: 63781 - protein, 329 aa, unidentified
MNPSSSIASAAPLFVGIDVSLDELDVARSDGNAVVTVTNDAGGIGELVRQLAADHPQCIVIEATGGYERPLLAALLDAQLPVARVNPRRVREFARGLGRLAKTDRLDAQMLVEFARRAEPRLAAKQRQIQAELEALVTCRRQLIATRTMHGNQLKQTQTRGGCKAAAKALKRVIDVLNGQIDSLDGQIRKLIESDDDFDHKDRLLQSAPGIGDVTSATLIAELPELGKTDRHRIGALSGVVPFNHDSGKLKGTRSISGGRASVRCALYMCALGAMRCNPLIQAFAQRLRAAGKKNKVILVACMRKLAAIFNAMIRENLPWHELQLVKSA

SEQ ID NO: 63782 - protein, 455 aa, unidentified
MAKQKTHKPTAIEMVNAGAAAVDIGSREHMAAVNPDVTDTPVKAFGTFTHDLHDLAAWFKSNGVTSVAMESTGVYWIPAYEILEQHGFEVILVNARYAKNVPGRKTDVSDASWLRQLHSYGLLRGSFRPSAQIATLRAYLRQRERLVEYAAAHIQHMQKALMEMNLQLHHVVSDITGVTGMKIIRALVAGERDLDVLASYRDVRCRASVETIKAALNGNDRPEHIFALTQSLELYDFYKGKMLECDRHLETTLATLGADTGHDPSQLPRARTKTKQVSTPSFDVRAALFGVLGVDLTEIHGMGPSLSLKLVGECGTDLRAWPSAKHFTSWLCLAPGNKISGGKVLSSRTRRSSSRAAALLRLAAVTIGRSDTALGAFYRRLAARAGKAKAVTATARKIAVLFYNTLRHGMTYKDPGASHYEERYRNRVLGNLKRRAKSFGYDLQELPPEADIAVS

SEQ ID NO: 63783 - protein, 350 aa, unidentified
MIIIGADFHPAYQEIASVNTDTGEYEEKRLAHPQEAEEFYRSLASVGQAVRVGMEASGHGRWFERLLEGFGLELWRGDAEVIRAKRGRKQKTDREDARHILKLLLKDDFPKIWVPSWENRDLRQLLWHRHRMVQARTRVMNQLQAVALNEGLRCKKRLWRANGRQQLESFKLAPWASRRRRELLELLDRLNPTIAELSQAIEREAEKCPEAQRLMTHPGVGALTALAFVLIIGNAERFGCGKKVASYLGLVPLETSSGNRRRLGHITKQGNSLLRFLLVEAAQVTVRRLPDWRTKYVHLMMRRGRKTAKVAMARKLAVRLYWMWRKGWDYEQWKKFGSYVGQPGHRYGVQ

SEQ ID NO: 63784 - protein, 317 aa, unidentified
MRASAAFFVGIDVSKQQLDIAVRPSGESWTVAHEEAGLSALVARLRGLAPTLIVLEATGGWEVPVTGALAAAALPVAVVNPRQVRDFARSTGLLAKTDRLDAQLLAQFAEVLRPAPRPLPDAQAQELTALLQRRRQLVEMLTAEKNRLPLAARRIRPQLQAHIAWLHQQIAQFDEDLRQLIRSSPLWREKDDLLRSTPGVGPVLATTLVAALPELGTLSRRQIAALVGVAPLNRDSGTLRGRRTVWGGRAQVRAVLYMSTVVAVRHNPVLIAFYQRLRAAGKAPKLALTACMRKLLTILNAMLKHHRRWAPVRAQHA

SEQ ID NO: 63785 - protein, 418 aa, unidentified
MRVDTDEPEIIERIAALDVAKAEVVCCARVPGPGRQRMQEVRTVSTMTAALLELGDWLAELGVTRVVMEATSDYWRAPFYLLEDRFETWLVNAHDVKHVPGRPKTDRLDAVWLCKVAERQMLRPSFVPPPHIRALRDLTRYRVDLLAVRTAEKQRVEKLLEDALIKLSVVASDPFGASGRAIMAALIAGERDPAVLANLARGSLRSKTARLTEALTGRFTDHHAFLLTQMLQRVDAATADIATVQARIDDEVGELAPAVARLDAIPGIGPVAAQMILAEIGTDMSRFPTPAHLASWARFAPGVNESAGRPTGKAASGKGNRYLARVLGEAAVSAARTDTFLGERYRRIARRRGKKRAIVAIGRSNLVIIWALLSDTDAQFIDLGPDYYATRNNPERRARHHIRELQALGYSVTLNPAA

SEQ ID NO: 63786 - protein, 399 aa, unidentified
MINGHDQFAVFLGLDVGKGEHHAVAQSRPGKKLLDRALPNDEAKLRELYRRLRKHGPVLLVVDQPATIGALPVAVALDEGITVAYLPGLAMRRIADLHPGSAKTDARDAAVIADAARTMPHTLRALKLDDERIAELTVLSGFDDDLAQQITATSNRIRGLLTQIHPALERVLGSRMDHPAVLDLLETWPIPADLTKAGKSKVRSRLLKRAPRIGARLTEEIFAAMAAQTVVVTGTNAAAVVLPRLAAQLASLRAQRAEVAEKVEEVVAAHPLSKVLTTMPGVGVRTCARLLTEVVGKGFPTAGHLASYAGLAPVTRRSGSSIRGEHPPRGGNKVLKRALFLSAFAALSDPVSRAYYDRKIAQHKRHNEALIALARRRCDVLYAMLRDGKPYLQPPATAA

SEQ ID NO: 63787 - protein, 375 aa, unidentified
MAAQTIRNNKSRKASPAPPENHSGSKAQIIHLGIDVHLRQYVVCRKLDGATPQPAQRFKPAEFIAWARKQLVLAGRVVCCYEAGPLGYTLQRELAAAGITCHVVRPQDWDKHGSKVKTDGRDARELAEHLARYEAGNKHALAVVRVPEAAQEQKRALSRQRGSFVKEVKRLAAMGRSHAMSQGHELSGRWWRKSTWPKCSAKLPPWLRELIEPLRQMLVQMEVFVSERTKQVEAMAAPAQQRPKGLGALTEQIIAHEVIDWSRFNNRRQVSSYTGLCPSEHSSGGSRRQGHINKHGNPRLRHALVEAVWRLIRLQSGWKRLEKLHTRLRNQSTRAASAKVGRKGVVALARELAVDLWRLNTGRCSLAELGLIAAA

SEQ ID NO: 63788 - protein, 313 aa, unidentified
MAETVVTAGIDVSKEWLDCAVWPGKAELRVERNAVGFDQLAAWLVEHRVSRVGLEASGGYETVVMDALQARGFAVIRFNAKRIRMFAKAKGRLAKNDRADARVIAQATLVLDENTPPERRRDLDPLVEHLAYRRQLRDWLGDCANQLEHLRDASLRRQILVRQVGLNKALAALDAKLAKLVVAHKDWHPLEQRLRKVPGVGPVLAQTLIALLPELGQVSRRAIASLVGVAPFDDDSGKRAGERHVTGGRDAVREVLYMAAVAARRWNPVIAAFAKRLVGKKPKVIIVACMRKLLTILNAMVRDGQDWNPGAAA

SEQ ID NO: 63789 - protein, 341 aa, unidentified
MEGDMKYCGIDLHSNNSVVVVIDEADRVLYSRRHPNDLTQILAALEMHRAELSGVVVESTFNWYWLVDGLQEARYRVHLANTTAIKQYDGLKHRGDESDARHLAHVLRLGLLPQGYIMPKAARAVRDLARKRMQLVQQRTTQILSIENSLSRHTGARISSNSIKRLQEADLSKMQLGNMQALGVKANVAVMQALQVQIDSLEKVLAQYCRAEADYRLLKTVDGIGDVLATVILLETGAIERFADVGNYASYCRCVGSAHMSNSKKKGEGNTKNGNRYLAWAFVEAANFAVRYCEPARRFYQRKKAKRNTTVAIKAVAHKLARACYHMLKTKEAFSVQRCFA

SEQ ID NO: 63790 - protein, 361 aa, unidentified
MAAIVMLGWTAPASLVPGCDVMQRSQRSRPTTIIRIGLDTAKHVFQVHGVDENEQTVLRRQLRRSEMGKFFNRLAPTRIGLEACGASHYWARLLRGLRHEVVLLPPQYIKPYVKRGKNDANDAEAICEAMSRPAMRFVPIKSVESQSELMLLGVRDLLIKQRTAVINTIRGYAAEFGVIAAKGPVKVAELLPCACGGGERAGVGAGHAQVAGRSARFKLIETRLMALHRENPLSQCLASQPGIGPIGAVSFALRVTDPKSFHSGRHFAAWLGLTPKDHSSGGRRRQGRISRQGNEALRKLVVLGATAVIRFARPGHASPWLLNLLARKPKKLAAVALANKMAPTLWAMMVSGEVYRRPLPA

SEQ ID NO: 63791 - protein, 415 aa, unidentified
MNAISVGIDVSKGHSMVAAIRFPGEVVWKPRDVLHTASALERLAYDIKALGYNGVEVRVVMEATGRYHEPVAQELHEVGNFVSVVNPKLTKDFKNNTLRKNKNDKADARKMARYGLKFWDDLREYTPVEAARAKLKQFSRQYNLYSKIKVQLKNNLIAMLDQVFPGANELFTSPAKADGREKWVDFVTTFWHCECIADMSEAAFIERYRKWCKRLHYHFSERKAADLWICSLGHVTTLPKNANTKMLITEAAKQLTSISRTVEIYRAEMLRLAQMMPEYDVVMSIYGVGPTVGPQLMGEIGDVRDFASRKALVAFAGVDPGDSSSGKHVSKSDKTSKSGSPLLRKVLFQAVKTYVTKMPANEPVYQFYAKKRAEGKKFYVCTTACANKFLRIYYARVKEHLDKVLPEEDRFPCQG

SEQ ID NO: 63792 - protein, 345 aa, unidentified
MSEFYEGRQFVSMDLHRRRSMLVRMTEFGEHLETVRILNDRDSLAEVMSRAGESPEVVLEATYGWYWAVDALAELGATVHLAHPLGVKAFSYRRVKNDQRDAFDLADLLRMGRLPHAWIAPPATRELRELVRHRAKLVAMRSQCKAHVHAVLAKGGIWVPMTDLFGVEGNLLLDKVTMPAPYRERIASLRRFIEGFDAEIDLFTGLVQRRLAHDAGYTAIQQIPGIGPVLAAVFVAEIGDVHRFAGPAQLTCWAGLTPSHHESDTTVHRGRITKQGSRLVRWAAIESVKILPGTSRIGAIREQVAHRRGNRNIGAVAAARRQLELVFYGLRDHHVRALHRSPRAA

SEQ ID NO: 63793 - protein, 414 aa, unidentified
MFAVGVDVSNGRSTVAVLGAKRKVVMRPFEVPHTSDGFAKLAERLRALNGEIRIVMEHTGRYYESFAMSMYRAGFFVSAVNPLAIKDYREGISIRKVKTDKADALKIAQFAIDKWEILPQYTPMDTIRYDLKTLNRQFQLSSKTKTALINNLIALLEQSYPGANRYFDSPVRPDGSQKWVDFVDTFWHVDCVTSVSQKAFVEQYQKWCKHHGYNFSEAKAVKIYEETRQKFPLVPKSETCKLLVREAVAQLNTVSRTVETYRAEMDRLASQLPEYETVMAMTGVGKSMGPQLMAEIGDIRRFAHQKSLVGFAGTDPIKDDSGDKISDSKPSSKRGSPYLRKTLFIIMTILLQLQPPDDPVYQFLNKKRSEGKKYYVYMTAGMTKFLRIYYGKVRDCLKEKGLWEQPLSEEVSPG

SEQ ID NO: 63794 - protein, 407 aa, unidentified
MRYYIGVDWADEEDAVWVVNDAGDKMLSRRFAHTVAARSEWARWLRERQAEGIELWAAIERPHGRIVDFLLDHGVVVYPINPKSLDRARDRFRVGGSKSDPFDAKVLALFLRSDHLQLRPLRPNSEAAQELQGLTRDYRRQVHLQTRLLNQLTATLKEYYPRALELGEDLTAGWAQTFLARYPTPAAAAALTEPDWRAFAHAHRLSPTRTAALWQTLQQPQLPLPAHVVRLKARLLQALLRELAPTLATIAEYRQAIDDFFATMPTAEIARSLPVGKSGTTVPTVWAELGDHADRWASFRHLQAYAGSVPETDCSGKHHVVKFRFACNTTLRDAMHQLAFLSLPHSLWARAYYDRYRERGHTHHQALRALGAKWLKIIFVLWKRQVPYSETHHLATMARQHLHQTAA

SEQ ID NO: 63795 - protein, 317 aa, unidentified
MVDNSIVCAGIDIGKWKLDVAVCGVRAALQADNTPVGHEKLITWLRRHKVERVGVEATGGYEQAVVRTLRREGFVVVVLQPIQVRAYAKFRLKLAKNDKIDAGLIAACVAATDDIRAAPDPRFEAFAAAQTLIDQLTDDIVLYKTRRESAHDEHSRAFWEREVAARKVQVRGARKTLSAEMRAHADLAAKLDLITSVEGIAEKTAIAILIRMPEIGTLSREQVAALAGLAPYDDDSGRRAGSRHIQGGRTRLRTSLYAAALPAAFFWNPQLTIFYKRLRANGKTHKMALVACARKLLIFVNTVVARATPWQPKAAAS

SEQ ID NO: 63796 - protein, 409 aa, unidentified
MEPIVERGCGIDVGQATVVACLLVGRAHEKPRQEVRTFLTFTPDLEALRDWLLAAGCTHVGMESTGVYWKPVYAVLEGHFELIVGNAQHIRNVPGRKTDVKDSEWLAELVRHGLIARSFVPPPPIRELRDLVRYRRRLVESRSAERNRLLKLLESANLKLASVASNVFGVSGMRMLHAILEGVSTPAQMAQLAQRRLRSKIPALERALVGRIEAHHRLLLDLQLRRLEQLEVEITALDQLIDQRLEPYRGWHTLLTEIPGVDRVVAAVIIAELGVDMSVFRSVHHLAAWAGVAPGNHESAGKRKSGRTTRGNLHLKTALVEAATAAARTSGYLKDKFYRLKARRGYKRAALAVAHKILVAAYHMLASGVGYHDLGEGYLDRVGHQHVTRNLVRRLERLGYHVQIERKAA

SEQ ID NO: 63797 - protein, 391 aa, unidentified
MIYIGIDVAKDKHDCFITNSDSEVLFKAFTIFNNLDGFNDLYQKIESVMDDVTKVKVGLEATGHYSYNLLGYLIDKGLPTYVINPLHTNLYRKSLSLRQTKTDKVDARTIASMLMSDVNLKSYSDTSYHNEELKSLTRYRFDKVKERAKLKTSVSRLVCILFPELEKLVPTLHMASVYALLSEFPSAKHVATAHLTRLTNLLSKYSKGRYGKDTAITFRDSARASIGSNMPAKSLELKHTIKLIQELDSEIDEIENEIKIIMDEINSPILSIPGINYRMGAMIIAEIGDFNRFASPDKILAYAGFSPSTYQSGQLDGAYAHMEKRGSRYLRYALYNATKYVCHWDPTFAAYLAKKRAEGKHYNVAISHAVKKLVRVIYHLEKTKQQYIKAA

SEQ ID NO: 63798 - protein, 421 aa, unidentified
MEETGELAELVERVAALDIGKAALTACIRVPHEDKPGRRCQEVREYATTTRALLALADRLRCQGVTLVVMEATSDYWKPPYYLLEAEGFECWLLNARHVKNAPGRPKTDKLDAVWLAKVAERGMCAPSLVHPKPVRQLRALTRYRRTLIRERAREKQRLEKILEDAQIKLSAVVSDLFGVSGRAMIEALVAGERSPWALARLARGTLRNKTKILEDALTGHFDDHHGFLCQMMLDRIDGLSAQIGQLDARVEEAIAPFARQVTQLDEIAGVGTTSAQELIAEIGADMSRFPTAGHLVSWAKFAPIENSSAGKKKGGSTGKGNPWIGGTLGEIVLGASRTHTFLAERYRRIARRRGKKRAIVATGNTVLTIAYHLLSDPDARYTDLGPGFYDSKAGRDRQARNLIRQLEHLTGKKVALNEAA

SEQ ID NO: 63799 - protein, 1021 aa, unidentified
MAVMIGIDPHKGSHTAVAIGAGEEPLGTLRVRACPAQAQELVAWAVAWPERSWAVEGASGLGHLLAQQLVAAGERVLDVPPKLAARVRLLEAGDTNKNDPNDALSVAVAALRSKAPRQVQAEDHAAVLKVWAKRHRDLARARNQVACRLHAVLCELVPGGIRKEITAAQAARILEQVTPSGAVEAARCELAAAFLGDLRRLDAQLRDTKKKLAAAVKASATTATKVFGVGPVIAGTVIGDIASIWRFASRHHFAAYNGTAPVEVSSGDRKTHRLSLRGNRRINHAIHMAAITQIRHRHSEGRAYYDKKVAEGKTHKEALRCLKRRISDALYARLLADARQAAAACAKGPGGQPGNDSASSAASSHPARQLFGQATPRTQHHDTARHHGRLTVEADFKENPCNHLTATTKRTRSAHAQDRGDCRGRREIRTARCNKGEPMRTMRFAAAAAASFLVLAGAGTAMAQPAASQPVAGTVVTVGSPSSPFSQNKQNEPAVAIDAHDPAVVVAGSNDNIDMEACNAGDPTTCPFTPGVGVSGVYFSFDGGHSWAQPTYSGWSARDCVGPAACQAHVGPIGTLPHYFESGLVSDGDPGVAFGPRPGANGTFSWANGSRLYYSNLTSNFGTTKRDETIKGFEGIAVSRADNLRAAAAGDASAWMDPVVISKQSSTTFSDKEQIWADNTQTSPFFGNVYVCWADFRSNSHGQALPTPLIVARSTDGGSSWVQKQVGPATNNGVNGQPDGCTVRTDSHGNLYVFGVGKRGGGSFQMMYKSTDGGAHFTGPTLLATAVDPGVIDPVIGRPVMDGVAGARNDLAFAPSVDIANGAPTGAGATNQIVLTWADGAPGLNNEQLLLTTSTNGGASFTAPTAVPLATGDRPYYTAPAISPNGTDAYITYNAFTTPFRNDTSSPRGLVGVILHADVTGGTIGTFGTLARGAVGDPRASSQNDLTAEFLGDYVYTAATRAGAVGVWNDVRNAADCPALDAWRLSLRTGTSVTKPAPQADCPATFGNSDIFGAAVSDPTP

SEQ ID NO: 63800 - protein, 465 aa, unidentified
MSSKRGTLCLSTANEAVRFGRDAYSDAVRPGLTIRPAQDRSQRADGEEGVMDLMDWVACVGIDWADQQHAYAVREVGGGEYEGSMGSDPESVHEWVRQLRERYPEGWIVVGLEQSRGPLLYALACYDFLILVPINPRAASSYRDSLRLSGAKDDPVDAALIRDFVAGHLSKLRVWKPDAAITRKLRLLCESRRKFVDRRTAFTHELSATLKSYFPQALQWFGAQTSALLRRVLERWPTLPQLRRARREDILGVIRKNSRKKASAIDELLVQIGSAVPLTEDEAIVEVSAILAQSLVPLIDQAHAAVRRYDSLIAELWTKHPDRALFDSFPGGGPVMAPRLAVGFGNDRSRYADASELQKYSGIAPVIEASGKQRWVHCRWQCPKFLRQTFHEFAECSIPHCGWARAFYHQQRERGAGHHEAIRALAFRWIRILFRCWKENTPYDEERYLQALRRRGSALVDRIAA

SEQ ID NO: 63801 - protein, 354 aa, unidentified
MLIIGCDFHTRYQQIAMAREGTAELLLERRLDHESGEAHAFYRNLQSSHEPVLVGIEATGPIHWFERLLTELGHQLWIGDSAKIRASEVRKQKTDERDAALILDLLLAKRFPKIWVPTPAERDLRQLLWHRHKLVCLRTMRGNQLHALALSQGLCRKKKLFTKKGRAELASLALAPWARRRREELLKLLEQVDAPIAELDRAVLEEAERREDAVLLMTHPGIGPVTSLAFVLAIGPVTRFCCSRKLVSYLGLNPTEESSGGRRRLGGISKQGNCMVRWLLIEAVYPAVRKDPALRQDYQRLKFRRGHAVAKVAIARKLAVRMYWMLRSGAAYAQLVRRQGSPGATLVEATPSLG

SEQ ID NO: 63802 - protein, 336 aa, unidentified
MNGSTGRWVGIDVAKSKLDVALLDERGKVKNHVFANDAKGHLALTEWLSQRGCSPEHTRVCMEATGCYSETVATALADADWKVSVVNPARVKGFAQGELLRNKTDRADAALLARFGQAMQPEPWVAPPLEVRQLRALVDRLQSLKEMHQQEANRLEAAMNQVGMRESIESHMTWLQASIKQLERQIEDHIDGHPGLREDARLITSIPGVGNTTAAKVMAYLGDTRRFKNAKALAAFIGVTPRLKLSGSSVRGRSMISRSGHAEIRRSLYMPALVALKHNPIIKTFGERLKAGGLAPKAVVAASMHKLVHLIYGILKSGRPFNPNFLVASLDMQDGI

SEQ ID NO: 63803 - protein, 339 aa, unidentified
MRLYAAIDLHSNNSVLVILDEEDKIVYERRHPNELPVILAQLAPYHEQIQAIAVESTFNWYWLVDGLMDAGYAVKLVNTAAVKVYEGLKYTGDEHDARHLAHLLRLGVLPTGHIHPKEDRAIRDLLRKRSQLVRYRTMQILSIQNLVIRNSGKRISTDGVRNLSDETISQFCGGDAVLALAIKSNLKLLLCLDEQIAEVQEVVLKQAKLKPQFKKLLTVDGIWNILGMTIMYEAGDMERFKKVGHFASYARCVGSSRWSNGKKKGEGNRKNGNKFLAWAFIEAAHYAVRYNERIRSFYQKKRDKTNKIVAAKAVAHKLARACYHVLKEQEPFDITRAFA

SEQ ID NO: 63804 - protein, 320 aa, unidentified
MKQATYVGVDVSKKQLDVAIRPLGELLGVSNDRRGIAQLVKRLKKLQPVCIAIDATGGLEKELAYALAAENLPVAVVNPRQVSNFAKSTGQRAKTDAIDAAVLAHFAEVMKPEVRPLPDAASRELSALVTRHRQLVEMMTAESNRRDLASKAVRKLINSLLRSLKDQLAVVDREIRKAISASETWRRKAELLRSVPGVGKVTTATLLAGLPELGELDRRQIAALVGVAPFNRGSGTWKGKRMIAGGRGWIRSVLYMSTVVAVRRNPILKEFYERLRARGKPAKQALTACMRKLLVILNAMLRRQTHWSAPNPLLSLRVAG

SEQ ID NO: 63805 - protein, 412 aa, unidentified
MDTLIERCCGLDVHKDSVSACVRLPGPKRARRQERARFATTTSGLLALREWLQAHGVSHVAMEATGVYWKPVWYLLEADFELLLCNAQHVKRVPGRKTDVSDAQWLAQLLEHGLLRSSFVPPLPIRELRDLTRLRSSFVQERTRSSQRLDKLLQDAGIKLSSVASSLLGASSRAMLEALVAGSRDPQALAELAKGRLRAKLPALREALEGRFSDHHGLLIGQLLNHLDHLEQTISALSEEIESRLAPFARELELLQTIPGVGRCVAEVVIAELGTDMSRFGSHRELASWAKLCPGTKESAGKRRSAGTGKGPVWLRSMLVQAANASLRSRDSYLSAQYLRLRARRGHKQAIVAVAHSILVSIYYMLLRGEPYHELGPTHLQRYDREAQRRHHLRQLERLGLRVSVEPLAEAA

SEQ ID NO: 63806 - protein, 352 aa, unidentified
MDRYIGLDGHSQSCTIRVVTATGKDVGRQVVETNGAALLQAIRSIPGSRHLCLEEGAQSSWLYELLRNEVDEIVVSIPERRVGYKDDSRDALDLAEGLRTGAIKRRVYKKCGPYSELRAAVRTYTILTRDVVRAKNRLKALYLSQAVRTPGGEVYQADKHQDWERKLPPPQRESARVLYQQVDSLVKLQSGAETRLIEASQAHKIVKLLSTAPAIGPIRSAQIVAAVVTPHRFRTSRQFWSYCGLAVVTRSSSDWIPAVGGWVRSKVYQTRGLNRNRQPTLKAVFKGAAHLIATRMTSHPLHASYKKLIAGGLKPTVAEVTLARRLAATVLAMWKHEEVYDPAKLRPNNTHA

SEQ ID NO: 63807 - protein, 363 aa, unidentified
MMFKAWVEDIAEKQGKTAVIPGMEPTGHYWFALGKFLQDSGMKPVHVNPHHVKKSKELDDNNPNKNDRKDPKTIAALVNEGRFSYPYIPTGIYAEIRSLSNLRFQTQEELTRIKNRIARWFAIYFPEYKDVYGDLMAVSGRMILKEAPLPEDIRILGVNGVNQIWRNAKLRGTGMKRAKILVSAAEHSVGSKEAPEAARIELKNLLNDMDVYVSRMEELLQTIEEKLKTIPYVDKLMEIKGIGLITVSGFIAEVGDIGRFDNPKQLQKLAGYAIVANDSGKHNGESRISYRGRKRLRYVLYEAAISLVGKNAEFKEIHEYYRTRKENPLKKMQSVVAVACKIIRVFYTILTKGVDYDANETDE

SEQ ID NO: 63808 - protein, 323 aa, unidentified
MYKFIGIDISKQTFDVCFPSGKHQQYPNQKGGFQKFLKGVKKEDSVIVVMEASGPYYVRLATFLYEEGMRVCVENPLKIKRFSQMNLNRAKTDKKDAQVIRDYGDKMGDQLKRWAPDPKHIVELRQLNTSLSLLSKQIGQTSRQLEAFQDGGHISKEVKKSLKSIPAKLKREKEKLEKEMLSIAQDQYKDTLKSLTSIPGIGSKTAIMLITLSSNFEKFEHYKQLVAYIGFSPRIYQSGTSVKGRGHICKMGNSQVRKLLYLCTWNAKFKNKACVQMYKRLKAKGKPERVIKVALANKLIKQCFAIGKNKTIYDENYVSKICF

SEQ ID NO: 63809 - protein, 274 aa, unidentified
MEKITRIGVDLAKNLIVVHGVDSMERVAVRKAIPRQKFLEWFANLEPCLVAMEACSAAHYWGRKLRALGHEVRLIAPQFAAAYRKGGKHVKNDRLDAEAICEAASRPHMRFVALKTADQQNVLVLHRMRSGFVEERTALVNRLRGELFEFGVFLPQGIDAFRAHFIEALEDGTTELDGIARAALLAGWHHIHALDEQIAWCDSQIAARVKHDANAQRLMAIVGIGPLTASAAVATVGDARVFRNGRQFSAWLGSVPKQASSGGKTRLGHITKSV

SEQ ID NO: 63810 - protein, 356 aa, unidentified
MQNDRQSSERVILGVDTHLDIHVGAVISQAGKLPGTHIIQTNQAGYLELLDWASSFGILEQAGIEGTGTYGAALTRFLIKNGVYVVEVNRPDRSKRRLQGKSDPLDAENAARTVLSGSSKAIPKMQSGACEALRIIGVARRSAVKARTQAINQLRALLVSAPQDVRDKLWKSKPHECVAACINNEMSEHSPLRIALYSTLRSLGKRWMALTEELNELDESLDKLTRKYASSLRSQFGVGPQTAATLLAVAGDNPERLKNEAALASLCGVNPLPASSGKTVRHRLNRGGSREANNALWTIALVRMRSDPRTRIYVDRRTGEGLSTKEILRCLKRYIVRELYPLILSDLAYANRPLLT

SEQ ID NO: 63811 - protein, 408 aa, unidentified
MKTLLRRCAGLDVHKVEIVACLRLVEKGKVARRVRRFPTTTQGLLELVEWLEGAGCSHVAMEATGVYWKPVWHILDGHFALILANAMHVKAVPGRKSDVNDATWLADLLAHGLIRASFVPPTPIQELRDLTRTRKQLTREIVQHVQRIQAVLEEANVKLSSVISDIMGPSGRRILTAIIAGETDAEKLAALGSERLGCGRAALSEALKGRIREHHRFLFAQHLRTIEQLEESVAAFDARIAGALAPFRDVVERLNEVPGLGRIAIETIIAEIGTDMSRFPTAGHLVSWAGLAPRLDESAGKRRSTRIRNGAPWLKPALVQAGWAATRKKNTYLQAQFLRLRSRRGPKKALIAVAASILTIVYHMLRDGTFYRDLGPEYFARRSPAKLAANLANRIRNLGYHVEISATT

SEQ ID NO: 63812 - protein, 326 aa, unidentified
MTNFNNYVGIDIAKKDFYACFDEQSESKKFNNTALGINAFIRHLSKNDFQNQNTVIGVESTGSYHLRLCLQCSSRGFQVKVINPLIVKKQNQTNLRRVKNDRKDASLIRYCLATGAGYVFSETSDTLLLKCLVRQRNSLVNIKFKNKRQQADVRYKEDCLKVRFNSVYQEISDILSQKIKDLEQQLKTFRPKEQKLLQTIPGVGPTTAVSFIAEVNDIKRFKQAKQLVAYVGLDSRVHQSGTSIHGKGYISKRGNKILRTRLYNATHVAVLHPNLFQNFFQKKRDEGKPYKVALVATMHKMVNVIYSVWINNKPFVDHTTNNQKED

SEQ ID NO: 63813 - protein, 409 aa, unidentified
MEAIVERCADLDVHQATVVACLNLGNKARPGKQVRTFGTMLADLEELRDWLKASGCSLVAMESTGVYWKPVYAVLEDHFDLIVGNAQHIKNVPGRKTDVKDCEWISDLARHGLIARSFVPPKPIRELRDLTRYRSKLVQAGSAERNRLLKLLESANIKLSGVASDPFGVSGWDMLKALVAGGRSPAEMAQLARGRMRRKLLELERALTGRLEEHHRFVLGVQMRRIEAIDADVAELDKRLDEKLKPYQRELRLLMQIPGVDWVIAAIIIAEIGIDMSVFVDAAHLSSWAAICPGSHESAGKRRSGRTRKGNVHLKTALVMAAKAAGKTRGTYLADKYHRLKGRRGALRAAVAIGHKILEAAYHMLATGRDYTDLGAGYLDQLNANRTTASLVRRLRELGFDVELTSKAA

SEQ ID NO: 63814 - protein, 408 aa, unidentified
MDIMHARCAGLDVHKQTVVACVRVAAASTARHEVRTFATTAAGLRALQEWLVAAGCTHAVLESTGVYWKPVWHRLEDSLTLVLANATAVRNLPGRKSDVSDAQWLADLLAHGLVRGSFVPPAPIQALRELTRTRKQLGREVTAHSQRIEKVLESADVKLATVLHPLLGVSGRAIVAALAAGETDPDRLVALAHPRLRAKRAALRAALPGHVRPHHRVLLCQHLRVVETLQATIAALDTAIGAALAPYRAAVEHLVTMPGVSTTAAQILVAEIGTDMSRFPSAGHLLSWAGLCPRQDASAGKHRSTRLRKGAPWLKPVLVQGAWAAVRGREGYLRAQFLRLKQRRGPMKAIVAVAASMLTAAYYILRDGDDYHDLGAEHFQRGDHARLVAGLTRRLHHLGYEVTLRPAA

SEQ ID NO: 63815 - protein, 312 aa, unidentified
MIEQCFGGIDVSQDRLDVLLLPQGTGFSVANDEAGWSTLIGRLRGLPVAAIGLEPSGGYERGVLRALLAAGLSVRRINPNRLRQFARARGALAKNDRIDARLIAEYVATMPTHVVRHDPAAARIAEIVTMRRQLCDEHVAIENQAAQLEDAMLRRLAKRRLARIETDIRLLDKRLTQMIAAEADLARRYARLTSMPGVGPVLAFTLIALLPELGRMSRKQIAALVGLAPYDFDSGKLRGHRSIYGGRMPVRNVLYMAALSACRYNPALKTFHNRLAAAGKKPKVILVAVMRKMITTLNAMLRDGAGWQPQAA

SEQ ID NO: 63816 - protein, 400 aa, unidentified
MRAVFGIDVSKASSEVAILVNGEKVHGYTMSNDALGFARLLGDLRTVHKPEIIFEATGVYSRRLQTFLEDNGYAYTRLNPLEAKKQLDSLRVRKTDQIDAEKLAQSQFVLNRKPTYVQEEVYQNLRALSRFYQNLTEDIVRAKNRLHKVLQVTFPELETILSTPSGQQYWNLVIDFPCKDFVLELSKDKLSEIIRQSTSKRIYDKRVTYLAEKLTALANQSYCAVKKTSPILEEVRYYGKELLRLSEQRQTVLDQMVELAQPLPEYDILLSIPGIAETTATSIIGELGDIRRFQSTNQINAFIGIDLRHYESGNFLAKEHITKRGNPYARKILFKCIHNIASASHTNPCHIADFYEKRKRQSQTTSTKPHTIASIHRLIRTMYYLITHNKLYDYTLTQNQ

SEQ ID NO: 63817 - protein, 488 aa, unidentified
MLASASATRRGRRQENDAPNAEYLMTPERSLFLEGAPMPQPILAIGVDPAKRLHRAVAVLFPDQVILDVALPNACDAIANLDDRLAELANQHGAELVYGLEDHRRYGRLFCQVLTERGRELRVVNPLWTSRQRAFYGQDKDDAIDGRSIAAVVLRRHHDLPLATDFGEVAQAVREAERSLQDLDKARTRLINRLHLQLSDTYTAAYEGFFGKLRSPLALRFFRHFPLPQDLVSHNVEMLASLLLDLAGGKVGPHKGGNRLIAMRSKAQAILETSAAMRASPRTLALELKAELIRQLCDELLANHVRIIRLERMLREQLLPVTKQTITTITGISTILAATIIGETGSITRFRSPAAFAVYNGTAPARNSTGGRDRHKARRDCNHRLKRAFYLAARAAVLHDPIAKAYHQSCKSRGLSYVEALKRVARRMSDVVYALLKSGKAYDRSTIEHAIERRREQAAHAARSHAKQSLVHSRPRKSNSPLSQQQVM

SEQ ID NO: 63818 - protein, 319 aa, unidentified
MTENRQKYTMIGIDVAKLKLDVAFNERLLLTVDNLEDGFKQILTQIARPKSVCFVLEATGGYEKRFVSFLLSKQLAVCVVNAKRVRDYAKAIGQHAKTDRIDAQVIRQYAEIIQPKPNEQRTEEAQKLEALIKRRDQLVRQRAIEKQHLEAVSDKESIRSIKKFIIAFDQEISRIETLIQKLITQNATLSKHRAQLGQVHGIGMVTVTTLLAQLPELGQLSNKQISALVGLAPFCRDSGGVKGKRMIWGGRALVRSTLYMATLSAVRYNKPIKIFYDRLLARGKLKKVVLVACMRKLLTILNAKVKNGTDWNPNYTFNS

SEQ ID NO: 63819 - protein, 407 aa, unidentified
MDKVNPRCAGLDVHKDSVWGCVRFGGEKSIEKFGTSSRELLRLGDWLASRGVTIVAMESTGVFWKPVWNLLEGRFELMLVNAQHVKQVPGRKTDVTDCDWISQLLEHGLLKASFVPDRPQRELRDLTRQRTQLLGDRARVVNRVQKTLEDANIKLASVATDITDKSGRAILNALVEGNLTPEQMAELVHKRMEPKKPALREALAGRVTPHHRFMLGQLLGQVDHQDRMIESFDARIEEVMSPLERESVKRLDEVPGFDVRTGQNLIAEIGTDMSRFPTAHHLASWAGMCPGNDQSAGKRRSGRTRRANRWLKAALTQAAWGASRTRRSYYSAQHRRLTTRRGVKRATIAVAHSLLVTTHCLLSNPRPYADLGAAYFEKQQTPQQQAQRLLQKLQRLGYTVELKRPAA

SEQ ID NO: 63820 - protein, 356 aa, unidentified
MVTGLKHQKEKRSMDHFAGLDVSVKETSVCIVDDTGRLVREAKVTSEPEALLAVLANPGYHFKRIGLEAGPLSQWLFSALAEAGLPVICVETRHMRAVLQAQINKTDRNDARGMAQMMRAGLYRPVHVKTLRSQKLRMLLTHRKLLQSKAIAIENDLRGTLRNFGLKVGIVGKVKFEARIKELVEDLPDLAVLVEPLLMVRRVLREQIGILHRRLLAIVRDDEVCRRLMTVPGVGPVVALTYRATVDVPARFKNSKAVGAVFGLTPSKYQSGEINRSGAISHCGDEMMRVMLYEAAQSMLTRTIRWSWLKAWAMKIARRRGMKKAIVALARRLAVIMHRIWVDGTEFRWTREEAAA

SEQ ID NO: 63821 - protein, 345 aa, unidentified
MQLQTIGIDLGKTLFHLVGLNQRGEVVVRKKFSRKQLLHFTANLQVKLIGMEACGGSHFLGRALREQGHEVRLMPAQYVKPYVKTNKSDYIDAEAIAEAVERPKMRFVPIKSDDQLDLQSLHRVRERWVMRRTAVINQIRGLLLERGITLRQGRRHVDEALPGILEDASAKLSGAVRLLLAQLKLELDQLQMRIDEADAMINKAAGENEACRRLVAIPGIGTVTATAIIAAIGNGAAFKKGRGFSAWLGIVPGEYTTGGKQKLLGISKRGNSYLRRLLVQGARAVLQQSAKQSSGLSAWLAQLTIRTHSNVAAVALANKLARMAWAVLAKDEPYRPPMLAAAATT

SEQ ID NO: 63822 - protein, 340 aa, unidentified
METKRHIGIDLHRNCFTACVRLENGRNYISEWQLEDLPRFTRKLRASDEVAVEMTGNTRFFHGAVAPHVARLVTVDPNQFKVISQSVKKTDPNDARNLALYLAKDLLPEVRMKEKREAQIASLTQTRDTLVKLRTTLKNKINNILAAHGINLAKEALSSEKALAGVLEMRFDEMVELELQVIVEQIRGLNRSIDKLEQTIKDRGQKLEGHRNLTSIKGIGNLGASILLSVIGDIDDFADEGKLAAYFGIVPRVQNSNETERSGRITKRGTKLGRTTLVQCALVAKRYSPYLARYYDRIKSRRGGGKAIIALARKFLGIIYRTLKNNWVFEDFPNFVLAEA

SEQ ID NO: 63823 - protein, 350 aa, unidentified
MLIIGCDYHPSFQQIAFVDTETGELGERRLLHREEAEQFYRQRREQSIQARVGMEASGHARWFERLLHELQFELWIGNAAEIRTKRVRKQKTDRQDAQLLLRLMMEDRFPRIWVPDAENRDLRQLLWHRHRLVQMRTRVMNQLHVVALNEGLRRKKALWRPAGRKELESFALAPWASRRRQDLLDVLDQLTPKIQQLTRALEEEVEKRPVARCLRTHPGVGPLTALAFELVIGTPERFPCGKQVASYVGLVPSEESSGDRRRLGHISKQGNVLLRFLLVEAAQVTVRSQPEWRSRFFHLAMRRGRKIAKVAMARKLAVHLYWMWRQGWDYGQLQKLGSHAGEPGHRDGVQ

SEQ ID NO: 63824 - protein, 348 aa, unidentified
MAHFVGLDVSVKETSVCVVDDTGKVILEQKVPTEPADIITLLSSLGVSYGRIGIEAGPLSQWLVNALTVAELPVICVETRHMKALLTAQQINKTDRNDARGIAQMMRVGLFKPVHVKTLVAQEQRMLLTSRKLLQRKLLDLESDLRGTLRNFGLKVGVVSGGRYEVRVRELIAGFPRLAAIAEPLLKVRQVMRQQLAVLHKMLLDTVRDDPVCRRLMTAPGIGAVVALTYRATVDQPQRFVHSRAVGAHVGLTPKRYQSGEIDYDGGVSKCGDALLRTMLYEAAQVLLTHGSKWSWLKAWGVRVVQRRGMRRAIVAVARRLAVVLHRMWVDGSEFRWSKDSAAVPTAA

SEQ ID NO: 63825 - protein, 311 aa, unidentified
MRPMAGEAFVGIDISKAHLDLAWDGEDTVARSANDAASCAAVAAELKDATLVVVEATGGYELEIVRALQAARSPVAVVNPRRVRDFARASGRLAKTDRVDARVIAHFARAMRPSQTPQIEDGRMALAELVARRRQLIDMLVAEQNRIEHAGPSIAAAIRDHLAYLKDQLTGVDAAIAIQVRADPAVARRRDILESVPGIGGTTAAVLLAELPELGAIDDKKIAALVGVAPVAHDSGTLRGQRHIAGGRSSVRCALYMATLSAVRCNPAIKIFHRRLRDSGKKPKVALVAAMRKLIILVNTLVRRDQLWKPA

SEQ ID NO: 63826 - protein, 449 aa, unidentified
MSDRSGVSRGDRNRNARLARLREAVPLSNAIAGIDLADSKQMVVVTDHESRVLARRTFRRRAWELGVALDWAAARAAAAGFAGVTVAVEPTGHRWQVVGQLAGERGMSFVCVQPLMSAWARRAEDLTFDKTDDKDAVLIARLAGQLRCYLPEPADAIWGRLRHLGIRRARLVADQVAQVQQMRDLLECVWPAVLDAARQPFKSTTWHAALTVALARADGGDLGRVTRLGRRRFDAAVRRQVARWDAVHPWQKIINAVLAACADPAGVTEMRHGALERVLLLLADWRDTRARLADTEQRMVAVLGELGLTELVTSITGLSAVGAASILAETGDPARFTSGRALVKHAGLAPRQKSSGNYTGRTRTTGQGRPALRLAAWRAVWGALKSNPVYATRFAYLTSREHNKLSTGQAHAAIAAALLRHLHAVITTGQRWDPAIASGGRPNQTLIAA

SEQ ID NO: 63827 - protein, 339 aa, unidentified
MDHVAIDLGARKSQICVRSADGEIVEEKRLETWDIKGYLASRPKSRVIVETCAEAFGVAAAAKELGHDTRIVPATLVRTLGVGARRTKTDQRDARALSEASCRVDLPSVHIPKAQSRARKTFCGMRDSLVSARTKVINTVRGWLRGQGRRLGKGSSPTFAKRVRALCGADLPDYVERQLRVVETLTAEIGDADKALEHQAEQDEICRRLMTVPGVGPVTALRYVAAIDDIGRFATAHQVESYLGLVPGENSSSDRQQRLSITKAGPSALRWVLIQAAWALRRLCRQPAAVPLQLWAHQVELRRGKRIATVALARKLAGILYAIWRDGTEYDGRRGAKMI

SEQ ID NO: 63828 - protein, 351 aa, unidentified
MIIIGVDYHPSDQYIAFVDTETGEYGERRLNHSDGEAEKFYRELAARGISVRVGLEATGYSRWFERLLAELGIEVWIGNAAEIKTKRVRKQKTDREDARLLLRLLRENNFPRIWVPSRENRDLRQLLWHRHRMVQMRTRIMNQLQALAMKEGLRRKKTLWSDQGRAQLEKLSLGTWTSRRRKDLLELLDRMNPSIEELTAAVEQEAKKWPEVLRLMTHPGVGPLTALAFVLIIGTPERFQCGKQIGSYVGLIPEEDSSANHQRLGHITKQGSSLLRFLLGEAAQAAARCDADWRRRYMHLAVRRQRNIAKVAMARRLAVRLYWMWRNGWEYAQWVAFGSHAGQLGTGHGVQ

SEQ ID NO: 63829 - protein, 381 aa, unidentified
MKKDSIAKLQVTKSQIRRMAAKQRLTVGLDLGDRSSRYCILNEAGGKASEDELPTTKAGLDSLFGKMAVCRIALEVGTHSPWVSRHLAAMGHEVIVANPRKVRLITQSVKKNDRMDAEQLARLARVDPQLLGPIRHRGAEAQGDLAVIRARGELVDCRTALINTARGLAKPMGERLKSCDADYVKESLAEGLSEATQNAIRPLLKSVEEITRQIGAYDKKIQKIEKRYPETKVLKQVHGVGTLIALTFILTLEDAERFVHSRDVGPYLGLTRKLRDSGESQPELGISKAGDVLLRRLLVQAAHCILRDGAPDSDLKLWGLTKVQAGAGKKGSKRRKKRATVAVARKLAVLLHRLWVTGEVYDPQYNRKAVEAAKGRGKAAA

SEQ ID NO: 63830 - protein, 359 aa, unidentified
MLYAGIDYHKKYSQVEVIKSSGEVIWAGKVPTSKEGMMWWINKIYPHGTEEGKRDKIKTVIEASWGWERIYDLLENIEEIEEIKVAHCLKLRWIAESRIKTDKIDADKLAKLLKAGLIPEIYVPDRKDRERKEMIRYRLGLVRMRTIIKNKVHALLDKVGVSLPKVSDLFGKRGKKFLRELKIEGAYGKILCNYLDLIEGLDKKIKKAEEEVRELMKGNKEREIIKSVPGFGDITSAIVTLEIGNIERFSSPKKLISYAGLSPSTYSSGGRTYHGALIKQSNKWLRWAVIEASWVAQRESLWCRTYFASQVHKGKNVAIVGLGRKLLKIIWYLLKEKREYEERPVEKEKFDFPVALSNV

SEQ ID NO: 63831 - protein, 335 aa, unidentified
MQIYGIDLAKEKFDVSFFDLTSKKVSNQPSHKVVTNNLKGIGKFFKGLPSDAVLVAEHTGVYGDTLLKCCMDCNVKIAFVGGYVIHRYRATPDRAKTDVLDCALLRDFGERYPDKLKYKTFPEEALYELRQLARHREMLVEQRKQQITADRSEDCRPIRSLAVKRSMDRIKEMLDTEIAETEKEMLKVINGHESIHHNYELVKSVDGVGLITAVELLVKTENFTKITTARQYAAYAGTAPYEKSSGKMDKGAHISKIGNRRSKTLLYICAESARLHNKEIKLYYERRTLIDKKPRHYVLNAIANKLLRIIFTLVEKGEYYDANFIRQDPRVVKHN

SEQ ID NO: 63832 - protein, 323 aa, unidentified
MQGQKSPERSAISEVYVGIDVCKDWLDVYLHPIGQTLRVANTPEGLKTLHRTLKKSTVALVVMEPTAKFHRLAHRTLDAQGFAIAIVNPLRSRAFAEAIGQLAKTDRIDARVLALMGQTLEPRASAPAPEALEALQELLHARAAAIADQTALSNQRGASQTKFLKSELDRRLKSLGGHIERMDAEIERRIADDPALKRRYEIVMSIPGVGPIAARALVVGIPELGSCSGKAATLLAGLAPLACDSGDKAGERHIRGGRSFVRSSIYFAALTASRFNPQLREDYQRWIAAGKEAKVALTAVMRKIVVLANALVTEDRSWQPIHA

SEQ ID NO: 63833 - protein, 420 aa, unidentified
MEAISESYFKAFVGLDWADKKHDACIQRAGFSEREFACIPHRVDKIEEWALSLYQRFGGPVAIIVELTRGPVVYALQKYDFIEIVPVNPSTLARYRKLLHPSGAKDDPSDAELALDLVLKHPERFQTLKAQGPQLRELQLLVEHRRQLVADKVRLTNRLNAALKQYYPQCLDWFQRLDTVLFCSFLQRWPSLEKVQSADTKTLKKFFQEHRANRKEVQEQRLRGIRSARPLTVDKPLISAYARKVQVLAEQLEVSLRAIKQYDTEIESLAVGHPDYELFENLPGAGAALAPRLLVAFGEQRDRFQSADEIQMYVGVAPVTERSGQKKWVHWRTQCPRFLRQTFIEWASHSICYSYWAEVYYRQQREKGKGHQAAVRSLAYKWIRVLYRCWQSNTAYDESRYLKALNRRGSTLISGVAQNT

SEQ ID NO: 63834 - protein, 303 aa, unidentified
MDQIIRIGMDTSKHVFQLHGVNAAEQPVLRKKLRRKDMLEFFRKLPATVIAIEACGGSHHWARLLSTFGHEVKLIAAQLVKPYVKRGKNDAADAEALCEAMSRPTMRFVPAKSAEQQASLMLIGMRDRLVRNKTQLANSIRGYAAEFGLTAAKGMCKVELLLDRIAADETLPTLARDLFAAHAREYQQLQEELDGIEAKLMAWHRADECSRRLAQIPGVGPIGASLLMMKTPGPELFKSGRHFSAWIGLTPKDHSTAGRNRLGIITRAGDEVLRSTLVLGATSLLRRVREGRGRNTSPWLLAP

SEQ ID NO: 63835 - protein, 351 aa, unidentified
MTMVGGFDVHRKQITFDYVDDDGLVRVGEIRPATRTTLRHWLSEHCPAGDAEFALEGCTGWRYVVDELATAGVVAHLGDPAEIATLRGPKKRAKTDRADARLLRTLLLEGRFPESWIPPAHVVEVRTLGRLYCTLMDERRAWQQRIHAQLFHQGCPPIRALLSVAGRDALAQAELSAAGRQYVDTALRRIDELTVEIGPVRGQLVSFARRQVACQALQARQYGVGWLCSAIMWAEIGDARRFSSSDQLVRFAGLDVTVYSSADKRSPGHLSRQGSPELRWATFEAAKCAARHGSPDHAYYQRLATKHDGHNGKNPTLAVERKILRRSYHTLRELGDAALAMPVPEEQGVAA

SEQ ID NO: 63836 - protein, 452 aa, unidentified
MIAAVVERCAGIDVGKKFLKVCVMVGPLSEEPEFEIRKKVDCTYSGLEELREWLKAAGVTQAVMESTGPYWVPVFNVLESDVRVVLANPVEVKNRKGHKTDATDAWWLAHLLRHGMIRPSFIPEKATRDLRELTRRRKKLVGLVAQERNRVQKQLEYGNVKLSNELSDVFGLSGQLMLKALVDEQRTPEQIAELAQGSLKKKKKEIAEAVRGERLSATQKELIRSSMRHMVFLELEIEQLDARIGDLIKDSSQQEQYELLQTIPGIKREAAGNVLAETGPDMKQFPDAAHLSSWAGICPGNNESAGKHKSRHTTHGNPWFRATLIESAWSASRQDGSSFQARYRRLKPQIGHKRALVAVAHALVKAIHYVLANGEVYREAQPEVLNEIQRLRMIRHHTRRLRRLGCWLPSEDLAPLKEWYVSHCIPEIDQPLSRPGRKPKRAQPLDAKEDQQ

SEQ ID NO: 63837 - protein, 410 aa, unidentified
MEVLYPVCCALDVHQASVTACLRAPGDGPQRRQQVRTFGTTTPELLRLAGWLTAAGCTHVAMESTGIYWRPVYNILEGRFELSLVNAQHVKMVPGRKTDVRDSEWLAQLLELGLLRRSFVPPAAQRELRDLVRYRKRLIEERAREANRVQKVLETANIKLASVVTTVLGVSARAMLKALIAGEQAPEQLADLAQRRLRRKRAALGEALTGRVTAHHRFLLEHLLRHIEFLDGAIAACDRQVETLTAPHAEALTQLDTIPGVARRTAEVIAAELGCDMTRFPTAGHAASWTGLCPGNHESAGKRLSGRTRHANRTLRQALVESARGAVRKRDSYLAAQYRRLVKRRGDKKAIVAVAHSILVIAYHVLRDGQPYRELGGDYFERLNADRLTRYHTKRLAALGYTVTLTKDAA

SEQ ID NO: 63838 - protein, 349 aa, unidentified
MRFYTGEHSYYCGVDLHARTLYLCIVDAHGKKRLHKRVRSEPAAFLEAIAPYREGLVVGVECIFCWYWLADLCASEEIPFILGHALYMKAIHGAKAKNDQVDSHKLAVMLRGGSFPEAYVYPREMRATRDLLRRRLFFVRKRGELFAHIRNTFHQYNLPRPSGQLLYKKNREGLAQAFSDPVIRSTLEADLALADRYDTVIRELERRILAEVRVHDPETFERLLTTPGVGKVLALTLLYELHDITRFRSVQRFSSYCRLVKSQHTSDGKRTGGGGGSKIGNAHLKWAFSEAAVLFLKDNPRGQAHLQRLQRRHGKGKALSILAARIGRAVYFMLNHNQDFDTDRFYART

SEQ ID NO: 63839 - protein, 316 aa, unidentified
MAKPVEKITLGVDVAKDQLVVSNAQTEDTTNLPNQPAAIKAWLNMLHGLLRIAIEPTSHYHMDFVEAALARGAEVYLINPRQLAHYRQAVNVRNKTDPADARLLARYLEHEGALLRPFQPQDRRAQQLWALLKRRATAVQSRQQLQQSFSQVRISIRALLTQFQQLLLRLDQQIQQLIRELGWWPDYQRCLTIPGIGPANAAALVAAYHRGAFAGSNAFVAYLGLDIRLRESGKYKGKSKLTKQGEPELRRLLYCGAKPATTHQRFADYRQRQLAKGLSKIAARVALARKLARIAFTLMSRQQSFNKQGITYCTAP

SEQ ID NO: 63840 - protein, 364 aa, unidentified
MDVHLRSTTVCALDAETGEAVTRRFRGNPWGEVAEWMSGFPGPSLAAYESGYLGFAPQRELSGLGVDCVVAAVSKVPRSAADLSSKNDRNDAARMAKAILSHDVTPVWVPSPEIEGLRDLAAAHDAATARLAAAKQRLLAFLARRGYAYGGTTPAGNPRKYWTYDFLRWLDKVRPADDGGIRALAALRSEVEAAAETRDDLLAEYRAAVAAGPLSAEVEALQSIKGCGFALAAAFASEVGDFSRFRSGRQVTSYFGLAPKQRSSADSVRLGGISGAGDALVRRLAVEGSWSYVQANHQPKLMPKGSGVPLEIRMHGRKGSERLLRRREEMLARGMPQAKANAATAAELVRWLWALGTMCRESTE

SEQ ID NO: 63841 - protein, 402 aa, unidentified
MKSSSGHSAPESKSMQLMNYTDRKLFIGIDVHKKRWQVAVLCEGIMLCNASIAASADELISYLHKHYPGGDYQCVYECGAWGFTLCRQLWAAGMECMLVNPNDIPGTDRERRSKTDPIDARRMAKALESGMLHSVYVPTEKEQKQRSLIRYRKKLWADLVRAKNRLKSELKSQGIILPEKYDRAHWSHNFLTWIAGVAEKDTWLKETLMLMLEQVKLLRKLLLKTELQLRVMMRQECHQSQVQLLQSIPGIGPLTAALFLLEIGDVKRFKTFDQLNRFIGFCPDSNSSGEYETHTGISVRKHKSLRSHLVEAAWMAIRKDPAMLAEYQRLCKRMKGHKAAVRIARKLLRRIRAVLISQKMYVRGITGNLTAEQIDAPDLPAPKVKGRPKKGPAPAAGHHISC

SEQ ID NO: 63842 - protein, 344 aa, unidentified
MTTIDYIGFDIHKKTISFCAKAQDGHILDEGTIAARRDDLKAWAKGRARPWVGAMEATMFTGWIYDYLKPLAQELKVAHPPMLKAIAASKKKNDQVDARKIADLLRCDLLPECYMAPSPVRAMRRVLRYRNLVVRQATRMKNRIAGLLMETGTPYNKQRLHGKAYFGELLGSLRQMPDAVVELLKLSRGQLELFEGIQKRLLRELQERPELAARVERLQSIPGVGEILALTWALEIGEVSRFPSIGEACSYCGLTSAERNSAGVEQRGPISKQRNKHLQTILIEAAKLAPRYNPPLAAVHQRELQRGNRNRATLAVARKLVAYLMAVDKSGKPFQVRAGVGGPT

SEQ ID NO: 63843 - protein, 423 aa, unidentified
MNATSVTNNEGDFTPPAQLPDAWIGFDWGYSKHAYALRDRSGKQTQGTLEASPEQLHSWLAQLQPKYNNLALAIEGTPASVMAVLAQYPSITVYPINPASSERFRKAFVPSGAKDDLPDAQVLLDMVYTHADKFRAWEAPDQLTHKLNKLVQARREMVDRRTRTLQRLTSLLRDYYPQALELVHSLSGPLALEFLERWPDLISLKAARPGTIKTFYYKHNVRSAQLVEQRLKRIKEARALTTDEAIVSVAVLQVQELIAELAVFHKHIPKLDKAIEQTFQQHPDAHLFRDLPGAGKQMAPRLCAAFGTDRQCFPDAASFQKHAGVVPVIEKSGQQCWVHWRWNAPAFLRQSLVEWAGLSILWSAWAKRYYDKAKASKKKHSVILRALAAKWVRILWKCWTTQTPYNEELYLKALAEKNSPYAA

SEQ ID NO: 63844 - protein, 344 aa, unidentified
MEHFAGIDVSLEHSSVCVVDGVGKIVREAKVASEPEALVRFFRGLETGVTRIGLEAGPLSQWLHAGLVAAGFEVVLLETRHVKAALSAMVIKTDRKDARGIAQLLRMGWFRPVHAKSPGSQEVRALLVARKLLQAKLLDVEFSIRGILRGFGLKMGEVSKGRFAARVRELAAGHAMLERITEPMLRAREALRTEYARLHGEMLAIVKPDPVCRRLMTVPGVGALVAITFKSAVDDPGRFTRSRVVGAHFGLTPRKYQSGETDVTGAISRVGDGMVRMALYEAAHIMLGRVTRFSSLKRWALDVAKRRGLKRAKVALARKLATVLHRMWVDGTTFHWGKQAVAVV

SEQ ID NO: 63845 - protein, 312 aa, unidentified
MTHVCAAGVDVGRDWLDVGLAPSGRTFRIANAPAGVASLVARLRREGVGKVVLESIGGYGARLVRGLADAGFEVGVVDPKRIAALRTAEGRRAKTDRLDAGLIARFALLMQDAARPVPSAKALEIRALSTRRRQLVEMAAMEKTRLKQTLDEAVADSCRQMIALLAQERTRIEAQLQAQLLATHDGPARAALLQTIPGVGPAVGMTLLADLPELGSLDRKAVASLAGLAPHPNQSGTRTGQAHIGGGRPCVRAALYMAAVSAARTDKGFRREYLALRQAGKPAKVALVAIARKIVIAANGMLKSGQPWQKPA

SEQ ID NO: 63846 - protein, 364 aa, unidentified
MNKCHLNTELSSLEGTRSEFNRSTAAIKLGIDVHQDFYVVVKQEGGTNPKPAQRFQKEAFLHWVAKLTKEGAEMHAVYEACGFGFELQRQLTALGIHCYVVCPQKLDERNKRVKTDGVDAKALCLKLDRFVEGNRDALALVRVPTQAEEQKRAIHRQREQLVKARKRLEAQGRSLIVNHGIEPVNKWWKRRTFAALQVPAWMKELLQNTQPILLALEEKIRALTAQLQEAAISRQPRGLGLLSSVVIDREIGNWDRFKNRRRVSSYTGLCPGEYSSGNTRVQSCVTKHGNPRLRAALVETAWRLVRFQPEYRAVKKWRHLLAKGALATGAARKKAIVAVARQLAVDLWRIRTGRVAIETLGLIN

SEQ ID NO: 63847 - protein, 540 aa, unidentified
MATKCKSRKRKSKTRSKKFRLAVLGKPTGIIQPRVQQVGPEHFGVIAVDCAKDRSKWMLCDFYGKILVEPTIVEHQCSSLNAMKLLANEAIRKHDIKDTVACVEMTGTYHKIVFRHLKRAGYDTRLVHPFASSHYRLPEHGDLKTDDHDLAAIFRASINGFGLIEKEWDDVFGQLQILVRHRRDLVNKRSRLQCQIRHHLQRTLPGFANLFPNDDMWVQPLAVAVLRFIADHGGTHQAILDAGLPTLGSWLRERKYRFQGRTLDRIYSWAKQAVDGDELSSSLSRVWLELLDDWKQKMSQITAAEVDEASLLVKTPYILLLSHPGINVISAAELAGETGPIEHYASSKSITGRAGLFPSRYQSDETDRGGNLSRFRNARMRAAWLLVAANMVKCNIYWRGKSSRWKEQGHDGRDIRCRIANRLSRPIFQMVSGRKLYSHPSQLDRGYVLEKLMEFHRDRGTPPSQIVTDLRHASEQIPSSYHAAEATPLRAFHEKSKRSRRSEPKQLGSLLVAVLARLQCSDIESTPLEVPTADSDVGTR

SEQ ID NO: 63848 - protein, 499 aa, unidentified
MIEIPAVIERCAGIDIGKRELAVALVMGPADKDGEVTTRMFGTTVPELEKLKQWLVQEGCTSVAMESTGSYWIPVKNILEGSVEIVLVCPRKHKPERGDKTDFRDAKNLAHLHRHGLPTGSFLPDRNIVELRDLTRRRKKLLSNLAAEKNRIQKVLEVANVKIGNIVSDVFGVSGQEMVSALLSGEELEAEQVAQLAKRKLRQRIPELTEALERHQMNEHHRWLIQQSVEHAVLLDRQMEELEERIKQRPEPYREQYELLQTIPGIKEMTGASILAEIGPDMGQFETAKHLCSWSGICPGNNRSAGKNKHSHIKKGNKFLLAALAEAGWGAARKSGSIFQRKFHRWMKRLGKKKANVAIARSLLTVVYAILKEGRPYQAPDPRQMHEMERAKLIRHHGKRLRELGADDELISQMVAKLTTPPAICSSAVEKQTEPAVTTPRIRRISPAKVCRGALGFRARQTRPQVYSVVKDRAAGAPSQGRPTSKRAESTKSKKLKTE

SEQ ID NO: 63849 - protein, 310 aa, unidentified
MDIITVGIDVSKERLDVAVHPSGEAFVVERNGAGLERLAVRLRELTPDIVALEATGGFETIAAAALAAAELPVVVVNPAQIRAFAKAIGQRAKTDPIDAAVIARFAAATRPEPRPLPDEATRLLADLMARRRQIVEMMAAERQRERRVTVVRLRKSIARLIKALQKELNSLDADIDDTVRGSPAWRDKEDLLASVPGIGPVIARTLLAELPELGRLGRRQIAALAGLAPFTRQSGQWRGRSFIGGGRTVVRTALFLGAMVAMRHNPVLKAFFTRLVTAGKPKMVALIAVARKLLTTLNAILRDNRPWQSA

SEQ ID NO: 63850 - protein, 369 aa, unidentified
MNTTTFVGLDVHARSIKAVALDAMTGEVRSATFGYDAAEVAGWVSSVDPSAKCVYESGVTGFDLQKRLSSMGIDCVVGAVSKMIKPSADRRRKNDRNDAEFLARMLSVGNVVEVWVPDDECEAARDLVRALDDARDDLKRCKQRLSKFLLRHGHAFSETTPSGRRKGNWTAAHWAWIKSISFAEKADDDVLAYYIDATRRAMEDKARLERLVEAEASKPRWKRRVDSVRCLKGIDVMSAADLVFEAGEFSRFKNARSFAAWIGLTPSEHSSGESVRQGGITKAGNKHLRRVLVESAWHYLGCSPHSKDLAKGQAPDPGARRHAAKGVRRLVGRRAAMLERGVHKNKANVATARELACWCWAIGCMVENG

SEQ ID NO: 63851 - protein, 402 aa, unidentified
MMPTHPSTVVAGVDTHLATHHVAVLDHTTGALLGDLEIETSLTGYRQLLDFVTSFGTVALVGVEGTSSYGAGLSRFLTRAGIAVREVIRPKRAARRLHGKTDPLDAILAARTLLTGETLPLPKPGTGTVEGIRVLLTARESAVKARTQAIVQLKSLLVTAPDQVRDTYRRLTGKALHAKLAACRPHGPVDQSSTMTALRSLARRIRDLDDEINLLNPQLQTLVAQTAPGLLDLVGVGVISAAQLLVTVGDDPTRIHSKAAFAKLCGVAPIPASSGKTHRMRLNRGGDRRANRALHTIALARARIDPDTIAYLAKKQAEGKTRREAIRCLKRYISHLIITAIWTPPVVPPIDDLRPLRHAKGLTTTQAGHALGVWPARISGIERGTLRNDTLTTRYREWLTTA

SEQ ID NO: 63852 - protein, 370 aa, unidentified
MGNRSMFVGLDVHKETIDVSIAEGDRHGEVRHYGVIKSDLEPLDKVVRALRAPDRRLHFVYEAGPCGFGIHRHLTKRGEDCVVVSPSMIPKRSGDRVKTDRRDSQMLARLHRAGELRAIYIPDATDEAMRDLVRARADAVGVGTQAKSRLKAFLLRQGRRYPGREGWTLPYRRWLTDLSFPSAAQHIALQEYRDAIGETEQRIERLTEQLRQLAPTWRWAPVVAAFQALRGVSFITAVGLVAELGDLTRFRHPRELMAYLGLVPSEHTTGPRVRRGAITKAGNPHARHLLAEAAWAYQGIPRIGRQHAYRQEALPKVVCDIAWKAQLRLTTRFRRLVAKGKAKPKVATAIARELTGFIWAIAQEVSPAPQ

SEQ ID NO: 63853 - protein, 426 aa, unidentified
MNTTTNFAATIGLDWADQKHDLWIQPADGSKAEHVRLEQTPETLHEWVAKLRERFHNRPIALAVETSRGPVISALMAYDFIVLFPVNPKGLKSYRDAFSISGAKDDRTDAQLLEELVRLHPEKLRALEPDTELTRRLGGLVENRRHLVDERTRLVNQIHATLKTYYPMAEALLHGQMNTPMAADFLVRWPDLAALQTAQPKVVRSFFYKHNSRSAKKTEQRLAAIQKAKPLTTDSAIIVPARQLVLALASMLRPLHQAVARLDKQIQQAMDEHPDAPIFKSFPGAGPALAPRLLVAFGTNRDRFDHAEEVAQFYGIAPVVVQSGNSKTVHFRYRCPKFGRQTFHENAGCALKKEPWARCYYDQQKERNKGKHHQACRALAYKLVRIYFACWKQHKTYEPNRYLIALEKHASPLHRTLKNRTATYCE

SEQ ID NO: 63854 - protein, 345 aa, unidentified
MKIVGCDLHTRYQQIAMLDEETGELVERRLEHANGEAKQFYSQLTGPVRVGIEATGHTRWFERLLAELGHELWVGDAAQIRAAMVRKQKTDARDAAHLLHLLLEERFPRIWRPTAEQRDLRHLLWHRQKLVWMRNAVGNQLHALAMGEGICRKKQLFTKKGRVELQALKLDAWASRRREELLQMLDQLDASLQQFDEAVNQQAGANPAAVRLRTHPGVGPVTSLAFVLLVGPVARFQRSKQLVSYLGLNPCEHSSGGKQRLGAISKQGNPMLRGLLVEAGHTAARLDPELRQDYQRLRLRRGGSVAKVAIARKLAVRMYWMLRRQVNYTQLVRMQGSSRATLVQQ

SEQ ID NO: 63855 - protein, 383 aa, unidentified
MKKTQETHKREDSTKEAIMYTGFELSDKKWKLAFSNGSKVRHISTDARDLNELQVQIFRAKKRFGLNEDTRVMSCYEAGREGFWLHRYLLSIGIENLVVDSSSIEVKRRKRRVKTDRIDAEKLLGMLMRYHGGEKKAWSVVRVPSEEAEDGMNLGRELEVLKKERTMHSNRIKGLLIQQGIVIKRLNVKRFLSELEGCRTWDGKELSVDFKSRIVREHQRLKIVDEQMRGVKKERKKRVESGDKACYRQVAQLMKLQGIGPENSWDFVMEFFSWRDFRNRKQVGALAGLTPTPYDSGGSLREQGISKAGSGRIRTRSVESAWCWLRFQPQSKLSKWFNKRFAQGGKRMRRIGIVAVARKLLIALWRYLKDGVVPEGACLMKGI

SEQ ID NO: 63856 - protein, 349 aa, unidentified
MRTFTPPAGTRFYAGVDLHARAIFVVILDADGQVRFARNLPANPDAFLRAIAPFRDGLLVACECMHCWYWLADTCRDHHIAFALGHAWAMKAVHGCKTKCDRKDAEAIARLLKGGNFPPAYAYPKERRGLRDLLRARLRLVRQRAHLYGHVHTARRQANLPPVSNDVKYKCKRAGCTADIADPFVRRRVETHLALLEPLDTAIRRLEAEIEDAARLIFPAELAVLQSTPGVGLVLSLTILLEIDTIDRFESRQQFCSYARLCGAVQSSDNKRCGTGNARAGNAWPKWAFSEAAVLSAQKDERVGALLNRLASKLGKAKAYSALAHKLGRAFYHMLHTKEVFDVHRFVRH

SEQ ID NO: 63857 - protein, 345 aa, unidentified
MKIVGCDLHTRYQQVAMLDAETGELVERRLEHESGEARAFYAGLAAPVRVGIEATGHTRWFERMLGELGHELWIGDAAEIRASMVRKQKTDARDAAHVLDLLLSDRFPRIWRPSLEERDLRQLVWHRQKLVWMRNTVGNQLHALAMGEGVCRKKKLFTKKGRVELEGLKLGPWASHRRQELLTMLDQLDASMKEHNQAVAEQAELNPAAVLLMTHPGVGPVTSLAFVLTLGPVERFERSKQVVSYLGLNPREHSSGGRQRLGAISKQGNPMMRSLLVEAGHTAARLDAELRQDYQRLKLRRGSGVAKVAIARKLAVRMYWMLRSPANYAQLVRMQGSPRGTLVGQ

SEQ ID NO: 63858 - protein, 345 aa, unidentified
MVVLGADLHKRSHTVVVIDGTGRKLAEKTVSATDAGHLELRRWAAQWPERTWGLEDCRHLSRRLDAELVRLGEAVVRVPPKLMAGARQSSRQPGKSDPIDALAVARAVLREPDLPVATLDGADRQVRLLIDHREDLVGERTRHEQRLRWYLVELAIAEPAPRSLGRAVVQATLGAALAGRAEPVARFARDLLVRIIELSATIGALEHEIEGLVRTSAPTLLALPGCGALTAAKIIGEAAGISRFRSKEAFARHNGSAPVPVWSGNAVRHRLNRGGNRQLNVALHRIAITQIRLAGPGRAYLDHRPAAGDSRTEAIRALRRRISDEVFRRLRADEAAGSAGLAVAA

SEQ ID NO: 63859 - protein, 355 aa, unidentified
MDDKKYIGLDVHQATISVAVLDASGKLVMECVIATQAATILEFVGGLRGSLCLTLEEGTWAAWLYDLLRPHVAQLVVCSPRKNALLKEGNKSDRVDARKLAELLRAGLLSPVYHGENGVRRLKELARSYLALSKDLTRVMNRIKALYRSWAIPCSGQTVYTPRQRAAWLAKLPESGIRRRAERLYEQLDQLRQLRLQARQELVAEGQKQEAAKWLRQVPYIGPLRTALLIALLQTPQRFRTKRQLWAYCGLALRTRSSADYRLKAGQLQRSQKPPALRGLNENHNHELKNLFKATATVAVGGSGPFHEFYAALIAAGKKPAMARLTLARKIAAITLSVWKKGARFDPGQLKRQAT

SEQ ID NO: 63860 - protein, 366 aa, unidentified
MISKEYYIGMDVHKDTVQIAVFEEKGEEPIYERRMKNDSELLVKEALRFVKKGKTEAAYEAGCLGYVIQRAMENAGITCYVLPANKVAKKRSDRIKTDKRDARLIGRELRSGSIRAISVPDEADEATRDLLRCREDVNEDLRRMKQRLLKFLVRHGHIYTEGNNWTQKHWRWMDKTEFKREHEKAVYEEYRSQIRSHEERLGRLGHQIEEIAESPRYKAKVSRLRAFKGIDYIIALSILCEIGDFRRFPSAKAFMSYLGLVPSENSSGGKRNQGGITKAGNGHLRRLLIEGAWHYTKPPRVGKKLELRRRGCSAEMIENADRALHRLHKKYFKLIFKGGKHKNVAVTAVARELAGFIWAVQINNVA

SEQ ID NO: 63861 - protein, 351 aa, unidentified
MKTEQTAQPKLYIGIDIHKRSWKIHCATDLFSGKSFAMPPKPDVLRSYVEKHFSDYEVTTAYEAGCCGYYAHRNFESYGWHSLVVNPADIHRKGKERFTKTDKIDAQLIARELKDGRLDGIHVPEVEREQLRSLFRRRNDLVKDFRRIKSIIKMQLLYFGVPVPEEFDNDHWSHNFRDWLDSLEFDHCSARETLDSRMRSFRFIDKELRDVSTKIRAYCRKHYKKDYYLLRSIPGIGGIVASGIICELGDLRRFNSIKHLAGYVGLAPGVHQSGDNQKHTGITMRAHRLMRSYFIEASWQAIRTDPIMQAYYRKHVGKNVKSVIVKVARKLLSRTLAVIKTEIPYAIGVVE

SEQ ID NO: 63862 - protein, 407 aa, unidentified
MTLYVGDDWSEDHHDVHLMNEAGERLAARRLREGVEGITALHELMARHASEPGEVVIGIETERGPWVGALLAAGYRVYAVNPRSASRYRERHQLSGAKSDAGDAKLLADLVRTDRHNHREVAGDSDEAAAVRIFARAHQQLIWDRVRQTNRLRNVLRDYFPGALQALPSLAHGDAVGVLAIAPGPREAARLTLPQLRAALRRGGRQRNVGERADELRAAFRTEQLAVPVTVSRAFAATTKAAVAQIGEINRQIAALEAELTSHFEQHPDAAIYRSMPGLGVVLGARVLGEFGDDPERYESAKSRRNYAGTSPITVASGRKRTVRARFIRNRRLADAANQWALCSLRASPGCRDFYNRRRAAGDLHNQALRALGNRLVGYLHGCLRTRTPYDEVTAWAHRHDREQLAA

SEQ ID NO: 63863 - protein, 338 aa, unidentified
MYYTGIDLHKFTSFLTTVESDGKVVKKDNFKNIPQNFIQYFSSIPGQHLATVESTMSWYWLNDLLDSINIPMILAHAKYVKAIAYAKVKTDKVDSHTLAQLLRMNYIPVAHKISNQYRFLRDALRARLKIVQRHTSVTNSMHLILAKFNFDSPTQLQGIPKFQYEQLSELQDLLNQQISDIEKQLHPFLIPNQDIQRLLWIPGIGIMNAFTILLETDDINRFPDLKNFFSYSRLTPAARNSAGKSRQRASKDGNKFLKVAFSDAAIRAIQYYPVIRKYHSSLLRRKNKFVAKTIIAKEIAQIVFFVLKYKFDFNNKFKGQDLIHRKSLQWPRITSPGA

SEQ ID NO: 63864 - protein, 359 aa, unidentified
MKIVGCDFHPRWQQIAIFDAATGEVCEHKLLNGDGEAERFYRGLEAPALVGIEACGNSQWFIDLLGRLGHQVWVGDAARIRASYVRKQKTDRRDAGHILQLLLEKRFPRLWTATAAQRDLRQLLIHRHKLVEIRSRVKNGLQHLALNRGMQKQRALWTASGMAGLKNLPLEGWSLRRREDLLKLLAELDQQVRGLDEAVEETAAGHPEARLLMTQPGVGPVTALAFVLTIGDVGRFKHSGQVASYVGLIPREHSSGGKQRLGAITKQGNRFMRQLLVEAAQTANRLDEGFRRQYQARCHHKPKGVAKVATARKLAVRLYWMLKQNVGYPEIAFIESSSGGTLTGSKEVVTLNERSRIRQ

SEQ ID NO: 63865 - protein, 353 aa, unidentified
MSNDKYVAMDVHKASVVIGVRDSEGKMIGRAVVETKAQTLRDYVRGLSGTVHLTLEEGTQAAWLYDLLKPLVAECIVCDPRRNKLLESGNKSDDVDVEKLSELLYLGRLRAVYHGGQGTRALKELAQNYEALVKDNTRIKNRLKAIFRGRGISYQGSEVYDYEQRAQWLGQLSERGVRERASQLYEQLAQLEEWVARARLQMLRESRKQKAKKILEQIPTLGEISVAQLIATVDTPFRFRSKRQFWTYSGLAVVRHTSADYQFAQGELRRRTKPGPTRGLNRNYNRRLKRLFKSAALAGSSKGPFKPYYERLLARGLNPELAQVTLARKIAAVTLTLWKKGASFDQEKLVKPE

SEQ ID NO: 63866 - protein, 348 aa, unidentified
MRFYTKTHKHYCGIDLHARSMYLCILDCDGEILLHQNMKATPEAFLGAVAPYRDNLVVAVECIFTWYWLADLCAEEGIDFVLGHALYMKAIHGGKAKNDKIDAHKIAVLLRGGMLPQAYVYPKRMPATRDLLRRRNHLMRKRADLLAHIQNTASQYNLPPLGTRVDRKGERDSIPTHFPDPVVRRSIELDLSLIAHYDELLKTLEQELALMAKGHDAFSYHLLRSIPGVGRILTLVLLYEIENIDRFPRVNEFLSYARRVKAQKSSAGKIHGHSGKKIGNAHLKWAFSEAAVLFLRKNPDGQRFVERLARKHGKGKALSILAARLGRAVYVMLRRREPFNAQKFLAQT

SEQ ID NO: 63867 - protein, 364 aa, unidentified
MTIVAHAHPFVIGVDTHAKTHALSILATPSGEIIEEATFPTTRSGLARAVAWAGRRTGGDLAVLWVIECAATYGAQLARAVADTGYTAVEAARMNAKANRGIGKSDQLDARRIAAAVLPLEVDRMRQLRSDDAVRAGLRVLVTARELMTGERTANVNALLALLRMVDLGIDARKPRTRTQIGEVSHWRVRHEEVGIATARNEAVRLARRITALDSELAENIAATTALLAQSPAKVLLEKIGIGPVTAAVAMAAWSHDGRVRDEAAFASLAGVSPIPASSGNTVRHRLNRGGDRRLNRALHMAVVTRMAYDPTTRAYAERRTAEGLSKKEIRRVLKRYLARQIYRTLTAESRAAIAVPESAPSPA

SEQ ID NO: 63868 - protein, 389 aa, unidentified
MIYVGIDVAKDKHDCCILGSEADKLFPVFTIPNNKAGFDELYEKMFSVTDDKTKIKVGLEATGHYSLNLLGSLIDKGLPTCVINPLHTNLYRKGLSLRKTKTDKVDARSIAMMLMTNKTLKPYSDISYHNEELKSLTRYRFDKVQERAKLKSSVARLVNILFPELEKLVPSLHMASVYSLLSKLPGASYITECHLTHLKNLLETASKGHYGRDMAITLRNTAKDSIGSVIPAKSMELKHTIHLIKVMTEEIDEIEDSIKSIMDTCNSPIMTIPGISYRMGAMILAEMGDFTRFNYADQILAFAGLSPSTYQSGQLDSSYSHMEKRGSRYLRYALFNAAKFVCKWDENFGAYLSKKIGEGKHYNVAIGHATKKLVRTIYRMELTGEAYRR

SEQ ID NO: 63869 - protein, 334 aa, unidentified
MEQITTVGIDLAKNVFSLHGVDAAGKTVLRRTVRRDRLVEVVAALSPCLIGMEACSGAHEWGRRFQQQGHTVKLMAPKFVAPYRKSDKNDGNDAEAVCEAVGRPSMRFVPVKSAEQQALLTMHRVRQGFVVERTALINRLRGLLAEFGVVLPLRSVTVRRQAADAAEVLPELARRAIADLLEQLRLLDGRIDAYDTEIEAQARLSEPARRLMKIRGIGPTTALAIVATVGNAREFKNGRQFAAWIGLVPGQYSTGGKARLGHISKRGDAYLRNLLVQGARSVLQTAAAHQDRLSRWALELQERRGYYRTLVAIANKNARIAWALLAKNEQLHQH

SEQ ID NO: 63870 - protein, 577 aa, unidentified
MPPLRDGFANQKLWQRAPALAPALESEPQRDSAAKADKPPGAFLPAMEHGPGIDDCVDGGGLVLKKDKSPTPLERMCEFRHPGRVALNLMFDRTEMKPNQQEQHEKTPGRLSPVAWQQMNRKQRREWTRKMQAEEISLQVINPDAAGIDIGNEAHYVAVPPSRDNQSVRRFGCTTAELKDMAAWLKKYRIRTVAMQSTGVYWIAVYDLLEEAGFEVYLVNARETRNLPGRKSDVQESQWLMKLHTYGLLRNSFRPSQEVRMMRTYWRQRNDLIRSAGRHIQRIQKALTQMNLQLANVLSDVSGVTGQAIVKAILAGERNPWKLAEFRDKRVKASEEEIARSLEGNWQEDLLFLLKQEQDGYEFSLRQMAECDERLQQYLKQRKDRSAGASLPEERRKERLRKKKENKPRFDLRAELFRMTGTDLTRIDGIDVRTAATVISEAGWDMSKWRTEDHFVSWLRLCPDNKVSGDRVVGKGRLPTNNPLTVAFKMAASCLRQSNSYLGAQFRRLRTRLGPPVAIKAMAAKLARLVYRMLRYGMQFVDRGAEFYVARHRQREINSLRRRAANLGFQVTELTST

SEQ ID NO: 63871 - protein, 323 aa, unidentified
MSQPNLQCMDIDVAKLSLDIATTDTIEPFTVGNDEDGFAVITDKLKHTKINLILMEATGGLEAAIACKLQSEGYDVVVINPRQARDFARSMGYLAKTDKLDAAMLAQLALVIDRHPDRSRYKRHLPDEARAVLAAMVVRRRQLNHMLVAERNRLYPSHPQSRKSIDNIIDALQNELDRINEQMKQHMTAFFQEQARLIGSVKGVGDITVASLIAELPEQGKLNRREISALTGVAPLNRDSGKMRGKRTTFGGRAGVRATLNMAALVATQFNPAIKLFYQRLLAAGKPKKLALVACMRKLITILNTMLRKGEEWNASFQSQVIS

SEQ ID NO: 63872 - protein, 367 aa, unidentified
MSHRLPHPDTTFVGLDVHKSSITSAVLVPSADVAVVDRFYPDEASIRRFLSGLGDPGLVSVCYEAGPTGYHLARLLRRLGASCEVIAPSLIPVTAGARVKTDRRDARRLVELHRVGQLTPVRVPTEAEEAIRDLCRARADLVTDRTRARHRLLKFLLRHGIVFGDGAHWTMRHEAWLAKVSFEDQALTRTYARYRSVLAGVDAELAAIEADLRCYLETGPFAETVARLSAYRGMTELGALSLGAEVGDWRRFPRATSFMGFCGLTPSEYSSGERVRRGRITKTGNVHLRTALVESAWSYQHRPATGAVIARRQRRASPETITRAWSAQVHLCAKFRRLSTLKSSRNVVVAAVARELAGFLWAEMTAA

SEQ ID NO: 63873 - protein, 342 aa, unidentified
MYKIVIGVDIAKLKFDAASFSDGKYKHKTFANNEQGYDCFINWLLLLFANDKLLICMEATGAYSLPLAEFMVNQGYAVSVVNPAKIKAYAKSELSRTKTDKADSKLIARYAIMMQPPLWTPPPENIRILQALTRRVEHLLEMTQMERNRLETAPPTVVDSITTVITSLEAELKATRKAIRDHIDNDPDLKQRHDLLITIPSIAEASIPHLLTALSDHHGFTSAKQVVAFAGLAPAIRQSGQWSGKTHIAKNGEPTLRKALYMPALVAWRHNSPIRVFCERLKANGKNGKAIVCAAMRKLIHLAFAILKSGQPFNPTLPFNYYLHFRWQDGIYGLRATGYWLN

SEQ ID NO: 63874 - protein, 458 aa, unidentified
MQQPVEVHVEEHESIVERVAAVDVAKASGMVCLRTPHEMIPGRRVTKIWPVAATTAALVELGDHLRCERVTRVVLESTSDYWRPFYYLLEAAGLTVWLVNAAQAKNVPGRPKTDKIDAVWLAKLAERSMVTPSLVPTEPMRQVRDLARARFDLVEDRTRVKQRIEKLLEDALIKISSVLTDVLGVSGRAMIEALTAGQRNPKVLAELAKGRARRNRAALERALHGRFTEHHARLARLLLGQLDELTVRIDEVTGLLDTAIRALPTSTSTTPTATTGAGGATNAESSTALPAPAGYDGAIARLCAVPGGGPDSVRAVLGEIGLDMSVFGTAGRLCSWARVAPHTRQSGRHNARARTGKGNPYLKSALAQIATGAAKTDTFLGQRYRRLIKRMPKAKALVALQRSILVIFFHLLADPTAEFTDLGSDFYAKRIDRARRTTHLLRQLHALGYEVRLAELSA

SEQ ID NO: 63875 - protein, 423 aa, unidentified
MDKNDDSRLAEFRQLKREIRGSTQHLVVGIDVAKERHYAFFGTPAGKTLLHRLVFDNSKEGFEKLCFQTDILKTQHCLTKVVFGMEPTGDYHKPLGEYLIQKDHLVVLVGGSAVKNNRELLDGRWDRNDTKDAANVADLLTQGKCLFYEFASPPLQELRSLLSLQRRLKKQEQGYRVRTRNHLIAQYFPELDPYFGYSEGPAIVKWCLDPREITELPFEEFVRMVSSRNGGEKQRRRLQEIRQKAASSIGCEAHPSVAFEGRVLVEEVRHLQDLLRETQASIRVVCHHFPEYFFLLTIPGFGPDISAKVLEAIGNPHRFENHRQVLKLAGLDLSAERTGKKQDVTPVLSKRGKADLRYGLYQAAFVASTRNRQFMTYFTNKLKGREREKGIGTKMRVKFAAKMLVIAWTLMKKKEKFDPGCIA

SEQ ID NO: 63876 - protein, 346 aa, unidentified
MEHLYVGIDCGKKLSELFGFTDQGEVVVTGALGMYDLEPWRKKFSVLRSQYQLHVAFEVGPHYDWLYDLLTEYCAEVVVVNPANFALISHSQRKTDRIDAQLLAEGVRRGDLPAVHVPDKQTRADRRLVAFVHWHGQQLGAVKTKLRSLLQQHRLECPFTNILGKGGRRWLGEKMPEFDPQAQVFVKLLVEQAEWLVKQRCELDQRVEARAATYAQAKVLQTIPGFGPLVILATLSAIAGIPRFARPERLSSYFGVCGSVYQSGQTLRLGSLTKRGNVHVRWLLSQALHHLHRKDPRARRRYQRLRRKKPCGVARGAQVRWLTEIIWHMLTKNEAYRLGGKAKLAA

SEQ ID NO: 63877 - protein, 408 aa, unidentified
MEVLYPRCAGVDVHAKTVVACVRVASGATVTYEHRTVSTNTRGLLDLADWLTARAVTHVAMEATGVYWKPVWHVLEGHATLVLANAMHIRNIPGRKSDTNDATWISDLLALGLIRSSFVPPAPIQELRDLTRTRKQLVREIARHTQRLQKTLEDANVKLTEVISDILGTSGRAILTALVAGETDPARLADLTAGRLKATRAELVEALHGRVTAHHRFMLQLHLTQIATLDTAVADVEARVREALVPFRAAVSLLTTMPGVSDTTAAVIVAEIGDDMAPFPSAGHLLSWAGLCPRLDESAGKRRSTRTRQGAPWLKTTLVQSAWAASRKKHSYFHAQFLRLKSRRGPKKAILAVAASMLTDVYYMLRDGVEFHDLGDQYFAQHDKARLTKRLLERLRDLGVEVEVKKAA

SEQ ID NO: 63878 - protein, 350 aa, unidentified
MRRPKEKLIAGIDLHGNNVMIGVINQDGKRITHRKLECDLKQVTQFLEPLKPRLQSMAVESTFNWYWLLDGLRDKGYPIDLANPARIEQYNGIKHVDDKDDAFHLADLQRLNILPKAHVYDPEFRPVRDLLRRRTNLVHQRTALLLSFKSLYARTTGKALDLAEAKKMEPREAPKLYKHPANQLIAQVQAEHIQALDKSISRIENAVLACAREIPMYEKLLTIPGIGKILGMTITMEVGDIKRFKTDGDFASYCRVVDARRLSNGKCKADNNQKCGNKYLSWAFVEAANFARRYCEHCRRWYDRKKARTSTVLATKALACKLAKAAWHVMDREIDYDATRMFPELAGNQK

SEQ ID NO: 63879 - protein, 461 aa, unidentified
MKNKRVEKKPRQNRQTVAGLPTLRADVAGIDLGSEQHWVCAPALDGPGREVADFGGTTAELLRLAAWLKERRVESVAMESTGVYWIAPHEVLEGQGLHVLLVDTRHLAQVPGRDKKSDPSDCEWLQRLHSCGLLKGAFRPKEEVCMLRTLVRDKANLVAELGDWIRRMQKSLDQMNVRLHRAVSDVDGVTGMAILRAIVKGERDPEKLAELRDRRCRQSREEIAEQLRGHWREDHLFSLKQALTMYEAVEERIAAYDAEILRQLGAMQQQSQRASAVPPVKNSQKAKSIRKRGEEPKREALYRMGGVDLTSIDAIGVGTVEVLLSEYGPDLSRFETEHNFVSHLQLSPHKPTSAGKPLKKKRRHTASTRVAAALRMAATSLRHSQTALGAYYRHISRRIGGDVAVFATARKLATLLYRLLRWGQAYLDEGAEAFERRYEQNRLLALKARAKQLGYELVQAS

SEQ ID NO: 63880 - protein, 384 aa, unidentified
MNKHSMIFIGLDTHKEFHEVAYCEEQRGATAVHYGRIPSSKISLKKLIRQFESKYSGATLHVVYEAGPCGYWIYRLITSLGHCCYVVAPSLIPKKPGERVKTDRRDSLKLVRLLKSEDLTPIYVPEPEDEAVRDLSRARETAMKDLKEAKYQLKALLLRNNIRYEGTANWSQKHLRWLTELILPHPAQHIVLQEQLQTINERTRRLERLGNELTHHVHQWRYYPVVKAIQAMRGVRLLVAVGVVAELGDLQRFDHPRKLMAYLGLVPSEHSSGGKRHLGAITKCGNGRARRLLIEGAHSYRYPANVSTTLQMRQEGLPKDIVDIAWKAQLRLCKRYQRMSKKGKHYNLIITAIAREMAAYIWAIAKEVVLTPVNPKLRLSRVPA

SEQ ID NO: 63881 - protein, 424 aa, unidentified
MSRKKSSPAGLQALYARACGLDVHKKVIVACVRILDPKDGTVQSTLRKFGTMTADLMELRQWLAELRVTHVAMESTGVYWQPVFNLLESHFKTWVVNAQHIKKVPGRKTDMKDAEWIAQLLQCGLLRPSFVPDRQQRELRDLTRQQTKLVQQRNAVDNRIQKVLESANIKLGSVASDVLGVSGRKMIEALMAGEKDVTVLADLAQRQLRGKIPELQRALEGELTEHHRFLLRQLLGQYDFLEKEIAIVSERLGAVAPPSFRAAVEQLDAIAGVGERGARALLAETGTDMSRFPTHKHFASWAGRCPGNHESAGKRRSGKTPAANRHLDAVLTEMAQAAVRTKNSYFKAQYHRLAGRRGKKRAIGAVKHSLLVTVYFMLRDNKPYKDLGVDYFDKLNPQQRIRYHVRRLQELGQEVELSPIADAA

SEQ ID NO: 63882 - protein, 345 aa, unidentified
MSIVGGLDIHRKQITFDYLDTVTGQVCRGQIAPADREHVRAWLARFAGREDVAFAVEGCTGWRYVAGELAAAGVAAHLAEPADTAFARGRKRHAKTDKTDCRHLRMLLAEERLPECCIPPSHILECRALLETYHDLRAEHTAWVQRIHAVLFHQGAPALGEGALRTEQGLAALRAAAAAHLSPAGQLQVATALDMTGMLESRLHELRHQLLDAARHLTGAKVLAERLYGVGPVTALAMTCWLAGEGRFSSSRKAVRFAGLDVTVYSSDRKGPPGRLSRQGPPVLRWAVYEAGKTHARSSAPDHRYYAQVKDRCNGKRAALSEARKILRQACHILAELGDDALAAA

SEQ ID NO: 63883 - protein, 398 aa, unidentified
MMDVRRAIVDLAKDRDGVAVNGMARPCSGIYLLSRVGRRKAKLKEHAMRTSQNTAESINTIGIDVGKNTFHLVGLDKRGAIVLQQKVTRHQLGRRLSNISRCLIGMETCSGTHFIARQLAALGHDVRLIPAQYVKPFLKGHKNDYRDAEAIAEAVQRPTMHFVSIKTPEQMDLLALHRVRSRLVRQRTGVANQIRGFLLERGITVRQGFMPLRKALPEILSSKSDALSPRMINLIGELIQDWRRLDDRIASVSTEIEAIAKRDESCQRLMSVPGVGPIVSSAVVAAIGNGTGFKQGRDFAAWLGLIPKQESTGDRTILGKISKRGNKYVRTLFVQAAHVVLERRPRTARQGLWPWIEQASKRLHRNMLAIALANKLARIAWAVLARGHAYQPRIIANA

SEQ ID NO: 63884 - protein, 320 aa, unidentified
MSPTPKQEVHVGIDVSKRTLDVCLLPQGESFVLTNDQEGVDQLLSHLEGVGPELVVLEATGRFERLAATSIASAGIAVAVVNPRQARDFAKAIGQLAKTDKIDAFVLARLARAVEPSPSVLPDAEARLLQAILARRRQLLSMLTAENNRLQMACEGALAKRIRAHMKWLEKEISRTDSDLEEAIEASASFKENESLLSSVPGVGPVLARTLLAELPELGKLTHKRLCALVGVAPFNRDSGQRRGKQEVWGGRASVRGALYMGALVATRHNPTIKGFYKRLVAAGKPKKVALVACMRKLLSILNALMRDRAVWRCPHTLTP

SEQ ID NO: 63885 - protein, 313 aa, unidentified
MEKVTLWAGIDVSEKSLDVAIRPTKEFWSVSNTETEIEKAVEKLLELSLELIVVEATGGLEVEVVTALASARLPVVVVNPRQVRDFAKATGTLAKTDKLDAHVIAHFGEAVRPEIRPLKDEKLQELTDLVARRRQIVDMLTAEKNRLKRSSKRVAQDIKAHISWLEKRLEKTDADLQKQMEESPVWRKKDEICRSVPGVGKVLSLSLLTGLPELGNVSPREIAALVGVAPFNHDSGKYHGRRIVWGGRANVRSVLYMATLTAVRFNASIKAFYERLISKGKKPKVAITACMRKLLVVLNAMIRNGTKWQENHA

SEQ ID NO: 63886 - protein, 391 aa, unidentified
MSMYFIGIDISKYKHDCCIISAADQKVVSKVTIKNNKAGFNELLTIIHSLANPADIRIGFESTAHYALNLELFLENSLLTFMEVNPVLISEYKKSKTLRRTKTDSVDCESIARWLMTVEYKPHSKGFCHAYSLKSLTRLRDKLIRQRSFYLVKITNVLDHTFPEFKPFFNERLSKTALYLLENYGSAEKMARMNSASYEKLRSVSRGKFSPQQFLRLKELAANTVGVNNSIFDVELNSLLSLYKSLVKEIDTIEKEINKLIEEVHPHYMSVPGIGPLSAAVIYSEYGDISNFTNPGQMLAFAGIEPGINESGTESHGGKMVKRGSSQLRYTLINCCLPLIRFDMTFATYYAKKRGEGKPHRVAITHVAKKLIRVIYALESQDIDFNAQKLR

SEQ ID NO: 63887 - protein, 354 aa, unidentified
MSAKTLLAQDRTVSAGLDVDGRGAAVALLDVTSGELLFEGRLAHDVAAWQGLRARLPGCRIAAYYEAGPIGFTLCRRLTALGIDCRVVAPSQVPKAPNLKQTKTDRRDAFTLAQLYFHPPRSCVRLPSEQEEARRQLVRLREQLLEDKQRVMRRIKSLLLNYGFDPPAAAGSAWSKAWRQWLRELDPGFEELRFTLDVMLDELAGIEQQLERINQQLRQLVKHPDYREAADRLMQIPGVGVLLTMTFLLELFRPGDFATAEALAAHVGLTPCEFSTGGKPRRGHITHWGPPALRRLLVEAAWIWTYKDARAQQRLHTIRAGKSPKVAIVGMARRLAVAMWAMTVKQQAYAYRWK

SEQ ID NO: 63888 - protein, 349 aa, unidentified
MRNVTIGMDLGDTKHVITILDEEGVIVRSCSLDNVRASIVKFFRKYKGSTVAIEAGTHSPWISREIKALGCNVLVGNPRKLRSIWNSDDKADVHDSEMLARIARFDPELLYPIAHRSKQAQTDLELLKARDMLVKTRTSLINHVRGAVKSFGERLPKCSAESFHKQCRDFLPENLKAVLQVIIETIEHITDRIKEFGRRIEKISREVYPETELLKAIGGVGPLTALAYVLILEEPGRFGKGRQVGKFLGLTPRRDQSGETDKQLRITKAGNRFLRRLLVGAAQYILGPFGPDCNLRRFGLRLAERGGKSAKKRAVVAVARKLAVLMHRLWRNGEVYDPFYKSAMIRNAA

SEQ ID NO: 63889 - protein, 414 aa, unidentified
MDVLVERRAGLDVHRDSVVATVRVPGKGKSRRRRAQQTRSFGTTIAQLEQLADWLAGFGMTLVGMEATGVYWRPVFWVLERRFECWLLNAQHLHNVPGRKSDLIDSAWCCQLLEHGLVRPSFVPPPEIRRLRDLTRLRTTQMEERSRAIQRLEKGLQDAGIKFSSVASKTYSVSARAMLEALLGGVSDPAALAELAKGKLRAKIPQLQEALANRFELAHHGVLVAQLLAHIDALDETVANLDGGILEATDPYAELITLLSTIPGVGRYIAEVLIAECGIDMTVFPDAEHLVSWAGICPGTNQSGGKRRSGKSRHGDRWLRTALSEAARAAARTKSTYLASHYWQIRGRRGEKKAIGATRHDILIAYYHITRDQVPFRELGPDWLARRHSVEHRTRRLIKQLEALGHTVTLEPAA

SEQ ID NO: 63890 - protein, 350 aa, unidentified
MVVVGADVHKRTHTFVVVDEVGRKLGEKVVAATRSGHAEAVMWARERFGNEVVWAIEDCRHLSARLERDLLTAGQKVVRVPPKLMAQTRASARTRGKSDPIDALAVARAFLREPDLPVASHDEVSRELKLLVDRREVLVAQRTATINRLLWRVHELDPERAPKPRSLDLAKHRGVLRDWLDTVAGLVAELARDELADITRLTEAIDALAKRIGERVRRVAPALLSLPGCGELTAAKLIGEAAAVTRFKSEAAFARHAGVAPIPVWSGNTAGRVRMTRSGNRQLNAALHRIAVTQIRLNGLGQAYYRKRLHTGASNPEALRSLKRRLARIVFHHLHDDHQNRHQLRQPAAA

SEQ ID NO: 63891 - protein, 346 aa, unidentified
MLYAGLDLSRKRLDFHLLDEEGATVEVGASPPDADGLRGLTERLDRHGAPIRAAIESMNGARFVHDRLELQGWQVEIADAQKVKGLAPLACKTDRIDAWVLAELARRDLVPAIWLPDPLVRAERERARWRLHLVRHRSSLKHRVHAVLLTHGKPCPVSDLFGVRGRQLLAQLALPEPWQGTIEASLRLIDELEREIDDCERELRRLGANHRYVPLLLTVPGISWVLAYTIAAELGDINRFPTPRKLAGYSGLCPRVSQSGERDLRGPLSKQGPRYLRWALVEAATHACTHHAYRDRYQKTKARIGKQRGAKVAQIDLARRLSEAIWHTLSRNQPFAPKGATDPLAA

SEQ ID NO: 63892 - protein, 392 aa, unidentified
MTLINIVAANQKYYAFNLLSVFIMVFWSVQYLLQHLLVQTQLSDQLLQPLILIFQLPQTPQFRHARPGKFFLPVNGMDYLLPLRLTVRNVFTKRITMNIVFLGIDLAKNVFQLCGLNQAGKPVYTKRTGRKELLQTLANIPACLIGIEASTGAFYWQREFEKLGHKVKVISPQYVKPFVRGQKNDGNDAQAIAVALMQPTMQFVPPKSPEQQDIQALHRARQRIVNHRTATVCQIRGLLLDRGIPIGSAVSRARRAIPLILEDAENGLSSRMRRTIAELYDLFNDLGRRIHFFDKEIETVFRQSEACQHIAKVKGIGPKTATAVAAAIGKGTEFKNGRHFAAWLGLVPRQHSSGDRQVLMNMTKKATSICGHFLFMVPALSSGLPRITMMVI

SEQ ID NO: 63893 - protein, 362 aa, unidentified
MSFRNTELSSLEETRSEFNRSKAIIKLGIDVHQDFYTVVMQVSGSNPKPSQRFEKEAFLHWAARLKSQGAEVHAVYEACGFGFGLQRQLSALGIDSYVVCPQKLDEHNKRVKTDGLDAKALCLKLDRFVQGNREALALVRVPSEKEEQLRAIHRQREQLVKARKQLEAQGRSLMVNHGIEPIQYWWKRRTFAALPVPEWMKELLGNSQPILVALQEKISALTVQLQTAAAPEQPRGLGAMTSVIIDREIGDWIRFSNRRQIASYTGLCPGEYSSGNTRLQSCVTKHGNPRLRAALVELAWRLVRFQPNYQPVIKWKEVLRHGAPATGAARKKAIVAVARQLAVDLWRIRTGRLSAESLGLIN

SEQ ID NO: 63894 - protein, 312 aa, unidentified
MMQDVFVGVDVANDWLDVHHVLSGARRIANTAAAARSFAAACAKQGAWFIFEASGGYDRVLRDALETCNVRFSRVNPRQARDFARAMGVIGKTDRVDARMLAELGIRLRPAPTQPLAAARRALQAQATRRRQLVEIRKQEATRLQQTADRQARADIVSLIVVLDRRIAKVEAQINDLIKADPELRPLNQRLQTAPGVGPIVAATLIAELPELGQLDRRSIAALAGLAPIARDSGKRVSPRSVGGGRPIVRTILYLAALQASRRCAVFRDFRQRLQLAGKPTKAALTATARKLLVTLNAMLANGTDYTLAAAI

SEQ ID NO: 63895 - protein, 338 aa, unidentified
MTNKINMLAIDLAKGSFQVCAVGPEGTVLYNRGLSRTRLAALLAAQPACIVAMEACATSHHWGRVAQRHGHEVRLVPAAYVKPFVKRQKNDRADAEAIAEAALRPTMRFVAVKSAETQGRAVAFRTHQCLVRQRTQLINALRGHLAEFGLVAPKGPASLKILENALEDQATDLPSPVREMGAIYLDQIARLTEVIERLADELEAASKTDAQLRRLCTIPGIGPVTAGAVSAFAPDLDTFDSGRNFAAWLGLVPRQRSTGGKTKLGSVSKMGQTDIRRLLIVGAMSVIRWVVRKGGSSNRWLAALVARKPRMVAAVALANKMARMIWAMTTKQEDYRMA

SEQ ID NO: 63896 - protein, 356 aa, unidentified
MVGPDATKFGRAAMERYVGMDVSLKETSICVVDGGGEILSEGTVASEPGAIAAFIETLAPGSARIGLETGPTTTWLWHELRARGLAVICIDARHAKAALSMQINKTDRNDALGLARIMQAGWYKEVRVKSLASHEVRAMLNSRALLVRIKRDLGNQIRGLLKNVGLVIGKATGGVFTRRVEELLIGHPHLQVAVRPLLAMRDEVAGEISNLDRQLLRLAREADNSRRLMTVPGIGPITALAFCAAIEDPSRFKRSRSVGAYFGLTPRRHASGEIDWSGRISKCGDRMVRSYLFEAAGVLLTRVPQWCALKAWGLRLAKRSGFKKAKIAVARKLAVILHRMWRDGTDFQWSAKEVAA

SEQ ID NO: 63897 - protein, 427 aa, unidentified
MPYRIAAIDVHKRMLAVVVSDVESEGEYRFERRKFGATPGELHVLAQWLVQQEVEEVVMESTAQYWRPVWGTLERYWKPARQQREGAHPMSGTLHLCQAKSNHGPRGRKNDFLDAQRLIRRLVAQELVLSFVPDEAQRLLRTVTRRKHQLTRAKIGFRNQLEALLEQGHIKLSSLVSDLLGVSARRMLKALAEGERDPGVLAGMAERGLRATPEQLRDALGASAQLNGVVRRLLKLALEELQVIESHIEQLDREAMGLLKGHEEVVQRLAEVPGFGMDSAVQMIAEVGLEAAHFCTEKKLSSWVGVCPGNQESAGESQSTHSPKGNRQMRRLLNQAAQSAVRVKGSIFEVTFQRLLPRLGYKAAIWAIAHRLCRLLWLILHKGVRYEERGPAVSAKSKRTRATRMIRELKKLGYRVEGGPLPAVTRA

SEQ ID NO: 63898 - protein, 502 aa, unidentified
MNPRVTIGLDLARKTSHQAAILDTGSPGGPVLRKVNSSAASLDAALQAAGGPDGCVAVLEPTGMAWLAVAAWLVFRGCTVVRTDTRRAHDFRKVMRRDVKSDAVDAVALARLPLLGGEAARGLVMPEHLRFALDQLLRLRAQLVKEATRQFQFLVSVLEAYVPELPGVLGEGEKLSSATVLLLRRFLHPGRVVEAGVDGLTLALEQAGVRLDDASVVTRWHTVAERAWSIWGPLEGAGCCPVDFDVAQIQVDTWLGRIEESENHIRKVEDKVRAIYKEVDPDGILETVPGLGPVIAPFVLAVVGDIRRFPSAKTFVSWCGLAPRKNQTGGTDRGGQRISKAGNRLLRKYLYLAAESARRSDLDLASFYARKEAQGTHHTAIVTALAAKLARRVYAVLKRAAAGDTTGYRFTDQIGAIVDRRESRRLTGAAYPSKAARRRAEQERRRDRGATPPSTGQSSDSPRGLSNAPVPPPRHPPPPGGARPAQVTASGHSSQADSPRAG

SEQ ID NO: 63899 - protein, 415 aa, unidentified
MALKIVYPICCGIDVHKTFVVACIASTDSNGVTTYKSHRFSTFTQGLKQLSQWLCEHNCKAVCMESTGKYWIPVFNVLEHSCNITLAHPKYVKAIRGKKTDKKDAQWIADLFKHDLVNGSFMPPSLIRQLREFMRYRTKLTNFMASEKNRLQNSLTVSNIQLASVVSDTFGKSAMNIIDKLLENPADTSFDLEPLIHGALKKKLPELELAIDGVITPEQVGKIKVIKQHYEDLESRKAELESMILAIAAPYTEELKLILTVPSISSVFSAITVISEIGVNMDVFPTAKHVCSWAGLTPANDQSAGKRKSVRISKAGIHIKPLLVQCANSVIKSEKHPEIRKRYLQLKRRRGHKRAIIAIARMLLTAIYHILKKKEPYNPELYNKYNVLPATKEITVEQAIKLAQSQGYWIKAAAT

SEQ ID NO: 63900 - protein, 425 aa, unidentified
MRLVYPVCCGVDVHKTFLVATIITTTNSILPKYQQKRFSTYYSGLLDFKQWLLANNCKDVCMESTGKYWVPVWNVLEAASINVVIANPKWVSAVKGNKDDKKDSKWIGDLFRMGLVPPSYIPVRDIRILREFTRYRSKLVSMRSSEKNRFQNAFTVCNLTLDAVVSDMFGVSATAIENYLLDTDDVDPNHCVYLLRGSLKKKASDVVEAVKGFNMTAEQKERVRIIQGHFDDIDKRIAQIDHVILRLTADYEAQISLLCTIPGIDRRLAITIISEIGTDMSVFGSSKRLCRWAGLTPGNNESAGKKKSVRISRAGVYLKPALVEAAHAAVKATQKSPCFRIKYERIMKRRGKKRAIIATARMMLTAIFAMLQSGEFFHPCDLLKFDMPDELKRKQTLSSAKDAVKLLVSLGLVPEGSISLDPLAG

SEQ ID NO: 63901 - protein, 425 aa, unidentified
MITPPCETPKQASIGRLFAVGIDVGCEKCSISVLRPDKTVVIKPLEFTNDAQGYAFVLTKLESLGVIPAQITIGLEATGRYWENLYHYLARLGYNLILLHPVQTHQFAQRRGLRAKTDALDAGTIARVVLSDEARPAYVPGDLVATYRELVRLHSNLADEIGRYRNEIHALLFVIFPEYTQVFADPCRPTALSLYPSRQAIAEVPIGILSAKLIELSNGHYGLKTAERLLTLSKKSASSGLASNARAQGLVILCDQLLHTQANLEILESEIAQLLQKDEAAKKLAEIPEFGPKTIAGLRAELGEVGRFTNCNQVVAYAGLDLTVKESGKWKGKVKLSKRGSGRLRRLLYMVALVSLRLKVSAFGDYYRELRKRGMNGRSALMAVMRKMLITAYSLLKNDSTFDPKKVWIGAKFVAKELPLVAQVA

SEQ ID NO: 63902 - protein, 346 aa, unidentified
MEHYVGLDVSLKLTAICIVDRTGKIQREGVVPSDPEAIAAFIESHAPHVTRIGLETGATSTWLWTELNRLGLPVICIDARHAKAALKMQINKSDRNDAVGIARIMQCGWYKEVRVKALDSHAVKALLVSRALLVKIKRDLENQIRGLLKNLGLVIGPAKMNVFALRAAELTADRPELAAAVTPLLNARVGIAQQIADLDRKVMKLARNNAQVQQFMTAPGIGPVTALCFLATIDDPRRFRRSRSVGAYIGLTTRRFASGEIDWTGRISKCGDKMLRSYLYEAANVLLTRVAKWSALKAWGIRLAKRSGLRKAKVAVARKLAVILHRMWIDGTEFKWSSKETAKQTA

SEQ ID NO: 63903 - protein, 340 aa, unidentified
MARVARHFVGIDLHRTVIQVCVMNEDGDVVQERRWRLVGLGAEGRVLAGLERWREGGRYVVEATGLNRWLVNRMRGQGMEVVVADAGKLGLKALGKKTDRRDARELARRWRLGDIDQCAATHYPEDREYGIRKLVGMRTQVVNQVRAVVNAYRLGVPRGKLYGPKGLAWLQEGEAPTEELGVWLRALGKVLEEVQAQVERVEAQLRQVAKEGLRGLEEQKGVGPVTGIALVYELGDVDRFRNARAIASYAGLVPRVSQSADHAHHGRLTRRGNAELRFLLGQWAVRLLSRDPRVQAWAGPHLKRMHRNKVRTALARRLLVGVAASWRRREPFDLERCLAA

SEQ ID NO: 63904 - protein, 402 aa, unidentified
MNCVGIDISKGKSMIAVMRPFGEVVVSPFEVLHTDSELSKLAKLLKSLDGETRVVMESTGNYHAPVAWLLHDAGLYVSVVNAMLVHDYGNNSLRRAKTDKKDAVKLANYGLDHWLTLPRYVPEEDTRLMLKSCYRQYQQYSKVRTMLKNNLISLLDTAFPDANRLFTSPPRADGSEKWVDFVAAFWHCECVCGLSEKAFTAKYQKWCKKHGYNFSEDKALDIYASACGHFGVMPKTDTAKLLVEQAISQLRATSAALAALKQEMQSLAASLPEYPVVMEMFGVGPALGPQLIAEIGDVRRFHSKKALVAFAGIDAPPYQSGQIDVRSRSISKRGSASLRRTLFLVMGVLLQCAPMDEPVYQFMNKKRSEGKPYRVYMMASANKFLRIYYASVKAYLDSLEHN

SEQ ID NO: 63905 - protein, 432 aa, unidentified
MIKAAIERCAGIDVGKKWLAVCIMVGPLDAEPRTETRRFGTNVADLERLRDWFQEQGITHAVMESTGSYWKPVFNILEETLTVYLANPHQVKPRKGHKTDNKDGHWLAHLLRHAMIQPSFIPPRPIRELRDLTRRRKKLIGAGSSEKNRIQKVLEDANVKLGNVLSDIFGVSGQLMLDALLEGKAQPNEIAQMAKRRARKRIPELVAALEKHRMSDHQRRMIRLSVAHMEMLEKQITQLDEQIEAHIREIGLIKQWELLQSIPGMQAGSAATVLAETGADMQQFGDERNISSWAGVCPGNNRSAGKSKSNHTNKGNSWLRSALTECAQGASKKKNCFLKDKFWRITTKHGGKRAPAVMAVAHNLLRLVFQVLSTGKPYQERSATPLEPPQRERMIRHHIRRLGKLGMAVGRPVAAPLRPHSTHPRRLKASPH

SEQ ID NO: 63906 - protein, 353 aa, unidentified
MKYDKYMGLDVHQAMTVAVVIDAEGKVVLETMVATEAAAVLRLVKSLSGPMRVTFEESTQAEWLYELLRSHVTQVVVCDARRNKLLSEGSKADKVDARKLADLLRTGMLRSVYHGHQATRKLKELVRAYETFSLDTQRTMNRIKAIYRGRGIATPGRGVYQARTRDQWLAKLAEPGLRQRAAWLYQQLDQLKPLRKQAKQVMLAESRAHRAVSLLRTIPQLGPIRAAFIVATVDTPHRFRTKRQFWSYVGLAVVTHMSAEYEMKAGKVVRRRKPVATRGLNRCCNHRLKEVFVSAATGGTRDESYKLYLERLINNGMRADMARITLARKIAAVALILWKKGKEFDPRELNRTT

SEQ ID NO: 63907 - protein, 412 aa, unidentified
MKCFIGIDVSSQDLKVCAMNPDGETLDVWIVSNNYDGATFLRDKLLSLADRHDFTEIHIGLESTSVYSWHPAMFLHEDEALKNHNTKVFTINPKLISKFREAYSDLDKTDHVDAWIIADRLRFGRLPMTIVMHEQYVALQRLTRMRFHLVHNLTREKQYFLQHLFYKCNAFTTEVDSDVFGHAITELLLEQYSLDEIGSMELADLADYLKDKGRNRFPHPEKVAKCIQKAARSSYRLSKCVEDTIDILLATSIESIRTVQKQIKQIDQAIERLLDGIPNTLQSVPGIGPVFCAGILAEIGDIHRFKDQAAVAKYAGLTWRKHQSGLFEAEDTKRIKSGNRFLRYYLVEAANSVKRYDEEFKAYYQKKYAEVSKHQHKRALVLTARKLVRLVDVLLRNDQIYTPRRKVNMAKH

SEQ ID NO: 63908 - protein, 408 aa, unidentified
MKTLHKRCAGLDVHKAEVVACVRLISKRKVEREVRRFPTTTQGLLALAEWLESAECTHVAMEATGVYWKPVWHILEGRFALILANAAHVRNVPGGKSDMNDATWLADLLAHGLIRSSFVPPPAIQELRDLTRTRRQLTREIVQHVQRIQAVLEEANIKLCSVITDIMGASGRRMLKAMIAGETDAEKLAALGHERLGCTRAELVEVLTGRVREHHRFLLGQHLRTIEQLKDSVAAFDARIEAALSPFHDIVERLEEVPGLAATSTETVIAEIGTDMSLFPTAGHLLSWAGFAPRLDESAGKHRSTRIRKGAPWLKPVLVQAAWGAARKKNSYFQAQFLRLKARHGAKKAAIAVAASILTTVYHMLRDGTCYQDLGPEYFTRRNPAQAAARLANRIRNLGYHVEIRAAA

SEQ ID NO: 63909 - protein, 358 aa, unidentified
MLLAEHIDFVVGVDTHKYTHTAALVTPAGRLVAHLTVTADGAGYAQLLRFAREQAAGRRVWAIEGTGSFGAGLTTHLLERAEWVVEIDHPKRPARRNGAKTDELDALRAAREALARDHLAQPRRRGDREALRVLITTRDDAMRARTKAICQLKDLLVNAPEHLRRSLQGLPTATLVERCARLRTTATQSAELGCTIVALRITARRALALQAEAAELEALLEPLVQQVAPVLLAEPGVGPVSAAQLLRSWSHAGRLHSEAAFAALAGVAPIPASSGQVTRYRLNRSGDRQLNRALHTIVVSRMLHHAETHAYVARRTAEGKSPREIKRCLKRHLARHFFKLLERGAARCAGEFEFERAA

SEQ ID NO: 63910 - protein, 326 aa, unidentified
MEHELHYIGIATAKEKLDVDVLRPDGRHRTKKFANTTKGHDELVSWLKGHKIDHAHICIEATGTYMEPVAECLYDAGYIVSVINPALGKAFAQSEGLRNKTDTVDARMLAEFCRQKRPAAWEAPHPLERALRALVVRHQALTDMHTQELNRTETAREVQRPSIDAHLLWLEAELKRLEKQIKDLTDDDPDMKHRRKLLESIPGIGEKTSAVLLAYIGLKDRFAHARQFAAFAGLTPRRYESGSSVRGASRMSKAGHVSLRRALYMPAMVATSKTEWGRAFRDRLAANGKKGKVILGAMMRKLAQVAYGVLKSGVPFDASRHNPVAA

SEQ ID NO: 63911 - protein, 345 aa, unidentified
MDEQQPADRQIVGMDLHRRRSVLVRMNQDGERLETVRIVNDVDRLADVIARAGESPEVVLEATYGWYWAADALAELGANVHLAHPLGVKGFSYRRVKNDERDAADLADLLRMNRLPEGWIAPPATRELRELVRHRAKLVHLRTSLRQQVHALLAARGVAIPVSDLFGVAGNQLLDRVSLSPAARTRVVSLRSLLDALDVEIDAFTKLTAKRLRGDPRYKAVQTIPGIGPVLGAVFLAEIGDITRFPGPTQLASWAGLTPKHHQSDTTVHRGRITKQGSVLVRWAAIEAAQCAGKYTRTGQRRERIAQRRGRNIGVTAAARDLLQLVYYALRDGHVRCLEPAAQSA

SEQ ID NO: 63912 - protein, 358 aa, unidentified
MAATEGTRGIVGGVDTHKDLHVAAVVDEQDRLIDTRCFATTRQGYRQMLAWMRSFGELQRVGIESTGSYGAGLLRFMQQAGITVLEVTTPDKQDRRRRGKNDDLDAQNAAHAAFAGQRTVTPRSRDGMVESLRVLMACRKTAVSARRVALQMIHNTIVCAPDGLRDQLRSLTRMQLVRTLAAWRPDLTAYRDLDSAYRIGLKSLARRYLELHDEIADLDAMIAAIVDELAPNLVARNSIGHIGAAQLLLTAGDNPERLRSEASFASLCGVSPVPASSGKTVRHRLNRGGDRAANSALHIIAIGRLRTDHRTKDYVARRIAEGHSKLDAIRALKRYLAREVYTLISQRRREINATRIAA

SEQ ID NO: 63913 - protein, 326 aa, unidentified
MGEKTSERFIGIDVSKAWLDCGLLDSGTGSVHTERFSNDGSGHSKLIGWALQAQPSLLVIEATGGYEGCVVAALATAAVAVAVINPRQGRDFAKALGVLAKTDRVDAVVLARFAERVRPQVRAPKSEELSMLEAVLVRRRQLVEMLSAERHRQAMARGVIARQIAQHVRWLQRQIQAADEDLSGMIERSSLMQRKLEVLTSAPGVGRLTAIALLTQLPELGQLNEKRISALAGVCPFSRDSGRFRGKRIIWGGRARVRAALYMAALTATRYNPRIRAFYQRLISAGKAKKLALVACMHKLLLMLNAMIRTDAMWQQHQHTKQSAAG

SEQ ID NO: 63914 - protein, 324 aa, unidentified
MAKRITICAGIDTGKRKLDVAIDGSSLQLQVENTAEGHKVLAEWLRRHKVKRIGIEASGGYELPVVTELRRKRFVVVVFQPAQVRAYAKFHLQLAKNDKIDAALIAACTAAVKKIHAAPDPRLQPFAEHLTLIEQIGENIRLYKNRIETCRDPRIQKLWKEEISRLAKRERAELKALVAAIRQHRDLAQRLDLIYSVSGAGMPTAVAILVRMPEIGKLSREQVAALAGLAPYDDDRGERSGDRHIDGGRKRLRRALYTAALPASFRWNPHLIALYQRLRAAGKVHKSALIACARKLLIFVNTVVARGTPWQNEQPVRATNPAIA

SEQ ID NO: 63915 - protein, 356 aa, unidentified
MSKASIIRRRVTIGLDVSDRYSHLCVLDARGRVDREDRIRTTPDAVGVWFAGYRSARVVLEVGPHSPWLSRLLKEQGHEAVVANPRRVRLIAEAERKSDRIDAETLARLGRADPKLLRPIEHRGKAAQQDLALLRVREALVRSRTKLIQCARGLAKAFGARLPASSAPSFAKRVREGELETLFPGLARLLQQCDELTASIRTLDREVERLGRERYPETQRLRQVPSIGPITSLAYVLTIEDPNRFAKSRSVGAYLGLTPKQRDSGDARPELAISKRGDDFMRRLLIEAAHYTLGPFGPDSDLRRFGLRLLGQGGKRAKKRAVVAVARKLATLLHRLWITGEAYHALGAPSAEVRAA

SEQ ID NO: 63916 - protein, 346 aa, unidentified
MKAFIGIDVSLASSAFCILDEHGQILKRAQVASEPEAFVAFLGGLPWSIAAIGLEAGPLSQWLHHGLAAAGFDPVLMETRQVKAVLKAMPVKTDRRDAEGIAQLLRICWFRPVHCKSVSAQELRALLGARRSVQKALLDIEQSLRGVLRNFGLKVGRVGRSQYEARVRELVQGNDMLEAAATAILSARTALRRDLAALEHRLRDLARQDEVCRRMMTMPGVGALVALTVRAAIDDPARFRSSRDVGPWAGLTPRRDQSGERDVMSHITKAGDATLRTVLFNAATVMMYRARPCWLKAWSLQVARRRGQKRATVALARRIGVVLHRMWMDGTDFRMTRDGEAVAAWR

SEQ ID NO: 63917 - protein, 334 aa, unidentified
MAWTVAIGVDTHKDLLVAVACDRLGRQLDSCTVEPDQQGFSRLLRWAQELGQPAFAIEGCGSYGAGLADFLAAAGIAVFECERPRRRERRRGKNDLIDAALAARRLVSGEGLSLPRGGGLVREQLRLLLLERRGVIEARTAALNQLHAVALSAALPGRLRRLDSRRLIEACLRLRTATIERTVVRRLAARIRDLDAELALLDGQLDELVARRAPQLLQECGVGAVCAAQLLVSSGEPSRMRSEAAFAAFAGTSPLDASSGRQRRHRLNRGGDRQLNRALHVISLNRTRYHEQTRAYYEHLLATGKTTREARRCVKRALARYFYRQLRALDPLTP

SEQ ID NO: 63918 - protein, 343 aa, unidentified
MDVHSNHCVLGDMDARGNFRGAQTFCTSEQNIIQALQDVKATEKYLTFEEGNLAYWVARVAAPYVTEVIPCDPKENALIYKGSNKNDKVDTKKLCRLLRLGELKRVYHPETDERAIFKAAAQHYIDLRDQQISLKQKIKAMYRHWGVIDVAGEAVYSPKKRDNYLCRIKHLAIRNEISRLYYLMDQTESMQERALKAMKQLGRKYPEIKQFQKMPGIGEILAHIFDAFIQTPHRFPDKHKLWRYSRLGVTDRSSDGKPLGFKRLDRSGISELKSLTYQAWMSALRSDNEVKRFYKNSLQRTFSRVHARLNTQRKIIATMYGMWKRGEPYNPNLFLDSPQSDAV

SEQ ID NO: 63919 - protein, 548 aa, unidentified
MNHNKTVDAESALAGAGTDSASTVPCEFDIMCRVSVMASADAPAFIGAKCPTCRLSSARPMFNGRVVAGNRDGILPRQDFTSIPPKPSPCPEKTGEDMARQTNRFEEVRRFVAGVDLAGHAGHYVCGPRKDDGTHDVERFGTTTNELLRMVAWMKERKVESAAMESTSVYWIPVYDTLESSGIEVVLVDTRTVKMVPGRKSDVKDCQWLQRLHSCGLLHGAFRPPEGFNAVRSVIRERGNVLQMRTQAIQAAQKSLDQMNIRLHHAVSDIDGVTGMRILGAIVDGERDPRALARLRDKRCRKSEAEIAEELTGNWREEHLFNLKQAYRTLCFLDERVAEYDRQIREMYAKIAEGFPPADPPPDGGGKKPKDKADAKAKADLVRICGGFDMTKIGGIGYDSAAAILSELGPDLSAFPTERHFVSYIGVAPALGKSAGKNVSTRKKHKNTSRVGLILKMSASALFRSESALGARIRCVRSRTCSRTAIKDVAREMGKQIYRGLKYGQAYVDEGERAYMDRTRERTIKSMKKKISKLGISAEELGIYAVAV

SEQ ID NO: 63920 - protein, 417 aa, unidentified
MTPDEKQAYARQFPVHVGVDTAKQFHVLVAQGPDGRRSKPFKVIVCRAGFAATHAHLQDLFPGLTPAQMLVGLEFAGHHGFTFARFLADRGYPVVNVLPAHTNRSKELEDNSPLKTDAKDAAQIAKLVGMGIFVRFPFLTTPYVELRLLSVQRHRLTVEATRFRNRLQGVLDLAWPEFLGQFSGLHKRTPLAILARWPLPQEFVAATPQAVWRHIHAASRGHVSKERVATLIASAKETIALTQATPERRLEITKLLARWALVREQLAVVEARIVALVDQCPEARVLLSVPEISAACAATIVAELGTPADFQHPRQVLKLAGMNLTGRQSGQTEGRRRQSKRGRPMLRRQLFLLAGRWCQPRGLYRPEYEAMRARGIPGTKAVCALARKLVPLLLRIMQTGEPFDEGRWRGNRHQVAA

SEQ ID NO: 63921 - protein, 317 aa, unidentified
MTDTYVGVDVSRAWIDTFCPLTNQHQRLTMDPAILDTFAAGLSSKGVVVVLEATGGCERALLHALTIHKVGYARVNPRQAREFARATGRLAKTDAVDARMLADMGAKFALKADDPIDPQRARLADLVARREALIGYITKEKQRLGTTVDLFIKDDIATTLTFLKTRLAALTKEIAAHIKSAAQLAKLDAALQSAPGIGPVVAATLVACLPEIGTTNRRALASLAGLAPHACDSGIRRGSRHIWGGRAQIRRALYLAAFIASSRDPVLKEFRAKLSNQQRPFKAIIIAVARKLLTHLNAMIRSGQPWNNQINAELTPA

SEQ ID NO: 63922 - protein, 406 aa, unidentified
MADIFALDVSMGKSYCVWYRGKHCLKEFSLVHTRAGFNALRDMIKKAQKPIIYFEATGIYSRVIEHFCETNGLRFCRLNPLELHLKSESLRRVKPDQKDAHRIALTVQENTFRLTVPWKKDYLQLHELSRFYNQLNADWNYRLNHLHTALEQVFPELKQLFVNRTSKLALNIVELFPHPALVRPYSRVKLKNILMASTDKRISKMKAYKYADRLIDLAQKSYPAVSGDAIQVDEVRYYARQLIALTRKKEEVIKRMESIAQRLPEYILYCSFPGIGKQTAAQLMGELGDISRFDNANQLNAFVGIDIRRYQSGTYLGQDHINKRGNPIARKLLYFTVGNMIRQQHANSNHIVDYYYRLKEKRPHPKLNKVAMVACMNKTLKCLLSMIKHHEKYHYRYTDSMVPVKA

SEQ ID NO: 63923 - protein, 327 aa, unidentified
MQDRAKGKERDVKEPSTSIGIDVAKATLDVAVRPAGARWQVPYTEEGVEGLVQQVQELEPTLVVLEATGRLEVVLVSALAQARLPVAVVNPRQVRDFAKATGRLAKTDAIDAEVLAHFAEAVRPTPRPLPDSQVQALDALVTRRRQVVAMLTAEQNRLHTTSPATRADILAHLRWLERRLAKLDAELGEALRDSPLWREREDLLRSVPGIGPVATMTLVAELPELGTLNRREIAALVGVAPLNRDSGTRRGKRTVWGGRAPVRAALYMATLVATRYNPVIRAFYQRLCLAGKPKKVALTACMRKLLTILNAMLKQHTVWEPNHALTA

SEQ ID NO: 63924 - protein, 335 aa, unidentified
MEFDFFIGIDVSKNELDFAVRQGKQLLFHREIANSPEPVSAFLKELCKLSGFGLSKAVFCMEHTGIYNNHLLACLHKKKAGICLEAASQIRSSLGNIRGKNDKTDAVRIAEYACTKRETLRLWQPKRELVQQLAHLAATRSRLVQAKKLLKTPLKEYSAFGTKKTAKQSTAVCSHTLKAIESDLKKADKAIGAVIAADDELKRLFGLVTSVSGIGKVTAAQILITTNEFKDIGDPKKFACYSGVVPFTKESGMFKGKAKVSHMANKKVKTLLHLSAIVAIQHNPDLKQYYERMVNQEKKNKMSVINAVRNKLILRIFACVKQNRMYENNYQKAVA

SEQ ID NO: 63925 - protein, 420 aa, unidentified
MDVLHERCAGVDVSKTDCKVAIRVPGKGVRPHREVRTFSAMTDDLLALRDWLVDNRITVVGMEATGAYWKPLYYLLEATDGIEPWLLNAQHMKAVPGRKTDVKDSQWICRLVEHGLVRPSFVPPREIRQLRDLTRYRTETVRDRARDVNRLNTFLEDAGIKLSTVVSDITGISARRMLDALVAGERDPEVLSDLALGAMRGKIPVLNRALAGHFTEHHAFVVDTMLTALDHAQERIESLGREIDRQLEPFRRQVELLVTIPGVGLAAAQVILAEIGTDMSRFPTAGHLASWAGMCPGNHESAGRRRRGTTRPGDVWLKGALGIVALSASRTKGTYLAGRYRRLIGRLGRNRTMVAIGHSVLIAAWHMLSTDTPYRDLGPEHFTERLGKARQTRRLVAQLAALGYDVDLQAKPTPTATNPG

SEQ ID NO: 63926 - protein, 400 aa, unidentified
MNSVGIDVSKEKSMVCILRPYGEVLLSPYEVAHTEQSISTLAKQIIELEGETRVVMEATGAYHLPLLLSLNQAGIFVSVINPLAMKKYASRSIRKGKTDKLDSIRIANYGLDNWYHLEKFTPSEAIYEELKILGRQYSHYITLKIGSKVALTNILDRTMPGIKNLISSHSEEPEKNKLNDFVEEYWHYDNITKKSESQFISAYCRWAKKKGYHANEAKARAIYASACKGIPTLPSSAASTKMLVLEAVRVLKEVTKTLHSILTQMQKLASSLPEYGVVRAMPGVGEILGPRLIAEIGDVRRFHSGSALIAYAGIDAPPFQSGTFVGTKRRISKRGSSLLRKTGYEVMKCLKTVKPSNDAAVYLYMLKKESEGKAKKVAKIAALNKFLRIYYARVNQVYQI

SEQ ID NO: 63927 - protein, 345 aa, unidentified
MTTMNYIGLDVHKKTISYCVKDVSGRIQQEGKIGSTRRELDCWMKTLPQPWTVAMEATIFSGWIYDHLLPHATQIKVAHPLMLRAIAAAKKKNDQIDASKLADCLRCDFLPECHMMPRAIRDRRRTLRYRHLLVRQMVQMKNRVSGLLMETGVEYNKQRLHKVSYFRELLSANGEVPPSIRPLLKLSRETIERCQKTEYALVSSLQRDPVLADRIKRLRTVPGVGPITALTWALEIGDVSRFGSIKKAISYCGLCGDERSSADKAMRMPLSKQRNKHIQRALVEAAKLAPRQNHELAVIYDQERQKGNSNRATLAVARKMVAYLLAVDRQQRDFVPAEERRTSAA

SEQ ID NO: 63928 - protein, 502 aa, unidentified
MGDHITYVGLDVHKDGIVVAVAEGGLRGEVRDYGRIANTPAALQRLVRKLGLQGVELRFCYEAGPCGYGIQRQLSAAGHDCVVVAPSLIPKRPGDRIKTDRRDASSLARLHRAGELTAVWVPDAGHEAMRDLVRARLDAVHALRRARQQLSGFLLRQGCHYGRPAWTKLHRRWLAGLRFEQAVHHLVLEDYIEAVEAAQARRDRLTAQIEAMLPHWTLAPVVAALQTMRGMALVNAATLIAELGDLSRFANPRQLMAYLGLVPSEYSSGASIKRGGLTKAGNSAARRLLIEAAWCYRFPARVSRELLLGKAGGAAAVRRTLDTTICRIADPTQVPRPRQLRDASPVMRFRPAHQRMINRRQDGRASCLARQSLKRMLEREPRIYLPATCKGGHESGRAHSDKFTASREDLRRTSRGVPFSSSRRRPGPCACKRNQSGGASPLQVCLLRPVAKCNCVAVRRGGEQQEANEPSVGSRTRFGRTVWRACGPRVKPRPARAGSPWR

SEQ ID NO: 63929 - protein, 350 aa, unidentified
MQTIYIGVDFHARQQTICYLTTDSGELLFHQLKHEDKALVRAFYGQFSGHVIVGLEASGYSPWFERLLEELGCEVWLGHATEIRRRARWRHKNDRRDAELILDLMVHDEFPRLYLPPLQSREVLRMLRYRQKLIKMRTIGKNSLQALALQSGLAKGPHLFTKAGLQELRSATMSPAMQWQREQWLQLLEPLNERLLETMRWLQQQSQADQRISRLRTHPGVGLLTALCLVHSLEPVRRFANTRKVTAYAGLDPVERSSAERQRFLGISKGGSRVLRFLLVEAAHTAIRKDADLKRFYQRLAQRHGRPKAKVAVSRKLLIRTYIMLRDEIDYAEFQRRAVAARPVLPAHGL

SEQ ID NO: 63930 - protein, 394 aa, unidentified
MTPRDQKKACRPSAPARLLVMNPHAAGIDVHATVHWVAVPAADAPPPPPDHPPKLPPHVRSFGTCTADLIALADWLKICRVRTVVMESTGIYWIPLFELLESRGFQVLLVEPRQSRHAPGRPKSDVLDCQWLQRLHSYGLLSGLFRPAEQIVVLRSYLRQRQMLIRYSAQHVQHMQKALEQMNVKLTEVVSDVSGVTGMAIIRAILRGERNPLELAKLRNDKCKRTEAEIARALYGNWRAEHLFALQQAVTLYNCYREQLRVCDDQMQAYLATLADRSQGRPRPCRHGRARRERRRNDPAFDVAGALFRMSGVDLTVLEGIDPNTALVLMSEIGPDVSRFPTVKHFCSWLGLAPQHQMSAGLPATPAGFEMGRRQPLREARRGRAGQRRRAEPR

SEQ ID NO: 63931 - protein, 347 aa, unidentified
MNKVVAGIDPHSNNAMVGLLAEDGRRLGHQKLQCDLKQIVQFLDPYKDRLESVAVESTYNWYWLVDGLKAQGYPVVLANPAKIDQYSGIKHADDKNDAYFLAELSRLKILPTGYVYDPILRPVRDLLRRRMSLVRQRTALMLSFKSLYTRTTGQAMELGRLKKMTLSEATALYDHPANQLIAQEQKRHMEALTQSIDKIEQAVIKDAQDIPYYPKLKTLPGVGIILGMTITMEVGDVGRFADAGHFASYCRTVDSQRTSNGKKKGDNNQKCGNKYLAWAFVEAAHFARRTDELCRRWYDRKAAKTSTVIATKALACKLAKAAWYLMAEQTDYDPKRVFPELAMKTQH

SEQ ID NO: 63932 - protein, 340 aa, unidentified
MGDITTIGLDLAKSVFQVHAVDAMGSVVMRKRLRRSQVLAFFAEIPPCLIGLEACATAHYWARELIALGHEARLMPPNYVKAYVKRNKHDVADAEAICEAVRRPSMRFVPIKTAEQQSALMMHRARDLLVRQRTMLVNALRGHLAEFGLIEAQGLHKVAKLIAIVTDENDGRVPYIARQVLQVMINHIEDIQVRIVGLEKQLLAWHKSNPVSQRLATIPGIGPIIATAIAATVADPNTFRSGREFAAWLGLVPRQNSTGGKARLGGISKRGDSYLRRLLVNSAHTVLLCSKQAKTDPWLTSLLTRKPRLVAAVALANKTARLVWALMSRQDTYRHAAATA

SEQ ID NO: 63933 - protein, 406 aa, unidentified
MNQNTCITIDVSQNKSHIQGFIGPNKPLSKARTMRHTKQGYQFILTLKNLIESKTNETPLIIFEFTGIYHKSLEKFLISQNLKYHIVAPLRAAKARNSEIREQKTDARDCLSLSKLFYSNNLGVFYSEDETYSNLRKLNRYYDTCMKHFVKIKVNFRETLAVIYPNYKKLFTSIYSDESLTFLKVFPHPSFYTSKSEDEIIEILKDKWNHVESWTSSKVKKLTPLINEVVPGCNVTEPDIIMLLSYITQIEYYLNQIKFTISKMNELAKKVPLYNLVHSLPGIQDILTCKFIAELGDISRFINYKQIVAYVGIDPMIRQSGDKDGLHLKMSKKGNKRLRTILHLMVSSLIKTNRESNAIKDKYQKKTHQLNPLKPKVASMACANQLVRIIFYMHKTSSTYTYQKCK

SEQ ID NO: 63934 - protein, 344 aa, unidentified
MRISVLGVDLGKNVCSIVGLDASGAVVLRRRVRRDTLIELVAKLPACIVGMEACCGAHHIGGVFAAQGHDVRLMSPEYVRPYVKAQKNDDRDAEGIAEAATRPTMRFVEMKTVDQLDMQTLHRSRDRLVGERTALINQLRAVLLERGIVVPQGKHKFEQYLIIMMDEHEGEGLSARMRMLVTDVRAQWRDLDRRIGAFDAEFARWAKENEDARRLGTIPGVGVTISTALIAAVGNASTFEHGRDLAAWLGLVPRQSTTGGKPRLMGISKRGNKYLRKLLIHGARAALPHVAEKDTALGRWAKNLLSRVHHNVAVVAFANKLARICWAVLRSGQKFAANGAPSAV

SEQ ID NO: 63935 - protein, 322 aa, unidentified
MKKDRVHAGVDVSKSSLDIAVYATKQQWSFPNNDKGISQAVSLLASLNPTLVVLEATGGLEVPLVAALGVARVPVAVVNPRQVRDFAKAIGRLAKTDALDAEVIAHFAAAVNPAPRPLPEAMAQELTAIISRRRQLQQMITAEQNRLHTARKSMAQRIRMHVSWLEEELASIDDDLGRMVRESPAWRGKDDLLQSVPGIGPVTSTSLLAGLPELGSLDRKQIAALVGLAPFNRDSGTLRGKRTIKGGRTHVRGALYMPTLVATRFNPVIRSFYQRLLSAGKPKKVAITACMHKLLTILNAMLKHGTVWNQVAPQFKFIGPCS

SEQ ID NO: 63936 - protein, 346 aa, unidentified
MGIVCRIGLDIAKNYFQAHGVDKHGKDVFNKKLKRADVLPFFANLPSCLIGLEACSGAHFWARELAKLDAGHTVRLISPRHIKPFVINNKTDAADARAICEVVGRPSTLFVNVKTVEQQDMAGWHRIRERKVKERTSLVNQIRALLSEQGIVFPQGITQVRKQLPCIVEDLDNGLSLCARDYLSELYGELVDCDAMLAKYEARIKTFAVNNEDCKRLQKIPGVGPLTATAIVAHVGTAKHFKNGRTFAACMGLTPREYSSGGKQKLLGITKRGNKHIRHLLIQGARIIMRYCLQKLPEQTEQRIRWVHDLAKRRGQHVAVVALANKTARIVWALLARGEEYRPALT

SEQ ID NO: 63937 - protein, 354 aa, unidentified
MRTTEQAVRKVISAKEVYVGIDVHKESWHVTIRSDGEERFNGRIPGQYHSLKRVLERYRDCQIKVAYEAGPFGFWLLDKLVLDGIETIVVPPSLIPIESGNKVKTDKRDSRKLATLLEKNMLKRVYVLTREEREHRDLLRTRRQIVDHRNDVARQIKSKLMFYGISSPFTSTTRWSVQYVEWLKTITFETAYLKEAFDLLIELYEYLTVKIARINRTVVLLCRDKKYRQKIKLLCTAPGIGKLTAIELLVELQDITRFKSAEEIASYIGLTPAEYSTGERTRQGRITRCGNKRVRTYLVESTWVLITKDPYLRAKYLRLKSRRGGKRAVIAIARKFLIRLRRMLLDNVPYRMAA

SEQ ID NO: 63938 - protein, 323 aa, unidentified
MNKDRIYFGIDISKDVFDVMDSSGNYFQFSYDYKGFKKFLKLLGKNSHCVMEATGYYHYKSAYYLIENNIRVSVENPLSVKRFIQMRLSKIKTDKSDSKMICLYAQSVDLKLWEGQSKSQIECLQITRLLSLYFKQTTALKNKIHGEDVLGNPSLLVVRSLKRSLKHKQKEIKSLEEKLTEIVKKDHQELLTRLESTPGLGRKTSIMLIVLTDGFERFNSASELCSYSGLTPIIRQSGTSVNGRSRISKMGNKKLRNLLFMCSFTACKNNKARKALYHRIVAKGKSKKLALIAVCNKLLKQAFAIAKSGLVYDETYRSTLAKN

SEQ ID NO: 63939 - protein, 337 aa, unidentified
METSKFYLGIDVSKLWFDASLLTVVNHQKQPLITQRFDNTTAGMKAFKLWLKNNAVCYDDNTLVVIENTGVYHRLIWSFCSKHNLNLHIGNAARIKWSLGITRGKSDVIDSQRLCMYCYKQADELQTMPPLNPIFIQLKDLMTSRTRLVAQLQSTKNYVKEIKSTNDIYLLNILEKSHKAAIDGIKKSIEQIEQAIRKIVQEDEKIKANYDLITSIPGIGEMTAVYIICCTNNFASKISGKQLASYAGVVPFEHSSGTSIKGKNRVHKMANKELKRMLHMCALTSIKYIPEFKDYFNRKKAEGKNGMLVLNAIRNKLVLRIAAVVNNQTPYVNNYKK

SEQ ID NO: 63940 - protein, 410 aa, unidentified
MEVLYPHCAGLDVHKDTVVACVRHMTDGTVEREVRTFKSVTAGLLALSEWLASEACTHVVMEATGVYWKPVWHILSDGDFALTLANAAHVKNVPGRKTDTNDAAWLADLLAHGLIRGSFVPDAATQEQRGLLRTRKQLVRERASHVQRLQRTLENANIKLDSAVSDVTGMSGRAMIQALIAGETDPARLAELAHRRIKSSPETLREALRGRVTSHHRFLLALHLKQIDALDQAIAGIDAEVDAHVEPFRAAVAQLKTIPGIGDLGACVILAEIGTDMSRFPTQAHLISWAGLCPKNDESAGKRRSNRMRKGAPWLKTTLIQCAWAAARKKGSYLQAQFHRLRARRGAKKAIGAVAASMLTAAYHMLKDGTFYQDLGPDHFDRRAKGAVTKRLIAKLASLGYEVTLAPAAV

SEQ ID NO: 63941 - protein, 360 aa, unidentified
MLRQRSELNFEGHNIFIGIDLHLKSWTLTILTEKLLHKTFTQPASVVTLHNYLENNFPGGIYHSVYEAGFSGLWTHYKLQEIGINNIVVNPADVPTTQKEELGKDDPVDSRKLARSLRAGDLTPIYIPAPSTLEDRSLVRMRATIVKDMVRFKQRIKSFLYFYGIAYPQEFEKAGTHWSKRFMRWLKDGVSLKHDSGNQTLKILIQEAEQQRKLLLETTRKVRALSSSEKYAPNMSLLRTIPGVGFITAITFLTEIENIERFGNSDHFAGFIGLVPNRHSTGAKERIGEMTFRGQGNLRKALIESSWFAARLDPAMNKSFHNYLNRMDANKAIIRIARKVLNRMYVVLKNKMEYVPRVVK

SEQ ID NO: 63942 - protein, 402 aa, unidentified
MNCVGIDVSKGKSMIAVMRPFGEVVVSPFEVRHTASELSELARLLKNLDGETRVVMESTGNYHAPVAWLLHGAGFYVSVVNAMLVHDYGNNSLRRGKTDKKDAVKLANYGLDHWLTLPRYVPEEDTRLMLKTCYRQYQQYSKVQTMLKNNLISLLDTAFPDANRLFTSPPRADGSEKWVDFVATFWHCECVCGLSKKAFTAKYQKWCRKHGYNFSQDKALDIYASACGRFGVMPKTNTAKLLVEQAISQLQTTSAALAALKQEMQSLAASLPEYPVVMEMFGVGPTLGPQLIAEIGDVRRFHSKKALVAFAGIDAPPYQSGQIDVRSRSISKRGSASLRRTLFLVMGVLLQCAPMDEPVYQFMNKKRSEGKPYRVYMMASANKFLRIYYASVKAYLDSLEHN

SEQ ID NO: 63943 - protein, 350 aa, unidentified
MIIIGCDYHPGFQQIAFVDTETGDCGEQRIEHSEGAEKFYRDLATQEKKVRVGMEASGRGRWFERLLAEVNFELWIGDATEIARKRERKQKTDRQDAQHILQLLMENRFPKIWVPSGENRDLRQLLWHRHRMVQMRTRIMNQLQAVALNEGLRCKKKLWRQHGREQLESFRLAPWASRRREDLLQLLDRLNPTISDLTQVIEQEVEKCAEARRLRTHPGVGALTALAFVLIIGRTERFQCGKQIAAYLGLVPLEDSSGNRRRLGHITKQGSSMLRFLLVEAAQVTARSIPDWCSKYFHLAMRRGRKIAKVAMARRLAIALYWMWRKGWDYEQSRKFGSHAGKLGTGDGVQ

SEQ ID NO: 63944 - protein, 336 aa, unidentified
MNYYSGIDLHSDNCYIATIDSDGQLCKEQRVPNAELHIAKYFNSLPGEHSAVVESTTGWYWLNDLLESLGIDLVLAHAKYLKAISYAKVKTDKIDAHTLAVLLRQNLIPKAHKISRELRDFRDTMRARARIVQQRTVSLTRRHGLGMKFNFTDSLSRQSQLLDALLEEQTNFFEQQILCLEKSLHPSLIHNDDIQRLLYIPGIGKVTAFSIYLEIDGIERFPTDKNFFSYCRLVPSAKNSNKNAKQRSSKDGNRYLKIAFSDAAVHAIQYYPEIRNFFNKMVRRSNEPTARAIVAKELAKIVFYVLKNKTPYRGFKGLPISRQKSVQWPRLKSPAA

SEQ ID NO: 63945 - protein, 380 aa, unidentified
MTDIEQHDSVGVFVGVDVGKGTHHAVALDRKGKRLLDSALPNDEAKLRALIGKLKEHGQILLVVDQPATVGALPVAVARAEGVWVAYLPGLAMRRIADLHAGEAKTDARDAYIIAEAARSMPHTLRSLKLADSQVAELTMLCGFDEDLAGQITQTSNRIRGLLTQIHPALERVVGPHLDHPAMLDLLERHPSPARLASLSEKQLANRLVKLAPRMGKTWAAEIVQALSEQTVVVLGTQAASIVLPRLAQQLAALRIQREEIAKEVERLVLAHPLHPVLTSMPGVGVRTAARLLIDVASRAFASAAHLAAYAGLAPVTRRSGSSIRGELPSRRGNKQLKRAMFLSAFAALRDPVSRAYYSRKISQGKRHNQALIALPTVPM

SEQ ID NO: 63946 - protein, 516 aa, unidentified
MVATVVRRPRRVFQVHKPNGQLSPRVQAVGPERFGIIAVDPAKKRSRLLLANFYGTVLVPPITVEHERGPIEAALAALRGAIREHNLGDVVVALERTGTYHRPLQRAFQDARFETRLVHPFTSKQFRLPADPDHKTDDTDLAGIVRAVTQGFGLLEPVWPELYASLQMLRRHRRDLVDKAALLQNQIRETLHSAMPGFEAAFTHLWQSPAPLAIARQFSSAADILQAGADGLRAALKDAGVRPRHDTIGKVLDWARNAPQGHPLNALQRRIFTALDDDRREKTRLINAIEVDLARLVVQTPYAILLAIPGINIVTVADLAGEMGPIEFYLNANHITGRAGLVPCRYQSDQVDRSGPLVKRANRRLRAVLMQTASNLINCNNTYNARAAAWRRQGKDERWIRVKVAKSFSRLLFAMVAGRQIFPHPALQPRHYVLGKLLEFHMEHKVAPEQMRADLEALCDQLPTRARAAEIPPLQERLDELTRRRAHGPRPLAEILPIVLVRLQGVQSTPRSEDPS

SEQ ID NO: 63947 - protein, 383 aa, unidentified
MEEAIGMGSVDSDARDDEVRVTGGVDTHRDQHVGVALDQFGRRLGTRGVPTTPAGFAELVAWARTFGTLEQLGVEGTGSYGAGLTRWLRARGLVVIEVERPRRQDRQARRRRGKSDPLDAEAAARAVQAGTGVGHPKAGDGRVEMIRTLRLTRRSAMKARTQAANQLHALVVTAPDELRARLRALPLAELVRIAAASRPVRTGAARATPLAAAKLALKGLAIRYRQLSAEIDALDVHLEQLVSTAAPELLAVKGVGTDIAGALLVAAGDNPDRLQSEAAFASLCGVAPIPASSGKTNRHRLSRGGDRDANRALYLLALGRMGWDPATRTYVTRRTAAGLSKPEIIRCLKRYLAREIYRILVKPSASLLAPVDGDDGQPSRIAS

SEQ ID NO: 63948 - protein, 323 aa, unidentified
MQGQKSPERSAQPGVYVGVDVCKGWLDVYLHPVGQRFRVANTPEGLKTLKRRIVELPVELIVMEATGKFHRQAHRTLHAAGLAVAVVNPLRARLFAEAAGQLAKTDRLDARGLALMGQALEPSATAPAPEAIEALQELARARSAAKADQTALSNQRGASQTAFLKAELGRRLKTLAGHIERLDAEIERRIGADPTLKRRFDILLTIPGVGPVAALALVVGMPELGACSGKAASLLAGLAPLARDSGAKAGERHISGGRAFVRTGLYLAAIAAARFNPQLSDDYNRLRSAGKKAKVAITAIMRKLVVLANVLIKEDRPWTPIHA

SEQ ID NO: 63949 - protein, 371 aa, unidentified
MKSILSVGMDVHKNSFSLCAYDGYTGEIVSESTFASDVKLVIKFIETLKSRYENDVEIKCGYEAGCLGYSLYKSLTARGVDCVILAPTTMQVSAKNKMVKNDRMDALNIAKNLTSGSYKAVYVPDEEDVEIKEYIRMIHDFKKELKRVKQEICAFVLRHGYQYDGKSKWTIRYMNWIRELEMSEIQRETLNEYIAEMENLNDKINRFMNRIDEMYQSERYHEKVSKLRCFKGIETFAAMTIQVETADFERFPNAKAYASYTGLTTGEHSSGDKNNRIGITKQGNTVIRKTLVECAQSLVKGNVYTPKSKRLKSRQKGMDVNIIAYADKATERLKKKYQKLIERNVPRNKAIVAVARELACFIWGMETGNIH

SEQ ID NO: 63950 - protein, 340 aa, unidentified
MAIVAGFDVHRAQITFDALNRETGEVHRGRIAATPEAVRRWVGRFAGERVDVAVEACTGWLFVCEALLEVGAVPHLAEPVETSALRGKKRRAKTDREDARWLRTLLCEGRLPEAWIPPAHVREWRTRARLRKTLVDERTTWLQRVQATLFHHGVSGAPDKLLSAQGREFLAGLELPDAASERIEVALSLIEALDRQLAPLEQALRQLARRQTGCRALMAHYGIGELTAPTILCELGDVTRLSASRKAVRCAGLDVGVHRSDRRSRAGKLTRQGSPQLRWALYESAQAACRPTSPDRADYLALKARGLSHTRATMTIARKLARRCFHSLRQLGPAALEPVA

SEQ ID NO: 63951 - protein, 359 aa, unidentified
MSEHNTTSRCAIGVDLGKKRSKVCVMENGVVTREFEVTGTKTAFQRAFGSLPRHRVILEVGAMSPWVSRTLSEMDFRVIVVAATTLKDCFSKGRRKNDRDDARGLAQIAVSCPEMLRVVEHRSEHAQRDLARLHVRATLVEERTRLINTVRGMLGSLGVQLPTCSTAAFVKRVHSTLAKGGEDATLVEPLLRQIEGATKSIRDLEKEIEALAQERYPAIKTLTQVHGVGTQTALTFMLTVTDPKRFRKNRTIGSYLGLVPAQYQSGDSNPQLRITKAGNTELRCLLVQCSQFILGRFGKESDLRRFGLAMAARGGPRSKKRAVVAVARRLAVLLLSLWRTGEIYEPLRNERLRGATLSA

SEQ ID NO: 63952 - protein, 346 aa, unidentified
MLYAGLDLSRKRLDFHLLDGEGATVELGATPPDADGLQRLSERVTQHGAPVRAAIESMNGARFVHDRLELAGWQVEIADAQKVKGLAPLACKTDRIDAWVLAELARRDLVPAIWLPDPLVRAERERARWRLHLVRHRSSLKQRVHAVLLTHGKPCPVSDLFGVRGRQLLARLGLPEPWQGTIEASLRLIDELDREISGCERELRRLGADHRYVPLLLTVPGISWVLAYTIAAELGDIGRFPSARKLAGYSGLCPRVYQSGERDLRGPLAKQGPRYLRWALVEAATHACTHPTYRHRYQQTKARIGKQRGAKVAQIDLARRLSEAIWHMLSRGEPFAPKGATDPLAA

SEQ ID NO: 63953 - protein, 313 aa, unidentified
MLKPITFANAREGWQIWEEKLNQLDAPAGQILIGMEATSRYGENLYHELEQRGYVLRLLHPGQTHHFHQQRGLRAKTDRLDAMTIARTLLSGEARMGYVPSEQVATYRELVRLHTQLSDTAASYQNEIQALIVVLFPEFTQVFADPCLPTALSVRSRLPECSGPGRSRVEPLFQLLRAQKAAHYGRPTAKKLVAKASQSVSSGRAIAGRSASLRILCDQLEHTQANLMRLNAEIEHLLNTDPGVKGLQQVPEFGPKTLAVLRGELGDVQRFSRTDEVIAYGGMDIQIKESGHRIGKAKLSKRGSGPARDGSST

SEQ ID NO: 63954 - protein, 347 aa, unidentified
MRFYTKQHQYYCGIDLHTKKMFICILDAAGQIRVHQNIKTDQETFLNIISPFREDMVVAAECMFTWYWIADLCAEKNIPFVLGHALYMKAIHGGKAKNDKIDSHKIATLLRGGMLPQAYVYPAKMRATRDLLRRRNHFMRKRAELYAHIQNTRSQYNLPDFLGRIAKPQNREGIVERFHDPSVQKSMAVNLEMIQAYDHILTQLERDIITSAKEHDLRSYALLQTIPGVGRILALVILYEIESIQRFPQVQDFVSYCRLIKSIKESNGKKYGSSGKKIGNAHLKWAFSEAAVLFLKGNEPAKRYLERLSRKHCKAKALSILAHKLGRAVYFMLKNKEAFNQTKFLGL

SEQ ID NO: 63955 - protein, 403 aa, unidentified
MTKYHVGIDVGKYHHHVSIREIERDTYNKTFSITNDHEGFEDLISSLERLSDDRKEFLIGIEACPYGINLSYFLMGIGFSLVEVNPFRVGQFRKAQGKKAKTDTIDARSIAGILSLGDHKPLSIPDQILDNLKELTRFRTDLVDVKATAIIHLRESLSILFPEFAKVFRQLDSPGSLAVLAAFPSPGHLIVAGEDEVGKTLSLASPHRMGRGMANRIIEAAKGTVGVFQKQQAIGIKISILAQKIASLQETIREIEKQITVIYNSLPNKLQGFPCGRDTSLAAIISEIGDIHRFATLKKFLSHLGWCPQSFQTGGYHMEHPRMSHAGNKHVRRLIWMLSIHAITRVPRYRQYFTTRVQEGKAKMHILIAIGRKLLSVLYTMLKKGIPYDPNWEENGHLAAARH

SEQ ID NO: 63956 - protein, 354 aa, unidentified
MIIIGVDFHPEFQQIALLNTTTGEVEEKRLAHPDEAAKYYRALASAGETVRIGMEASGHGRWFERLVAELQFDLWIGDAAEIRAKRGRKQKTDRQDAQHILKLMLKDDFPKIWVPNWENRDLRQLLWHRHRMVQARTRVMNQLQAVALNEGLHCKKKLWRERGRQQLESFALAPWASRRRRDLLDLLDRLNPSIAELTQAIEREVENYPAAQRLRTHPGVGVLTSLAFVLILGNAERFRCGKQVASYLGLVPLEDSSGNRRRLGHITKQGSSIVRFLLVEAAQVTVRSLPEWRSKYFHLVLRRGRKIAKVARARRLAVQLFWMMRKEWNYEQLKKFGSHAGQPGHRDGVQSNTE

SEQ ID NO: 63957 - protein, 364 aa, unidentified
MKFVGIDLHKKSITLCVRDASGRVLTRRRLHTADTERIVGFCRELGRFAFCVEATAAYEWLVQLLEPLATKWVLVHPGKMRLIAESTEKSDRVDAEVLSEFLQLGKLPRAYRPTPRQRGHRTLARYRARCRQQVTRLRCRIRHVVAGYNADRPDLFGPEGREHLARVDLTGADRFVLDQLLAEHDRGLEQLAAAKKELQAFAAGGDDAEQRARAIATSVPGIGEAIAEVALAELADVERFGSIAAAGKYAGLVPGRRGSGDKVIELGITKQGSRLLRWAMVQAAWQAVRHSARWRAVFEPIRRRRGAKRAIVAVARRLLVVLVSMLKSGQVYQPNEAEAVEQARKERLRRAKPARRPARAAAAK

SEQ ID NO: 63958 - protein, 348 aa, unidentified
MDHIGIDVHKRESQIYILAQDGEIIERRIRTEGERFAAVLGDRPRARILIEASTDSEWVARCLEALGHEVIVADPNFAPMYATRSRKVKTDRRDARALAEACLLGAYRPAHRLSDPQRHVRGRLGVRDALVHTRTRYISVIRALLRQHGYRVPSGSAGSFSDRVRSLPLPGCLLSVVAPLLAVMGHLNQQLAYSDATIEHLAIQDPRVLRLRSVPGVGPVTAAAFLAAIDDVGRFHHAHQLEAYLGLVPREYSSGETQRRGPITKAGHSRPRWLLIQAALSILRRRPPAAEALWTWALRIAARRGKYVAVVALARRLAGILYALLRDGTVYAPRRPAALPDPVAALHA

SEQ ID NO: 63959 - protein, 349 aa, unidentified
MILVGCDLHTRKQQVALLNMDTGELWDQELSHAGDDVERFYAALPPPVTVGIESTGYSLWFHALLQRLGHTLLVGEAAKIRAMVVRKTKTDRRDARHLRDLLKDDRFPLVWIPDPTTRDLRALIKHRLRLVRIRTMVKNGLHAIALNQRLALGPSLWSRQGLAQLQALVLLPHTRRRRDDSLDLLQWLNGHIDELDLQVATAAAADPDARRLMTHPGVGPVTALATVLVLGPVGRFPGSKHVVSYIGLAPTVNASADKCRLGPISKQGSALLRWVLGQAAPLATRGDAALKRVYFAVLRRRGRPKAKVALARRLLVRLYVMLRDQIDYDEFCRRGQARRGGLELARTPV

SEQ ID NO: 63960 - protein, 312 aa, unidentified
MPANAEPDYVGLDIAKDQLDYCIDEHTEGRRPNTAEGRAQLISQLRGLPHARIILEASGGYEKVVVAELLQAGVEVCVVQPGRVRAMAHAEGLAAKTDRIDARLLRRYGQRYKPRLAVPADPLAATLRELLEHRRALTTQQAEVQGRLALAGPTLRTLLDTQHTFLAEQLAAVEKLLAEHIDRDPCLRTKAARMQEVKGVGPVLAATLLAYVPELGQIESAQLSALLGVAPHAKDSAKTCFPRHVRGGRGQVRTVLYMAAVCASRWNPILAAFYQRLRSHGKPATVALVAVMRKMVCLLNHLIQNPNFVLVR

SEQ ID NO: 63961 - protein, 371 aa, unidentified
MHFITKFVGLDVSKEKISVAIADSGNEAPRYYGSIPHTPEALRKLIKHLGPAETLSFCYEAGPTGYATYRWITSMGAHCTVVAPSLIPKRPGDHVKTDRRDAEQLARLFRAGELTPVYVPDQADEALRELVRIREAAKADLHRARQRILKFLLRHHIEPPVTIKRRWTKKYLDWLRQLSFPYASMQLAFDEMLHALFEIEQRMERLGKELARQTESSPKAPLIQALQSLRGIGRLTAITLVAEIGTFSRFRSPAQLMAYLGLVSREYSTGLSTRRGSMTKTGNGRARRAVVESAWSYRYRPAVKGDLAERLEGMPAEVQRISWKAQERLHGKYRRLVYAKNKHKNVAIGAVARELVGFIWAVAQFVEQRAS

SEQ ID NO: 63962 - protein, 425 aa, unidentified
MTPEPNPEFAAFIGIDWADAKHDICLQAAGSRQREFAVLSHRPDAIDEWAAALRQRFHGQAVAVCLEIARGPLVYALQKHDFFVLFPVNPATLAKYRQAFQPSHAKADPADAQIALEILLCHRDKLKALQPQSVGIRTLERLLEERREFVDEQTRITNRLTSALKEYFPLANAWFDEKASALFCDFLSHWPSLKQLQRARRTTLLTFFREHHCYQPRLIEERLAALQRAAPLTDDAAVIKPKALMVEGLVDQLRVTLKAIARFDAEIEAVAPTLPDYALFQALPGAGPNLAPRLLVAFGERRERFASAADVQMFVGVAPVTESSGKQHWVHWRLQCPTFLRQTFVEWAAQTITRSFWAGAYYRQQRAKGCAHQTAVRALAFKWIRILFRCWQLRTPYDESAYLNALQRRGSPLLASLALPSPATH

SEQ ID NO: 63963 - protein, 374 aa, unidentified
MHMMHHRQIRYLGLDVHKATIAVAIADESGAPTSYGSIANEPSAIRTLMTRLGGSDVQLHVAYEAGPTGYALHRQLTTMGIDCIVVAPSLIPKRAGDKVKTDRRDALKLARLLRSGDLTPVWVPDQAHEALRSLVRARADAKADQLRAKHRLSKFLLRQACWPPIGVRNWSQRYFSWLRQLEFEHLPDRIVFADYLAEVTAAGERIKRLEAALHQCAQTSSQLALIRALQAFRGIGFLSAVTLVAEAGDLRRFRTAPQFMAYVGLVPSESSSGGKQQRGSITKTGNSLLRHVLGEAAHHVRRAPRVSGALKRRQADVSPEIVALAWRAQLRLHARYRHLSLRLGALKALTAVARELAGFIWAAGQVRLEEPAAA

SEQ ID NO: 63964 - protein, 370 aa, unidentified
MSNATTFVGLDVHARSVKACAFVPETGETIRKSFGYEPGEIASWVSSLPQPARCVYESGVTGFHLCRELRSMGLDCVVGAVSKMHKPAADRGRKTDRRDAQFLAVQLALGVVTEVHVPDAECEGARDLTRALADARDDAVRAKQRLSKFLLRHGFVYDERNSAGQRRNRWTRDFWAWVGRIDLGDGAAMATLDHYCVRVREADAAKAALEAKVKTLAQQPRWKPTCDALKCLKGVDAVTAVSIACEADGFARFAAASGFAAWVGLVPSEHSSGESQFRGGITKAGNKHLRKLLVEAAWHYKGASRSPKDLAKGQIVDEATRRHANAGVRRLVDRRRAMDDAGKQSSVANVAVARELACWCWAVGRMAEGA

SEQ ID NO: 63965 - protein, 412 aa, unidentified
MDVIVQRPAALDVHKEQVSACVRFPAPDGARAQDVREFKTTVGGLLVLHDWLKAHGVTQVAMEATGVYWKPVWAVLEDSFDCLLVNARHVKQVPGRKTDVKDAEWLCQLLEAGLLRASFVPPKPIRQLRNFTRYRKAQIKERQREANRLHKALEDTGIKLDCVATDILGVSGRAMLDALCAGTTDPEVLAELAKGRLRAKLPALREALEGRFDAQHALLIGAILSHLDFLDEQVERLSEAIEEQLRPFQPAVDLLRTLGGIETRTAQNILAEIGTDMSVFPSAGHCASWAGQCSGNDQSAGKRRSGRSRKGSKWLNDALKDAAMGAIRTNDSYLQAQYRRLKPRIGHGRALGAVKHSIICAIWHMLSTGELYRDLGGDYFRKRDPERQTKRLIAQLERLGHTVTLEALPDAA

SEQ ID NO: 63966 - protein, 401 aa, unidentified
MPELWAGTDAGKAEHHCTVIDNDGAKVLSRRVPNGEAELLQLLADVLDLADGSPVTWAVDLNAGGAALWIALLVSHDQRLLYIPGRSVHHASGSYRGDGKTDAKDAYVIADQARMRRDLHLLQETSEIAVDLKILTARRLDLSADRTRAINRLRGQMVEYFPALERAFDYSASKAALVLLAGYQTPTALRRIGRTRLATWLKNRKAYNPAKVADTAVTAAEAQFTEVPGEKTAAKMVHTLARKVMDLDEEIAQISSLIEERFRGHPSAEVITSMPGIGDMLGAEFIAATGGDLATFGSPDRLAGVAGLAPVPRDSGKISGNMRRPRRYSRRLLRMCYISAQIAARVCPESKLFYDRKRAEGKSHKQAVLALARRRLNVLWALIRDNRTFSAATPRPALATA

SEQ ID NO: 63967 - protein, 419 aa, unidentified
MGKIIENCAGIDIGKRFLLCCVLTGSAAEEPRSETLRFEVTVAALQRLREWLTNKKVTHVVMESTGSYWIPVFNILEDHFVIVLANPEEVKNRKGHKTDRKDAEHLADLLRHDHVRSSYIPPKPVRDLRDLTRRRLQLTEDATRERNRVQKLLEHVNVKIGNVLSDIFGVSGLNMLLALLSGQATPEEIAQLARGQAKRKIPQVIEALEGHRMSDHERLLIRSCLRHLACLEEEVEELDGEILRRMQMPPFEAAYRLMQTLPGVGQLAAASILAETGTDLAPFPTADQMASWAGLCPGNRESAGIQKGGQTTHGNSYLRTALVQCAWAATRKQGSVFQARFQQLSPRRGQKRAIVAVAHQMLTIAYCMLKQGVPFRDAESIPRQRRRKRRAHHHLCCLRRLGLSVRVVADSNGVLGESV

SEQ ID NO: 63968 - protein, 499 aa, unidentified
MNPLFVGIDVSSKNNVAYLMKPDGSKHSSFSVQNNLGGAKLLSERIVSALGSMQLERVVIGLEATSIYGDSLVYALREDGRLGRFQRKIHVLNPKQVRKFKEAYSDLPKNDWVDAFVIADHLRFGRINREVYMDDYRYKALQTLTRARFDVIQNLTREKQRFANYLFLKCSGMAQDKDIQNTSATTIALMEHFETVDDLANADLEELTAFITETGRGKFADPDATAKAVRAAAKGSYRLPKTVNDTVNQAMAVSIASMRALKGQVKVLDKAIEQQFEIIPNTLTSIPGIGKVYSAGIIAEIGDIHRFDSQASVAKYAGLVWNRSQSGDFEAEHSRMIKSGNRYLRYYLLEAANSVRRCDSEFRRYYDLKFKEVNKYQHKRALALTARKLVRLVFRLLKDNRLYIPPELRAQLATLTHRPCFKISQGQGFGWCCLFAVYTVLFTLFRLKFSCITYLTSYHWTLQQFQHCGGRPGKLLRNLLQYIPVGQHRLPGIVIEAVK

SEQ ID NO: 63969 - protein, 370 aa, unidentified
MQQYTEAFVGIDTAKKKHALAIADPGRDGETRYLGEIDSAPAAVQRMIRKLARRYEKLYFCYEAGPTGYGLYRQVRALGHDCIVVAPSLVPKRPGERIKTNRRDAVTLARLLRAGDLTPVWVPDAVHEAVRDLVRARTAASEDLRRKRQQLLSFLLRHGRIYSGRKHWTKMHLHWLAQQKFDHPAQQIVFQDAVDAVEDAATRLRRLDQQVAEIVPGWSMAPVVEAYQAMRGVSFAVAVTFVVEIGDLRRFDNPRQLMAFLGLVPSERSTGERVRRAGLTLAGNKRARRVLIEGAWSYRYPARVSQALQTRLEGLPKTVREIAWKAQTRLCARYRRLTAVGKKRPLVIAAIAREMAAFLWAIAQHVAPAA

SEQ ID NO: 63970 - protein, 346 aa, unidentified
MDHIAIDLGSRESQVCIRTAEGQIIEERRVSTRSLGKYLTKRPKSRVVLESCAEAFSVADAAMGAGHETVVVPATLAPSLGVGERGVKTDCRDARNLSEASCRMSKLPSIHVPAQASRNRKSICNFRETLVQTRTKLINSVRGWMRSEGLGVVRSGAPTSFPVRVRTHAAERSRTLPAYVEPVLVVIDKLTVEISAMDDQLEEAAESDATCRLLMTAPGIGPTVSMRYTAAIDQVTRFPNAHRLQSYLGLTPGERSSSQRKRRTGLTKAGPSKLRRVLIQAAWAARRYYKDDPVVMWSFEVEKRRGKQVAAAALARRLAGILYAMWRDEKPYDKAHQVTRATQATA

SEQ ID NO: 63971 - protein, 300 aa, unidentified
MEIKRIGLDLAKYVFEVHAVDNDENVVLRKTLRREAVAQFFAELEPCVVGMEACCGSHYWARVLTDLGHEVRLISPQFVKPYVKSNKNDRNDAEAICEAVGRPSMRFVPPKSPEQLEIQAVHRIRQRVVANRTRLVNQVRGLLGEHGVVVPRDINRIRRTLSEIADGQSGGFGGLFVEMLRDIREELAELDARLAGYNQRIKSLYRSNEMCQRISQIEGIGPITATALVAAVGDKSCFRNGRQFAAWLGLVPKQHSSGGKARLFGISKRGDRYLRTMLIHGARAVLGRSCHCTLINQNCL

SEQ ID NO: 63972 - protein, 324 aa, unidentified
MNKDKTIFGIDISKNTFDVMDSNSKHNQFENNTKGFVQFLKLLNTDSHCVMEATGYYHYQLAHFLVENNILTSVENPLSIKRFIQMKLSRIKTDKSDAKMICQYGQERELQPWVGYSKNQMECFQMMRLLETYTKQSTAYKNKVQAEQTLGNPSKLVVNSLKKSLKNLEKESQIIEKALLELVKEDYQEMLTKIESIPSIGRKTAVMLVVLTDGFTRFESAAQLCSFCGLTPSIRQSGTSINGRSRISKIGNAKLRNLLFMCSFTAFKHNKACKAIFERITNQGKSRKLALIAVCNKLLKQAFAIAKSGVEYNENYRSKLAIIN

SEQ ID NO: 63973 - protein, 350 aa, unidentified
MIIIGCDYHPGFQQIAYVNTDTGELSEARLGHKEQAEQFYRELSQRGVTVRVGMEASGHARWFERLLNELQFELWIGDAAAIRTKRVRKQKTDRQDAQLLLRLLLEDRFPRIWVPDAENRDLRQLLWHRHRLVQMRTRVMNQLHVVALNEGLRRKKALWRPAGRVELEGLSLAPWASRRRQDLLDLLDRLTPKIHELNGKLEQIVELRPVTRQLSTHPGVGPLTALAFELVIGTPERFACAKQIASYVGLVPVEESSGDRRRLGHISKQGNTLLRFLLVEAAQVTVRSDPQWRSQFFHLAMRRGRKIAKVAMARKLAVELYWMWRRGWEYDEMQQLGSHAGEPGNRHGVQ

SEQ ID NO: 63974 - protein, 348 aa, unidentified
MQSTLKLPVIGLDLAKSVFQLHIVDVDTGEIQRRQIKRAKLTEFFAKCTPSLVAMEACGSSHYWARTIRALGHEVKLLPAQHVKAFLLRDKTDAMDAQAIWVAAQQPHILPVPVKSERQQACLALHSMRRQMMKMRIMQTNALRGILAEFGVAMPIGHRQLLKAIHAEISQAQTQGLLPTDLVVCIQEQLKRIDGLQDDIDHIGQRLVAMIREDRQMQAIQEIPGVGDLTASALVAAVGDFCTFKSARQFASWVGLVPRHVGTGGKTQQLGISKRGDTYLRTLLIAGARAVIARSGKSGWIERLLQRRHYNVVVVALANKMARTAWAVLARGMAFDRNRWNPLEVEAA

SEQ ID NO: 63975 - protein, 319 aa, unidentified
MSDQVRTSYVGVDVSKERLDVAFRPAGGHCRFPNDPGGIDALVSRLAEERPALVVLEASGGYERPAAAALAASGLAVAVVNPRQARDFAKATGRLAKTDALDAQSLARFAEAVKPEPRALPGEEALLLGEILDRRRQLIGMLVPENNRLPVTASEPVRRRIRAHVRWLEKEISRTDGELKEAIERSPAWRENEALLRSVPGVGPVLAGTLLAELPELGTLPHKRLSALVGVAPFNFDSGTLRGKRMVWGGRARVRSTLYMASLAAARHNPAIRAFYERLVAAGKPKKVALVACARKLLAILNAVIRDRVPWSPTHVLSP

SEQ ID NO: 63976 - protein, 402 aa, unidentified
MGRVVIGMDPHKASASIEVVDEKERILHTGQYATDRDGYQQMLAAVSRSPHRLWGVEGSRGTGRHLAQRLVSDGESVVDVPAKLAARARVFDTGNGRKTDATDAHSVAVVALRTKDLVAVRVDDDVALLRLLSDRHDELSLARTQTVNRLHRLLLELIPGGAKLWLSAIQARRLLDQVVVTGPAAEVRHRLASELVTEIAVLDRKLKESEKQLRKAVLATGSGLLKLYGIGPVAAARLLADVTDIARFPTRSRFASWNGSAPLDASSGEQRRHRLSRAGNRRINWVLHIMAIVQIRFDTEGRAYYRRRLAAGKTPREAIRCLKRRLSDVVYRQLVDDATKASPGGHSGATLTSSAADPNPTVDSSDKSLPGLEHEPTPAVAPRRTTPQPASRQPRRRARDRT

SEQ ID NO: 63977 - protein, 409 aa, unidentified
MTKLFVGIDVSMNDNKVRLLKEDGSDAGKLTVTNNLPGAIKLVDKILQTAGHYSVDKLVVGLESTSHYSYHLATFLKNDQRLAILSPSVHVLNAKSVHRFKSSYNDLPKNDDVDAWVIADKLRFGRLPEEVSVDDRYLALQRLTRTRFHLMQSISREKAFFLNNLFLKFSSLCQDKLFSNQFGATAMAVVEEFLSVDEVATMPLEELVEFIQQKSKNRFSDPEGVAQALKKAARSSYRLSKSLADPVNASLAASASVIRALESEVKKLDKVIAQHLEAIPQTLTSIKGIGPVYAAGIVAEIAGINRFDNHKALAKYAGLVWNEHQSGNWKAEFTPRIKSGNKYLRYYLVESANHIKVHDEEYRQFYLSKYSEATTHKHKRALVLTARKFVRLVFALLRNNQLYNASKRS

SEQ ID NO: 63978 - protein, 363 aa, unidentified
MHSITNTELSSHEETRCQFNGGRCTIKMGIDVHQDFYVVAEQVGGTNPKPPQRFHKQAFLHWAAKLKHTGAEVHAVYEACGFGFTLHRQLAALGIHCHVVCPQKLDERNKRVKTDGLDAKALCLKLDRFVQGNRDAMALVRVPTEEEERSRAIHRQREQLVGARKRLEAQGRSLMVNHGLEPVQNWWKPRTFAALPVAQWMRELLLNSQPILLALQEKIAVLTLQLQSAAASNQPRGLGKMTSVIIDREIGDWNRFNNRRQIASYTGLCPGEYSSGNTRLQSCVTKHGNPRLRAALVELAWRLVRFQPSYKPVVKWRQILAKGALATGAARKKAIVAVARQLAVDLWRIKTGRLRAEQLGLTI

SEQ ID NO: 63979 - protein, 417 aa, unidentified
MKIVYPICCGIDVHKSFLVATIVSVTELRTLKYKKERFSTFNKDLKRLKHWLIENNCYDVCMESTGKYWVPVLNVLEPELRVVIVNPKWVKAIKGNKDDVKDSKWIGELFCFGLVRSSFVPEKSIRILREFTRYRYKLVNMRSSEKNRFQNGFTVCNIALDSVVSDMFGKSASRITDYLLSDENPDAAHCVTFLHRSLKKKAVAVVESIDGFQLTEEQKFRMLQIRQHMEYLDSAIEAVDRKLEEMASPYAAAIKLLCTIPGMKHDSAVTVISEIGTDMSQFGSSKRLCSWAGLTPGNNQSAGKKKSVKITRAGVYIKPMLVQVAHAAVKCTSQPYYKVKYESIMRRRGKKRAIIAIARMILTAIYHMFCTGEVFNPTDLRQIDMPKELKKKNVANAIRLLKQQGVLPENFTEASYA

SEQ ID NO: 63980 - protein, 347 aa, unidentified
MKYYAGIDVSLNSSNVCVVDASGKIVREGKVASEPVTLITWLGSLGVNLERIGLEAGPLSQWLYGALREAGLAVELLETRHVKTALSTMPVKTDRNDARGIAQLMRLGWFRPVHCKSMAAQEVRALLTARKLVQSKLYDIEMSLRGILRGFGLKVGPTTSPSFAARINHLVDGQTSLEVVAAALLSLHAVALREFKSLEKSVRQISRADARVRLLMSTPGVGPLVALTYVAAIDDPARFTSSKSVGAHFGLTPKKYQSGETDVSGRISKMGDGSVRTALYEAAHVILTRPIKGGALKSWAMKLARRAGMMRAKVALARKLAVVLHRMWVDAIKFDADKASGCVRVAA

SEQ ID NO: 63981 - protein, 411 aa, unidentified
MNPVVGLDISKGKSQVQAFLDKGKPYRKSFKVTHTLEGLNDLVIFLEDVKNEAGMKPTIILEATGHYGAPVIHHLEERGYLLIIINPLISYKARGSSLRKVKTDAIDAYLLCELFYKEELEPYKKRGVQLLNLRNLTRQHENITGVMIQTKLQFQAVLEQVFPEYKGVFGDLYSNVSLLTLSEFPSSEDILKASEESITDKIYELCKSRSIRWANEKALQLKAAAARNPFEKTVYQSHILSLDMYIKILLQYKEHLSKLESEIDALAKEIEEYSIIKSIPGIGEKIAATIISEIGEIDRFNNPKKLVAFAGVDPSVFESGKFSATKNRITKRGSSRLRHALFMAVRCAIRDCRKTKTDDTIIPRNKKIREFYDKKREEGKPFKVAIIACVNKLLHWIFALLKNKTTYQDLA

SEQ ID NO: 63982 - protein, 355 aa, unidentified
MLYLGIDQHARQITISLRDESGDVLEARQVSTQPGRINAFFEQLTRERLRKGELFVAVLEVCGFNDWLIRMLKDYRCHKVILIQPYDRKKRKTDRRDAAALSELLWVNRDRLLDGKPVRGLRQVDVASTSDQENRRLTTLRKEIGQARTRLINKIRHMLRRHNMQWEMPTKTFPTQAAIAWLKKITLPAIDRLEMNYLLVDLQHVEQRVKELEETIAQRCGASEDAVLLSSMPGVGCFTATGLASRVGRVERFPRAHSLANYWGLTPGCRNSGENNQRLGSITKAGSGMARWLLAQVARNALQKDARLRAWFKRIRRRRGASIARVAAMRKLATIIWHMLSKRKTYKECRALAAA

SEQ ID NO: 63983 - protein, 382 aa, unidentified
MNRILKIGMDVHSTSYTLCAMEPVLGGEDRIFANIQVTSDYRNVIQFIDKLKEKLGSSDSYSIECGYEAGCLGYSLYHQLTKSGVKCTILAPTTMLTQQGKRVKTDKRDAVMIAQCLSYGGYHAVHVPADKDVSVKEYLRMRDDHKVALKKIKQQINAFCLRQGYFYAGNKWTIKHLNWLKKLVLSDLYRETLNEYLTSYEEQTAKIERFDKRIEELAEDSDYQENVKKLGCLLGIKTHTALSLIVETGDFKRFRKGNTYAAFLGLAPGESSSGEKISRTGITKAGNSHLRMLLIEAARGMCRGRIGYKSKVLRSRQDGNPTEVIAYADRGNTRMRSKYYRMIRHGKKDNVAVAAVARELACFIWGLMTNNITSKEEGTKAA

SEQ ID NO: 63984 - protein, 371 aa, unidentified
MGESSKTLYVGLDVHKDSIAVAYAPEDRGAEVASLGSIGTRQCDIDTLIRKLQSKGATLVFVSEAGPCGYWLYRYLTRTGLSCHVVAPSLIPKKPGDRVKTDRRDAITLARSMRSGDLTAVYVPQIEDEAIRDLSRGREDAMRDLKATKHRLTAFLLRQDIRYEGRANWNAAHLRWLSEVVCPTRAQQIVFQEYVRAVTEQHERLPRLETALHEEVKGWRLYPVVEAIQALRGVELTGAVIVIAELGDLTRFDTPRKLMSYLGLTPSEYSSGERRRQGGITKAGNSHARRALVEGAWAYRYPAKVSRHLQLRLEKLPAEVQAISWKAQVRLCKRYRQLTARGKHVNQVVVAIAREMAAFAWAIARTVPLAP

SEQ ID NO: 63985 - protein, 351 aa, unidentified
MSISMIGLDTAKSVFQVHGVDENGKTVLKRKLQRSEMVTFFEKLPACTVVLEACGAAHFWARTLIGLGHDAKLIAPEAVRPFVKKGRKNDPADAEGLVTAANHRGTRFVPVKDTAQQGILSIHTARAILVKQETMLSNSVRGLAAEFGHTVAKGKENLAELMAEVEADEAVPARARQGIVALYDQYRALDEQIQTLGAEIVAHAKSDEKARILDAIPGVGPITASLVVATVSDWSVFKTARDFAAWLGLVPRQNSTGGKTRLGKITKAGNKQIRKLLVVGATSMVRRSEHWDSAMGRWTASLLRKGRPVRLVTVALANKVARVMWALMTHNDVYRPQGAVKPAATADVAAA

SEQ ID NO: 63986 - protein, 355 aa, unidentified
MTSLTYIPKDYDTFIGIDVDKTSFSFTVNNHFQMKKSKKLPSNPEHLYNYIQKTYGHKKVICAYEAGPTGFHLYDYLTSKKIPCLITAPFSIPKAPNEKVKTNRIDSVKITDHLMSGKMKSIRVPQGDYRELRHLIRIRENYASDRKTAKQRIKALLLYSNLYPELKEPDNKWSRNYIRELKQISCSFAVRQRLDMLLEDLEYARTKTLSTLRTLKAFCREHTEINQYMRYLQSIPGFGFIVSVTLLGKIGDPAYLHNPRELAAYVGLVPKEKSTGDTIHKGSITGLGSHILRFMLVEAAWVAIRKDTQLEQFYHRIKGKHHPRYAAKIAITAVARKLTQIAYRVIKDKRMYVQY

SEQ ID NO: 63987 - protein, 353 aa, unidentified
MTTVILPHHWCVGIDLHKDTMTVCTDCRCCGEIAFRKIACKNRDQIAEFFRTLRRPHSVAIEAVGFYRWLWELAEPLVEKLVLADATQARALAGRRLKTDRADAQNIAELLADGRLPLAYAPPLEVQILRDWTRQRNRLSRAHARALHGVKSIMNINNRPGPVRLNAARLIGYLKAYGKLLPERHVRMLWQHQRQLGLLEEEIEMCEREIAKLLDAPRFEPVTKLLLTAPGVGFVTAATVLAEVGDFSRFPDGKAIGRYAGLTPRVFASGGKERQGHISKTGPSDLRWVLQQAAWTAIRCDDQIKRRWLKISRGSGKKSAAVGIARQLLVTLWQMIRHQAPYRPRVEPVPEAA

SEQ ID NO: 63988 - protein, 427 aa, unidentified
MQYALIQVLPDVPAGGVCAGIDWATADHVACVAGMAGRVKDRFSAAHDKAGLDAMITRLRRNKATEVAIERGDGALVDALLAAGLTVVVITSRQVKNLRSRYGSSGAKDDRFDSFVLADTLRTDRARLRPLVPDTAATIALRAAVRARRDLVAHRVAACNQLRAHLAAAFPAAVGLSCELDSPISLAFLARFGSCDAAAQIGEQQMAAWLQTVPARGNTAPASVLCARLRVSAPGATGAAGTAQAGVTAALTTTLSALSAQVKALETQIAAQLACHPDGHIFTSLPRAGTLRAARLLAEIGDCRSRFPDPQSLAGLAGVAPVTRQSGKHASIEFRWAVNRQLRDAVCDFAAGSRHASPWAASVYDAARDRGKDHPHAVRVLARAWIYVIWRCWHGAAAYDPAKHNALQHLLDRQHAEAADSIWQEDR

SEQ ID NO: 63989 - protein, 371 aa, unidentified
MKKFTKFIGMDVHKATIAVSVADANGGEVRYVGEIANTPEAIEKLVRQLRKGDAHLSFCYEAGPCGYGIHRQLSDLGWDCQVVAPSLIPRKPGERVKTDRRDSLMLARLHRAGELTAVWVPDDAQEGLRDLTRAREDMKHLQRQAKQRLCAFLLRYGKCYSGKSNWTQAHYRWLEEQQFRQSVQQIVFQEYVDTVKALSKRVDGLDTQLESAASESVFWPVIEGLMALRGVNLLTATTVVAEIGDLKRFASAPQLMAYLGLVPSEHSSGTTKSRGAITKTGNAHVRRVLVEASWTYRHPARKTAHLQRRAERTSEAVQDIAWKAQKRLCARYRLMEGKGKLKVQACTAVARELSGFIWAIGQELPQPVPNR

SEQ ID NO: 63990 - protein, 449 aa, unidentified
MSKGYGDFVLLDTCKKVVEESFRLDDNKQGHDILKRQLLHWKKEHSVARLLLVTESTGGYEDNWLRVSKDKALCSFVESYRINAKIIFHEYEAQRRNSIDDGISALTIAEHVVKNLENFSVTKSFHETAYTPARSLVRHYASLQQERSSHKNGLLKLIYQYLPSLEAIKPSEWPSYWLEIFVRYGSRKSIQIAASKGFKQLKRVPKGKAKEIAEALANGIDVRHTPQMVVFAIRSKARQIKRINEELQEIKKMIIDQAPVDADQVDLLKSIKGMGDITPVILLSFIEEVSRFKDAKHMASFFGVQPRVKRSGDGSYKTKMSKQGAGLVRRELYLLAFRTLSQEPYLRAIYAKARAKGMVHDAALGVLMHKILRIIYGMLVSNTRFNAGIDQLNQHQTGAESKLQKQKKNAARRFQPASTVAPVSFRQRKKRKRDHELQADGISESTESS

SEQ ID NO: 63991 - protein, 341 aa, unidentified
MSEITTVGLDLAKNVFQVHGADASGRAELRKKLRRDQVLAFFSQLQPCIVAMEACGGAHFWGREIVKLGHEVRLIPPAYVKPFVKRQKNDAADAEAICEAVRRPSMRFVAAKSAERQAVLVLHRSRELLVRQRTMLINAIRGHCAEFGLVTAQGVRGSRDLIERIGQADSIALPDMAKAAMMLLFEQLQALVRQIQTLEQRLLAWHRQEQASQRLATIPGVGVITATALAASVTDPAAFRSGREFSASLGLVPRQNSSGGKDKLGRISKMGDRYLRKLLVVGATSVVRRARNADTAAANWVRSLLDRKPARLVTVAMANKTARIVWAVLTRGETYRSPAAV

SEQ ID NO: 63992 - protein, 356 aa, unidentified
MNHFNKLDFTNQPIYIGLDVHKKSWSVSIYSQHCEHKTFTQPPQVDKLVTYLRRTFPGATYQSVYEAGFSGFWIHDQLEQQGIHCMVVNPADIPTKDKEKATKTDQVDCRKLARSLRNCELEGIYVPSRIKVEDRSLVRTRQSMVRKQTRCKNQIKSILSFYGIPIPEEMENRRWSKRFINFIEQIRMEKTSGDFALKAHLDELLHLRGIIARLNKAITQLAKTEQYYDQVKLLKTIPGISTLTAMILLTELSEISRFKTLDKLASYVGLIPKTHASGEKQQQTALTKRRNSQLRALLIESSWIAVRKDPALMFSFNRLSARMKKTKAIIPIARKLLNRIRYVLKNQKPYLTSVVE

SEQ ID NO: 63993 - protein, 442 aa, unidentified
MNKKYFMGIDVSKGYADITVLDSRKRIVEENFQLDDTFEGHNKLFEILCNFFTQHPDSKLFAAVESTGGYENNWFTILHKLQSQMNISVARLNPFGVSHSSKASMNRIITDKQSAKHIAEYLIGYPEKVNYQSEDYFASARRQWSSIKLFTKQKTQLLNQLNSLLYIANPEILSFCNNGMGLWTLLLLEKYPTALKLSRARVTSLSKIPYLTKSRAEEIIENAKRSVASTNDEIIEGTIIALVKQIISLKKIITTQIKCLETNVDLPSEIKLLKSFGGIGTYSAVGLMIEIVSVERFSSSKKLASFFGIHPVFKISGDGKSGFRMSKKGRKEPRNILFNTTRYAIVHNPLIKELYTNHLKKGMSKLSAIGAIMHKILRIIYGMLKNNTPFNAQIDHRNRNNIIVNNQSKKYTIERRFQLYDNKAPISRRENKMRKENELLPK

SEQ ID NO: 63994 - protein, 385 aa, unidentified
MVSDLREGPLMGWTGCFPRGDSLQRLYRSTRRSSPWIPPHPPLASIGIDIGKEVFHIVGFSADGTIAFRRKIKRLALIETFKRLPASIVGMEACLSAHFVSRALRQLGHEPRIIPAIYVKPFLKGQKNDYNDAEAIAEASLRPNLRTVREKTQDQLDLQACHRVRSRLVSRRTATINQIRAFLIEQGIAVRTGSRALRNSLLAILENRQDEISPRMGGLIVGLYEDWISLDERIDTIASEIEKISEKEANCQRLMSVPGIGPLISTAVVAAIGTGEAFERGRDFGAWLGLVPRQYSTGGRSILGRISKRGSKYLRTLFIQAANVILMRPHNWERFSFGTWLRNAAPRLHRNKLATALANKLARIAWSILRNEKTFDINRHEAMAI

SEQ ID NO: 63995 - protein, 330 aa, unidentified
MNSICLSTDQLTPALPVLGLDVAKKSVQAELRTNGKRVRFGFENNAKGFAQLARMLKEQGALKVWAGLEATGPYSHALALWLHGQGHRVSLLNPRRVKQYARSAGNRNKTDLLDAAIIADFVCAHLPAAWQPPTLEVAQLQALVRRREELSLMLQAEKNRLEGVASHVRCSLERIIDTLSAEKTRLEKLITQQIRSHQQLSRDHQLLCTIKGIGSLTAAILLAEMARPGQVERARQAAAHAGLAPRREQSGTSVRRNRALGKEGNRYLRKALYMPALVAIKYNAPLRHFASRLRTAGKPKMSIVCAVMRKLIHIAFGVLKHQKPFNPSLA

SEQ ID NO: 63996 - protein, 413 aa, unidentified
MDVLYPRCCGLDVHKSSISACILIQVAGRVQKHQHRFGAMTQDLQELANWLRQFEVAQVAMESSGVYWKPVWNILEGQFTVILANAQHIKNVPGRKTDQKDAEWIAQLLQHGLLRPSYVPSEVIRDLRDLTRMRASLSQEASRISSRVQKVLEDANVKLASVATNTLGKSGRAMLEEIIAGQNDPEHLASLALGHLRAKTPQLKLALEGKIRPHHRFLLRRLLDQLRFVEHEIVMLDEHLEDIGREQPELSQAVARWDTIPGIDRVAGWTLLAEVGHNMAQFPTAEQLASWASLCPGNHESAGKRLRGTTRKGSPWLRRMACQCAWAAARTKNTYLSAQFRRLAARRGIKRAIIGVAHSLVLIGYYLQKNQRNYEDLGADYFDRIDSDGLKRYFIRRLEKLGHKVTLMPLNAA

SEQ ID NO: 63997 - protein, 428 aa, unidentified
METPVEKAEVVAWAGLDWADQRHEVRLQAVGSEQIESYTVEQKPEALHAWVAELQARFPQGRIALALEQSRGAVIYALMNYTFLCLYPVPPKGLARYRQAFFSSGAKSDASDADLLLEMVRSHRNRLRAWQPDDELTRKLRLLVEHRRETVADRTRLTNRLGALLKTYFPQALEWAGELRSLAACEFLSTWPSLEAWQAAGRSTQRKFYHRHRRRPAEELEKLLDTIAQAQSLTRDRALVEASVLMSQTLVEQLRTVIAALARLDETLEELFDQHPDQGLFRSLPGAGDAWAPRLAAGFGTDRQRYLKAEDMQQFSGIAPVTEASGKQRWVHWRMACPKFLRQTFHEFADASRKKSLWARAYYQQRREQGATHHGAVRALAYKWIRILFRCWQSHTPYDESVYLAALRRRHSALWLAAGSLSTSEAKA

SEQ ID NO: 63998 - protein, 425 aa, unidentified
MKKTDYLSTLFVGIDIGSRTNVVSAIDFNQEYLIRMKPVPNAKEGAETLESLLVDVLSAHHEFNHVIIGLESTGFYGVHIANYLSASDKLSPFGTEVYCLNPKEVAKYKESFNSLDKNDGIDSFVIADFATVGRISIKPWRGAQYLALQRLTRHRLHIAECIAREKTYVLNNIFLKFSEFAMMQKEDHPFSNKYGVAAEAVLEQYVTNDDIIEASIADLVELIESKSRGRITDPEETAKLLQAAAKGSYRLDKVVAEPITLSISSSFNCIRAFEKELKAIEKAIEQTVQGLNPTEYQVLKSIPGIGHVYAAGILAEIGTIKDFPNNDTLAKYCGIVWKENQSGNFRAEDTKMSKAGNRYLRYYVIEATGSVINHCPEFKAFYNKKFAETTKHQHKRALALTSRKFLRMLFGLLDKSQLYSPEKSR

SEQ ID NO: 63999 - protein, 459 aa, unidentified
MGMTLGIDLACRAAHVASLAGPDGALVWRGRSFFTRPADLEKLWRDVDCVPAELTVVMEPTRNAWIPVAAWFRRRGAKVVLVPTTQSADLRAYYAKHTKNDRLDSAILARLPLLHPEGLREHVGDGPADPLRRVVKQRSSIAKRRSAIFHRLDAQLELLGPAWYDALGTDYGKATLQFLAHYADPATVIRLGQARLARFLQRYSHGHWREGKAAELIAAAKESLQLWDTDGMDFAELAVDIAVEAEQAMMLTAQLADLDERIANLYAEADPAGIIRSAPGVGPVIAGIIAGRLGDPHRFTSLAAVRSYSGLVPKVNQSGKAEHVGGLTKAGDPLLREAMWMAAEQARKLDPQLAAKYKRLMDSERHHGTAVCHIATTLLTRIATSWRNNEPYQIRDLNGTPLTQDEGKRIVQEQYQVNKNPKKQYKRATNHKAGREPQESPSAPTSRPATTKPTSPRAA

SEQ ID NO: 64000 - protein, 345 aa, unidentified
MKIVGCDLHTRYQQIAMLDLETGEWTERRLEHEDGQARAFYASLEGPVRVGIEATGHTRWFERMLAELGHELWIGDAAQIRASMVRKQKTDARDAAHLLELLRGGRFPRLWRPTLAERDLRQLVWHRQKLVWMRTAVGNQLHALAMGEGVCRKKKLFTHKGRVELEGLRLDLWASRRRQELLRLLDQLDASLEEFGQAVAEQAERNPRAVLLMTHPGVGPVTSLAFVLTLGPVDRFVRSKQVVSYLGLNPREHSSGGRQRLGSISKQGNPMMRSLLVEAGHTAARLDQELRQDYQRLKLRRGGGVAKVAIARKLAVRMYWMLRRQASYAQLVRMQGSPRATLVQP

SEQ ID NO: 64001 - protein, 307 aa, unidentified
MFVGIDVAKDRLDVHVRPAGESFVISRDDEGIEELAKRLSAMVPTLVVLEATGGFETVVAAGLAAADLPVAVVNPRQIRDFARATARLAKTDALDAAVIAHFAEAVNPPVRRLADPQQRLLGELMARRRQLIEMMVAEGNRRRLLTARRTLKTVDRVLATLKAQLEEIDHDIDIAVRGTPAWREAEDLLISVPGIGHKIARTLLAEMPELGRLDRRQIAALTGVAPFNRDSGTRRGRRAISGGRIVVRSALYMSVLVAIRRKLPLAQTYHRLRASGKPAKVAIVACMRKLVTILNAILRHKKPWATA

SEQ ID NO: 64002 - protein, 326 aa, unidentified
MTTYVGADISKDYYDVALMQAEDLVDEAQFDNTKEGFRQFGRWLKKRRSEDTHVVMEATGMYGEALAEWLYEKGYAVSVVNPAQIKAYSQAQLRRAKTDKADARLIADFARTQRPRLWTPPPPEIKRLRALVRYMNALQNEYQRERNREHAQQLADMKAMHGEHIAYLKAKIAEVKALIDAHIQAHPALADTVKLLMTIKSVGPLVAWHFVAEVDITRFSSAKELVAFLGLNPHINRSGKRQKTPSPISKMGNPALRRVLYMPTQSAKRFNLPVQVFYDRLIANGKHSAVATIAAMRKLVHIIYGVWKSGQPFDPHYETFQHALVA

SEQ ID NO: 64003 - protein, 428 aa, unidentified
MHSTQNDRINQITFSTLIIGVDIAKFRHVARAQDFRGVEFGKPLTFENNREGFELFVSWFRKIATEQGFKDAIVGMEPTGHYWLNLAHFLKEEQVKYGVVNPLHVKKSKELDDNSPTKNDIKDAKVIAQLVKDGRYAVPSLPQGVYAELREAMKIREHLTTDLCVVQARVHNWLDRYFPEFLTVFKDWECKSAIQMLSLHLLPHELVSVPDETLLQHLREAAKRGLGLGRIQNLKAAASRSVGIRQGPELAKMELKLLLTQYEWLQNKLEELGVKLDELLLQIPHVKQVLAMKGIGRDTIAGFLAEVGDITQYRHPKQITKLAGLNLKTNSSGTHTGQTRITKRGRKRLRALLFRVMMPLVAKNSAFRTLHEYYTKRPVNPLKKMQSLIALCNKLIRILFGILQKGHEFSEEKMIRDIPRFNEIPQAA

SEQ ID NO: 64004 - protein, 324 aa, unidentified
MLPTLGIDISKDSFHLELSINDKLRHRKFANRKEGFGELCVWLVKHKATQVHACLEATGPYSEALAIYLHQQGHTVSIVNPVQIKAFGQSELRRNKDDRPDAGLIRRFCEKQRPAPWTPPPVHLRELQALTRHLENLIETRQQQINRLEATNTKNVAKSLRKLVAHLDAEIKRTEQQIDDHVDRHPDLKQQSELLESIPGVGKRTAAKLLAELTDISQYKSARQVAAYAGLTPRNNRSGTIRGKTRLSKTGNARVRKALFFPAIVAKRHNPIVRAFCERLSSHGKNKMQVIGAAMRKLIHIVFGVLKSGKYFDPSHELLLNSVS

SEQ ID NO: 64005 - protein, 427 aa, unidentified
MTYRIAAIDVHKKMLAVVVADVAGEGEYQFERRKFGATPDQLHLLAQWLCQQEVEEVVMESTAQYWKPVWGALEQYWQPARQKREGARKMSGKLHLCQAKSNRGRRGRKNDFADGERLIKRLVAQELVLSFVPDAEQRLWRTVTRRKYQLTRDKVRFQNQLESLLEQAHIKLSSLVSDLLGVSARRMLKAIAEGETDPAALAALADYRLRATPEQLRDALGACGQLHGVYRRLLKMALEELKLMEEQIEQLEQEASKLLQQHQNAVQRVAAVPGFGVDSAIQAIAEVGPEAAAFETYKNLSSWVGACPGEEESAGESKSTHSPKGNRTMRRLLNQAAHAAIKVKGSIFEMTFRRLLPRLKYQQAIWAIAHRLCRLLWKILHEGVRYEERGPAVSAKSKRTRTARMIKELKALGYRVAGGPLPAGTPA

SEQ ID NO: 64006 - protein, 425 aa, unidentified
MQEKLQRVTDTTIIVGIDVAKKEHWARITNSRGVDLMKPVKVQNSAEGFDKLMARVEKVREASGCDKVIIGLEPSGHYWKPLGWYLFLHLSAPILVGVNPYHTKRAKELDDNSQTKSDKKDALTIAHLVRDGRYFDVYLPECAYAELRILCNERKRLQKQLNRANNVIVAVMDEYFPEYDGVWDKITGQTSRAIMRQYPFPGDILKAGAEKLTELMRQASHGTEGAARAARLIEAATGSIGVTEGSYSAKIRLLSLIDELEFYERKIAIIEDEMAAIMDSMEMGELLQSMKGVGPVISAVFLGEVGDISRFDNWKQVRKLAGMNLVEQSSGQHKGKTKISKRGRPYLRYMLFMAGQSGSLHNPEMHGYYRCLRERKQNPLTGYQAFVAVGLKIMRIMFHMAKNRVPYDPAKALGKVREQQIAALV

SEQ ID NO: 64007 - protein, 408 aa, unidentified
METIYPVCCGLDVHQASVSACLRRVNSDGAISLENRQFATTVQGLSELSQWLTETGCPIAAMESTGVYWKPVYHILSAAAEVWVVNARDVKQRRGKKTDRADAQWIAELLAHGLIEPSFIPPPDITALRDLIRMRTALVQTRTQMKNRVLAVLEDTNVKLASVVSDPFGVSGRKMLNALVQGNRDPEELSEMAMGVLRRKIPQLTTALEGTFTDHHALLIRLNLEMIDQINVQVDQLDERIGQLMEPLENKTELVRSIPGVNQTAARIIVSEIGTDMGRFGSGPRLCSWAGVCPGNNESAGKHKSGKTRKGNRYLRRVLTECAWAAGKTESFLGRTFRRLQARIGGKKAAVAVAHKILAIVYHLFTEGTTYDDDRYNRLSRKQENRQYSKALATLKKLGYQIQLTPIA

SEQ ID NO: 64008 - protein, 366 aa, unidentified
MEARRFVGIDLGKRHYEACVLHAEEKIVRWSGTTDAPGREELAGKLEAGDVVALEAGALSFTLARRLAQVDGVTVKVLHSAKLAVIYSSMRKTDKEDALKLARVLQGTAEECLPVVSLPSQEEEDARRLANHQIFLNRERTGVINRFHAACVEHGMTEVTKKDLATEKGRMAILERMTGIYRMLAEHYCVILAAIESQRALAKEQVRQALRTQEREAEILLSIPGVGPTAALAYLGFVGSEERFENPAQVSYYVGMVPRVELSGSSIHHMGHITKQGSPALRRALVQAAWAAVRSPMGAHFRLVYDRISERRGKRIAIVAVARHMLELMYTLLSKHELYRFCSEEERSRKLKFYKLGSLGTEETLT

SEQ ID NO: 64009 - protein, 316 aa, unidentified
MNNDLEIIVGIDISKNKLDIQIQEDGQYFTCGNDLIGIGKLIEKLSSIHPALIVLEATGGYEKGVVSALVEAKLPVAMVTPSWVRYFARSNGTLAKTDKIDAKMLVRYGRANHPPVVIVRSELQERLSVLMTRRSQVSLALISEKNHLSTIVYLDVKALIEASIDNLEQQIMQLEELIAEIIDQNPELKKNEKIICSVPGAGKITAAILLADLPELGSLDHKKIAALVGVAPFNRDSGHYRGKRRIKGGRQSIRKVLFMAALTAMKWNPVIKEFYERLVMRGKVKKVAIVACMHKLLTIMNAMVRAQTLWKPVITS

SEQ ID NO: 64010 - protein, 428 aa, unidentified
MSNQELIRRKQYCQIVKEIAGSDQYMVVGIDVGKDNHHAFMGTATGKSLFRKLIFENNLEGFSKLLKTSDLIKTRNNLSKVVYGLEPTGNYHKPLASHLIRCDSNVVLVSGEAVNKNRSLLDGRWDKHDTKCAANVADLVSRGRCLYYDSPSPGIIELRSLLSLRKRLKKEEHSLRMRIRNNLLAQYFPELDRFYSACESESLAIVKWCLEPDQIAGMAFEPFFQMVTRTRRGTAQLLRLRKIHQQAIESVGCPMGSAAAFEAQLLVDKLEQVRQQLKDTEAAIKDVALEFDEYRYLLTIPGFGLYISSSVIAAIANPFRFKNRKQLLRMAGYDLCAKRSGKTSDNAVPVISKKGNSNLRYALFQAAKIASARTEIFRNYFAEMLRGRERERGIITKMRVKLAAKMLIIAWNLMKKREPFDPAYLTIE

SEQ ID NO: 64011 - protein, 402 aa, unidentified
MNCVGIDVSKGKSMIAVMRPFGEVVISPFEVLHTANELSELAGLLKSLDGETRVVMESTGNYHAPVAWLLHGAGLYVSVVNAMLVHDYGNNSLRRAKTDKKDAVKLANYGLDHWLTLPRYVPEENTRLMLKSCYRQYQQYSKVQTMLKNNLISLLDTAFPDANRLFTSPPRADGSEKWVDFVAAFWHCECVCGLSEKAFTAKYQKWCRKHGYNFSKDKALDIYASACGHFGVMPKTDTAKLLVEQAISQLQTTSAALAALKQEMQSLAASLPEYPIVMGMFGVGPTLGPQLMAEIGDVRRFHSKKALVAFAGIDSPPYQSGQMDVHSRSISKRGSASLRRTLFLVMGVLLQCAPMDEPVYQFMNKKRSEGKPYRVYMMASANKFLRIYYASVKAYLESLEHD

SEQ ID NO: 64012 - protein, 340 aa, unidentified
MNIVFLGIDLAKNIFQLCGLNQAGKPVYTKRTGRKELLQTVANIPACLIGVEASTGAFYWQREFEKLGHKVKVISPQYVKPFVRGQKNDGNDAQAIAVALMQPTMQFVPPKSPEQQDIQALHRARQRIVNHRTATVCQIRGLLLDRGITIGAAVSRVRRAVPLILEDAENGLSARMRRTIAELYDLFNDLGRRINFFDKEIDVVFRQSEACQRIAKVKGIGPKTATAVVAAIGRGTEFKNGRHFAAWLGLVPRQHSSGGKQVLMNMTKKGDKHLRTLFIHGARAVVRVATNNNDGCLYQWVNQLKERRGFNKTTVAVANKNARIIWSMLRNDTEYQAVGS

SEQ ID NO: 64013 - protein, 350 aa, unidentified
MEYIAFDAHKHYTLASVAKPDGRLVREERIAHERGALREFLERCERGSPVAVETIGNWYWIVDEIEAAGCVPALVHARKAKLMMGEINKTDKLDARGLNRLQRNGTLPTVWIPPGELRDQRDLPRTRMVFVRQRTQLKNRIHATLAKYALHDFDVSDVFGVRGRALLRERFELLPPHTAYASQQLLAQVEALGRQVRAFEQRIQTTFKPTPAIQRLLTLPGVGLTLAVVIALEVGDVARFAGAEKLAAYAGTTPRVHASGGKTRFGPSRPDVNRYLKWAFVEAANAICLHPRRAARRHVSRLYERIARRKGHPKAIGAVARHLAEATYWMLSKDEAYREPKGVGRFVHGG

SEQ ID NO: 64014 - protein, 349 aa, unidentified
MTLYIGVDFHPHQQTLAWCDTQTGETRTIDLVNDPEKVREFYSSLPEPATVGIEASARATWFEEMLFETGHKLLVGNPVLIRKRATSRHKNDRRDAELILRLLLQNEFPAIWRRPPESDQILEILRLRRSFVRQRTQGYNRLQALAHSVGLPKGKIGTRGFQQMLKAASMNEVASIRREHLFSLLEKLNAQIAELDDWLKKKADKDEKVQLLLSQKGVGYLTALATVHTLGDVSRFPRVSRQIANFAGLDPVEDSSSGRVRFRSISKAGSTLLRHQLGQAANIACRTDANLKSFYKRLAKKKPKAVAKTAAARKLLVKLSIMLRDHITADEFDRRGRTVGNARESHDLK

SEQ ID NO: 64015 - protein, 339 aa, unidentified
MKYTPVGVDIAKHLIQVHFIDEHTGEVIDKQLRRQDFLTFFSNREPCLIGMEACGGSQHWARELKKLGHEVRLLQARFVKAFVMGNKNDVMDARAIWMAVQQPGKEIAVKTEEQQSVLVLHRTRQQLVKFRTAQINSLHGTLLEFGETIHKGRAAMEREFPAALERMKEKLPPYLITVLEEQFYRLNELDLRIDGLEKQLNSVARQNETCKRLMEIPGVGPLVATAAVATMGEASAFKSGREFAAYIGLVPKQTGSGGKVRLLGISKRGDTYLRTLFIHGARAAALLTKEPGPWITELKKRRPTGVAIVAMANKLARTVWAIAAHGSKYDKNHVSIRPY

SEQ ID NO: 64016 - protein, 393 aa, unidentified
MLNYSMVNDSLTGNAGAGEASVASRAGTSRRREFDCVLAFEAVTEREPRRRRGTSPNSRLNRPPGTSSHLQVREKTMPESIYVGIDISKDTFHVASCPNIIKTQLPNTPQGYRQLSRELKHQSIALIVLEATGGYEKPLAAELLSDSLPVVVVNPRQVRDFARGLGQWAKTDPIDAQVLAKFAQIVKPAPKTHSTPQTAELSELVRRRRQLNDLRAQESNRLLMIHHPKVKKSIKKMLKTLDFQIDEIDHLIREYIDADNNFKNKDRILRSTPGVGPQTSAMLIANLPELGKLNRQEIAALAGLAPYDCSSGKYDGRAHIWGGRKDVRSVLYMAAFTACRFNPVIRTLAERLKQNGKAYKVVLTACMRKLLVILNTMIRDQSLWTPRKILKNT

SEQ ID NO: 64017 - protein, 344 aa, unidentified
MLHAGLDLSRARLDVCLVGESGEFVAHTAAPPDADGLRHLADRLRGHRVRAVIESMTGARFVHDALEEFGWEVLVADAQKVKGLAPLACKTDKIDARVLAELSWRDLVPVIWLPDPSIRRERELARYRLHLVRHRTTLKNRIHATLMTFGHPCPVSDLFGLAGRELLDRLALPDPWRRNVDASLELIDDLELQIAQLTVEMRRQGADHRYIPLLVTAPGFGWINAFTVASEIGDIERFASPAKLCGYTGLRPRVYQSGNSDRRGPITKNGSRYLRWALFEAAMHACTHPVYKERYQRTKRRLGRQRGPKVAQIDLSRKLTEAIWHMLTRNQPFAPAGAAFRLAA

SEQ ID NO: 64018 - protein, 416 aa, unidentified
MSVALPQALFFTGIDWASAEHAVCVLDAAGKITARFTIKHSAEGIASLVRRLARYGDPAGLPVAIERPSGRLVDLLLEAGHPVVPVSPNAIKTWREGEVLSGAKSDAGDAAVIAGYLRLRYHRLAPAAPYCDETRALRAAVRTREDLVQMRVAATNQLSALLDAHWPGARAVFADIESPISLEFLTRYPTPAAARHLGHKRMAAFLVKHGYSGRRPAAQLLARLHGAPAGTAGRALTEALQDAVLAVVAVLRALNGAVKDLDRSVAAHLGEHPDGPVFTSLPRPGQINAAQMLAEWGDCRPAYDGPDCVAALAGVTPVTKQSGKYRGVEFRWACNKRFRRAVTTFAGNSRHASPWAAQIYAEARAAGKDHPHATRILARAWIRVIWPCWVNGVPYDPARHRAAAALAGQTPSQPAA

SEQ ID NO: 64019 - protein, 343 aa, unidentified
MKLSRVGIDLAKNVYQLQGVDRSGKTVWKRRLKRHQWLKVLLDKTEPSCVIGMEACASAHHWGRELQSRGYTVKLIPPQFVKPYVKSNKNDARDAEAICEAMSRPNMRFVTVKTVEQQDIQATHRIRAELITQRTAKANQIRGLVAEYGLVAPKHMSSLRAAIPCWLEDAENGLTGDFRSLLHGVWDDLLILDDRVDQMDKLIKRLAENHEECVRLQQLRGVGPMISTAIIATVGDARQYRTSRQMAAAIGITPKQHSSGDRDRLLGISKRGDVYLRTLMIHGARSVVASAKHKDDRLSRWVTGIATKRHPNVAAVALANKTARMAWAMLRNETDYDPDYAIR

SEQ ID NO: 64020 - protein, 410 aa, unidentified
MEGGGSMEILHTCCCGMDVHKRTVVACLLGPSGKEVRTFGTMTADLLAMNAWLRAQGCQMVAMESTGSYWKPIYNLLEAEQLPAMVVNAQHIKAVPGRKTDVKDAEWIAQLLQHGLLRASFIPARDQRELAELVRYRRSLVEMRSAESNRVQKVLEGANIKLGSVLSNVLGVSGRAVLARLIAGEEDGQVLATLVHRTVRAAKEEIARAAEGRMGAHQRFLLERQLALIDTLTRQIAEIEEEIERRLVQEREVIERLQTIPGVGICTAREIIAFIGTDMTRFPSHRHLASWAKLCPSLHESAGHRGNGGIGPGHKLLRAALTEAAQAASRSNSYLAAQYKRIARKRGTRKAIIAVAHSILTIAYHIIKDNTTYTDLGANYFDERDKEKIIRRATQRIERLGKTVTVTDAA

SEQ ID NO: 64021 - protein, 312 aa, unidentified
MSQNNTILHVGLDVAKLSLQLHLINRFHSLTNDTKGHRQLLKLLGDHPGAHVICEATGGYEQVVVRCLQAASIAVTVVEAGRVRYFARAQGLRAKTDPIDAAVLSAYGRTFSPAPTSALSAELQRLNAITQRRRQLVHLLLMQRNYVEHYSDRFAIRQARQLIKMLEKQIAECEQAIAELISQDDVLSKKASRLKDIPGVGPIVAATVLAEMPELGQITKNAAGALAGVAPYNDDSGDQKGKRRIGGGRRTVRTALYMATLSAVRHDRILKAFYQRLCANGKAPLVAITACMRKLIVLMNQLLKNDQFQLAG

SEQ ID NO: 64022 - protein, 391 aa, unidentified
MIYVGIDVAKDKHDCFITNSNGEVLFKAFTISNNQDGFNDLYQRIESVMEDITKVKVGLEATGHYNYNLLGYLIDKGLTTYVINPLHTNLYRKSLSLRLTKTDKVDARTIAYMLMSDVNLKSYSNTSYHNEELKSLTRYRFNKVKERAKLKTSVSRLVCILFPELEKLVPTLHMTSIYALLSEFPGAKHVAGAHLTRLTNLLSDASKGRYGKDTAITFREAARASIGSNMPAKSLELKHTIKLILELGSEIDEIENEIKTIMDEINSPILSIPGINYRMGAMIIAEIGDFSRFDSPDKILAYAGFSPSTYQSGQLDSAYSHMEKRGSKYLRYALYNAAKYVCHWDTIFAGYLAKKRAEGKHYNVALSHAVKKLVRVIYHLVKSNQQYIKVA

SEQ ID NO: 64023 - protein, 370 aa, unidentified
MRIIGCDLHARQQTLAMLDTTTGEVVNLTLMHEGDKVRGFYSQLPRPVLVGIEATGSMQWFLNLMEELGIECRVGHPAQIRAAEPRKQKHDRRDADLILKLLAENRFPAIWLPTKELLDLRALLLHRHQWVRMRVRMQNALQAIALANGLRRGPSLWSYDGQAKIGLLPLLPHASCRRSALQAMYKMMESEIEKLTQKVAEQAGHRAGARLLMTHPGVGPVTALATEVFLGDPQRFTDSKALASYVGIIPREYSSGGQQRLGGVTKQGSPLLRFLWGEAGAHAARRDPELKRFYCRKLVHKGLGKARVAVARKLGIRLWIMLRDEIDYQEFCRRGQMQQKAVRPVAGMPETGNGAKSHRPSDEATRLPEC

SEQ ID NO: 64024 - protein, 343 aa, unidentified
MQTVTTVGLDIAKSVFQVHCVDAAGQAVIRRQLKRRYVLAFFQKLPPCLIGIEACASSHHWSRELQALRHTVRLMPPAYVKPYVKRQKNDATDAEAICEAVTRANMRFVPTKTPEQQSGLMLHRTRHLFIRQQTSVINAIRAHLAEFGIVAPVGRKGVEELLHVVADGNDKRVPSVARACLAALGSQLLGLKKQILTFDRMIMDWYRSNETSKRLHYIPGVGPLLATALAASVADPKVFRSGRNFSAWIGLVPKQHSSGGKDRLGSISKKGDRYLRSLFVAGALSVIRYAKIHGTKHRPWLTALLARRPTKVAAIALANKLARMAWAMMARGERYRNPVALAA

SEQ ID NO: 64025 - protein, 339 aa, unidentified
MKLYTGLDLHSSNSYLGIIDETGKRVFKQKLPNDRERILAALSPYNNDIAGIVVESTYNWYWLVDLLMGEHYHVHLANPTAIKKYTGLKFADDQHDAFWLAEMLRLGILPEGYIYPKEDRPIRDLLRKRMHLVRLRTSLIVSLQNILSRNNGFKLKTSDVKALTENRVAPYLEGNEDLALAGMVSKDSIDFLTRQIKKIEMVIEAKVELKPPYEKLQSVFGIGKILALTIMLETGPINRFPKVGNYVSYCRKVSSKWLSNDKVKGKGNKKSGNKYLAWAYSEAAEHARRSYTQARAYYNRKMQKTNFMAAHNALAHKLARAAYYVMRDEVNFMPGKIFV

SEQ ID NO: 64026 - protein, 406 aa, unidentified
MRSIGLDIHRDFCEVAIAEGGEVRSPGRVEMTPEALELFAGSLASTDQVALEVSGNAWEVARIIRPHVAKLVVVSPADTGIRAARAKTDRLDARALAKLLAAGSLQSVWVPDDHTRAMRRRLQRRRKLLVVRTKAKNEIHAALMRRLVRKPAVSDLFGKQGRRWLESLELPDEEQETVEGCLRQLDFCESEIEAIEKRIATEALRSPEICRLMTVPGVNVICAATFMAAVGNIRRFGDRRKLVGYLGLDPKVRQSGLSATARGRISKQGSASGRHALVEASWSVVKAPGPMHSYYQRIRARRGAQVAIVATSRKLACLFWCLLTREEDYAYAQPSLTAKKLRRLELAAGAPKGAGGAGIWSTNKTMREAEQALARQAEATYERTVDDWQRQQRRRGGADATTGRAI

SEQ ID NO: 64027 - protein, 315 aa, unidentified
MMNEQTYCGIDVAKRHFVIGLSTQKRTKTETNNPKGIAHTIEYLRSFNVDLIVLESTGGLELPLAKALHRAGFRVVIANPRQTNQFAMSQSLAKTDNKDAKMLAFYAQMLAMRDNVAQQLYIPPTPEQEQLEALVSRRNQLVEMRSAEKNRLEQVHSTQRLSVEQHIDYLSLRIDELDSEIEQHLKHFDDKVKKFKDIKGLGTQTIAVLMSMLPELGQYTHKQIASLVGVAPHPKESGNTKWKSRCSGGRKAVRNALYMATFVCVRFEPKLKQFYERLRANGKAFKVAINACMRKLLTILNAIVRDGSQWDAHAL

SEQ ID NO: 64028 - protein, 341 aa, unidentified
MSKVSTIGLDLAKHVFQAHGADADGNVVFRKQLRRDKVLAFLARQPVCLVAMEACASAHYWAREIGKLGHAVRLVPPSYVKPFVKRQKNDMVDAEAICEAVQRPTMRFAAVKSEDQQASAVVFRARDLLVRQRTQIINALRGHLAEYGLIVAKGPSHVAALIEQAKASGSGVPVAAQPALDLLIKMLTVLAEQIKQLDIEIAKRAREEEVARRLMTVPGIGPITATALMALAPEPENFRRGRDFAAWLGLTPLQRSTGGKQKLGQISRMGERTLRRLLIIGASAVVQQARRRGASQGTWLGRMLARKPPMLVAVALANKIARTVWALMANGGVYKAPVAAA

SEQ ID NO: 64029 - protein, 371 aa, unidentified
MEAGSTGEEDRRGKFRPNLDRLTVGVDLGDQWSHYCILGLEGETLAEGQLRTTQQHIAEFFQALNAARVVFEVGTHSPWVQEVICGCGHEVLVANPRLMEGSKRRKRKNDRIDANKLARLGRVDAQSLHPMRHRSKEVRQDLVVLRARDALVAARTELINATRGLVKSMGARLPKCSSPSFAQKVEEAVPVEIREALLPLVRMAAALSDCIQGYDQKIEKLGREKYGHTALLRQVKGVGPITALAYVLTLENPGRFAKSRDVGPYLGLVPKQEDSGESQPQLGISKTGDTMVRKLLVGSAQYILGPFGPDTDLRRYGLRLCERGGKNAKKRAAVAVARKLAVLLHCLWVSGEVYEPLRQGMSPTIASAVAA

SEQ ID NO: 64030 - protein, 431 aa, unidentified
MPVNVYETVNCVGIDVSKGKSTIAIMRPLGEIVQSPHEVKHTLSDLKALETTLRQLEGETRIVMEYTGKYYQPIARFLNNAGFFVCAVHAKLIHDFANNSIRQIKTDKADAVKIANYGLTNWNLLRRYSNEDETRLLLKTYNRQYNMFMKQYIASRNNFISLLDQTFPGINDLFSGHRRPDGHEKWVDVAARFWHAECVSGQSLNAFSKAYKDWCSRNGYRGRDDKAEAIYLLAKESIPSLPKNDFTKAIIQQAARELRNICMTLTELQKEMNFIASALPEYPVVLDMGGVGTTLGPQIMAEIGDVRRFPRREKLVAFAGVDVPPYQSGQFEAKDRHITKRGSSDLRKNLYQVIGCLMQHSMEKDPVYRFVAHKKAEGKHFYSYMVAGCNKFLRIYYARVKAYLNLLEQQEPVPFIDGSGGSEVVLQPLDC

SEQ ID NO: 64031 - protein, 361 aa, unidentified
MAGTMTWVGLDVHARSTHAAAIDAMTGELSRVRFGAGVEAPLAWLRSLPGPVRACYEAGPTGFGLYRALTEAGIAAEVIAPGKTPRGPSDRVKTDRKDAELLARQLLAGSLTTVVVPSPEVEAAREMTRAHDVCRQELMRARHRVSKMLLRHGRVYPKQKTWTAEHRRWLSAQRFPEAPSDVVFADLLAAVDGITSRKSTIALTLSQLATDERWWPTVARLRAFRGIDTLTAFSIHLELGADWKRFAHAPALSAWLGLTPSLNQSGESSRQGAITKTGSMLARRLLVESAWHYSRPPRLGATLINRQQGQPDHVLAISNRAQQRLYRVNRRMRARGKPHNVTVVACARELACFLWAAATAD

SEQ ID NO: 64032 - protein, 330 aa, unidentified
MTSLPDSTSAPVTIGIDVAKATLDIAIGLHVPPLSLTNDTEGFDALLTQLATHQVALVVMEATGGLETAVAAVLQTAGYAVAIINPRQARDFARAMGQLAKTDRIDARILAQLGEVIERSPERDRFVKPLPSAEQQALAALVTRRRQLIAMLVAERNRLAQASAATRKSIDTIVEALTTELERIDSDMSGHVQVHFADLSALLDSAKGVGKTTISTLIAEVPELGQLTRREISALIGVAPINRDSGRMRGKRTIFGGRGSVRQVLYMAALVAVRFNPTIKVFYDRLVAAGKPKKVALVACMRKLLTILNAMVKTGKPWDAVFHQSDSKNA

SEQ ID NO: 64033 - protein, 411 aa, unidentified
MRRVIGMDLHRTFAEVVVWEDGRLRHAGRVDMTRSGLEGFARTLRADDEVVIEATGNAMVVSHLLRPHVARVVIANPLQVKAIAHAHVKTDKIDAGVLANLYAAGFLPEVWTPDAATERLRRLVARRNQVVRHRTRLKNETHAILHAHLVPPCPHADLFSRVGRAWLERQALPDDEHAAIKRHLCELDTLGEDLAVLDRAIGEATLDSPVVRRLLTVTGINVTVAAGLAAAIGDVRRFSSPQKLVSYFGLNPRVRQSGLGLAQHGRVSKAGRSHARAMLVEAAWAAAKAPGPLHAFFVRVRARRGHQIAAVATARKLAVLCWHLLIKEADYLWARPALVANKIRGLELQAGQPQKKGNQRGPAYAYNVKALRDQEMEIARRAETAYERVVAHWTPRPSKAVRGRLKSARLE

SEQ ID NO: 64034 - protein, 318 aa, unidentified
MKKLTTTMMERTLNKQDGRLTIGLDLGDRSSFYCVLDEAGEVLLEQKVSTTPKAITEIFGAMPRSRIALETGTHSPWVSRLLKELGHEPIVAHARSVRLIGESRRKDDRLDAMTLARLVRIDPELLCPVRHRSAEAQADLTVIRARAALVRTRTMLVNATRGLTKSYGERLRGCNARGMKPQAAQDLSPVLKSALEPMMSEIESVSERICEYDQMLESMARNRYPEAERLKQIKGVGTLIALAYMLTLEDPHRFSKSRDAACYVGLQPGRRNSGQSEPQMHISKEGDPYLRSLLVQAAPRSRPLGSRQRPAPMGHEAG

SEQ ID NO: 64035 - protein, 317 aa, unidentified
MSDAVNVGIDVSKDRLDVAILPHGEVLDVPNNETGHARLVARLASEPTLVRVVLEATGGYERQAAQALFRAGLPVVIVNPRQARDYARAIGRIAKTDRLDALTLAEFARAVKPALRQPDTPAQRLLASLVGRRRQMISMIGGERQRLSGATTDFVRQDLMASITSLKARLANVEAEILVTIELDPTWKARMSILTSVPGVGKITAVALLAELPELGTLTGKEAAALTGLAPMNRDSGRMRGKRRIHGGRARARKALYMAALTASRYNPTLRDFYQRLISAGKPVKVALTACMRKLLLILNALLKHHSTWQAPQPDSA

SEQ ID NO: 64036 - protein, 374 aa, unidentified
MENTITYVAMDTHKKQHTIALHYPCQEEIVEFTINNTERDIKKMVNKVKKQAPGKVEFCYEAGVCGFTLKRRIEQFDCRCIVIAPSLVPRKPGERVKTDRRDAKKLLMMFKAGLLTEVHAPNEHQEAARELTRLRETAKEDLKRSRHQLLKLLTRHGYVYRDGHHWTQKHITWLRTIEFTESMLTSVFECYFEQMIYCIGRVEALDKEVELLAGSAEYKEIVGALRCFHGIETLTAITIITEIFEFGRFESPRHLMSYLGLTPSEDSSGDKQKKGSITKTGNKRVRRLLNEAAWHYRHRYVPSKTLKQRRKGQPQWAIDIADAAGRRLSKRHRHLVNNGKMPCKANIAVARELAGFIWFVVTQYHARNNTKGAA

SEQ ID NO: 64037 - protein, 324 aa, unidentified
MSDAIVGIDIAKANFHAALIDDAGEHARSFPNNAKGFAQLERWLRNRKVTHVHACLEATGAYGDALAIALYEAGHIVSVVNPARVKGVAQSELARNKSDALDAGVIARFCKAMAPPPWSPPSPEIRALQALTRRLCSLIDARAQEYTRAETPGIVEVVADSIRAHIDHLDGQIRELEAQITDHIDRHPTLREQRELLASIPGIGTATSARFIGEVPDVTKFASAKQLSAFIGLSPQQVQSGSSVRRKARLTKRGNARLRKDLYYPAIAAIRFNPIVRRFAERLRAAGKSKMLIIGAVMRKLVHIAYGVLKHRRPFDPNFNTVPA

SEQ ID NO: 64038 - protein, 339 aa, unidentified
MNVLNVVGIDLAKSVFHVHGTDRTGKVCVKRKLKRSSMLRFFATLKPRLIGMEACGGSHYWARELVKLGHEVRLIPPQYVKPYVKTNKSDAIDAEAICEAVTRPTMRYVDIKSEDQQAILLIHRDREGLVRNRTALINRIRATIGEFGLTVPAGPRNLHKWFEQRYGEAESYLPVITAQQVHRMMERLQFTESEIAELDRQIALQGQQDEAVKRLEEIPGVGRLTASALVATVGRAQSFKSGRQFSAWLGLVPRQHSTGGKSRLIGISKRGDAYLRRMLIHGARAVLRHMNPRRPVTAWLRQLQTRCHRNTVIVALANKLARIVWALLTKGERYQEVTA

SEQ ID NO: 64039 - protein, 356 aa, unidentified
MDVHKESIELATADEGEARHYARIGGEAAAVDRAVRKLRSVHRELVFVYEAGPCGFWIYRRLRAQGLACRVVSPSMTPRRAGDRVKTDRRDCLMLARLARAGELEPIYVPDAKDEAMRDLVRTREDAVSMQRQARQRLQALLLRNEIRYVGKTAWSAAHRRWIAHLKLPDAAQQIAFEEYVTAIEEAGARLERLGQAIGAQLEHWRWRPLVCALQALRGISVIHAVRIVAELGDLTRFVSPRKLMGYLGMIPSEDSSGSRRRQGSITKAGNSSARRALIEAAWAYAHPARVSWVIARRQTGLSKSTTDLAWKAQLRLCARFRRLAARGVNRNKIVVAIARELSGFVWAIGQSVKPT

SEQ ID NO: 64040 - protein, 429 aa, unidentified
MPRMAGTTEAARGREPHLDVFCGIDWAEGHHDIALADRDGTIVARLRISDDAAGLGELLRLVAEHGDSQESPVPVAIETPRGLLAASLRATSRQVYVINPMAVARYRDRHSVAGGKSDKLDAAVLANILRTDRHAHRPLPADSELARAIAVLARAQQDAVWDRVQAQNRLRSHLREYYPGFLAAFGSLRDGITRPEARVILAAAPTPADAARLTRARLAGLLRKAGRQRGIDEEAARLHAAFREEQMRQLPLVEQAMGRQALALLRQLDAACQSAADLQAAAEESFNQHPDAGIITSFPGIGTLTGARVLAETGDDRSRFTDARGLKAYAGSAPITRASGKRKSVTHRIVKNDRLAAAGYVRAFAALTASPGARAHYDRRKEAGDRHSAAQRNLFNRFLGCLWHCLQTGQRYDEETAFPGTIKKPPRAA

SEQ ID NO: 64041 - protein, 288 aa, unidentified
MAVTVLGIDLAKNVFALHGVDHKGNTILCKPKVSRAKLLETVANMPPCLIGMEACSSAHFWARLFKNVGHEVRLIAPKFVSPYRLSGKAGKNDAADAQAICEAVQRPHMRFVSIKSEEQQSIQCLHRARQGLNEERTAVCNRIRGLLAEFGVIAPLSPERLRNEFESMKVHLPTLAATCMDELFLHIDNIERRLLKFDRLIKETAEQDERCRLLMQLKGVGPMTASALVSAISDGKEFRNGRQLAAWLGLTPSQYSSGGKPKLGRITKAGDNYIRSLLVQGARSMMAR

SEQ ID NO: 64042 - protein, 355 aa, unidentified
MNSEEYIGLDVHQATIVVAVTDSSGKLIMESILETEAATILQFFAGLRGTLAVTFEEGTWSAWLYDLLNPHVDKLVVCNPRKNALLKDGNKSDRIDARKLAELLRGNQLKPVYHGENGVRMLRELSRSYLAIVKDLSRVMNRLKAVYRSWAIPCAGRDVYYRRHRAQWLDKIREAGVRRRAERLYDQLDMLQHLRQQARRELLAEARKHAITARLRQVPYLGPIRSALAVALMQTPHRFRTKRQLWAYSGLALETRISAEYRMVEGQVRRSKKLLCIRGLNKDHNHDLKGLFKGAATMASVRPGPFQDFYQAALAKGIKPTMARLSLARKIAAITLTLWKKGESFDAEKLKSQAA

SEQ ID NO: 64043 - protein, 351 aa, unidentified
MVLETTRDNEQIIERIAALDIGKAEVVCCVRVPDPSLSGKRLQEVSTHRTMTRSLLVMCDRLRQLGVTRVIMEATSDYWKAPFYLLEAAGFETWLVNAKDVRHLPGRPKTDKLDSVWLCKVGERQMLRPSFVPPPQIRVLRDLTRYRVDQVGVRNAEKQRVEKLLEDAQVKLSVVASDIFGVSGREMMAALIGGERDPKVLAQMARARLRAKIADLQEAFHGTRFNDHHAYLLTKMLARVDAIDADLADLDARIDQEIQRQDTSWAQAVARLDAIPGIGIAIAQVILAEMGLDMTRFPTAGHLVSWAKFAPTVKESAGRKKGKNATGHGNAYLARALGGRGRGRQDQHLPR

SEQ ID NO: 64044 - protein, 341 aa, unidentified
MAKNTFFIGLDIACDDFAASIYQSPEKPVITKEGIKNTFDGFNVFISWLKEHGLSKTNCIICMEATGVYNEAIAHYLVSQGFRVSVEPPLKVKRAFDPVGHKTDPVDSKQIAEYAYRYSDELRFWQPKDEIMEKIKHLLTAREQFTKQSTAIKNAMKSYEKHTVQVPLIVKAHRQTLREIKKHITEIDKELDRIIRQNPSISKMNNQLKSIPGFGLLLSTSLITLTGAFSDISRYKTLAAFLGICPYQHQSGKSIYRQPHMRSFGPVYPRKLLTLAARSVATHNDVFKKYYARKLAEGKDKKLVLNNISNKLIKLACALIKNNSRYTATYRSINPMFLNIS

SEQ ID NO: 64045 - protein, 323 aa, unidentified
MSGFVGVDVAKNTFDIATHLPNGKHKTKAKLANNPKGFKEFEAWLDTNVERSALIVMEATSVYHLELAEFVYNKGFRVCVVNPATTKAYADSELRRIKTDKSDAKLIADFAREKDQKLQPWVPEPLKYRQLKAMVRRLDDLQEMEQMELNRLDVSDEKVKSSINSVLRHIEKEIVETHKAIKKHIDDDPDMRQMRDLIVTIDGIGQKTLERLLAELGDLRKYSDPRQLVAAAGLNPKLQESGKLKGHTLISRIGSARLRAGLYMPGMVALKHNTAIKAMKERLEANGKAPKQIICAAMRKLLHFVYGVLKSGLPYDPKLALAR

SEQ ID NO: 64046 - protein, 334 aa, unidentified
MSTIADGDDLRVVVGVDTHKDVHVAVVLDEVGRLGDTASFAATARGYRNLTGWVTGFGEVLAIGVEGTGSWGAGLARHLRARGLNVIEVNKPNRHNRRRRGKTDPIDAEAAARAVLAGDATATPKAGDGPVEALRQLRVARAGALKARTAAANQFHSIFDTAPEVVRGQLRGLSTRPKMTVAGRYRAADPLTPTSAAKTALHSIAQRWAALDTEIRALDRDIKTILDTIAAPLLARHGVGYETAGSLLCAAGDNPDRLATEASFAALCGTSPVPVSSGRSNRHRLSRAGDRQANAALWRIVIVRLPSRHAPTIDYKTGLTGRCRGCGQLTRRTG

SEQ ID NO: 64047 - protein, 410 aa, unidentified
MEVLHAHCAGLDVHKDTVVACVRHMVGGTVKREVKSFQTTTKELMALSEWLSVEGCTRVAMEATGIYWKPVWHILADGEFELVLANAAHVKNVPGRKTDVNDATWLADLMAHGLIRGSFVPDEPTQDMRDFLRTRKQFVRQRSSSIQRIQKTLEDANIKLDSVISDIIGLSGRAMIEALIAGQSEPDKLAALAHRRIKASPAELEAALRGRVTDHHRFMLRLHLQQIDALNAAIAEIDRQVEANLEPFRTATTLLITIPGVSELMARTIGAEIGTDMSRFPTHGHLISWAGLCPRNDQSAGKRRSNRMRKGAPWLKTALVQAAWAAVRTKGCYLQAQFQRLRARRGAKKAIGAVAASILTAAYHMLKQGTFYNELGADFFDRSAKNSHAKRLLARLQNLGYDVQLTPINA

SEQ ID NO: 64048 - protein, 339 aa, unidentified
MKLFVGIDLHGSNNVIVIRDETGHTHLRKRLKNELELVLNQLAPFREQVEAITVESTYNWYWLVDGLMDHGYPVKLANPVEIQQYNGIKHTNDMSDAEFLSELLRLGILPTGYICPKETRHLRDLLRKRLLINRQRVTHILSFQGTLQRNLPSFMKAQDIKKLEEGDLDGMFDDPHLSLSARKSIGIIQFLSKQLKEVEAVINRSVSKIDIHSDLLTVTGVGKTLAAAITLETAEISRFHTVGNYVSYCRLVNSSRISNGKKKGENNRKNGNKYLSWAYTEVAQFSRQWCPQAKRFYQRKLAKTNKMVAQRALAHKMARACYYVMKDHVPYDPVRAFGH

SEQ ID NO: 64049 - protein, 354 aa, unidentified
MKKIFIGIDFSKEKFDATLIKADGLKESAPSVHEVFDNKVSGYRRLVRWVKAHAETLMAEAWLFCGENTGGYSIGLSNYLYASGYDMWLESAYKIKHSSGIQRVKNDKADSRAIAEYAMRNYDKMIIHKPQSASLTCLREVFLYRHSLVRQKVSLQVRRDEKRLTQEKSDVRAFMSFTSKHLITEVNKAIAKCDQKIKEIIASDDELREIFDIITSMPGIGVQNATCLMVYTDNFQKFDLDSRKIACYYGIAPFGRQSGTSVNSRPQVSPFANRRIKSLLSQAALAAIKFDINVHSYYQRLIERGKHPLLIHNNIKNKMLHILVAMVRDRVKYNPDNVYRTSNEVSLAPQVLNI

SEQ ID NO: 64050 - protein, 357 aa, unidentified
MKTQSKELDFSNQEFYLGLDVHKRSWTVTIRSNNMALKTFNMNPSALELAQFMKKRYPLGKYYSVYEAGFSGYGVHRELESYGFKNIIVSASSIPTTAKEKITKTDAVDSRKLARELSNGTIHGIYIPSLLEQEIRSLSRLRYRQVKKRARIKNQIKSYLNFYGHQLPKNSEMQHWSRRFIEYLRSLEFNYDIGKEQMDIYIEELLEIREKILQILRSLKKYLQQYDKYYIIKLLETVPGVGFIIATTFYSEIMDIKRFSNNEKFASYIGIVPATSSSGEKESVLGLTFQFNRYLRSLLIEASWVAIRKDPALTLAYNKYLTKLSSQKAIVRIAKKLLNRIYYVLKNEKEYVCSVIE

SEQ ID NO: 64051 - protein, 335 aa, unidentified
MDIRHFIGIDVSKNTLDWAVYANKGIIWQTQSENSPVAIRAIIKQLLALPNFQIANCVVCMEHTGLYNAHALEVLFQAQLPIWLEASLHIKQAGGLQRGKSDNVDAQRIAEYAYRFQDRTRLWKPARPVMKKLAEFTRLRQRLQGMISQLKVPLNEQKRFGDRALTTQLGQHCSSSLKALLSDLKGVEKAIKQLITDDPILKSLFDLVTSIPGVGQVVATELILASDEFKAINDPKKLACHAGVAPFEHSSGSSVRGKTRVNHHARKSLKTLLHMAAMSALQMPGELQEYYQRKVKEGKNKMLVINALRNKLIHRVYAVVKRGKKYNKNYTPTLV

SEQ ID NO: 64052 - protein, 479 aa, unidentified
MSFPLERFVLSSASPGVRRRAAIKDHTPMSLPVLDPLAAFVDVGSEHMHVSIAGGPPEVFGAMTGELHRLRDWLKERGVSSVAMEATGVYWLPLYGVLEESGMRVLMVNGKHTRNVPGRKTDMQDCQWGATLHAHGLLRGGFVPPAQIRQLQDYLRLRDDHIGLAGSHVQHMQKALERMNLKIHDVISNVVGASGLAVIKAILGGERNPERLLAVCDVQIRKRKAEAMKEALRGTWGEEHLFALKQALESWEHYRKQIEACDKQIHEVLLRMQASMTPPESQAQDGSPGEGARGESAPRKRAGINAPSIEGLEGLMKRLLGGKDLTVLPACTSYSMLQLIGEVGLDLGKWRTAKHFTAWLGLAPGSYQSGKRNRGVGRKRNRAGRLLCVLARSLVRSKDIALGGFYRRMAARRGGLIANIATARKLGVLIWQAMVKGLDYVDEGLRRYETRVLETKQRTLRRMAKDLGMEVTVRQNQAA

SEQ ID NO: 64053 - protein, 482 aa, unidentified
MKPKQQEKTKNATYQPTQGHWQQMNRKQRREMTRKIQSEDISLEMIHPDAAGIDIGNESHYVAVPPTRDSQPVRRFGCTTAELKAMADWLKQCGIRTVAMQSTGVYWIAVYDILEQAGLEVYLVNARDTKNLPGRKSDVQESQWLMKLHTYGLLRNSFRPSPEIRTMRSYWRQRNDLVQSAGRHIQRMQKALTQMNIQLANVLSDVSGMTGQAIIKAILAGERDPHKLAAFRDHRVKASEEEIARSLEGNWEEDVLFVLKQEQDGYEFCQKQMTECDQRLEQYLQQREDRSAGATLPEEKRKERLKKKKGNKPRFDLRTGLFRMTGTDLTRIDGIDVMTAMTILSEAGWDMSKWETEDHFVSWLRLCPDNRISGDKIIGKGRLPTNNRVSIALKMAANTLRTSKTYLGAQFRRLRSRLDTPVAIKAMAAKLARLVYRMLRSGMKYVDQGAAFYEAQHRQLQIKHLKTKAAKLGFQLIQVPAA

SEQ ID NO: 64054 - protein, 390 aa, unidentified
MDVMHPVCCGIDVHQKSIVCCILDGPLTSNEPKKYQTTFGTTTKELKAALDWLLEHQVTHVFFESTGQYWIPLFNIFSDSDLELILANPQHIKNVPGRKTDVKDAEWIAQLGRCGLINQSYIPSQEVLQLRYLTRYRLSVKQRLTQIKNHIHVILQRANIKITSYLADIFCKTGQALLTLFINGEVINEDNVENCIHGRIKASTRQLIEAMEGKLSTVDRFLIKECMEEYQLQKKISDELNKEIKEYILEHFPEEYQLLLTIPGISDNCCATILAEIGPNVDAFKTDKNLASWAGMCPGSNESAGVKRSSHTTQGNKYLKQALVMSVLSVQRAKEESFSLFYQRISSRGSKMKAIIACGHKMLRIIYKILQSHKPYDSQKALGLRQQTNA

SEQ ID NO: 64055 - protein, 355 aa, unidentified
MNKIKYIGLDVHKSSISIAVLDATGKLIMEVTIETQAEALLDFIRGLRGTLYVALEEGTCAAWLYALLVPQAAKVVVCDPRQNPRRLGEKKSDRLDARKLAEWLRLGTLKPVYHGDPLEPGLRESARSYRTLVSDTTRVMNRLKALYRGRGIRCAGTRVYSPRWRGEWLEQLPPSGVRPRAELLYQQLDLLMPLRQEARATMLAESRRHAAQKILRSIPALGPVRVALLIALLQTPHRFRGKRQLWAYAGLALVTRSSADYRIVDGQLGRSRQQALVLGLNANHNHVLKALFKDAAASALAHPGPLKDFYATRVAQGMKPELARLTLARKIAAITLTLWKKGERFNVEHLKAQAA

SEQ ID NO: 64056 - protein, 353 aa, unidentified
MKLHKYMGIDVHQATSVVVVLDANGKVVLEMIVATEAAPIIRLVQSLNGPLHVTFEETTQAAWLYDVMRAYVLEVIVCDPRRNKLLSEGSKGDKPDARKLAELLRAGLLRSVYHGHEATRRLKELVRAYETLSIDTMRTMFRIKAIYRGRGIRTLGSGVYQLKQREQWVHRLTEPGVRQRVAWLYEELDYLRSLRKRAKQTMLEESRKHRAFTLLRTIPQLGPIRCALIVATLDTPHRFRTKHQLWAYSGLAVVTHTSSEYEIKAGRVVRSRKPIATRGLNRNGNRRLKDVFVAAAAGGTQAEPYRTYLRHLEQKGMRAEMARLTLARKIAAITLSIWKKGETFDPKKLNWTT

SEQ ID NO: 64057 - protein, 392 aa, unidentified
MIYVGIDVAKDKHDCCILGPDGEVLRDSITFANNRKGFEELLAAIQKALQEKSRDEVRAGLESTGHYSTNLVAFLRSNGFEPVVLNPLSVNRFRKSQTLRKTKTDKADARFIAAMLLTSAASPHASVSYHIEELKVFTRSRSRLIEHRGKLRISMTRLLDVVFPELATLVWSTNQKSVYHLLLELPNPQAIAHCRIDRLTNIISAGSHGKYGREKALEIRQAAAESIGSNSPAMAFELQQTIRLIQNITIELDLLDNRIEAAVEAVKTPLLTIPGISYTLAGIILAEIGAIERFQTPAQLLAFAGMEPSTFQSGKFRANQTPMVKRGSTYLRWAVLQAARLVAMRDKTFYDYLLKKRQEGKHFNVALSHVGKKLVRVIFHMLQTNRSFVPQS

SEQ ID NO: 64058 - protein, 415 aa, unidentified
MLKIVYPICCGLDVHRDFVYACIATTVNGVTTYKSHRFSTFTKGLRELLSWLLASNCKDVCMESTGKYWIPVYNILETDCKIVLAHPKYVKAIRGKKTDKKDAKWIADIFKHDLVSGSFIPPADIRQLRDLVRYHAKLTNFTTGEKNRAQNCLTVSNLKLDSVFSDVFGKASSKIISHILANPSEKLSDVSAFRTKGMKATDEEILEAVDGEIYPEQAEKLRIIRDHMSSLDLCKANLQSLILSTAEKYIPEIDLVCTVPGIATFSAISVIGEIGVDMSVFPTSKHLCSWAGLTPQNDQSAGKKKTTRISRAGAYIKPLLVQCALAAVKSKNKHPEVYNRYSALKKRRGHKKATIAIARMLLTAIYNVLKKHEPYNAEIYRKSDAPPEHRNVSVEEAIFILQRQGYLISSPVSIE

SEQ ID NO: 64059 - protein, 352 aa, unidentified
MAVTIVETRAETRAITGGVDTHADMHVAAALDPIGGLLGAGEFPATPAGYARLLGWLGGFGAVCLVGIEGTGSYGAGLSRHVTAAGIRVVEVDRSDRQDRRRQGKSDPLDAVSAARAAQSGRARGAPKGRDGAVEAIRALMVARRGAIRERTRTINQARALVLTGPDDLRARFARHTTAALVAGIASLRPRPGDVPGYATRVAVRELGRRAVFLDGQLERLDELIAPLVTARAPGLLALYGIGPHTAALLLIAAGDHPGRLRSEAAWAHLCAAAPIPASPGKVTRHRLNPGGDRQANHALWRIVFTRMGSDPATRAYAERRTAEGKSKAEIIRCLKRYVAREVYPHLRPAAG

SEQ ID NO: 64060 - protein, 353 aa, unidentified
MIIGVDFHPEFQQIALLNTTTGEVEEKRLAHPDEAEKYYRALATAGETVRIGMEASGHGRWFERLVAELQFDLWIGDAAEIRAKRGRKQKTDRQDAQHILKLMLKDDFPKIWVPSWENRDLRQLLWHRHRMVQARTRVMNQLQAVALNEGLHCKKKLWRECGRQQLESFPLAPWASRRRHDLLELLDRLTPAIADLTQAIEREVENYPAAQRLKTHPGVGVLTALAFVLILGDAERFDCGKQVASYLGLVPLEDSSGKRRRLGHITKQGSSIVRFLLVEAEQVTVRSLPEWRSKYFHLVLRRGRKIAKVAMARRLAVQLFWMMRKEWNYEQLKKFGSHAGQPGNRHGVQSNTE

SEQ ID NO: 64061 - protein, 340 aa, unidentified
MEITTIGLDLAKSVFQLHAVDADGAVVWRKKVRRGALLETLAQVPACLVGMEACATAHHWAREISALGHQVRLMPPAYVKAYLRRQKNDAADAEAICEAVRRPTMRFVPAKGAERQAVLVLHRSRELLVRQRTMLINAIRGHCAEFGLVAAQGVSGSRDLATRIRQTDSAVLPDMAKDAMVLLVEQLHALVRQIQALNRRLLVWHRQDKASQRLATIPGVGVISATALAASVTEPSQFRSGREFSASLGLVPRQNSSGGKDRLGRISKMGDRYLRKLLVVGATSVVRRARTADTTAANWVRSLLERKPARLVTVAMANKTARIVWAVLARGETYRSPAAI

SEQ ID NO: 64062 - protein, 424 aa, unidentified
MKSLPEFEFAALVGIDWSDTKHDICLQAANSEEREFTVLLHRPAAIDAWASALRQRFGGQPVAVCLELAKGPLVYALQKYDFLVLFPVHPATLSKYRQAFVPSHAKADPTDAQLALELLLRYRAKLKALAPQSVAMRMLLRLVEQRRRLVGDQSRISNRLTDALKQYFPDVLTWFADKDTILFCDFLTRWTTLKQLKRARRATLLSFFHDHHVRSQARIDERLKAIKSATPLTDDLAVILPNQLLVLALVEQLRVTLQAIERFDAQIATVSEELPDYALFRALPGAGVTLAPRLLAAFGEQRERYQSAAEVQRYTGIAPVTESSGKKHWVHWRLQCPTFLRQTFVEWAGATIPRSFWAAAYYRRQRAKGCSHHAAVRALAFKWIRILYRCWQTRTPYDESTYLNALKRRGSPLLASMMETAKNI

SEQ ID NO: 64063 - protein, 369 aa, unidentified
MADYREAFVGIDVAKLRNAIAIADAGREGEVRFFGEVDASDTSMRRVIQRIATKFDRVYFCYEAGPTGYGLYRLIRSLGHECMVVAPSLIPRKPGDRVKTNRRDALALARLLRAGELTAVWIPDEGHEAMRDLVRARAAAVETLRVHRQHVSAFMLKHGRIYPRRKGWSMRYLRWLQEQPFDHPAHQIALQEMVEAVRVSKERVERLEGVIEEFVPTWSLAPIVRALQTLRGVDLIVAVTFATEVGDVQRFESPRQLMGYLGLVPGERSTGETVRRGGITKAGNGRVRHMLVESAWTYRHPPRVGAKKLYHLEQAPPKVREIAWKAQTRLTARYRMLSGRGKRTTVVCTAIARELVGFMWAVARETQAT

SEQ ID NO: 64064 - protein, 343 aa, unidentified
MQSITTIGLDIAKSVFQVHGVDAAGQVVVRRQLKRRYVLAFFQKLPPCLVGIEACASSHHWSRELQALGHTVRLMPPAYVKPYVKRQKNDATDAEAICEAVTRPTMRFVPTKTTEQQGCLMLHRARHLFIRQQTAVINSIRAYLAEFGIVAPVGRRGVEQLLEVVADTADQRLPEIARACVAALGEQLRALKAQILKFDRCIIAWHRSNATSRQLDDIPGVGPALATALIGSVADPKAFRSGRDFSAWVGLVPKQNSSGGKDKLGGISKQGDRYLRSLFTAGALAVIRYAKIHGTRHRPWLTALLARRPTKVAAIALANKLARMAWAMMARNERYKEPAALAA

SEQ ID NO: 64065 - protein, 384 aa, unidentified
MFAGIDIASERHVLARLDDAGAAIGKPITISEDRAGYDALLAALGRAPVLIVMEATGHYWKNLFVVLTTAGHDVALLNPLIARRFQETNLARTKTDALDATGLARLAFEKRPAPTHLHDEIAETLRELVRHRDRLRQDFDDRVRQLHRLVDLGFPEFTRYVRSLDSMLATCLLAEYPTAHAFARATPRRVARLRYDGRHFVGPDLAHSLVEAAKHSVGQHHGPAYKLQARHICQDLDTWRKRLAEIEHDIENLLNTHVTGKLITSIDGIGPQTAARIIAATGDPAHFKSAGAFAAFVGVVPALRQSGKQKGARAGIGHLGHARLRRALWMPVLSAVRLNPWLRAFYLRLRAAGKPPKLAIIAAMRKLLHAVYSVAKHRRPFVTT

SEQ ID NO: 64066 - protein, 410 aa, unidentified
MNMENEVDIACGMDVHKNNVVVTVVKRKVKEPLLTGLYATSLSSLLQLFARLKELGVTRIAMESTGPYWIPIYRMFHPAFEVHVGNARRMKEHSGKKTDKRDSKWIAYLALNGEVEPSHVPKDEFLDLREIERVMKHLVEIQSGLKNKLRHEMQLCKLDAIECNGKLSKSLIVLLDGLSEGKTIEASISGIKHKRMREQFTRQLSEIAGELSKPLLAVIGALVSSIKALNEQIEHLEEFLCNALEPHESEVERIASVPGIGTSTASTILCEVGEFKDFHSADAFCCWCGMVPSVSQTNGKTYYGRLLHGNRYIKGKIIQCAWVAVTRCGENQFRSYFNEMVKRGKPKCKAIVAVAHKMLKVIYHLMIEKEMYSGTRHLQTRIKAKKRNPRVKNADPLNLLLDGFKFVSQT

SEQ ID NO: 64067 - protein, 411 aa, unidentified
MQLFVGDDRAEDHHDIEVMDAAGKVLAKRRLPEGVAGIAQLHELLGRQLGEDADEAGVIVGIETDRGPWVAALIAAGYLVFPVNPLQASRYRERHGVSGAKSGGGDAHMLADMVRTDSHQLRPAAGDSAEAEAIKVLARTHKTLIWERTRAVQRLRHQLREYFPAALEAFEDLDAPDTLELLARAPDPGRAARLTRAQVSAVLKRAGRRGIAGKTDAILAALRSDQLAQPAALTAAYTATVRAHLSVIVTLNQQVKVLQGQVGEHFGQHPDAEIYLSQPGMGTVLGARVLAEFGDGPHRYRDGRARRNYAATSPITRASGKKKVVAARFIHNDMLVDALRAQAFAALNASPGARAFYDAQRAKGLEHNDALRRLANRLVGILHGCLKTRTPYNEATAWGHREHLPKPSVAA

SEQ ID NO: 64068 - protein, 342 aa, unidentified
MGAVTVIGLDIAKSVFQVHGIDAAGTIVIQRQIRRGQVLPFFASLRPCLVGIEACATAHHWSRELQHPGHQVRLMPPAYVKPYVKRQKNDRADAEAICEAVTRPTMRFVETKTCEQQSVLMLHRVRFMLVKQRTRLINAIRAHLAEFGLVARVGREGADELVQRVRKGDAPIPDLARACVLALAEQLMLVRRQILEMDRRITAHSRASEVSRRLAEIPGVGPLLASALVAHVPDPQSFSCGRNLAAWIGLVPKQSSSGGKERLGGVTKQGNRYLRSLLTMGALAVIRYAQRHGTRRPWLVALLARRATKVAAVALANKMARMAWAIMAKGERYREPVIMQAA

SEQ ID NO: 64069 - protein, 344 aa, unidentified
MLYVGLDLSRKRLDWLALGEGGQLVANGAVAPDRDALTRLGRRLGDAPVLAVIESMSGARFVHDQLELAGWDVRIADAVKARGLAPLACKTDRIDCWVLAELGRRQLVPEIWLPDPRVRAERERARFRLHLVKHRVALKNRVHAILFQHGLPNPHRDLFGAGGRLLLARLELAEPWASSVSASLLLIDRLDAQIDACEADLRRLGVDHRYIPLLTTVPGIAWVLGYTIAAEIGDIGRFASPRKLIGYTGLTPRVEQSGERDRRGPLRKNGPNYLRWALIEAAHTAGRNPRYRPIVTRMRARHGRTRGSKIAAIEIARRLTEAIWHMLTNDRPFAPAGAPTPVAA

SEQ ID NO: 64070 - protein, 406 aa, unidentified
MELVALHKRVIGLDVHQAQITACAIIEESDGTTRIEQRQFGAFKRDRRALAEWAAALLPDEVVMESTGIYWKSPYAALEAVGIRAQVVNARHVKHVPGRKTDIGDAQWLATLARAGLLRASFVPPMALRELRLIARQRQKLSGQLSSEKNRLHKVLTDGGIRLGVVVSDLHGQSARAMVKAIVAAQPPHQVLKLASRRLKASREELFDALQGELTDSHHFVLDELMRHIEEIEARIARFDTRLLEGLASEKNALTLLQTLPGVDLIGAAMLLVEIGTDMDAFGSADRLASWVGICPGNNESGGKHKSGRVRKGNLYVRRLLCEFAHAASRTRSVFQSKFQSLVIRRGHKRSIVALAHKLLRTIFFMLKRHEHYRDSATDYEALSVQRNAPRWIKALTRFGFIPAAI

SEQ ID NO: 64071 - protein, 319 aa, unidentified
MTAQIFIGIDVARDSLEVAVRPTGEQWSVGNHPVGIAELLVRVRPFRPTLIVLEATGGLELPVLGVLGSAGLPVVAVNPRQVRDFAKATGKLAKTDAIDAQVLAHFADAVRPEVRPLPDGATRALSALVARRRQLVEMLTAEENRRASASATIRPDIQEHIGWLRKRLKGIDKELSQALRTSPLWRAQEDVLRSVPCVGPVVTVTLLADLPELGVLGRKPLGALVGVAPLNRDSGTQRGKRTVWGGRSTVRAALYMAALVGTRHNPVLRALYTRLLAAGKTKKVALTACMHKLLTILNALLKHGTRWATPTSLGASSTG

SEQ ID NO: 64072 - protein, 388 aa, unidentified
MLPVIDALEVQKGRPAMKQNTTELENPRRRVVRKNKQRELTIGVDLGDKTSRYCVLDREGNVLFERSTATTKKGLAQAFASMGASRIAMEVGTHSPWVKRLLESWNHEVIVANAHRVRLITESTRKDDRLDARKLARLARVDPELLSPIRHRSEGAQAYLVMIRARAVLVEARTKLVNSARGVTKSFGERLASCDPDQMRVKCLVGLPSSLQSALQPLVTAVESLTRQIHEYDNKIAQIARSEYPETARLRQVTGVGELIALTYVLTLEDPQRFRRSRDVGGYLGLRPKRRDSGASRPQLRITKEGDVYLRMLLVQGAHYILGWHGVDTDLRRWGLKLAARGGKNAKKRAVIAVARKLAVLLHRLWVTGARYEPLRHSQIASSLQVAV

SEQ ID NO: 64073 - protein, 315 aa, unidentified
MEQSFFAGIDVSEDRLDVAFSHGDEILEFYSIPHTEDEISHLIEKFQKTSPSLIVVERSGGLERCLVACLAGAGLPVVANNPRQVRDFAKATGVLAKTDKIDARTMARFAAAVKPPQRPIKDAERQQLADRVARRRQLVHMLAQEKNRLSRSLGPVRADIQHHISYLQERLDKSNKDIDQIIKGTALYHDTLELLSSVPGIGPVTSASLIADCPELGSLNRRQIAALVGTAPFNRDSGKRSGTRCVWGGRRTVRAHLYMATISAIKCNHKIKSFYTRLIAAGKKPKVAITACMRKLITILNAMVKNQEPWQTSAA

SEQ ID NO: 64074 - protein, 377 aa, unidentified
MKRIKFVGLDVHAETISVAVAEQDGEIRPLGMIANREESIRKLVKKLGPVEELRFCYEAGPTGYALYWQLTRMGAKCEVVAPTLVPVKAGDRVKTDRRDALKLARNYRAGELTAVWVPDAAHEALRDLVRAREAAKKDELRARHRLSKFLLRHGRRPPMGVKAWTMKYLEWVKREVHFEQLAQEATLLDYLHEVEHGAARIARLDGAITEAVKSAPPQMRAVIEALQALRGIAHVSAVTVVAEVGELSRFARATQLMAYGGIVPSEDSSGERTRRGNITKTGNAHLRRVVVEAAWAYRHRPSVGATLRKRQEHVSEEVKEIAWKAQQRLHERYRKLLAKGKNKGVVVTAVGRELLGFIWAIGIQVETAQKESLQRAA

SEQ ID NO: 64075 - protein, 333 aa, unidentified
MNAAIGIDVSKARLDCALVELGRDKPRWEKQVARTPAGVAQLLAKTPAGVPWVMEPTGRYSQEVALLAAEHGQQVLLALTKPARQVLNGLSHASGRTDRTDGIGLGRYALFAHLRDYPLKSEVMDELDQAISARASLAAALSRLRAQQRDLPRAARRYDRAIAALESELEELDRELAGRVRSEPDLATARELDRVPGIGAVVALAVANRLEEKQFDHPDQFVAYCGWHLTFKDSGQKQGRRKLSKHGDGELRRLLYLAAMANLHCKESPFKDQYHRELAKPGMTTTGALCAVARKLARVCWSIHRHGTSYDPQRVNRQPGSGPPAAEKGGTAS

SEQ ID NO: 64076 - protein, 464 aa, unidentified
MKNRSPRVSRPADRLLVGDDVSSVRNDVRFLSAAGDVLLGHQAFANDVPGYHALRECVLDLLEQQGSAGVDFAGEATGWYGFHTFYALAHDPELCHVDVRLNLYNPRLTHAFKKALASLDHTDPLDAHVIAERLRFARTQHAPVLDDVWLGRRLLTRHYFHLSHALAAEKTYFSAFLFLKASAYRQLQPFSDVFGTTSTAILTQYSTIQELAALPLSKLEGLLRDLSNNHLPDVEKNAERLHAVATHSFPVPPGMLAPLNLLLGSTLDHIRFLEAQLGTLQATLADAFAGVPELDWLMSIPGIGLIIATCLLAEISPWERFLEGDRLDRQTGRLRPKNARDAEAALAKWVGLWWPRHQSGAFTGEITRLRHEGNRYARYALIQAANCLKEHSAEYAAFYSRKFAESTTHAHKRALVLTARKAIGLFVALLHTGQFYRVPEPYRNVWSPHQARQLAGDSTSPDDA

SEQ ID NO: 64077 - protein, 393 aa, unidentified
MICVGIDVASDKHDVCIMNQEGEIFKRIFTIHNSKTEYKKLLNEIEAAKKFWNDSKVSIGIESTGVYSGTLINYLSKIEAYQIIHINPILTNMFQHSEVIHYAKTDKIDAKGICNFLSEKKKKLYTYTPPSYTMLEMKSLGREMNHLNKQINKTINRLTGLLHIVFPEFFEVFDKVKGTICLEYLRLYPTPDMIVRKRSLDDVYNKLDNRGRKNDNLDNLINLAKETVGHFTKSDAISISFMASQLQLLYKQKEMMVDRMDTLVVENAMNLAWIPGMGPITACTIMGEIGDITNFHGADSLVAYAGINPMVYQSGKYDAKGLSMSKKGSSYLRNAIILVSRLIIQHDEKFKAYYEKKRAEGKSYNVAIGHVSNKLTRVIYHILKYNEPYDETK

SEQ ID NO: 64078 - protein, 418 aa, unidentified
MYHMAEVSFPSQVLRGCGIDVHLKVVVATIKGEGIRKETRSFDTFTSSLTELKEWLLQNGITHVAMESTGVYWKPVYHVLEDAIPNVWIVNARHIKNVPGHKTDKMDSEWICKLLLAGLLKPSYIPPKEQRQLRDLTRYRNKLIQHVSSEKNRIMRILEDCNIKLSSVVSNTSGTTATKLIDWLCEGKFITLQDIESIYHGRLSATPEELLKACTGFVESHHVYMLQMIRRDIDQTTVLIDELGVKIREVLSKYDNAIELLKEIPGFSDKVVEDLVAEIGFDMSKFPSEKHLASWAGICPGNNESAGKKKSGRITHGNKQVKAVIVEAAWAATRTKNTFFSERYHRIAARRGKKRGLIAVAHSQIVAAYLILSTGARYHELGAQYQQEKIEKKRKAYLTAELKKLGYSVALEKKIATE

SEQ ID NO: 64079 - protein, 319 aa, unidentified
MTNHKTLGIDISKKKFDVALLCNGKLKNKKFTNDTKGFDLLLEWLTRLEGLEARVCLEATGIYGEALSEHLYDSGLELSVVNPARVKGFAQSELLRNKTDKTDAGLIARFCHAMQPSLWSPLPKEIRRLRDLTRHLDALQGMRQQEKNRIEAASEVIKEHLSRHVDYLDNEIEKIKSAINQHIESHSELDIRRNLLATIPGIGDATIRVILAEFGDVTRFKNAKALSAYIGVAPRVRESGSSLRGRSTMSKTGRSQLRKAFFMPALVALRYNPIIVELKERLTKAGKPKMAIVGAAMRKLVHLIYGVLKNEVPFNEKFA

SEQ ID NO: 64080 - protein, 344 aa, unidentified
MSKVSTIGLDIAKHVFHAHGVDERGRALFSKRISRAKVLDFFADQSSCTVALEACGGAHHWARQLTQLGHQVRLIPPAYVKPFVKRQKNDAIDAEAICEAAQRPSMRFVAVKGEEQQAAGLVFRTRDLLVRQRTQLINAIRGHLTEYGWVAPKGPSHVAMLADLIEEEEMVNSLPGAARAMFRVMLDLLDSLNGKIADLDKEIARRAREDEVSRRLMTIPGIGPISATAIAALAPPAETFAKGRDFAAWLGLTPRQRSTGGKQKLGATSKMGERTLRRLLIIGSSAVVKQASKRGAPKGSWLEQMMARKPRMLVTVALANKMARIAWALLLKQENYRAPVAAKA

SEQ ID NO: 64081 - protein, 368 aa, unidentified
MREQQNNRQERTIIGLDLGDRWHRFCVLGESGQVVKEGSVANNRVALSELSSRYPGALVVMEAGCHSPWVSRHLEQAGCEVIVSNPRKTRAIYQHERKSDRRDALMLARIARMEPALLYPVRHGSEEAQQDLLRIKLRDSLVRARVGLINSLRFTLKSLGYTIANPSTERFHKVIQSALPESVVQMIAPSVQAIEELSLRIKLLDREIRTLAHTKYPETSWLEQIPGVGPITALYFVLKIGDPARFERVRDVGAFIGLCPRRDQSGENDPQLRISKRGDAYLRRLLVSSAQYILGPFAPPSALRQYGLALAAGATDRAKKSAVVAVARKLAVLLLTLWKNKSSYQTFPQHSSREKMRTNDLERLRCIA

SEQ ID NO: 64082 - protein, 322 aa, unidentified
MRYIGIDVSKATFVVAYSSDKGGEIRTFNNTTTGIKQFIGALPKDGSIHCVMEATGNYSALLLYMLNVAGITVSMENPLKVKNFAKAMLSTIKTDKSDARLITLYGEKMNPRPFKVQGEAILRLRQKRTVIRQLTKQITAMSNLRGSLACLPVPDKGATHTVDETIKFLEKKRGRLQSELTDLVEVEFSRQLALLTTIKGIGITLATALIITTGGFTYFQNAKQVSRYLGICPTYEQSGTSVNIRGHINRNGDAYTRGLLYVAAWTASRFNTKCGETYTRLRQNGKPGKLAMIAVANKLVRQAFAVVTHDKEYVDGFVSNRP

SEQ ID NO: 64083 - protein, 317 aa, unidentified
MTQSITVTAGIDTSKAKLDIAVHGHAQNWQVENTPHGWRQLAGDFTKSGVVRVGIEATGGYERGAVRYLREKGFTVLLLQPMQVRAFARVHRRRAKNDALDAALIAACAAHIDEPVREVDERLAELTGHLTFVEQIEEDIARLKTRLEHIDDRRLRSMVVADIARLKARRAAEMRRILKALRMHEDLAGRLDLVLSVPGIGERTAIALIVRMPELGCLTREEAAALAGLAPFDDDSGKTKGQRHIAGGRERLRRSLFAAALAAAFRWNRALVALYARLTARGKAHNAALIACARKLLIYANTVVQRGTPWVDSPAVA

SEQ ID NO: 64084 - protein, 341 aa, unidentified
MTEVSTIGLDLAKNVFQAHGADAAGAPVFRKKLRRDQVLAFFAAQPPCLVAMEACPGAHHWGRQIGKLGHTVKLIAPAYVKPFVKRQKNDAADAEAICEAAQRPTMRFVAVKSEAKQAAAVIFRARDVLVGQRTQLINAIRGHLAEYGLIAQQGPFHVGGLIAQIEDPTSDIPPAARACLTVLVGALRYLQEQTAALDAEIATRAKADETARRLMSVPGIGPLIATAIEALAPPTETFHSGRDFAAWVGLTPVQRSTGGKERLGRTSRMGERTLRRLLIIAASAVVRWAKRKGVPADTWLGRMLARKPPMLVIVAVANKNARIAWALLTKGGIYRAPAVTA

SEQ ID NO: 64085 - protein, 432 aa, unidentified
MVEINPLSTLFVGIDVSSKNNVVYAMDFNQHKAFSSSFANSQPGAEQLEKRLEQFMLAHQNLDTIVVAMEATSVYNIHIANFLSSSEVLMPYSPYVYCVNPKATANYAKSYVGASKSDPEDAEMIADFARAGRTKKLTPWRGSQFIALKRLTRQRLHLVECMTREKTYMVSNMYLKFSELQLLDGDNAPFCDVYGATSSAVLTEYYSPQDIIDAPEEDLLKFLAEKSRNRIADPSEASRLLKKAARDSYRLDKCMYEPLNISLACSFNCIETYKKQIKAIDKAIEKALNGVVPEAVTILESIPGIGPVYAAGIIAEIGDISAFKSADALAKYAGLTWRHHDSGDFRSDDTYVTKAGNIYLRYFLVEAANSVRRHIPEYGEYYAKKFAEVTKHQHKRALALTSRKFVRLVFGLLARNQLYTGEKLDAELNNRT

SEQ ID NO: 64086 - protein, 485 aa, unidentified
MHLPSPVRLLGIDLGVISDHTAVVVDGTGRVHARRRARSTVTSLAALEAAALATAEAGTHLVVVIEPTGPAWRPVAVFYGRRGHTVLRVTSAKAADLRRFLARHAKSNGIDAETLARLPLVAPTGLTAVEFGSPARASLDRRVRAVARLTAEIGRRKTRIRTLAQQLVPMIGGALSEGLSHTDLAVLECYADPRALLAAGPARLTRLITTTSRGQLGAAKAQALRTAAAEAVALWEGDSAAALDDLAAEVASEVRLVRAAEAERARHEHARDAAFAQVDPAGLAASLPGLGPVGTTQLVATMGRPGRFPNGGAFKAFTGLTPRANETGQTDRKHQPMTKAGPRLLRSQLVQSANTARKLDPQLAAVYHAQMTQRGATHRKALCVVAARLAERGWLTLARGEPYVICDLEGRPVTPEQARRLIAERFTVTPEVRRRRRSTKQAGKAPHKALKAQGKSQREAGHEATFPAASLDAPPIIVNNSHAPV

SEQ ID NO: 64087 - protein, 362 aa, unidentified
MKKSIRERESEWKQRPDRTVGVDLGDRFSHYCVLNGDGEVLEEGRVRTSEEAFRRHWEAEPRQRIVMETGTHSPWISRLLRGFGHQVIVANARKVRAISENESKNDRQDAEMLARLGYCNPRLLKPIQHRSAERQRDLNLIRARDTLVRARTMLINSMRGLVKSAGGRLPPASSESFAARVSAAVPAELGTATHPLLHQIAGLTVEIRGLDQAIEKLAERYPEIRILRTAPGVGPVIAAAYVLTLDGVDAVEHSRSVGAFLGLRPKQSQSGDSDPEHNISKTGNIYLRRLLVQAAQYILGRFGPDSALRRWGLKLAQGGKRTKKRAVVAVARKLAVLLHHLWRTGQHYQPFPEVAAAAGSAA

SEQ ID NO: 64088 - protein, 367 aa, unidentified
MDSLYVGIDLHKKFAYWTAINGKREIVFEGKVPTDVKATEAAVGKLPAAASIQAVVEPVEHWGWYTDMLEKFGVETKLADCLKVGLIAKSRLKHDRVDAKVLSELLRSGFLPEAYLAPKEIRDLRALLRFRICLVRTKARFKNRAHGLLAKQGLRTSWTDIFGTAGRKWFGTLDLSSPHKEELDSLLVLYDALQTEVKKLDKEVRLRAATSNELRLLQTIPAVGAFTALLVKAEVGDFSRFPSADKLSAYAGLVPSSYSSGGKFRFGHITRSGSGYLRWIMVEAAQRIRPRDGELYSFYQRIREKKGNATARVALARKLLCLCWTIVTKGKPYSKTKAAFRGDLGVQLAERLNYRLRPASRIVTVPP

SEQ ID NO: 64089 - protein, 449 aa, unidentified
MSKKTKTKNTLQLAVIHEHTAAVDVGSMLMTVAYTDNEGNQQLMETDGFTESLNELVQTLKAAGVTHVAMEATGVYWMALYELMEDAGLKMTLVNPKHFKNVDAQKTDVKDSQWLQQLHVHGLLRASHIAPELYRELRSYVHERNVLQKQKSDTLNRIHKVLTKMNIKVQHVISDIEGVSGMKLLRGIAGGITDAEKLLAGINIGLLKADKEDLLKSLKGVYKTQYVVILKNSLVMLDFFKGQMKNYELLIEEVLQKMLPVDKEKKTPKIPRKTKQVRKNQYSINLKEYLTQIIGVDLTQVDGLDEISVLEIIAVTGINMDKWKTAEHFSSWLNLSPRAKITGGKVIGYSKRFTNNNATQALRMAAQTMWRNKGTLGILYRRLAAQKGSSKAIKAIARKLAVIIYNMIKNKSEYDPQKIQIDTDTEKKKRLKRLEKEATRYGYILQKAA

SEQ ID NO: 64090 - protein, 423 aa, unidentified
MSYRIAGIDVHKKMLAVVVADVEVQGEYQFERIRYGSNPEHLRLLAAWLIEHKVEEVVMESTAQYWKPVWGALERHWKPSCQKREGAGPMSGTLHLAQARSNRGRKGRKKDFPDAERLVKRLVADELILSFVPDAEQRLWRTVTRRKYQLTRNKVRLQNQLEALLEETHIKLSSLVSDLLGVSARRMLKAIADGGTDPAALAALADKKLRATPAQLCDALDACAELKPIYRRLLKMFLEELQLIEQQIGQLDQEMAALLSQHPEAVQRLAEIPGLGVDSAQQIIAEVGATARTFPSGKHLSSWVGACPGDEESAEVSRSHRSPKGNRHMRRILNQCANAAVKAKGTIFEIVYRRLVSRLGHNQTIGAIAHRLCHLIWIILHRGVRYEERGPSVTTKSRRQRTTRMIRELRNLGYRVEPLGTPA

SEQ ID NO: 64091 - protein, 344 aa, unidentified
MDHFAGLDVSVNETSICIVDGAGRIVRETKVASEPETLLAVLKNPAYHFKRVGLEAGPLSQWLFSALAEAGLPVICVETRHMKAVLKAQINKTDRNDARGIAQMMRVGLYRPVHVKTLRSQKLRMLLIHRKLLQSKAIAIENDLRGTLRNFGLKVGMVGKVKFEARIHELVENLPDLAVLVEPMLTVRRVLREQIVILHRRVLAIVRDDDVCRRLMTTPGVGPVVALTYRATVDVPARFRKSKSVGAVFGLTCAKYQSGEIDWSGRISRCGDEMMRVMLYEAAQSMLVRSKKWSWLKAWAMQVARRRGMKKAIVALARRLAVIMHRIWVDGTEFRWTRQEAAAV

SEQ ID NO: 64092 - protein, 420 aa, unidentified
MQEQPSKFAAFIGIDWADRKHDICLQVAGADTFELSVIEHRPTVIDAWARALRKRFDGRPIAVCLELSQGPIVSALLEYDFFVLFPVNPSTLARYRGTFTLSGAKDDPTDASVALEILRRHPEKLAALRRESVDMRALRRLVECRRDLVQDRVRVTNRLIYALKAYFPQVIDWFRDKETDVFAAFLERWPSLPEAQRARRDTLVDFFHEHNVRRANTIEKRLAAIKSEKPLTTDPAAIQPALLLVETLLPQLRALSAGILRFDEEIARRCKTLPDFRLFSNLPGAGKVFAPRLLVAFGEQRDRFATAAALQMLTGIAPVTERSGKTHWVHWRWACPKFLRQTFVEWAASSIPHSFWARAFYESHKAKGSTHNAAVRALAFKWIRVLFRCWVDRVPYDESRYLAALQKRHSPILKFAAEAS

SEQ ID NO: 64093 - protein, 349 aa, unidentified
MTHRKPTNAAVYGIDLGKNVFHIAGADADGAIIGNWKLRRDTLLQFFRVAAPALIGMEACPGSQWLARHLQAFGHRVRIIPAQFVKPYVKSNKSDIIDAAAIAEAVTRPTMRFVEIKSAAQAELQAMHRIRDRMVANRTRLVCQMRAMCIEFGIAIHQGIGKFKADMPRVLSNEENDLTPIMRRLLADLLDDLRHIEERIAAVTREIEANAAQDERSRRLMTVPGIGPLVATAILASAGDGRQFRSARDMAAWLGLVPRQHSTGGKNTLLGISRRGNHYLRRLLIHGARSCVMHLDRSRDRLGAWIDRLQKRMHVNKVTVALAAKVARVAWVILNRPGAIYERRDPATA

SEQ ID NO: 64094 - protein, 340 aa, unidentified
MNATTYGLDIAKSAFQLYWVDSVTGEISNRRFSKEELIGFLAKRPAGRVALEACSSSHWWARKLHALGHEAVLIHARFVRPFVQTNKTDAADARAIWTAVHQPQMRAVAQKTEDQQAMLSLHRMRSLLVKFRTMQVNQVRALLYEFGASFRRGRAAGVAEIYERFAQLEAELPGAVLQCVRDQLGRIERFDQDIVEVEQRIKTWQREDAACRAISDIPGIGKLTATAIVATIGDAKTFKSGRQFAAYLGLIPRQSGTGGKVRLGNISKRGDPYLRTLMIHGARSVLYHDKAPSDWQQKIHERRPANVAAVALANKIARTAWAILAHDDRYDRHHVSMRPA

SEQ ID NO: 64095 - protein, 355 aa, unidentified
MSGLKHQKEKRSMDHFAGLDVSVKETSVCIVDDTGRIVREVKVASEPEALLAVLKNPAYCFKRIGLEAGPLSQWLYSALAEAGLPVICVETRHMRAVLKAQINKTDRNDARGMAQMMRVGLYRPVHVKTLRSQKLRMLLTHRKLLQAKAIALENDLRSTLRNFGLKVGMVGTVKFEGRIKELVENLPDLAILVESLLIVRRVLREQLGILHRRLLDIVRNDDVCRRLMTVPGVGPVVALTYRATVDVPARFKNSKAVGASFGLTPSRHQSGESDRPGAISRCGDEMMRMMLYEAAQVMLTRTNKWSWLKAWAMKIARHRGMKKAIVALARRLAVIMHRMWVDGTEFRWTQDVAAA

SEQ ID NO: 64096 - protein, 379 aa, unidentified
MSKGTVFVGMDVHAETIAVAVSEGRGVVRSLGMIPNRPEAVRRMLGQLGAVKHVKVCYEAGPTGYVLYWQLTALGVHCDVIAPSLVPMKSGDRIKTDRRDAERLARSYRSGDLTPIWVPDAEHEALRDVVRAREAGKEDQLRAKHRLGKYLLRYGQRPTEGCRAWTAPWWQWVRALQMQHVNQNTVLLDYILEVDQQAQRIARLDAAIDLAIARAPARLRAIVDALQALRGVAKVTAVTLATEFGSFTRFEHAGQAMSYTGLVPSEHSSGAKNRRGSITKTGNSHLRRVLVESAWHYRHRPRLAKRQKEVQANVPANIASIAWRAQERLHRRYASLSLKAKPRAKIVTAVARELVGFIWAIGREVEKQPMAPGKQQTNR

SEQ ID NO: 64097 - protein, 354 aa, unidentified
MTSAPGQPAQTFASIGIDIGKDVFHIVGFDAQGKIVLRKKFKRLALESELAKLPPSIVGLEACLSAHFVSRTLRRLGHTPRIIPAIYVKPFSKGQKNDYNDAEAIAEAALRPNLRVVQEKTQDQLDLQALHRVRARLVSRRTATINQIRAFLIEHGIAVRTGANSLRRSLFAILENRADELSPRMSDLIVGLYEDWLWLDERIETLTGEIEQISHQEANCKRLMSVPGIGPIISTAMVAAIGTGEAFERGRDFGAWLGLVPRQYSTGGKSILGRISKRGSRYLRTLFIQAANVILMRPQTWERFSFGAWLKAAQPRLHRNKLATALANKLARIAWSVLRNNIAFDAHRIEVVAI

SEQ ID NO: 64098 - protein, 338 aa, unidentified
MAIVMGLDQHRAQITADWLNTETGEVSRARVTPAHRDRVGQFVGRFAGQDLEVALEATTGWRFVVEELQAIGADVHLAEPAETSTLRGSKKRAKTDRADARHLRELLMVGRLPEAWIAPGHLLDLRARVRLRHTLVDQRGEWQQRIQAVLYHHGVAQRRDLLTAGKRQWLEGLELPAAAREQITVALRVIDALDAESAPLTRELRAYGRRQPGCRALMRHYGIGALTAVTILAELGDARRFSSSRHAVRYAGLDITVHQSDQRRAPGHLSRQGPPALRWALYEAAQLARRPGSPDHAYYEQAAARLGGNRACLAVARKLLKRSYHTLRELEDEALQPA

SEQ ID NO: 64099 - protein, 410 aa, unidentified
MQALVERGCGLDVHQATVVACLLIVRKDGKVQKQMRTFGTTTRELLSLREWLLSEGCTHVAMESTGVYWKPVYAILEGALEIVVANAQHVKKVPGRKTDVKDAEWIADLLCHGLLRSSFVPPKPIRELRDLTRYRRKLVESQAAERNRLLKLLETANIKLASVATDVFGMSGRLILRALVEGKATPQEMAELAKGKLRKKIPELEPALEGKVEEHHRFLLRLQLGRLEAAEKDLAVLEQRIQEKLKPYEAQLTLLDEIPGVDWTLAAGIIAEMGVDMSVFGSVSQLASWAGVCPGNNESAGKRKSSRIPKGNVYLKTALVEAANSAAKAKGTYLRDKFYRLKARRGYKRAAVAVAHKIMVAIYHMLSHRVCYNELGDAYLDKRNKHQLTRNLIHRLERLGYSVTLEQKAA

SEQ ID NO: 64100 - protein, 339 aa, unidentified
MTDIIRIGLDIAKGVFEVHAVNAQEQVVVRRSVRRNQLLNWFAKQPPCLIGMEACGTAYHWARELTALGHMVRLIPPAYAKPYVRRNKNDAADAAAICEAVSRPSMRFVPIKTLEQQADTVTHKARQVLVKQRTMIMNSFRGLMAEFGIIVPSGPQHIGKLLAVLADPDDPRVPAVARTALNAMSEMLSSLETQIEVLEKDIRLRARNNPTARRLDTIPGYGPILSSAMAAIVTDPGQFDSGRDFAASLGIVPRQDSTGGKTKLGPISKRGNGYLRRLLVNGAMAVLNGKNAANDPWLVKLLESKPRKLVAVALANKMARIAWAVMTRQEDFRPRAVAA

SEQ ID NO: 64101 - protein, 319 aa, unidentified
MSGMYVGVDVAKAELVVAARPSDERWSVANDERGARTLAERLKRDAPALVVLEATGGYELAAVAALAAAGLPVVVANPRQVRDFARATGQLAKTDRIDAGVLALFAERVRPEVRPLPNEEAQELDAVLTRRRQLLEMLTAERNRLGQVAGRGRRPVKKSLKAHIAFLERELRVADTDLGAMVRASPAWREKDDLLRSVPGVGPVLSLTLLAELPELGRLSRREVAKLAGVAPLARDSGTLRGHRYVHGGRASVRAVLYMAALVATRRNPVIRAFYERLLAAGKPKKLALVACMRKLLTILNAMARSGLRWEAPNALATT

SEQ ID NO: 64102 - protein, 351 aa, unidentified
MNTQTTAAPKLFIGMDVHKKSWTIHFKTDLFDNKTITIPPDPSVLINYVHKQFEGHKISCCYEAGCCGYWIARALLDQGWEVKVVNPADVPRNNKQDWQKTDKIDSRNLCKHLSDGNLKGIFIPGEEQEQLRSLFRRRIHLARNLRTIKNHIKSQLLYFGIKLPEQFDNPNWSREMKTWIANLQWKYRSGAESIKSRLKQLEFMWYEELHISNELRAYCRKHYRKDYYLYKSIPGIGGITAAGVLSELGDIRRFNRLDELAAIVGLVPGIYQSSENKINLGLTKRSNHPLRSLLVEASWVAVRTDMALQQYYRVHAYKEPNKAIIKVAHKLLSRMRGVIKSGVPYQLGVVK

SEQ ID NO: 64103 - protein, 323 aa, unidentified
MRKRQGPFSQVVGVDVSKDKLDFAFADGKRTRSIDNAPKQIVRELIGRINNPESTIVVMEATGGYEERLVTLLHEHKIALAVVNPRRVRDFAEGIGRDAKTDRLDAQVIAFYGQVVKPEPQVAKSEEDKKLKALVERRRQLLDLINQESNRLGQTTDREIRGYIQETLKTLKKQVETIDQRLAKCVKANTANARKVEIFESVKGLGPVSISTFLAELPELGQLNRGQIAKLVGVAPMNRDSGKKSGRRRTFGGRSYVRRVLYMATLVATQFNPRIKTFYQRLLRQGKPKKVALIAAMRKLLTIVNTLIKNDALWDATPNQARV

SEQ ID NO: 64104 - protein, 454 aa, unidentified
MLRRSSDTSTLAQLPKVHLDAAGLDIGSTEIWAAVPADRDGESVRQFGTFTPDLQALADWLVACHIQTVALESTGVYWIPIYEILEARGLEVRVVNAQHLKRVPGRKSDFADCQWLQYLHTVGLLNGSFRPEGEMCVLRAYLRQRATLIEHRAAHILHMQKALQQMNVQLTQVLSDITGVTGMAIIRAIVAGERDAVKLAQLRDKRCAHAEDEIAKALTGNYRAEHVFALKQALALYDAYTQQIQDCDAAIEQQMQAMADDNDDDLPPLDDTDKRNSHSKNGPSYDARTLLYRLAGVDLVAVTGLSALTVQTIISEVGLDMSRFPNEKHFCSWLGLAPHNDVSGGRVLRSRTLPTRSRAGQAFRLAAQSASRSHDTEFGAYYRRIRGRLGPKQALVALAHKIARTVYYLLKHRTPFHDVGAMAFERSAKERDIARLEKWAAKLGRQVVEIAAPT

SEQ ID NO: 64105 - protein, 334 aa, unidentified
MKSDSVHIGVDVSKAKLDVYVPAKQEGLRATTFEVANDIAGFRKLRDVARSANATVCVEPTGGYELELIAFMHKFNVPVAYVDALRVRQFARAEGNLSKNDRIDAALIARFAAKIGARVLDRQDTAAVELKRKTKFRQTMTDLRTTLINRLETEFDKEMRGLLKEQIRHIDRMIRKIEKSSMETVDNNPSMRSMVGRFTKVGGVGEVTAISILTGLPEIGRLSDSKLNRLAGIAPEEKSSGAKEWRRQIWGGRKDVRNTLYMATTAGLMWNSILNDYYRKKRAQGHPHKWAMIPTMRKLLSLLNRIARDPNFNPIPEPESTKNNAKVGRKKKTA

SEQ ID NO: 64106 - protein, 343 aa, unidentified
MKIMRVGVDLAKNVFQVHGVDRTEKPVWCRRLSREKWLKVVLEKVEPGCEIGMEACAGAHHWARQLQGHGLTVKMIAPQFVKPYVKSNKNDANDAEAICEAMSRPTMRFVLVKSVEQQDIQAVHRIRSELLGQRTAKANQIRGLVGEYGLVAPKQLSHLRAALPGWLEDAENGLSERFRRLLNALWGDLVELDTRVGELDDEVAATVKSDPVAQRLQQLRGVGPITATALVAAVGSAEQFAKGRDMAVSLGLTPRQHSTGGKDRLLGISKRGDPYLRSLLVHGGRSVIRTAKGKDDRLSRWVMNLVARSHPNVAAVAMANKTARIAWAMIRNGTDYQPERAAS

SEQ ID NO: 64107 - protein, 395 aa, unidentified
MEVMDQAGKVLARRRLPEGVAGMTQFHELIGRFAGDDGEAEVVIGIETDRGPRVAALVAAGYVVYPVNPLQASRYRARHGVSGAKSDAGDAHMLADVVRTDSHQLRPAAGDSPEAEGIKVLARTHKTLIWERTRAVQRLRHQLREYFPAALEAFGDLDAPDTLELPGKAPDPAAAARLTRAQISAALKRARRRMIADKATAILAALRSDQLALPEHLTAACATAARSLIAVIVTLNEQVTTLQRQVEDHFGRHPDAEIYLSQPGMGAILAARVPGEFGDDPDRYADGKARRNYAGTSPLTRASGKKKIITARYVRNDRLADALNSQALSALTRSPGARALYDQLRARGIEHNDALRRLANRLVGILHGCLKTGTLYNEATAWQTHENLSQTRAAA

SEQ ID NO: 64108 - protein, 307 aa, unidentified
MQGQKSPERSAQGVYVGVDVCKDWLDVYLHPVGQAFRVANAPEGLKAFKRRISELPIELIVMEATGKFHRQTHRTLHAAGFAVAVVNPLRARLFAEAVGQLAKTDRLDARVLALMGQALEPSAIAPAPEAIEALQELARARSAAKADQTALSNQRSASQTAFLKAELGRRLKTLAGHIERLDAEIERRLGADPALKRRFDILITIPGVGPVAALALVVGLPELGACSAKAATLLAGLAPLACDSGEKAGERHIKGGRAFVRTGLYFAAIAAARFNPQLSDDYKRLRNAGKKAKAERVNDFETPGVRI

SEQ ID NO: 64109 - protein, 404 aa, unidentified
MNAVGIDVSKGKSMIAIMRPLGEVVATPFEVGHTAAELNELAKFILKISGETRVVMEYTGVYFEPIARALYDAGLCVCVVHAQLIHNYGNNTIRKVKIDKADAIKIANYALDNWGKLKPYTPIDEVRRQLKAYSRQYRKFNKLKTMLKNNFISLTDSTFPGVNELFSSPPRKSDGHEKWLDFAMKFWHAECVCSLSQKAFTERYRKWCHKAGYYFLKSNAEDIYAAACGHIGLLPKDENTKQLVQQTIIQLTSICSSLSVIENKMTELAGLLPEYPIVMEFRGVGRILGPQIMAEVGDVLRFEKKESLVCFAGLEAPPYESGKFESHNRTISKKGSPHLRAALFQVMDCLIKTQPVNDPVFQFIDRKRSEGKHYYSYMCAGSAKFLRIYYARVKEYLTTLEQNT

SEQ ID NO: 64110 - protein, 364 aa, unidentified
MDTHKKDHKVALMNPQTGELQQFTVRNTAKDITQMVRKIKKQAPGDIHICYEAGVCGFVLKRRLDALGFRCSVIAPSLVPTKPGERIKTDRRDARKLLSHFMAGQLTEVYAPDEQQEAARELARCRQAAQENLKRIRQQLVKFLTRHGYIYRDGRHWTQRHMQWLNSIEFDIADLRDVFDSYYTEQQHCMQRLRSLDRQIEQLAERPQYKEMVGLLRCFKGIDTLTAITIIAEIFEFGRFASPRTLMSYLGLTPSESSSGEKRRQGAITKTGNKRIRRLLTESAWHYRHRCGLSKSLKQRRQGQPQWVVDIADRAMVRLRKRYWRLLERGKIKNKAVVAVAREMVGFIWAVLQEYEHRKKKQTA

SEQ ID NO: 64111 - protein, 462 aa, unidentified
MKGNAVKSKRVRRPRSPLALVNPDAAGIDCGLAEHYVAVPQDRDPEHVRRFRTFTEDLHRLADWLVSCGIKTVAMEATGVFWIPVYEILEARGLQVLLVNARHVKNVPGRKSDVADCEWLQQLHSVGLLRGSFRPAADIAALRSYLRHRESLVQTASTALQRMQKALVQMNLQLQVVITDISGTTGLRIIRDIIAGQTDPRQLAKHRNARCNSSEAEIAAALTGNYRPEHVFVLQQNLEIFDALQRQIESCDKRVEAHLQQLTAQAPHASKPIPAARPRRRSRGEPPFDLRTPLHQLTGADLSQIDGIGPYNAVRLISEIGTDMSRWATERHFTSWLTLAPNNKISGGRLLSSRTQPSTNRAAAILRVAAMSLSRTDTALGAFYRRLAGRIGKAKAITATARKLATLVYRCLKGDIVYEDPGAAAYDRHHRESVLRRLRHRAASLGFTLVNQQTREILEGVS

SEQ ID NO: 64112 - protein, 395 aa, unidentified
MYKLLVGIDVSKERFSAAGMDSGGKEAFSRAYTMDSKGFEELLKAVRSLCEEDSKVLMAMESTGCYHINLFSFLSSQGIGTLVVNPLLISNYAKLSLRKTKTDKKDAMTIARFLLDHHKEISQLSISQDNQDLRDLSRERESLSHLISATKVEIKRVLRTTFPELETVGDVYTGVMLRLIQEYPSARLVRAAKLKGIIKLLKEPRRGNKRTYTAEDIYRAAKTSIATVSPGKEIILRGKVATLLHLQERLEEITKLLTELCQSTRMEDLDILQSIKGVGPNTAAPLLAEMGSIENFSSHKKLIAFAGLDPSVTESGQYIGASRLSKRGNRHLRRAIYLMTTSVVSWNAWFKAYFQKRKAEGMAPQKALFATAHKLIRVIFAMLSQRTYFKVKEAK

SEQ ID NO: 64113 - protein, 374 aa, unidentified
MVDDIAIYIGLDVSKEKIAVGLAEAGRKGEVRYYGEIANRADAVRKLAEKLAGRHGRLCFCYEAGPTGYGLYRQLSGLGHECLVVAPSLVPTRPGLQVKTDRRDAVALAALLRAGELSSIWVPDETHEAMRDLCRARETTVSDLRRARQHLLSFLLKHGRVFEGRSHWSKAHRNWLATQRFDHRAQQIAMEEYIHSIEQIEERRDRLTRQMVELLPNWSPNPVVEAIQALRGVAQISAVTLVSEIGDFRRFSNPRQFMAWLGLVPKERSTGASVSRGSITKAGNTRARRMLVEGAWTYRLPARVSQELLKRAEGLPEEIRTIAWKAQVRLCQRCRRMQASGRSINIVTVAIARELAAFVWAIATTVLIPPAKAI

SEQ ID NO: 64114 - protein, 381 aa, unidentified
MYTGNSAVAHYYSLTHNHMQTCERAKTLFVGVDVHKDTHTAVGLSPFGEKLFELTIGNYPQDFAELAEKVKSMAETANLSPRIGLEDCHGFGQRLAEYLDNDGYMVTHVAPILVDHKRKKAAHPEKNDSLDARGVAEVMIQKIDTLPVNKITQDSQIAKDIQELSLDREYLVKEQTRLKNQLHLLLHRIWNTEYRKKFKDPFSVKGLRFWKKSVPKNTSSFLSKNMKRKVKKLEALRLEIKELESDMELLIEKSGHKIHTANGCGIVLAAMIIGEIGDISRFKSPSALAKYAGCAPREHSSGKTHRHRKTRSGNRRLNCAFHRLALSQISRMGNEKAKAYFLRKISEGKSKQQSLVCLRRQIVNIIWMIMKHKTDYNLQKN

SEQ ID NO: 64115 - protein, 403 aa, unidentified
MAKYHVGVDVGKYRHHVTIRDISSDTYCKSFSLTNDREGFDEFISSLEKLSVDKNDFLVGIEACPYGINLSYFLLGVGFNLVEVNPFRAGQFRKAQGKKAKTDKIDSRTIAAILSLGDHKILSITDPILDNLKDLTRFRTDLVNERATMIIHLQEALSILFPEFNSVFRQLDSAGSLAVLATFPGPEHIIAAGEETVGKTLSFASPHKMGRGMARRIIEAARNTVGVIQKQPGLGIKISILAKRITSLQLTIRELDKQITEMFDSLPCKLQGFPLGRAPTLAAIVSEIGDIHRFPTLKNFLSYLGWCPQTFQTGNFRLEHPRMSHAGNKYIRRLIWMLSVFSVRVVPLYREYFKRRVMEGKAKMHVLIAVGRKMLSTLYAMLKKGVPYNPNWEENGHIAAAGR

SEQ ID NO: 64116 - protein, 404 aa, unidentified
MWYVGLDWADTHHDVDVLDEAGKRVGARRFAHSHAGLNELKQFVLSIAAQPEHLACIVETNHGLLISFLLEAGIPVYPVNPKTANQLRKAAGAKTDQIDAHRLSKIGRLELAELRRLEPDGPTVQELKTLTRDQDALIQTQTRLVNQLTACLKEYYPAALHLFAKLQQRSTLVFLQAYPTPQAAQAASLDEITATLRAGKHTNPTRAAPKIFEELHRPQLVASEVIVRAKSRLMLSLVKQLVVVIQEIASYDRAIHTLFLTHNDQELWSSLPRAGKRLAPRLLAEWGDDRSRYADATSVQTLAGTAPVPFQSGNYAKAHKRFACLKPLRNALHQFAWQSTQQEAWARDYYQRKRAEGKTHSMAVRALANVWVRIIYRMWVNKTSYQTATFEAAKRAHAPRQRVA

SEQ ID NO: 64117 - protein, 365 aa, unidentified
MKKIAYVGIDYHLNSLSLAVVVKGKNEPVDMVRLKNDDKLIRKYMSKLSERFEIKTCYEASSNGYSFQRKMAAWGYPCEVIAPSLIPRKPGDHRKHDFRDARDLAQNYAHGTLSIVHPPSEEEEAVRSLVRCRFAFKEAAKRVKQQINSFLLAQDQHWNRSKWTSQHRKWLWEMRMPNAYLQQVLDEHLAHLDYLETRLAHLDDQIEQVATSPVYAPSVKKLAAMKGIKTLTAMLLIAEITDFRRFPNPRALMAFLGLIPSEDSSGDKRKDGAITRAGNKRCRSALIESVQHYARSPHMSAQMKSDLSQLDAHSAGVAVKCLKRLHKRFWALTLKGKLRPVAITAIARELVGFIWAMMQPQPAIA

SEQ ID NO: 64118 - protein, 381 aa, unidentified
MKPTKKLTPTSPKQTEATAEVIKLGIDIHKTKYVVIRQIDNQAAQSPQKFSPDEFVVWVQRQRLLAKRVVSCYEAGCFGFVLHRKLAEVGVENYVVRPRNWDEYGSSVKTDARDARELCGHLDRYLSGNERALCVVRVPTEEQEQARSLSRQRETLAKERKRLQNVGTSSGLYHGVDVPANWWKPKVFAKLSAEIPEFLKLILAPFQQVLEMIDKHLRETTAREERKANRKIPVGLGALTTSILDQEFVDYTRFNNRGQVSSFTGLCPGESSSGNKRQQGSINKHGNPRIRHMLLEAVWRMMQFQPDYKPVLHWKTRMANEPFGAAKKKKMAVAIARQFAVDWWRIQTGRIQPEDVGLRVEFPSAYSTRALREGRVSKVYA

SEQ ID NO: 64119 - protein, 384 aa, unidentified
MRQVEGQRSTLDDAAVFVAMELSKSAWLLAAQASPSGKTSSHRLESGDITGLLALLRRLQARERQACGGTVQVVVGYEAGYDGFWLQRQLAAEGITCWVMDPGSLQVNRRARRAKTDRLDAAMLLRALIAWCRGDRAACHMVQVPSVAREDARRTHRERQRLVAERVQHVNRIKGLLAAQGIDDYRPLRRDRSTRLDELRTKDGRMLPPRLRREIERELQRLELVLEQLEAVEAERDAAVAAPAVDDADAAKVALLAKLGGIGNELATVLVREGLFRSFANRKEVAAYAGLTPMPFASGERHREQGISKAGNPLLRKAMLELAWLWLRYQPDSALARWFTDRVGSARGRIRKITAVALARKLLVALWRYLTAGLLPEGARVKAA

SEQ ID NO: 64120 - protein, 424 aa, unidentified
MKSEHADQIDFAAFVGLDWADQEHAVCLQASGLTKVETYVLKQTAQSLGEWANQLRDRFGGRKVAVCLEQSKGALIYALMSYEFLVLYPVNPQTLAKYRKAFRTSGAKDDPDDAGSLMELVKLHRNRLRAWVPDDVQTRTLQMLVESRRGMVRERTRLTNRLISLLKAYYPQALEWAGEIKSLQACDFLKKWPTLEAVKRAKGSELKKFYRQHGCRNEQVIEERIKQIRASDPLTRDQAVIRSSAMVVEAIVSQLPCVIRAVEQFDQEIARVFEQHPDHELFNSFPGAGSALAPRLLAAMGSDRARYESAKEVQQFSGIAPVTERSGKSKWVHRRFACPKFVRQTFHEFAKQSIVWSKWAHAYYDQQRRRGKHHHAAIRALAYKWIRIIFRCWKDRTVYNEQAYVEALRRRGSRLIPSPVPGEN

SEQ ID NO: 64121 - protein, 339 aa, unidentified
MTEIKRIAIDTSKSVFTLHGIDGADRPVIRRDLRRAGLIAFFAKQAPTEVALEACGGSHYWARVLSAQGHTVKLIAPQYVKPFVKRGKNDRNDAEAICEAAGRPNMRFVPVKSAERQAELMVLRTRELLIGQRTQLVNALRGHATEFGVIAGKGIANVDKLLEMIAGDSSIPPVARDVLAMLGAEIERLDTRLGEIDAGLRAQHKANPMSSALAEIPGVGPITALTLVTEIEPCHFQSGRHLAAWIGLTPREHSTGGRQKLGGISRAGNERLRSLLVVGATAVIRHAKHGSKIASAWLLKLLERRPRKVAAVALANKMARIAWAMMSTGELYRGVPRQG

SEQ ID NO: 64122 - protein, 353 aa, unidentified
MTVYVGVDFHARQQTISYCDSADGEIHQAELQHEGDQVREFYAQFKGEVIVGLEASGYSNWFEELLESMQYTVWLGNPAEIRRKAPRRQKTDRRDADLILALMLKGDFPRLHRFSAESRTVLRQLRYRHKLVKVRTIAKNSLQAISLSAGLTQKRGLLSQRGQERLRALELPPVLSQQRAEWLQLVAQLDERIATIEATLEKVAASDEQIALLRTHPGIGLLTGLGVRHTIAPVTRFHIPRKVVAYVGLDPVEDSSAERRRLGSISKEGSRLLRFLLNEAGQTACRQDPDLKRFYQRLVHRRNRQKAKVAVARKLLVRSFIMLRDQIDYAEFVRRGVAARSARKAHRPTMPVL

SEQ ID NO: 64123 - protein, 368 aa, unidentified
MTTNTLKAAPAASAKELKNEKPAKAKRMLVGVDTHLRGYQAARKIDSGVIGVVENFRSEEELELYVAKQTTLAEEVVVVYEAGPLGYTLYRKLSARGVLCYVCAPDSSEQRKKRRKNNKIDARSLTSKLFNYLNGDQNALQLARVPTEAQEQLRMASRQHDQLVEERKRLGATGNAMLLSQGFGSWSNWWRPKAWAALSSKLPPWLLERLEVWVDVLKVLDEKIARAKAAFVRSCKGPRPKGVGALSQMQLQSEVLDWSLYSNRRKIACLAGMVPSEWSTGDKEWRGSITKVGVPALRRIIVEMVWRIIFFQPQYKPVQKWLEVLRGPNPARKKKAVIAIGRQLIVDLWRLQTGRVTAQELNLIMVTD

SEQ ID NO: 64124 - protein, 309 aa, unidentified
MKKEEVVYCGIDVAKSHLDIALCGERWRVANTQTGIGGLVERLKAAAPKKLQVICEASGGYEQALLGALAEAAVPVTLVQANRVRQFARACGILAKTDRIDAVVLASFGQALKPLPSPAPPLHLLRLRELDRQRCHLSRLLVAEQNRLAQLRCAQLRRLARSLIGKVQKQIASIDQRIASLIEQDQTLSAKAKKLTSFTGVGTRTAALLLAQMPELGRLNRRQVAALAGVAPYNRDSGSMRGKRCIFGGRRALRSGLYMAALAAARRNHILAPFYQRLLAAGKPPKLVLTAVMRKLLIALNTALSPYPA

SEQ ID NO: 64125 - protein, 356 aa, unidentified
MSQKLDSTIAVIGIDIGKNSFHLVGLDKRGAIVLRQKWSRGQVEARLANMQPCLIGMEACVGAHHLSRKLQALGHDARLMPAKYVRPYSKGQKNDFRDAEAIAEAVQRPTMKFVATKTVEQLDLQALHRVRERLVGQRTGIINQIRAFLLERGVAVRKGLRFLRAELPTILAKRSDVLSPRMLRIVEDLSGDWRRLDERIEGVSSEITALVEQDAACKRLMTVPGIGPIISSAMVAAIGTGDVFSKGRDFGAWLGLVPKQISTGDRTILGKISKRGNRYLRALFVQAAWVVLVKIGPKHWQRYGLETWIAAARKRLHHNVLAIALANKLARIAWAVLHKGRAFECVKTNAMASRPA

SEQ ID NO: 64126 - protein, 335 aa, unidentified
MEFEFFIGIDVSKNKLDFALLQGSRLLFHREVANTPEAVKAFVGELGKLPGFKLGKAVFCMEHTGIYNNHLLNCLYKKKAHVCLEAATQIKNSLGNVRGKNDKVDAIRIAGYAYDKREKLRLWEPKREVVQQLAHFTAVRSRLVEAKKMLKTPLLETGVFLSKTIAKKNSGLCNSTLKSIGSDLKKAEKAIAGLIDADDELRRLFGLVTSVSGIGKVTAAQIIMATNEFKDISEPKKFACYAGVAPFTKESGLFKGKTRVSHMANKKVKTLLHMAAMVAIQYNQDIKQYYERKVEQEKKNKMSVINAVRNKLILRIFACVNQNRPYENNYTKAVA

SEQ ID NO: 64127 - protein, 416 aa, unidentified
MSVADPAEPPRPPAPTGGVDWAKDDHAVSVVAPDGEQTLRFSVTHDAAGLRTLVRRLLAAGVAEVGIERPDGPVVDALRQAGLVVFVIPPGQLKNLRSRYGSAGNKDDRFDAYVLADVVRTDRRRLRPLLVDQPATTALRQTVRARRDLVAHRVAIGNQLRAHLQISFPGAVGLFRDIDSDITLRFLERFPTAEKAAWLSPKRWTAWLASVGYSGRTPADTLHQRLTEAPAGVTGPPADTAATVTAAFVATLRTITSQIDALTARISEQLDLHPDAPIFTSLPRSGRVRAARLLAEIGDARARFPTADSLACLAGVAPSTRQSGKITAVSFRWGADKQLRDAICDFAGDSRHANPWAADLYQRARNRGHDHPHAVRVLARAWVDIIWACWTTHTPYDPDRHGALQRILNQDQPKAA

SEQ ID NO: 64128 - protein, 365 aa, unidentified
MIEKAYYIGMDVHKDDVQMAVFEEKGEEPIYERRMKNETALLVKEAARFSGKGKTETAYEAGSCGYVIHRAMENAGIPCYVLPASKVAKKRTDRIKTDKRDARLIGRELRSKSIRPISVPDEADEAARDLLRCREDVSEDLRRVKQRLLKFMVRHGYAYTGGGNNWTLTHWRWMDRRQFKQEHERVVYEEYRGQIRSLEERLARLEQQVVQTAESPRYRAAVSRLRAFKGIDYIIALATVCEIGDFRRFANAKAFMSYLGFVPSEYSSGGKRNQGSITKAGNGHLRRLLVEGAWHYTKNARPGKRLEQRRQHSPASAIDAADRALHRLYKKYIRLVLSGKHKNVAVTAVARELAGFIWAVQVSAA

SEQ ID NO: 64129 - protein, 345 aa, unidentified
MNVTAVGIDLAKNVFQVHAVDARGKVVLRKQLRRAQLAGFFSNMPPCLIGMEACASAHHWGRTFERFGHTVRLMASQFVKPYVKTNKNDVADAEAICEAVGRRSMRFVPIKSVEQQAILSVHRVRQGFVTARTAQANQIRGLLGEFGLVIPQGIYNVAKRVPELLEDASNELPVPFRHLIERLTQHLKELDRQVKEFEKEIIEWHRSSELSRKLEAIPGIGPLAASALVASIADAHSFDNGRQVSAWLGLVPRQSSSGGKPTLLGMSKRGDAYLRTLLIHGARSAILAAKNKVDNTQGWLTNLLKRRHPNIAAVALANKNVRTVWALLAHGREFQADYVPTRMAA

SEQ ID NO: 64130 - protein, 318 aa, unidentified
MNTNTLQNINIGVDTGKSQLDIYIRPLDIYFTVPNTDKGISDAIKAIKKHKPQRVVIEATGRLEMPFILACDKAKLPYVVANPLRIKRFAEAIDQRAKNDRLDAALIAHYAERVQPELTKLKSENIRLMSDLVTRRNQLLTMQTMERNRLQILPKNISSTITPILTALKNQLEKVEAKIEKLIESCPEYQAKNTILQSMPGVGKILAASLISNVPELGFITNKQASSLIGVAPITRESGRFKGKRMIKGSRPQVRTVMYMAMMSAIQCNPVFKATYERLLAAGKPKKVAIVACMRKMVVTLNSMLRDGAMWNKDSVKN

SEQ ID NO: 64131 - protein, 371 aa, unidentified
MKVVYPICCGVDVHKSFLVGTIVSTTSGVEPHYQKKRFSTYNNDLHRFCDWLLSNGCKNVCMESTGKYWVPVFNILEERGITTTIANPKWVKAVKGNKDDTKDSKWIGDLFRLGLVPGSFIPSKEIRVLREFTRYRYKLVSMKSSEKNRFQNAFTVCNVALDSVVSDMFGKSATAITDYLISADSFDAEYCTSLLQRSLKKKADSVIESIEGYSITDEQKLRMRIVRSHLDYIQSAIAEVDSAIDAMVTQHEGLIALLQTIPGVDRNSAITIISEIGTDMEQFGSSKRLCCWAGLTPGNNESAGKKKSVRITRAGVYLKPALVQVAHAAVKATDNSYYRLKFEQISKRRGKKRAIIAIAQIGRAPRLNSSH

SEQ ID NO: 64132 - protein, 380 aa, unidentified
MRQVCGLDVHKDSVFVCIINENGVVFQEKYGVLTPELEQMLAKMMEYHVEEVCMESTSIYWMPVWRVLENYVNLKLVNPYFIKQLPGKKSDVKDAEWIATCLLKDLIKGSYVPDDLIQQLRQYDRRISDLNSEIVRKLGKLDAALQRCNIRISNYVATTDGKSYKEVVRLISEGTRDPAELAKVIHGRTVNRVGKDVVLASLTGVISNTDIDVIRQLREEVALAERHKDECQSKMDAICQQYFPQQLKNLQTIPGIKGRSATAIIAEVGTDMSSFEDAAHLVSWCGLKPRNEESAGKIKARSTTHGNRYLRKTLIECAWAASKTQGCYFNKFSYHQVVVRRKNKMKVQVAIARKILTAVWYVMHDNVAYRDYTPDIAPAE

SEQ ID NO: 64133 - protein, 346 aa, unidentified
MMIIGCDFHPSWQQISWLDTETGETGEQKLVHASGDAKMFYQQLAAPVLIGMEATGNSQWFIELVEDLGHVIWIGDAAQIRASYVRKQKTDKRDAEHIRKLMVENRFPRLWTPDREQRDLRQLVLHRHKLVMIRSRVKNELQHLSMNKGIQKKRTLWSQAGQKMLRELPLKPWAACRREDLLGLLGMLNQQIGQLDAAVQKAAEENPQAKLLMTQPGVGPNTALAYVLTIGDVSRFRRGKQVASYLGLIPREESSGGRQKLGAITKQGNRMLRSLLVEAAQVAVQHDPGFRKQYLHRCHQKPKAVAKVATARKLAVRLYWMLRSQVGYPEIVRIESSSRVPLVGAS

SEQ ID NO: 64134 - protein, 396 aa, unidentified
MEVVAESVAGIDVHQKEITVTVLIGSAESAKPKKVHVRFQTVTFDLKACGAWLKQQAVKQVLMESTGQYWRPVWQILEPFGFNMILCNPRIIKNIPGKKTDQKDSEWLSELARYGLVSASYVPPRQIQELHESTRLSKSITQQMTRLKNQVHDILQRSNIKLTTYVSDIFSGSGRRILALLENSEVINLASIEQAGTGKRGYRLKATPKQILASLDGALSYNDRFLMAMNMNLLASYQRELINLESRIYEQLEAFSELYHRLQAIPDVGEGTAQIIIAEIGSDVSPFPDAHHLASWAGLCPGSYESAGKKHGAHTLHGNKYLKTAMITAAMAAKTTKQTGLRDFYWRLCSRMGKQKANVALAHKLLRIIYVMIQTGTTYQEYKKSQRTEDTLTPKI

SEQ ID NO: 64135 - protein, 367 aa, unidentified
MDGKRVIGVDIGKRWLDVAREDAAKVERHVNEAAAIAALMGTLDPTCDIVVFERCGGYERELEAALAAANVPWAVVHSARVKAFRQVQGIKAKTDAIDARLLRAFGRDHLNGGKLRLGRSEDVVLDALMARHRQLKAALHAEHCRREIAAIAPVRASIERVIARLEAELVAIAAELSAHEANDPQLAFKEAVMCERMGVAQATARALLAELPELGRLDRREIATLGGLAPRVHRSGRRQLRRGLVPGRTCVKVILFNPARTAMRWDPEIKAFCDRLRGRGKPGKVILVAVMRKLLVRLNAAVRDAQARRCADMGRSCGSLIHQSRWPIAASGAGGHGRHSRRAAVPLTAEHDAAQSRPDRWIDKATR

SEQ ID NO: 64136 - protein, 412 aa, unidentified
MKRIRDRVAGLDVHRDTVVACCRMVDPSGEIEVTKQSFSTTRKGLGELTTFLLDAGVETVALEATGVYWKSPYYALEGLFPELWLCNAMHVKNVPGRKTDLSDAEWLADVAAHGMVRPSFVPPPEIRELRELTRYRKTQVDARAREIQRLEKVLQDAGIKLTSVASVVWSVSSREIIEALIAGERDPMVLAQMAKGRMRSKIAPLEEALSGNFGAHHAIVARQIIDHIDFLDSSINALTNEVATRLVPFDQAVAIVTSIPGISRTTAEIIVAETGVDMSRFPTPEQFCAWAGVAPASYESAGKRRSAGTRHGAPWLRRALVEAARAGARTKGSYYSAQYSRIARRRGPNKAAVAVANSMMFTMWHLLTTGALYQDPGADYFERRHDPSVEAKRLARRIEALGFDVSFNQKAA

SEQ ID NO: 64137 - protein, 423 aa, unidentified
MSRSHTARSIVQDQPGSLYAGVDLALEKNAVMVMDEKAHRLDHFTFPQDRDGYAYFLKRLEGLRQKHQAAQVLVAMEPSNFFWKLLAQELEQKQVPYRLVNAYTVKKHREGNQLDVSKDDRRDAAQIAELARTGHSTRTRLQKGAYEELRQYATLYEQIQRGLTREKNVLWGLVGPVFPELSRVFKNLQGETAQALLRSGVPAAWIRPLELNDFLSRTRAAFAGKKLAVSKLRYAHQLAAASIGVAEGLQAVHLAIQVHLDQLQTLQTQLERVTSTMSACLTALPEAPYLLSVPCLQVVSAALFLAEVGDPRRYQASAQWVKLAGLQPAPNTSGRKQRSKTPISRQGRPRLRYMLYFTCMRLIQQDESFARLHAHLQRRSKNPLPKMQAVVVLMNKLLHILWALIQYHTYYDPSFGQSIPTTA

SEQ ID NO: 64138 - protein, 342 aa, unidentified
MKIHTIGIDLGKTNFHLVGLNERGEVVVRKRFSRAQLLRFTANRKVHVIGMEACGGAHFLGRALQEQGHSVRLIPAQYVKPYVKTNKNDYVDAEAIAEAVGRPTMRFVPIKSDDQLDLQSLHRVRERWVTRRTAVINQIRGLLLERGITLRKGRRYLDEALPGILEDADAKLSGTLRLLLGQLKLELDQLALRLEEAEALIEQTVQESEACQRLMQIPGIGPVTATAVISAVGNGAAFRKGREFAAWTGLVPREHSTGGKQKLLGISKRGNRYLRKLFVQCARAVLQRKTKQAPGLKVWLEKITSHTHGHVAAVALANKLARMAWAVLATGEAYRAPLPAAA

SEQ ID NO: 64139 - protein, 371 aa, unidentified
MFQPIRYVGLDVSKETIAVAVAEPDGSVVEYGDIHNDPSSVRRLIEKLSQDVVVKTAYEAGPTGYPLHRQLTGLGIENKVVAPSLIPRRPGDRVKTDQRDAVQLARLLRSGDLTPVWIPDEAHEALRDLVRARDDARTEGLRAKHHLSKFLLRQGVIAPTRVGRAWSARHQAWLNTLTFRDRAAQITFDDYLACVRAATERVRHLDAALLECGAASPHVDLLRALQAVRGIGFLTAVTIVAEAGDLHRFRSAPAFMAYVGLVPSEYSSGASRRRGHITKTGNRLLRHVLGEAAHHARLQPAVSEALRQRQQGVPKEVVEISWRCQQRLHHKYRHLGGRIGRQRAISAVARELAGFVWAIGQAVQPVAMAAA

SEQ ID NO: 64140 - protein, 352 aa, unidentified
MMIIGCDFHPRFQQISFLLEENGECGQRRLMHTAEAVEYYRSLRGTRVRIGIEATGSYGWFRRLLSELGHELLVGDATQIRASNPRKQKTDKRDAEHILGLLVADRFPAIWQPPAENEQLRQLLWHRSRLVRLRTRVTNQLDGMAKNEGLLIPGGWSGKRRKAIEALPLPGWYSERRKDLLGLLDRLEERIAPLNKAVSQAAANNAEACLLMTHPGVGPVVSLAYVLTIGNWQRFPRGKQVGSYLGLIPAEESSGDKRRLGHISKQGNTLLRWLLVEAASTAQRYDASWHRHYVRLSMNKHHGVAKVAIAHKLAVRLYWMLRSGEDYQHVRERGSQARQSECPVGRSRRPIE

SEQ ID NO: 64141 - protein, 313 aa, unidentified
MGVDVAKETLSINMPNSRSIVIANRIAAIRQHLASATKGVPGDHALHVCFEATGCYPRKLKKACGEADILFTTLNPHKVKKYAESISIAAKTDSIDAKAIRLFAKHRKPSPDLELSPGQEEMRELANLRRLLVTTKVRLQGFLESAGCSAARLEARQMLRSTETRLDSVTKKLMSLRDSDPLRKAICGELAKIAGIGDLTAILIVALVPELGTLGRRRSAALAGLAPYAHESGDYKGLRYIRGGRFNVRLALYMATLSAAHYNHVLKALYDKKLREGKPKKVALVCVMRKLFAHMDRVAAKAIKSYEANAKSA

SEQ ID NO: 64142 - protein, 369 aa, unidentified
MNDITYVGLDVHKATVCVAIAKSGRGGEIRQVGVFENRPDVLCKMVARLGKDRRRLSFCYEAGPCGYGLHRLLTGLGHDCIVVAPSLIPMKAGDRIKTDRRDALMLAKLHRAGELTPIWIPDAAHEAMRDLVRARATAVRGLSKARQHLQGFLLRHDRIYHGARAWTLAYRRWLATVRFDHPAQQIVLQDYIHAVEDAESRRDRLTRQIEELMPSWSMAPVVAALQAMRGVALVVAVTVVAEVGDFRRFTNARQLMAYLGLVPSEHSSGSTVRRAGITKAGNALARRVLIEGAWTYRMSARVSRKLHDRLEPLSAAIRDIAWKAQVRLCARYRHLAAAGKPKVVVTTAVAREMVGFIWAIARVAQPELI

SEQ ID NO: 64143 - protein, 356 aa, unidentified
MQTQVTKKIDFSDKNLFIGLDVHKKSWSVTIVIDGMEHRTFTQPPDPLALNNYLQRMFPGGSYNSAYEAGFCGYGIHRDLNSLGIRNIVINAADTPTSQKDKLHKRDPTDSRKIARELEKGSLRGINVFDRELEELRSLNRTRFYLMRDLRRSKNRIKSFLMYYGVPILPEFDNNQWTLKFISWLKQVRMKTPGGQEAFFHLIQSYEHHRQQLLILSRMVRLRISHYDKELYSLLNKISGIGPLTASALITELGDINRFTHINHLGSYVGLIPRVRESGETTHTGGITFRCNSFLRTLLIESSWQAIRMDPALMQYYHRHVINSKGHKVIIKVARKLLNRIRYVMKNRQPYVTGVA

SEQ ID NO: 64144 - protein, 342 aa, unidentified
MDYYAGIDVSLELSSVCVVDATGQIIREAKVASEPEALTAFLRSLGLPLTRIGLEAGPLSQWLYAGLTKAGHAVVLLETRHVKAALSAMIVKTDRKDARGIAQLLRMGWFRPVHCKSPPAQEVRALLVARKQLQAKMRDVEFSLRGLLRGFGLKVGEVSKGQFAARVRTLTAGHAMLEQIAEAMLRAREALQTEFNKLHRAMLAIVRSDEVCRRLMSVPGVGALIAVTFTSAVDQPERFSRSRAVGAHFGLTPKKYQSGETDITGAVSRVGDPMVRTALYEGAHIMLTRAVRFSALKRWALEVAKRRGMRRAKVALARKLAVILHRMWVDGSTFRWSREVTA

SEQ ID NO: 64145 - protein, 347 aa, unidentified
MIIIGCDLHTRFEQIAMLDTETGELVEQRLDHESGEARKFYAGLKAPALVGIEATGFTRWFAELLGELGHELVVGEAGKIRAMETRRQKHDRRDAEHLLHLLVRGDFPKIWLPSAEERDVRVLVEHRHQLVELRTRAQNGLHAIALSYGLRRRGRLGSQRGQEELKKLPLREGLGRRREDLVRLVRQLDVWIKELDQRIEQEVARREDAQRLMTHPGVGPQTALATVLVLGPVERFPDDRHLTSYLGLIPREDSSAGRQRFGHLTKQGNRLLRWLLVEAAQTASRYDPSLRRAYRRLAFRKGAALAKVAVARKLAIRLYIMLRDQIDYAEFCRRGSHAGMLGDVALV

SEQ ID NO: 64146 - protein, 367 aa, unidentified
MLYAGVDVSKDKVSVAVLTSGGNKLTSGDFDITTEGLKLLELTLKHLKDEISMAIEQTGTYSMPVILYLMERVEGLRIYLVDGLNFNRFIKLEGRKKQDKADAVSLAEYLRRGLPARLITDKDIKAYGLKVLISQREHLLKVKNQIENRLRQLVETVFPDSKTLSKPVFWSEIRKGRAILDWKRLTDKAEVLSTILRERKIWLEVVHSLEETEKEINAFLRAYYPEDLNILKSFGFSETTIAYFISVYVDIERFKDVKAFKSYMGLGLRIYQSGKKEKNVVNSYTNKYIRKLLYMYVVQAVRERSNNRRVKEYYLRQVEKSGSKKKAIIKTAGKVIEWVYYCLKHKEPFKWEANYETQQENNSKINS

SEQ ID NO: 64147 - protein, 360 aa, unidentified
MRSEECCGKPSAFGEDAEGYAYLFHLLGAPKDCLVALEATGHYWRNLFVSLVTKGYEVAVLNPLRTRRFAEEELERTKTDAIDALGIARFAAQKRPAPTMLPEPAAEELRELVRLRERLLGDLGDQLRRLHRAVDLGFPEFTNHVRTLESDLAISILSRYPTATAYRNVSPKKLARLCYDGRHEVGEQLARALVNTAKNSVGRHHSDTYRREIAYACEDIVALRGRLRELADDIKQKLEQHALGKLLTTINGVGVQTAAYLIAELGDPARFHNAAALASYVGVAPRLRQSGKRRFSGTAVVRLGNARLRKALWMPVLTAVRFNPWLRAYYDRLVSRGKPRKVALVAAMRKAARRGLERCN

SEQ ID NO: 64148 - protein, 433 aa, unidentified
MDSSPPYDLIIGLDRSDRKADLHLIRVAIGQRSSQTIDTSPEALWEWLLQLRQQHPQARLALCLEQPAAHLLAFLETYDWITLYPINPITLQKYREAFVTSRAKDDTKDALYLAELLLNHHDKLKAWAPEDSQTRAVQQLVVHRRAVVDERTGLTNRLQALLKQYFPQALVLCGEDLWRPLTTRFLLKWSSLQAVQKAKPATLKQFYHLNGSRSSKLIEQRLALLPKAVPVSDDRAILDSFVLRVQLICRQLQDVVQTIKTFDQQIARAFQEHDDHQIFASFPGAGPVLATRLLASLGSQRERYDKAANLQHYTGIAPVTKQSGGKRHIHRRYLCPKFHRQSFHEYAKESILWSRWAAAYYLQQRTKGAHHHTAIRALAYKWQRIIFRCWQSRKPYEEKTYEAALRKANSPLINLLDKVQLGKSPYKNPVNKN

SEQ ID NO: 64149 - protein, 358 aa, unidentified
MRFFQEPYRFYCGIDLHTRTMHVCILEDDGVVRVNRNLPCNPKAFLAVIAPYRESIVVGVESIFCWYWLSDLCQEQGIPFVLGHAFYMGLIHSGKGKNDRIDADKIARLLRSGTFPLAYAYPKGMRETRDLLRRRTFLVRQRTGLLTHLHIVNSQYNLPSIDKQLRWQSNLREMAERFGDPCLRQNIAADVLLIERLSRLILELERYLIGAAKVEDPGAYQLLQTIPGVGRVLGLVLLYKMHNWKRFTTVGQFLSYARLVRCAHESAGKKVGSGGNKIGNPHLKWAFAEASCLILRVSETARSWKQRYQQKHGPGRAMTVLAAKLGRAAYHMLRKREAFDEARFWNARRELSQLLARK

SEQ ID NO: 64150 - protein, 425 aa, unidentified
MNYKQNEKINQVKESTLVVGIDIGSTTQYARAFDWRGIELEKVFPFSNSREGFESFKAWMQHLQDKYKKLDAIVGIEPTGHYWFDLGAYLEDEGILLVMVNPYAVKQTKELDDNSQSKNDRKDPKVIAKLVTEGRYSAPYTPDGVYADLRIMVANRKRLIREMTQIKNRFARWFAIYFPEYTDVFGDYEAQSSMLLLKKVCTPEAIVELGAEKINQIWRDAKLRAVGMKRATTLCETAKRSIGLKKGSSAARYEMKLLLEDYEYKKAQLDAVMEEIEKLCRKIPESEQMLAIKGIGVITVAGFLAEVGDVRRFESPRQIQKLAGLSLRENSSGKHKGQTTISKRGRSKLRAVLFNAAIPLIAKNPEFKSLHEYYTTRANNPLKKKQSVIAISCKLIRVFYAILANGVTYDSQKLLSDIHRQPQAA

SEQ ID NO: 64151 - protein, 338 aa, unidentified
MSKITTIGLDLAKHVFHVVCCDEQGKVIRKNMLKRTQVLAYFANLPPCLVGMEACASAHHWARELGVLGHRVKLIPPQYVKPYVRGNKNDYNDALAIAEAVTRPEMRFVTVKTTAQQDIQALHRLRERCLADRTALCNQLRGLLAEYGLIFPKGVNLLHRRLPELLEDGENGLSDLFRRLLAQGYQQLQELDGHIDHYTQEMKQQSQQNEACRRLQTIPGYGPIVAGVFHSVVGHGEAYRRGRDVSAALGLVPRQQSSGGKEVLLGISKRGDRYLRSLLVHGARSVVIRAAKKDDPLSRWINKVKAARGFNKAVVALANKMARIGWAVVVNKTVYQIA

SEQ ID NO: 64152 - protein, 437 aa, unidentified
MTIMKTINTSEFAATIGLDWADRKHDLWICPEGQAKAEHLRLDQTPEALHHWVAKLRERFPNRRVAIAVETCRGPVISALMAYDFIVLFPVNPKGLKDYRGAFCVSGAKDDRTDAMRLEELVRLHRDKLHALEPDTELTRKLAGLVENRRHLVDERTRLVNQQHSTLKTYFPLALDLLEDQMNTLLAAEFLTRWPSLAALQKEKPKVLRAFFYQHNSRNAQRIEQRIQAVPAAQPLTTDAAIIEPACALVSARAGMLRPLLKAIAHLDEAIQEAMDQHPDAPIFRSFPGAGPALAPRILVAFGTNRDRFASADEVAQFYGIAPVVEQSGNSKTVHVRYRCPKFGRQSFHENAACAFKKEPWARAYYDQHKKKHDDKHHPACRALAFKLIRIYFACWRDKRAYQSDLYVQALRKNGSPLHKTLKTQRAPSCEYLSKNP

SEQ ID NO: 64153 - protein, 392 aa, unidentified
MTYFIGIDLAKYKHDCFIMDENGEVIRDSFSFNNDKEGFNTLLNVLNSLDSNQEKRIGFESTGHYGSNLKIFLERNGYSFMEFNPLLVHRHFKSETLRRTKNDKVDARKISSYLYTREYKPNPNSSYHLNCLKSLTRTREALIKDRTRHIIHMTNVLDKMFPEFKLQFGNQGLNAASAMYLLENYGSPSKMSNMTRASYDKMKSELRRTISYAKFLRIKELARNTIGNEDEILVFELNTYLELFKELDKKILKVEDKITKEFSIMKCHIASIKGIGIITAAGILAEIESIDRFDNPGQLCAFAGIEPSENQSGTHDGGGKMVKHGSPHLRNYLMQSAGYMLIHNPVLYEYYLKKRNEGKCHTVALSHVAKRLTRIIFYLEKNDTDFNIDKMR

SEQ ID NO: 64154 - protein, 316 aa, unidentified
MNEKEIFIGIDVSKDNLEVFVKPLGQRPAFAQTEDGLLLMIDFVQSFSPRLVVLEATGGLERAAVGALGAKGLPVVVINPRQIRDFAKAKGILAKTDKLDAEVIAEFAEAIRPEIRPLKPQETQELEALVTRRRQVVQMITAEKERLPTAVRATKKDIEAHIQWLEKRRDKLNTDLERKIQNTPLWRAKDEILQSPKGVGPVLSHMLLAKMPELGTLNRKQAGKLVGVAPLNRDSGKFRGKRKVWGGRAEIRSVLYMATMSAIRSNPVIRVFYQRLIEAGKPHKVAVTACMRKLLTILNAMVKNNTPWRAPQAEIA

SEQ ID NO: 64155 - protein, 456 aa, unidentified
MAQAKRSRPSRDITPIHPGAAAIDIGATMHVAAVELDQDPEQPVRSFGTFTGDLQRLADWFASCGVQTVAMESTGVYWIPVFEILDQRGFKVVLVNARDAKHVPGRKTDISDAQWLQRLHAYGLLRASFRPKGEIATLRAYLRLRERLLAYTASHIQHMQKALTQMNLQLHHVVTDITGVTGMAIIRAIVAGERDPATLAAMRDPRCHATVETIRQALVGNDREEHIFALTQAVELYDFYQAKVAECDTRIQAVLERLRQAAPISAGKLPPARHKTKQPNALAFDVRAMLHGLLGCDLTQIHGLGPSLALKLVGECGTDLSAWPDAKHFTSWLCLAPSNKISGGKVLSSRTRRSGSRAAALLRLAAVTVGRTETALGAFYRRLSARVGKAKAVTATARKIAVLFYNTLRHGMSYADPGASYYEERYKRRVLTNLERRAKSLGYVLQEVSAPALGVS

SEQ ID NO: 64156 - protein, 441 aa, unidentified
MTVNAAVLFLCSHPFTKGGTPMDAQQFEVIRPKCAGLDVHKKSVVAAVCTSDPVTLTASYKTKVFNTTNSDIAALRDWLLAQDCRDVCMESTGKYWIPIFNILEPHMHVILTHPKYVKAIKGKKTDKRDAKWIANLFRFDIVKASFIPPADIRALRELSRYRLKLSYMRTAEKNRYQNSMTISRIRIDCVLTDPFGLSATRIMDYLLSDEPFDEEKCRSLIDWRVKASKDDVLDSIRGYNIPEEQKFKMTHAKAHMDFINKSIDEIEAELFLRSRQYDTQVKRIATVTGITGLSALFILSEIGADMSVFESDRHLCSWAGLTPANNESANKKKSARCSRAGQYLKPLLIQCALAAVKSKKEPYFAIKYQRIAKRRGKKKAIIAIDRMLLTAIYNMLKKNEPYNPDLYRIADRPPTHHEVSVEEAIYILQRQGYLVAAPSLP

SEQ ID NO: 64157 - protein, 348 aa, unidentified
MTTVAERFDHVVGIDTHARSHTYCLVDTRTGAVVDTATFPTTTAGITRATSWITRHSNRTSLLAAVEGTSSYGAGITAALAATGIGVAEIRPLSRPSRARTGKSDPIDAEGAARAVIGEHLDRLAQPRRTGDRAALRVLLAARSLMDQQRTANRNALTALLRSTDLSVDARRPLTDAQIAVIAGWRTGRDDAPVRVFREEARRLARTVLDQTELLRINHRQLAQLTEALAPGLQSIPGVGAVTGAILVTAYSHHGRVRSEAAFASLGGIAPLPASSGNTTRYRLSRSGDRQLNRAIDVVVRTRLSCDPATRVYAARRRSEGLSGREIRRCLKRYVCRALYRELRTRMA

SEQ ID NO: 64158 - protein, 304 aa, unidentified
MDLYNGIDIAMKTFVAFNLEAGKLKLDNQASSIQTYLDSLPPGAIIAIESTGGYGALLAEMAVRAGFTVYMLRPDKVKKHREAGPNRSKTDDIDAKVIRDYVVTFAKDLHPHQPLPALEAKIRRLSRTRDKIVQKMSDLRKALRSLGDSKKDVDATLAPLLARIKRIEKQLAELIEQTGDGKILYSIPSIKLIATAAVLPAIRTMRFKSKHALVSFFGMDLTADESGEKVGRRRMSKQGDNKARKALYIAAVSASHSKAFGPYYKMLREQKRLTTTQALNVLARKLLHIIYGVYYSQTPFKAPT

SEQ ID NO: 64159 - protein, 358 aa, unidentified
MLYLAIDQHRKQLTVNLRDEQGDVVLKRQVSTEWTRVRIFLEEVQTRSLPEGGFVTIVEVCGFNDWLLKLLVEYGCRETVLVQPGKRTKNKTDRRDANALGELLWTNRQRLLAGKKVQNVRRVVPPSEGDSEDRQLTALRQRLGRLRTRTINKVQHLLLKHNLQQECPTKGLQTQRARKWLAKLPLSTIDRLELDQLLVQWELWDKQLEELEERIRQRHAENKTSLIVGTVPGAGAYGSLALACRIGSIERFPHARSLAHYWGLTPRSRNSGDATQRLGSITREGSAMARFILAQMVVHVLRHDPALKDWYRRIKRRRGAKIARVAVMRRLATILWHMIKQQQAYQRGRGRREGGTAA

SEQ ID NO: 64160 - protein, 358 aa, unidentified
MIVMKYYTSTTQFNCGIDLHARQMYVCVMDRDGKKLVHTNIRNNDFAYFLKLAEPYRHDLTVCAECMFGWYWLADACQDAQIHFVLAHALYLKAIHGGKNKNDRIDSEKIAHLLRTNLIPPAYVYPAEKRPLRALLRQRILYVWRRSELLARIQSHQLAHNRPTLRQTRPNRDPWEERLLAQEDHPLRQLALQNDLALIRHYDTQITALEEQLQKLTKATAWRDYTLLQTVPGIGEHLGLTLLYEIGDIQRFPTVKDFVSYCRLVKGTVASAGKIKGLRGAKLGNAYLRWAFGEAAVIAKRDHATIGPLAQRLEAKMGGNKFKANTVLAIKLARAVYFMLRNHTVFDPERLVAALTHK

SEQ ID NO: 64161 - protein, 341 aa, unidentified
MSEVTMIGIDLAKRVFQLHGACANGTVIFRKKLTRVQLLAFMSQQSACVVAMEACATAHSWGREFEKLGHTVRLIAPNYVKPFVKRQKNDVADAEAIVEAASRPTMRFVALKSEAQQARAMLFRTRQMFIGQRTQTINALRGHLAEHGVVAPKGAIHVKRLADAIEDEAIGLPEGVRELAQVYLAQIEGLNVQVTALDQRMKAAAKEAEAAQRAQTMPGVGPITALAIETFAPDLNCFHRGRDFAAWLGLVPKQNSTGGKPRLGKTSKMGQRDIRRLLISGAMAVLQAVERFGTPHNSWLIAMLERKPRMLVAVALANKMARGLWAMVTKQEDYRTPATMA

SEQ ID NO: 64162 - protein, 365 aa, unidentified
MTSVTLPGTIHLGMDTSKDTIVVAVLLPGEELPAVDRVVNREEAVRRLIGRFGDRERLRACYEAGPGGYDLHRLLASMGVACDVVAPSLIPKGGSDRAGTDKRDAVRLARLHRAGELTPVRVPSPAEEAVRDLARVRAAVLADRKRAQQRLTAMLMRHGRIWRDGSYWTGPHRAWIAAQSFGEPALATALACYRATLDTRETELACIESELAPWAQRDPLAATVARLRCYRGIAELTALMLAAEVVDWRRFPCARAFMGYTGLVPCEYSSGQRTWRGHITKAGPAPVRTALIEAAWAYRCKPAIGATLRRRQHGAAPETIARSWKAQRRLHGKYRTMTARGKAAPEAVTAIARELAGFVWAEMTS

SEQ ID NO: 64163 - protein, 355 aa, unidentified
MNDTKFIGLDVHKTSISAAVLDHDGRLVMQSVFATHAAAILGFMHGLRGTLRVTFEEGTHSTWLYDLLWPHVAEVLVCNPRKNALLKSGNKSDQIDARKLAELLRGGMLSAVYHGQTSPLTVKELGRTYTTLTQDTTRVMSRLKALYRSQAIATEGKKLYTRRRRESWLAQLPQVGQRYRAERMFQQLEALQGLRRQARRDLMVECRKHTATALLTSVPFLGPIRAALLLARVQTPFRFRGKRQFWAYCGLALETRSSADYHFVAGELRRSKKPVLIRGLNLNHNHDLKNIFKAAATTASALPGPFRAFYENLLGKGMKPEMARLTLARKIAAISLILWKKGERFDPEQLKSQAA

SEQ ID NO: 64164 - protein, 340 aa, unidentified
MTITTIGIDLAKNVFAVHGVDQNGKTVLVKSRVTRAALPGLIAGLPPCVIGMEACSGAHYWARLFRQYGHEPRLMAAKFVSPYRMAGKSGKNDAADAQAICEAVRRPHMRFVPVKDESQQAMQCLHRTRQGFIEEKTATYNRLRGLISEFGVIAPQSTDALRHMVSAQKSSLPLQVQQCVDDLLEHVDRIEANITEYDRILSRMAKTDHRSQRLMELKGVGPTTACALVACIGNAHDFKNGRQLAAWLGLTPSQYSSGGKSKLGRITKAGDSYLRTLLVQGARSVLIGAEKRTDSFSRWVCSLVERRGYWRAVVAIAAKNARLCWASLHYGDDFRLYSAS

SEQ ID NO: 64165 - protein, 447 aa, unidentified
MKTEPEEIPDADHELIIERVAAIDVAKASGKVCLRLPRPGRPGHRVSRVWDVEATTAAVCELADHLVAGQIERVTVESTSDYWRIWYYLLEAAGLSVQLVNARDVKNVPGRPKSDKLDSVWLAKIHREGAAAASFVPPAPIRQLRDYTRLRVDLTRERSRYWQRLEKLLEDALIKVSAVASTLDTLSVRDMLEALIAGERDPRRLADLARGRMKTKRAALIEALTGRFDDHHGELARMLLDQIDALSGQINTLTIRIDQLLATIANEVPGHDDGDSGAGGQPSADLTVVQRLTEIPGIGPTGAQVILAEIGLDMSRFPTAAHLVSWAKLCPRTIQSGAIQRSGKSGKGNPYLKGALGEAAAAAAKTNTFLGARYRRIVKRRGKLKALVAVARSILVIIWNLLSDNHARFRDLGPDYHATRINTERKLRNHIAQLAALGYHVTVEPAA

SEQ ID NO: 64166 - protein, 404 aa, unidentified
MYNAVGIDVSKGKSTIAVLQPGGVIVRKPFDVFHTSQSLKELSNYLASLEGDTRIVMECTGRYHESMANSLSNAGFFVTVVNPHLIKNFGNNTLRKVKSDPADAKKIARYTLDNWAELRQYSCMDNTRNQLKTLNSQFSFFMKQKVAAKANLIALLDNTYPGVNKLFNSPAREDGSEKWVDYAYSFWHVDCVRKIGLKAFTVRYEAFCRKHHYIYQPSKPEELFNASKELVAVFPKETSYKLLIQQSIQQLNLASAHIEQLRREMNALASTLPEYEVVMGMYGVGKTYGPQLIAEIGDVSRFTHREAITAFAGVDPGVEQSGQHNSKSNKASKCGTARLRKTLFQVMTTLLQNAPENEPVYQFLNRKRSEGKPYYVYMTAGANKFLRIYYGKVKAHLRSLEQNE

SEQ ID NO: 64167 - protein, 347 aa, unidentified
MEQYVGLDVSQDVTYVCVVDHEGKTLWQGDCASTPEAIGETIKKRAPRVLKIGLESGSLSTWHWHGLTDMALPAICIDAYHAHGVLKLQMNKTDKNDAHGLAQIMRCGWYKEVTIKSFESHESRALFRTRSNLVTLRTDLINQIRGTLKTFGILIKGIAGTGFEARIQEIIDEGSALAAPLQAQLDVLRVIKKQISDLDELVLDYAYACKSCRLLMSIPGVGPMTAANFVLAIDDADRFAKSKNVGAYFGLTPRRRQSGEMDYNGRISKRGDRVVRHQLYEAANALLTRVKKPSSLQAWGLRIAKRSGMKKARIAVARKLSVIMHQMLLTGELFCFNPSTNERAIYA

SEQ ID NO: 64168 - protein, 416 aa, unidentified
MNAVGIDVSSRKSTVAVLRPLGEVVCLPFDVTHDIAGLASLVEKLKALDGETRVVMEHTGRYYEAVEKALHEAGLFVCAVNPLLIKEYGANSLRRVKTDKADAVKIARYALDNWADLRDFTPMDAIRYDLKTLNRQFQLASKQRTASANNLIALLEQSFPGIRKCFDSPVRSDGTQKWVDFAHSFWHVDCVRKQPFAAFCERYRKWCKRHAYLFKQSNAEEVYALAKRAVVLTPKSKVVKVLVQEAANQLSSISRSVEVYRAEMDRLAAMLPEYPVVMAMYGVGKSYGPQLMAEIGDVRRFERKQALVAFAGIDPMPNQSGDKNVRSNKSSKRGSPYLRKTLFNVIRTYLQCAPQDEPVFQFLNRKRAEGKPFYVYMLAAANKFLRRYYAKLRDYFASLDTLQPVAPIPTILKAAL

SEQ ID NO: 64169 - protein, 422 aa, unidentified
MKVTYKTCCGVDVHKSFLVATIITTTGGIEPSYQKKRYSTFNNSILEFKQWLLDNDCHDLCMESTGKYWIPVFNLLEDEINVTIANPKWVKAVKGNKDDTKDSKWIGDLFGLVNGSYIPCKKIRILREFTRYRYKIVSCRSSEKNRYQNALTVCNVALDSVVSDIFGKLSTSIIDYLLEQSGNSINHEEIASKLLKSLKSKEDAVIESIEGYQMTDSQKYRMHLVRAHMDYITAEINDVDREIEKVISSDSDFENAIQFLMTIPGVKRDSAITVISEIGIDMTQFSSSKCLCCWAGLTPGSNESGGKKKSVRVTRAGVYLKPALVQCAHAAVKSEKSPYYKKKYESLMKRRGKKRAIVAIARMILTAIYQMLSTGESWNPSDLYKIDIPEALLEKQKAKAIKQAMKLLQREGLYPPPEPIAS

SEQ ID NO: 64170 - protein, 377 aa, unidentified
MNLMRITIVGFEKLERWIAELQQKHRLMKVIIGMEPTGHYWFNLANWLVDKCLNVVMVNPATTKRNKENRDNCPSKSDPKDALVIADVVSRGYYYEYSRQALVFQRLRTMMSDREFWVTNSVRLQNRIVHWLDIRFPEYPSVFKDWTYKRSLATLKVFPCPRDLEKFTVPEVIEAWRAYMQRAGGSTGAQLIAQARRSVGDQSAIHEAKMDLQRLVEEYERIISMLEQIETDIEALFTEIPLVKQLRTIKGLGTIFIAAILAGTGDLRQYAHGRQLLRKAGLNLAECMSGKRKGRIVLSKRGDSTLRKYLYLTTIQLVGSNPVFRKLHEHNVQIKRMKKQQSIFKLLGKLARILVGLVQRGEKFSPEKTVRNWAQVA

SEQ ID NO: 64171 - protein, 414 aa, unidentified
MTSSKYLFVGIDVSKHKHDIAILDQQKQMVHKPLVIGDDRSGYELLLSKLRRLKRQLQTQQFWLGMEATSDYWKNLYYHLKKQPEPFVVVVINPVQTKAFAKSELRRAKTDPVNAKDIACFLVEKRPKARCDRPPLFDAIKDVDTQMYALKKQQTMMLNKLRIELSKVAPEIEKAIGYLDGQQNLALLAAYPTAEAIANASAAQLHKVRYGKRQWALPASFIDRMKALAQDSVAHKRGPGSGVVVESLVRRISEGQRELEILKEQIHKLYTQAHEKQSILTTITGIGKETAAVLEAYIADVGRFASAREMVAYFGMNPVVNQSGKAKRKSYLQKRGSGIVRHKLYMATLSIIRNKKSPVYDYYARLAASGKPKLVALAAAMRKLLTIIYAMLKNQSPFDPNKGVSTKQKSESCS

SEQ ID NO: 64172 - protein, 342 aa, unidentified
MNIKQIGIDIGKMTFHMVALNGENEIVIRRQFTRSQLITFFTKRTGQDLNVAFEACSGAHWLAHQLIALGHKVRLLTPESVKPFAKAQKNDWNDALAIAEAANRPGRHVVGVKSQEQLDMQALHRVRQRLVTSRTALINQIRGLLRERGLVFRSGRAQFEAFVRDKLVTGDVDLNPLCRTLFAALIAEYEAMNSRLDEINQELEEFAKSNEVCRALLPVPGVGVIVATALFSAIANISDFKTGRDLAAFLGLVPRQRSTGGKTVLLGISKRGNTYVRTLLIHGMRSAFYHRQKRNDRMAAFMERLSARGMHTNKIVVASANKTARIIWAILSKNTYYQSQPV

SEQ ID NO: 64173 - protein, 335 aa, unidentified
MDRQYVGIDFHRRRSVIVRKSAAGEKLSSVRVVNDPWAIAAAVAEAGPEPEVVIEATYGWYWIVDWLQAQGATVHLANPSGLNWGTRRVKNDERDAIDLIDMLRLGRLPEAWIAPPATRMLRELVRYRAKLVALRSGLKAQVHAVMAKEGVLPTVTDMFSTAGNAQLNEMALGDAYTIRVESLRDLIEVYDREVAMLEHQIRERLRGDHGYRAIQAINGIGPTMAAILVAEIGDVTRFRSAAALCSWAGLTPKHKESDTTVHRGQLTKQGSRLVRWAVIEGTVRYHGGGKLAADFHKIAERRGKNKATVAIARKVLTLVYYGLRDGEIRCLAKTA

SEQ ID NO: 64174 - protein, 410 aa, unidentified
MPKIVYPVCCGIDIHKSFVVACIAATDAALATTYKSKRFSTFTGDLRRLAEWLKQNHCQDVCMESTGKYWIPIWNILEPSCRLVLAHPKYVKAIKGKKTDKRDAKWIADVFKHDLLNGSFIPPADIRQLRDLVRYHFKLTNYITGEKNRAQNCLTVSNIKLDDVFSNVFGKAASAITERLLENNEPFDVRPYLTKGLKASPEEIQASVDGVMCANQAEKLRIIRSHMDSLGLCKANLESEILAVAEKFLPQINLVLTVPGIQTFAAVATIGEIGVDMSVFETSRHLCSWAGLTPQNDQSAGKKKTTRISRAGAYIKPLLVQCALCAIRSKKNPEIAFRYNAIKKRRGHKKAIIAVARMLLTAIYNILKKNEPYNAELYRQSDKPPIQREVTVEQAIFILQRQGYLVTSTA

SEQ ID NO: 64175 - protein, 367 aa, unidentified
MNTIYIGVDFHARQQTICYLKIETGELVTCELKHQDKEQVRAFYKQFQGHVIIGLEASGYSPWFEAMLEQLGCEVWLGHATEIRRRARWRQKNDRRDAELILDLMLHNEFPRLHRPTVQSREVLRMLRYRQKLIKVRTMSKNSLQAIALQAGLAKGSRLFTTAGQQELRTAEMSPVLQWQRDHWFELLKPLNQQLLETMVWCKAQSKGDAAITRLRTHPGIGLLTSLCLLHTLQPVSRFRNARKVTAYAGFDPVERSSAERQHFLGISKAGSRLLRYLLVEATHTAVRHDEDLKRFYKRLAERRGRPKAKVAAARKLLIRAYIMLRDEIDYAEFRRRAVAARLARQGQRPEVPEVLIGQPASAGCQE

SEQ ID NO: 64176 - protein, 411 aa, unidentified
MQLFVGDDWAEDHHDIEVMDEAGKVLARKRLPEGVAGIAQLHGLVGAYLGEDADGAEVTVGIETDRGPWVTALLASGYLVFPVNPLQASRYRERHGVSGAKSDAGDAHMLADMVRTDSHQLRPAAGDSPEAEAVKVLARTHKTLIWERTRAAQRLRHQLREYFPAALEAFEDLDAPDTLELLAKAPEPAKAARLTRAQVSAALKRARRRNIPDKATAILAALRREHLGQPAAVTAAYAATVRALIAVIAALNEQVKTLQGQVEEHFGRHPDAEIYRSQPGMGAVLGARVLGEFGDDPRRYRDGKARRNYAATSPITRASGKKKVVAARFIHNDRLVDALNAQAFTALNASPGARAFYDQQRAKGLEHNDALRRLANRLVGILHGCLKTRTLYDEATAWGHRENLPQSSVAA

SEQ ID NO: 64177 - protein, 341 aa, unidentified
MEQKLSALGIDIAKQVFHLVGMDAHGTIVVRKRLYRAQVLVFIAQLPPTCIGMEACGGAHYWARRFREHGHEVKLMAPQFVAPYRKANKNDMRDAEAIAEALTRPTMRFVPVKSVAQQELQALHRVRERLMKARTALINETRGLLLEYGIVVPQGATTFRKHVLEKLATEDAKLTPHSLALFQQLLEELATLEARVATYDAQLAQVAQTHPVCQRLMTIPGLGELTATALVAAVSGATQFKNGRQFAAWLGLVPRQHSTGGKSRLLGMSKHGDSYLRKLLVHGARSCLRWVGRKRDRRSQWVQSLMERRGWNRAAVALANKNARVAWVLMCTEQVYETAVA

SEQ ID NO: 64178 - protein, 337 aa, unidentified
MDYFAGLDISMDETHVCVLDREGVVIHESKTASTAEAIAGELAKAPRCRRIVFETGRMAPILFHGLSQLGLPVVCVESRQAYQALKSLATHKTDRNDARGLAHLARTGFFKPVHVKSLSAHALRSLIIARKKLVGQRVTLENQIRGLAVVFGIRLPRALTAAFIDKALKASEGIAGLSAAMRGLIAARTAVMTAVAAIDADMRRMARALAACRRLMTIPGVGQLTSLAFVAAIDDPSRIRRSRDIGAYLGLVPRRYQSGEVDYVGSISKCGDRRVRTLLYEAANVMLTRYKGQLKLKDWAFAIARRSTMRKARIALARRLAIIMHAMLRDGTEFELA

SEQ ID NO: 64179 - protein, 371 aa, unidentified
MKQQSKSSNITVGLDLGDRRHRFCALDERGEVVEEGSICNERDSLRKLAGRYHGALGVMEAGAHSPWISRFLEALGWRVVVSNPRKVRAIYQHERKSDQRDALMLARIGRMDLALLYPVRHGTAEAQQDLLRIKLRDSLVRARVAVINSVRFTLKSLGYTVRNPSSARFHKVVMEEVPESVREMITPSVQALAELTTRIKMLELEINTLAQMKYPQSAQLQQIPGVGPITALYFVLKIEDPNRFAHVRDVGAYAGLCPRRDQSGESDPQLRISKRGDAYLRRLLVSAAHYILGPFGPQSALRAYGLMLAADGTAQAKKRARVAVARKLAVLLLSLWKSQQPYQPFPGARLNGQQEDRRSGTIALHRMEATD

SEQ ID NO: 64180 - protein, 406 aa, unidentified
MDVVYSHVCGLDVHKKNIVACTITPEGKETRTFGTMTDDLILLMDWLKTKGCTHAAMESTGPYWKPIYNLLELEEIEALVVNAQHIKNVPGRKTDVKDAEWIAGLLRHGLLKGSYIPNREQRELRELIRYRRSLIEERAREVSRIQKVLEGANIKLSSVASNVLGKSGRAMIEAMIAGETDPEALSDLAKRKLRSKKADLKRALNGLMGPHQKLMLGAQLRHVDYLDEEIGRLDEEIKRRMLPFEEDLELLDTIPGVARRTAETILAEIGPNMDQYPSAAHLCSWAGLCPGQNESAGKRISGKTRKGNKKLRSTLVEAAKAAARTRETYLSSQYHRIAARRGANRATVAVAHSILSMAYYILKRRQPYIELGPTYYEERKRDVIIKNSLKKLESLGVSVTVNTVAS

SEQ ID NO: 64181 - protein, 412 aa, unidentified
MDTVIERCAGLDVHKDTVVVCVRVPGPDGGRQQLIQTFGTTTTAVLALRDWLTAHGVTIVGMESTGVYWKPVYYVLEDALECWLLNARHLHKVPGRKTDIADAAWICQLVEHGLVRPSFVPPKPIRELRNLTRYRKAQIEERSRESQRLDKILQDAGVKLSSVASDVLGVSGRAMLGALVEGTRDPAVLAELARGALRKKIPALREALRGRFGPHHALLVGTILAKLEFLDDAIAQLSAEIEQVIAPFAHEAALLRTIPGVDRRNAEALVAEIGVDMSRFGAAGRLASWAGICPGNNESAGRQGSGKTRKGSKWLRTHLTEAAKAAGHAKGTYLAAQYARLRARRGSARATVAVAHSILVAAYHILERRQPYQDLGADHFRRRHSREQQTRRLVRQIQALGYKVTLELVEAA

SEQ ID NO: 64182 - protein, 372 aa, unidentified
MQQTIIYVGLDVDDTQYHGSALDKNTGEVIHIKCRPTLNGLLGQLEKLRQYFPGSTLTLCYEASYIGFTLQRDLTDKGYACVVVAPTSIPSPRSKQIKTDRIDASQLAQFYANGLLTLVSVPEREQEQDRDLIRSRQHLVQQRTELRTHVQALLRRNGLHYKEQTGNKTHWTKYHYCWLARTVEAATGSLKANLELLLRQLKGLNALLVDYTQQIEALANTPRYQKPVQALTCYKGIKNLFALTMITEIGDIKRFPHPRQLVSWIGMDIREYSSGGKHNRFGITKQGNRYLRTAFIEANQRGYRTARITKDIKARRAHTAPELIDIADRCLRRLNKKGNRLLIGGKHPNKVKVACAREMVGFVWESLNKVAA

SEQ ID NO: 64183 - protein, 498 aa, unidentified
MEHSPQPTVNNFAATKFATGDKSKLGRIAPRRTRSSVAKPARLKLRTPVGAAARPQTSERTAPCEGPYTSTTRGQPTMPRKARMKNYSELTHFAGLDWAKDHHDANLMDRQGQVVARFRFPHSGPGWQQWREKIREYPALGVAIETSQGAAVEQLLASGVTVYPVHPGAAKAYRQRQAPSGTKDDELDAWSLGDALRMDGAHWRALSPQDAIVEELRLLCRDEAELIGQRTALVNQLQAALHEYYPAALEAFEDWTAPYAWAFIEAFPTPQRLVQSTGHRRRVFLHTHKLWRPGTAERRLEIFARADQFCGGEAVTRAKSRLAVALCHSLDALQLQLDEYRAAIEKLFAEHPDHDVFGSLPGVGPTLGPRLLSGMGTDREQYPDVQGLQCVAGTAPVSFNSGQIKRAKIRWHCDRFLRHTVHLWAGCSLKCCAWAAAYYAAKRKDGMSHACALRCLAQRWLKILWKMWQTHTPYDPEYHARNQQRHGSWVLQLNPKTT

SEQ ID NO: 64184 - protein, 350 aa, unidentified
MKRATEKLYAGIDLHSNNVVIGVINQDGKRIAQRKLDCNLEQVVGFVQPFKPRLQAMAVESTFNWYWLVDGLRARGYAIDLANPAQIEQYKGIKHADDKHDAFHLAELQRLNILPKAHIYEARLRPVRDLLRRRTNLVHQRTALMLSFKSLYARTTGQALPLNQLKQLTSKEAVALYEHPANQLIAKVQVEQMAALAAGISRVEKAVLDCAREIPLYERLLTIPGIGKILGMTITMEVGDIGRFKTDGDFASYCRTVDARRLSNGKAKGENNAKCGNKYLSWAFVEAANFAKRHDEACRRWHDRKAAKTNPVLATKALACKLAKAAWHLMARQTHYDERRMFPELAMKRT

SEQ ID NO: 64185 - protein, 347 aa, unidentified
MSHYIGCDAHKKYSVFTAIDSDCRVVLTEQVAHDKGGFRQFLSSLPVDSPIAVESTGNWYWIIDEMEKAGHRPFLAHAGKSKLMMGQINKTDKLDARGLALLLRNGTLPSVWIPSGELRDQRELPRMRMELVRMRTSLKNRIHATFAKYGIQMAGASDLFGAGGRKQIEKKLGELPPETRYSVRQELKLLDQVQEQIDVAEKRIREIITVTPAIKLLMSLPGVGPILGTVIALEIGAVARFPGASHLASYAGTVPRVNSSGGRTRHGRVRPDVNHYLKWAFVEAANVVVLNQSRMSHRHVVHLYRRVRERRGHGKAIVAVARHLAEASYWMLRKNEPYQEPVSSTQG

SEQ ID NO: 64186 - protein, 419 aa, unidentified
MQVVYPRCCGIDVHKKGVTVCVLISHEDGTVERQFRSFGTMTGQLQALSEWLRQWQVTHLAMESTGVYWQPVYNLLEANDRTVLLVNAQHVQALPGRKTDTKDSEWLADLLRHGLLRGSFIPPAAIRELRDLTRYRKTLVQERSQEANRVQKLLEGANIKLAAVATNVLGVSGRQMLDAIIAGEEDPAALAEFARASLRKKLPQLRQALEGRVKPHHRLLLTQLLGHIDYLTTAIAEIEQEVERCLAPFAEAVTLLQTIPGIGAIAAAAIIAAPTPEGRPCVDMGRFPSAKHLASWAGVCPGNRESAGKRLSGKTRTGNTWLRGILGEVAWAAARTRDTYFSAQLRRLARKRGTKRALLAVAHSVLTTIYHVLRTKRPYHDLGPDHFDHLDAERLQHHHVQRLEQLGYTVTITPKAAAG

SEQ ID NO: 64187 - protein, 408 aa, unidentified
MLNEPLVIAGVDTHKDTHYAAVITITGEHIGAAEFPTTEAGYDALTSFITCHGTLLRAGVEGTNSYGAGLTRHLHEAGVQVVEVIRPARQVRRMRGKSDPIDAYTAAHTALANNNTVTAKTSDGLVEAIRVTYAARRSALKARTEVIVQLKSLIVTAPEAVREEYRGLSTGAVIAKLAGSRARAGDDEVAACTRSALKRLAVRYQQLNHEMTTYDTDLARLVQTVNPALVQTNGIATITAAQLLITAGDNPDRLHSEAAFAMLCGAAPLPASSGKTNRYRLNRGGDRAANSALHKIAIVRMATDPETRRYVARRISEGKTKKDILRCLKRAIAREVFHLITNPQPAADSSDLRPTRKTLGLTLTEVAEALDCSLGKISRIERGHVRDTRFLDQYRTWLTTQQQPQIAA

SEQ ID NO: 64188 - protein, 343 aa, unidentified
MQAITTIGLDIAKSVFQVHGVDTAGQVVIRRKLKRRYVLAFFEKLRPCLVGMEACATSHHWSRELQALGHRVRLMPPAYVKPYVKRQKNDAADAEAICEAVTRANMRFVETKTAEQQSCLVLHRTRHLFIRQQTSVINAIRAHLAEFGIVAPVGRKGVEQLFDVVASTKDQRIPEVARACVAALGVQLRALKAQILDFDRQIMIWHRSHETCKRLDEIPGVGPALATALVASIADPKVFRSGRDFSAWIGLVPKQHSSGGRDRLGSISKQGDRYLRSLFVAGALAVIRYAKIHGTAHRPWLTALLARRPTKVAAIALANKLARMVWAMMTRGEHYKEPVALAA

SEQ ID NO: 64189 - protein, 348 aa, unidentified
MRILAIDMGRSKSVACDYAGETAEHEFQTLLTEPAAFHDLIVERSPDVVVIEISPAAGWVRDLCEAMGKKLVVANTRDEAWRWRKIKVKTDRKDALKLGKMQAMNQLSGVHMPTKDVRQWRMLIQYRKSLVDDRTSIRNRIRGILDGVAVKLPKGAAAFSESGVEQWRQELCRSLEECGMEDLWRGMIQVEVLRLEELDKHLEEVEKRLCQKALADERVQRVMEVPSVGVRTAELVVALIDDPHRFGRGKHVGNYAGFTPKKYQSGDMDRDGRISRGGCALLRALLVQSSWIGVYRVPWMKELYQRIKRGSEKRKKKAIVAVARHLLVRLWAMLRDGVPWREPAIAAA

SEQ ID NO: 64190 - protein, 344 aa, unidentified
MNISTVGLDLAKNVFQVHGIDGTGKVIVRRSLRRRQVMPFFSKLEPCLIGMEACGTSHFWARELQALGHEVKLMPPIYVTPYVKRGKTDAGDAAAICEAVTRPTMRFVAIKSAEQQSILALHRTRALLVRQRTQLINMIRAQLAEFGFVLATGIQHALKLVDQLVEGVAPDIPPLACKIVISLAEQIRALQARIGTLEKDMKVWFRGNDLAKRLQTIPGIGVLTASALAASVTYPHQFTSGRQFAASLGLTPKADCSGAKERMGRISTMGDRYLRRLLVSGMTSQLQAARRKPEAHPWVTHLLASKPNKLVAVAMANKAARIAWVIMTRGEVYRAHHSVTEVTE

SEQ ID NO: 64191 - protein, 335 aa, unidentified
MEQKDLNLAIFVGIDAHGSEHTAFAINRFEEEKGRIQFENNLLGIKKFLAWVPTVSNGHTVFGVEGGGNERHTLLRRLVINYNQVYEVNPLYTKQRRDHGTRGDKSDAVDAKMVAEVVAKKFSELPKITSHEFTAERLALRKMVWYYEEITKQAARIQNQLRQVTKERKLAEAKQERKALDFIIKSKRKDWDRIKKTQKKLTAELEKLLPLQAKNLKTMKGISTILSAKLVAHANGIERFSNLDKFIRYAGIAPLERSSGKTKKYIKANRGNRKLNSAIYMIALSQLCWNEEAKRYVEKKVLEGKTKRHAIRCLMKRMACIVYGMMKSGAPYQGR

SEQ ID NO: 64192 - protein, 344 aa, unidentified
MNQIMRIGMDTSKHFFQLHGVDAAERPVLRRKLRRREMLAFLAKHPPTVVGMEACGASHYWARELQKLGHEVKLIAPQHVKPYIKRNKNDGRDAEGLCEAMSRPTMQFVRAKTAEQQAALMLAGMRERLVAQRTQLSNAIRGYAAEFGLIATKGLDKIEPLLADISADEALPAMARELFAMHGREYAQLQAELKKIDARLVAWHRSNADSRRLAQIPGIGPIGATALVMKVPDPRLFPSGRHFAAWIGLTPKDHSTAGKTRLGKITRAGDERLRSVLVAGATAVIQQARRGRGRASPWLLALLKRKTPKLAAVALANKIARIAWKLLVTGESYDGARMPGALPA

SEQ ID NO: 64193 - protein, 406 aa, unidentified
MQTVYERCCGIDVHKKLIVACFRNGKKAELRKFDTLTCNIKELANWLLDNDCEMVAMESTGAYWKPIYNILELFGLDVMVVNAHHMRNVPGRKTDAKDAEWIADLLQHGLLKASYIPSKEQREIRDVVRYRKSLIEERSREINRLEKILEGANIKLSSYVSDLTGISSRKLLNQAIEDEVTPDNIGDLVHHSMQGKIPVLLKAMDGVLTPIQKKLVKAILDHIDDMTRRINDLDDIINNEMKHYEDAINKIEEMPGIGKRSAEVIIAEIGADMSRFPTAAHLASWSGLCPGNNESAGKRKSGKTNKGSKHLKSILIQCAKAAKNNKESFFFAQYQRLVTKRGANRATVAIAHSMLIAIYHMLKDNVPFKDLGSNYYTKFNTDKKANYYLKKLQELGVSVPVSLATA

SEQ ID NO: 64194 - protein, 349 aa, unidentified
MRFYTTQHQFYCGIDLHARSMFLCIMDQSGKVLLHRNFHATPDALLVAVDPYREDIVVAVECIFTWYWIADLCSREGIAFVLGHALYMKAIHGGKTKNDKIDSQKIASLLRSGMIPMAYVYPQGMRSTRDLLRRRLYLARQHAELQTHIQNTNTQYNLPYFEKRIDRRSNRAGIGIRFTDPVVRTSVEVDAALMDAIHQQILTIERQINAQVPEHDPVAIHLLRSIPGVGKTLALVILYEIHDIRRFPTVGNFISYARLVKCTHESGGKRKTGPNNKIGNVHLKWTFSEAACLFLRKNERAKLYHRRLVSRYGKAKALSIIAQKLGRTVYTMLKRRTPYDARRFFETLT

SEQ ID NO: 64195 - protein, 342 aa, unidentified
MQITTIGLDIAKNVFQVHGIDAAEKVVVRRQLRRGQVMRFFEALAPCLIGLEACASAHHWARELMKLGHEVRLMPAKDVRAYVKRNKNGAADAEAICEAVRRPTIRFVQVKSAAQQGQLMQHRTRDLLMRQRTQIINALRAHLAELGIIAAQGREGVKELLAIIADKRDEALPLDAQASLLVLAAQLQALQTLIGSIEKRIVAQHRANADSKRLETIPGIGVVGATAIAATVTDPKVFRCGRDFAAWIGLVPREGSTGGKRKLGPISKQGDRYLRRILVVGAHSVLRRAKLHPEKYPWLTRLLARRPFRVVAIALANKMARIAWALLAKGGTYQAPRLAAAS

SEQ ID NO: 64196 - protein, 370 aa, unidentified
MLDTTTFVGLDVHARSIKAVSLDVMTGEVRAATFGYDAGAVAEWVRSVDPKARCVYESGVTGFDLQKRLSGLGVDCVVGAVSKMIKPSADRRRKNDRNDAEFLARMLSVGNVVEVWVPDDECEAARDLTRALEDARDDLSRAKQRLSKFLLRHGLAFDERTPTGRRKGNWTRAHWSWIESIRFAEGADNDVLAYYVDAVRRAAEEKARLEGLVEAEARKPRWRRRVDSLRCLKGVDTATAADLVFEAGEFSRFRNARSFAAWVGLTPSEHSSGESDRRGAITKAGNKHLRKALVEAAWHYLTCSGRPKDLAKGQAPDRGARRHAAKGVRRLVERREALLARGVHGNKANVVTARELACWVWAVGLMAEEA

SEQ ID NO: 64197 - protein, 309 aa, unidentified
MEASYVGIDVSKDRLDVHVRPSGEAFVVARDDEGVAELLRRLSVLAPALIAVEATGGYETLVAAAVGGAGLPLAVVNPAQVRHYAQALGKRAKTDPVDAEVIARFAEATHPEPRPLPGEATQALADLVTRRRQIIAMMVAERQRAGRLPQRLRKSCERVVRMLEKELAALDIDIDTTVRGSPAWCATEDLLASVPGIGSITARSLIAELPELGRLDRRRIAGLVGIAPYTRQSGKWQGKAFIGGGRRTVRAALFVATMAAVRHNPAIRDFRQRLLNAGKPKMVAMIACMRKLLIILNAIARDQKPWQHA

SEQ ID NO: 64198 - protein, 360 aa, unidentified
MAKAKTAVGLDVHATKIVAAVLDVETGELSRFSMNGDTDAAAGFCAGLPRPVRVAYEAGPTGYGLARELARRGVECVVAAPSKIPRASGDRVKTDRRDAEHLVRLLLAGKLHPVRVPGDEEEALRDLVRAREQVRVDLMRSRHRLSKLLLRHGIRFDDGKAWTDRHRAWLATITLPWPAAQSTLLDCQGAIDALCLRRDSLEREILALLSTSPWAVQVGRLRCLRGVDTLTAVGLCAEIGDFERFAKAEQLMMYIGLVPCENTTGQQRRLGSITKTGSGHARRLLVEAAWHYRLRPRIGKALTDRQHGQPPEAVAIAWSAQRRLHRTWTRLEARAKRRTIIAVAAARELAGFCWAITQIE

SEQ ID NO: 64199 - protein, 323 aa, unidentified
MNKGIKFFGIDISHLVFDVTDSDGNYYQFKNNVSGFRKFIKLLDSKSHCAMEATGYYHYQLAYYLLESGIKLSVENPLAVKRFIQMKLSKVKTDKSDSKLICDYASQVDLNLWRGNSKDEIECLQIVRTLATYTKQSTMLKNKLHGESVLGEPSKAVVRSLKRSLKQLEKEAKMLEDKLVDLVNQSHQDLLTRLKSIPGIGPKTAMMLVVLTGGFDRFTSASELCSYAGLTPVIRQSGTSVNGRARISKMGNQKLRNLLFMCSFNACKCNKACREIYERIVAKGKSKKLALIAVCNKLLKQAFAIAKSGLIYDDTYRSTLVKN

SEQ ID NO: 64200 - protein, 384 aa, unidentified
MHKHNIVFIGLDTHKVSTEVAYIEDQRGAKPVHQGKIKTTKAAITKLARQYQSKYPQATLHFVYEAGPCGYWIYRLLTSLGHCCYVVAPSLIPKKPGDKVETDKRDALKLAKLLKSEDLTPIYVPEDEDEAIRDLSRARETAMKDLKDAKYQLKGLFLRNNITCKVNDNWSNQHLRWLTELVLPHPSQQIVLQEMIQTISERIKRVERLVNELMHQAKQWRYYPVIQALQAMRGIRFLVAVGTIAELGDLRRFDHPRKLMAYLGLVSKENSSGDNRKQGGITKCGNGRARRLLVEGAHSYKHNANVSTELQKRQEGLPKVVIDIAWKAQLRLCRRYKRLMQRGKHRNVVVAAIAREMVAYIWAISREIVLVPIAPKTRLSRVPA

SEQ ID NO: 64201 - protein, 428 aa, unidentified
MNETDRIRLEEFRQFKREVRGSAEYLLVGIDVAKEKHHAFFGTSTGKTLFKRLVLENNVEGFGKLLVQAEAMKVQHGLKRVVFGMEPTGNYHKALGEHLIRCGHRVVWVSGVAAHENRKTLDGRWDSNDTRDAANVADLVSQGKCLFYEFPVGALQDLRNLLSLKRRLKKQEHGYRVRIRNHLVAKYFPELDGYFKGSEKMSLAIVRWCLDPSVIAGLEYKRFVERVAPGKGRLSRENRLPAIWKMAVDSIGCEVGPAVQFEAQVLVEGLRQIRVVMGDTDKQIQDLCLEFSEYEYLLSIPGFGPDVSSKVLGALGDPFRFQNGRQVLKMAGLDLSAERSGKTSQSAIPVVSKKGKADLRYALYQAAFIASNKNQDFIIYYTNKLRGREREPGIKTKMRVKLSAKLLIIAWTLMKKKESFNPDYLAIE

SEQ ID NO: 64202 - protein, 470 aa, unidentified
MSRSQSPDPFAQGEIRSTEGLPVVNPHAAGADIGAESIYVCIPGPGQTQIVRSFGTYTADLHAIADWLVENGIQTIAMESTGVYWIPLFEVLEERGIHCCLISGNLARRLPARHKTDVLDCQWIQTLHSLGLLTESFRPDADLIALRSLLRHRAQLIEHRSPHVLHMQKALIHMNIRLDQAVSDVTGQTGLAIIRAIVAGERDPHKLAALRNPRCKKTEDEIAQALTGTWREEHLFVLKQSLEFYDFYTRQIEACDLEIERTYSAIRPDWPDPAPDDREPLPPNKRGSHSKNLPKETPIRVRQHLRRLTGVDITAVDGLSLDLAQKIVSEIGTDMSQFPTVKHFTSWLRLCPNNQVTGGKTIRSSTGKSHNRARQAFLQAAASVACSDCAFGAFYRRLKARVGPAQAQVATAHKIARVVYHMLKFKVEYLPTSAQEYEQQFREREIRHLQRKAARLGFTLSPQPASGAVS

SEQ ID NO: 64203 - protein, 334 aa, unidentified
MVLTYPTEKESFMAAMMIGIDPHKGSHTAVAIDESEQPLGELRVRSSSTQVVELRSWAKRWPERIWAVEGAGGLGYLVAQQLLAAGERVVDIQPKLGARVRLLATGATNKNDPNDARSVAIAALRSTMLVEVVPEDHATVLKLWAKRARDLGRLRTQVVCRLHAVLAELTPGGFSGSISAAQATTLLEKIEPQGAIELARYELAHEFLADLTRIDEQMRQTKKRITVAVAASGTTVTEIYGVGPFVAAVVIGYVRDVSRFSDRDHFAAYNGTAPIEVSSGNRKVHRLSRRGNRRLNHAIHIAPSPRSAIATVRDAPTTTRRSPRAKVEKKRSAP

SEQ ID NO: 64204 - protein, 352 aa, unidentified
MTAKKRKVTGGVDTHGRTHHAAVIDQTGRELGDQQFPATPAGYRQLLGWLRSFGTIMKIGVEGTGAYGAGLARYLSSQKVTVVEVDRPDRRTRRVKGKSDPIDALAAARAALSGQASGMPKTRTGPVEAIRALRVARNGAVKARTAAINQLHGLLTAAPEDLRADLVGHTGMSLVNRCAGLTSDDTRLSDPVEATKAALTAIATRIQALTAEITLADRRLRPAVTQTAPTLSGLFGVGPDVAGQLLTTAGDNPDRLRSEAALAHLCGTAPIPASSGRTDRHRLNRGGDRAANKALHTIALCRLRYDPRTRAYQEKRTKQGLSKKEIIRCLKRYIVREIHTALLADYTALNTP

SEQ ID NO: 64205 - protein, 366 aa, unidentified
MSNIKYIGLDVHKNSIAIAIADNQRNGEVRYYGQIENNMDKLNNVFRKLVSDGSELSCVYEAGPCGYYLYRYLTDNGIDCFVIAPSQMPRKSGDRVKTDRRDAVTLARLHRAGELTPVYVPDLEDEALRDLVRAREDAQKALRKSKQQLGAFLLRHHIIYGGKTMWSSAHFNWLSNISMAHPAQQVTLQEYIDTVDGNIKRVDRLTTQIRELSEQSRLSPLIKALQAMRGVSLIVAATIAAELGDLRRFANPAQMMSYLGLVPSEHSSGEKTRRGGITKTGNGHVRKALIEAAQAYRLPARKSRAIRKRQESLDKEVCRIAWKAQLRLCGRYWRLAAKGKKVNVVKTAIAREIAGFAWAIAQEVTL

SEQ ID NO: 64206 - protein, 357 aa, unidentified
MQIIGCDFHPSVQQIAFVDTESGECGERRLAHCAEAEQFYRELKQKGERVRVGIEATGQSRWFERLLQELNFELWIGHPAQIRAKQVRKQKNDRKDAEHLLKLMMKDDFPRIWVPSPENRDIRQLIWHRHRLVQMRTRVMNQLQAIAMNEGIRRKRGLWTKKGRAQLEALSLSGWTNFRRQELLELLDRISPSIDQLTKAIEQAAQQRPEVERLQTHPGVGPITALAYVLVLGTPDRFRCGKQVGSYLGLIPCEDSSADHWRLGHISKQGNGLLRYLLGQSALSATHLDADWHRQYARLVIRKNHAVAKVAMARKLAVRLFWMWKREWDYEQSKEFGSHAGVARLSQWCAVDHRQLD

SEQ ID NO: 64207 - protein, 344 aa, unidentified
MKNYAGLDVSLEETAIAIVDETGRTVREAKIASEIEAIDAWLGKTGIAIVRLGLEAGPLSSWLHAGLKERGWPAICIETRRLRAVTRAMPVKSDRKDAEAIARVMRTGWYRAVHVKSLASQQLRVLLRHRKILQAKRQDLENELRGTLKNFGLKLGRVGRAKFAQRVGELVTGEPWLERLALPMLAARAALLKSFGELHALVLRIVKADAVCRQLMTIPSIGAVNALAYKTGIDDPTRFRHSADVGPHFGLTPRRYQSGETEIVGSISKCGDAMVRGLLFEAAMTLLFRVKAASALKRWARALAKKIGTRKAAVALARRLAVIMHRMWLDGTDFNPNLIRAAAG

SEQ ID NO: 64208 - protein, 341 aa, unidentified
MNGSKTVVGVDIAKRVFQLHWIDMETGEIVSLQLKREKFLEHFANRQPCLIGMEACGGAQHWARKLTALGHQVKLLPGKAVKPFVTGNKNDRQDARAIWTAVQQPHVKAVAIKTEEQQAILALHRMRSQLVKFRTAQINGLRGLLAEYGEVMPQGKAGVRKGIAAALARLEDRLPAMVIDTLREQWARIEKLDGEIAAIEQRIQLWLKQDEACKRIAEIPGVGPLTATAAVAIMGDAKAFKSGREFAAFAGLVPRQVGTGGRIKLLGISKRGDTYLRTLLIHGARSVLTHAKDPGPWVTKLRQRRPLNVAVVALANKMARTIWAILAHERTYQKGFVSQPA

SEQ ID NO: 64209 - protein, 343 aa, unidentified
MEHFAGLDVSVKQTSVCIVDGTGRLVREVRVASEPEALLPVLTNPLYRFKRIGLEAGPLSQWLFSALAEADLPVICVETRHMRAVLQAQINKTDRNDARGIAQMMRAGFYRPVHVKTLRSQKLRMLLTHRKLLQSKAIAIENDLRATLRNFGLKVGVVGTMKFEARIRELVETLPDLAELVEPLLIVRRTLREQIGILHGRLLAIVRHDDVCRRLMTVPGVGPVVALTYRATVDVPARFRNSKAVGAVFGLTPSRYQSGEVNRTGAISRCGDEMMRVMLYEAAHTMLLRLAKWSWLKAWAMKIARQRGIKKAVVALARRLAVILHRIWVDGTEFRWTRETAAA

SEQ ID NO: 64210 - protein, 423 aa, unidentified
MEVMYERVAGLDVHKATIVACVRLGAGRKVTRECRTFDTTTDGLRALLAWLEECRCSHVAMEATGVYWMPVWKILGEGDFTLIVANAAHIKNVPGRKTDLNDAMWIADLLACGLIKPSFVPEEEMQELRSLLRTRKQLGREQTRHVQRIQKTLAEANIKLDSVLSDIMGASGRRIIEAMIAGVRDPRRLAGLANTRIKATPKQLYDALHGRLTDHHRFLLTLHLRQWDSLDATIREIDQEVEARIARMDKEVKAGEAPFRDLIGLLCTIPGVSTLSGTTILSEIGRDMSRFPTAGHLVAWAGLCPGQNESAGKRKPVRLRKGAPWLKTMLVQCAWAAKRKKDSYYKAQFFRLQARRGPQKAICAVAASILTAIYHILKNGTEHHDLGADHFNRRSTEGQTKRLVAQLTRLGFEVQLQRTAEAA

SEQ ID NO: 64211 - protein, 389 aa, unidentified
MSQPFDASRSLTVLEQDSTIIAVIEMSQSKWLVSAVVPGVERQPLKKLDPDEEALRKLLHRWRNEAGQAGREIKRIVVAYEAGRDGFWLARWLQARDVEAYVIHPASVAVSREHRRAKTDRLDTELLMRAFLGWLRGEKRHCSMAAIPTAEEEDAKRPNRERGNLVTDQTRIVNQIKAILARFGIRTFRPTLRKAAEKLDGLRTAEGTPLLENTRAELRRHLARLRVVREQIRAIEHERLRKFAAAPAGVKGPHAMVRLIARVVGVGVETADMLVNEVLSRHLRDRKAVARYAGLTGSPDESGRRRRERGLARAGNARVRCGMIQLAWRFLRFQKDSALAQWFDVRTADGRGSTRKTMIVALARKLLIALWQLVTTGEMPRGVVLRPAS

SEQ ID NO: 64212 - protein, 352 aa, unidentified
MIIIGVDFHPEFQQIASVDTDTGEVQEKRLAHREEAEKFYRALAGQKVRVGMEASGHGRWFERLVAELQFELWIGDAADIRTRRVRKQKTDRQDAQLILRLLLEDRFPKIWVPSWENRDLRQLLWHRHRMVQARTRIMNQLQAVALNEGLRCKKRLWRIHGREQLESFRLAPWASRRRHDLLELMDRLNPTIAELSQAIEQEVEKCPEARRLMTHPGVGPLTALAFVLIIGEADRFQCGKQVASYLGLVPLEDSSGNRRRLGHITKQGSSMLRFLLVEAAQVTVRSLPEWRNKYLHLMMRRGRKIAKVAMARKLAVRLYWMMRQGGDYQQWVKFGSHAGQPGNRHGVQSNTE

SEQ ID NO: 64213 - protein, 419 aa, unidentified
MAKRNTTTILEVMYSVCCGLDIHKKTISACLLYTDKHGEQQIEIRKFGTFMCDLMHLRDWLLEHECPIVAMESTGIYWRPIHNVLEDHVKVVLVNARHIKNVPGRKTDIKDSKWLAGLLRHGLVRGSYIPPKEVREWRDLTRLRKQYVRSLSDYKRRTQKLFESANIKIDSVASDLFGVTGRNLMTLLLENKKDITPDDIKACAKGQLKNKVEEMHKSIKGFFTDHHRNLLRSLLRLINSLEIEIENLNQRIHSVMSSNKELIDQMSQCPGLNEISSSAILAELGITLETFPTMEALSSWSGVCPGNNESAGKRHSGRSPVRNHHLKTLLIEAAWSAIKVKGSYYKAKYYRLKARRGSNKAIVAIAHRLLKAIYHIIKNGASYQELGQGHLIRKDKGARLRRLQKQAQEFGFRLVPVNP

SEQ ID NO: 64214 - protein, 396 aa, unidentified
MTKVLYIGLDVHKESIAVATAAQGDTEARTYGKIGGTLDALDKLIKKLAKPEQELRFVYEAGPCGYVIYRYLQKRQYHCAVVAPSLIPTKASDRVKTDRRDARQLARLFRAGELTAIYVPDEEDEAVRDLVRARDRAMVDQRKARQRLKGFLLRLGHRYLGKGNWSAAHLRYLSDLKFSHAAQQIAYQEYVEAITVAGERLERLTTAMETALATWKRAPTVRALMSLRGVALLNAMTLVAEAGDLTRFSSPSPLMSYFGLTPSEYSSGEKRRQGAITKAGNGACRRALVEAAHQYRFIPRVTPAIQKRQEKQSQEVRAIALKAQQRLHARFRSLSARHKKPVVVAAALARELCGFVWAIACQVNAPQMVKNRPPRAKRTTTAKRDYQLDSKKTFKR

SEQ ID NO: 64215 - protein, 412 aa, unidentified
MQVLHPCCAGLDVHKASVVACVMLTAADGSLAQETKTFGTTTAELLALGDWLKSQGVTVAAMESTGVYWKPIYNLLEGQLELLVVNAQHIKAVPGRKTDVADAAWIADLLRHGLLRGSFIPPQPQRELRELVRHRTNLVGRRAQAVNELHKILESTNLKLGNVVSDLTGVSATEMLQALVAGKTDPAVLAELGRGQLRKKKPELQAALRGELRAHHKLILSQLLADISWCEEQIAEVSAEIAARLKEQDELIDRLDDIPGVNRRVAEIIVAEVGGDVKRFPTAQHLISWAGLCPGNNESAGRRKSSRIRPGNRSLRCGLIEAAQAGRRKKGSYLSALFGRLAGRRGKKRALIAVGRTILQSAYHMIERGARYEDLGADYYERRNPEGLARRLAKRIEKLGFAVTLQSLPQAA

SEQ ID NO: 64216 - protein, 340 aa, unidentified
MEKISVLGVDLGKSVIHVHAVDERGREVLAKRFTRAKFEAFLRQLPGCRVGMESGGGSQYWARLALREGHDARLIPPQYVKPFVRRNKNDWRDAQAVCEAVQRPGMHFVTVKTLEQHELQMVHRVRSRVLAERTTLVNQLRGFLLEFGVAVACGRRVLLRRLPEVLEEGDNELTDPARALLWELYQELSALEARMDELDRRIEQQAREREACCRLREAPGIGPMIATALVAKAGDGRHFHSARHFSASLGLVPRQDSTGGRPRLLGISKRGDKYLRTLLIHGARALLRVAAKRNDRLSRWALALQQRRGTNIAVVALANKLARIAWVLLTRGERYAHSPA

SEQ ID NO: 64217 - protein, 313 aa, unidentified
MKKTICGVDVSKAKLDACIEPGHRLASFNNDTAGIAELAAFWREHAVTRVVMEASGGYERRAFIELWEHGISCALTNPRNVRRYAEAMGILEKTDRIDSSIIARFADAKNLAPTPLPSQAQQRLKALVARLRQVTGDLTVQKQRRASLLDNSEMLASLDEVIALLKRQSRSLEGEIASMIDDDPLWAKLAETWREMKGVAGRTVARLHAELPEIGTLSNKAIAKLAGLAPIANDSGKRKGKRPTRGGRAGVRSILFLVAAIAARYDKSLGDFRDRLLKAGKEKMVVRIALARKLLVRLNAKARDARTEYANAT

SEQ ID NO: 64218 - protein, 353 aa, unidentified
MIVLGADMHKSSHTLAAIAAATGEVLDDKTAAVGARGFDAVLQWARGLGPERVWALEDCRHVSGSFERFLIARGERVVRVPTRLMANTRRASRQRGRSDRIDAIAVARAALAEGIATLPTAELAGPELDIRLLVDHRERLVRARVGLNNTLQWHLHDLWPELQLPGSSLFYGKWGPRIARRLARAEQTMRVRIARDELRRLRELTHAINALEAEIADLVGQVAPQLLCEPGVGPLTAAKLVGEIAGAGRFSTDAKLARAAGVAPIPVSSGRTDRHRLDRGGNRQINAAIHRVAVTRGRCHPETRDFLARKKAEGKTQRDAIRCLKRHLTRRVWHLLRAHPDQEQLHLNEAFLT

SEQ ID NO: 64219 - protein, 342 aa, unidentified
MLIIGCDYHPSFEQIAFCDSGTGECGERRLEHGGEAESFYRSLQGQAVRVGMEATGGTRWFERLLDECGIELWVGHPGKIRAAAPRKQKTDRRDAELLLDLLLAERFPRLAVPSPEQRNLRQLVGHRHRLVQMQTRVKNQLQALAINEGLRLRRALWSRKGQAQLQALALPYWSEQKRCDLLALLADLQRRGALLDQAVEAAAAASPVVGCLRQQRGVGPVVGLAYELTILDPTRFQTSRQVASYLGLIPAEHSSGGKQRLGHISKQGNALLRGLLVEAAHVAVRWDPEWRRQYVRLAMKKNRSIAAVAMARKLAVRLWWLWKSGLASGQIGGSGSHAEQPV

SEQ ID NO: 64220 - protein, 343 aa, unidentified
MQTITTIGLDIAKSVFQVHGVDAAGQVVIRRQLKRRYVLAFFQKLPPCLIGIEACASSHYWSRELQALGHTVRLMPPAYVKPYVKRQKNDATDAEAICEAVARANMRFVPTKTPEQQSCLMLHRTRHLFIRQQTAVINSIRAHLAEFGIVAPVGRKGVTELLHIVADPSDKRVPEVARACLAALGNQLLSLKEQIVEFDRMIMVWHRSNETSKRLHYIPGVGPLLATALVASVADPRTFRSGRNFSAWIGLVPTQHSSGGKDRLGSISKQGDRYLRSLFVAGALAVIRYAKIHGTKHRPWLTALLARRPTKVAAIALANKLARMACAMMAKGERYRQPVALAA

SEQ ID NO: 64221 - protein, 315 aa, unidentified
MIIGIDVSKSSFDSAWALSGKSHHGVYEYSDKGIAQLLKDTPETAHYVMEATGVYHSKLALTLHEAGRAVTVVNPLVIKRFCQMQLTRVKSDKADAEKIRQYGEQTDLALWKPSADEIDALRQAHGWLDDLIRDRTRLLNRQEAHQHQAKPNNFVTRQMKETYTRLTNQIVLCEGQLSVIVKKCFPELYEHLVSIPSIGKKTAIELIVITEAFSKFAEVKGLSAYTGISPTTYSSGSSIKCKGVIAKMGNGRIRQLLYLCSLTAMRSNKDCKALYERMKVAGKPGKVIQVAIAHKLLRQAFAVATKGVYYAENPA

SEQ ID NO: 64222 - protein, 314 aa, unidentified
MDVVYERCCGLDIHKATITACVIVGRKKEIRTFGTMTDDLLLMTAFLRELDIQMTAMESTGSFWKPIFNIMEVEGIPAILVNAAHIKNVPGRKTDVKDAEWIADCLKHGLLTASFVKPRDQRELCELIRYRGSMIEERAREYNRMGKVLEGANIKLTSVASKIDTVSSMNMVKALCEGVIDADVLASLAKGTMRSKENELKRALNGLIQPHQQMILKAMLNHIEQLSGLIAELDVEIDKRMSQDVELVDALDGITGVGRVSAQTIIAEIGTDMSRFPSANHLASWACMCPGNNESAGKKKSGKTKRANSTLKKL

SEQ ID NO: 64223 - protein, 317 aa, unidentified
MRVVFGIDVSKVSSEVAILVNGEKFHNYTMSNDAIGFSLLLGDLKTVPKPEIIFEATGVYSRRLQAFLDEHGYAYTRLNPLEAKKQLDSLRVRKTDQIDAEKLAQSQFVLNRKTTYVQKEVYQNLRDLSRFYQNLTEDIVRAKNRLHKVLQVTFPELENILSTPSGEQYWNLVIAFPCKDFVLDLSKDELSESIRLSTTKRISDKRVAYLAEKLTALANQSYCAVKKTSPILEEVRYYGKELLRLSEQRQTVLDQMVELAQPLPEYDILLSIPEIAETTATSIIGELGDIRRFQSANQINAFIGIDLRHYESGNFLA

SEQ ID NO: 64224 - protein, 356 aa, unidentified
MIKKMKDYIVKGKKVSIGLEDSKKTWKISARSEQMEVHFCSMPARYSGLKEYLSGNYPQCDVTLIYEAGFKGFGLYDKLTADGFNCIVTPPNRVTQEKDSRVKTDKIDARRLATVLENNDYKVCAVPDKERREDRQLSRVMIQVQQEITRTKNRIRKFFDFHDYAEAFPAGDWKELQYAAVRETELSEPLKVTLDAYFSIIDKLKELRKELHRKVMALAKKDRYKEAVRIISSVCGVGKLTAIRLVLEWGEDLGERFHSGKKLACFSGLTQSEYSTGDRVRKGRITRQGRGYIRAWLIQCAWQCIKRDPAMLEAFQRIAKNAASRKKAIVAIARKMVVRIWTCVHHKQEYVVGVVE

SEQ ID NO: 64225 - protein, 342 aa, unidentified
MAKIIGCDFHPRFQQIAFLEQETGEFGERRLSHPEEAERFYRSLAGHAVRIGVEATGSLGWFQRLMQELGHEVLLGDATEIRASNPRKQKTDKRDARHILSLLVQDRFPAIWQPPVENDEMRQLLLHRCRMVRMRTRIKNQLDGMAKNEGWLSPRVWSPRRREQIEGLPLTGWRAERRRDLVALLEDLNRRIGPLDEAVRAAAEANGEARLLMTHPGVGPVVSLAYVLVIGDWRRFARGKQVGSYLGLIPVEESSGSKRRLGQVSKQGNSLVRWLLVEAAATAQRYDASWHRQYVRLSMTKHHGVAKVAIAHKLAVRLYWMLRSGENYEQVVERGSHAGRSE

SEQ ID NO: 64226 - protein, 391 aa, unidentified
MELGKRIEFENRKEGMEKFLDWANKIMKANGKENVIVGIEPTGHYWLCFEQYLRENGIKVVLVNPFHVKRSKELDDNTQTKSDIKDPKTIAMLVKDGRYTEPNIPEGIYAEMRVAMNIYERLQKQMNVLKNQIINWLDIYFPEFLEVFSDWEGKTAIATLREMPLPCDVVEKEVEGIIEYWHDKVDVRAISRRRAMDLAEAAKRSIGKKEGRKLARLEIKYLLEEYELLKKQIEEIEAEMAELLREVPNGEELLRIKGVGVKTAVGFISEVGDIRKYEDARQIQKLAGLNIIENSSGKYKGQTCISKRGRGRLRSSLFKAMITIVAKNEEFKQLHRYYTTRQNNPLKKKQSLIALCCKLIRIFFAILKKGIRYDGNKMLSDIKREALARTA

SEQ ID NO: 64227 - protein, 408 aa, unidentified
MEIVGIDWGRKKHYCYLLHQGKKLVLKNKEEDFAKLLKIKEAVYVIEDGNNRIVDYLLRNNRQVYILPSRRSSEARSFFVIEGKSDFIDSKVIAMTYEHNPEWCLQVKREGIAFELDVLVEENAVINVSMMQDIGRLDAYLERYWPEVKEVFSGTSARKLAFISICPTAKDFLSMSDKEILQKLKEMGFLINSNLKSKLKELRKIALERYVPASIRTLIVAFSRYAMEKKVMKEEIGKQMKEIIEESEFSVLLTLPGVGVIIASQLIVAYLTHKFSSYRDLQRYAGTTPTYYGSGNKNTTKMRSNCNHYLRGTLHIASLAATNSSKWMKRFYDNKKSEGKSSAHALRALANTILKIAFAMLRDLTPYSEEKFFKRNPLSDYTPSKKEGEQKPEYSLKVSSVATCRSTA

SEQ ID NO: 64228 - protein, 431 aa, unidentified
MEEAGDEPLFCERAAGIDIGKQVVSVTIRVPSETRRGGRQQETREFGTTRRQLLEMADWLRCWQVQRAGMEATSDYWKPVYFLLEREGLDCLLYQASQVKALPGRPKTDRLDSAWLARITEQGSLAGSFVPPEDIRRLRTHTRYRRRLIQARTAEKARCEKLLEDAHLKLSSVISDIHGVSGRDMLRAIIAGERDPEALAQKARTRMRRKIAQLREAVDCSFFTPDHAFVLQMMLDNIDHYTAQIGVLDERIAVLCEPYERQVAQLDGIPGFGVRTAQDLIGEIGVDMAAFPTAGHLCSWARLAPRVRESAGRRKGKNATGRGNPYIGGTLGEAAAGAGRTQTFLGAKYRRLCTRMPKKKAQGAIMRDHLVITHALLSDPGAEYRDLGTGYYEQRERTRRRASSHVRSLERLGYKVTIEPLTPTPTPKPAS

SEQ ID NO: 64229 - protein, 354 aa, unidentified
MNTTQNSTKSKIVKVIGVDLAKDHCDVIGYDENGKICLRLDGCSYAKLREILANLPQAVVLMEACKGSMFHARSIADLGHEVRLVKGTDVKALRNVNHKNDLRDAAYIANLYFVPGIKYVYIKNQQQQSLQFLQNEYKSLQELRIQVGNQIHAGLEEFGCPVRKSSKFIKTRMVAHLEKHAELIPEDVMASFKRRREIWLNLLQQEEEAKRRLEQVAATDANAERIMTVPCVGPQTAVGLLVHVGVDFGRFKNSRQFAASLGLVPKQNSTGGNNTLNHITKCGPKSLRSNLVQCAQLVLMYAEKWKGNFGDWVRKMRDSGKKHGVIVCAIAAKLARIIYRLMKDKVDYTPILSC

SEQ ID NO: 64230 - protein, 525 aa, unidentified
MVTKSKKQKQSSKSKPGKRYVGKPGGVIQQRVQQVGPEKFGIVAVDCAKKRSRWFLCDYYGRVIVEPTTVEHNAGSLKAMTQQIQEACQAEGITDTIAAVEMTGVYHRPVQAALRKAGFDTRTVHPFASSHYRKPLHPDLKTDDNDLEAIFHAAINGYGLALLEVDPVYRSLQRLARHRRNLVKQKARLQIQIRALMHQSMPGYADLFEDDKLFNKSIAMPIAKHFSSAASIKRAGSDGIAKYLRSQKIRFQIRTIDRVTVWASIAADPDPLAPLLTDQWKQLAQLHALMKTQVEQTEREMAAFLVKTPYVLLLSVTGINVVSAGELAGEAGPIEHYASATALNGRAGLYPSRYQSDEVDRNSGMAKSCNRRLRAACVLVAKNLIKCHTYYRGLAALWKTQKIATVDQQCRIANRSNRMVFQIVSGRQLWRGKGIDREYLLFKLREFHRTHHSTPEQTVADMTEAFAWLPKSAYGAEAKPLEELAKKKGRGAKSIGDLLLPLLIRLGVGGPSGVESDSSEARSPH

SEQ ID NO: 64231 - protein, 347 aa, unidentified
MNYIGIDLHKKFSQFTVLGEKGEILNSSKVDNRKEEIISYLNNFDQPGKAVIEATFAWGWLADLLSENKIQVMLAHPQKVKAIASAQIKTDKIDSEILAKLLKSDLIPEAYYSPKEERETKELLRCRASLVGLKTQIKNKIHSLLHKSNIRDGERFTDLFGKKGRKFLASLDLGDKFNFALKQYLALLDFLENQVKESDKKLKDIFKKDKQAKFLEKLPGLGYYSSLILSKEIGSIQRFPTAKKLCSYAGLVPSTYQSGTKTRYGRIKQGNKYIRWILVQAVPKAIKKDKVLEKFYQKILSKKGHNKAKIATARKMLAQIWHLLTYKKIFKDPETGSPVFFSGVHRR

SEQ ID NO: 64232 - protein, 423 aa, unidentified
MLKEQPIETQDKQEQKPDKEQKEKYLPVGIDPGKKICGVVILHPDSGNDTVLSSFFMDNCSFEDADALIERAEKVANSLGIKPIFVIEATNILWRPLFSYLKRKGYQVHTVCALQTKSSRGTKMRKTKTDLIDAKHIARIYKQGESHPTKFPEGIRMDLRELVRLHSFLTDMKGRILNRVYGYLFQVFPEFVSFFDSDSFLGTMWTLLKEGLVHPDCLKKVRIDKLTSILRKASMGRFKREKAIMLKEKARNSFGISEGREGFSSCLKLLANTYEFVEKSIACLEEDEIKPIVDQIPNKLNTIKGLGIAQAYFLAESRKPEEYENVDDVLAWFGLDPRLSESAGKKKKNRHISKCGTKYGREGMFLSTDTVMIHNPPVMAKYRRLRKNGRTNIEAKTILAADLVKVCYAMQRDNVPFNPSLIH

SEQ ID NO: 64233 - protein, 397 aa, unidentified
MYIVGIDIAKRKHEAAVIDGEGTVIIKPFSFTNNCSGYNRLLAMLTKAKLPLDEVSFAMEATGHYWLALFTRLQKEGFRVQVINPVQTNSIRSFYIRQAKTDPRDALLIAEVIRFGHFSESTLHPENIYELRELCRGRHAIVSMQADVKRKVVALLDQVFPEYETAFTNLFGDTSMAILQTCPTPKELSEMPFEELCHLIEVSSHKRFRMAKAQELQELARNSFGFAMAGDVFSTMIRLYAKHLDFLKQQVREMDRKIAEIMETLDTPITTITGIGPTLGAYILSEIGDISRFSSAAKLAAYAGIDPTMRQSGEYNGVRNRMSKRGSPYLRHAIWLAASSAVLHDPALKLYFQKKRDEGKPYMASVGHACRKMVSIIYAVMRGNKAYTPCIPNEISA

SEQ ID NO: 64234 - protein, 356 aa, unidentified
MQTQVTKKIDFKDKELFIGLDVHKKSWSVTIVIDGMEHRTFTQPPDPGALNNYLKRMFPEGSYNSAYEAGFCGYGIHRELKSLGINNIVINAADTPTSQKDKLHKRDPTDSRKIARELEKGSLRGINVLDRELEELRSLNRTRFYLMRDLRRSKNRVKSFLMYYGVPIPPEFDNNQWTLKFVAWLKQVRMTTTGGQEAFSHLIESYEHHRQQLLILSRIVRLRISHYDKELYSLLNTISGIGPLTASALITEIGDINRFTHINHLGSYVGLIPRVRESGETTHTGGITFRCNTFLRTLLIESSWQAIRMDPSMMQYYHKHVINSKGHKVIIKVARKLLNRIKYVMKNRQPYVTGVA

SEQ ID NO: 64235 - protein, 342 aa, unidentified
MCIIRIGLDIAKHIFYLHGADEQGKPTLRKKLYRHELLAFFSKLTPCLIAMEACSGSHHLGRELRKLGHDVRLISPQFVVPYRKNQKNDYNDAEAICEAASREHMRFVAIKSEEQQVNLMVHRIRDQCIAERTSKVNQIRGHLHEFGIVLPQGVAQVMGLLPPLLEDNQLPGLLKSLLQDLLDDIRQLNKRIESLDKQIREFVKSNDTATRLMTIKGIGPITASALVATVGDAHLFKNSRQFAAWLGLVPKQFSSGGKTKLGGITKAGDGYLRKLLIQGARAVLFRCNKEEDHRSKWLMQLRLRKPDNVVATALAAKLARTAWAIMTSENTYQENYNVLTAA

SEQ ID NO: 64236 - protein, 355 aa, unidentified
MTASYDYHIGVDYHKSYSHLVVQDSGGKTLRSGRVKNDRQSLGGFLERYRENSHAVVEATRNWMVMYDWLDDICDDVVLAHPWKVKAIADAKIKTDKIDATVLAHLLRADLVPQAWAPSDKARELRVALRERMFYVRLRTMTKNRIVTVFDRYPEQTAQLKKLGDLFGKAGRVQLAQVKVSEIDRIQIDRGLAFIGDIDGRIKQSEATIRAMTKANANVKLLRTIPGIGEFFARLIDAEIDDISRFRNPKKLAAYAGLVPSTYSSGGKTFHGKIIRQGNKWLRWAFVEAVTPAIVSNAQLRAQYEHLKIRAVNKARVALARKLLTIAFQILRDQRADEPRGTSPMEGASTISRLS

SEQ ID NO: 64237 - protein, 356 aa, unidentified
MIVIGADTHKSSHTLVAVDSVTGRRVGVCTVASTTAGALDALSWARRVCGGADRVWAVEDCRHVSGRLERLLISAGEAVVRVAPRLMAGARSSGRERGKSDPIDAAAVARAAIREGVEQLPVARLEGAELDVRLLLDHHDDLVKARSQSQQRLRWHLHDLYDDLSIPAGALDRTVWLDRVLGRLRRSPQTTRVRIARDLVCEIRGLTRRIRELEQEIRLLVCELCPQLVAMPGCGPLTAAKLLAEVAGADRFKSDAKLARAAGVAPVPASSGRQDRHRLDRGGNRQLNLALHRLAVNAARHDPTTAAYLARKQAQGMSRMEALRCLKRHLVRRLHKLLTQPAHDQARAPETALALT

SEQ ID NO: 64238 - protein, 386 aa, unidentified
MPQLNDLSRSLVTLEQDATLIAVIEMGQSSWLVAGIVPGVERQPLKKLAVDESALLKLLNRWREEAEQAGHGIKRIAVVFEAGRDGFWLARWLRARDIEAHVIHASSVAVSREHRRAKTDRLDTELLKRAFLGWLRGERDHCKMVAIPTTNDEDAKRPNRERESLVGEQSRIVNRMKATLTRLGIRGFNPKLKKAAERLDGLRTPEGEPIPPNTLAELRRDMVRRRLVGDQIRQIEDARLERLEHAPGDGPHAMVRLLARVIGVGIETADMLVQEVLSRNMRDRRAVARYAGLTGSPDESGRKRREKGLARSGNARVRRGMIQLAWRFLMFQKDSALAQWFRSRTENVRGTRKTMIVALARKLLISLWRLVRDGVLPDGVILRPAH

SEQ ID NO: 64239 - protein, 418 aa, unidentified
MAKFNGNYSVYVGIDWANDKHDLCVQQANSDIRKFKVIKHSANTINAWIIKLHKQYKGQIAVAVELSKGPIVYALQKFDFVTIHPVNPSMLAQYRKAFSPSGAKDDPTDAELALDLMLNYPKKIKALKMESEPVRKLTYLVEQRRRLVEDRRRFSNRLINTLKQYYPHLLDWFSHRGSGLFCDFITRWPSLQKVKRARPETLRKFFISHKGRSSAYTEQRIKSISEAEPLTLDKAVIDSHQLLAVALAKQMLVAVEAIEIFDSEISELFDTLPDAELYRSLPGTGPCLAPRLLVAMGENRSRFTSASEIQMSVGIAPVTERSGQKFWVHWRYQCSKFVRQSFIEWAAKSVHQSYWAGIYYQQQRSKGNTHQSSVRSLAFKWIRVLYRCWKTKEPYDESKYLKALRDRNSPLLFKEKAC

SEQ ID NO: 64240 - protein, 339 aa, unidentified
MNAVTVIGIDLGKHSFHLHAQDAVGRMVFRKKLSRQQLLRTLANVPACRVVMEACAGSHWLARRLAGMGHEARLISPQFVRPFVAGHKNDFGDAQAICEAACRPSMRFVSPRNEAQQTVSALHRIRERLVRERTATVNQIHGFLLEFGISLPRGAALMGRLPAVLSHEPLPPRLVALAVRLRGHVHYLGEQIKQVEQELMTALREDDRSRRLLEIPGIGPITASALAVELGDAQQFANARQFSASIGLVPRQYSTGGKPTLLGISKRGDRNLRRLLVQCARAVMQRADSRTDALGAWVKALSTRRHSNVVACALANKLARIAWAVLARGTHYEARPHLA

SEQ ID NO: 64241 - protein, 407 aa, unidentified
MLFVGDDWAEDHHDVELMDVTGRRLAKARLPEGVAGIARLHAMVGAQLGDDADDAGRVKIGIETDRGPWVQALVAAGYTVYAVNPLQAARYRQRLAVSGAKSDAADAHMLADMVRTDSHQLRPVAGDTADAEAVKVVTRMHKTLIWERTRAGQRLRHALREYFPAALEAFEDLHAGDTLELLAKAPDPASAARLSTAQISAALKRARRRDIPVKAATIQAVLRAEHLGQPPVVTAAYAASVRALVAVLGTLNEQVAILQGQVEAHFGRHPDAEIVLPQPGLGPVLGARVLAEFGDEHDRYVSAKARKNYAGTSPITRAPGKKRVVAARFVHNDRLIDALMTQAFTSLRNSPGARTYYDRQRARGASYNAALRQLANRLVGILHGCLKTGTPYDEATAWSHHLNEAAA

SEQ ID NO: 64242 - protein, 311 aa, unidentified
MATSSEMYVGIDVSKGRLDVAVLGENQEKQVCNSQAGIKELVRWILEMQPKLIVVEATGGYQRAVVDALFHAGLSLAVVNPARVRQFARACGLLAKTDKLDAQVLAVFGQRVQPRQYEGKTEAEKQLSALLVRRKQVEEMLKAEQNRLRTVSPSLRDSVERIIAILKEEKKRLDEQIRELMNEQQAWQEQTEILTSAPGVGPVTTATLLADLPELGKMDRKRIAALVGVAPMNYDSGKKRGYRKTKGGRTDVRSVLYMSTLVATHYNPLIRAQYQQRLKRGKLKKVALTVCMRKFLTILNAMVRDQQPFRT

SEQ ID NO: 64243 - protein, 359 aa, unidentified
MKEYIAFDSHKHYTLAETEEVETGKTLQQRINHQPGAIRRFLQRHGAVPGTAVAVEATGNWYWIVDEIEQAGFLPLLVHPRKAKLMMGMVNKTDALDVHGLNRLQRNGVLPTVWVPPAPLRDLREVTRTRLVFVQARTRMKNRITATLSKYGLRVEGARDAYAQKARAELAEKIGRLPLQTQTVTGMMWSQVRFADEQVRVLEKLLREMVRLTPEMRLLKTLPGVADLLASTIALEIGTIDRFASAERLASYAGTTPRVHSSGGKTRYGQLRPDVNRYLRWAYVEAANSPSSRRRTDPAPHVAVLYQRLKQRRGHAKAIGAVARHLAEASYHILTKKEPYRDPQLRQRSSQGGASARTS

SEQ ID NO: 64244 - protein, 396 aa, unidentified
MVQIWAGTDIGKTHHHCVVLDAEGKRLMSRRVLNDEPELLALLCDVLALAEDVVWAVDVADGMAALWINVLLNHSQRLVYIPGLAVNRASAGYRGMGKTDAKDATVIADQARMRRDLTVLRPDEENVVELRVLTDRRSDLNADRTRRINRLRRQLTGIFPALERVLDLGNAGPLILLSGYQTPAALRRTGRTRLETWLRNRKVRGADALAETALEAAGRQHTAVPGEKITAQVIHTLAKEVIGLNEQIAEIDKLIAARFREHELAEVISSMPGIGTLLGAEFLAATAGDMSRFGSSDCLASFAGVAPVPRDSGNVSGNLHRPRRYHRGLQRVFYTSALISIRSCDASRRFYERKRAEGKRHTQAVLALARRRVNVLWALIRDGRCFQHELPVTEAA

SEQ ID NO: 64245 - protein, 346 aa, unidentified
MQMKISVLGIDIGKNVCSLVGMDAGGKVVLRRRVTRETLIGLAAKLSPCIVAMEACCGSHHLGRVFAAHSHQVRLMSPEYVRPYVKAQKNDDRDAEGIAEAATRPTMRFVELKSESQLDMQSLHRARDRLVGNRTAVINQLRAVLLERGIAVPQGRCKLEAYLGIFMADEHVALSPRIRTLVEDLRAEWSELDRRISDYETEFAMRARADETTSLLTTIPGIGPLNATALTAAVGNAETFRRARDLAAWLGLVPKQMSTGGKSKLLGISKRGDGYLRKMLIHGARAALPTLSKSETPLGGWLRGLLTRAHKNVVVVALAAKLARIVWSVLRTGKRFNVTAATVVIQ

SEQ ID NO: 64246 - protein, 328 aa, unidentified
MKPVIGMDVAKGKSVAQAFIKRNNPYGRDQEILHTPKGFDKLKQLLEEIEKKTTHKPVVILEPTGHYHRVLVLYLQQAGYEVILVNPLQAQRARRTGLRKVKTDASDAWHLGDLYYQEENWSAYPGRKEALVDLQFLTREHEFITSLYVQAKLNMRTLVDQIFPSYEGVFKDLYSKTSLNLLEACLTSEGVKAQTPEAWMGMVKAATQASRSEAWMNRKVAALQNAIADNPVQRVPYGLEMALRSLLTLVREFQKQLAALEKVILELSETLAEVQLLESIPGVGTKLATAIISEIGDASQFHHPKQLVAYAGIDPSVFSSGKFVERCI

SEQ ID NO: 64247 - protein, 416 aa, unidentified
MPHETSSPIPPRAELAYVVGIDIGMESCLMCCLTMEKRQVIKPSKFSNDAAGFEWLLEHLERLKTAADQILIGLEATSRYGENLCHALLKRGYRLCLLHPGQIHAFAQQRGLRAKTDRLDAATIARALLSGEARFGYLPSDQVVTYRELTRLYQQLTGEVVRYKNEIHALLVVLFPEFTQVFADPSRPSALTVLKAYPSAQAMQEAEPQLLYQLLRDQCPGRYGHKTADKLIHLAQASVSSGVAIGARSSSMSILCDQLEHTQKNLELLQQEIERLLDSDPKARSVLALSELGPMTVAVLRAELGDLDRFARMDQVVAYVGLDLQVKQSGKWKGQTKLSKRGSGHVRRILSLAALRSIRLPTSPFGMFYHRLVHRGLKKGMAVIAVMRKLLIVAAHLIQTQEDYDASKVGVQALRA

SEQ ID NO: 64248 - protein, 342 aa, unidentified
MHITSIGIDLGKTTFHLVTLGEQSKVLVRKKFSRKQLLAYTANLPTSLIGMEACSGAHFIAAAIRSQGHEVRLIPAQFVKPFLKSNKNDFLDAEAIAEAVARQNMRFVPIKTDEQLDLQALHRVRDRLVQRRTAVINQIRGFLIERGITFPKRPANLRNNMAALLEDAQANLSPRMRRLLEGVWQEWKQLEAHIAEADDEIERIASADASCQRLRQIPGVGPLASTATVAAIGNGAAFRKGRDFAAWLGLVPKQRSTGGKARLFGISKRGNEYLRRMFIHGARAVLYRVKYDTGGFGRWVHQLEARAPRNKVIVAIANKLARIAWAVLSSGEVYHHQPVVTA

SEQ ID NO: 64249 - protein, 401 aa, unidentified
MKEHYVLAIDVAKGKSMVSLISSCGEVLISPYEINHNLNDFKNLDERIKKLNAFNDTAVIMESTGIYQMPVKRFFKENNYNLYVINPIYSKMYKQNLRKTKTDKEDCLKLAELFFMKDFKEYIDQDQFYLNLNALSRKYNTLIEAQTRLKNEFRNGVYEVFPEYEKLFKKNLIFSNTSLEFIKKYPHADIISNTRIDALANTMAKLNGRHEKYYLKKAKLIKEYASNSYPSVSRNDEKVNNLIITIELLLSYIKQIENLKSKLINKAKRSYMFNLINSIDGIGEFTTSLIIAELGDISRFDNIKQLTAYCGLDPSIKQSGSSINIGGPISKSGNRYIRRILFVTVQNIIPIASKNFPDNDILLYYRKKRNEGKHHYVAVVDSTTKLLRKIFALVKQYQNNI

SEQ ID NO: 64250 - protein, 454 aa, unidentified
MKRKRSKPKIDRTMPMVHTNAAAIDVGATMHMAAVRADRTAEPVRSFGTFTTDLRRLVDWLKECGVETVVMESTSVYWIPIFELLDARGFNVFLVNARDAKHVPGRKTDVSDAQWLQRLHSYGLLRASFRPKGQIAELRAYMRQRERLLEYAASHIQHMQKALTEMNLQLHHVVADITGATGLRIIRAILAGERDANVLAGLRDYRCHASVETIEKALTGSYRAEHLFALEQALALYDAYHEKVSACDVRIEAVMKELSIGRGHRSDALPSSRRRTNQANGLAFDVRAALFALLGKDITQIDGLGPYLSLKLIAECGDDLAAWPSAKHFASWLCLAPSNKISGGKVLSSRTRRSGSRAAALLRLAAVTVGRTDTALGAFYRRLSARIGKAKAVTATARKIAVLFYNAVRHGMEYVDPGASFYETRYRKRVIDNLHRRAKAFGFVLQPMEPAAVS

SEQ ID NO: 64251 - protein, 316 aa, unidentified
MTEEAVFVGIDVSKAQLDTSISGEADTLSVSNDPDGIQQILEFLRPRTPVLIVLEATGGFETPAVAGLAAAGLPVVVANPRQVRDFAKATGQLAKTDRIDAQILALFAARIQPPIRPLPDEASQALDALVARRRQLIEMLVAEKNRLGFAQTTVKKGIQKHIRWLERQLQDVDQDLDSMIRHSPIWKAQNDLLRAVPGVGPNLSRTLIAELPELGRLNRKEIAALVGVAPLNRDSGKHKGKRMVWGGRAPIRAALYLSIWSASRWNPLIQPFYERLRSSGKPPNVAQVACMRKLLTILNAMVRDGRPWNPDFQHSC

SEQ ID NO: 64252 - protein, 342 aa, unidentified
MFNLPLFVGIDYHTHSIQVCVMDSQRTILANQSVANDPEAVVRLVAPFGSNISAAIEASTGAADFAEQLITHYHWHVELAHAGYVARMKQTPDKSDWTDAKLLADLTRAGYLPRVWLAPQYIRDLRELVRHRHGLVQQRTQAKLRLRAALRNHRIVPADSPWTIKGKKWLLDKANIASEMLLYLLQEHYDTIAFFDKKIAAVTERMQCAVADDSVVKQLLRQPGVGVITAITLRALVGHFDRFRTGKQLAHFCAVCPRNHSSAGKTTTGGLIKAGDDLLRQVLVEAAHRLIRYDTRWKGMADRLRANGKKTCVIVAAVANRWMRWLFRQMIVPAPLDTSTSP

SEQ ID NO: 64253 - protein, 352 aa, unidentified
MYYVGLDLHKKYVTGCVLDSQGVVVAEQRRLPPVLETMLGWLAPLGQPVAVALEATLYWAWLHDRLTAAGYQVAVAHPQQVKLICHARCKTDPVDAHKLADLLRTDLLPAIWIPDAATRARRTQLRGRAWVVRMRTRVKARIQAYLAAENERVPVSDLFSRGGRAWLATVVLPAAVREQVDRLLALVEQLDGQIAEQDRAVRELARATPEAALLQTIPGIGPFGALLLLAEIGTIARFGSSHELAAYAGLVPSTRSSGGKTAHGSVGPAGSAWLKWLFVEAVQTLKRQPGPVRSQYERLLRAKGKPKATVAAARKLCCYVYWMMKEGRSYDDWLRQRHQREVRPIQAVASVA

SEQ ID NO: 64254 - protein, 457 aa, unidentified
MESYYMGIDISKGYADFVILDAKKNVVEPNFQLDDTFSSHCKLFEILKRFFDHHCESVIFAAVESTGGYENNWLHSLNGFHGSLNIRSARLNPLGVRANSKASLRRVITDKISARDVAEYLIAHPEKVTYQQEDSLASLKRQWGFVRLLVKQKTQILNQFESLLYTANPELITYCKSGVPAWLLKLLKQYPTAAKLAKAKASSVARTPYVTADRAKKLVDQAKKSIASATDETTGKLVSAMAEQIIRMEETIRIQTQQMVKQCAIPEIALLKTFPGISDASAIGLMLEIQSVKRFSSVKKLAAFFGLHPAFKTSGDGTSSVRMSKQGRKEPRKILFMVAMVSLTANPHIREIYEAHTEKGMKKMAAIGLCMHKILRIIYGMLKNNQAYDSQVDQENRKNRTTREATHTAKNENRRYEMFNQQAPISRRQNNKRKEWEQSQSDNITQCGIDVSTPSAA

SEQ ID NO: 64255 - protein, 403 aa, unidentified
MKHVIAFDVSMGKSYMIIYNVQKQCVFESEIKHTKPDFKKLQEKIHKLTDETGESPEIVFESTGIYSRQLERFMQNNQYTYCLLNPLEAKIQCDSLRIHKTDRSDAHRLALTHFTVTRRVSTRTDNLFYQLKSLSRLYSELDDELSIIRGRMHKVIQLTFPELERIFTSKSDLFLNFVQLFPHPDYVLGLSKTIIKNRIRANTNKKISNITAEKKAIQILEIAKICYPAVSQNDVLCDQLKLYARRYQELLYQKESCISKMVYVAEQRAEYDIIRSLPGIGPNTAVRLMAEIGDITRFNNNKQLNAFAGIDIRRFQSGKTFFKDKINKRGNKHLRKLLFLIIQNMIKQRRYGQNHIVEYYDKLKTQPYNKCHKVASIACVNKLLKLLFYLITHNIHYDYRLTA

SEQ ID NO: 64256 - protein, 347 aa, unidentified
MKKVSVIGMDMGDKNHKAVGLSEDGGVVCRDEVPCTPEDVRAYLKRHPGALLAIETGTHCRWVCRIGLELGHEVLVGNARKLRVIWDSSRKNDWNDAEKLAKVARMDRTMFAPVRLRGDGDQGLMRLVKSRDLLVKSRTGIVNQIRGFCKSEGFRLPKCSAESFTRREHEVPPAVRAVTKPLFAMLRELARKIGVYDKMIAEGVKRLRGEDAALLDTITGVGPVTSAAFLAAVGDVSTFGSARDAGPYFGLVPRQDQSGKTDKQLRISKEGNGIVRRLLVTAANYIMGPFGKDCDLRRHGMRIAERGGKNARKRAKAAVARKLAVVMLAVLKSRTAYRPLTDVETVA

SEQ ID NO: 64257 - protein, 324 aa, unidentified
MFVGLDVHKKYTEVAIVNEDGVVTEQERIENEPGLIEEFSDKLSNADMVMESSSTWYWLYEILSRKHRVVLSNPAKTKAIASAKLKTDKVDALMLANLLRGGYIAESYVPSRRVMGLRELVRYRANLVRIRGTIKNRVHAYLLMNNIKIDCSPFTKGFLEELGKVEDGRVQGYLRIIERLNLEIHEASKRICSEALNDEAARLLMTIPGISFYSALLLASEIGDVSRFPDSAHLVSYAGLVSSTHSSGGTTYHGRITKAGSPYLRWVLNQCVWVHIRSEPEGNVAGFYGRLRKKKGHAKAVVAASAKLLKIVYWVLKEKRPYQG

SEQ ID NO: 64258 - protein, 520 aa, unidentified
MATTRSRKRPSTRRPAPALSKPRGVLHPRVQHVGPEHFGIVCFDPAKARSKFLLADFYGRVLLPPTFIDHNRPALDDAVAQVRQAFADHQLGDGVVAIERTGRYHRLVQRTFAAAGFETRILHPFVTKQYRQPVDPGNKTDDKDLAAMHRATVTGCALLEAPRDEAWTTLLLLIRHRRDLVRKGAALNCQIRDHLEAALPGYAACFDKLWDSAIPWHLLRHFPTAAHLRQAGVTALCHSLHQAGIRYQQRTLQAVLDWADRAAPGDVAASQHHRIALALYDDRQRKTQEIQALEREIAGRLVQTPYVLLLSFPGLNVVSAADFAGEMGPIEHYANAKAITGRAGLRPTRYQSDQVDKANGPLVRNCNRSLRGAILGIADNLIGCNHHFGVLATHWSAQGKDPRHTRVKIALRFCRIAFQMVAGRQVFHHPCLQARHYLLDKLTAFHRDHGTPMPEVLRDLQAAVGQVPPREYAAEARPLHEELNKIEQGHRRGPQPLGAILPLVLARLGVGVVQSPESGE

SEQ ID NO: 64259 - protein, 402 aa, unidentified
MFDTEDVGVFLGLDVGKSAHHGHGLTPAGKKVLDKQLPNSEPKLRAVFDKLTAKFATVLVIVDQPASIGALPLTVARDAGCKVAYLPGLAMRRIADLYPGEAKTDAKDAAVIADAARTMPHTLRSLELTDEITAELTVLVGFDQDLAAEATRTSNRIRGLLTQFHPSLERVLGPRLDHTAVTWLLERYGSPAALRKAGRRKLVEVVRPRAPRMATRLIDDVFDALDEQTVVVPGTSTLDVVIPSLARSLAAVHEQRRALEAQIKALLEDHPLSKVLTSMPGVAVRTAAVLLVTVGDGTGFPTAAHLASYAGLAPTTKSSGTSIHGEHAPRGGNRQLKRAMFLSAFAALHDPASRTYYDKCRARGKTHTQALLRLARQRINVLFAMLRDGTFYEPRLPETAVA

SEQ ID NO: 64260 - protein, 347 aa, unidentified
MAIVEVTRPIVGGVDTHLDVHVAAAIDPIGGLLGVESFPTTPAGYHALASWLGAFGPIDRVGVEGTGTYGAGLARHLAASGITVIEVDRPNRQERRRNGKSDELDAIEAARAALSRRATGHAKGGTGNVEALRALLVAKRSARSIRIRSIGQLRHLAITAPDDLRVRLTGLTSKALVAQASVLRARPGSDPVRHATKTAIITLARRVQAINAEIAVLDHHIDRLVGATAPGLVAVYGVGADTAAILLVAAGDNATRIHSQAAWAHLCGVAPIPAGSGKTNGRHRLNPGGNRQANHALWRVVLTRLGQGEPRTVAYMQRRLAEGRTKPEIIRALKRYVAREIYQQLPG

SEQ ID NO: 64261 - protein, 354 aa, unidentified
MNIKYIGMDVHKETISIAVMNGEGKLVMESIIETKAITILQFIQGLRGDLHVTLEEGTWAAWLYDLLKPHVTKLVVCDPRKNALMKEGNKSDKIDARKLADLLRGGYLRSVYHGENGLRTVKELTRSYLTISKDLSRVMNRVKALYRSWGILCGGQQVYAPRHRSEWLNKIGEAGVRRRAEFFYQQLDALRALRQAVRRDLLAESRKHGATKLLRQIPYIGPIRAALLIALIQTPYRFRTKRQLWTYSGLAIETRDSAQHRYVAGQLRRSKKPQQVRGLNQNHNHDMKAIFKSAATMASSREGPFNDFYQGLLTKGMKPAMARLTLARKIAAITLIVWKKGAHFDAEQLKPQAA

SEQ ID NO: 64262 - protein, 352 aa, unidentified
MTNYKYVGMDTHPASITTEVLNANGRVVSKSIMETHPEQIRDYFRGMSGTVHVAFEEGTQAAWLYEIIKPLVAEVIVCNPRDSKLSRSGNKSDKIDAHKLATLLRMGELKPVYQGEARTRVLKETVRSYSGLSKDTRRVMNRIKAIYRGRGIVCKGTHVYEPGMREQLAMRLADNTRNRLELLYRELDCLSCLRKTARAELAKQVRRQPAWKILKQVPGLGPIRIAYIIGIVSTPFRFRTKRQFWPYCGLAVVTCSSSDYEVVGGKFRRSKKPIGTRGLNRNYNRDLKYVFKSAALHASTREPFKPYYDRLIANKMKPELARVTLARKMAAITLAIWKKGEGFDADRLIQEA

SEQ ID NO: 64263 - protein, 424 aa, unidentified
MLGVGIDWAEQFHLVALGRGETGVFEVKRVEHTPAAVTALLSRIVGLEPDLAEVRVVIETSHGVLVEQLLDAGFTVVPVNPDLIARRRGPARKKDDAEDARIACLLALDRFTSLRPLIPHGPVAAELRAIARDDERANRDERRLLNRLRADLIATFPAALLIAGDDMGRPTFLRMLERWPTAQALRQATREEIIALARAGHHGWPDRFADQVTAALASETFTARDYLIRAKADTIRLTATQLLAIGAQRRVWEQRMGRLLLGVPGRGRRSVTEDQPGQAFPGGEIYLSFPGLGDRLAARVAGEIGEHIEQFDSPNALACYAGKAPVTRRSGKSEYVVACRLACNRHLRDAVQQWAFCSLTRSAWAREFYDRHIHDHHSHHAALRALGNRWLEVLWHCLHRGVRYDEALHTANRNHAMATRPRAA

SEQ ID NO: 64264 - protein, 315 aa, unidentified
MTKHLLPVNVGVDVGKNQLDLYLLERDRALTVPNEEQAILVLVRSLSRYRVERIVVEATGRLEQPFVRAALAAGLPVIVVSPLKIRRFADVIGQLAKTDQIDARLIAQFAATVKPLPRPASDANAQAIKDLVVRRRQLTSLRTMEKNRRQVMPNDLKPSFDRILKALDRELKSLEQLINLAIDQHASSRHKRELLTSMPGIGNCVAATLIGDLPELGSLDRRQIASLTGVAPFNRDSGTLRGKRRIRGGRTHSRTALFLSAMVATRFNPDIKRFYQRLLTAGKHKKVALTACIRKIVTALNAMLRDNLPWRSAIA

SEQ ID NO: 64265 - protein, 317 aa, unidentified
METEKAYVGIDVSKETLDMAVHASEQRWRFANTDSGITEALACLEELSPALVVLEATGGMEYPLAAALAVAEIPVAVVNPRHVRDFARAIGRLAKTDAIDAKVIAHFAAAVHPTPRPLPDAQGQELKAILTRRRQLIEMLTAERNRLGSSRSKAVKAHIRDHIAWLEKEMIQINDDLGRSIRETPVWEEKDDLLKSVPGVGPVLSTTILADLPELGLLNRRQIAALVGVAPFNRDSGHLRGKRTIWGGRAVVRSALYMSTLVATRYNPVIRGFYQHLLAAGKPKKLALTACMRKLLTILNAMLKHQTPWYYPTSKTA

SEQ ID NO: 64266 - protein, 414 aa, unidentified
MNLFVGLDVSSETLEACFLGNQIDQVFLRTRFANDTVGASQIKNEIIKLNDENHFKKIMIGMESTSLYSFHPAIFFQNDQELKALNVKTVIEDPRRVRKYAESYDTDKTDYNDAFIIADYLRIGRGTTSPMREEKFMALQRLTRSRYQLIQQLTETKQHFLENLCYKVNTLSHELDSIQVFSATTIELMTEEVSIDDLANMPLEDLAELVQKKGHGRFKDPEVFAKTIQKACRNSYRLDKTMADSIDTILGILAREMRGLTKSIKDLNKAIEDLVSTTPEYKCLTSIPGIGPVYAAGILAEIGQIERFPNQAQLAKYAGLTWKRKQSGNFESENTKLSQTGNRYFRYYLVEAANSVKNRVPEYKAFYQRKYAETPKHKHKRALVLTARKFVRLVDTLLRNHQLYMPPKEAKEIE

SEQ ID NO: 64267 - protein, 413 aa, unidentified
MKKILYVGLDVHKESIVVATAPEGDAAAELYGKIGGTLEALAKLIKKLAKPELELRFVYEAGPCGYVIYRHLKKAGYLCQVIAPSLIPTKASDRVKTDRRDARQLARLFRAGELTAIYVPDEEDEAVRDLVRARDRAMVDQRKARQRLKGFLLRLGHRYLGKGNWSLAHLRYLATLKLSHAAHQIAYQEYLEAITVATERLERLTKAMETALPGWKREPVVRALMSLRGVALINGMTLVAEAGDLTRFDSPTQLMSYFGLTPCEYSSGEKRQQGALTKAGNGACRRALVEAAHHYRVAPRVTPAIQQRQEGQTQEVRAIALKAQQRLHRRYCSLIGRHKKPVVVVAALARELCGFVWAIACQVSAPEKVKLREPSSTKAAKQNKPQAVVAKSSKTPALAKREYVLDDTKRFKK

SEQ ID NO: 64268 - protein, 405 aa, unidentified
MQVVHHRCCGLDVHKKTVVACVLTARGKQTRTFGTTTRELLELADWLAEGRISHVAMESTGVYWMPLYNLLEGQGLELLVVNARHIKAVPGRKTDVKDAEWIADLLRHGLLRGSFIPDRSQRELRELVRYRRTVIDQRGDVVRRIHKLLEGANVKLSDVATDILGASGRAMLQALVAGSQHPAELAGLARGSLKRKRSQLELALEGSFGAHQRYLLQHQLGLVEYLEQEIAQLSVEIEDRMRPFEAAIGMIDGIAGLGRRSAEAILAEIGQDMSRFPTDKHISSWAKVCPGNNESAGKRRSGAAGQGNPWLGSALVEAAWAAVRQRESYFAALYQRIAARRGKKRAIVAVAHSLLIVIYHMLQDGTVYQDLGANHFDRLNREAVARRSVRRLTKLGYTVTIHEAA

SEQ ID NO: 64269 - protein, 459 aa, unidentified
MEKNNRRREKGKAACARIRKETEQPIVKMDVAGIDVSKADVWVCISSDKAKENVRQYRTFTVELEEMAKWLKEHGIKEVAFEATGSYWIQMYRLLRGKGFDAVVFLPGTLKGFQRPKTDPLDCQWIWRIAAQGMLKRSFVPEGEIAEIRVYDRQKAEIRGRAGDCVRHMQKALTVMNIKLDVVLSNITGKSGLSMIRDILAGERDVKKLAAYRDRRVVASVEEVEQALAGIYSEGQIFILRQAMEQWEMLKEQEEECEKRINAVLERLAARRQREIGLVKWEEPEKRKVSVEAWKAQCLMQIYGVDVTRLPGFGTDLGVSVLGETGYDLNLWETAKRHASWTRLAPRLARSGGKDIKMKRSRLIMPRIGRLFLQAAVAARDTETMIGAKYRRLRKRKSGNVAAQATAHDLQGKFYRMVKEKKSYQEIGAQEYDAQFRAREFENLTRRAQKLGMKLTPAA

SEQ ID NO: 64270 - protein, 472 aa, unidentified
MGKGSGNGTTRGDRRRNARRERLRGLLPRDGAVIGIDLAEDKQALAVVDHDVRVLARKTVKVKAFRLGEALDWAVAQAKLKGFKHVAVACEPTGPRWMQVQRLCAERRLPLVCIQPLVSHIAREQQDYTPHKTDESDCVLIGRLATELHCYIPEELDETWAHLRHLGRRRAQLITAATASVQRIQDFLSVAWPVVTEVCAQAFKSVTWLAALQVVTGRCGGEPARLAAMGREEFTAVVRAAVPGWGGKKGWGTICGRVFAALTDTEGVVAWSRRGLLRRCADELGDLQRTRAQLRAVEADMVMVLGELGLSRLGDIPGLSATGAAAILAETGDPRRYDSSSSLVKHAGLSPSENASGAFEGQAHMSRRGRPGLRLTAWRAVWPMLRLNPVMAAKYAALTQAAEAAAADAGSQQARAAAAAARARRARARVACAASLLRWIYSMVVHGTSWDAAVASGAAACQHAPRSQPEAA

SEQ ID NO: 64271 - protein, 446 aa, unidentified
MSDRSGLSRGDRNRNARLARLRQLLPPENAIVGIDLADDKQAAVVTDHDSRVIARRRVSARAWELGGLLDWAAGRAAAAGFRSVTVACEPTGHRWRVLDQLAAERGLALVCVQPLLVYRAREGEDLTFDKSDPKDAVIIARLAAGLHCYEPERADAVWARLRHLGARRNQLTTDATAEVNQVRDLLECAWPAVLTASGAPFRSASWRAAVAVVLDRCAGDLRRVRRLGEARFTAAVRRELPRWGATRPCLRIVRAVFAALADPAGVTAHRPGALERAHLALGDWRDTRTRLADVEARMVAVLDDLGLRELVTTIAGLTPVGAAAILAETGDPARFASPRSLVKHAGLCPRDNASGGYQGKTSISGRGRPGLRLAAWRAVWAALPNNPVMAARFAHLTTREDNRLARQQARTACAAALLRWIHVVITRRVTWDPAIAAGSTPLRQAA

SEQ ID NO: 64272 - protein, 414 aa, unidentified
MNMEVFCGIDWAEDHHDVALVDRDGQLLARRRISDDAAGLAALLDLLAEHGDSAEQPVPVAIETPRGLLVACLRATGRKVYPINPMAVARYRDRHSVSGGKSDHGDSVVPANVLRTDLTFHRPLPADTELAQAIAVLARAQQDAVWDRVTAHNRLRSCLREYYPGFLAAFEAARGGIMRPEARVILAAAPTPADAARLTLAQLRGLLKKAGRRRGIDAEAARLREAFRAVQMRQLPLVEQAMGRQTLALLRQLDAACASAEDLEQAAIESFNQHPDAGIITSFPGLGPLTGARVLAEIGDDRSRFCDAKGLKAYAGAAPITRASGKTKSVTHRRIKNNRLNATGYTWAFSALTASPGARAHYDRRRETGDRHAAAQRNLFGRLLGCLHRCLATGQHYDETIAFPDTTQKLPTAA

SEQ ID NO: 64273 - protein, 417 aa, unidentified
MALKIVYPICCGIDVHKSFVVACIAATDGKGVTTYKRRRFSTFTSDLRLLAKWLADNGCRDVCMESTGKYWIPVYNMLEATCKVVLAHPKYVKAIRGKKTDARDAKWIADIFKHDLISGSFIPPFEIRQLRDLMRYRVKLTNFSVGEKNRAQNCLTVSNIKLDDVFSDVFGKSASAITDQLLVYPDGNFDVSEYIDRRCKASPEQIQAAIDGLMCFEQVQKLKIIRSHMDSLEFCKANLESAILSLAEQFRSQAELVMTVPGIQLFSALSIIAEIGVDMSVFPTVKHLCSWAGLVPQNNESAGKKKTVRITRAGAYIKPLLVQCALTVCNSDKHPEIKSRYLALKKRRGHKKAIIAICRMLLTAIYSILKKSEAYNPNLYRKVVSLPVNREFTVEQAVAFVQRHGFLVVDSDGVIAS

SEQ ID NO: 64274 - protein, 424 aa, unidentified
MKVTYKTCCGVDVHKSFLVATIITTTGGIEPSYQKKRYSTFNNSILEFKQWLLDNDCHDLCMESTGKYWIPVFNLLEDDINVTIANPKWVKAVKGNKDDTKDSKWIGDLFRLGLVKGSYIPCKKIRILREFTRYRYKIVSCRSSEKNRYQNALTVCNVALDSVVSDIFGKSSTSIIDYLLEQSGNSINHEEIASKLLKSLKSKEDAVIESIEGYQMTDSQKYRMHLVRAHMDYITAEINDVDREIEKLISSDPDFENAIQFLMTIPGVKRDSAITVISEIGIDMTQFSSSKRLCCWAGLTPGSNESGGKKKSVRVTRAGVYLKPALVQCAHAAVKSEKFPYYKKKYESLMKRRGKKRAIVAIARMILTAIYQMLSTGESWNPSDLYKIGIPEALLEKQKAKAIKQAMKLLQREGLYPPPEPIAS

SEQ ID NO: 64275 - protein, 430 aa, unidentified
MKSNTQNAKIEAITEKTLVLGIDVGSETHYARAFDHRGIEYSKKPFKFSNTEAGFVTFKEWILDLKEKHEKDKVVPGLEPTGHYWFNLGKFLQDNEMKPVLVNPHHVKKSKELDDNNPTKNDRKDPKVIAGLVREGRYMIPYLPDGVYADLRTASNIRFQLQAELTRIQNRISRWFNIYFPEYKTVYGKPDAKSGMLILKQAPLPEDILTLGIDGVNQIWRDAKMRAVGKARAKTLIEAAEHSVGSKEGVVSARMEIRMLLEDYESRNIRLQEVMTLIEELVNQIPMAEKLLGIKGVGIKTVSGFLAEVGDISRFNNPKELQKLAGLALVENSSGKHKGKTTISRRGRKRLRYLLFEVAMSLVAKNPEFRELHTYYTTRRLNPLKKMQSLMAVAAKLIRVFYAMLTKGVDYDPKKMVGDIKRPAVYLPAA

SEQ ID NO: 64276 - protein, 491 aa, unidentified
MAKRKQSTFERLTSGKLNRKQRKDLGRRLRADDPGLEIVHRNVGGIDVGNQSHYVAVAPACDAEPVREFGSWTADLVRMAEWLKLCGIQQVVLQSTGVYWIAVYDLLEKAGFQVCLTNARDTKNLPGRKSDVQESQWLMKLHTYGLLRNSFRPPEQIRPVRTIWRLRDRHVREAGRAIQHIQKALTTMNVQLANVISDVSGVTGQAIIRAILRGERDPYRLAAMKDHRVRASDEEIARSLEGNWREDVWFELPQAVDGYDFCQRQIRECDERLQRYLQALPSRALPHPERDAEATMTSLPQPKEKVQSPKSGKKHGPKPRKNEPQFDLEAELARICGINVATLDGVDVMTIQTFVSELGTDMTPWRTEDHLVSWLKLSPNRQISGGKVIKQERSKAKNRVADALRMAASTLIRSDSYLGARFRYLRGRIGPGKAIKAMAAHLARLIYRMLTRGQNWVDRGAKEHEQRRQERDQLSLRRKAAALGFRLEPVA

SEQ ID NO: 64277 - protein, 353 aa, unidentified
MKRKLSSSEVILGVDTHLDVHVGVVIDQLGRLLGTRSVSTNSAGYRDLFRWASSFGTIASAGVEGTGTYGAGLCRMLTDNGIKVLEVNRPDRTMRRLQGKSDPTDAESAARSVLSGQSKAIPKLQSAACEAMRITSVARRSAVKARTQAINQLRGLLVSAPQEVRDKLWKTKAIDCVNACSRIRNLGDTILLQTLTVILKSLAKRWLMLSSELKQLDRQLENMTQKYARRLRGQFGVGPHTAAILLSVAGDNPERLKSEAALASLCGVNPIPASSGKTVRHRLNRGGNRSANNALWTIAMVRMRSDPRTQAYVERRTTEGLTGKEIHRCLKRYIVRELFPIILSDLGSIRATA

SEQ ID NO: 64278 - protein, 421 aa, unidentified
MAEEQFELFVGIDWASESHEICVLDAERRVIDRKTIEHSGAGMTQLCELLLKLSSQQPSRVAVAIETPRGAVVETLVERQFKVFAINPKQMDRFRDRHTVAGAKDDRKDAFVLADSLRTDLHLFHPIQLDEARVIRIRELSRTEEDIVQEQTRAGNQLRELLRRYYPQMLQLCPGMDEGWFLELIELAPTPEAAQKLTRSKVEQLLKEHRIRRLSAEEILTELKAPPLQLAPGAVEAASEHVLLQLPRIRLLQQQRSDVAGRIQSILDEMSEPGQNGEHRDVAIILSLPGVGRVVAATMLAEASQALAQRDYHALRSYAGAAPITRQSGKKKIVIMRQSCNPRMRNALYHWSRVSVQRDDQSREHYAQLRKVGHKHGRALRGVVDRLIPVLMAMLKSGTLYDPQRRANRRTPTIGSPTGQS

SEQ ID NO: 64279 - protein, 368 aa, unidentified
MKQVTTFVGVDAHKKDLFIAMLVGDHMIPVTWQVANEPNAVRRLVRKLEREAPGPVRMCYEAGPCGYALQRQVTTPRVSCQVIAPALIPRKPGERIKTNRRDARKLVELLRAGLLTEVRPPTPEEEAVRDLCRARDDAREDLQRCRHRLGKLLLRRGLHYSGRNWTRAHRQWIDSLDWTQPAERVVVDDYLLAVDQVEARLLELDARLAEIAETDPYRERVGWLRCFRGIDTLTAILILAELHDFRRFQSPRALMAYVGLVPGEDSSGEKHRRGRITRTGNALVRRLLVEMAWHYQHRPSIGVALTRRRKGQPGRVIAIADKAQQRLCRRFRRLAEQHKPAPKVAVAIARELAGFLWAALQPAPTPAG

SEQ ID NO: 64280 - protein, 330 aa, unidentified
MLKLLNRWREEAEKAGRRIERITVAFEAGRDGFWLARWLRARGIEAHVIHASSVAVSREHRRAKTDRLDTELLKRALLGWLRSERDHCKMVAIPTTKDEDAKRPSRERQSLVGEQTRIVNRMKAALIRLGIRGFNPKLKKAAGRLEDLRTPEGEPIPPNTLAELHRDMQRRRLVSDQIRQIEEARLERMEQAPGDRPHAMVRLIARVIGVGIETADMLVHEVLSRKLRDRRAVARYAGLTGAPDESGSKRREKGLAKAGNARVRGGMIQLAWRFLLFQKNSALAQWYRTRTEGGRNRKTIIVALARKLLIALWRLVTTGEVPAGVVLRAA

SEQ ID NO: 64281 - protein, 377 aa, unidentified
MSKYSKYVGLDVHKETIVVAIANAGRGEAMQYGEIHNNAEAIQKLAKKMSAQGAQVLFCYEAGPCGYGIYWQLKGLGHDCMVVAPSLIPRKAGDRIKTDRRDAVTLARLCRAGELTAVWVPDKEQEAVRDLTRAREDMKKMEQHARQQLGAFLLRHNKKYSGKSAWTQGHFRWMERLRFEHPSQQIVFQEYVDMVKHAQSRLQAIGQQMIAVLERWSMRDVVTALMALRGVDLITAMTVVTEIGDISRFESARQLMAYIGLVPSEHSSGQKQKRGGITKSGNGHVRRVLVEAGWHYRFPARKTAFLQRRAEKTSEEVQEIAWKAQKRLCMRYRHLLGKGKLKVEVCTAVARELAGFIWAIACEVMEKRGVKAITKAA

SEQ ID NO: 64282 - protein, 505 aa, unidentified
MGRLDEFRHPGRALLNSPGGKISMKPKPQEKTQKATDHRMQSHWHEMNRKQRREMMRKMQSQDLSLEVVHPDAAGIDIGNESHYVAVPSTRDNQAVRRFACTTGELQGMAQWLKQCQIRTVAMQSTGVYWVAVYDVLEQAGLEVYLVNARDTKNLPGRKSDVQESQWLMKLHTYGLLRNSFRPPQEIRMMRTYWRQRNDLVHSAGRHIQRMQKALTQMNIQLANVLSDVSGVTGQAIIKAILRGERDPQKLAALRDLRVKASEEQIAQSLEGHWQPDLLFVLKQEQDGYEFCQQQMAECDHQLAQYLQQREDRSQSAPLPEEKRKERLRKKKGNTPQFNLREGLFRMSGTDLTRIDSIDVMTATTILSEVGWDMSKWATEDHFVSWLRLCPDNRISGNRIIGKGRLRTNNRVTIALKMAASSLRLSNTYLGAQFRRFRAKLGGPVAIKAMAAKLARLVYRMLRYGVKYVDQGALLYQAQHHQLQIKQLHWKAAKLGFRVVQVPAT

SEQ ID NO: 64283 - protein, 382 aa, unidentified
MAGTEPHAWGTGLMDDITYVGLDVHKATVCVTVAESGRGGEIRQVGVFENRPEILCKMAARLGKGGRRLSLCYEAGPCGYGLHRLLTGCGHSCIVVAPSLIPIKSGDRVKTDRRDAMMLAKLHRAGELTAIWIPDAAHEAIRDLVRARATAGQVLSKARQHLQGFLLRHDRIYRGVRAWTLAYRRWLTTVRFEHPAQQIVLQDYIHAVEDAEARRDRLTRQIEEMLPSWSMAPVVTALQAMRGVALVVAVTVVAEVGDFRRFANARQLMAYLGLVPSEHSSGSTIRRGGITKAGNALARRVLIEGAWTYRMTARVSRKLHDRLEPLSAAIRDIAWKAQVRLCARYRRLAAAGKPKVVVTTAIAREMVGFIWAIARIAQPALA

SEQ ID NO: 64284 - protein, 320 aa, unidentified
MQAPVILGIDVARGELVVAREGSTGAVQHVRNDADSIRRWLETLAPGSVVAMESSGRYHRLLADLAHAKGMCVYVLNAHDVHQYARVGTPRAKTDRLDAIVIAHYVREHRTSLRRWQPPAGVSEALRRLLDQRAMLTRQLVAVRQSLGRSADAGEVARTLERAYTQAFELIDQQLRTLVRSEPALQAGVQRLETITGFGMQAAVRLAALFTRIDFTNANAVVAYSGLDPHPNDSGDHHGRRRLTKRGPPALRRQLYLVAFAACHSKVFGPAYRGLRERGFASTEALVILARKLLRLAWAIWKSGKPFDPSRVRLPACVET

SEQ ID NO: 64285 - protein, 342 aa, unidentified
MKQYVGLDVSQRETAVCVVNETGQVIFEGKARSNPGALTDLLNKHAPHAERIGFETGAMASWLWHELRRVELPVVCIDARHAHAALSVRMNKSDQNDARGLAELVRVGWYREVKVKSEESQKIRAILVARSRLVSMRRDIENQVRSLIKECGLLFPRAIGQQFRNQVSELLGVDHLLLSVISPLLSIHENVCQQQGKFDNEVRRLAKLDDTTRRLMTVPGVGVVTALTFRHTIDDPSRFRSASTVGAYLGLTPRRSQSGETDTNGKISRWGDRLLRTYLFEAATVLLYRTKKWSSLKAWGMKLAKRIGMKKAKVAIARKIAVILHCIWVDGTSFDWGQPKPI

SEQ ID NO: 64286 - protein, 408 aa, unidentified
MNSLFVGVDVSSRTHFAYLMRPDGDKHCSFPLGNNPSDAKLLSNRIVSALDSLQLTNVSIGLEATSIYGDGLVYALREDGALGRFEKKIHVLNPKQVQNFKKAYSDLPKNDEVDAFVIADHLRFGRAGNEVYMDDYRYRALRTLTRMRFEVVQNLTREKNRFANYLFLKCSGIAQDPSIPNSSATTLALMEHFETVDELAYADLDELTAFIAKAGRGRFADPEKTAKAFQAAARASYRLPKTVNDSVNQAMAVSVASMKALQDQIKTLDKAIEKHFEIIPNTLTSMPGIGKVYSAGIIAEIGDIHRFHSHAAVAKYAGLVWTQHQSGSFESENSRLIKSGNRYLRYYLLEAANSVRRCDSEFRRYYDLKYHEVNKYQHKRALALTARKLVRVIFRLLKDNRLYIPPEA

SEQ ID NO: 64287 - protein, 449 aa, unidentified
MARRKKSSSQAQMVPPVIQPDAAGIDIGATEIYVAVPPDRDPEPVRCFATFTSDLHALADWLEHCRVRTIAMESTGVFWIPLFQILEARKLQVCLVNARHAKNVPGRRTDVSDCQWLQYLHSVGLLRASFRPNAAVCAVRALLRHRDSLIEMSSRHIQHMQKALSQMNLQIHHVISDITGATGMAILDAIVSGQRDPYALAKLRDRRIKASEETVIQALIGDYRAEHLFTLRQSLDAYRYQQQLIAECDREIERQLKSFESKVDVSERPLAEARRSNKTALRITELRVQHYRILGVDLTAVPGISSPTVQVLLAEVGHDWSKFPTASAFASWLGLCPDNDISGGKILWTGTRKVNNRASLALRLAARSLHHSQSYLGEYYRRMRAKLGAPKAIVAAAHKLARILYHLVISREPYQESIFSTLEAKYRFRTEARVKAQARALGFQLVPIE

SEQ ID NO: 64288 - protein, 414 aa, unidentified
MESVYRSIAGIDVHKKMLAVVVRSQRGDQVQYSQRKFGTNREDIQHLGAWLQAEGASEVVMESTAQYWRPVWNGLEPHFRLHLTHPLKTRAPRGRKFDFRDARRLSDRWDAGDLEESFIPGIEQRGWRQLTRARVQLKKKLGAVQSHVEGLLEHGGIKLSAVVSDLFGVSGWAMLEHIAQGVTDVEVLAGEARGVLRKKVAELKQALAGQLDPVCRLLLGQHLEQVRLFRRQLEEINQALAAAMQEHLLVLHRLTKIPGVDLYAAQELLAEIGPKADAFASAEQFASWVGVCPGSQQSAGINYSHRSAKGNRYLRRLLCQIAWAAIHTKDTFFASLFARLKPRIEGKGAAWAVAHRIAKIIWLVLHREVEYQEKGSAPPNERILMRKFKRMLKEFGTLGLDVRALLDQQLPAPS

SEQ ID NO: 64289 - protein, 398 aa, unidentified
MKKILRYIGLDVHQHTIAIAVADAGRSPAKKFAEVENDWHKLLKQLDALGSPEQLRLCYEAGPTGYELARSLRERGYHTIVVAPSLVPEVHKKIKTDRRDAVALAHFLRSGDLTEVTVPAAQTEAMRDLERARSDAKEAERVARQQLSSFLLRHNRRWTGASNWTLSHVAWIRKQVFTEPAQQRVLSDYLQAIDQAELRVKSLTADLGKFVEQWALKPLVLAFQSLRGFQLVNSVVAVAEIGAFSRFESAGQFMCYLGLVPSEHTSGASRRQGRITRAGNRQVRSLLIEAAWNYSRRGKASKAIAKRRSLVPTEIQAIAAKAEDRLCRRFQAMLSKGKKSVVVATAIARELAGFVWAIGVAIERSGAVPSIDTRLAQREQSEVKRLQADTEKYFTRVS

SEQ ID NO: 64290 - protein, 413 aa, unidentified
MEVVHQCCCGLDVHKDSVTACVVWAEEKGKKRREERSYGTFTGDLLRLADWLRACGATHVAMESTGVYWKPVWHVLEGQFELLLVNAQHVKAIPGRKTDRGDAARLAELLQHGLLRSSFVPPPPIRELRDLTRYRVSLAQECNRIANRIQKVLEDANLKLASVATDPLGASGRAMLKALFEGERDTEKLAEMSRGLLRRKIPQLKQALEGRVRDHHRFLLKELLDHLEFIESKMTRLEEEIAKRLRPFEETVSRLCTVPGIDRISAWGIISEVGLDMKQFPDAAHLASWAGVCPGSWESAGKRKSGRTRKGNAWLRRHLCQSAWGVSTKQNNYLSALFRRLAARRGVKRATIAVAHTLLVIVYHVLQRPVEYHELGPDYFDKLNPERSKRKLVERLEALGFRVTLEPAAPQPA

SEQ ID NO: 64291 - protein, 341 aa, unidentified
MKNLFIGVDFSKEKVDVAIIFADGLTETAARVFNEFKTTVSGYKQLVKWVEQNSYGIDSSLWLFCGENTGDYSKGLCNFLYGKGYDMWLENAKSIKDASGLRRLKSDRADASMIAEYAMRNYDKAIMYEPLSESLAQLRELFLYRQMVVRHRCSFQVRRGEKRLTMEKSPIKTMISQSGRHIVSELNKEVEKIDKRIVELIKSDEELTEVFTIVTSVPGIGTQNAVSLMVYTDNFRRFNYDSRKIACYYGIAPFGKDSGTSVHSDPRVHYMANRQIKAMLTQAALAAVNFNPIMARYYMRLVERGKKKQVALNNVKNKLVHLITAMVRNRQLFTTEYKITA

SEQ ID NO: 64292 - protein, 336 aa, unidentified
MQINHFVGIDVSRDTLDFCVVVDGISHQHYCIANRTVDIGSTIKKIMRSSGSTFDDTIFCMEHTGIYNLPLIKWLQSHDAKIWMESGVHIRKTLGLVRGKNDKVDSMRIAMYAFINRHKIKFWKAPRKLIARIAALLSQRSRLNKAKKQLCTANKEQKLFMDKDIMSSLNIYTQKTVVVINKQILAIENEILSLIKEDEKLNRMYQIITSVAGVGFVTASYILVTTNEFINFNDPKKYACYSGVVPFEHSSGSSVRGKTRVSQMANKNIKTLLHMAALSTIKKGGDLQEYYYRKVVAEGKNKMSVLNAIRNKLILRIFACVNQDREYEQNYCYKLV

SEQ ID NO: 64293 - protein, 343 aa, unidentified
MLYIGLDVHKEFCQACVMNKSGKVISNERFLSTQEALDKFLDRFDKAKFVLESTGIWEFIYEGIEKRGFEVVLAHPLKVRAISEAKVKTDKVDAETLAHLLRADLIPRSHVPPRDMRNLRQLVRHRAYLVRQCTSIKNRIHAELLRRGIRRPESLKKTFTFKHVEWMHSLGILTIDSSLNCLEGIQAQIKEVESFLLAEYNSRPDARLIATIPGIGFYGALLILAEIDDIHRFSHPEKLCAYAGLVPTVHQSASRSYNGSITKNGSPHLRWILIEAVHVHTNYCPESKLSAFHRKIAKRRGKQRATVATARKLLHTIYWMLLTKEKFHCQGFNLVEKAASMNA

SEQ ID NO: 64294 - protein, 399 aa, unidentified
MLAVGIDISKSKSVAAILNQDGSMHTSPFEFHHTQPELDAFIKYILNSNQSATILMENTGHYHYPVLKAFQEAGLPVCIVNAYQIKKFGDMDLRKAKTDKKDAVRIARYALEKSYSLVPYTSMEQKYEDLRFLARQYNQRMLTLKTNKVFLLNLLDETMPGITNILPLTTRTPETSLSVLFINRFKSYDRIKKMGKNRFLDAFEKIARKSRNRQTKTYGLAIYEAALRNITTRGENEYILAAQDQCLELVCESQKAADSIILKMQTLAETLPEYAVLRSMAGVGDRLGPLILAEIGDIRRFHSGKALNAYAGNDAPPYQSGTFESHNRHISKRGNAALRKYCFEVMQALKLTRPQDDPVYLFLLKKEQEGKPYNVAKMAGVDKFLRIYYARAMETLKQQ

SEQ ID NO: 64295 - protein, 416 aa, unidentified
MSIYVGIDVSKFFHVAYCLDERGNRLGYLKFGNDRPGFTELEKLIGGLSIPDNGHIFLGMEATGHYWFPLYEFLKSKGYKVQVFNPLKVNRFRDFYIQPTKTDPKDAFVIASILRYGKVKPTVLPPDNIQKLKRIVRYRRFLTEEMTQMKNKIRCMLDEIFPEYQSVPFFSNPFAQTSRALLKIAPSPAKILALPRESWVEYLFSHSKGRLGWERALKKAHLIYQAARSSIGSKVVASVLEECVRDLLYELEHLEDRIGLFTEEIEDRLSLTPGRILTSIPGVGPVTAATIISGIGDISQFRSADALVCYCGLIPSSHSSGTFTSKRNRMAKRGQSSLAHVFYQIALSSLRCNPTLREYYEHKLAQGKPRKVAVVAVARKLIRIAYSMLKNSQPYTDSQRTKEKVLVSSLTKESSL

SEQ ID NO: 64296 - protein, 377 aa, unidentified
MNKVRFVGLDVHAETIAVAVAEPTGEVRSLGAIPNRSDSIRRLVKKLGPVESLRMCYEAGPTGYVVYWQLTALGVRCDVVAPTLVPVKAGDRVKTDRRDAEKLARSYRAGDLTAVWVPDASHEALRDLVRAREAAKKDQLRARHRLGKFLLRHGRRPAERMTPWMERHLTWIRQSVHFDQPAQEATLLDYLHEVEHEARRIERLERAIDDAIVDAPPRMRAVIEALQALRGIAKMSAVTIVAEVGTLSRFARATQLTGYAGLGASEDSSGERRRRGGITKTGNAHLRRIVVEAAWAYRHRPAISGTLRKRQATLSPEVTAIAWKAQHRLHARYRRLLGRGKCAQTTITAIGRELLGFIWAIGCAAEAAPEQRQLRAA

SEQ ID NO: 64297 - protein, 391 aa, unidentified
MIFVGIDVAKDKHDCFILNSEGTVLADVFTIANNRIGFETLLSRIQSCSQGESKIKVGLEATGHYSYNLLGFLLDSGLATYVINPLHTNLYRKSLSLRRTKTDRIDARTIAMMLMSDVDLKSYSNIAYHNEELKSLTRYRFDKVKERAKLKSSVARLVNILFPELEKLVSSLHIAVVYALLSNYPGASYIANANTEELAETLCTASKGRYTKSKTAEIQVAAGVSIGSKMPAKSMELKHTIALIRELDKEISEVESAIDKITSQMDSPIFTIPGIGRHMGAMILAEVGDFSNFASADKLLAYAGLSPSTYQSGQLQNCYAHMEKRGSRYLRYALFNAAKYVCLWCPTFSAYLEKKRSEGKHYNVAISHAAKKLVRLIFAIQRSGKAFLADY

SEQ ID NO: 64298 - protein, 329 aa, unidentified
MKVPQIIGADLSKKTIDFATPQGEHLKVNNDPPGYQELMKWIKKQRLNIPQVMIVMEHTGLYSHRLEQYLHAQQVSFTKVPAIAIKLSLGIVRGKNDKIDAKRIARYGVEKQASLVAEGPVDKILERLQMLHSTRDRVVRTRASILRAVKEYQETCGLKKTDLIISSQRRIIKCMTDEIVKLDHEIAKVLSSEPSLKKNNELLQSITSVGQVVALASILTTRNFTRFPNGRKYACYCGTAPFENKSGSSIRGKTKVSHLADKSMKRLLDLAAKTAIQYDKELRDYYLRRTTAGKSKMSTINIVRNKIIHRMFAVIKRQTPFIKDYLQSA

SEQ ID NO: 64299 - protein, 354 aa, unidentified
MKRTTKYVALDVHQAMTVASVREESGRIIARSILPTEESALLEFFRGMRGAIHVTFEEGTQAQWLHDLLVDRVDRVLVCDRRGEKRHKRKDDQADADELSELLRRGGLRAVYHGSPHRSTLRELTRTYQNVVEDSTRVMLRLKALFRARGIKTPGRRVYHPKDRQEWLAKLADDGVRFRAQTLYAQLDVLRELRPKVKTAMVAEARRDPAWAVLGSIPFLGPVRIALILAIMRTPWRFRTKRNLWAYCGLAVVTHSSSDYELVNGQAVRRRRAPMTRGLNRNYSRELKNVFKGAATAATGRPGPLLDFYEGMIARGMREELARVTLTRKLTALTLRLWKKGEPYDPTKLTKQAR

SEQ ID NO: 64300 - protein, 386 aa, unidentified
MRTSNVSTPIAEGISTIFVAIELSQKSWLVTLHCPDRDKISRHKLEGGDHAGLLALIDRVRERAARVLGAVPAVVSCYEAGYDGYWLHRLLTAAGVTNHVFDPASIAVDQRARRVKTDRIDGEKMLRTLMAYLRGEPRVVRIVRVPAPEQEDARRASRERDRLTREQTAHTNRIKALLRLLGMAVGNPRRRDWLSWLSAQRDWQGQAVPPRMLAELKREHARLMLVREQLDELARSQAAADLSPAAAEMTERSEFLLRLKCLGPAFATTLTSEVFYKDFRNRREVASYVGLTPSPWKSGGIDREQGISKAGNPRARRSAIELAWLWLRHQPDSKLTQEYRRRTLNAGKRIKRIAIVALARKLTIALWRYLKTGLVPEGAALKAAQM

SEQ ID NO: 64301 - protein, 347 aa, unidentified
MRFYTKQHKHYCGIDLHTNKMYLCILDRHGETVFHRNLKTSPEHFLNAIKPFRDDLVVSAECMFTWYWLADLCEDKGIPFVLGHALYMRAIHGGKSKNDKIDSLKIASLLRGGLIPQAYTYPRKMRATRDLMRRRNHFMRKRAELFAHIQNTASQYNHQDPLGRIARPNNREGTVERFDLPCVQKSIEANLEMITTYDRVISDLERYIIRTAKSHDPVSYALLQTIHGVGRIIALNLLYEIEDIARFPRVQDFVSYSRLVKCAKESNGKKYGTSGKKIGNAHLRWAFSEGAQLFLKGNEAGQKYLQKITSKHGKGKALSILAHKLGRAVYHMLKNQKAFDMNKFLTA

SEQ ID NO: 64302 - protein, 408 aa, unidentified
MKTLHQRCAGLDVHKQDVVACLRLATKGRVHREVRRFPTTTRGLLELAAWLEAARCTIVAMEATGVYWKPVWHLLDGSFELVLANAAHIKGVPGRKSDVNDATWIADLLAHGLIRASFVPPQPIQDRRDLTRTRKQLSREIVRHTQRLQAVLEEANVKLASVITDILGASGRRILKAMITGETDPSHLAELGSRRLGCSRDTLVEALDGRVRDHHRFLLDQHLKTIEQLEETMAAFDARIEAALAPFRDTVERLTQVPGLSTRAAEVVIAEIGLDMSRFPTAGHLLSWAGLVPALDESAGKRRSTRVTKGAPWLKPVLVQCAWAAANKKNSYFEAQFLRLKGRRGPKKAAIAVAASILTTVYHMLRDGTCYQDLGPNYFARRNPARTARKLADRIRNLGYIVEIRSAA

SEQ ID NO: 64303 - protein, 355 aa, unidentified
MIVIGVDPHKQTHTAAVVDGRSGELVGERTVRARRRGHEQLLGWARALAVERLGALEDCRHVSLSLERFLLARGERVVRVPPRLMGASRKGVRTTGKSDRIDALAVARAGLREPGLPQAFLAGREREIKLLLDHHDDLVAERTRIQSRLRWHLHDLEPDLIVPTGALDRACWLERLERLLAGRAQTAQVRVAAELVARCRELTTRVRQLERELRPLVEREAAPLLALRGCGTLTAAKLVAEIAGVHRFKSDAQLAKHSGSAPLPASSGARQRHRLNRSGNRQLNCALHRIAVTQGRCHPPAQNYLARKQAEGKNRKEALRCLKRHLTRTVYRMLNSTEQENSASTRPTARTPALT

SEQ ID NO: 64304 - protein, 354 aa, unidentified
MQQPERAAEVIIGVDTHKDTHTAVALNALGARLGTTTIPVSREGYRQIEAWACSFGSVRAFGIECTGSYGAGLSRALQASGHRVLDINRADRSARRRHGKDDPLDAEAAARAVLSGQATTLAKSGTSSVEMIRHLKLARDSAVKARAQAMQMLKGLIVSAPAELREQLEGIRGKVTLVRHLAALRPGPMTSTTASAKVGLRALARRWLSLSKEIEGHDRDLDALAAAHTPELITAPGIATGTAAEMLILVGDNPERIRSEAAFAKMCGACPVPASSGKTSRHRLNRGGNRQANAALHRVIVTRMRCHQPTIDYVRRRTAEGKTKAEIMRCLKRYVAREVFTHLCKPRQPVSETA

SEQ ID NO: 64305 - protein, 356 aa, unidentified
MTSTKKYVGMDVHKESISIAVMNSVGKIVMECVLETKASMILQFINGLRGDVRVTFEEGTWAAWLYDLLKPHVSEVLVCNPRKNALLKDGSKSDRIDARKLAELLRGNHLKPVYHGEEGLRTLKELARSYLTISKDVTRVMNRLKALYRSWGIACAGTHVYAPRHRSEWLGRISEAGVRRRAEHCYQQLDVLRLLRQQVRRDLLLESKKHQAWKLLRLIPGIGPIRAALLIALIQTPHRFRTKRQLWTYSGLGLETHDSAQYRVVEGQLRSKKSVTLRGLNQDHNHDLKDIFKGAATRVSSSSSGPLHDFYEHLLAQGRKPTMARLTLARKIAAITLIVWKKEVHFDASYLTSQAA

SEQ ID NO: 64306 - protein, 392 aa, unidentified
MYFVGIDIAKRFHEAAVIDEQGKVVVKRIKFQNSHVGYCKLMDTVRKLNQPVEFAMEATGHYWFSLYAHLRQDNQTVRVINPLQSDALRGLFIHETKTDAIDAFIIAEVVRIGRYSQTEILPEDIHALRELCRQRFYVIDMASDIKRKIIALLDQIFPEYEKLFSDTFGVTSMELLANYQTPEQILSVDSQTLADLLSKASRGRFGLDKANQIQQYAKNSFGIILASSSLSLIIKQYIEQLKSFETSIAIFDAEIAKIYDTFDCHLHTITGIGTTLAAVIFSEIGGDISKFESIPKLVAFAGLYPKNRQSGESINSKGRLSKRGSPYLRRAIWLASFVAAFKDPAIHQFYERKRSEGKDHLNVMGHVCHKLISIIFAVLRDNKPYEPAQIAS

SEQ ID NO: 64307 - protein, 459 aa, unidentified
MARRLRRSTRPVTMPTLHPDAAGIDIGATEIYVCVPLDRDPEPIRRFGTFTEDLHALADWLRQCRVTAVAMEATGVYWIPLYQILETRGFAVCLVNARHVKHAPGRKSDVQDCQWLQYLYSVGLLRASFRPPEAVCAVRTLLRHRDTLVQLAAAQTLHMQKALTQMNLQLHHVLSDLTGVTGLAILDAILAGERDPHVLARRRDRRIKASPETIAKALVGDYRPEHAFTLRQSLAVYRHTQGLIEACDREVQMRLGAFASTIDPTTHPLPSTAKPSRRRVREATPGFDLRTELYRILGTDLTQVPGLSTPSVFTLFAELGADLSAFPAGPHFASWLGLCPDNRISGGKVLSVQTRTVKHRVAQALRLAAQSLSRSQSVLGAFFRRMRAKLGAPKAITATAHKLARIVYHLLTTHESYNQTRLAAAEADHQRRTESRLRVQARALGFQLVPVAPAERSVS

SEQ ID NO: 64308 - protein, 359 aa, unidentified
MQQQSNKTDFNGQHIYAGIDVHLRSWKVTVLTEELTVRTFSQNPRPELLHQYMTRNFPNATYHTAYEAGFCGFWIHNKLKLLGIDSIVVNPADIPTTNKEVVNKTDQRDSKKIARLLRSGLLDGIHVLSLKTLEDRSLVRTRTTMVRDMTRIKNRIKAFLYFHGIEFPEQFKQSGSHWSKRFVLWLRDIELTEYSAKKSLSLLVDESEFIRSMILEATRAIRDLSQSESYARRVMLLQSIPGLGMLTSMVILTEIESINRFPNFDKFCSFIGLIPSTNSSGESEKTGELTHRGNNFLKGILVECAWIAARRDAVLNKSYSEYCKRMEPNKAIIRIARKLLSRIRFVLKNNQVYVYQSIN

SEQ ID NO: 64309 - protein, 318 aa, unidentified
MNTKTKQNINVGVDTGKYQLDIYIRPLDIYFTVPNDDKGIKEAVKTIKKYKPERIVIEATGRLEMPFILACANANLPFTIANPIHVKRFAGAIGQRAKTDKLDAQLIAHYSEAIKPKLSQLKPDTMQVMSDLVTRRNQLLTMQTMEKNRLQIMPKALAMTIKPVLTLFNNQIKKIEEKIVKLIESCPEYQAKNMILQSMTGIGKIAAASIISNLPELGYISSKQASSLIGVAPMNRESGRYKGHRKIQGGRPQVRTVLYMAMMSAMQSNPVFKVTYQRLLAAGKPKKVAIIACIRKMIVILNSMLRDGVMWEAPKVNN

SEQ ID NO: 64310 - protein, 340 aa, unidentified
MKHIGIDVHSTTTDACVRNDKGTIVLRRRIQTKASELEKFVLGITGKKRIVLEEDQMADWVTRVLQPLADEVIRCQPQYNRLIIGSEDKCDKMDAESLSELLYLNRIKPVHHPAMHFRTLREAVRAYWIASRDLTRAKNRLKGWFLFNGLHEPGRRIYSSRKRTKYLKPLQEQGRNIELAELLYERMDVCRQLKAKHIRMLRKVSRPVKDLVELVQAIPAIGPISSYTLVSLLEDGRRIPNKRKLWRYAGLSLRRHESRDIGFQGASKTGNRLLKHVVMSAAITIVSRGERNGLLNLWERDIRKNVDPKRARRNLARKIVVIAQHLLRSKQEYIDELIRA

SEQ ID NO: 64311 - protein, 338 aa, unidentified
MNITTLGIDLAKNVFQLHGVDAQGKVMLKKKLNRSGLSDFVAKLPNCLIGMEACGSSHYWARKFQSFGHTVKLMSPQFVKPYVKSNKNDEKDAEAICEAVTRPNMRFVQIKQLEQQDMQCLHRIRSQSIKNRTALTNQIRGLLSEYGIIFPKQIQNVKKLLPDIISDQTNALGDYARTLFGELYSDFIMLNNRIKKYDQEIAALSKANKDCQRIEKIPGVGILCATAIVAAISDPTLFKNGRELSAWLGLVPRQSSSGGKQNLLGISKRGDNYLRCLLVHGARAVLFNSKNKENPTNKWVIALKERKGANKAIVALANKNARIIWALLVKQEEYKYAV

SEQ ID NO: 64312 - protein, 414 aa, unidentified
MEVVYERCAGLDVHKKSVTACLITPAAGRGWQKERRRFGTMTDELLKLADWLRAGQVTAVAMESTGVYWKPVFNILESEFEVLLVNARHIKYVPGRKSDISDAQWIGELLQHGLLKASYIPEVAQRDLRDLIRYRTSLVQERTREINRVQKVLEDANVKLASVATNVMGVSGRQMLEAIIAGEQDPEALAELAKGRLRAKIPELERALSGRIRASHRLLLRLHLEHIDDLNSKIENLNEEIDRLMRPFDEDEQQERLDAIPGVGHDVAQVILAELGVDMSRFPSAAHAASWAGLAPGKNESAGKNRSGKITPGNRHLKTALVQAAHAASRTRDNYLAAQFRRLAARRGKKRAAIAVAHSILVIAYHMLRNGTEYRDLGGDYFDRRNQAQLQRNLVKRLEGLGLQVTLETVAVAA

SEQ ID NO: 64313 - protein, 392 aa, unidentified
MRFAGIDVGGERHMVAMVGEDGKVLCRSSPFSEDASGYAQLFELLGPPEGCLLALEATGHYWRNLFVALLGKGYAVAVLNPLRTRRFAEEEPQWTKTDAIDALGIARFAAQKRPPAAQLPDVATEELRELSRLRDRLQEDFASRLRQLHRAVDLGFPEFTRHVHTLESQLAATILSRYPTAASFDGASVKKLARIVYDGSHKIGEELARALIEAAAKSVGSFHSEPYRLRIKYLCEDLDVLRRRLKDLARDIERRLDNHEVGKLIMTIDGIGPLTAATLIAELGDPARFRSAGAIASYVGVAPRLRQSGKKRFSGSPTIPFGNARLRKALWMVVLNAVRRNPWLRQYYERLRAAGKPGKVAVIAAMRKLLAAVWSVATHRRAFVPRLPFQVA

SEQ ID NO: 64314 - protein, 390 aa, unidentified
MQALCPRPDEHAPIRTDLKAIFVSLELSRSTWIITSLAPGGGEKMSKHSVPSGDVAALLARLSQLQEKARARTGRIFPIIVIQEAGLDGFWIHRVLQQEGIESHVVDPASIATSRRRRRAKTDRIDGEAQVRALLAYKRGEPRVCAMVQAPTPQEEDRRRISRERETLTAERVRHVNRIKGLLFAQGIGDYEPLHRNRRERLEALITGDGRPLPECLKAQIRRELDRLELLIEQVKAVEAERDAVLARAQASPGVPAPAALLLALKGIGPEAAATLWSEGLFRTFSNRKQVAAYAGLAPTPWQSGSVHRDQGVSKAGNPRLRTIMIQIAWLWLRHQPQSALAVWFRERIKRTGGRLGKTMIVALARKLLVALWKYATAGVLIEGAILKPA

SEQ ID NO: 64315 - protein, 410 aa, unidentified
MELLHRRCCGLDVHKETVVACLRLVADGKVTTEVRTFQTTTADLLRLSEWLAANGCTHVAMEATGIYWKPVWHILDDGEFELVLANAAHVKNVPGRKTDVNDAMWLAELLAHGLIRASFVPDAQTQEMRNLLRTRKQLVREQSSHVLRVQKTLEDANIKLDSVLSDVMGKSGRAMIEALIAGETNPAKLASLADRRVKASPEELREALRGRVTKHHRFLLRLHLNQIDALDAAMATVDAQVEANLAPFRTAVELITSIPGIKTLSAHAIVAEIGIDMSRFPSAPHLISWACICPRNDESAGKRRSNRQRKGATWLKTTLVQCGWAAVKKKGSYLQAQFHRIKARRGPKKAIMAVVASILTAIYHMLKDGTMYQDLGCDHFKRRSTDQQKKRLVKRLADLGYTVELKPLTA

SEQ ID NO: 64316 - protein, 370 aa, unidentified
MGEYSGAFVGFDTSKTKHAVAIAEGGRGGEVRFLGEIASSPARVERLVGKLASRYDKLHFCYEAGPTGYGLYRQIRELGHDCAVVAPSLIPKRPGERIKTNRRDAVTLARLLRAGELTAVWVPDAVHEAVRDLVRARAAAAQDLRGKRQQLLSFLLRHGRIFSGRQHWTLAHRRWLAEQSFAHPAQQVVFQDAVEAIAEALARLQRLEQQLVAIVPSWSMAPVVEAYQAMRGASFLVAVTFAAEIGDVRRFDNPRQLMAFLGLVPGERSTGETIRRAGLTLAGNRHARRVLVEAAWSYRHPARVSPTLRARLEGLPKPVRDTAWKAQVRLCARYRRLSAAGKKLPVVIAAIAREMAAFLWAIVRHVAPAV

SEQ ID NO: 64317 - protein, 392 aa, unidentified
MYIVGIDIGKNHHEASIVSPEGKQIGRSLRFATTHKGADSLMSFIFKNIGNSPCVFGMEATGHYWYPIYSFLKAKGYTICVINPIQSDSLRKMYIRQTKNDSIDSFLIAEVIRFGQFGTTSMADENILAMRQLCRYRDSVISSRTEIKLRIGTIMEQIFPEYEKQFSSLWMSTSMGILEKYLTPENIENAPIDELFEIIKDKSHNRLTKAKAISIKEAAADTFGIKIAQDAFSFQLKQLIDRMNFHDKQIEALDIEIMKYYEQFDCYLHTIPGIGIIGAATILAEIGDINRFKSSSALVAFAGIDPTVRQSGEFNSTHNHMSKRGSPYLRHAIFLAATTCSFHNSPLNAYYKKKRDQGKHHLTATGAVARKLTTIIYAVLRDSKPYEPKKFC

SEQ ID NO: 64318 - protein, 389 aa, unidentified
MQVVIGDRPEAASAIRTNLGAIFVSLELSQSTWLITSLLPGSSEKMSKHVVHGGDIAGLLERFARLQEKARARTGRNFPIIVIHEAGLDGFWIDRALKNEGIESHVVDPASVATSRRRRRAKTDKIDGEALVRTLLAYKRGEPRVCAMVKAPTPEEEDRRRLCRERKVLVTERVKHVNRLKGLLFSQGVCGYEPLRRNRRRRLDELRTGDGRPLPKNLKAQISRELDRLELLLEQIKVVETERDALLAAQQIAAPTSAAMLLAIKGIGPDFAAILWSEGLFRHFDNRRQIASYAGLAPTPWKSGSIDREQGVSKAGNPRLRTTLIQLAWLWLRHQPQSALALWFKERVVRNGGRLKKVTIVALARKLLVALWKYVTAGVVIEGAVMKVA

SEQ ID NO: 64319 - protein, 372 aa, unidentified
MNTLYVGIDVSSKSNVVYLMLPNGDKHSNFSVANSHEGSTQLVKRILSALTSHSLDTVLIGLEATSVYGDNLVYFLREDATLAPFNRKIHVLNPKQVKKFHDAYNDLPKNDYVDSFVIADCLRFGRINKEVYLGDYRYKALQNLTRARFFAVQNLIKEKQRFMNVLFKKYSTMTQEKVFSDTFSTTALAVYDEFDSAEALANMDLHELTDFIIEKGKNRFPDPDAVAKAIQKAARSSYRLPKTVNDSVNQVLSISITSMKALESQIKEFDKAIAAQMELLPNVLTSIPGIGPVFSAGIMAEIGDINRFGNHAQLAKYAGLAWKQHQSEGFEAQTTRLINSGNRFLKYYLCEAAFSLVRCDKEYSDFYHLKYK

SEQ ID NO: 64320 - protein, 392 aa, unidentified
MYIVGIDIGKNHHEASIVSPEGKQIGHSLRFATTHKGADSLMSFIFNNIGNSSCIFGMEATGHYWYPIYSFLKARGYTIYVINPIQSDSLRKMYIRQTKNDSIDSFLIAEVIRFGHFTTTSMADENILAMRQLCRYRDSVISSRTEIKLRISTIMEQIFPEYEKQFSSLWLSTSMGILEKYLTPENIENAPIDELFEIIKDKSHNKLTMKKAISIREAAADTFGIKIAQDAFSFQLKQLIDRMNFLDKQIEALDCQILEYYEKFDCYLHTIPGIGMIGAATILAEIGDISRFKNSSSLIAFAGIDPTVRQSGEFNSTHNHMSKRGSPYLRHAIFLAATTCSFHNSPLNAYYKKKRDQGKHHLTATGAVARKLTTVIYAVLRDSKPYEPKKFC

SEQ ID NO: 64321 - protein, 374 aa, unidentified
MSSDGITGVGLDAHKKSIHVAMLVPGREEPVSWQEANEESAVRRLARRLNREGPGEVRACYEAGPLGYTLQRELEAQGVICEVVAPSLIPIKPGERIKTDWRDARKLAEMLRSGMLTAVQPPNEADESLRDLCRGRDSVRQDLARSRQRMSKFLLRRGDRYHDTQRHWGVRHMKWLRPLRFEHAAAQAIFDHYLLTIDHLDERQRQVDAQLGLFGSQEPYGQPVAWLRCFRGIDTVTAVSLVAELHDFRRFRSARSLRAYLGLVPSERSSGEQRRQGSITRAGNHHVRRLLVEAAWHHRHRPVLSQPLRKRREGQPAHVIAIADRAQERLHGRFIRMTRRGIHYNKTVVAMARELVGYLWATLYPRETEAPPSA

SEQ ID NO: 64322 - protein, 341 aa, unidentified
MAVAGGLDLHRGQLTFDYVDTGTGESWRGRICPADRESLRGWLRRFHGVPDVEFAVEGCTGWRYVVEELQRAGITAHLAEPAETAGLRGRKRRAKTDWADARHLRDLLLDGRIPESWIPPAQVLEARALVRLYKDLLEERTSWQQRVHATLFHQGIPVVPKLGTADGQQHLDAAELSAAGRRAVQAGLRQIERLTQEMASLRRELARLSSRQPGCRALRRAHYGIGGLLSVAVWAELGDCRRFSSSDDAVRHTGLDITIYDSDGRRARGHIARQGPPVLRWALYEAALYASRPASPDYAYFCQVRDRIDGQRALLSVARKLARRCYHTLRDLGEDALAPAA

SEQ ID NO: 64323 - protein, 385 aa, unidentified
MERNDLSRALVAFDQNSTIVAVIELSLNTWLVSGLVPGVKRQPLKKQTADPERLVALLHRWREEATKAGRAIDRIAVAFEAGRDGFWLARWLRARGIEAYVIHASSLAVSREHRRAKTDRLDTEALMRAFLGWLRGEARHCRMAAIPTLAQEDAKRPSREHVSLVTERTRLVNRMAATLVWLGLPKVNIKVRQAAEHLAALRTPEGEPVPPNTLAELRRDLERLAVIRAQIKAIEQARLERLQSAPAQGTHPMILMLAKILGLGIETADMLVHEVLTRGLRDQRAVARYGGLTGAPDESGNKRREQGLAKAGNGRVRRGMLQLAWRWLMFQKDSALTQWYRSRTADGRSDTRKTMIVALARKLLIALWRYVTTGELPQGVVLKVA

SEQ ID NO: 64324 - protein, 316 aa, unidentified
MNKIICGVDVSKEWLDIAVEPRGVEGRFRNDAAGVAELAAFCASHGVELVVMEASGGYERLAFLLLWELSVPCGIANARSVRFFAEAMGFLEKTDRIDAAVIARYAQVKRMQPTPPPSAAQQRLKALVARLSQVTGDLTIQKQRRSAVFGAEFSAEIVASLDEIIGLLKRQQRRLEGEVASLIDDDPLWARLDQAFRSLKGVASRTVARLTAELPEIGILSNKAIAKLAGLAPIANDSGKRSRQRSVRGGRVGPRSILFLIARIVARYDPHLRAFHQRLLAAGKKKMVIRIALARKLLVILNAKARDARNEFANAT

SEQ ID NO: 64325 - protein, 455 aa, unidentified
MRKKIKKAIPVRYHDGLSQLRPNAGGIDIGASEVWVDVGGADADPVRVFETFTADLNRMGDWLKSCGIQTVAMESTGVFWIPVCQILESKGIEVYLVNARQAKNVSGRKSDMLDCQWLRILHSYGLLPASFRPAKDIGVLRAYMRHRQMLIEYAAAHVQHMQKALTQMNLQLQHVISDITGWTGMKIIRAIVAGERDRRRLAALRDARTKANEETIAKALEGDYRAEHLFALKQSLELFDTYQKQITSCHDQIEQHLKSLATKADPAELKAARTRKRRHRNQPEFPIREQAFRISGVDLTQIDGIHDSAALSLIAEIGVDINAWKTEKHFSSWLALCPNNKISGGKILRRSTRKTANRAREILQLCAQSLLRSHSALGAYCRRMCGRLGTPKGIVAAAHKLAVLVYRMLKFGHQYTDIGQERYEQQYKQRVLQRLARRAQDFGFQLIPCPEKQVP

SEQ ID NO: 64326 - protein, 314 aa, unidentified
MEKITVGIDVSKDRLDVAVRPSGERFAVPRTGAGLDDLVARLKVLKPNLIVLEATGGFETVVVAALAGAGLPVAVANPAQIRAFAKAIGQRAKTAPIDAGVIAHFGEATGVVPRPLPDQATQQLADLVARRRQIVEMIGSEKQREKRANPRIKKSIGRLVKALERELSSVDKDIDDAVRGSPAWREREDLLSSVPSVGPAISRTLIAELPELGTLDRKQIAALVGLAPFARQSGQWRGKSFIGGGRASVRRALFMGAMVAARYNPVLKAFYERLLAAGKPKKVALIAVARKLLTILNAIVRDGSPWKGTVGAVS

SEQ ID NO: 64327 - protein, 483 aa, unidentified
MKKKASKSTGHKTSSGRSCKKGSAWQVVHPRAAGIDVGAAEHYVAVPPDSAGADNRPVRNFRAFTEDLDALVEWLKACQVDSAAMESTGVYWIPLFQKLEAAGIEVILVDARAVKHAPGRKSDVQDCQWLQQLHSYGLLRAAFRPEDSVYRLRTLVRHRQSLVSSAAEHIQHMQKALVQMNVHLHQVVSHINGETGLRILRAIVAGQRDPQELVKLRDAQITRSTPEEMMAALKGDWRPEALFVLQQSLSLWDTYQERIKECDAAIEKQLQQIPTPTPPASPTAAPKADPLASQTPKKKRPQSRKCNDPQLDLRPQLARLCGLDLTAAHGMGVLTVLVILAEIGLDMSKWRSAKAFVSWLGLCPNNKISGGRVLSARTRQVNNRAAAAFRMAAMGLARTDTWIGSFHRRMKGRMGEAAANTATAHKLAVVVYHLLKHKEGFVERDVAKYEARIYKHQMAFVKKKAKALGMKLVPMIDETSLAE

SEQ ID NO: 64328 - protein, 485 aa, unidentified
MNPKRSKSRNAGKMPMVHPNAAAIDVGATMHMAAVRADRAPEPVRSFGTFTADLHRLVDWFTECGVETVVMESTSVYWIPIFELLDARGFTVFLVNARDAKHVPGRKTDVSDAQWLQRLHSFGLLRASFRPKGQIAELRAYVRQRERLLEYAASHIQHMQKALTEMNLQLHHVVADITGATGLRIIRAILAGERDPEALACLRHYSCHSSAETIAKALTGSYRAEHLFALEQALALYDAYHEKASACDARIEAVLKELSIHRGHGHGSPPPASRRRNRTDQANALTFDVREALFALLGKDITTIDGFGPYLSLKLIAECGDDLSSWPSAKHFTSWLGLAPSNKISGGKMLSSRTRRSGGRAAALLRLAAVTVGRTDTALGAFYRRLSARIGKAKAVTATARKIAVLFYNAVRYGMDYVDPGAASYETRYRTRVVNNLQRRAKAFGFVRAESRCCRFLGIVLQCQLSDLGMERLHIDRGDGRCPAP

SEQ ID NO: 64329 - protein, 403 aa, unidentified
MTTKAILGLDAAQAGVAFHLQDLGGRLLARGPAAKTTAGWTALQQTLATHGLQPADCLVAIEATGDHHLPWCEAFTQAGATVLALNPLVAKRTTPVRNAIRDHKADPIDAEGLAQTAAREGAALARFTYRSTPALFRLRKLLAAQAAVRAVLTDLKKHTGALQELCFPELDRTGLSTLRQCRLLQKAPTPAQIAGLSAAELAALAGDKHPAVLAAASASFAPAALAAACAPALQAMLGIVEQLASALRTLEREVTRHAPAAVPAERLALAHSLPGFGAKTTPVVLACVPAELWTRDQGRKQKVARVQALFGIDPRLRESGRWKGKVKISKRGIRPARTALYQIAFCSILHDPEMRAYYQRLTKVEKKPHKVALFDLARKHLRRLVAVLESGQAYQPRFLPAAA

SEQ ID NO: 64330 - protein, 340 aa, unidentified
MVKGTKGSHHKEGSTKMSKHNMVCAGIDTAKHKLDVALNEGPHHQQLGNDAAGHGKLVTWLHRHGVERVGIEASGGYEQAVVRYLRRAGFVVVVFQPSRVRAYAEFLLQLAKNDKIDAALIAVCTAALNAEKIHPAPDPRLGPFAAHQTLIDQLNEDIARYKTRRESCRDGHLGQYWKEEITRLKGRVRAEIKQLAAAIRQHPDLAERLRLIESVDGIGLPSAISILVRMPEIGSVTREQAAALAGLAPYDDDSSDRRGQRHIRGGRERLRRSLYTAAFPASLHWNSQLMALYRRLIKAGKGHKRALIACARKLLIFVNAVVERGTPWVKQPAAPQPLAS

SEQ ID NO: 64331 - protein, 355 aa, unidentified
MPSKADTAVARTIGIDTGKNTLHMIGLDEKGAIVLREKVSRTRIAARFVNLPPCLVGIEAGMASHYVARELAGLGHEVKQVPPAYCKPFRQSHKNDFRDAHAVAEAVERPSTRCVPIKTDGQLDLQALHRVRSRLIGNRTAVINQIRGFLLEHGIPVRQGYRFLRQQLPQILATRTDVLSPRMIRIVGDLMADWKYLDERIKGVTDEIEALAHADEGCQQLITVPGIGPIISSAMVAAIGNGAAFCKGRDFAAWLGLVPKQMSTGDRTILGRITKRGNRYLRMLFIQGARAVLLRPASWAKHSFGSWLTAATRRLHRNVLTVALANKLARIAWTVLAQGRRYEARVEPRVEPAAA

SEQ ID NO: 64332 - protein, 430 aa, unidentified
MEQIPQQPIVKAQLEPEFAAFVAIDWADQKHYWSLKVAGQQALQRGSLDNTPEAVEVWIMELHLRFAGRPLAVALEQRRGALAVMLSKYAHVHLYPVHPTTLAKFREAWYPSRSKSDPVDADLLLEILTAHRSRLRRLDPDTVEMRLMQTLVENRRKLVDERTALSNRLTDLLKLYFPQILGWFDEVISVVVSDLLEQWPSLQELQHAKPAKLEKFLRDHHCLEIPERLNRIRQAIPATYDRALMDSAPVLVTAWVRQIAVLRDSIRQLEKRIAELAAHQEDWPIFQSLPGAGAALAPRLMAALGTQRDRYASASELHCFSGIAPVKEASGNTQWVHFRWACPKFLRQTFHEWAACSIAQCEWAKAYYQQQKARGKKHHAAVRALAFKWMRILYRCWKDRQPYREEIYLASLAKRRTALVAALAQAVQMS

SEQ ID NO: 64333 - protein, 349 aa, unidentified
MSQDLNSTVAVIGIDIGKNTFHVVGLDDRGAIVLRQKWSRGQIEARLANMPPCLIGMEACVGAHHLSRKLKALGHDARLMPAKYVRPYSKGQKNDFRDAEAIAEAVQRPTMKFVVTKTADQLDLQALHRVRERLVSQRTGIINQIRAFLLERGVAVRQGLRFLRAELPRILATPPDVLSARMVQVISDLAEDWRRLDHRIDDLSNEITLLARQDAGCERLMSVPGIGPIISSAMVAAIGAGEAFSKGRDFAAWLGLVPKQISTGDRTILGKISKRGNRYLRVLFVQAAWVVLIKPMSWERHGLKHWIDAARKRLHRNVLAIALANKLARIAWGVLAGSRTFEASKLQTA

SEQ ID NO: 64334 - protein, 366 aa, unidentified
MKKISTVQVFGNEIFKEQKLTIGVDLGDRWSFYCVLDEAGKIILEQKVSTTPEAIKQTFGKIPRSLVALETGTHSPWVSRLLTELGHEVLVAHAQKVELITKSNRKDDRHDARTLARLARIDPELLGPVRHRSAKAQIHLTVIRARAELVSARTALVNAARGLVKSYGQRLPKRGTYQVSRELATGLSAELRDVLGPLLKEVESLNERIQEYDERMEKIAKEEYPEVSLLQQVKGVGTQISLTYVLTIEDPYRFPKSRAVGCFLGLRPGRRNSGESEPQKGISKEGDRYLRTMLVQGAHYILGPFGEDSDLRRWGLKLAERGGKNAKKRAVVAVARKLAVLLHRLWVSGEVYEPLRNSQKAMRAVA

SEQ ID NO: 64335 - protein, 350 aa, unidentified
MRTIGIDLGKVNSQLSERDEKGGENRNERFPTTAQKFRQLFADQPKAKILVEACTISHWVAALLRQLGHEVVVADPNFKPMYIDEQSKRKKTDKRDARILSWALCTGNWRPAHERSEREQVRKSLIDARARQVKARTQSANGIRGLFAYYGVAVPACEPEDLGCAAQALLDELPKPIRPIVKAQIQALEALNKTIGNIDRQLELKAKADPHVQRLMTAPGVGTVVASAFVAVIDDPQRFDNGHELASFLGLCPGESSSGEKEQRGHITKLGPKLLRSLLVQAAWGIWRSKSPEAARLKSWAQKIAARRNSKRLAATALARKLAGILLAMWKNEARFEPNWKPQPRLKKAA

SEQ ID NO: 64336 - protein, 382 aa, unidentified
MKYRTIFGIDSHARTTTICALVVETGETVKKTFRNNPYEEMKDWMRQFPHPSVGVYESGCTGFVPSRMLTHECSDVHPIASSKMPHDDDSAKQKNDRRDAERLARWELSGSLKAVWVPDEETEGLRDLCHAIEDRRKDRTAAYLRVQGLLCRHDKVWNQRTASGKLKSTWTRGYFAWLDTIELDSEGSQEALRSAIDAARSAKQRYDELVAKAREIAGRSKYAEVIEALCCLKCVQFVTALTFCAEVGDFSRFASGRKITSYVGLVPRESSSADKQSLGRMTKSGTNMLRKLLVECSWAVSRCRRNPKKKLDGVDEDVYERCVSLSNRLHDRRNDMCARKMKPNKANVASAAELARFMLEIGREVQDRQARRASASAATAAA

SEQ ID NO: 64337 - protein, 339 aa, unidentified
MNSMAVGVDVAKQVFQVHYVDRETGGIVNKTIKRAKFLEFFANRAACLIGMEACGGAHHWARQLTQMGHEVRLMPAEFVKAFNIRNKNDAADARAIWLAVQQPGKPVAVKTEMQQAMVALHRMREQLVKFRTMQVNGLRGLLTEYGEVMSKGRAKLDKEIPAVLGRIAERLPAALIDTLREQWNGLAKLDEQIAEIERRMREWKKEDKAVKAISEIPGVGLLTATAAVAMMGDPKAFSSGREFAAWAGLVPKQTGSGGKVNLHGISKRGDMYLRTLLIHGARSVLTHAKEPGEWIEQMKKRRPPNVVIVALANKMARTIWAVLAHDRPYQKGYVSVKPA

SEQ ID NO: 64338 - protein, 493 aa, unidentified
MKTPVSSPAAKRRARNVRKLQRQSQKPTSRPVKSLDELTPIHRRAAGIDVGSAENYVAIPTEGLASGESPVRVFGVFSAEQDALVEWLRKHQITTVAMEATGIYWRSLFDKLEQAGIEVYLVDPHGVKAVPGRKSDWLDCQWLQKLHTYGLLSKAFQPDLAIRRLRALTRQRAELVCCGAAHQNHMDKALVSMNLHLSLVVSNIVGDTGLHIIEAILEGQRDPQELVKLRDARCKKSTVAEMEAALKGTYDEEQLFILRQSLEAWRFYQKQMEQCDQRIEQALAAIPKAPPALQTAPPKPVPTDPEAKATQRPKRPLKGNNAPTLDFSQALVRICGVDLMKVCGLNLLSVLMLIGEIGVDMSRWRSARAFCSWLGLCPGAKISGGKVLSRRTRQVNNRAATILRLAAWAAGRTDTWLGRFYRRIKARRGAPKAVTATARKLACVIYHLLKYQEEFVPVDILLYEVKAQDNRLRRLRKEAEAMGFDLVELQKVA

SEQ ID NO: 64339 - protein, 343 aa, unidentified
MNHSVGIDVSLELSSVCILDATGKIVKEAKVASEPGALTTFLTRLNLPLTRVGLEAGPLSQWLHAALVKAGFEAVLLETRHVKAALSAMIVKTDRRDARGIAHLLRMGWFRPVHCKSAPAQEVRALLVARKQLQAKMRDVELSLRGLLRGFGLKVGAISKGQYATRVRTLVAGHAMLEQIAEAMLHAREALRTEFSKLHRAMLAIARADEVCRRLMTVPGVGALVAVTFTSGVDAPERFARSRAVGAHFGLTPKKYQSGETDITGAVSRVGDVMVRTALYEAAHILLTRAVRFSSLKRWALEVAKRRGMRRAKVALARKLAVILHRIWVEGTTFRWGREVTAA

SEQ ID NO: 64340 - protein, 346 aa, unidentified
MKTLYQTKRLFGAFDLHSNNSYLAIIDEEDNRIHKRKLPNSPDVILAELEPYKNDIAGLVVESTFNWYWLVDILMDEGYQLHLANPAGIQKYKGLKHSDDNYDAFWLAHLLRLGILPEGYIYPKNERPIRDLLRKRGHLVKLRTSLINSLQGIIQRNCGHKLSANKIKAIKVDNVTPLLEDNIDLALSGSISKETIDFIGFQIRKVEKVVLDRVKLREEFIKLLTMSGVGKILALTIMLETGTINRFKTVGSFTSYCRKVPSGWTSNDKKKGKGNVKNGNKYLAWAFSEAAEFARRHDDHSRAFYNRKSTKKNFMVAHSALAHKLARAAYYVMRDQVAFDPQKLFT

SEQ ID NO: 64341 - protein, 399 aa, unidentified
MNEVSTVGVDLAKNVIQIHGVDCDGNVVVRRQLRRGQFLTFFEERPACLIGIEACSGSHHWGRQRQEMGHAVRLMPPSYVKPYVKRNKTDAADAEAICEAVTRPSMRFVPVKSEADSAALVLHRARDFLVGQVTQTGNAIRAHMAEFGIVTAKGSKRVASLAEELDALPEAARLPLRVLFDQLAETQSRIEQLTDEIKEVHRHNEVSRRLASIPGVGVLTATAIAATTPDVSNFGSARDYAAWLGLTPKQHSTGGKPRSGGISKMGNRYIRRLLYLGAMAQIMVRRRSRHMGTDWLSRKLATKETRVVAIALAIGKLIEIAGNPRLPQQSQCLSRCLLFLNLIRWTGLSQLGILSKDTSPHISTECHARRELFQPCPFMGRQAQGERRQCGTRLLLGRF

SEQ ID NO: 64342 - protein, 338 aa, unidentified
MTVVTVGIDLAKNVFAVHGVNAAGKAILVKPLVRRAKLLELIATLPACLIGMEACSGAHYWAREFQKMGHTVRIMVPQLVSPYRMGGRHGKNDAADAAAICEAVARPNMRFVPVKSIEQQGQLFVHRAHQSYVSERTTLINRIRGLLSELGIVLPQAFKAFLSGVAQVLEDLPGYCNQVIGDLLNELFHIEEKIKNSEKLIQQLARDNSAAQLLMQFRGVGPMTATAIVASIGNGHDFRNGCQFSAWLGLTPRQQSSGGKARLGRITKAGDSYLRTLLVLGAKSVLLGAAKNDDPVSKWALQLKERQGYGRALVAIVAKNARMCWAMLHLKDEFRFPS

SEQ ID NO: 64343 - protein, 362 aa, unidentified
MMMTTAKTTAATDTILAIDLGKYKSVACHSPVLNEQSFVKFATTRAELTKLLDKQRPDVVLIEACLLSGWVHDLCTEKGIRCLVANTSSEAWKFKHLKRKTDRDDALRLVEIYRLGKFPTVHVPPKEVREQRGLIEMRQKLVGRRVALQNRIRAILVGQGLPAPRGARAWTVVGLVGIAQYAQPIAECAALELWRGRLHLTLTELAHVRELLVQAEKKLDALTKDNEAVQLLQTIPGVGPRTAEAVVAFLPKPELFRTSKQVSAYGGLVPRQYQSADTDHRGRITKRGPRTLRKLLVECAWVMLRYNAWARKVYRRLTHGGKTRKKQAIVAVARKLLVRCWAMLRDGTVWREDPTPAAAATT

SEQ ID NO: 64344 - protein, 359 aa, unidentified
MAVIEGQERRIVGGVDTHKDLHVAAVVDEQDRVLGTRSFATTRQGYRQMLAWMRSFGELRRIGIESTGSYGAGLLRFMQQAKVPVLEVTTPDNQDRRRRGKNDDLDAQNAAHAAFAGQRTVTPRSRDGMIESLRILMACRKTAVSARRVALQMIQNTIVCAPDGLRDQLRSLTRMQLVRTVASWRPDLTAYRDLDSAYRIGLKSLARRYLELHDEIADLDAMIAAIVDELAPNLVARNSIGHVGAAQLLLTAGDNPERLRSESSFASLCGVSPVPASSGKTVRHRLNRGGDRAANSALHIIAIGRLRTDQKTKDYVARRIAEGHSKLDAIRALKRYLAREVFTLITQRRREINATQIAA

SEQ ID NO: 64345 - protein, 358 aa, unidentified
MTICIGIDVHKKKCVATLKRDSQIVEQTSFYNNGHGIKEFIEHIKLYGESAIAVCESTGNYWIRLHDILEDNGIDTVLANPIKTKIIAQAKLKDDKIDSNVLADLLRADLVYRSFVPDKEHRELRQIVRTRVDLVATKTSIKNKVHAILAKYDYSCPTNDIFSQKAIEWLKTEELSWIDRMAVDAYLETMFGIEKKIKIFTAKIASISKEDERVRLLMTIPGIDYITALTIVSEIVDIQRFSTPWKLVGYAGLAPSKRESGTTHRIGDSRRITRQGSRWIRFTIVESATTAIRYDNRISKFYRRIALRRGPQKAKVAAAKEMLVIIWHMLTKNQPYRTMNNDLVQRKYKRMERESALA

SEQ ID NO: 64346 - protein, 350 aa, unidentified
MIIIGCDYHPGFQQIAYVNPDTGELREVRLGHKEQAEQFYHDLSQRDVPVRIGMEASGHARWFERLLNELQFELWIGDAAAIRTKRVRKQKTDRQDAQLLLRLLLEDRFPRIWVPDAENRDLRQLLWHRHRLVQMRTRVMNQLHVVALNEGLRRKKALWRPAGRAELESLALAPWASRRRQDLLEVLDQLTPKIHELNGKLEQIVEQRPVTRQLSTHPGVGPLTALAYELVIGTPERFACAKQIASYVGLVPSEESSGDRRRLGHISKQGNALLRFLLVEAAQVTVRSQPQWRSQFFHLAMRRGRKIAKVAMARKLAVELYWMWRRGWDYEEIQQLGSHAGEPGNPHGVQ

SEQ ID NO: 64347 - protein, 466 aa, unidentified
MMTKQVEEILDEPHEQIVQRVCAVDVGKDSGTVCVRVPAASGTGRRVSKVWDVPARTGAVLGLAAQLSDQGIEKVTLESTSDYWRIWFYLLEAHGLDVQLVNARDVKNVPGRPKTDKLDSVWLAKLTEEGLLRPSFVPSAQVRQLRDYTRMRADLTGDRTRYWQRLEKLLEDALIKVTSVASRIDTLSVRDMIEALIAGQRDPRVLAGMARGRMRLKYADLVESLTGQFDDHHAELARMLLHQIDTLTDQIDVLTARIEALLARLPAGNTPDPDRPAPDGQARPGTGANAPADEAAQRRKPPTAADMIKILDQIPGIGPSNAQVIIAEIGLDMSRFPTAGHLVSWTRLCPRTIQSGKRSTTGKTGKGNRYLRAVLGEAAATGGKTQTFLGERYRRLIKRRGKLKTIVAIARSILVIIWHLLANPGTTFHDLGVDFNDQRIDIGRRTRNHVRQLEALGFNVTLTAAA

SEQ ID NO: 64348 - protein, 473 aa, unidentified
MARAARRPGARQYPKRRSSRGRSAPFEQMHLNAAGIDVGATEHWVAVPEDRDEEPVRRFGAFTAALYVLTEWLRQCQIETVVMESTGVYWITLFEVLEERGFDVKLVDAHDARQVPGRKTDVKDCQWLQELHTYGLLRGAFRPEDQICVLRSYLRQRSMLVAMASRAVQHMQKALEQMNLKLTEVVSDINGKTGMEIIHAILAGERDPQRLASHRDRRCKHDQATIAKALEGHWRAEHLFALQQALEQYEFLQQQLQACEQQIEACLQTFVTHVEVEPPQPTPACKRRARQRQAPSFDVHQYLDAMTGVDLTQIDGIDALTALKVISEIGLDMTRWPTGKHFASWLGLCPGNKLSGGKRYRMRSKPTANRAASALRLAAQGLVNSHSALGAYYRRMRARLGAPKAITATAHKLARLVYSLLRYGTAYVDAGQQAYEQKYRDRVLTNLQRKARVLGYQLVHVEDTGRVQAAATL

SEQ ID NO: 64349 - protein, 314 aa, unidentified
MSSLVFVGIDVSQGCLDIAIRPGASFSLPHEESAIATLVEQLCALGPTLIVLEATGGMEIPLTSALATAGLPVVVVNPRQVRDFAKASGHLAKTAALDAQVLAQFAEVMRPQPRPLPDAEARALAALLIRRRQLVEMLTAEKNRLLSAPSPIRTRLRTHITWLERELQSTNTALAEAIRQSPVWREKDELLQSVPGVGPVLTSTLLASLPELGTLTHKQIAALVGVAPLNRDSGTLRGRRTVWGGRAQVRAVLYMGAIVAARFNPVIRVCYQRLQRAGKAKKVALTACMRKLLTILNAMLKHRTPWREVEAHHA

SEQ ID NO: 64350 - protein, 346 aa, unidentified
MKTRPDVTTIGLDIAKSLFQVHAVDAEGAVVVRRQLKRARVAAFFSALKPCVVGIEACASSHHWAREIGALGHQVRLIPPAYVRPYVKRQKNDAADAEAICEAVQRPAMRFVPVKSQQQQAGLVLHRTRHLFVRQLTAVVNALRAHMAEFGVVAPKGRLGVAQLVAIINDDKDARIPWFARACLMALSVQLGVLQQQLQILDKRLERWHRGDGTCKRLDAIPGVGPALATALVASVPDARAFRCGRDFSAWVGLVPKQNSSGGKAKLGSITKQGDRYLRSLFCAGALAVIRSVQIHGNTHRPWVARLLERRPAKVAAIALANKIARMAWAVMAKGEAYREPVALAR

SEQ ID NO: 64351 - protein, 389 aa, unidentified
MKIYVGIDIAKLNHFAAAISSDGEIILEPFKFTNDADGFQLLVSKLESFDKNSIIIGLESTAHYGDNLVRYLVAEFYQVCVLNPIKTCQMRKNNIRKTKTDKVDTFVIAKTLMMQDDLRFVSFYDLDMMDLKALGRFRQKTIKQRTRLKIQLTTYVDQVFPEIQYFFKSGLHQHAVYALLKEAPSPKEIASMHMTHLANLLKVNSHGHFTKEQAKELRVLAQKSVGANDSSISIQITQTIQQIELLDSQLEKIEAEMTDIMKFNDSVIMTIPGIGYINGGMILGEIGDIHRFSNPNKLLAFAGLDPSVYQSGNFQAKTTRMSKRGSRVLRYALVNAAWNVVRNNATFKAYYDAKRAEGRSHYNALGHCAGKLVRVIWKMLTDEVEFNLN

SEQ ID NO: 64352 - protein, 442 aa, unidentified
MDDNVEEIDADENEEVLERVAAIDVAKASGKVCVRIPGAKRRITKVFDVKATTNAIMALADELSDLGVERVVLESTSDYWRPFFYLLEARGLSVWLVNARDVKNVPGRPKTDKLDAVWLARLNERGMLRPSFVPPAEIRELRDYTRLRAELTKERSRHKQRVEKLLEDALVKISIVATDIFGKSGRAMLEALIAGERDPEVLSELALGKMRPKRAALREALTGHFDAHHAELARMLLDQIDGLEEQIERLSARIDELVEKLPGAQAPADPTTGEIGGSGGLPVLSRLDEIPGIGPHAAQVIIAEIGLDMTQFPTPAHLVSWAKLSPRTIQSGPRSHSGGTGKGNPYLKGILGEVASAAARTDTFFGGRYRRLVRRRGRQRALVAVARSILVAVWHLLDDPSVRFVDLGPDFYERRINKDRRTHDLIRQLQALGHQVSLSPAA

SEQ ID NO: 64353 - protein, 368 aa, unidentified
MSEITTAFIGLDVHKDSIAIAVAVPGRAPPRFLGTTGPLLAEVEKALSHCGTPPQLLIVYEAGPCGYGLARQLCARGYRCEVIAPTLIPRKPGDRIKTDRRDALALARFARAGDLTPVVIPLEPDEAIRDLSRAREDAIRARLKARQQLKAMLLRHGQRYTGKSSWTAAHERWLAGVRFAHPAQNIAFVEYRTAVSEAHERIERITAALRDQVAEWRLQPVVAALMTLRGIDLIAAVTLIAELGDLTRFAHPKQLMAFLGLVPSECSTGESRSLGSITKAGNSHARRVLIEAAWAYRFPAKIAREMQVRNESQPRALREISWRAQLRLCQRYRRLSARGLHQNKICTAIARELAGFIWDLARQATVRT

SEQ ID NO: 64354 - protein, 357 aa, unidentified
MKIVGCDLHARQQTLAMVDTEGGEFTEKTLFHEGNAVREFYAALEGPVVVGIEATGAMQWFLELLEELGIECRVGHPAKIRAKETRKQKHDRRDARLRLELLLEDRFPQIWMPSTEQRDLRTLLRDRHQWVKMRARLQHTLQAIALNHALRKGRALWSAAGQGALEALPLPPYTGQRRTELLSLYVELQKRIQELDKEVEAQARQRPQACRLLTHPGVGAVTALATEVFLGDPNRFATGNQVASYIGMIPCEHSSGKRQRLGKLTKEGNSLLRYLWTEATMHAVVKDAELKRFYRRKLIQKGMGKARIAAARKLGIRLWIMMRDQIGYEEFCRRGKLRQEGKAHAGMPDFNSGPALQ

SEQ ID NO: 64355 - protein, 406 aa, unidentified
MDLAPLHKRVIGLDVHQAQISACAIIEEPDGTTRLEQRQFGAFKRDRRALAEWAQTLRPDRVVMESTGIYWKSPYAALEAVGLRAWVVNARHVKNVPGRKTDIGDAHWLATLARAGLLRASFVPSAAMRELRLIARQRQKLVGHLASEKNRLHKVLTDGGIRLGVVVSDLHGQSARAMVKAIVAGRPAHEVLDCASRRLKTSREELFDALQGELSASHRFVLHELLQHIEEIEARIARFDACLLDGLADERNTLALLQTLPGVDLIGAAMLLVEIGADMDAFGSADRLASWAGICPGNNESAGKHKSGRVRKGNPYVRRLLCEFAHAASRTTSVFKSKFQALVVRRGHKRSIIAIAHKLLRTMFFMLKRREHYRDSSTDYEALAVQRNAPRWIKALTKFGFIPSPT

SEQ ID NO: 64356 - protein, 353 aa, unidentified
MTTQCAIDFHARSQTIRWRTEADGEIHSVLLNHETDDVRAFYASLPKPVIVGLESHGYTGWFEQMLSELGITVRIGDAARIRACKTRKQKNDDRDADLIFELMTTERFPEIYRPTPESRTVLQQLRFRNNLVRARTRIANSLVAIALSCGAVRRFSVLTTKGRRRMAALKMSEEQAWQRDRWFEFLDGLEPVITEVERKLEAEAKKDPRVCRLMTQKGVGVLTGLALVHVLGPPERFATSRKVAAYVGLDAVESQSGQRRHIGRISKQGSRLLRFLLVEAAQTSARCDPELKAVYERLRRKKTHATAKVAIARRLLVRSWILLRDQIDIDEFRRRGRARCGVKPGQPEETHGL

SEQ ID NO: 64357 - protein, 343 aa, unidentified
MLYAGVDAHRTAMHVTIMDEAGKVLARKRVPSSSDELRKLFVNYREPIKAVVEATYNWGPVYDWLDEIVDDVILAHPTKVRAIADARIKTDTIDSRTLAHLLRADLIPEAYAPSKETRAIKRVLRQRMFFVRVQTMVKNRVHALLAQHAIELPDMTDLYGKAGRAWLRQLTLPAPDGQLLRDDLSLLATLRERIIATDHLIAQLVKGDEIVTWLASLPGIGPFFAVLLRHEVDDVTRFRTAKRFASYTGLIPSTYASNTRVYHGRLTKQGNKWLRWAFIEAVAPALRASSSLRCYYDQIKARRGAHDARVCTARKLAELAWTVWTERRCYEDRSARPTAMAAS

SEQ ID NO: 64358 - protein, 401 aa, unidentified
MPTVRENGTRIKRFRELKATLRTDRTRLLVGLDVAQAEHVVHLRHAHTRIVVPTLTIPNTTRGFTALWARIQQAQRTTGCREVVCGLEPTGTYHHAVATFLEAQGADVVFLSSSVAYWNRRTQDGTWDKNDPKDAANGADLLEQGKVLFYRQPTGPLAELRHLVRCLRRVRTELASCKARWRTTLRPALAPLGESLPQRLWAELPTVLQPWERAAPGRPAVPKGRLPLGLATACADLGTQVTAVQARIAAIEQALTPVAERLPAYALLRSIPGVGATVAAVLLAEIGDIGWFTKFSQLRKLAGLDIVRVQSGQFAGQQRISKCGRGLLRWALYHAAVGVTRTVAGRARLAALKAKRRGDRFAGFKALVELAAKQLRVIWGVWRSGTPYDPTRAGGLRRPVR

SEQ ID NO: 64359 - protein, 385 aa, unidentified
MQRLDDLSRSLTALNPDSTLIAVIEMSQSSWLVAGIVPGIERHPLKKLEPNEGELLRLLVRWRAEATKMGSTITRIAVAYEAGRDGFWLARWLRARDIETYVVHPTSVAVSREHRRAKTDRLDTGLLKRVFIGWLRGEPDHCHMAAIPTLAEEDAKRPNREREGIVRERTRIVNRMKSCLARFGIRNFKPTLRKAPERLATLVTPEGVHLPPNTLHELRRDMARLRFVMEQIKEVEEARAQRLEQAPQENTHAMVRLLASVIGVGIETADMLVHEILSRSLRDRRAVARYAGLTGAPDESGSKRREKGLAKAGNARVRRGMIQLAWRFLLFQKDSSLAQWYRTRTEGSGKKRKTMIVALARKLLIALWRLVTTGEVPAGVVLRAA

SEQ ID NO: 64360 - protein, 339 aa, unidentified
MNEVSTIGLDIAKQVFQVHAIDGRGAAVVRRALRRRQVLRWFAELPRCLVGLEACATAHYWARELAKLGHEVRLIPPAYAKAYVRRNKNDPADAAAICEAVGRPSMRFVAVKTEQQQAAVGLHRVRDLLMKQRTMLRNQLRSLMAEFGVVAPKGRRGLSELLSILADGEERRIPSPLRASLLLVADTLRGIERRLEVIDEQLVAAGRADPSYRHLITAPGYGPILSSAMSAIVTDPAAFRRASDFAASLGIVPRQEGTGGKVWLGPISKRGNGYLRRLLVNGATAVLNSKRAKDDPWLARLLATKPRKVVAVALANKMARIGWALMMRQEDYRTMPAAA

SEQ ID NO: 64361 - protein, 355 aa, unidentified
MTSTKYIGLDVHKESISIAVMNSVGKVVMECVIETKASTILQFIDGLRGDVRVTFEEGTWAAWLYDLLKPRVTEVVVCNPRKAALLKDGSKGDRIDAYKLAELLYMNSIKSVYHGEHGLRTMKELARSYLTISADLTRVMNRLKSLYRSWGIPCAGTEVYAPRYRAEWLGKISEVGVRQRAEHYYQQLDVMHLLRQKVRKDLLAESRKHKAWKLLRQIPGIGPIRAAVLIAVVQTPHRFRTKRQLWKYSGLGLETHDSAQYHAVEGELRRSKRPATVRGLNKDHNHDLKDIFKGAAMRASTAAGPLHDFYENLLAKGRKPTMARLTLARKIAAITLIVWKKEVRFDANYLKQQAA

SEQ ID NO: 64362 - protein, 342 aa, unidentified
MQMTTIGLDIAKNVFQVHGIDASEKVVVRKQLRRGQMLAFFEALPPLLVGLEACATAHYWARELTKLGHQVRLMPAKDVKAYVKRNKNDAADAEAICEAVRRPTMRFVQVKSAEQQSQLMLHRTRDLLMRQRTQVINALRAHLGELGITAAQGKAGLTELLAIIAGSADERLPTEAHASLMVLAAELQAMRTLIASIEKRIITHHRSDEASKRLRSIPGIGLVGATAIVATITDPKAFRSGRDLAAWIGLVPRQDSTGGKHKLGPISKQGDRYLRRILVVGAHAVLKLVRQKPEKYPWLTQLLARKPFKVVAIALANKMARIAWALLVKGGPYRARALVATA

SEQ ID NO: 64363 - protein, 339 aa, unidentified
MESFVGVDLHKKVSQLAALREPKPASQLRFPNNTVTVEKVLKKLPQGSKIALEATGSWWWFVELAQKTGHEVVMSHPKQTKAIASARLKSDKVDALMLAKLLKADLLPTVWIPPATQRYVRELLTHRARLVRQRTAVINEIHALYAKRNIDPGMIFHRVRPPAFMAKELSGYGSRIVEEDAELLAFFNRQLRGLDNELQKIAEEDVESKRLMTIPGVGPLSAVAVNCWIGTIERFSKAKKLSSYFGLAPRVRQSGDRERHGHITKEGNRMVRSLLIQAALWHIRLGKGASRKHYLGVLKRRGKQIARVAAGNKLLGIMFHMMKGRIDYQEFLRRGSSAQ

SEQ ID NO: 64364 - protein, 321 aa, unidentified
MDKYTEIYGVDISKEVFDVYGKEAGHLQFKNDEKGFLSFMKGLLKGSLVVMEATGYYHYRLAQYLYAKGVLVSVVNPLSVKRFVQMKLAKIKTDKSDAKAICEYAQNNDVPLYSALTNVQSECLQLFRLLENYLKTRTAIKNKQHGEEVLGIPSEFVYRSLKRNHHHLNKEIGAIECRILELVKEDQQHQLTLIKSIPGFGIKTALFLIVVTDGFSKFETASQLCSFAGITPTIRVSGSSVRGRSRISKVGNKNLRKLLFICAFSASRHNKACREIYERIVNKGKSKKLALIAVANKLLKQAFAIAKSGRPYDEGFVSKLT

SEQ ID NO: 64365 - protein, 353 aa, unidentified
MTSQQNSFANVATIGIDIGKTTFHLIGQDRRGAIIMRAKLSRTQLMRRLVNVPQCVIGMEPCAGAHHIARRLSELGHDVRLVPAQYVKPFLKGHKNDYRDAEAIAEAVQRPTMDFVAIKTPEQCDLLSLHRVRSRLVRQRTGTINQIRGLLLERGITAPRGPAPLRKALNEIFAEPPADLSSRMLCLIGDLALDWRTLDARVEAVSREIEMLAENDEACQRLMTIPGIGVIISSAVVGAIGNGGAFKQGRDFAAWLGLVPKQDSTGGKTKLGGLSKRGNKYLRTLFVQAAHIVLIRKPAAAQRALWSWIERASQRLPHRNLLAIALANKLARIAWAVLARDHDYHPTANTDAA

SEQ ID NO: 64366 - protein, 344 aa, unidentified
MDHFAGLDVSVNETSVCIVDDTGRIVREAKVASEPDALLQVLTNGAYRFKRIGLEAGPLSQWLYSAFAEAGLPVICVETRHMRAVLKAQINKTDRNDARGMAQMMRAGLYRPVHVKTLRSQKLRTLLTHRKLLQSKAIAVENDLRGTLRNFGLKVGMVGTAKFEARIKALVENLPDLAVLVEPLLIVRRVLREQITVLHRHVLAIVRDDEVCRRLMTVPGVGPVVALTYRATVDVPARFRNSRAVGAVLGLTPCQHQSGESDYSGAISKCGDEMMRVMLYEAAQILLMRSTKWSWLKAWAMQIARRRGLKKAIVALARRLAVIMHRIWVDGTEFCWTRREAAAA

SEQ ID NO: 64367 - protein, 424 aa, unidentified
MKNTAARKRKQIPEGYLVVGVDPHKKRHAAVAITQDFTAQAKFKVENTREGLETMLDRARGEMVKCGCRGAIFAIETGGHYWRNIAYYLDERGIPFRFINQYTLKRRREGKDLNRRKNDYRDSEVAAQLLCTGEFVESVIPQGVYAELRSSHNAYARLVKERTRITNLMKGLLDALFPEFTRVFKDPGGLTALTVLSTCPIPGVIAGMTEDEFMATIEARHNGRRLMRKKLRALHYSAQTSIGIDAGARSMSSEIAFLVDKLELIKQHIRIMEGILAKLVDETEEGKYLLSIRGLDYIAVAGLLAELGCFKLYRSAKQMIKMAGSNPTESESAGKKRSKTPMSKQGRPLLRHCAWTAVIPMLRFNADFRAWARQRRERPAHANPLNGREIVGAALNKLLRLAFALVSNQTYYRDTRPALIPVGV

SEQ ID NO: 64368 - protein, 361 aa, unidentified
MKKPAQHLIAEVPCRQAKVEITIGIDLGDVWSHYCTLNQDGLVVDRGRFRTTPKAIEKWFTDVAPARIAMEAGTHSIWISAQLQELGHEVIVANVHQLRAISHSDRKSDQVDAEKLARYARLDPNILRPIAHRTVQQQEALTLVRARALLVRLRTAAVNAVRGLTKSCGYRMPASATTCFAQRSLAVMPPGLAQALGPVLQQIAEMTIKIKQYDRQIQQLGQTEYPETQALLKVHGVGHLTALTFVLTLGSKERFGRSRDVGCYLGLRPRRSQSGDHDPQLGITHAGNAYLRSLLIECSNHILRPHGRDSALRQWGLHLAARGGKQAKSKAVVAVARKLAVLLHHLWSTQEPYMPFYEQAA

SEQ ID NO: 64369 - protein, 375 aa, unidentified
MYPWARYRRTFQVFTIRNNSDGYGELFHKIESVSKDKSQIKIGLEATGHYSYNILGSLLDHGYHTFVINPLHTNLYRKGQSLRKTKTDKVDARSIAEMLVTDKTLKPYTGTSYHSEELKSLTRYRFELVKERAKMKTSVSRLVNILFPELESLVPTLHMNSVYRLLQELPGAYFIASSNLTHLKALLADASKGRYGREKAIEIRETAKSSIGSLMPAKSMELRQTIHRIDTLTSDIKEVEQSIQKIMDECGSPITTIPGIKYRMGAMILAEIGDFTRFSNADQVLAYAGLSPSTYQSGKLISSYARMEKRGSKYLRYALFNAAIYVSGWDERFRIYLSKKRAEGKHYYVAISHVIKKLVRTIFRMEITHTSYQPL

SEQ ID NO: 64370 - protein, 516 aa, unidentified
MTPLAARLGGVSPFGRLISILPSRACGLLFDRGKAMPVRKSKGPSKKAKSRGARKPTGLEATLRPHAAGIDVHSREHWVCVPESETQKVDAPPPAGRLPVNVRKFGTCTVDLEQLADWLDECSVKTVAMESTGVYWIPLFELLERRGFEVFLVDPRQTRQVAGRPKSDVHDCQWIRRLHACGLLAASFRPADEVCVLRSYLRQRQGHIADAGRSIQHMQKALQQMNVKLTEAVSDITGATGTKIIKAILGGMRDPRALAKFRDPQCQQSEEQIARALQGNWRDEHLFALRQAFESYQFQRRQMAKCDEAIEKYLKTLEDKSGGEILKPKRQKHRKADSTALRFNARQLLFQFSGADLTVIEGIDLNTALPILAEIGTDMSKWATEKHFTSWLGLCPQHRGSARRIKDRRIRGGANRASRAFRLAAQGCHHAKNAMGAFYRRIRARAGGSKAVIATARKIACRVYRLLKYGEKYVRQEMHAYENAHRIKLTKGLARKAAELGYKLVPTEAQLPVSTA

SEQ ID NO: 64371 - protein, 338 aa, unidentified
MQVTTIGFDIAKCAFQVHGADRQGRAVLKRKLARSKVLVFFANLPPCLVGLEACGGAHFWARQLTRLGHEVRLIAPQYVKPYVKTNKHDAADAEAICEAVQRPGMRFVAIKDEHQQSMLLLHRIRDRLVAERTAGINAIRGHMTEFGMVTAKGQAGLVELRSIIADPDDARLTPLARELLTLAVAHLRSLEEKIVDLDRQVGRLAREDANCRRLSEIPGVGPIVATGVLATAGDLRLFDSGRSFAAWLGLTPRQHSTGGKQRLLGISKRGDGYLRRQIMHGARSIVSLARGREGKLWSWLNALLARRPFNTVVAALANKLARVMWALLVRDEPYRAAV

SEQ ID NO: 64372 - protein, 329 aa, unidentified
MNDAHASTFSDSSVFVGIDVSKKKLDVCLLAGKSKQLCSFDNTIGGVASLIDRLRAHPVRLIVLEATGRYERRCGVELMTHGFEVAIVNPRQPRDFAKCQNLLAKTDTIDAFILASFARVIGPRPSSLPSANQLLLDEMVARRRQVVQMHAQEDNRLQQAFEKKIQASIKRMMRLLDQQREDLDREIATLIDRDDDWRSKLELLKTVPGVGDVTASTLVAELPELGRLNRQEIAKLVGLAPMNHDSGTMRGQRHIQGGRSSVRCVLYMATLTARTFNPLIKQMADRLTRAGKPFKVVMTACMRKLLTILNTMARTGEKWRTPCPAIQTT

SEQ ID NO: 64373 - protein, 343 aa, unidentified
MTKLNVIGVDLAKSVIQISVLSPSNRELRNSALTRRKFAEFLGSQRPSLVAFEACATSHYWARVAQRHGHRVKIIPAKAVFPFRQGHKTDENDALAVAEAARRPNVKLAPLKTVEQQGMQAIQRSRELLVHERVALSNHIRGLLMEFGIVIPQGFAALYRQLPEILEDGENELPDLYRPTLNLLYQRLSDLRSDLEQLNDAIKTLVQHHPVCRRLTALEGIGPVCSVLLYATLGTGEAFDNGRQFSAYLGLTPKQFSSGSKVNLVGISRRVANRRLRAILIQGARAYVYRMKEPKTAKDRWLWAIVERSGKCKAAVALANKNVRTTWAMLTQNTEYQRYPLAA

SEQ ID NO: 64374 - protein, 333 aa, unidentified
MEVKINMPKYVELDVHKQTCHATVINERGAIIKQKKFLNRPKELEKFFDDIEDAKVAMEAGYCWQPVYERLENKGYEVRLAHPFKTRIIADAKIKTDASDSEALAQLLKLDWLPTSYVPTGEIRELRELVRLHVYLVRERTRFKNKVRAEMSKRRIEIAGDPFTKRRRSQLKEAENRAIDNYLEIVVSLDERIKELERELKVRAQENEEAKLLMTIPGVGYFSALAILAEIGDIDRFPDAEKLCSYAGMVPSLHQSGATMKSGRITKQGSALLRWILVECAWMHIRNAGDTRLTRFFYRISKRKGRAIAITATARKLLVAIYWMLKRREEFRA

SEQ ID NO: 64375 - protein, 352 aa, unidentified
MKTYYVGMDVHQASIVIVVLNGAGKVIEASTLKTGASAVRSYLKRLKGKVYVTFEEGTQAQWLYEVVQPLVSEVIVCDPRQNRLLASGNKSDRIDAQKLAELLRNGSLKAVDHRDHGVRMLKELVRNYECLVRDTTRVMSRLKAIYRSQVIACKGHDIYRPDRKTKWLGKLKEPGQKARAGFLYEQLAALRPLRQKAKLTMLREARRQAAYGWLLSMPRLGPVSVAQLLAIVGTPHRFRSKRQFWTYVGLAVVTRTTGDQEVVNGVLRRSRRPIATRGLNRNHNHLLKRVFKMAATSACHSGPFAAAYEARVKRGMDPALARLTIARQIAAITLSLWKRGELFQVERMKLAS

SEQ ID NO: 64376 - protein, 343 aa, unidentified
MVHYIGLDVSLKKTSICVVNQAGSVVREGVVDSEPEAIAAFVRSKAPGAVRVGLETGPTATWLWSELKQLGLPVICIDARHARAVLKMQINKSDRNDAAGIARIMQTGWFKEVRVKGLDSHSVRALLASRALLVKIKRDLENQIRGLLKNVGLVIGRAKFNVFVVRAEELIEDRPELIAVVGPLLKARQAIEQQTDDLDRKVLKLARYDAQVRRFMTVPGIGPITALCFKATVDDPTRFKRSRSVGAYVGLTTRRHASGEIDWTGRISKCGDAMLRSYLFEAAGVLLTRVPKWSALKAWGMRLAKRNGLRKATVAVARKLAVILHRMWIDRTEFNWSKKEVAA

SEQ ID NO: 64377 - protein, 338 aa, unidentified
MTIVMGLDQHRAQITAEWLDTETGEVARKRIAPADRIGVRRFAAGFRGQGLEVALEATTGWRFVVEEFQAIGAKLHLAEPAETAARRGTKKRAKSDRADARHLRELLMVGRLPESWIAPEHLLELRARVRLRHTLVDQRREWQQRIQATLYHHGVPPRSWLLGTESRAWLAGLELPPAAREQITIALSLIDAHNAQLGPLDAELRGYAKRQPGCRALMRHYGIGPLTSVTILAELGDARRFSSSREAVRYSGLDITVHQSAARRAPGRLSRQGPPALRWALFEAAQCARRPGSPDHDYYLQTAARLGGNRACLAVARKLLKRSYHTLRELGQEALQPA

SEQ ID NO: 64378 - protein, 442 aa, unidentified
MRTIGLDLSIKQPSEAIVAGHDGSFIGSSFKIDETAAGLKSLMERVCKGDADDESLRVIMEPTANAWLPIAIYLSHREVTCHLVQSEKAADLRAFYRKHAKSDRIDTRVLAKIPFVDEEGLNSLYLPTAEEQALRRLSRQREKLVSQASAIKNRLHDLDRLAGWDKALRSAFGSPFSEAARSFRRDLYDPWKVRELGIKGLETYLVKLTGKKDCRSTAEKLYRVSLAIIELYSPPGKDVSPYLDFEMLCFEAQIKQERLLKLEELQEKVNEQIQRISRRSRSVELARSLMGIGEKGGPVLASYVGNPHRFNQNTFRGWHGMIPGSKQSSNKDQKGVSMTKAGPNLVKKFAYLCADVARQWDPQIAHIYWDQMVNKGKHHTQAVCACATHLLDRLLAVLKEDRPYELRDCAGNPITSAEGKRIIQEKYQVPEEVRQSRRARNP

SEQ ID NO: 64379 - protein, 329 aa, unidentified
MTKSYIIGVDVSKETLDIHCYSHYESVSIVNGPSGFSKLLKWISKKVCEDISSVMVVMEYTGIYTYQFEKFLYAHCVDYVKCSALDIKRSAGIKRGKSDKADCKMISRYGWQRKEELSVMKPLSKNERDLQQLMAHRDKLVGDKASYQVRIKELKEQMGSDMNEAILASTEQIIQMLSEQIKVITSEIEKLIESEEELLTTYSLLKSIAGIGFATAVHLMIATENFRRFTNPRKLACYSGVAPFENSSGKSIRGKTKTSHLANKKLKSLLTMAAISAIQHDPDLKAKYQQKLKEGKAKMCVLNIIRFKLIERAFAVVKRKTPYELRLAA

SEQ ID NO: 64380 - protein, 392 aa, unidentified
MYIVGIDIGKNHHEASIVSPEGKQIGRSLRFATTHKGADSLMRFIFKNIGNSPCVFGMEATGHYWYPIYSFLKAKGYTIYVINPIQSDSLRKMYIRQTKNDSIDSFLIAEVIRFGQFTTTSMADENILAMRQLCRYRDSVISSRTEIKLRISTIMEQIFPEYEKQFSSLWLSTSMGILEKYLTPENIENAPIDELFEIIKDKSHNKLTMKKAISIREAAADTFGIKIAQDAFSFQLKQLIDRMNFLDKQIEALDCQILEYYEKFDCYLHTIPGIGMIAAATILAEIGDINRFKSSSALVAFAGIDPTVRQSGEFSSTHNHMSKRGSPYLRHAIFLAATTCSFHNSPLNAYYKKKRDQGKHHLTATGAVARKLTSVIYAVLRDSKPYEPKSFC

SEQ ID NO: 64381 - protein, 352 aa, unidentified
MPMLAEVVEVVIGVDTHKDTHTAAVVTAATGAVLEQVTVPADPDGYQALLDLAGTHPGLRAWAMEGSGGYGAGLTRHLAAAGEVVVELDRPARPARWAGAKSDPIDAVRAARDALARTRLAAPKTGPERAALAAYLTARRGAVEAAATTERQLHALVITAPEPVRTRFRGQSTRAMVTTAARLRPHAATGDVEVHAVLDVLRDLARRVTFLREQAGAHEAAIRSLVASWRPDLLALTGVGPIVAATVLSAWSHPGRCHSDAAFAMLAGVAPIPASSGKTTRYRLNRSGNRQLNRALHTIALSRLRYDERTRAYAERRRKQGKTDREIKRCLKRYIARELYRLLESPTTPATA

SEQ ID NO: 64382 - protein, 320 aa, unidentified
MTAFTPVGIDIASKKFDAAIWIEEKKYKNKVFANTPTGFHAFLLWLAPYGPCHICMEATGAYSLPLATYLYDAGYPVSVENAARIHAFGQSELIRNKTDKGDAKMIARYCHLHKPPEWKPVPVNERKLQVLINRLNRLKEMKRMEENRALTSETIVQDSIQKVIAALDEEIKEIEQTIKKHIDNDPDLKKNQALLESIPGVGEILSTTLLGYVGDMSRFSSNKALVAYAGLNPMLKESGCWKGSTKLSKKGNALLRKALYMPAITALKYNPVVAALCNRLKEKGKRGKCLVCAAMKKLLQLAYGVLKSGKPFTAEIPLAR

SEQ ID NO: 64383 - protein, 345 aa, unidentified
MGHVTRIGMDTSKHIFQLHGVNAAEEPALRKKLRRKEMVTFFEKLAPTVIAIEACGASHHWARLLQSFGHSVKLIAPQLVKPYVKRGKNDAADAEALCEAMSRPTMRFVPVKTAEQQAALMLVGVRDRLIRNRTQLANAIRGYAAEFGLTAAKGKAHLDPLLERIQADESLPALARELFAAQAKEYTQLQAQIDEVDARLMGWHRADECSRRLAKIPGVGPIGAVLLKMKTPEAELFRSGRQFAAWIGLTPKDHSTAGKVRLGVITRAGDEGLRSVLVVGATAVIRHVRRGGRASPWLTELLKRKSPKLAAVALANKMARIAWKLMVTGENYAAKSLPAALAGAA

SEQ ID NO: 64384 - protein, 372 aa, unidentified
MLYAGVDVSKDKVSVAVLTSGGTKLTSGDFDITTEGLKFLELTLKHLKDEISMAIEQTGTYSMPEILYLMERVEGLRIYLVDGLNFNRFIKLEGRKKQDKADAVSLAEYLRRGLPARLITDKDIKAYGLKVLISQREHLLKVKNQIENRLRQLVETVFPDSKTLSKSVFWSEIRKGRAILDWKRLTDKAEVLSTILRERKIWLEVVHSLEETEKEISAFLRTYYPEDLNILKSFGFSETTIAYFISVYVDIGRFKDVKAFKSYMGLGLRIYQSGKKEKNVVNSYTNKYIRKLLYMYVVQAVREKSNHRRVKEYYLRQVEKSGSKKKAIIKTAGKVIEWVYYCLKHKEPFRWEANYETQQEDLSQVNSGQTED

SEQ ID NO: 64385 - protein, 356 aa, unidentified
MPKIKQLSFEGQTIFCGIDVHKKNWRVNIRNEDFELEDYSQDPCEKVLMNHLRKGYPGASYQVAYEAGFSGFGIERSLKKTGVNCIIINPADVPTSDKDKKRKNDKVDARKISRELSNGALQGIYVPTVEMEHARTLVRHRDRMVRDQTRCKNRIWHLLMFSGLKLDIDKPKQYWSRRFIETLRQIPCETQSLRYTLDIAIAGYLQIRKLLSQTTKQVWVLAEEKSFASIQKLLRSIPGIGKINAMIFMTELQDMRRFKTFDKLCSYAGIVPDTASSGESEKVKGITHRHNHYLRTAIVESSWVIIRKDPAMLMLYKRYCSKMVPNKAIIKIARHLLSRIRYVWTAQVEYEIGIVG

SEQ ID NO: 64386 - protein, 347 aa, unidentified
MRKIIVGIDISKEKLNVCLLEGMNIVHEDEIENTVASLRKWFGRMRKFLKCCMDEVLLCTEFTGRYIYPLAIACHEEEVFLWIEDPSRIKNSFGLVRGKSDSVDARRIAEYAFRHQDKAVAYRLPSKELASIKILMTDRELVLSDRKKYEAQLSDQKRFMSKEDYAMQSKMWKSIVKELQKQLDFIDEKIDKLVSASESLSHQVELLKSVDGIGQRIAIAMVVFTDAFTRFDNARQFNCYAGLAPFTYTSGKSIYSKAKVSQRANKQIKALLHLAAVCAATHMKSGDYKEYYDRRVAEGKHPLCVLNVIRAKLVGRMFAVIKRDEQYIKNYDRYSSEKKLSTPVQIS

SEQ ID NO: 64387 - protein, 354 aa, unidentified
MNYVGVDLHKKTIVICVMDQDRKVTARRTFACSQAAEIRAFFAGLRPFRVVVEATASYEWFVAAVEPLADKVVLANPKKLRVIAESVKKTDKLDAQVLAEFLARDMVPEAHRPTPRQREHRALVRHRQYLRQCATALKNKMRRVAADYNADRKDLFSVAGWQSLEEVGLRESDRFVLDQLHAQWRSLEGQILELGKHLKAFAAKAPAREAEARAKLGTIGGVGPVTIDVVVSELGDVDRFHSGKAACAYAGLAPRVRQSGGKGKDLGITKEGSPLLRWALVEAAWRVIRQGASWRRIYEDIKRRSGGKRAIVAVARRLLCVMYAMLRDGKNYDPLKVGEPPASSRPKRPSPVVS

SEQ ID NO: 64388 - protein, 389 aa, unidentified
MGEAIRATVAYLGIDVGKRSHSACGLGEDGEVAFRSDLENRPADIDRLLERAGAGALVVVDQKRNIGALVLARAFAHGNPCAHLPGYAERQARGMFPGVAKTDAIDAEVIARTARGMPGALRPLAEEPEGAASLRILSSQREFAAAARTRAKNRLRATLLEADPALERAVDPSRGWHVAPLAEFGSAAGCSAAGWRRFSAAARRAGAPAAGARAPWESMLASAGSGRALPAGEDVAVRMLARDVAALDADVAELEGLVADSLAGDEVYECLLTVPGIGPKTAAALVTSVDISMFRGHDELASYCGVAPADSRSGTSVRSTSPQRGGNKQLKNLLTFSCNSLIGTQNRFGRYYDECRARGMRHNKALKAVARKRLKVIYAVMRDAVPYAA

SEQ ID NO: 64389 - protein, 356 aa, unidentified
MSNITLLAVDLAKNIFQLHGIDAKGKAILKKKIKSREQFVEFIAKLKPCDIYMEACGSSNYWGRKFIKFGHNVKLINPKYVKPFVKRNKNDANDAEAIATAAEAHNMSFCNVKTEEHQDIQSTHRIRSLLVERRTALANQIRGLLAEYGVVMAKGNAKVRRMLPEILGSNPYDMSALMLSNIDVLYNEFLHLDKQIDIYNKRIEEIFKGNETCQKLATIPGVGVLGATILASILASGSSFKNGRHFAAFLGLTPKQHSSGGKENLLGISKGGDTYTRTLLIHGGRAALLWVSKKTDKRSIWAKNLVMRAGKNKTAVALANKIARTAWALVHENTEYDPNHKPVIRNKPKAKVSKAA

SEQ ID NO: 64390 - protein, 354 aa, unidentified
MLYLGIDQHARQITISLRNENGDVVQARQVSTQPAKINAFFQKLTRERLRNAESFVAVLEVCGFNDWLIRMLQDYRCQKVILIQPEERKKRKTDRRDAGALSELLWSNRARLLQGKPVRGLRQVDISSTTDRDNRRLTTLRKEAGRARTAIINRIRHMIRRHNLQWDLPTKTFPTQQAIAWLKKLALPAVDRWEMDHLLIDLEHAQQRLSELEKVIAERCATSEEAALLASMPGVGTYTATALACRVGRVERFPRSRSLANYWGLTPGCRDSGETRRPGSITKAGSTTARWLLAQMTRQVLRKDAQLREWFKRIKRRRGSSIARVAVMRKLATIIWHMLTKKKTYAECRAVSAA

SEQ ID NO: 64391 - protein, 402 aa, unidentified
MNCVGIDVSKGKSMIAVMRPFGEVVVSPFEVRHTASELSELARLLKNLDGETRVVMESTGNYHAPVAWLLHGAGFYVSVVNAMLVHDYGNNSLRRGKTDKKDAVKLANYGLDHWLTLPRYVPEEDTRLMLKTCYRQYQQYSKVQTMLKNNLISLLDTAFPDANRLFTSPPRADGSEKWVDFVATFWHCECVCGLSKKAFTAKYQKWCRKHGYNFSQDKALDIYASACGRFGVMPKTNTAKLLVEQAISQLQTTSAALAALKQEMQSLAASLPEYPVVMGMFGVGPTLGPQLLAEIGDVRRFHSKKALVAFAGIDAPPYQSGQIDVRSRSISKRGSASLRRTLFLVMSVILQCAPIDEPVYQFMDKKRSEGKPYRVYMMASANKFLRIYYASVKAYLESLEHD

SEQ ID NO: 64392 - protein, 321 aa, unidentified
METTQQTIFAGVDVAKDELEACVMPGEHRITVARNGEGVAKLLDFFKQHGVEGVIVESTGGYDRIVTAACLEAELQTCLINPSRAKHFGIALGLLAKNDRIDARTLALFGDRIRPRAMEKTSEKQQELHDLVTRRRQLVAMQTAEKNRRKQDPAKAAAKSIDTILAALAKQIDKLDAEIARRIEADDSWRDADDLLQSMPGVGKATSAALIAELPELGKLNRQAIASLVGLAPFDHDSGKMKGQRSIWGGRKTVRTALYMAALTAIRCNPTLKAFAERLKNAGKKFKVIVTAVMRKLLVTLNTMLKNNTPWNDSLATEIPQ

SEQ ID NO: 64393 - protein, 369 aa, unidentified
MADRITYVGLDVHKESIVVAVAEGGLRGEVREYGRIANTAAALDRLLRKLGGDGMTLRFCYEAGPCGYGIQRRLSAQGHECVVVAPSLIPKRAGDRVKTDRRDAASLAKLHRAGELTAVWVPDARHEAMRDLVRARLDAVHSLRRARQQLCGFLLRQGCHYGRPAWTKLHRRWLAGLKFDQAVHHLVLEDYIAAVEAAAARRDRLTAQIEAMLPDWNLAAVVAALQTMRGMALVNAATLIAELGDLSRFADPRQLMAYLGLVPSEHSSGASVKRGGITKAGNGTARRLLIEAAWSYRFPARLSRELLLRQENQPRPIRDIAWKGQVRLCARYCKLARAGKPANVVTTAIARELSGFVWAIARQVTVTAG

SEQ ID NO: 64394 - protein, 419 aa, unidentified
MPATFSIPRTNDLERAMTAVMIGVDPHKATHTAVVIGPAEEPLGELRVRASAGQAEKLVAWAADWPERAWAVEGAAGLGRLLAQQLVAAGERVLDVQPKLASRVRLLQAGDTNKNDPNDALSVAVAALRSKTARPVMAEDYPAVLKVWSKRHRDLARLRNQVACRLHAVLCDLVPGGHPKEISAAQAARILEQASPSGAVDRARAELAAEFLEDMRRLDAQLRDTRKKLAAAVRASGTTLTEVFGVGPVIAGTVIGDIADVSRFPGRDHFAAYNGTAPVEVSSGNRKIYRLSLRGNRRINHAIHMAAITQIRHKHSDGRAYYDKKIAEGKTHKGALRSLKRRISDAIYACLLADARRAGQRPARTAREGNRGTTLTPVRPAHAPNADSSDKPLPDLGTTIRPGIRAATPSPSKPTSRKP

SEQ ID NO: 64395 - protein, 384 aa, unidentified
MKVACGLDVHKDSVFCCILCANGEKIQHKFGVLTEELVTLRDLMVSEGVEECAMESTSIYWIPIWRVLEGSVKLHLVNPYFIKQLPGKKSDVNDAEWIATCLSKELIASSFVPDDKIQRLRQYDRRIFDLNVSISRNLVKLDQCIQRCNIRISNYISTTDSKGYRSIVKLISQGVTDAEVLVKELHGRTINRHGRETLVKALTGVVSETDIDIIKQLVEEIELQQRHKDEAQEKMTALCMEWFPQEVENLQTIPGVKERSATSIIAEIGTDMTHFQTPKKLVSWVGLRPRNEESAGKIKARGITHGNRFVRKTMIECSWGAARMKESFFAEFSYRQCIERRKNKMKVQVAIARKILVAVWYVLSQGTQYIKPTDHYTAAHMTAV

SEQ ID NO: 64396 - protein, 338 aa, unidentified
MKVIKQNVGIDVSKKELAVCLTFLRENLSVKIKGTKKFSNNEFGFKAMMEWLERKKDAALPLHFTMEPTGVYHERLSYFLNDMEQLVHIVLGNKAKKYAESLDVNSKTDKLDSKALSRMGVERVLELWNPGSPIYRKLKVLTRERSATLKLRVMIKNQLEAMLHSAFPNKKSVNRLNRLIKELNSQLVKIEKDIDKLVKNDIELKSRILKITTIPGVGFLTAVIVIAETDGFALIKSIKQIVSYAGLDIKIRESGKWTGKSKITKSGNVHIRKALYWPAYSSVSHTQTYKVFYERLFNRKEISMVASVAVQRKLLGLIYTLWKNGTVYIDNYKSKMVA

SEQ ID NO: 64397 - protein, 426 aa, unidentified
MYKIAGIDVHKRMLAVVVSEVEIDGEYEFERRQFGSNPAQLRSLAEWLVGQQVEEVVMESTAQYWKPVWGALERYWKATCLKRDGASPMSGTLHLAQAQSNRARRGRKNDFADAERLVKRLVAHELVLSFVPDPEQRLWRTVARTKCQLTRNRVQLQNRLEALLEEAHIKLSSLVSDLLGVSARRILHGLAEGETDPAVLATRADGRLRATPEQLCDALGACQELNPIYRRLLKMALEDLHMIEKRIEQLDQEMAEMLRSHQDQVQRLAEVPGLGVDSAQQIIAEVGVTAATFPSERDLSSWVGACPGDNESAGVSRGHKSPKGNRQMRRILNQAANAAVKYKGSIFQILYRRYVPRLGHNQTIGVIAHRLCRLVWKILNRGVRYEERGPSVNQRSRHQRAGRMIRELRSLGYRVELPSSPGPVPA

SEQ ID NO: 64398 - protein, 340 aa, unidentified
MKQAITIGLDLAKNVFQVHAIDGSGEVVLRRKLRRAEVDSFFRSQPPLTVGIEACGGAHHWARVLENLGHRVRLMPPAYVKPYVKRGKTDAADAEAICEAVTRPTMRFVPAKTEAQQAAGVELKVRQTLVRQMTRTVNALRGHLAEFGIVAAKGIWKVVDLIGVVRDPDDRRLPPAAREALLELVGQVEALRQRIDRLDSAMVRRTRTDETARRLATIPGVGAITASALQALVPDPKGFGSGRHFAAWLGLTPRPHSSGGKERLGRISRQGNALLRSLFVLGATARLRYAKKTPEATDWSTRLLARRPFKVAAVALANKMARVAWALLVKGGTYTMPAAA

SEQ ID NO: 64399 - protein, 355 aa, unidentified
MDSKKYIGMDVHKESISIAVMNGAGKIVMECVIETKANMILQFIDGLRGDLQVTFEEGTSAAWLQDLLKPHVTKLVVCDPRKNASMREGNQNDKIDARRLAELLRLNHLNPVYHGEHGLRSLKELVRSYLTITKDVGRVMSRVEAIYRSWAIPCTGKQVYAPRHRAEWLGKITEPGVRRRAEFYYQQLDALRTVRQEVRKELLAEAKKHKAWKLLCQIPSIGPIRAAVLLGILQTPHRFRTKRQLWTYSGFGIETQSSADHRSVDGQLQRAKKQSSIRGLNRNHNHDLKNLFKGAAIVASSKPGPFQEFYTALLTKGLRPEMARLTLARKIATIVLIVWKRGACFDAQHLKPQTA

SEQ ID NO: 64400 - protein, 344 aa, unidentified
MENYAGIDVSLELSSVCVVDAHGKILKEAKVASEPDAFVEFFEKLGFAVKRIGLEAGPLSQWLHARLKRAGFETVLLETRHVKAALSAMTVKTDRKDARGIAQLIRMGWFRPVHAKSIGAQEIRALLVARKQLLGRLIDVELSIRGILRGFGLKVGPVTRKNFEARIRELVAGQATLERIAIAMLSARSALKAEYGRLHKAVLAIVRDDAVCRRLMTVPGVGPLVAITYKSAIDDPHRIVKSKAAGALFGLTPKKYQSGEKDVTGGITLAGDEIVRTVLYEAANVLLSRITRFSKLKRWGMDVAKRRGSKRAKVALARKLAVILHRIWVDGTTYRWTDAGPIAA

SEQ ID NO: 64401 - protein, 420 aa, unidentified
MKVVYQTCCGVDVHKSFLVATIIKTTSGVEPSYQKKRFSTFNNSILQFKEWLVKNQCRDVCMESTGKYWVPVFNLLEDEINITIANPKWVKAVKGNKDDTKDSKWIGDLFRLGLVPGSYIPCKPIRILREFTRYRYKLTSCRTSEKNRYQNALTVCNVALDSVVSDIFGKSATSVIDYLIEQPDNSINHEEIASRLLRSLKKKSDSVIESIEGYQMTDSQKYRMRLIRAHLDYITSTINDIDTMLNSLIAPYENAVQLLCTIPGVDRNSAITVISEIGTDMTPFSNSKRLCCWAGLTPDNNESAGKKKSVRITRAGVYLKPALVQVAHAAVKSDKSPYYKQKYERIMKRRGKKRAIIAIARMILTAIYQMLSTGEAWNPTDLFKIDMPEPMKEKQKEKAIKQAMKLLIREGKISESQLAS

SEQ ID NO: 64402 - protein, 390 aa, unidentified
MFYLGIDIGKFHHAAALMDQRGKVITTLPSFLNTRSGFQKLLALITAHLPPAEELRIGMEATGPYWIPLAEWLKTNGWPPVVMNPIKTASLRNYGVRGSKTDNIDSVLIANALRFEGGQPQKILPKLSEELRRFTRLRADMVKDRTRIALRVTSLLDRLFPELLSSFSKTLSPSCLALLAAAPTPARVLALGEERLTTLLRKASGGKLKATRAKEIMDKAAVSVGVTTQASEEVLALLLEQITLIDSQLRTLDHRITKLYKQAGLYFTSIAGVGTLIAGTILGEFGSVTRFTQAKQMVAFAGIDPRLRNSGQHQGQVHISKRGSRYLRRALYLACQGAVRNDDYFHSIYQRHRDNGKSYKEAIIAVMNRFIHVLYVIWRDNRPYYPLTSA

SEQ ID NO: 64403 - protein, 411 aa, unidentified
MDLMYARCAGLDVHKATVVACVRMPGPRPDARHAETQTFATTLRGLEALAAWLTAHGVTHVAMESTGVYWRPVFAVLEGTVQVQLVNARHVKMLPGRKTDVRDCEWLAQLLECGLLRGSFIPPAAVRDLRDLTRLRKALIRERGHHVNRIAKTLELANIKLGSVVTDIMGKTGRAILQALSAGLDDPEQLAACAQGLLRKKQAALREAVEGRLTPHYAFLLQQHLALIDTLDAHITTFDARIEAAMAPFAEAAALMQTMPGVATRAAEAILAETGMDMSPFPTAAHFASWARLCPGNHESAGKRRPTTTGKGATWLRATLQEAAWAAVRTKKSYYRALYYRLKARGGPKKAIVAVQHAMLVALWHMLKRRVPHQDLGADYFAQRNTERTLRHHVRRLEQLGYQVLLAKEAA

SEQ ID NO: 64404 - protein, 347 aa, unidentified
MNQHTAIGIDLAKQVFQVCIVDTRHQRVRTNKVLKRAELLDYLRRQPSCRVFMEACGGSHYWSRQFQAMGHQVLLIAPQFVTPFRKGHKTDANDALAIVEAGLRPNMRFVPQKNLEQQDLQSLHRIRDRHIKQRTQLINQTHGLLQEYGIVSGRGQAALKRKMWRVLEDAENELTFTIRELLAEQMAELDHQNQCISRLDKRMEQLSRAIPACKRLQAVEGIGPVVATQLYSTLGNGNAFSKGRQASAYLGLTPRQFSSGGKVAMTGIGRTGQISLKAALIRGAHAVIQRIGDKQDSKSCWLRALVDRVGKNKAAVALANKTVRVAWALLHANKTYRVDYVESQFQF

SEQ ID NO: 64405 - protein, 311 aa, unidentified
MKKKTVYIGIDVSKPNLDVSDFDPKPSRIKNTNAGIAGLIRRIKSLSAEAIVCCEATGGYEQLLCSMLMAEGIKVALANPARVRHFAKSKGILAKTDKIDAEVIAEFSRQNSPRLLCERPKWLDELKALLVRREELINMKKQERSRLEHAGCRTVTMEIKRHISLLSRRIVTLERAMDDLVGKHAELKWKYSRLTEVKSLGKISALSLISFLPELGSISGNQAAALAGVAPFNKDSGNHKGLRMIQGGRSRIRRTLYMAAVIGSFSNPFFKEIYQRLTGKGKPAKVAITAVMRKMIVLANRLLADPDFQLS

SEQ ID NO: 64406 - protein, 428 aa, unidentified
MGHVIVGMDPHKRSATIEVIDAREKVLAQGRFGTGQDGYKMMLAVGRRFPDRTWAAGGCGGIGRHLAQRLIADGEIVLDVPAKLSARARVSATGQGRKSDPVDAHSVAVAALRTDGLQVVAADGETVALRLLADRRDGLGHARTDTVNRLHRLLLELLPGGAKKFLSAQQARALLAAVRPRDIAGRTRRQLASELISELAAIDKKIKAANTQLTELVAATGSGLQGLNEIGPSSAARLLGDIGDISRFANRGHFASWNGTAPIEASSGEQKRHRLSRAGNRRINRVLHIMAIVQLRYDTEGRAYYRRKLAAGKTSMEAIRCLKRRLSDVVYRQMTNDAKAPGTGPGGHLGTATGSSAAGSNLCTGTSEKSLPGPAANDPMPNLACEPVRSSGRSRRLDQSRTAAIVKRSLLDAGEDRHTLTKAGTTHS

SEQ ID NO: 64407 - protein, 417 aa, unidentified
MKLLFIGDDWAEGHHDVAAQDDAGKTLARRRLPEGADGIARFREMVGSCRGEDAEPDPARVIVVIETDRGPWVKALAAAGYRVYPANPGQAARHKETVANPGKKDDFFDAGCLADMGRTRRHQMRELAAGSDVAEAVKIAARAHQKLVRERTRHLLRMRPALREYFPAALEAYADLTLAGKDALELLAKAPNPESAARLTVTQVTAALKRAGRRGDLAQRARDIQAALRAPHLAQPDVTAEAYAASVQAAAAVITALNEQVKIMEAKVSGLFRRHPDAGLYLSQPGIGDITGARIPGEFGDAPGRYATAKARKNYAGTSPLTIQSGKKKTVHARYIRNRHLIDALPAQALTALSVSPGARGSYDDLRARETGHDDAMRRVASRLAGILHGCLKTGREHDEATAWSHRAGNPEATKAA

SEQ ID NO: 64408 - protein, 447 aa, unidentified
MKTEPEEIPDADHELIIERVAAIDVAKASGKVCLRLPRPGRPGHRVSRVWDVEATTAAVCELADHLVAGQIERVTVESTSDYWRIWYYLLEAAGLSVQLVNARDVKNVPGRPKSDKLDSVWLAKLTEKGLLRPSFVPPAPIRQLRDYTRLRVDLTRERSRYWQRLEKLLEDALIKVSAVASTLDTLSVRDMLEALIAGERDPRRLADLARGRMKTKRAALIEALTGRFDDHHGELARMLLDQIDALSGQINTLTIRIDQLLATIANEVPGHDDGDSGAGGQPSADLTVVQRLTEIPGIGPTGAQVILAEIGLDMSRFPTAAHLVSWAKLCPRTIQSGAIQRCGKSGKGNPYLKGALGEAAAAAAKTNTFLGERYRRIVKRRGKLKALVAVARSILVIIWNLLSDNHARFRDLGPDHHATRINTERKLRNHIAQLAALGYHVTVEPAA

SEQ ID NO: 64409 - protein, 365 aa, unidentified
MTEITRAPVARVGVDLSKRVYQVHAVDRAGRVMLVKAMPPQRFFEWCAQLPAGCVVAMETCGGSHHVARCLHGLGLDVRLIAGHFVTPHRMAGKSGKNDANDAAAICEAASRPHMRFVPIKTAQQQGQLALHRLREGYKEERTALINRVRGLLAEFGLVFPKSPEALRRVLADVVEDAANELPGLARLAIQRTHEHWIDIELQIAWCDDRIAEHVRADERAKKAAALLGLGLVTASAIAASVGDFKQFANARQFGAWLGLVPSQNSTGGKASLGRITKRGDDYLRTLLIQGAKSAVMTAHKRSDRISQWLVQLKERTSWQKAVVALANKNARILWAVLTRDAAFDPDHVPPVPAARISPKLQPAG

SEQ ID NO: 64410 - protein, 346 aa, unidentified
MLGDDFDVVIGVDTHKHTHTAAVLNATGAVLDQLLVPADAKGYRQLIAFGQRHGERRLWAIEGTGTFGAGLTTALRARSECVVEVDRPARAPRRAGAKSDGIDAVRAARQAIAGDGISEPRGRGEREAIRVLLATRSQAVEFRTRAIGALHALVTSAPDALRERLRNLPLGQLLHTCASLRGSSRQSTEEFATVTALRATARRALACQHEAAEHEEQIHVLVQLVAPGLLAETGVGPVVAGQIIASWSHRGRVKSEAAFAKLAGVAPIEASSGTVTRHRLSRCGDRQLNRALHTIVMVRIRQDPRTKTYVARRLAEGKGIREIKRSLKRYVARHIFRELEALPKTT

SEQ ID NO: 64411 - protein, 350 aa, unidentified
MKVAKPERSVGLDLGDRFSHYCVLNQEGEVTEEGRMQSSESVLRKHFAKEAVMRIAMEAGTHSPWVSRLLKRLGHQVLVANPRKIRAISGSESKNDRNDAEQLARFAAFDPKLLSPIEHRSEQRQQDLNLIHARSTLVRARTMIVNVVRGLVKSAGGRLPSCSTESFAERTRAAIPAVLSEVSMPLLKQIGLLTAQIDLMDKQINKLDRKYPEISLLKSTPGVGPLVAACYVLTLDSPEVLGDNRQAGAFLGLRPGQSQSGGSDPQRRITKTGNNYLRSLLVQSAQYILGRFGPDTALRRWGLKLAASGGKRGKKRAIVAVARKLAVILHSMWRSRIPFQAFPPQATVVA

SEQ ID NO: 64412 - protein, 354 aa, unidentified
MSGEKYIGLDVHQATISVAVMDSQGKLIMESILETKASTILEFLAGLRGTLSLTFEEGTWAAWLYDLLKPHVAKLVVCNPRKNALLKQGNKSDKIDARQLADRLRLNDLKSVYHGETGVRMLRELARSYLTVVKDLSRVMNRLKALYRSWAIPCAGRDVYNTRHRSQWLEKIPEAGTRRRAEQLYQQLDMLQHLRQQARRELLVESRKHTITAKLRQIPSLGPIRSALAVALIQTPHRFRSKRQLWTYSGLGLETRDSGEYHFVKGQVQRKKPVWIRGLNKDYNHDLKGLFKAAAMRASIQPGPFQEFYQRSLAKGIKPTMVRLTLARKIAAITLTVWKKGESFDIEKLKSQAA

SEQ ID NO: 64413 - protein, 340 aa, unidentified
MNHYAGIDVSLEASSICVIDGSGKIVREGKVASEPEALIAWFGSLGLSLTRIGLEAGPLSQWLYAGLRDAGFTVELLETRHVRNAFKIMPVKTDRKDARGIAELMRLGWFRPVHCKSMEAQETRAMLTARKLVQKMLHEVEMSLRGVLRGFGLKVGKTTPVQFEGRIGELVAGHPNLEVIAASMLAVRATLRCEFNGFERRLRTLARSDTRARLLMSTPGVGTIVALTYAAAIDDPSRFKSSKTVGAHFGLTPSRYQSGETDRSGRISKTGDGAVRAALYESAHIILTKPIKGCTNLKSWAMRIARRAGLNKAKVALARKLAVIMHRMLADGTTFTTQPA

SEQ ID NO: 64414 - protein, 358 aa, unidentified
MVQRKELNFEGQNIYIGIDVHLKSWSVTIITESGYKRTHSQKPSAKELFEHLKKHYPNGKYQAVYESGFSGYSTYYALKEYGIKCMIIHAADVPTSQYENVMKTDAIDSEKLAKSLKGGLLRGIYVRDKEELDDRSLIRLPKTLQKQLGGYKSRVKHLLYNNGISYPDCFENSRSHWSNRFIYWLENEVRLLSSTRLSLDLLIDQVKLFRKNLLKATRMVRDLSKKPQYSRQYENLISIPGIGLVTAMCLLTEIGDVSRFHNQREFASFLGLIPSCHSSGENIYNMEKTFRGNKHLGPLVIESAWVSIRHDRAMSMAYGAYCKRMKGQEAIIRIARKMSNRILSVLKSGKKYQYDKVR

SEQ ID NO: 64415 - protein, 337 aa, unidentified
MYYVGLDVHAKRSSYCILDEHGRKVKSATVRGPWDKVLCALTLAPQPFAVCFEASTGYGYLHRRLSAMASKVVVAHPGQLRLIFRSKRKSDRVDAEKLAKLLFLDEVPPVWVPSIEVQAWRSMIERRQQFLGERTRAKNRLRALLRSEGIVAPKGLWTKRGLAWVTAQSFPTASEALQRDLLVQQVVFLNEALKTLERGLAAYAARHSGVQVVLTIPGVGVRTAEAVVAYIDDPGRFADPNAIGSYFGLVPRQDESGGRNRLGHITRQGPPTVRKLLTEAAWQPIRRSPEVRAYFERVQRDDSDRKKIAVVATAHYLLRVMLAMLRTGEVWRYAPAA

SEQ ID NO: 64416 - protein, 341 aa, unidentified
MEKATIIGIDLAKRVFQVHAAAKDGRPVLRKKVSRAQLLGFLAKQPRAIVAMEACATAHEWGRAISGLGHDVRLIPPIYVKPFVRRQKNDAADAEAIAEAASRPTMRFVAVKTEEQQARSMIFRTRDLLVRQRTQLVNALRGHLAEHGIVAAQGLAKVKVLATAMRDTGSLHPLVHELGQRYLVHIARLDVEIAELDKRLRRPSKDDETAKRLQSMPGMGPITAAAIEAFAPPMATFKRGRDFAAWLGLVPRQHTTGGKPRLGRTSKMGQRDIRRLLIIGAMTVVRWAVRKGAAKGSWLARMLAQKPRLVVAIALANKMARSAWAMLSKGEEYRGSALAPA

SEQ ID NO: 64417 - protein, 341 aa, unidentified
METATIQKNFYCGGDLHAKTMFLSIMDAKGEILFHRNIPNNPPYFLSVIQPYRHSIAVGVESTFNWYWLADTCQKENIPFFLGHALYMKAIHGGKNKNDRIDATTIANLLKCNMFPPAYPYPKEMRGTRDLLRRRYRYVTLRAESYTHIQGTFNQQAIDGVSSSDVKRKSSRADLPNHFDHPDIAMSVNCDIELSHALDPIINKIEKQVYTRAKYHDHNALSILMTTPGIGKILAFTILYEIYTINRFPSVQNFSSYCRLVKCERTSNGKYTGDGNNKIGNPYLKWAFSEIIIHAQTHSPNIKKYYERLISKHGEGIAKSIMAHKFAVAVYFMLKKQGGIQ

SEQ ID NO: 64418 - protein, 367 aa, unidentified
MSNSRIQSKALNAKLSWEIIGLDLAKNDLSFVGITLEGEIIRIDRLSYEQLVEFSRDTDPTTFAMEPCCESHYLTNQLELYGHQCRIIPGKAVQNYIDTYFSGQKNDLNDAEALAFLGQQKRLKFVRAKNRDEMQLQTLLTVREHYIDEYRKTLTSLKGVAQYWGLRLAKSLSSEMRLIALIEDADLPEDVKGIFKEMVKTYKDLQKKARELTKKIEAFTQGDEFCQKIRKIPGLGPISSAGLKVAIGDIARFPSPRTLPAYFGLVPRNITTGHSLKMGKITKRGDKLVRTYLVQAAGSLLMLDGKGKFRDCQLRRWIQRKRQTLNHGKLVIALAAKLLRIVWAILSKNEAFDYRKAGVAKCSLPKT

SEQ ID NO: 64419 - protein, 464 aa, unidentified
MKDNKRRRQIKQRRISSHLDQVNLFAAGIDIGSQSHYAAVPEELDSEPVREFGCFTGDLNRMADWLVEIGIQTVAMESTGVYWIPAFEILEARGLVVLLVNARHVKNVPGRKSDVQDCQWLQQLHTYGLLEGAFRPPEETVALRTYMRQREMLVQRASDHIRHMQKALRQMNLLLDNVVSDIDGVTGMKIIRAILAGERDPAVLAQFRDKRCKQDKKTIAASLEGHYREEHLFTLKQSVELYDVYQQQIASCDAAIQAQLDRMESRGDKDDLPPTKKRKTKSSLDFDVRGELYRMTGVDLTRIDGFNETSVLKILAETGIDITPWPTEKHFASWLGLSPGNKITGGKILTSKTKPSANRAAAAFRMAAFGLFNSKSALGAYYRRQRTRLGSPKAITATAHKLARTFYSMLKNGSEYVDQGQDYYEKQYRDRATKNLKKRAAFLGFDLVPNKEEKNMTDALLSTT

SEQ ID NO: 64420 - protein, 438 aa, unidentified
MSIVAYAGIDWHEASLRVYAVSEDSGEMVIDSTVLNDKASVTKVFKKWGKSYTLRCCYESGAGGYVLYRWLRDLGIECMVVAASLVPQRGGDQIKTDRRDAINLARNLRKGDLTPVHIPTEDEERARRLVRHRTMLVESIVKTKNQIQKLLLSAGIKKPFPSSWTSQHETWLEGLKLPGVDGEIFASHLAMLKFQRSQMKSMEDQLEIIAASDTYRDRVSRLMCLKGIRLVSAMVLITEIIDFNRFKSPRQLMAYLGLVPTESSSGKRRRQGSITKAGNRRCRHILVESSWSYRNKPKISDDLKKRQKGQSDEVIAHSWKAQKRLYKKYWGITNRSKATGVAAVAVARELVGFLWGLMTGNFARVDNEDSAEVTAKPAAGQAKKLETALEVEKALKLIQESDPRLIERLQSKLVDASRYASGLPATGCSPTAGLGAGG

SEQ ID NO: 64421 - protein, 358 aa, unidentified
MQRNKKTFKGQNIYIGIDVHKKNWQVAVITESGYTERISTAADAKALFKFLKSHYPDGNYRAVYESGFSGFATHYALSELGVSCVVAHAADIPSSQYELTMKSDRIDAEKLARALRAGLIRGIYVRPKDNLDDRGVLRIRKTIQIQVGGYKTRIKHLLHSNGVELPERFSRSGTHWSRAFIAWLREDVRLLSDTRRSLELLLLQVETLRANLLEATRRVRALSMTDRYREDCALLMGIPGIGLTVAMTILTEVCDIGRFGNERQFASYLGLVPTSHSSGERVSHGEMTFRGNKHIGPLLVEASWVLIVRDRELGRMYTEYRWRMAGQKAIIKIARKLSNIIFAVLKTRKAYEPYRRDA

SEQ ID NO: 64422 - protein, 464 aa, unidentified
MPTNGSRFQLRLSIRISFATQAARSNQLHRSAKTMEASIATTGAVTAYIGIDWADQKHAIALRSAAEPNKIEHQLIDQKPEALMEWIGGLEQRFGTQGKILVCLEQSRGALLYHLMGYDFFELYPVNPLQLARYRETFSPGGAKDDWPDSELLCELLYCHRERLRALKPDSVLGRKLNFFNEGRREAVDQRNRLSNAIKSQLKVYFPLALELLDQDTSTALAADLLIGWPTLEAIQKQPAHRLRKFFYGHNCRGEQRMLKRLELVQKAKPLTQDSAVIEPAALRVQILARQLKNLLPDIARYEDKIAQLFEAHPDRFLFENLPGAGEALAPRLASAFGSDPQRWESALEIATLSGIAPVRRASGMKSGKKGQRKASVHFRQACPKFLRQSFHEFAGCSIRYCSWAKAHYDALRARGKGHHAAVRAVAFKWIRILFACWKQRTPYDPQRYLQALQRRGSPLAIAC

SEQ ID NO: 64423 - protein, 316 aa, unidentified
MEPIVAGIDVGKATLDVAVRPGTARRTVANDAAGWAEVVAWLRTAHVTHVVLEATGGYEVDVALACAGGGVTVSILNPRQVRRFAEALGLLEKTDRADAGALAEFALRIKPRATRLPDEGQRARMALVTRRRQLMDMITAEANRLHACRDVAVRKGINATLAFLRRQVKGLDGDIDRQVRKTPLWRDDVELYESIPGVGRVVATTLVAELPELKTLPAKKLAKLVGVAPLARDSGTSVRGKRPIYGGRASVRAKLYMAALVGVRFNAVLKAHYTQLLARGKEKKVALVACMHKLLTILSSIAKSRTPWREIALAAP

SEQ ID NO: 64424 - protein, 452 aa, unidentified
MEENAIPMEIVNPHAAGIDIGSRSHWVAVGQQSQDVREFGVFNVDLFALADWLSGHQIKTVAMESTGTYWQNLYAVLIARGFHVILCNGKFTKNIKGKKTDIKDCQWIQKLHSLGLLSGSFLPDGKTEQLRTYCRHRANLINNAASTSKKMQKYLRLLNLRLDVVVNDICGLTGLTIIRAICAGETHPDKLAALRHGNCRKSKEEIAKALHSNGRKDYLFALQQELDTYDHLQIKIAQCDQKIEEMLNEIIDNDDNKKQHHIDPKSYKRVTKNTPKDIDLNLKSYQMFEGIDLLAIEGVSFNTVLTIMSEVGIEGIKKFPTAKHFASWLRIAPNNKVSGGKVLSSKVPKGSNRLKIALRNAANAIGNLKDSTPLRDFFQRISFRKGRVSAVSATARKLAVIIWNMVVKNTPYVNPEGYLFLDQKRKLGMVKRIQKQLDKFALTKEEFNFSTT

SEQ ID NO: 64425 - protein, 410 aa, unidentified
MEPILISCAGMDVHEKKVDVCIAHGPLDKPPKFEIRTFSTMTSDLEDLKIWLKKYDVTTIGMESTGVYWKPIFNVMEGELKIVLANAQRLKAIPRKKTDIMDCKRIANLLRYGLLPNSFIPPREIRELRDLNRTRRKFVGIMTSEKNRLVKVLEAANIKLSSVVTKIYGVSSLAIIRSLLEKNKLSKEDISKLAKGKLKKKVDLLEKAVNGKLTDHHRFLLEMHLQNIDYLAKQIKKLDEEIERKMVPFQKESKLIQTIPGISEVNASAILAEIGADMSQFPDEAHLSSWAGVCPGNNESAGKKKSGKTQKGNSFLKGALTESAWAASKTKNTSYNAFYHNLVRRKGKKKTLVALAHRMLIDIYFVLKTGEPYQDMGAEAVHERTAKRKERSMIRSLEKIGYSVTKAANA

SEQ ID NO: 64426 - protein, 341 aa, unidentified
MTEIKRIAIDTSKSVFTLHGVDDAGRAVLRRNLRRGELLRFFERLPPVEVALEACGGSHHWGRALSAFGHQVRLIPPQYVKPFVKRSKNDRNDAEAIAVAAAQPSIGSVPIKSVEQQAAAMLLSVRELLVRQRTQLVNAMRGHAAEMGVVAPLGEKGFKELQAAIATADEVAVPAAAKQAIALLGREVERIEIRLRAIEATLMQQHKTNPLSRRLAAIPGIGPIGALNLALRVDAGQFASARHFAAWLGLVPRECSTAGKQRLGGISRAGDERLRQLLVLGATAVIQHARPGRPATSQWLLNLLSRKPRKLAAVALANKMARIVWAMMTSGEAYRPRPVVA

SEQ ID NO: 64427 - protein, 335 aa, unidentified
MVSGNGEILREDQVPTTKAGMTATFGSLGRVRIAIEVGTYSPWVSRLLDSLGHEVIVANPRQVKLITESSRKDDRLDAQTLARLARIDPQLLRPIQHRSEKAQTALMVIRVRAALISVRTSLVNTARGLAKAMGERLPKCDADQMGVLKAESVPAKLRHLLEPLLKEVESLTEKIKDGDRQIEQIAREDYPETTLLQQVGGVGPLIALSFVLTVDDKNRFQKSRDIGCYIGLRPRRSDSGQRQPQLRITKEGDPYLRTMLVQGAHYILSRRGPDTDLKRWGLRLAERGGKRTKKKAVVAVARKLGILLHRLWVTGEVYEPLRNHKLRQEQKKIAA

SEQ ID NO: 64428 - protein, 351 aa, unidentified
MPFKTDTATVRTIGIDTGKNTLHMIGLDEKGAIVLREKVARGRIAARLVNVPRCLIGIEAGMATHYVARELTALGHDVKQVPPAYSKPFRQGHKNDFRDAYAVAEAVQRPATRCVPVKTDNQLDLQALHRVRSRLISDRTAVINQIRSFLLERGIPVRQGLRFLRHQLPDLLATRTDVLSPRMVRIVEDLVGDWSHLDERIENVTEEIEALAGGDASCRQLMTVPGVGPIIASAMVAAIGNGTAFAKGRNFAAWLGLVPKQMSTGDRTILGRITKRGNRYLRMLFMQGARVILLRPENWQKHSFGAWLTAAAKRLHHNVLATALANKLARITWTVLAQGRSYEARVEPRTA

SEQ ID NO: 64429 - protein, 343 aa, unidentified
MEHFAGLDVSVKDTSICIVDDTGRIVREVKVASEPEALLQVLGNPIYRFRRIGLEAGPLSQWLFNGLAEAGLPVICVETRHMRAVLQAQINKTDRNDARGMAQMMRAGLYRPVHVKTLRSQKLRMLLTHRKLLQSKAIAIDNDLRGTLRNFGLKVGVVGTVKFEARIRELVENLPDLAGLVEPLLMVRRVLREQFSILHRRLLAIVRDDEVCRRLMTVPGVGPVVALTYRATVDVPARFRNSKAVGAVFGLTPSRYQSGEVNRAGAISKCGDEMMRMMLYEAAHIMLVRLAKWSWLKAWAMKIAKHRGMKKAIVALARRLAVIMHRIWVDGTEFRWTREVTAA

SEQ ID NO: 64430 - protein, 329 aa, unidentified
MRRVIGMDIHRTFGEVVFWEEGKLRHGGRVDMTRTALEGFGKSLSLTDEVVIEATGNCMAVSRVLSPFVKRVVIANPLQVKAIAHADVKTDKVDACTLASLYAAGYLPEIWTPNAATERMRRLVARRYQIVRHRTRIKNEVHAILHAHLIPKCPHADLFGGRGRNWLARQPLPDDEQEAIERHVRELDRLGEDLSALDRKIAESTLDDPAIRRLLTITGVNVTVAAGLMAAIGDIARFRSPQKLVSHVGLNPRVRQLGLSAAHHGRISKVGGSHAFAMLVEAAWAAAKAPGPLRAFFVRVRANQPGGACSRRFVKQQPQRSVRLSAASA

SEQ ID NO: 64431 - protein, 400 aa, unidentified
MISVGIDVSKEKSTICILKPYGEIVSRPFEVCHTEKELSELASMLLRLNDDVRVVMEATGIYHLPVLCYLKEKGLFVAVVNPFEMKEYRCQGLRRVKTDKQDAITISNYGIDHWYRLKNYEAEESVYAELKLLGRQYRHYMRMRVESVLELTHLLGYTMPGIKTLLKGWNETNGKDKLGDFAEEYWHYDNITKKPEEQFIESYLKWAKEKGYHQSQDKAVKIYALAKEGIPTVSSDTPSTKMLVQEAVRVLREVDNTLMTILTQMQALAKSLPEYPVVRAMGGVGNVLAPKLIAEIGDVRRFHSGKALIAHAGIDAPPYQSGQFIGTERKISKRGSSSLRKIGYEVMRCLKTHKEPEDAAVYRFILKKEKEGKSKRAAKIAGLNKFLRIYYARVMEVYQN

SEQ ID NO: 64432 - protein, 427 aa, unidentified
MKIVYPICCGVDVHKNTIVATIAATGKNLITRYTTATFSTLAPDLLRFRNWLTEHNCRNVCMESTGKYWIPVYNLLEDAFNVILTHPKYVRAIKGQKTDKKDSKWIADLFKFDLVRSSYIPTKEVRALRDLSRYRFKLVCMRSAEKNRYQNSMTVSNVGLGSVLTDPFGRTSTDIMAHLLSSQSYDEEFCKSLIRKSAKVKTEKILDSIRHSKIEPDQHLKMRLAYGHINELNEKIVLVEAEIFNRLQPHYNKVRFLSSQLPGITELSAALILCEIGFDLSPFDDQRHFISWAGLSPASNESANKKKSVRISKAGKYLKPLLVQCALAAVKSKSQPYFAIKYAAIKRRRGHKKAIIAIARMMLVCIYKMLSTGECFNPTDIDMVFSFAKPKEKRVVITVDSALDYLISQGYDVSSLAKADPSVLSVV

SEQ ID NO: 64433 - protein, 405 aa, unidentified
MDKIFVGVDVGKEVHWACCLDSTGEILLSRRVFNDEADLRALVAETEAVGASEIAWTVDLIAVEASLLLAVLHGADHKVRYLPGSAVHRASAGYRGEGKTDARDARVIADQSRMRSDLIQLEPDDTLVREMRILITRRADVVADRIRTINQLRQQLTSVCPALERAAKVADHHGWLILLRRYQDPKTIRRAGVSRLTTMLTNAGLRAATAQKIATTAVDAAKSQTVKLPAADLAAELVAELAQEVSRLDALLAELDAKIDTRFRQHRLAHIVISLPGMGPRLGAEFLAAIGNIDSFASANHLASYAGLAPVSHDSGKTVGRHRRPHRYNRQLRRVMYLSALNSIRYCPESKTYFEKKKSEGKRGTAAVMALARRRTNVLWALIRDGRDWTPRPQLSAPHTATAAA

SEQ ID NO: 64434 - protein, 346 aa, unidentified
MEHIARIGMDTSKHLFQLHGVDAEENVVLRRQLRRTQMVSFFQKLSPTLVGIEACGGSHHWARLLQSFGHQVKLIPPQYVKPYVKRNKNDAADAAAVCEAMSRPTMRFVPVKTPNNQAVLMLLGMRERLLRNRTQLSNAIRGYATEFGLTVAKGISRLDHLFERIAADSSLPALARELFTLHAQEYRDLQMRIAEVDDKLDDWRHENEMIRRLIKVPGIGPIGAALIVMKTPDPQGFKSGRDFAAWIGLTPKDHSSGGKRRLGGITHAGDEALRSVLVSGATNVVRHARLGRGQISPWLMALIKRKPAMLAAVALANKMARIAWKLLVSGEAYSGYSASRLAVQAG

SEQ ID NO: 64435 - protein, 383 aa, unidentified
MSDHSEAFVAFDTAKLRNAVAIADGGRGDEVRFLGEFDNTPAATAKLVRKLAAKYKRLTFCYEAGPTGYGLYRQIKSLGHECIVGAPSLIPKKAGDRVKTNRRDAISLAKLLRSGDLSAVWVPDRQHEAMRELTRARETAMNDLRAKRQQISAFLLRRGVHYPPDKKTWGKMHINWLMSQKFEFTEERIVFEELMEAMRQAQGRLDRLEAAIRAAMPDWSLCKLVIALMAMRGLDIVSAATIVAEVGDLSRFRTPRELMAYVGIVPSEDSTGDKVKRGPITKTGNRRVRRMLVECAWSYQFPPRLSKDKQVKVEAVPQAVREIAWKAQSRLNQRYRALLRRGKLKNIAITAVAREFVGFIWAVAQAVGAAPAAANTKAPAVAS

SEQ ID NO: 64436 - protein, 351 aa, unidentified
MSHKTAAIAVQTIGIDTGKNTLHLIGLDDKGAIVLREKIARGRIAARFANVPRCLIGIEAGMATHYVARELSALGHDVRQVPPAYAKPFRQGHKNDFRDAYAVAEAVQRPSTRCVPVKTDDQLDLQALHRVRSRLVGQRTAVINQIRGFLLEHGIAVRQGLRFLRQQLPDILAKRGDVLSPRMTRIMEDLSGDWRHLDERIKHITEEIEVLAHGSESCRQLMTAPGIGPLIASAMVAAIGNGAAFAKGRDFAAWLGLVPKQMSTGDRTILGRISKRGNRYLRTMLMQGARVILLRPKNWAKHSFGLWLTAAAQRLHHNVLATALANKLARIAWTVLAQGRSYEARVEPKVA

SEQ ID NO: 64437 - protein, 469 aa, unidentified
MLNLAKVTESKPDRLAALVPKSERTPAHEAPCISVTYDGATMHNKKEKPMKEWKEITHYAGFDWARDHHLVVIVDQQGQIVADFQFDHSVEGWKSFQEKTAPFSNLAVAIETSQGVVVDQLLQGGYAVYPVNPAAAVSYRQRKAPSGTKTDHLDGWSLADALRVDGHGWKALQPMDELSLQLRLLCRDEVALIEQRTGLVNQLRQALVEYYPAALEAFDDWVNPSTWDFVIQFPTPESLVQAGRRKWEKFLHAHRLWRSETAQKRLAIFAQADQFKASAPITKAKSQLALSLCKLLRTLQQQLDEYQNQIQELFNRHPDHDLFGSLPGAKSILAPRLLAAIGSDPDRYTTVEVLQCFAGSAPISFASGQIHKAKVRWACDKFLRHSVHLWANCFRKTSAWGQAYYQKKRQDGMSHACALRCLTQRLLKIVFRMITDKKPYDAELHARNQIKHGSWVLALVGNPIAKTGE

SEQ ID NO: 64438 - protein, 344 aa, unidentified
MTRIRQLVLGVDTHCDVHVAVLLDRLGRKLATATFATSDAANAALLAWTRCYGQVTLAGVEGTGSYGYRLAQHLAAHAINVVEVNRPDRARRRRKGKNDPIDAEAAARTVLAGDATAIPKSRSGPVGQLRALVMARRSAIKARTQATNQLRALLVDGDDELRGQLGPLRKHHLAHACAELHPDGGAFHLALRSLGRRWLALHREIIDLDQAITTIVARLTPRLLARHSVGVHTAARLLITAGDNPTRLRSEAAFAALCGASPVEASSGKTARHRLNRGGDRAANSALWTIAFVRLIHDPRTRAYAAKRTSQGSSRKEILRCLKRAIARELYPLILEALTAPSPA

SEQ ID NO: 64439 - protein, 354 aa, unidentified
MTDPSMPDPDRLVTLGVDTHLDNHVAAVLDERGVLLDSMTLPTTPAGYQALLDWAAEFGTIDRVGVEGTGSYGAGLARWLRGAGLVVLEVDRPDRRARRQHGKSDPLDAEAAARAVQSGRATGLPKGGTGAVEAIRALRIARNSAMDARSRVTNQLHALRVTAPDALRDELRALSLSGLLRRASGFRLPAVIEEPSAATRMALRSLARRHQALSAEIAALDGHLRRLVSAAAPRLVARPGIGVHSAGQFLVTAGDNPARLRSDAAFGMLTGTSPVPASSGKTVRHRLNRAGDRQANCSLHMVVLSRMGHDERTKAYVRRRTSEGKTTKEIMRCLKRYVAREVYGLLLQSPGLTS

SEQ ID NO: 64440 - protein, 312 aa, unidentified
MEAKFVGIDVSKATLDVDCLPVITPLQFSNDASGIAGLVKWLVGSGVERIVLEATGGYEVAAASALAAAGLPVVVVNPKRVRDFAKAQGILAKTDRLDARVLALFAQQIAPPVRALADAAQRDLAELLDRRHQLVVMRTQEQARMATVLPVARSDVKQHIAWLDKRIRKHEGVLLKRLRANDIWDAKVTLLDTVPGIGPVNLFTLVGRLPELGTLNRQQIAALVGVAPFNDDSGKRRGQRYIRGGRADVRCALYMATLAAKLWNPVIAQMYDRLIAKGKPFKVAMTACMRKLLTILNAILKTEKPWEDRLAT

SEQ ID NO: 64441 - protein, 340 aa, unidentified
MSDIYTIGIDLAKSVFQLCAFDKTGKKLINRSLKRNQVIKFLSNIAPCLIGMEACSSSHYWAREIKKLGHEVKLMPPQYVKPYVKTNKNDMADAEAICEAVRRPTMRFVSVKSEEQQALLLLHREREGVIRDRTALINRIRASLQEFGVSVPAGRFQLRKWFREGFSLVEHKLPKLLVEHISLMQTRLRELEQYAEYLDKQIDLTSEVSDECQKVRQIPGVGRLTSSALIASIGDAKAFSSGRQLSAWMGLVPSQHSSGGKSLLLGISKRGDTYLRRMFIHGARAVIRHLKEGKPFFEWVTSLLKRMHKNKVIVALANKLVRISWAILAKEESFSVGRTY

SEQ ID NO: 64442 - protein, 340 aa, unidentified
MKNVNLLAIDIAKINFQLHGVDLTGNIVLRKNLTRNKLIEYISNLPSCTIAMEACGGANFWARKFTQFGHTVKLISPQFVKPFVKTNKTDRNDAEAICESASRPSMRFVNPKTIEQQDVQSLHRVRSLIMQERTALSNQIRGLLSEYGITIVQGIHNLTKCLPNILTDEETELSTLSKMIFRDLYEQILLKTKKIEEYDKLIEAVFKQNIDCQKIAQIEGVGILTATALIACIGDINIFKNGRHLSAYLGLVPKQHSSGNKQKLLGISKRGSVYVRSLLILGAKAAIRSAAKKSDRKSNWIKEIQKRRGNNIATVALANKTARTIWEILKNNSNYAVIAA

SEQ ID NO: 64443 - protein, 408 aa, unidentified
MSNNKTLYVGVDAHSEHNTCCFMEQDGNLVRKILAVPNSLPGSEYLVSEIIDSIKSHSFNQVKIATEATSFYDYLFLDFLSCNQQLNSFNPLIYRFNPKTTKSFKKTYPDKDKTDSDDAFVIADRLRFGRLPEPYPSQQPYIPLQRLTRFRKHIIDSIAKEKTYFTTHLFLKFSSYSSVKPFSNSLGASSEALITYFTLDELASIDINELIDFLIKKGKNRFPDPEAVAQKIKKVARESYRIRPALASSIDLVLSTTIKNIRALNKNLKEINKAIEQELHAFPNSLTSVKGLGPIYTAGIIAEIGGIKRFSSQAQLAKFAGLTWRKTSSGNFSANSTRMTKTGNKYLRYYLWEAANSLRVHNEQYRHYYRKKYTEVNDHKHKRAVALCARKLVRLVFALLTKNQLYQA

SEQ ID NO: 64444 - protein, 367 aa, unidentified
MQKGSTTAAKQSRNISQPTLTIGLDLGDRNSWYCVVDEAGQIQLEQRVGTSARALQKVFGSMPRSRIALEIGTHSPWISHLLSEWGHEVIVANARKVRLIGESRKKDDRLDAQTLARLARIDPELLYPVKHRSAQAQADLMMIRARAGLVRARTGLVNTASGLAKSYGEHLRGCNVRNMNPEKAEGLSPELQRALAPLLSAIAELSQRICEYNEHIEALAQQSYPQVALLKQIKGVGTLIALTFLLTLEDPHRFGKSRDVGSYLGLQPGRRNSGRSEPQMHISKEGDPYLRTLLVQGAQHILGPFGVDCDLRRWGLKLAERGGRNGKKRAIVATARKLAVLLHHLWVSGEVYEPLHNRNRRIAAVAA

SEQ ID NO: 64445 - protein, 342 aa, unidentified
MTMIGIDPHKATHTAVAVDDDGTVIAEFTLGSSNTQAQRLCDWAEGLGEREWAVESATGLGYLISQQLVAAGETVFDVPPVLASRVRLLGSGRSQKNDPNDARSTAIAVLRSDRLVVVQRDDHVVVLRLLVKRHRDMARLRNKHCSRLHALLLELEAGGIGGKISSSNASELLDRVTATDEAARYRILIAREVTADIARLDRALKASKDRIAVAVTASATSLRDIVGVGPIGAATIIGYTKDIKRFPTKGHYATYNATAPIEASSGGTKRHRLNLRGNRILNHAIHIAAVTQLRHDTNGRIYYDRKIAEGKTSREAIRALKRRISDAIYRALIADTTRVAAN

SEQ ID NO: 64446 - protein, 387 aa, unidentified
MNVDSIDEPRFAAYVAIDWGDSKHVWSLQPADSDRREHGEIEHNPEAVAAWAAMLSARFGGQPVALAVEQSRGPLVFMLGKYEQLHVYPIHPRAAAQFRAALFPSGAKDDPSDAELLLDLLVHHRARLRQLKPDTEQTRLVQHLVEGRRKLVNERTREALQKARPDTVRCFFTAHNCRSQELIERRLDQIRSAIPAVRDKALIEAAQAMTKVLVELIATLREGIASFGCQIAQAVAAHPDFAIFNSFPGAGPALAPRLLAAFGSQRERYQSAADLQTFSGIAPVTERSGKSQWVHVRWACPRFLRQTFHEWAAHSIGFCDWARAYYQQQRGRGKDHHAAVRALAFKWIRIAFRCWKDALPYDDARYMQSLRRRGSPLIAALAKPQLP

SEQ ID NO: 64447 - protein, 332 aa, unidentified
MRFYTTQHPFYCGIDLHARTMYVCILDQAGETLVHRNMTATPEALLKAIAPYREQIVLAAECMFTWYWLADLCADHGIPFVLGHALYMKAIHGGKATNDTIDAHKIAVLLRGGMLPQASVSPAEMRATRDLLRRRMPLARTRGALLAHVHHTNSPYTLPAIGTKIADKANRDGVAERFADPAVPKRMAVDLALITSDDALLRDVERTIVTTAKHHDAQTLSLLQTVPGIGKILSRVLLYDMHDIARFPRVQDFASSCRLVKCAKASAGKRAGTSGSQIGNAHLTWAFSEAAVLCLRDHPAAQQFLARLEHTHSKGKALTILAHKLARAVYDM

SEQ ID NO: 64448 - protein, 400 aa, unidentified
MAYKVAGIDVHKKVLMVVILDVNDPSSEPQRRRFGTTTSELQELSTRLRKQGVQQAVMESTAQYWRPVWYELEPYMKLCLAQAFSNRAPRGRKHDFRDAERLVRRLMAEELTLSFVPEPKQRSWRTITRMKVQLTEDKSRLHSQLECLLEEMRIKLSSVISDLLGVSGYRILRALAGGETDPKKLAALADDRLQCSERQLVDALTGSPQPVHLQLLALYLDRHLMLVGQIAKLDQMIAEALKPHQEAVARLALAPGLGVDSAQQIIAEVGADAGTFPSAAHLSAWVGTCPGLDKSAEENHSSRSAKGNKYLRRLLNQAAHAAVKKKGSHFQAVFRRLLPRLGYKATIWAVAHRLCRLVWKMLHEAVPYVEHGSEPDARTKRRRARNLVLRNINKLTYYVR

SEQ ID NO: 64449 - protein, 332 aa, unidentified
MTNANATDCIFAGIDVAKLKLDLARTGIQQVATFTNDPAGIAQLVEVLRQTPPKLIVVEATGGLERLLLDALLEANLPVHLANPKHVRYYALSLGILAKTDPIDAHVIERYAVQLSPRLLQKRSEKQTELEALVTRRRQLLNLRTQQGNQLEATRSKLARKSIQAVLKVLEKQISSMNRQIRKLIESDDDMDDIDKLLRSVPGIGNVASATLLCEMSELGTLDRRRAAALVGVAPFNHDSGKNKGKRVIRGGRASVRNVLYMSALTAIRCNPIIQTFAGRLAKAGKLPKVIIAAAMRKLVCIINAMVRDGLSWDQLDIVKKFNSLKSVPSTI

SEQ ID NO: 64450 - protein, 342 aa, unidentified
MLNHYREGEVVEEITTVGIDLAKNVFSVHAVGSRGEVVLRRTLSRAKLSELIAQLPPCLIGMEACSGAHEWARRFAASGHTVKLMAAKFVMPYRKSGKNDGNDAEAICEAVARPNMRFVPVKSLEQQSDLTLHRVRQGFVEERTATLNRLRGLLTEFGHVLPLRASEVHRRVPQLLGKLPTRVAACARDLLEHAARLQAKTLEYEHEIKIHVRSNALACRAQTRLGIGPITASALVATVGNGHDFKNGRQFAAWLGLVPRQYSTGGRTRLGHITKRGDPYLRTLLVMGARAVLQRAASLTDPLSRWALAVRERRGYHRACIAIAAKNARVAWALLAKEPVAA

SEQ ID NO: 64451 - protein, 351 aa, unidentified
MWIIGVDYHPSVQQIAFVNTDTGECGERRLSHSDGEAEKFYRELKAAGCKVRVGMEATGHARWFERLLAELAFELWIGDPTQIKAKRVRKQKTDRLDAALLLQLLLEDRFPRVWVPSPENRDLRQLLWHRHRLVQMRTRIMNQLQAVAMNEGVRRKKALWNKSGRARLESLPLAPWAARRRRDLLELLDRLNPTIEVLSAAVEQEARQRPEVLRLMTHPGVGAITAVAFVLIIDSAERFACGKQIGSYVGLIPCEDSSADRRRLGHITKQGNTLLRFLLVEAAQAAVRRDPDWRRRYIHLAMRRDKRIAKVAMARKLAVGLYWMMRKECNYEQLKKFGSYAGESKYGHGVQ

SEQ ID NO: 64452 - protein, 343 aa, unidentified
MRHYAGLDVSVKETSVCIVDESGKVCRETKVPSHPEDLARALHDRAWCLERVGLEAGPLSQWLFSGLAATGLPVVCIETRHTKAFLQAQVNKSDRNDARGIAQMMRVNLFRPVHVKTLTSQKRRALLTARKLLQEKALAVDNDIRGLLRNFGLKVGPIGASKFETRIRELVEGMPELAEIIDPLLEARRKLRELFAVLHRKLLVIVRDDTVCRRLMTVPGVGPVVSMAFTATIDVPARFKSSKAVGAALGLTPILNQSGESKRLGRVSLCGDGMTRTLLYEAAQVMLTRTTKWSWLKAWAMKVAARRGIKKAIVALARRLAVILHRIWVSGTDFRWTREVQSP

SEQ ID NO: 64453 - protein, 338 aa, unidentified
MPTDQTGQTYALFVGVDIAAQTAMVATQRPGAKASRSLTIEQTPEGYTSLLRQLQATGFVPCQVLVVMEATGSYWISLATRLVHEGFAVSVMNPAQAHHFAKALLKRAKTDAIDAQTLAQLAMILQPEPWTPPPQIYYALQQRLAQRDDLLNLRQQVRNQLHALVQHPEVIAEVRARMESLLATFESQLTEVESEITAALSQDSAWAAAATRLQSIKGVGWVTAAWTLVTTLNLTSCDTVDALTAYAGLAPMPRQSGSSVWHRPSIGHTGNGRLRTAFYMATLSAAQHNPVIKAFYTRLREVGKLEKVARCAAARKLLHIAWAVVKKDQPFDPNYALG

SEQ ID NO: 64454 - protein, 342 aa, unidentified
MIASTIGLDLAKHNFHVHAVDAGGSVVKTAALRRSEMIKFFQDAKPCLVGMEACATAHHWARELMKLGHEVRLIPPSYVKPYVRRGAKNDAADAAAICEAVRRPHMRFVPIKSESNQAFLMLHRARGLLVRQRTMTVCAIRAHLAEFGITFGQGRQRIETIMPSIEDVASSLPEQARFALKSLIRMVGELNTQIEGIETKLAEIGRSHPVSNLLSSIPGVGPITSTAIAATVPDARMFRSGREFAAWLGLTPRQNSSGGTTRLGGITKQGDAYLRHLLVIGARNIVRYPKARAKVDGAWIDALLQRRRPMIVAVAVANKLARIIWAMMTSGEMFREAHAKTT

SEQ ID NO: 64455 - protein, 321 aa, unidentified
MSLFNLGLDVAKSKLDCALRLPDGKFKSKVVENTSIGFNVLTEWLEKHGATSTHVCMEATGVYWEAVAEYLAAKGMTVSVVNPAQIKAFGQSQLVRTKTDKVDARLIARFCAERHPAPWQAPTASEQALRAMVLRLDSLQVMRTQESNRLEVARDAVKLGIASHIEWLDKEIKALATKIGKHMGGDDSLKGKQALLDSIPGLGERTIAILLAFYADLERFGNARQAAAFAGLDPRLHESGSSVKMKPRMSKVGHAFLRKALYMPAMVALYKTAWGIRFRERLAAAGKPPKLIIGAMMRKLIHVAFGVLKSGKNFDPALHGC

SEQ ID NO: 64456 - protein, 312 aa, unidentified
MDAAVVVGIDVSKERLDVHVRPGGEAFSVKRDGDGIAALIERLRPLDPAILAVEATGGFETVVAAGLAGAGLPVVVVNPAQVRAFANALGKRAKTDPIDAAVIAHFVEATRPAIRPLPDEETQLLADLVARRRQIVAMIGAERQRQKRAPARIARSIARLVKALEKELASLDADIDDAVRGSPAWRDKEDLLASVPCIGPTIARTLIAELPELGTLDRRQIAALVGLAPWTRQSGQWRGKSFIGGGRASVRAALFMGAMVAIRRNPVLKAFRDRLVAAGKPKLVALIATARKLVTILNAIIRDGQPWREQTA

SEQ ID NO: 64457 - protein, 343 aa, unidentified
MAAVMIGVDPHKASHTAVAIGAAEEPLGELRVRACAAQAERLLAWAVAWPERTWAIEGAAGLGHLLAQQLLAAGERVLDVQPKLGARVRLLAAGAVNKNDPNDARSVAVAALRSASRREVAADDHAAVLKVWSKRHRDLGRARTQVACRLHAVLCELVPERISAAQAAHLLEGITPPGAVGAAHCELAGEFLADLRRIDTQMREAKKKLTTAVRASATTLTEIFGVGPVVAATVIGEVRDLSRFADRDHFAAYNGTAPIEVSSGRRKIYRLSRRGNRRLNHAIHMAAVTQVSHRHSPGRAYYERKLAEGKTRKEALRSLKRRLSDTIFAQLQADARRGGAAPR

SEQ ID NO: 64458 - protein, 376 aa, unidentified
MENDITLYVGLDVHKDSITVAYALGMGEVEQLGKIGTSKADTDRLCKRLQSKARHIRIVYEAGPCGYGLYRELTQKGFDCMVCAPSLIPKKPGERIKTDRRDALKLVRSLRAGDLSAVYVPSVEDEAFRDLSRAWVSTKDDLKRARQRLKAFLLSHGVRYTGKADWGPAHRRWISAFAFDTVWQQLAFDEYRRAIEDRLAQCSRLEEALREAVVNWRFYPAILGLQAMRGVQLTTAIGILAELGDLSRFAHPRQLMAWHGVTLAEHSSGEKRRQGSITKNGNSYARKLLIEAAWSYRHPARVSPQIQRRHEGLPKAIVDRSWDAQVRLCRRYRKLAARGKNPNIAVVAVARELSGFIWDISQLAMSLAVPNEARAA

SEQ ID NO: 64459 - protein, 345 aa, unidentified
MTEYAGFDVSKEETAFCIKDGTGRVLAQGKTATDPAALFEVIKEHCLCPERIVMETGTLCHWLVRELGELGLAVDLIDARQAHAVMKLQHNKTDANDANLLAEIARSGFCRPVVAKGITAQMDNMALKGRALLVRQRRDIENTIRGLLATLGHRFAKGTAKFGEHVRAILNQHGELKAVIEPLLAARKALSCNFETLDGEVVQRAKTSPECRLLMTVPGVGPVTALAYLSTIETAERFAKSRSVGAYAGLTTRRNQSGEMDWSGRISKHGDAMLRALLYEAANSMLEVVKKAHPLKDWARKIRKRSSHKKACVALARKLAVTMHAMLKTGEEFRWPPKQDSALQC

SEQ ID NO: 64460 - protein, 303 aa, unidentified
MENIALIGIDLGKNSFHIHCQDRRGKAVYRKKFTRPKLIEFLATCPATTIAMEACGGSHFMARKLEELGHFPKLISPQFVRPFVKSNKNDFVDAEAICEAASRPSMRFVQPRTESQQAMRALHRVRESLVQDKVKTTNQMHAFLLEFGISVPRGAAVISRLSTLLEDNSLPLYLSQLLLKLQQHYHYLVEQIKDLESQLKRKLDEDEIGQRLLSIPCVGTLTASTISTEIGDGKQYASSRDFAAATGLVPRQYSTGGRTTLLGISKRGNKKIRTLLVQCAKGIHTKTGTPVWQIGRLGQGSTV

SEQ ID NO: 64461 - protein, 339 aa, unidentified
MKYIPVGVDIAKHLMQVHFVDEHTGEIIDKQVKREKFLEYFSNREPCLIGMEACGGSHHWARELQKLGHKVRLLKDRFVKAFVMENKNDVMDARAIWLAVQQPVQSVAVKSEEQQATLGLHRMRQQLVKFRTAQINALHSLLLEFGETTHKGRAALAKEVPEALERLKERLPLYLINMLDEQYQRITELDEHLDHIEKQLQAIARQNETCQRLLNIPGVGPLIATAAVATMGDASAFKSGREFAAFIGLVPRQTGSGGKIRLLGISKRGDKYLRTLFIHGARAAALLTKEPGPWITELKKRRPASVAIVAMANKLARTMWAIAAHGRKYDKNHVSIRPD

SEQ ID NO: 64462 - protein, 385 aa, unidentified
MQMMIEGQSHFQPFGLSYWGFEDLNKGVGSMTASYEYHIGVDYHKSYSHLVVQDSSGKTLRSGRVKNDRQSLGGFLERYRENSHAVVEATRNWMVMYDWLDDICDDVVLAHPLKVKAIADAKIKTDKIDATVLAHLLRADLVPEAWAPGERARELRVALREGMFYVRLRTMTKNRIVTVFDRYPEQTAQLKKLGDLFGKAGRLQLAQVKVSEIDRIQIDRGLAFIGDIDVRIKQSEATIRAMTKANANVKLLKTIPGIGEFFARLIDAQIDDIARFRNPKKFAAYAGLVPSTYSSGGKTFHGKIIKQGNKWLRWAFVEAVTPAIASDAQLRAQYEQLKIRGVNKARVAIARKLLTIAFQILRDQRAYEPRGESPMEGASTTSRLS

SEQ ID NO: 64463 - protein, 411 aa, unidentified
MEIVHPRCCGIDVHKATVCASISIKDAGVVEKHKARFDTTSAQLRELAAWLHHHQVTKVAMEATGVYWKPVWNLLEEEFELLLVNPQHLKSIPGKKTDFKDGERIAELLQHGLLRGSFVPPCRIRELRDLTRMRAVLAQERSSIINRIEKTLEDPNLKLGVVASDVVGASGRAMLEAIVKGETDPAVLAELAKGTLRNKIPQLKLALEGKVTQHHRFMLRQWLDMLDFVDHKIALLEQQIIEQSRPFEATVNTWMQVPGLRRINAYSLLAEIGADMSEFQTAGHLASWAAVCPGNRESAGKQSSGKIRPGNPWLRRTLCEAAWAASRTKNSYFRALYQRLTRVRGKNRALIAVAHSLLVTVYSFTVTGQPYQDLGLDYFNRLNKDHLVNALVKRLEKFGNRVILEPRGQAA

SEQ ID NO: 64464 - protein, 369 aa, unidentified
MSDCITMHVGLDVHKDSIEIATADVRGGEIRHVGRIGGDLPALDAALARLRCPVAGMQVVYEAGPCGYAIYRHLVARGIACAVVAPSLTPRRPAERIKTDRRDALKLARLSRAGELRAIRVPDTQDEAIRDLLRAREDTVRVQRNARHRLKALLLRQDVRYTGKTAWTPAHERWLARVRLPTPAQQIVCQEYVDSVHQATLRIARFDTVAGDLLPHWTRYPLVRELQALRGVRQLHAAMLIAEVGPFERFDSPRQLMGFLGLTPSESSSGSRRRQGAITKTGNAFARRALVEAAWQYRFPARVGITIARRQGECSETARAIAWKAQVRLCARFRRLQARRMLSTKAVVAIARELSGFVWAIACAEAASH

SEQ ID NO: 64465 - protein, 415 aa, unidentified
MASRQFCRVAVIAAGSGASFPCRPLHASGTKAYPILSISRATLASDGIIGPRTSASIVPGSNIMENLAMKLFIGLDLGLNKTAICAIDEDGSNVLQVTARSEPAEIIAKLSKLKGKITLVGLEACPLSEWIYGALQDAGFPVFCLETRHTQRFLSTRPNKTDRNDAHGIATMMRVGHFKPVHVKSRPSQFVRSLLIGRRQFMTAMLQIENTIRALLRTQGLKLGKVHRCQFSERVKELCDEEPMLLPAIEPLLAARDEMRAQMRKLNNALERASRADPICKLFQTIPGVGPLTALAFKATIDDPSRFKRSKLVPAHLGLTPRVYQSGEIDRSGHVSKSGDKLMRYLLVEAATSMMLVSKKWCSLKAWAMKVAKRSGTAKAIVALARRIAIVMHQMWVTGECFRFGNDDQSGAMAT

SEQ ID NO: 64466 - protein, 420 aa, unidentified
MEIDHGEQHLIERVAAIDIGNAEMVCCVRVPGAGRARAQEVRTYSTMTPNVLEMTDWLTGLGVTRVVMEATSDYWKPVFYLLEEQVPETWLVNARDVKHLPGRPKTDRLDAVWLCKVAERQMLRPSFVPPPAVRRLRDVMRYRTDLVTVRTAEKQRVEKLLEDAGVKLSVVASDIFGVSGRAMMAALIAGERDPARLADMALGRMRARTGLLEKAFMARFSEHHAFLLATMLARVDTASEDIAAMDARVTAVLDEELHDAAARLTSIPGIGAVTAVAILAEIGTDMTRFPTAAHLCSWAKFTPLTSESAGRTKGRQSTGHGNRYLARTLGEVAVMAGRSHTFLGARYHRIARRRGKPRAIVAVGRSLLVIIWHLLSHPGTTFTDLGADYYETRINHQRTARTHIRALEGLGYQVTLAPAS

SEQ ID NO: 64467 - protein, 341 aa, unidentified
MNNVTLIGIDIGKHVFHLHAQDKFGKEVSRKKCSRPQMMRFLANHPLCTVVMEACAGSHCLAREIKAMGHEAKLISPQFVRSFVKSNKNDFVDAQAICEAASRPSMRFVTPKSPEQQTLSVSHRMRESLIRDRTKTVNQMHGFLLEFGVSLPTGLAVIKRLASVLEEHDLPVRLVALLQRLHEHFVYLSEQIKVLDEELASQLADDDLGSRLLTIPCVGPITASLLAVEMGDAQQYGSSRDFAASVGLVPRQYSTGGRPALLGISKRGDKNLRRLLVQCARVYLMRLKYQKGPLADWVCSLLARRHSNVVACALANKLARIAWAITTRHTQYKTEPDAMNA

SEQ ID NO: 64468 - protein, 399 aa, unidentified
MEPQVFVGIDVGKSQHHATAVNQEGGVVHDKPLPQSEPKIQELLTDLVAKHGELLVVVDQPKTIGALVVAVAQQMDTQVAYLPGLTMRRVADLHPGQAKTDARDAYIIAETARTMPHTLRSITVAEEQIAELSMLCGFDDDLAAQLTQVRNRLRGLLTQIHPALERVLGPRLAHPAVVDLLGRYPTPAGLKRAGRGHVRARLKKLAPRMAARLTDEIFRALAEQTTIVTGTHAAEHIIGRLAAQLQQLTQQRSDVEAEILLVVDAHPLTEVLTSMPGVGVRTAARILTEVVGKDFKSAAHLASYAGIAPVTRQSGTSIRGESPSRRGNKVLKRVLFLSAFASIKGDPVSRAYYDRKRAEGKRHNQAIIALARRRSDVLFAMLRDGTFYESRPTQLATAA

SEQ ID NO: 64469 - protein, 388 aa, unidentified
MYLIGIDISKYKHDCFIATEAGIPIKAFSFDNDRLGFDLFLETLKSLDQSQEIRIGLESTGHYGSNLKQFMCASGYTYLEFNPYLTHMFSKALSLRKTKTDKVDAKTISSMLGSVDYKTLHTRFYHINELKQLVRYRHVQMMNRSKALIEITNILDRIFPEFKPFFNERLSGTAIFILKKFKSRERISKLSNKDYESIKSYSKGKISYVRVQKLKSLALSSVGYETKSDLLLLKLAIKHYEDLSDTLECVDEEIISFMRDIPQTLTSIPGVNLISAAIIIAELGDFKNFTNPAQVISFAGLDTSVNQSGTMETRGHLVKRGSGLLRMTLWQITFSSLRLNPKLYDYYLKKRAEGKHHKVAMVHCVRKLIRTLYYLGVNQLTFDHSLFK

SEQ ID NO: 64470 - protein, 359 aa, unidentified
MNKISMFFVGLDLGDKLSYITIIDQDGEMVEESRLPTTKASFQRKFSTLQPCRVAMEVGAHSRWASHLLNDLGHDVLVANARKLKAIYHNPRKGDRADAETLARLARLDPALLSPIHHRSPQAQSNLAVLRSRDAIIRSRTLLINHARSIVKSSGDRLPSCSADSFAHKVAPDIPETLHPALLPILDTIASLTKQIREYDRQIELLCQDQYPETKLLRKVSGVGPLTALGYILTLEEPRRFQRSRQVGPALGLVPKRDQSGDQDPQLRITKTGDPYLRRLVVGSAQYILGPFGPDCDLRRWGLKLAERGGKNAKKRAVVGVARKLAVLLHHLWKTGEIYDPFYLARKYDQVSDTMPVAA

SEQ ID NO: 64471 - protein, 336 aa, unidentified
MFQFGIDVSKKTLDLCLLREGVKGKVKTRKLKNDFNAADAVIGWLSKQHCEPANVHIIMEATGVYHESLAYALYKAGAQVSLANPHRSREFARGMDILTKNDQVDAYMLACYGALKVPEPWVPPPENVRHLSALLRRRDAPVTDSTREKNRLEKCRATDTPLAVTESIENVLRNLSAEPEHLDALILTHLDQHPELKKDFDLLTSIKSVGYQLGLNMLVILRGHHFDTAEQVAAFLGVVRVEKYSGTSVRGKPKLSKIGPPEIRAKLYLASLCGLRFNPVMKAMYERLCLRGKAKMCAIGALMRKLVHWCYGVLKTQKPFDAEYLSSDARSACKAA

SEQ ID NO: 64472 - protein, 369 aa, unidentified
MTTRKRSTSSTSTGPPAWGEVVQGVDTHGEVHVAAVVCPLGQILGTKSFPATAVGYRRLLAWARKLGAVRRAGVEGTGTFGAGLSRYLLAQHVVVFEVNRPDRSARRLLGKSDPLDAQAAARAVLSGRAQARAKTGDGPVQSARMFKLAKDSAVKARTQAINQLKAVLVVADPALRERLSGLGNRELFRTCARLSPREGGAGGGDEDTVAEATLMTLNLLAQRIEQLTGQIDELNQRLTGLVERHAPQLLAPVGIGPDSAVTLLITMGDNPERLSSEASFAALCGVSPIEYSSGGRSSRRLNHGGDRQANAALHRIVFTRLRHDPRTQAYYERRTQEGKTRREIIRCLKRYAAREVFNLVRMVSTDPPL

SEQ ID NO: 64473 - protein, 355 aa, unidentified
MSQEKYIGMDVHQATISVAVMDAGGKLIMECLLETKAATIVEFIQGLQGTLSVTFEEGTSAAGLHDLLQPHVSRLVVCDPRKNALLKDGSKSDRIDARKLAELLRTNQLKPVYHGEHGVRTLKELGRSYLTLTKDVTRVMNRIKALYRSWAIPCAGATVYAPRHRAEWLAKIAEPGVRVRAERLYQQLDLLQPMRLEARRELLVESHKHAAVKLLRQIPSIGPIRAALLVALLQTPHRFRTKRQLWAYIGFAVETHDSGEYRYVRGKLQRNRERITVRGLNDNHNNDLKNLFKGAAISASTRPGPLRDFYVARVEKGMRPTMARLTLARKIAAISLTIWKKGVEFDSQQLHRQAA

SEQ ID NO: 64474 - protein, 477 aa, unidentified
MEQIHDRVAGLDVHRDQVTVCVRTPGPRGGVHTEKARFGTTTGGLAALAEWLAGHAVTLAAMEATGVYWKPVYYALEGRFLVWLCNAHHVKNVPGRKTDMSDAEWLADVAAHGMVRPSFVPPPPIRELRELTRYRKTQIDARAAEIARLEKVLQDAGIKLTSVASKVLTQSGRAMIEALIAGEHDPAALAGLAKGKLRPKIPQLTAALHGHFGAHHAIVAARILAHLDSLDDAIAVLDGQIAARVAGGYQSAARLLADVPGLERRSIEVIIAETGADMSCFPCPAQLASWAGLCPGNHESAGKRRRVATTPGNQWLRRTLIVPADSPPPGPEQGRRRGRAQPPRRDLAHAHHRRGLRRPRRRLLHLPPRQRAPDPAPSQPAGEARLHRAARRRRVSHRQQTPLPGLRPGTLPRAQFPPHFTPDRAPAVLPHHDELARQAPDQPRGHRGRHLRDHHRHRAARPGRAGHRDLPVRSQDQ

SEQ ID NO: 64475 - protein, 364 aa, unidentified
MDVHLRSTTVCALDAETGEAVTRRFRGNPWGEVAEWMSGFPGPSLAAYESGYLGFAPQRELSALGVDCVVAAVSRVPRSAADLSSKNDRNDAARMAKAILSHDVTPVWVPSPEIEGLRDLAAAHDAATARLAAAKQRLLAFLARRGYAYGGTTPAGNPRRYWTYDFLRWLDKVRPADDGGIRALAALRSEVEAAAETRDDLLAEYRAAVAAGPLSAEVEALQSIKGCGFALAAAFASEVGDFSRFRSGRQVTAYFGLAPKQRSSADSVRLGGISGAGNALVRRLAVEGSWSYVQASHQPKLMPKGSGVPLEVRMHGRKGSERLLRRREEMLARGMPQAKANAATAAELVRWLWALGAMCREATE

SEQ ID NO: 64476 - protein, 343 aa, unidentified
MEAYSGKQFVGIDLHRRRTVIVRTTEGGEVLETVRIVNDVERLASVMARAGECPEVVLEATYGWYWAVDAWQAGGASVHLAHPLGVKAFEYRRVKNDVRDASDLADLLRMGRLPEAWIAPPPTRELRELVRHRAKLVGLRSHCKAEIHAVLAKCGVQVLMSDLFGAAGTQLLDRLDLPSPYAARIASLRRLIDDLEFEIDLFAGMVRGRMAREPGYTAVQNIPGIGPTLAAVFVAEIGDITRFASAPKLTCWAGLTPKHHESDTHVHRGRITKQGSRLVRWAAIESVKNLPAGTVAGVLRERVADRRGRNVGSVAAARRQLEFVFYALRDGHVRALEHLPGVA

SEQ ID NO: 64477 - protein, 355 aa, unidentified
MSTIAQPDAVSQAEITGGVDTHRDTHTAAAIDQTGRMLGHQTFPATGAGYAALLAWLGSFGPVVLIGVEGTGAYGSGLTGYLTGQGVTVVEIDRPSRKTRRTAGKSDPIDAEAAARAALGKVRTGIPKNRDGQVEALRNLRIARNSAVSQRADCLRRIKALIVTAPHDLRQQLRGLTNPRLIDTCHNLRPDPNQIAIPQHAVKTALRSLARRHLAAQHEIAELDQLITELINTINPELLTLNGVGPDVAGQLLVTIGQNPERIHSEGAFAMLCGVAPIPASSGQTHRHRLNRGGDRQANSALYTIVISRLRWDPRTRAYLERRTTNGLSKKDIIRCLKRLIAREIYYVLTKPQTP

SEQ ID NO: 64478 - protein, 469 aa, unidentified
MHTIGIDLSAKGEHKAVMVDGGGRFVSPIIHFRTDPASLMRLLEVAQEDNSDQQLQAVMEPTGMAWFPVAVFLIRRGVVVYLVNSQQVADLRKYYKKHAKSDRVDARVLAKLPVVDEEKLHRLELSGAKSLACQRGCKQLDRLMKQHTACKNRLIALDRFAWPGLEEAVFQDPFGPAASWFRQHWYDPLRVHQAGADTIRQEWLSSGLNPADPADWAVLLVQLAAKVLAIYGEEDTYLDYGLLQAEAIREQEYLAFIDEMHHRLQLKTVRPLYRQLHPSRNLETIPGVGQDGAAIYVSFIGNPQRFGSLRELRGWSGMIPNSKQSSESQASGLKITQAGPSLVKKFAFLDAEVARHWDPQIAALYYNQMVHRGKHHVQAICTCSAHLLNRILVVLRDDRPYELQDVDGTPLSQDQALKIIDRQYTVPEEVRNRNSKRRRLEQIERRSEKKQKEEKPHQLVIPGSTPQVR

SEQ ID NO: 64479 - protein, 386 aa, unidentified
MLDGINLPVPERTGIPGDCATLFVSLELSRSTWVATSLAPSSKKMSKYTLVGGNGRELLDLLARLKTRAEQRIAAPVKIVAIHEVGLDGFWVHRLLEANSVESHVVDPASIAVPRRHRRAKTDAIDGETLLRTLMAWQRGEPRVCAMTVPPSPSEEDRRRISRERAVLLRERIRHTNRIRGLLFGQGIANYNPLNKNRRECLEELRTGDGCPMPARLKAEILREIDRLELVLRQISQVEAERDEMLRPAEASSPAALLMRLKGIGAEFATVLYLEGLFRHFENRRQLAAYAGLAPSPWKSGSIDHEQGISKAGNPRLRTTMVELAWMWVRYQPDSALSCWFRQRVGSERGRTRRISIVALARKLLIALWRYVTHGEIPAGAVTKPV

SEQ ID NO: 64480 - protein, 342 aa, unidentified
MEITTVGIDLAKSIFQVHAVDAAGQVVVRKALRRAQVVPFFAKLPPCLVGMEACGTSHHWARELIRLGHDVRLMPPAYVKPYVKRGKTDANDAAAICEAVTRPSMRFVPVKSTEQQAALALHRTRDLLVKQRTQLVNMIRGLLAEFGIEMARGLRHALELAARLSAGDAAEVPPLAQRVVTGLADQIGAVQIQLTRLEKELLAWHRDSDLSQRLATIPGVGIVSATALAASVSEPERFRNGRQFAASLGLTPLQNCSGGKERLGRISRMGDRYLRRLLVVGMTSLVRRAKATPTSLDPRLPALLQRKPVRVVTVAAANRTARVAWAIMTRGGTYRAPAATAA

SEQ ID NO: 64481 - protein, 383 aa, unidentified
MLETFAAAVDYQTTLILSIEVSNKSWVLAAQVPGLPHTKAKRSVSPGAEALLSAISGYRTRAANLGHKIERVIAVYEAGWSGFWLARWLRRHGVEGYVIQPSSVPVDRRLRRAKSDSIDAELLLRTLLAWLRGEPRVCSMVPIPDEADEDARRCVRERMELVSERVGLTNRIGAVLATLGVGDYNPLLRNRRCRLAQLRTGLGEPLPPNAHAKILRLLDRLELVLAQIAELERERDAVMETEAPDKASKMIQQLTKLRGIGVQSATVLVREAFVRRFANGKALGSYAGLASSPYSSGGMDREQGIGKAGNRRVRTVMVELAWLWTRYQPASAQVCWFRERVRSTGQRVRKIILVALARKLLIALWRFVIDGVVPEGAVLKSAT

SEQ ID NO: 64482 - protein, 455 aa, unidentified
MSNRSRRGLSRGDRRRNEKLARLREIITRETAVLAFDLAADKQVCALTDPDSRVLARRTARVRAWQLAQTLDWGLAAAAEAGFTSVVVACEPTGHRWRVLDQLAAERGVVLVCVQPLLVARAREAEDFTRNKNDDTDAMIIARLVTELRCYLPERADPAWARLRHLGARRARLVVEVGAARQQVRDLLECAWPAVLDAAGKPLDSANWLTAVATGLDRIGATGELSELGQRGWEDFAAAVRAELAPTRWYSAIVRAVFDAATDPAAAAVGVVDQRAGALERVRFALADLAHLRARIAEVETRMTRVLDTLGVTELVTGIPGVSAVGAATILAEAGDPIRFSSARALVKHAGLCPRANESGKYTGTTSISGRGRPELRLAAWRAVFTALQHNPVLAARHAHLTGRAENPLTDTQARIAIAASLLRQLHAVIVTRTAWDPAIAAGLDRREDGAACAA

SEQ ID NO: 64483 - protein, 360 aa, unidentified
MASSTLPRNEKPVLFDHVVGIDTHRDFHVAVVLAPNGGKLAELTFPTSSKGYEQLVTWSEQFGVRPVFAMEGTSSYGAGLCRVLLDAAYDVIEVNRPDRVARRRHGKDDPVDAEASARAFLAGTATIIPKRGGDQVEMIRLLKVAKDSAIDGRTRALNQVRSLLVTAPVALRERLKGLSRSELIATCASFRPGVLDGPMAAAKRALRSLGRRIQALDAELEALMSDLDALTQAACPGLRQSYGIGVDGAAVLLAAAGDNPERIRSEAAFAAICGASPLEASSGNGRHHRLNRGGNRQANATLHRIAVVRLRWHEQTKAYAERRKAEGLSNKDILRCLKRFIAREVFHLLMGKPPRRTAAS

SEQ ID NO: 64484 - protein, 339 aa, unidentified
MQLYAATDLHASNNYLAIIDENGKRRFKQKLPNNPALILEALKLYKEEIAGIVVESTYNWYWLVDMLMAEGYKVHLANPVAIQKYSGLKHADDKHDAFWLAEMLRLGILPEGYIYPKEERPIRDLLRKRGHLVRLRTSLIISLQNIINRNCGKELDCNSMKRLKINHVAPLLEDNEDLALAGSVSKESIDFLTRRIKEIEKAVENKVKMQEPYSNLQTIPGIGKIIALTIMLETGHIERFADTGNYVSYCRKVHSKWISNGKQKGKGNRKNGNKYLAWAFSEAAELARRFDAKARAYYQRKKQQTNFMVAHNALAHKLARAAYRIMKDNVSFMPEKLFA

SEQ ID NO: 64485 - protein, 364 aa, unidentified
MKATDERVVIGMDPHKRSVTIEVMAADEEVLGGGRFGTDVAGFKSMLEYVTRWPDRVWAIEGCNGIGRHVALRLIAEGHEVVDVPPKLSARARVFATGQGRKTDATDAHSVALVGTRMAGLRPVVHDEQLAVLRLLVDRRASLGDDHTRMVSQLHQLLLELIPGGAKKDLSAAQAKALLAKVRPRDVVGKARRRVAAELIADLERVYARKKAADKELKELLAATGTTLMDLHGIGPSGAARLLVEVGDITRFPNREHFASWNGTAPIDASSGDQVRHRLSRAGNRQINRTMRALKRRLSNIVYRTMLDDAVRASAASEVTGPGGQRGSDSDSSATGSQPQHRLFGSATPGPVTPQPRTPLPAVS

SEQ ID NO: 64486 - protein, 337 aa, unidentified
MNIVFLGIDLAKNFFQLCGLNQAGKPVYTKRTGRKELLQTLANIPACLIGIEASTGAFYWQREFEKLGHKVKVISPQYVKPFVRGQKNDGNDAQAIAVALMQPTMQFVPPKSPEQQDIQALHRARQRIVNHRTATVCQIRGLLLDRGIPIGSAVSIARRAIPLILEDAENGLSSRMRRTIAELYDLFNDPGRRIHFFDKEIETVFRQSEACQRIAKVKGIGPETATAVVAIGKGTEFKNGRHFAAWPGLVPRQHSSGDRQVLMNMTKKGDKHLRTLFIHGARAVVRVATNNNDGHMNQWVNRLKERRGFNKTTVAVANKNARIIWSMLRNDTGYQVV

SEQ ID NO: 64487 - protein, 401 aa, unidentified
MVRYIGMDVHREFAQLAVVEDGLVRDEGRIGVTPEALRQWAAGLRGDDQVALEATGNSDAIANLLAPLVGKVVVSNPSKTRAIAEAKVKTDKVDARILAQLLAADFLPGTWVADDRTRMRRRLVMRRTHLVKQRTRVKNQVHAILARNLAPTCPHADLFSGVGRRWLAAQVLPADEQRSVEALLRQLDFHNEEHASVEQDIAIEAIDDPVIARLMTVPGIDVTVAMAVVAAVGDFARFDTPDQLVCYLGLNPRVKQSGNAPASHGRITKAGPAQARGMLVEAAFSASRTPGPLRAFYRRVKDRRGFQIATVAVARKLAVLCWHLVTKGEDYAFGRPSLTAHKRRKLELAAGATPHPGPVAGPSHDYFIKQLRDQEKELVAQAERAYEVVVAHWQPKRPATA

SEQ ID NO: 64488 - protein, 370 aa, unidentified
MKSIIYVGMDVHTTSFTLCCYRFGFDDIFAFAQVEPDYKNILTYLNKVKQNSGSDCQFLCGYEAGCLGYTLFHQLTAHGVNCVILAPTSMPVQLRPAIKTDKRDAMKIAKCLANGDYSAVYIPSDEDNSVKEYIRMRDDAKIALKRIKQQLLSFCTRNGKMFTDGSTYWTLKHVAWLRKLNFGNTLLQETFQEILASYFQTADKVSRYDQRIEELVQRESYREKVKKLTCLIGVGTITALATVVETGDFRRFQTARHYSAYLGLVPGEESSGKHIQRTGITKAGNSHLRKLLIESAQCYGRGAIGSKSKMLIRRQAGNTPQVIAYADKANERLRRKFYKINFRSKRNIAVVAVARELACFIWGMMTDNVA

SEQ ID NO: 64489 - protein, 377 aa, unidentified
MKKVVMCGADVHDNSITTRIAINKETPETKVFRYTVQGRRNLYKYLKLVGRKHGASRIVVAYEASSLGFGMCDECTDVGIECYVLAPTKMPQSEEQRKRKTDQRDAQKILEQLRGHILAGNDLAKVWIPDPQVRDDREVVRMRLEIADKLTEARTQVRTLLKRNKIQKPKTVGKSWTLSDRHWLKRLTEPESELAWGARVGLASLLRQIDALEQEVKEVDKAVKALAESERYRAAAGALVEKLTGVAVLSAMVFLTELGDLRRFTNRRKVGAFLGVVPSSNESGESAKDRKGHITRQGPARVRKVLCQGAWARVTFDPDESKVHARIIEKNPKKKKIATVACMRRLGIRMWHIALEAQLEAGVYESKELPSDQRKAA

SEQ ID NO: 64490 - protein, 411 aa, unidentified
MHHKQRHIYVGIDLHKHHHTAVIINCWHERLGEIQFENKPAAFTDFFIKVRQLVPENMTLVFGLEDVGGYGRALATFLVDHGQMVKEVNPALSYAERNSYPTMQKSDSWDAECVARVLVNKLDFLPDAEPKDVYWSIKQLVTRRNALVKAQGALKNQLHVQLSHHYPSYKKFFAEVDGKTALAFWERYPSPSCLEGVRIDELTAFLQAVSHNTCSRKKAKEILELVKTDGTTTKQYQETRDFLVQSMVRDLRFKKQEMALVEGELRKLMKLLDYQLETMPGIDVVTASALVAEIGDIQRFPNANKLARYAGIAPVHFGSGGKGKGHKSKQGNRTLHALFYQLAIQQIQVAKESKKPRNPVFYEYYQRKRKEGKTKGQALVCIMRRLVNVIYGMMKNKTAYQLPNITERKVI

SEQ ID NO: 64491 - protein, 339 aa, unidentified
MKEVTTIGLDLAKNVFQVHGVDRAGTVVVRRALRRSQVLAWFAKLPPCLVGMEACATAHYWGRELRRLGHEVRLIPPAYAKAYVRRNKNDAADAAAICEAVGRPAMRFVTIKTEQQQAAAAIHRVRDLLIKQRTMLRNQLRGLLAEFGVVAAQGRRGLNELLAILSDPEEQRIPSPLREGLTAVMETWRGIERKLEAIDRQMVAAGRADATYRHLVTAPGYGPILSSAMAALVIDPGAFKRGCDFAASLGLVPRQDGTGGKVRLGPISKRGNGYLRRLLVNGATSLIKCQHARQDPWVAKLLASKPRKVVAVALANKLARIGWALMTRQEDFRSQPAAA

SEQ ID NO: 64492 - protein, 417 aa, unidentified
MEDEVYYERCAGIDVHKKRLVACLRIGRKSEVRKFGTLTHEIRDMVAWLKSNGCQMAAMESTGSYWKPLYNIFEQERLPAMVCNAYHIKNVPGRKTDVKDAQWIAKCLSQGLLKPSFVPDRDQRELREMTRFRKSQIEERSRNINRLQKFLEGANVKLGSWLSDIEGKSATELLELIISKPDFTVDDVAKHMYGKMKSTAKELFLSLEGSITPTQRELFAHVMAVIRQQSAQIEKTDALIQRNLNANYKAAVEALDEIPGIGRVSAEQILAETSADMSHFRNQHSLSKWAGVCPGNNESAGKRKSGRTPPGNKMLKSTLTQCAQSAKRNKKSFFSAQYSRLVSHRGKNRATMAVAHSMLIAVFFVLCGQKFKDLGADYYNQFNREKKINSHVKQLSKLGVAIPDSILRAAIDSPKDG

SEQ ID NO: 64493 - protein, 380 aa, unidentified
MKAITLYIGLDVHKDSIVIAIAEPGRNGEIRLFGTITNDLQALEKVLNRIRKAHPDAILEIAYEAGPCGFGIARRLKQLKVSCLVAAPSLIPRQPGSPFKTDKRDARGLARLLRAGELTGVYIPEPTDEAIRDLCRARTDAVDDHRRCRHRLKGFLLRHGFRYQGKANWSQPHMRYLRELVLPHPAMKTILEEYLQGIDAAHNRIERIEASMLTLLETWRLKTAVQALMAFRGFQLVASMITVSELGDIHRFEHPRQLMTYLGLVPTESSSGPHQRLGSISRCGNSHQRWLLTECAEHYAIPPKISKELSRRQQGQPQAVRDLSWKAQNRLHTRFVRLLARRLQRNKAKVAVARELCGFVWALLRSQDCYKQSTSTSTPS

SEQ ID NO: 64494 - protein, 379 aa, unidentified
MDHAITGTLAKTVLHGALALSKNGWLLALQFSDRVQPSLYPLRGGDTEGLMTQLMAARDRWAKVSGKAPSIVLCYEAGYDAFWLARFLKARGIECLVVDAASVQVNRRARRAKTDRLDVRMLLRALIAWDHGERHVWSVVRVPSVDEEDLRRSHRERDRLVRERTAHINRIKGLLFGQGIRGINVKSKYKTLQIDKLVTGEGRPLPPRLASEITREIARLALIQEQIVALERERDQAPTPCKVTEKKRVQLMCLTGIGPAIAAVMTREVYYRQFDNRRQVAGFLGLATSPHDSGDVERSQGISRAGRGQVRGAIIQAAWLWLKHQPKSAITRWFVQRTAGHSGRIRRIMIVAVARKLAIALWRFLEQGLVPQGAMLANR

SEQ ID NO: 64495 - protein, 339 aa, unidentified
MWYTGIDQHKQFCVLTTYGAAGPRVKQARVPSVPLALQAYIAEFPGPHRAVVESTGAWYWLADTLATLGVDLVLAHAPRLKAIAAAKVKTDPVDSDTLALLLRADLIPRAHMIHPEQRGPRDLMRTRLRLVEKCVSARNSIDRLLEKFNAEDVAQLDALYQLQAGCHAAQIHLLTQQIRDLERALYPSLIPNADVQRLLWIPGLGKVNAFTVYTEIDGITRFPSARQFFSYCRLVPGADNSGGRTRHRSGSKAGNRYLKLAFSHAGIRAVQYYPEIRAFFKAKARKKPIRVARTLVGLELARLVYHVLATQEPFNGQFKGRPLSRTKRGKWPRQASPPA

SEQ ID NO: 64496 - protein, 413 aa, unidentified
MEVIHTHCAGLDVHKKTVVASIIVPQGGGGLYRETRTFETMTSGLLALSDWLVEQGVTHAAMESTGEYWKPIFNILEHGFEILLVNAQHIKAVPGRKTDVKDAEWIAELLRFGLLKASFIPPEGQRELRELTRFRSTFIRERATLANRLQKVLESANIKLASVASDVNGVSGKAILQAVVEGTSKPEEMADLAKGRLKQKRELLARSLEGRVKPHHRFILSELLCQLDALDESISHFDEKIEEYCRPFEEAITLVDTIPGVARKVAEVIVSEIGTDMSCFPTANHLASWAGVAPGNNESAGKRLSGKTTKGNRALVSALTQAAHAASRTKNTYLNAQFHRLAARRGKKRAIIAVAHSILVIAYHLIKSKEPYHDLGFGYFDKRNVQSTAKRLVHRLQELGYNIDLDLLTTTAA

SEQ ID NO: 64497 - protein, 410 aa, unidentified
MLKIVYPICCGIDVHKTFVVACIASTNEKGVTTYKSKRYSTYTKNLRELASWLEANNCRDACMESTGKYWHPVYNVLERSCALVLAHPKYLKAIRGKKTDKRDAKWIADVFKHDLVSGSFIPPAPIRELRDLIRYRTKLTNYMTGEKNRAQNCLTSSNIQLDHAFSDVFGKSATAILEHLLECPGDKNFDVAPFVDRRCKTPIEEIQLAIDGTISPEQTEKLKVIRSHMDALKVCQANLESAILSLAEPFAEQINLVSTVPGIRDFSAIAIIAEIGTDMSVFPTAKHLCSWAGLAPQCNESGGKKKSSRVSRAGAYIKPLLIQCANAVVTSKKHPEIRNRYLAIKKRRGHKKAIVAIARMMLTAIYSILLKGEAYNPELYRQSDISPVDREEQAIALLQKRGYSVLKEAE

SEQ ID NO: 64498 - protein, 477 aa, unidentified
MEQNSIPKPPIKGRVVGFDCHPDTFTAALVQGKTPAEAVVQKVFTKVPLSQMISWAKKHLSPDDMIVMEASGNSAEVVRRFRANHFQAEALESCHLGKLKEAHANNDRISAVRIAKAFLAGTAKIVWIPDAKTQERRDVMHAHRKAVKRHTQMNNRLDSYLSDNGVRLEASLKALEPQIAFAQIRQAKEWSTSQWLIIDSFMAELQAAGHVRQKWEQAMAMEVISDPVLLSLARLTGIRAVTAYSIGAVIGDIARFKRPKSLVNYLGLHPCFDDSGNEQWSGGVGGGHGRKDLRSLLIESAQSILNTASPLARWGRSLMARKGSRNLAVAAVARKLAVAIWYLLKGQWETLENIDRSLSLKIGKIISKVGSQTLQNMQTDRKTLRQLIEQKLKSGRVYQLDPTLVFKPKPSESTKPLTLAEEHRPEVKRPMALKNKLSALSRSRSTTRPVRGIQPQSAGPRSAPLRASGPKSSDAHP

SEQ ID NO: 64499 - protein, 405 aa, unidentified
MDLIPICRSAVGMDVHLNMIEVCAIVEDASGEAQVHRRRFGGFRRDRLEMAQWIAGFAPETVVMESTGIFWKSPYAYLERLGIRALVVNAQHVKTVPGRKTDVGDAEWLAMLARAGLLRGSFIPPEPLRNLRQLSRHHQRVTAMLAAEKNRLVRVLGDAGIRLTAVVSDPHGVAARAMIDCLLDGGTPQQALAHAGRLRAPREELAAALEGEPSEEHLFVARMIRRHIDALEADLAELARALIARLEPYQAALDILLTLPGVDLLAAAKLLVEIGEDMSAFGSAEKLAKWAGICPGNRESAGKRKSGKTAKGNRYLRALLCEIAWSAARTASQFKSRYQALAIRRGAKRAIVAIAHKLLKIVYVLLARRVPYRDSTVDYEALAVKRKAPRWIRQLKKFGLLPQTA

SEQ ID NO: 64500 - protein, 347 aa, unidentified
MKVTTVGLDLAKSVFQVHGVDERGQRVVAKRLRREQVVEFFARLEPCLVGMEACGGAHYWAGKLQALGHTVRLMSPQFVKPYVKTNKNDARDAEAICEAVGRPNMRFVPVKSVEQQTVLSVHRARASMVKMRTAQANQIRGLLAEFGYVIAPGNKSLREQLARLLGQDSALPVPMRSLLEQLLALWRHLDEQARQLERQIELWHRQSEASRRLAQIPGVGPITASALLAAAGADARQFRNGRQLAAWIGLVPRQHSTGGRQVLLGISKRGDPYLRALLIHGARSVIRVVRQRALAGIDTGANPWAQRLVQRRNANVAAVALANKNARTAWALLAHGASYQARLPVPA

SEQ ID NO: 64501 - protein, 397 aa, unidentified
MKSEPPESVIIGLVKTALPSGTWSSKRHNNFFQEALMDKYIGFDIDSNKTSVCIVQKNKTDKYATIGPDAGSMKKFLANQKKDGCRVHLTFEISGQAGFLYDELIDYVDSIKVANPDKMTWIYRTAKKNDRMDARKMAVLLSIGEIPAVHMPGKEVRQRRMIICHRKKLLTGAVTAKNRIRALFKSQGISKAGNRGKWWNRRNRLWMKQFCGGGFVAENLWRVQLGNLLDELEMNEKQIASVTDYLDGYLDKQAGGRLLMSIPGVGPRTAEAVLAYTDDVKRFEGGKEYCSYFGVTPKLDESGSSRRLGHISKKGPSVVRWVLIESSWKVVRYSPAIRAFYEKVRGGQKGRKKIAIVAVARKLLSIMRAMLLTGAMFDEKDVSSLEYGKIEGLRKTA

SEQ ID NO: 64502 - protein, 393 aa, unidentified
MYLVGIDIGKLKHSFCLLEKETGEILVEPVFFENSRDGFNVLLSSFKHLPQRDILIGMEDTGHYNLALLKFLLDRNYQVALINPVATDLTRKMQGGISKNDKLDTLTICDVLSSNQRVKSYRISKYSSFDLYEQKLLTREHHNLKEEENQLSNRLQKCIDVVFPEFNSLFKSKYGIVYMNILKEFGSADAIAHADIRTLRKCFDTGRGKHISLTAEELKEAARNSIGFPSSSEATQIKHLVARIELIKEQIAEIDKKIEEFSIQNTSPILSIPGISHFSGTSILAELGDIHNYSKPSQIIKFAGVAPLTYESSQFTAQHTAITKKGCKYLRKTLYQIITPVIQYNPVFRKFYLLKIAQGKGHRCAQGHCVRKLMRVIYHLLSTGTQFDPALLR

SEQ ID NO: 64503 - protein, 343 aa, unidentified
MEAYAGLQFVGIDLHRRRSVIVRTTEAGEVLEAVRIVNDVQRLASVMARAGQCPEVVLEATYGWYWAVDALQAGGANVHLAHPLGVKAFEYRRVKNDFRDAQDLADLLRMGRLPEAWIAPPPTRELRELVRHRAKLVGLRSHCKAEVHAVLAKCGVQVLMSDLFGMAGTEMLDRLDLPAPYAARIASLRRLLDDVDFEINLFAGIIRGRMAQEPGYTAVQKIPGIGPTLGAVLVAEIGDITRFASASKLTCWAGLTPKHHESDTHVRRGRITKQGSRLVRWAAIESVKTVSKASEVGVLRERVADRRGRNIGSVAAARRQLELVFYALRDGHVRALEHLPRVA

SEQ ID NO: 64504 - protein, 340 aa, unidentified
MEITTIGIDLAKDVFELHGVDGKGRVVLQRRLTRKRLIECLAKLPACLVGIEACGSAHHWAREITKLGHEVRLMSPQFIRPYVKGNKNDANDAAAICEAVGRPSMRFVPVKNQHQQDIAALHRVRSQLVKNRTALANQIRGLLGEYGITVVQGIDHLRRALPVILGDEANGLSGMFRETLAEMAERLQWLEERCRRYERRIELVFRQDERARRLGQIEGVGPLIATALVAAVGNAREFRSGRELAAWLGLVPRQYSSGGRNVLLGISKRGDRYLRALMIHGARSALRVAARKRDPRSIWISRIKLRRGPNVAAVALANRNARVIWALLIRGEDYRTPALA

SEQ ID NO: 64505 - protein, 320 aa, unidentified
MRNAVGLDISKLTFDASAMVGNAEYSAKFDNDSKGLDQFSDRLKSLGCQNLHICMEATGSYYEEVADYFAQYYSVYVVNPLKISKYAESRFKRTKTGKQDAKLIAQYCRSAKESELVKRQKPTDEQYRLLRMIAAYAQIKSECAAMKNRHHAAKDEEAAKAYAQIIKAMNEQLEVLKEKIKEQTEKPNCKEGVKRLETIPAIGRMTAAVLFHHLTSSKFETSNKFAAFAGLSPQQKESGTSVRGKGKLTKFGNRKLRAVLFMPAMVAYRIRAFPDFIKRLEEKKKPKKVIIAALMRKLAVIAYHVHKKGGDYDPSRYKSA

SEQ ID NO: 64506 - protein, 393 aa, unidentified
MRKPKKQKKPLNDLSRSLIPFDPNQTLTAVVELSKKAWLVAGIIPGVERQPLKKLAADENELLKLLERWRAEAEKAGHKITRIAVAFETGRDGFWLARWLRARGIEAHVIHAASVAVSREHRRAKTDRLDTEQLKRAFLGWLRGEREHCKMAAIPTVAEEDAKRPHRERETLVGEHTTIVNRVKATLARLGVRNFNPKLKKAPERLEHLRTPEGEPISPNTLAELQRDLARKQLVAEQIGQIEKARLEQLKQAPKAGANLMVLVLVRVIGIGIETADMLVKEILSRNLRDRRAVARYGGLTGSPDESGSQRREKGLARSGNARVRKGMIQLAWRFLEFQKESALAKWFRARTENNRGSRKKMILALARKLLIALWHFVRDGVVPEGVVLRPAH

SEQ ID NO: 64507 - protein, 350 aa, unidentified
MKIVGCDFHPSYQQVAIFNTETGEVEDKKLIHATGEAEKFYRELETPALVGMEATGNSRWFELMVEKLGHQLWIGDAAKIRASYVRKQKTDKRDAGHILKLLVEKRFPRLWVPDVRQRDMRQLLTHRHKLVRVRTRLKTELQHLALNQGIQKKRQLWNEKGRALLASLPLQGWAQQRRKDLLQLLGMVEPQIEQLDKAVEQAAKADPQAVLLMSQPGVGPITALAFSVTIGDVSRFERSKQVSSYLGLIPTEHSSGSKRRLGSISKQGNVFLRALLVEAAQSVVRHDPGFRKEYQHRCHHKEKGIAKVAAARKLAVRLYWMLKSNKSYTELVLNGGSPRHPVAAKAKPLS

SEQ ID NO: 64508 - protein, 395 aa, unidentified
MVSPELQVAVDVGSRCHRVAIGDAQGRLLEEFDVEHTAAGLSGFFTRVERVRARCGWPVAVAMEGHNGWARPLDRQVLLRGWRLYNVNNLKLARYKEIFPAPAKTDAIDARRILELFRLRAQLRVAREVLQEVARVPCENDKLKRLTRRRRQLVNEKTRVLNRMQADLQAVCPGLLAITAEADNLWFLSLLSCREDLRKLARLRKSSLLGLTGIGRKYASVIQAWQPQALFSDEVEWAGPMIVADARRILELKGEIDALEVLIAQIANDSEIAQHIDSVPGFGAICSAELAGEIGTLERFEAEGGLAVYVGMAILDDASGQHHGTKRPRQVNVRAKAAMMTAVARHMEQVAVSRAYYEKKRAQGKTHNQAVRALGRQLVRVLWSMLKQGRDYELR

SEQ ID NO: 64509 - protein, 348 aa, unidentified
MGYYVGLDVSLDTVSVCIVDEQGKVIREQEVPSTPEGIGGFLLGTGLQVIKIGLESGNLTHYLTKGLLSMKYEVIVMDSRKMAAILAVTINKTDKNDARGIAEALRVGHYKQCVHRSDDSLETRTLLNGRGTLVDERTHLVSSIRGHLKVYGVKLGKGKDKAFREKVETSISALKTSVQKTIKALLNVLDVLDAEIKKLDKEAVQLGKHDADVQLLQSIDGVGPITALAFKAEMDDPTRFKDSKDAGAYVGLTPTQYSSGETQRQGGISKRGSRRTRYLLVEAATSLLTRSKKWSKLKAWGMKLMKKKGKKKGIVAVARKMAVMMHRMLITKEPFKRTDKLKEEKKVA

SEQ ID NO: 64510 - protein, 317 aa, unidentified
MNNTEIQTPVNVGVDVGKANLDIALHPSGQFYTIPNTEAHIRRFVRILKNYEIERIVVEASGRHEHALVQACDKAGLPIIVVNPISVRRYAQAIGVLAKTDRIDAQVIAQYAATLKPEFKPIPDKTSQKIKDLLVRRSQLLEMSTMEKNRLQILPKSLHRSIKSLLRMLQNQIETVTRQIEQEVAKVDQWRSKMEIMTSVPGVGKVLAYTFLSELPELGSLNRKEIAALVGVAPINRDSGKLNGKRRIRGGRHRVRTVMFMAMLSSIQCNPVFKRFYERLKAQGKIPKVALIACMRKMIVVLNTMVKNQEPWRGEMA

SEQ ID NO: 64511 - protein, 346 aa, unidentified
MTTEASTKSYAGLDLHANNTYCAVINQSGQPLFQQRLDNELPTICQALQSYQPHLQAVAVESTFNWYWLVDGLQAAGFPVQLANPAKIQQYSGLKRTDDQSDALWLAEMLRLGILPTGYIYPKEPRAVRDMAPRHRMSGVVQQATRTLLSLQSMVTRHTGQTVRGRGLEDWTLVELREAFPEAASQETAAALLELLGEQRRIQRVLEKNVLARAKVDGAFARLLSLPGVGNILGMTIMLETGPIERFASAGDYASYCRAVDSRCDSAGQKKGENNRKNGNKYLAWAFVEAANYAARYNARAQAWLARKTARTLRVVAVKALACKLAKAAYYVLRDDVEFSEQKLFG

SEQ ID NO: 64512 - protein, 359 aa, unidentified
MDIQSNKLDFSNQNIYVGFDVHLKSWKVTILTEKVAVKTFSQDPNPELLYQYLMRNFPGGIYHSAYEAGFCGYWIHNKLISLGINSIVVNPGDIPTTNKERVQKEDQRDSRKIARFLRSGELKAIYVPSLKTLEDRGLLRARATLVKDLTRFKNRIKSFLYFHGIDYPESFNKSQSHWSKRFMTWLESIELTEESGKITLSSFIQQSKNLRETVLNLTRQIQKLSQTETYQNNINLLRSLPGIGILTAMTILTEVENILRFDNFDKLCCYIGLVPSTNSSGEQEKIGDVTSRGHSVLRNAIIESAWIAVRHDPVLLKYHLDYCKRMDPNKSIVRIAKKLLSRIKFVLKNKQPYVSSWAK

SEQ ID NO: 64513 - protein, 322 aa, unidentified
MNKYKETFGVDISKDVFDVYGSCEGHNQYKNDESGFKKFLKELPEGSLVVMEATGYYHYRLAQFLYKNGVIVSVVNPLSIKRFIQMKLAKVKTDKSDAKAICEYALINEVPLYNALTDTQSECLQLFRLLDTYLKHRTATKNKIHGEVVLGVPSKFVYRSLIRNKKQLNKEVAAIESKILSLVKEDQQEQLTLLTSIPGIGQKTALFLIVVTDGFSKFENASQLCSYVGITPTIRESGSSVRGRARISKVGNRKLRNLLFLCSFNACKHNKACKEVYERIVNKGKSKKLALIAVANKLLKQSFAIAKSGRPYDETYVSILPR

SEQ ID NO: 64514 - protein, 370 aa, unidentified
MLDTTTFVGLDVHARSIKAVSLDVMTGEVRAATFGYDAGAVAEWVRSVDPGARCVYESGVTGFDLQKRLSGLGVDCVVGAVSKMIKPSADRRRKNDRNDAEFLARMLSVGNVVEVWVPDDECEAARDLTRALEDARDDLSRSKQRLSKFLLRHGLVFDERTPTGRRKGNWTRAHWSWIESIRFAEGADNDALAYYVDAVRWAAEEKARLEGLVEAEARKPRWRRRVDSLRCLKGVDTASAADLVFEAGEFSRFRNARSFAAWVGLTPSEHSSGESDRRGAITKAGNKHLRKTLVEAAWHYMTCSGRPKDLAKGQVPDRGARRHAAKGVRRLVDRREALLARGVHGNKANVATARELACWVWAVGLMAEEA

SEQ ID NO: 64515 - protein, 467 aa, unidentified
MKNYNYNLYVGIDVSKGKADAAVLAVPELRSVKPRFLRKKLSFKFIKSEVTEFLNTVRRYSSDQHCIHTYFALEVTGIYSTNVYSFIKKNCNGDEEIHQLNTDFVNKWRESHNISKSDPLDAQTISTIIGTDDDVRYVSDSVFENKNGYQDLKALVHRHYQIKKLYSQETNRLIALCDCYFPELQYVFEPKSAAFLAVLSQYPTSHDIINASKNEVFCLVYEASKHRCSMDKIDKLFNYAQDTLVPHVSNHIRCVILNTVESIINIRTQLRLIEKDIRALAATFNVYSLLMTITGCGPLTAAVIIAETGNIFRFKNADHYVSYSGSSPRNKRSGKSVEIMGKISKKGSRYLRHALYMIAEFARRHNPVLRHLFERVKNGNKKRHRLAVIAVANRIARYIYSIMKSESSFIIMHENIMRLPEETRNTFFNSISLDFPGNTRKQIYQYSDINGEIHRFVYKNEATESVA

SEQ ID NO: 64516 - protein, 372 aa, unidentified
MRHHSEAFIGIDTSKSRNAVAIAEGGRGGEVRFLGEFPATEAAMHKLVTKLEAKYSRLTFCYEAGPTGYGLYRLITSLGHECIVAAPSLIPKKPGDRVKTNRRDAVSLTKLLRAGELTAVWVPDERHEAMRDLSRARLAANKDLQGKRQQISSLMLRLGRCYPGRTTWGPAYMKWLMSQKLEHREQRMALEELLEGVRQEGERVVRLEQAIREAVPEWSLAEVVTALQAMRGIDLIAAVGVLAEIGDLSRFQNPRELMGYLGLVPSESSTGDRIKRGGITKAGNGRARRILVEAAWAYRHPARVGREKQPKVAAAPRRVREIAWKAQTRLCGRFRTLLRKGKLPTVAATAVARELSAFIWAINREVMQTRRA

SEQ ID NO: 64517 - protein, 326 aa, unidentified
MAKRITVCAGIDTGKRKLDVALDGSAEQLQVDNTAEGCKTLLQWLRQHRVKRVGIEASGGYEQAVVAELRRKRFVVVVFQPAQVRAYAKFHLQRAKNDKIDAALIAACTAAVKQIHPAPDPRLLPFAEHLTLIDQIGEDIARLKNRLETCRNARLRALWKENIAHLVKLEKGELKTLVAAIRKHPDLAKRLDLINSIDSIGLPTAVAILVRMPEIGQITRQQAAALAGLAPYDDDSGDKVGARHIQGGRERLRRALYTAALPGAFRWNRQLIALYQRLRTAGKEHKHALIACARKLLVFANAVVARGTPWQDKPQTGAAVTSPSVA

SEQ ID NO: 64518 - protein, 400 aa, unidentified
MNPVVGLDVSKGVSEVQAFLDKGIPYGKSFKIYHTSEGFDSFLHFLIELENKTLIKPTVILESTGHYQAPILQFLEKYDYLHIVINPILSYQAKKTSLRKVKTDAIDAYNLCELFYKEELEPYKKRGISLLNLRHLTRQHEAITGLYIQAKLQFHTMLDQVFPEYRRVFGDLFSKVSLNLLSEFPTSEKVLEICEQNLGEKIHLLCKSRSHQWALKKAIKLKEAAKSNPFEKIVYQSHLVSLNMFIQMLLQYQEHLSNLEEQIDTLAKDIEEYKIIQSIPGIGEKIAATIISEIGEIDRFNHPKKLVAFAGVDPSVHQSGKFTATINRITKRGSSRLRHVLYMAVLCGIRSSRNKRLKEFYDRKREEGKPSKVAIIACVNKLIHWIYTLLKRKETFIDLS

SEQ ID NO: 64519 - protein, 436 aa, unidentified
MPESIPYLSVGFDVGADFTWMSIMLPNGILIGKPFKIIHSDPQSRELAISKIKEAQEMYSLESRCFLESTGIYHIPLLCFLRDKGFDCAVINPIITKNSTNMNVRKLHNDKFDSKKAAKVGLDASLKASIVPDDAIIDLRNLVRDYYYFKDLQSAIVLKLHAELKVSFPAYLNVFSKVTTQTSLKLLEAYPLAADMLAAPKDELVETIRSTARFGETYALARYDAICTAAKDAAVFGRALPSNALRIRLYIKMYREYQAHLDSILEELHQAVGKLEGTPDYDRISFIQTLHGVGFLSAVVLIAEMGSFDRFSSPKKLYAYFGLDPGVNDSGKFHGDRVHMSKRGSSLARRILHMVAINNLKVDKATKTPVNPVIYDYYTRKCASKKKSVAVGAVMHKICNIIFAMLRDNKPFELITPEEHRERYAAEHPESVNTAA

SEQ ID NO: 64520 - protein, 348 aa, unidentified
MYVGIDCHKRFAVATKMDARGEVLEQVRLANTEEDLGTYLCALPPETAVAVEATGNWSRFYEMIEERDLAVTLAHPYKTRAIAAARIKTDKIDSTMLAHLLRTNLLPAAYIPPRSVRDLRELLRYRASLVSLRTQIKNKVQAILSKPGTVPPVKHVFGKKGTRFLEQVPLRSCYRTALDGYLTLLQTLQTERDRLGEVLATQAQADSQARLLQTIPGIGTYSALRILSEIGEIDRFPDARRLCSYAGLVPSVHASGGTTRRGPLTKQGSKWLRWILIETSLHAVNGAPQFRSLYWRVQRKHGANTARVAVARAVLKTIYAMLRTDKPFEARPRRVRITGQRPGVIAAA

SEQ ID NO: 64521 - protein, 341 aa, unidentified
MQEFIRIGVDLSKGFFQVHALEREGSPAVKRKLSRARFLAFFAGIAPCRIGMEACGSAHHWARELRAMGHEVALIAPLYVKPYVKRGKTDANDAAAICEAMSRPEMRFVPVKSADQQAALMLHKARELLIKQRTMSVNALRGHLSEFGLVAAKGIHRVKDLIALAQAEERLPEAARQATGILAAEIEGLDAGIDKLERQIERASAINPMSRLLDEIPAFGPLIASAMVAFHPDPHVFRSASDLPASLGLTPGQHSSGGKERLGAITKKGNRYLRKMLVVGCTSVLRVAHKYRGALAEWIVAMRARKPERVVAVALANKLARIAWAMMTTGESFRTELYVKA

SEQ ID NO: 64522 - protein, 403 aa, unidentified
MNAVGVDVSKGKSTVAILRPQGLVVASPYDVSHTGSDLKELATAIKKLHGETRVVMEATGNYYEPIARFLHEQGLFVSVVNPMLISDFGGNTLRRPKTDKKDAVKLALYALTYWLDLKRYEPQEDLRKSLKMLNRQYQFAVKQQTMLNNNLISQLDLTFPGINRLFTSPAKAQDGHLKWVDFVSEFPHCDCVAMLSPGIFKKKYRRWCEKNGYHYRSSKADEIHAFAREAVSAVPASDAITLIIRQAASMLNAALENTTTLHYEMKRIAEMLPEYETVMSMYGVGDKTGPQLMAEIGDPRRFHSRRAITAYFGYDSENDDSGQKVSKSNPITKRGTSALRRTLFLIMIALIQNQPEDNPVYQFLNKKRSEGKHYYCYMTAAANKFLRIYYAKVNEVLNAQPSG

SEQ ID NO: 64523 - protein, 393 aa, unidentified
MKLIGIDIGKNKHFFCVMDQQTGEIISQPVSFSNDKEGFDFLVQKIKSYPKDSILIGMEDTGHYHFALLKYLLDLQYTVALINPKTTDFNRKMQGGITKNDKLDTINICDVLDTPERKKQYRITKVNSFDLYEQKQLTRHHHNLKEENVYKNHLQKCIDIVFPEFNKLFNSKYGIVYMNILKMFGSAENIANTDIRTIRKCFEIEGRGNRISLTPERLKECAISSIGISSSAEVIQIKHLTAQIELIEEQLTEIDKKIEEFSIQNKSPILSIPGISHFSGTSILAELGDISNYSKPSQIIKFAGVAPLHYESSQFNAQHTAITKKGSKYLRKTLYQIILPVIRHNPVFNKYYQLKISQGKGHRCAQGHCVRKLLRIIYHLLKTNQQFDPQLLR

SEQ ID NO: 64524 - protein, 386 aa, unidentified
MQKLNDLSRSLTALEPDGTLIAVIEMSLSSWLVAGIVPGVERQPLKKLAVDESALLKLLHRWREEAEKAGRRIERIAVAFEAGRDGFWLARWLKARGIEAYVIHASSVAVSREHRRAKTDRLDTELLKRSFLGWLRGERDHCKMVEIPTMKDEDAKRPNREHDSLIGERSRIVNRMKAALVRLGIRGFNPKLKRATTRLDGLRTPEGEPIPPNALAELRRDMERRRLVNNQIAQIEEERLERIEQAPSDGPHVMVRLLARVMGVGIETADMLVHEVLSRNMRDRRAVARYAGLTGSPDESGRKRREKGLARSGNARVRRGMIQLAWRFLLHQKNSALTKWFRSRTENARGTRKPMIVALARKLLIALWRLVREGIVPDGVVLRPAQ

SEQ ID NO: 64525 - protein, 319 aa, unidentified
MSKSITETAGIDVSKRKLDVALAAGPDRLQASNDPAGYQQIESWLREHGVERVGLEASGHYEAAVAAHLRRVGFCVVLLDPAQVKGFRRFKKKRAKNDKIDARLIAVATADMEPDSIRPAPDERLAPWAEHLTLIEQIGEDISRLKTRRDRYSLPAHKRYLETEITRLSRRRDREIVRLLAKLRRHPDLALKLDLLESIPGLGPLTALSFVLRMPELGRMTRAEAAALVGVAPFDDESGEHTGERHIAGGRKRLRRSIYQAAFSASQRWNPILLALYKRLIAKGKHHKVATVACARKLVEIANAILARATPWQDKAVTP

SEQ ID NO: 64526 - protein, 327 aa, unidentified
MITIGIDVSKAKIDCLWLRDVVTGKVKSKVFKNTAEGHSALLQWAIKNAHVESDEIHFIMEATGIYHEALAYALYEAGTNVSVVNPAQISSYGKSFGVRSKTDKKDSFVIARFGATQQPRLWHPEPSEIRTLKALISRYDAVCQDIQRESNRLEKATIGGGVPDEVITSIETILVQLKAEKKRLEGLINKHFGQHPNLKQDRALLESIPGIGPIVSRLMISVIRSRKFTAAPQCAAFLGLVPVQHESGSSVRGKSRLSKAGNASIRAKLYMAAVVAIQHNPDIKQQYERLLKNGKSKMSALGAAMRKLVQICFGVLKHQTPYQSRVN

SEQ ID NO: 64527 - protein, 424 aa, unidentified
MSKKKQTAAGLGAIYARVCGMDVHKDVVVACVRILDMKDGTVQSTLRRFGTMTADLLELRQWLAQEQVTHAAMESTGVYWQPVFNILEGHFEVWVVNAQHIKKVPGRKTDMKDAEWIAQLLQCGLLKPSFVPDRQQRELRDLTRQQTKLLQQRSAVANRIQKVLETANIKLGSVATDVLGVSGRKMIEALIAGERDVGKLAELAEKRLRHKIPQLQRALEGELTEHHGFLLRRLLDQYDFFAKEIARISERLAAIAPPSFRAAVERLDEVAGVAERGAQALLAETGTDMSRFPSHKHFASWAGRCPGNRESAGKRKSGKTPAANRHLDAVLTEIAHAAVRKKGSYFKSQYHRLAGRRGKKRAIGAVKHSILVTIYFMLRDNKPYTDLGANYFDKLNPQQQIRYHVRKLKELGQGVELSALNDAA

SEQ ID NO: 64528 - protein, 315 aa, unidentified
MTDRCFVGIDVSKARLDVAWTTSQGQTFATSNDEPGWRALVAHLQGLAPILCVLEATGGYDAGVASALVLAEVPVAVVNPRQVRDFAKARGTLAKTDALDAAVLADFAARMEPTPRPLPDDVSADLRALVARRRQLVEMLSAERHRLAQVRPAVQPSVQAHIHWLRTQVKDTDTQITQQVQAHPTWRVRDQQLRSVPGIGPATSARLIASLPELGSLSARAIAKLVGVAPLNNDSGTRAGTRQIWGGRTVVRQSLYMATVVAIRFNPVLRPFYQRLRAAGKPSKVALVATMRKLLTILNALLKHGTTWSPAAAQA

SEQ ID NO: 64529 - protein, 343 aa, unidentified
MEQYIGLDVSMKETAISIRQDGKRMWRGKCASDPQLLAALIRKRAPDVRRVVFETGPLSVWFYHALMAEGLPVICIDARHAKAALDMAANKTDANDADGLAHLAEVGFYREVRVKGFDSMLIRTLITARRQLLKMRLQISNQIRGLMKTFGLVVPKGAGSVFERNVHDLLQGEAKLARIVVPMLRAWSDIRYQIAELSKQLAAMAREDQHCRLLMSVPGVGTVTATAFAAAVEDPANFRNSRAVGAWVGLTPRRYQSGEVDNDGHISRRGDNQLRGLLYEAAAVILNRSTDTSTLRTWAMELKERLGFKRAAVALARKLAVIMHAMLRTGELFDPHGGTPAAA

SEQ ID NO: 64530 - protein, 369 aa, unidentified
MEQSTEIFVGIDVSKARNAIAVASGGRNGEVRFVGEVDSSVESMRRLIKGITAKHALAHFCYEAGPTGYGLHRLIVSMGFPCSVVAPSLIPRKPSNRVKTNRRDAVALAKLLRAGELTAVWVPDESHEAMRDLVRARAAAVETLCVNRQQVSAFMLRHGRIFPRKTAWGARHLRWLQEQKFDHPAHQIALQEMVEAVRISKERVERLEAAIKEFIPEWSLSPVVQALQTLRGIDLIVAVTCATELGDLRRFDNPRQLMGYLGLTPSERSTGDTVRRGGITKAGNGRVRHLLIESAWTYRHPPRVGKEKLYKIEAAPPRIREIAWKAQTRLTARYRALSARGKKTTVVCAAIARELVGFMWCVAKEAQIA

SEQ ID NO: 64531 - protein, 370 aa, unidentified
MLDTTTFVGLDVHARSIKAVSLDVMTGEVRAATFGYDAGAVAEWVRSVDPRARCVYESGVTGFDLQKRLSGLGVDCVVGAVSKMIKPSADRRRKNDRNDAEFLARMLSVGNVVEVWVPDDECEAARDLTRALEDARDDLSRSKQRLSKFLLRHGLVFDERTPTGRRKGNWTRAHWSWIESIRFAEGADNEALAYYVDAVRRAAEEKARLEGLVEAEARKPRWRKRVDSLRCLKGVDTASAADLVFEAGEFSRFRNARSFAAWVGLTPSEHSSGESDRRGAITKAGNKHLRKTLVEAAWHYLTCSGRPKGLAKGQAPDRGARRHAAKGVRRLVERREALLARGVHGNKANVATARELACWVWAVGLMAEEA

SEQ ID NO: 64532 - protein, 356 aa, unidentified
MSRDIKYIGMDVHKEATVIAVLNGSGKLVMESIVETKASSILQFIHGLRGELHVTWEEGTWAAWLYDLLQPQATQVLVCDPRRNAFLKEGNKSDKIDARKLADLLRTGMLRPVYPGEHGLRTLRELGRRYQTISQDLNRVMNRIKALYRGWSIPCAGTQVYAPRYREEWLHKIEHAGVHRRAELLYQQLDGLQALRRTLRPELLAESRKHKASKLLRQIPCIGPIRAARLLALMQTPHRFRSKRQLWTYSGLGIETRDSAQYRFVRGQLQRAKKPQQIRGLNRNHNHEMKEIFKGAATRASCGVSRLRDFYVALLDKGMKAEMARLTLARKIAAIALTLWKKEERFDAEPLKLQAA

SEQ ID NO: 64533 - protein, 346 aa, unidentified
MAMVCGLDLHRGQITFDAAVVENGEVWRGRLWSPDRERFRRWLREDVARRAGDGPVSIAVEGCTGWRYVVEEVMAAGFDAHLAEPADTQAARGRKQRAKTDRSDARLLRVLLEDGELPESWIAPELVLEWRERVRVYKALVDQRTQWVQRIHAELYQHGVAVPEGAIRSAATRASLETVELSVAARERVTIGYRMIDDTDAIALPLKKELQHFGSRQPGCRALVDAHYGIGGLLATVIWSELGDCQRFHRSMQVVRHAGLDVTVDQSDRRRPGGHLSRQGPVTLRWALYEAAKNSSHGRSPDHGYYATVKARHDGKLAAISVARQLARRCYHTLRAVDPEQVYAMP

SEQ ID NO: 64534 - protein, 331 aa, unidentified
MKKLDFVFFIGIDISKLTFDAAIINGETTSSFVFDNNQKGIRAFLRLLRNQRIVLDDTLICMEHTGVYGRLLITKLLEKQANFCVEMSLRIIRSLGIQRGKNDKLDAIRIARYAVKNCNEIELYKPIPEVLEKVKVLIKIREQLVHFKADMNKYPNELKTFAPELSKLAQKNIKKTTKCITAEIKRIEADLQALVLSDEKLNTTIGLVTSVTGIGIFTALYFVIYTNFFTRYQNPKQLACYCGVVPFKHTSGSSVHKKSRVHHIANKTLKKQLHMCALSAVRHDPELKIYYERKADEGKNKMLVLNNVRNKLVLRVCAVIKRQKPYRKIVA

SEQ ID NO: 64535 - protein, 355 aa, unidentified
MSKITRVGVDLAKTVIQVHAVDAAGRVLVRRALKRDMFIDWCVQLPAGCLIAMEACSGAHHWCRKLQALGFDARMIPAQFVAPYRLQGSSGKNDANDAAAVCEAASRAHMHFVRPKTIEQQGMLCVHRLREGLKEERHACINRIRGLLAEFGIVLPQSPEVLRRHLRDLMEDASNELASMARLVLQRAQQHWQELDEHLQWCDERIAAHKAADPQVQRAAQLLGVGPVTASALIASVGDFKQFKNGAQLGAWLGLTPKQNSSGGKARLGGITKRGDTYLRTLLIQGAKAVVLTGKGCTNNPIGQWAQRLRERVGWQKAIVALANKNARILWAVLTREAPFDAHHISVKPTAVAPL

SEQ ID NO: 64536 - protein, 432 aa, unidentified
MNPFSVSPEPSPVAAWVGLDWADQQHVICLYEVATGQSTVSRLEQKPEALQDWLSQLRQRFGGSPVAIVLEQARGAVIYALLSADFVRLYPVNPQSLASYRKAYAPSGAKSDPADAVLLMEMVRNSPERFRAWKPDDADTRSLQLLTQNRRQLVDQKTALTHQLTSLLKTYYPQALELPGVLDSLQACDFLTQWPTLEALQHARPGQIRQLYREHGHPSPEQLDRRLEQIREARPLTTDPAALLSGSMMVQALVQQLRPLLGAIERFDRQIAVLFRKHPDRPLFDSLPGAGAVLAPRLVAAFGTDRDRFQSAQQAQQLFGIAPVTEQSGRQRWVHWRWACPKFLRQTFHEFAGHSRHWCGWAKALYHRLRRCGKGHHAALRVLAFKWIRILFHCWKTRTGYDEQIYLKSLQKRNPTLWAEIQLLPPRKKKVA

SEQ ID NO: 64537 - protein, 344 aa, unidentified
MSILKYSVGIDVSKSDFKANVSSIDTEQSVKVKASRTFVNSASGHAEFAQWVTKNSKDCDVPVHFLMEATGVYHEQLAWFLYKHGHRVSIILPTKAKRYLQSLGHKSKNDRIDAQGLARMCAEQNLPLWKPISAQVYRLRALTRTHEDLQVQRTGLIAKIKSSKYGMYETKKVDRINQKLLNVIETEIEGLEEEIRKAIEEDELLNEKYRIINAVKGLGLMSFAVVVAETNGFALFTNSRQLTSYAGYDVVENQSGSRSGKTRISKRGNYHIRRILNMPALNVVKYEPWFRGFHERIYSSTGMKKKAYTAVQRKLLCLMYTLWTKNEPYNNMQNCRDEIPEAGG

SEQ ID NO: 64538 - protein, 309 aa, unidentified
MFIGIDVSKDKLDVAIGDAVRQWPNTPEGHQQIVQELKSLSIDGVVLEGTGGYEKAIVGELGAALLPVAVVNPRQVRNYARATGKLAKTDEIDACILAEFGQAVRLTFRPIPSKEQLRLQQQIARRRQLIGMLTAEKNRLQQSDDKLVQRSIKAVIRTLQSQLDQLDGDLQQTIQQTPVWRTKDDLLKSVPGIGPHTSLSLLAELPELGSCSRHQIAALAGVAPINRDSGKFRGVRTTWGGRTTVRSALYMATLSAIRHNPKIKPYYRRLRDAGKRAKVAIVACMRKLLCILNAMLREQKTWQTTPQTA

SEQ ID NO: 64539 - protein, 400 aa, unidentified
MISVGIDVSKGKSTVCVLKPYGEIVCSPFEMQHVEEDLEGFHNLLQKLDGEIRIVMEATGIYHLPVLTFLHEKGYFISVINPFAMKKYAKDNSIRGAKTDKLDSIMIANYGIEKWFRLQKYEGDEETYAELKLLGRRYRYYMELHVKALQELTHILDYVMPGIKKMFNSWNEANGKDKLSDFVERFWHFDRITSMSLEKFTEEYLVWAKEKKYHQSRSKAEAVYELASSGIPTLPSGTPSTKMLVQEAVSVLRTVDSSLTLILTRMQALAKSLPEYSTVREMGGVGDVLAVKLIAEIGDVRRLHNAKALIAWAGIDPPPYESGQFIGSKRKITKRGSSTLRKVGYEVMRVLKSHPAPKDDAVYNYILKKESEGKSKKHAKIAGLNKFLRIYYARVIAVYQ

SEQ ID NO: 64540 - protein, 408 aa, unidentified
MQVVHQRCAGLDVHKDSVVASARWMRGARVHYEVAQFATTTRGLLHMADWLQERRISHVAMEATGVYWKPVWHVLEGRFQIILVNAAHVRNVPGRKSDVNDATWLSDLLAHGLVRPSFVPPTQVQELRDLTRTRKQLVREVSKHTLRIQKTLEDANIKITGVVSDLLGVSGRAILQALIAGESDPERLLACTTGRLTAPRARLLEGLTGLVREHHRFLLRLHLEQIQALHHGIAQIEEQIARLIDPYSQQILLLTTMPGVSTTVAHTLLAEIGADMQRFPTAGHLISWAGLCPRMDESAGKKRSTRIRRGAPWLKTVLVTAAWAAVGAKDTYLRAQFHRLKARRGPKKAIVAVAASMLTAAYHILRDQVPYHDLGGQYFDQRDRSSVLRRLKHRIEALGYHVEVRPAA

SEQ ID NO: 64541 - protein, 453 aa, unidentified
MSKVTPASEPAFAAFIAIDWADREHVWAMEIPGSQQREAGRLEHTPEAIELWAVRWATRFNGRPVAVALEQARGALVYALSKYKHLVIYPIHPSTSHDFRKAVFPSGTKDDPKDAEILLDLLLRHRDRLRVLNPDTEQTRKLQSLVEKRRQLVDERTAFTNRITGQLKLYFPQVLRWFDKLDAPILAAFLQRWPRLNDVQQASPDTLRKFFTAHHSRSHDRIEERLVEIQQARPAITDAAVIDPAVLMVQTFLQVVEVLREAIKKLDKAIDQEFNAHPDHSIFDSFPSAGPVMAPRLLVAFGSQRDRFAAVNEVLSFSGIAPVKSQSGSSRWIHFRWKCPKFVRQTFHEYAGLSIQQCEWAKAFYDQHRAKGKGHHAAVRALAFKWIRILFRCWQSGKAYDETVYLNAQLKRQAPRNPRPKDQQSAAPQGSGKPVKLQLKKVGDFTKLGGITA

SEQ ID NO: 64542 - protein, 340 aa, unidentified
MNKTTTLAIDLAKQVFQLHGTDFRCKATLRQKVRRCQLPALLAQTPPCSVVMEACSSSHYWAREARSYGHKVRLIAPQHVKAFTRGQKNDRNDAEAIAVAAGQPGIPDVAVKSEEQQAILALHRIRARLVKEKLQVSNQLHGLMGEFGVTLPRKSVIGMRRAMMALIEEARVPLLLHAPLKDQLEHLSQIEKRLEDLTVGLTQMANSSSACRRLMKHDGVGPIIATAFAAEVASPAMFKNGRQVGAWLGLVPRQHSSGGKERLFGITKRGDQYLRGLLVHGARSSLRVAERRSDHLSKWVLQVSARRGRHRAVVALANKMARRLWAALRYDDYVPFTAAA

SEQ ID NO: 64543 - protein, 339 aa, unidentified
MNRIVVGVDIAKRVFQLHWVESATGEIVALQLRREKFLEHFANRSNCLIGMEACGGAQHWARSLQKLGHEVKLLPARMVKPFVGGNKNDAADARGIWTAMQQPGIKAVAVKSEEQQAVLALHRMREQLVKFRTAQINGLRGLLTEYGEVMPQGRAGIKRDIPGVLGRLSDRLPAIVIETLREQYARLGELDEQIGQIERRLRQWQSQDSATMRIAAIPGVGLLSATAAVATMGDAKAFKSGREFAAWLGLVPRQTGTGGRVQLLGISKRGDKYLRTLLIHGARAVLTHSKSPPEWLTELLKRRPKNVAVVAMANKMARTIWALLAHERAYQSGYVSRPA

SEQ ID NO: 64544 - protein, 336 aa, unidentified
MSHYCGIDLHSNNHVVVVIDERDKRVFDKRLNNDLSATLDVLLPYRETLKGIAVESTFNWYWLVDGLQEHGFGVQLVNTAAVKQYDGLKFSGDHQDAFHLAHLMRLGILPAGYIYPKEQRAIRDLLRRRMSLVRSASTQLISVQSQIWRSTGMRIKSGELRKLEFIPPLMDKYTLQAVHAGLMVYQAIQQEISGLEKSAFEAIKLTQSFKILQTITGIGKILGLTIMLETGDIHRFAGAGNFASYCRTVDATRTSNGKKKGVGNAKAGNKYLSWAFSEAAHFAVRFEPLAQRFYERKKAKTNGIIAIRAVARKLARATWMMLRHQVPYDAKLMFPS

SEQ ID NO: 64545 - protein, 338 aa, unidentified
MAIVMGLDQHRAQITAEWIDTDTGEVSRSRISPAHRAGVRKFAERFRGQELEVALEATTGWRFVAEELRRVGAVVHLAEPAETAARRGNKKRAKSDRADARHVRELLMIGRLPESWIAPDHLLDLRSRVRLRHTLSHQRGEWQQRIQAVLYHHGCPQRRNLMTAEGLQWLKAQPLPAGAREQVTVALGMIDALEAQLAPLDKELRAYARRQLGCKALMKHFGVGELTAVTILAELGDVDRFSSSREAVRYAGLDITVHQSDQRRSPGHLSRQGPPALRWALFEAAQSAARQGSPDRDYFAQAAQRLGANRACLSVARKLLKRSYHTLRELGEEALQPA

SEQ ID NO: 64546 - protein, 316 aa, unidentified
MDHKQTTYGVDVSKAMLAIAHYEADAVLEIANTPEAIAAWLASVPAGSAVAMEATGVYHRVLAQMAHAADAGVYVLNPQVLKHYAQAVGQRGKTDLCDARMIARYAVHERSKLGPWQPPVLAADTLSRLLVRRRTLVGARQTLAQSFSGMPVLKAQRQTLLASFKRVIASLDLLIRRELARLPEMATLHRRLMSIVGIGEVVATQLVAALRTLCFTRAAAFIAYTGLDPRPDDSGQHRGRRRLSKRGPALLRCLLYNAAMSAAKSKLFKPLYLALRARGLQSTEAIVILARKLARIAFALYKSGEMFDPQRHLKSA

SEQ ID NO: 64547 - protein, 387 aa, unidentified
MQTVADRPEAPTAIRTDLGAIFVSLELSRSTWLITSLSPGGGEKMSKQVVRGGDVAGLLERFARLREKARARTGKVFPFVVIQEAGLDGFWIDRALQNEGIESHVVDPASIATSRRRRRAKTDGIDGEVLVRALLAYKRGEPRVCAMIKAPTPEEEDRRLCRERKVLIVERVRHVNRVKGLLFSQGISGYEPLRRDRRRRLDTLQTGDGRLLPVHLKAQVCRELDRLELLLEQIKAVEAERDVLLAAQQVAAPAPAAMLLDIKGIGPEFAAILWSEGLFRHFDNRRQVASYAGLAPTPWQSGSVDREQGVSKAGNPRLRTTLIQLAWLWLRHQPHSALALWFEERVRRNGGRLKKTTIVALARKLLVALWKYATAGVVIEGAVMKRT

SEQ ID NO: 64548 - protein, 366 aa, unidentified
MVSVPSGPGTVYAGMDTSVREIVCGVLRPGMEVPAVERVPNDEESVRRLIGKLGDRRLLSVCYEAGPSGYELHRLITSMGAACQVIAPSLVPKGPSERVKTDRRDAVRLTLALRAGMLAPVRVPSRDEEAVRDLVRARGDLLDDRRRAQQRLNALLLRHGRVWRAGGKWTCAHRAWVDRQRFGEPALQDALEAYRGALEAREADLRAAEARLSAWARRDPLAPAVARLAAYRGIAELTALTLAAEVVDWHRFPSARAFMGYCGLVPSEYSSGARTRRGSITKAGSEGVRTALVEAAQSYRYRPAVGAGLRARQAGAGPGTLARSWKAQQRLHATWKKMTARGKPHGVVAAAVARELAGFAWAEMTS

SEQ ID NO: 64549 - protein, 355 aa, unidentified
MPSKADTAVARTIGIDTGKNTLHMIGLDEKGAIVLREKVSRTRIAARFVNLPPCLVGIEAGMASHHVARELVALGHEVKQVPPAYSKPFRQGHKNDFRDAHAVAEAVERPSTRCVPIKTDGQLDLQALHRVRSRLIGNRTAVINQIRGFLLEHGIPVRQGYRFLRQQLPQILATRTDVLSPRMIRIVGDLMADWKYLDERIKGVTDEIEALAHADEGCQQLITVPGIGPIISSAMVAAIGNGAAFCKGRDFAAWLGLVPKQMSTGDRTILGRITKRGNRYLRMLFIQGARAVLLRPASWAKHSFGSWLTAATRRLHRNVLTVALANKLARIAWTVLAQGRRYEARVEPRVEPAAA

SEQ ID NO: 64550 - protein, 411 aa, unidentified
MDVLYPVCCGLDVHKKTITACLRFASARARAEEVRTFGTTTRELLRLADWLTAAGCTHVAMESTGVYWRPVYHILEASFEVLLVNAQHVKAVPGRKTDVKDCQWLAQLLEHGLLRGSFVPPAPLRELRELTRYRRQLVQEHAREANRVQKVLETANIKLGDVATDVLGVSGRAMLHALIAGERDPERLADLARGALRQKAEALREALVGRFTLHHAFMLQGLLDHIEFLDQQIARFDERIEEQTRPFGPAIERLDTIPGVGRRSAEQILAELGDDMRRFPTAAQAASWSGICPGNHESAGKRRSGRTRKGNAWLRSTLVESARAAVRNRGCYLSAQYHALARRRGDKKAIVAVGHSILVAAWHILRDGVEYRDLGPDHFDRLNRERLVEYHTRRLAELGLTVQLPGAQATA

SEQ ID NO: 64551 - protein, 401 aa, unidentified
MEGPVISIDVSNGCSHFRCFIDRNKAFGKVHKIKHDVDGFQYLLDCMERLNEKTNEEACVVYEATGVYTKPLIRFLNKHKIKHYMVNPLQAAKMRKTDLHSKKTDKNDPNSIAKVYYDKDLYEYEDEKQIYHNLRVMNRNYEDQLDHLRKYKVTFQNLLSIVFPGYSRLFENPYCDIALAILKKYPHPDMIKNKKPETVAKYLEKHTCHKKKACLKWATKVIEYANKTYPGCEKDEIEVIELLRIIKEVEGCIASCDTQLNAMIQLAEQLPNYFLILSIDGIGPNLACRILAEIGDIKRFSNKKKLISYAGIDPHISQSGDVDGLHLSISKKGNKRLRCLLYLAVSCNLRLKKENDPIQQFYKKKKQQSVPLKPKAARVACTNKLLRIIYGMCNNGCLYQN

SEQ ID NO: 64552 - protein, 338 aa, unidentified
MEQISTIGLDLAKNVFQVHGIDVAGKVLVRKQLRRAEALKFFAALPPCLVGMEACGTAHHWARELTKLGHTVRLMPPAYVKPYVKRGKTDAADAAAIAEAVTRPTMRFVAVKTVAQQSVLMLHKVRELLVRQRTMLINALRGHLAEFGIVAARGPGGVTAVIMALHEAQDGLPDLARQVLHGLIDQMRIIGAEITKAEKRIMAWHRASEASRRLATIPGIGPITASAIAAAVPDATLFRSGRQFAAWLGLTPRAHSSGGKQRLGGISKQGDGYIRRLLVIGATAVIRFARQDNASKTWAARLLERKSARLVSVALANKTARIAWAVLARNQSYTAAAI

SEQ ID NO: 64553 - protein, 342 aa, unidentified
MGEVSTIGLDIAKSVFQVHGVDAGGVVVICKRVSRVKVLEFFAALPPCLVGIEACPTAHHWSRKLQTLGHTVRLMPPSYVKAYLKRSKNDANDAAAICEAVTRPSMRFVPTKSEQQQSALMLHRSRQLLVRQRTMLSNAIRGHMAELGIISAKGRHGTAELLEIITKEDDRIPTVARVSLAVLARQYAVVTAEIGTIEKHIHALHRSSQESRRLEEIPGVGPIVATALVAEVGDWTAFSSGRSLAAWIGLVPRQHSTGGKDRLGRISKQGNRHLRWLLVAGAMAVIRYARQHGTKRLWLVRLMGRRPVKVAAVALANKIARMAWAMMVRGERFSEPKLLPAG

SEQ ID NO: 64554 - protein, 343 aa, unidentified
MELYVGLDVSLKETSICVVDGKGEIVSEGTVISEPAAIAEFIKAKADGAKRIGLETGPTTTWLWHELRAFGLPVICIDARHAKAALSMQINKSDRNDAVGLARIMQCGWYKEVQVKSVSCHEIRAVLNSRAQLVKIKRDLENQIRGLLKNLGLIIGKAGGTVFRRRVEELVGRQGLLWEAVRPLLAVREIVRREIAALHRKLLGLARNDVVSRRLMTVPGIGPINALAFCAAIDDPARFRRSRSVGAYLGLTPRRYASGEIDWSGRISKCGDAMVRTYLFEAAGVLLTRVPRWCALKAWGLRLAKRSGLKKAKVAVARKLAVIMHRMWRDGTDFIWSTKEAAA

SEQ ID NO: 64555 - protein, 299 aa, unidentified
MHYIGMDCHITTLDFAVVNEAGRLVKANSVATSVNGFMEFVKTVPPPRAIYMEEGTLAAWALETCVRFREKLVITDAKKNHWIGSSGQKDDPLDALKLAQLARGGYINEIHHPVGQRRRFRELMIAYHDTVRSTTRIKNKIKAKFRQNGIQCTGVTVYSETYREEWKGKLPQEATLLLILEGLWRQLEQSEQTEKELLATARAQAKYYPEIKHFEALPGIGFISAATISAILETPYRFADKRKVWMYAGLGIMTRSSGGKLYSEKLSTDYNRLLKYTLNKPQKPLFRLRIILTGVNIWI

SEQ ID NO: 64556 - protein, 342 aa, unidentified
MHIKTLGIDLAKNVFQLHGVDETGKAVLRKRLSRTKLAEFMVNLPPCLIGLEACGSAHYWARKFEAMGHTVKLMAPQFVKPYIKSNKNDAKDAEGICEAVTRPTMRFVSLKQVEQQDIQMLHRIRSQLVKQRTALANQIRGLLAEYGIIIPKGINHVNKQIPEILEDGENELTTLTREMFSDLYENSKLLEEKVNAYTKKIELLAKTNEKCQRICKIEGVGPLTATAVVAAVGDASVFKNGREMAAWLGLVPKQHSSGDRTQLLGISKRGDKYIRTLLIHGGRSVTRVCTTKTDARSLWVADKKERCGENKTAVAVANKNARIIWALLNSGESYQLGKGLAA

SEQ ID NO: 64557 - protein, 384 aa, unidentified
MPDVSSNAPAMVRMRAALDVHKRSIVCASQPDDPRAGELRGQEIPNTERAIRGLVRRLGGPEGLVVCYEAGPCGYDPYRLFTAIGVACDIVAPALIPRAPGARVKTDRRDAKRLLVLHRAGALKFVYPPTPAQEGLRDLVRCRDDLVCARRAARHRVVKQLLRYGHIYREGKKGWTKRHIAWVRRQRLDDPLAQAALEHMLAHLDSVDAQIAALDHQLDEIAAREPWSDPVRWLCCFRGITTLTALALLAEIGDFRRFATARELMSFLGLTASEYSSGDQRHRGHITKTGPRHARRLLIEAAWHYQHAPRVSQRIAAVQPHVPPDIAERAFSAQVRLHHRHRHLSTHGKRSTVATVAVARELAGFLWAAMTRQPLNQPDPTPTA

SEQ ID NO: 64558 - protein, 412 aa, unidentified
MQDILTCAMGLDIHRDVIVACLAKGELGTDPEIEIRSFSTLIPEMRKLRDWVLEAECRYVAMESTGIYWQPIYEMLEPCFDGQINILVVNARHMKNVPGRKTDMRDAQWIATLLRAGLLKGSFIPDKTFRELRHLTRYRKSIVRDITAQKNRIDKFLQSSGFRFTAFLSDAFGASGRNIIRHLMEYGNISREALDRCLKTQTRKRIDEILIALNGSLSEHQRGFLRMIFGHLEALEQHRHTVEGAITKEITKHEEALSLLCSIPGIDVTAAAAIIAEIGTDMSAFPDSQHICSWAGLSPGNNESAGKRKSAHINKGNPYLKSMLCEVGWVISGKRSLYLSGWYWRIKQRKGAKRATIALARKLLALIYTMLKTGSPYNEDCFEIRRKQSERKRASRMVNELQKLGYFVVAPG

SEQ ID NO: 64559 - protein, 344 aa, unidentified
MQVAVLGIDLGKKSCSLVGLDGTGRVLLRRRLQRGSVIKLTAELPACVVAMEACCGAHHLGRLLHAQGHRVRLMSPEYVRPYVKSHKNDDRDAEAIAEAATRPTMRFVELKSESQLDMQSLHRARDRLIGQRTALINQIRGLLMERGIVVAQGRRKLEIHLATLMTEQREMLSPRMRLLIVDMCTEWRDLDGRIKAFDEEFATLVRADDVSRRLTTIPGIGVLNASALTAAIGNGQTFGRGRDLAAWLGLVPRQMTTGGKPRLKGISKRGNKYLRKLLIHGARAALPSLAKSETALGAWLRGLRVRAHVNTVVVALAAKLARIVWAVLRHGGRFEMKPTPAAQL

SEQ ID NO: 64560 - protein, 366 aa, unidentified
MPTLFGASERDDGFSMAAKKRQVTGGVDTHGKTHHAAAIDGAGRVLGDQEFPASASGYRQLLAWLRRFGQVIKVGVEGTGTYGAGLARHLTAQSVTVVEVDRPDRRARRAKGKSDPLDALAAARAALSGQASGTPKTRTGPVEAIRALRVARRGAMKARTAALNQLHGLLASAPESLRHDLSHPQAPLVDRCAALLVDETRLTDPVEATKAALAAIAARIQALTAEITHADRRLRPAVARTAPHLNAVYGVGTDVAGQLLTTAGDNPDRLRSEAALAHLCGAAPIPASSGRTDRHRLNRGGDRAANSALHTIALVRMRHDPRTRAYVDKRTKQGLNKKEIMRCLKRYIVREIHTALLADFTTLNTA

SEQ ID NO: 64561 - protein, 420 aa, unidentified
MKVMHDRVAAIDVHKDMVKVAVRVPGERRGTRKTDVLEFRTFYGVLEEMGRELRRRGVTHVVMEASGVYTEPVYYALAGLDFTEVMVINPAHAKALKGHKTDARDAIRLLDLYECGLLSGSYIPAPDLKEVRDLARYRTKTVQARASEIQRLQKTLETAGIKLSSVVSDVTGVSATAMIEALIDGERRGAVLADLAQGRLRTAGKMADLSMALAGRFTDHHALMCRLHLDRLQGLGEAVAGLDAKIAPMAARLLKSLPGFGDVVVAGWLGEIGPAPHQHFATAQRLASWATVCPGNYMSAKKSKGGRTGDGGNYIKPLLVQAAWAAVRVPGRLQARFHRLVRRFGGARNKGAIKRAIMAIAHTLLKIAYQVLKTGTPYTDLGADFYASRETPQARQDYLIRQLQKLNPGCVITVTPAEAA

SEQ ID NO: 64562 - protein, 381 aa, unidentified
MTTAMTRSEESTPATGSLLMAFELSERTWKLGFSVGRGQRPRLRQIPAGALERLTEEIARAKSRWACGAARVLSCYEAGREGFWLHRWLVAQGITNVVVDSSSIEVNRRARRAKTDGLDLSGLLTLLERHARGEQRVWHVVRVPSVAEEDARHLHRDRETLQQERTRLINRLHGLLTTQGLRVPLHADFLERLARAELWDGTAVPVGLAQRLRRVWNQLAFLNAQLAEIDDERATLAAASTTGSGRWAAQLQQLQGIGAIGAWCLSTEIFGWRQIRNGRELGALVGMVPAPYQSGETSHDQGITRAGNRHVRRMMVQLAWSWLRYQPTSALSCWYRARFGQGRRLRRIGIVALARKLLIALWRYGQHGIVPAGAQLKTRVG

SEQ ID NO: 64563 - protein, 350 aa, unidentified
MEKRSMKHYAGLDVSVKETSVCVIDEAGKICREVKVPSHPEDLATALNDPAWRLERVGLEAGPLSQWLFSGLVEAGLPAVCIETRHTKAFLKAQVNKSDRNDARGIAQMMRVHLFRPVHVKTLTSQKRRALLTARKILQDKAVAIENDIRGLLRNFGLKVGAIGVAKFDERIRELVEGIPELVEIMEPLLAARQKLREMFTALHRKLLSIVRDDGVCRRLMTIPGIGPVISLAFCATIDVPARFRNSKAVGPSLGLTPVLNQSGESLRVGRVSLCGDGMMRTLLYEAAQVMITRVQKWSWLKAWAMNVAKRRGLRKAVVALARRLAVVMHRIWVDGSVFRWTREATPATA

SEQ ID NO: 64564 - protein, 411 aa, unidentified
MQVVYERCCGLDIHQKTVVGCRLLSQQKGPVEKSIRTFATTISGLTELDSWLAEGQVEQVALESTGIYWRPIFNLLEGRYEIILVNAQHMHAIPGHKTDIKDSEWIADLLRHGLLKASFIPPKPIRELRDLVRTQTHLMQERNRHINRIHQILETANIKLSSVVTDILGKSARQMLEALIAGESDPVQLAKLARGRMRPKRGQLQEALRGRLEPHHCFLLRETLAHLDFLQLRVGQLEQEVAERLSPFEESIALLMTIPGISRRSATILISGTDLTAFPSAAHLASWVGLCPGSHLSAGKRRSGKPTKGNSYLRSVLVQVAWVLTRMSDNYLSAQFHHLRPRLGAKKAVVAVAQSVLVIVYHVLTTGEPYQDLGPDYFHRQNKEQQTRRFVHQLETLGYHVELAPQEEVTP

SEQ ID NO: 64565 - protein, 417 aa, unidentified
MDVHRDFCEVAVAEQNGKVRSAGRVASTVQALEVMAQSLAADDVVALEATSGAGLIADLIRPHVGAVLVANTRRLPQISKAKAKTDRLDARMLARLAASGFLETVWAPDEPTRALRRLCARRETLVRARTRAKNEAHAVPARNLCGRPPVSDAFGKRGRQWLESLELPIDERLTLDGCLRQIDMLDIELKGLDRALAEQALASPEIRRLMTVPGVNVQTAAAFMAAIGDIRRFPSAKQLVGYLGLDPRVRQSGNTEARHGHISKTGSSLARGMLGEAAWSVAQTPGPLRAFFERVRSRKGPQVAATATARKLCCLFWCLLIREQDYAFARPAMTRFKIRQLELAAGAPPRRGQAGVAGGHKTRSVREAERELATQAEAAYRRLISDWKATRPTKSGAGATPGRASLTALEGRSRATG

SEQ ID NO: 64566 - protein, 361 aa, unidentified
MKKITPNHQSDQQTVIGIDLGDKQHAVCIIDKRHGKILKEFSIRNRTKDLKKLADDFPLSLIAMEVSTHSPWISRLFEIAGLEVLVANARKVRAISANERKCDLLDARLLAKLARSDRDLLHPIQHVSEEAQRDLLSIKLRDSLVRSRVALLNSMRGALKALGIRLPSCTSGSFASKARSHLEQDHPELLPALDPSLKILEGLTTQIKECERAIDHIAQSHYPQAQKLQQIPGVGPITSLSFVLSVEDPARFEDARDIGAWLGLVPRRDQSGDTDKQLPISKTGNCFLRKLLVQGAQFLLGPFGPDCDLRRYGLNLADRGGKAAKKKATVAVARKLAVLMLTLWQKQSDYEPLYNSQSAAA

SEQ ID NO: 64567 - protein, 414 aa, unidentified
MKAQTVNFDQLIEKGCGIDVHKNLIVATIKGEGLPEQTRSYDGFTESLEQLRDWLKENGVTHVAMESTGVYWKPVFNVLEEDFEVILVNARHIKNVPGHKTDKKDSKWIAKLLLCGLLKGSFIPLKPIRELRDLTRYKRKVIGHIASEKNRIQKILEDANIKLSSVVSDMSGAVATKIINALIGGEENVDELVKFHHGKMHCTKEELAASLRGKLTDHHRFMLQAIKESIAEKERLIGKLDEQIDKMLKANELKLDAELLETIPGVGKDGAAYILAEIGNDMSQFPNEQHLASWAGMSPGCNESGGKKKSSRTTHGDKYLKSMLTQFAWAATRTKKTYLRSKYDSLVGRRGKKRALIAVGHKILIAAYFILKDKTVYKELGGEYLDSRKKDRQIQRYLDKLKELGVEVNTEMVA

SEQ ID NO: 64568 - protein, 366 aa, unidentified
MDAIYIGVDFHARQQTICYLKTETGELVISELQHQDKAQVRAFYQQFQGYVIIGLEASGYSPWFEAMLEELGHQVWLGDATEIRRRARWRQKSDRRDAELIWDLMVHNEFPLLHQPAPQSREILRMLRYRQKLIKVRTMSKNSLQAIALQAGLAKGSRLFTKDGQAEFQGTAMSPALQWQRDHWFELLKPLNEQLLETMVWFKAQSKDDPVIARLRTHPGIGLLTALCIWHTLQPVSRFRNQRKVVAYAGFDPMVRSSAERAIYLGISKAGSRMLRYLLVEAVHTAIRYDDDLKRFYKRVAERRGRPKAKVAAARKLLIRAYIMLRDEIDYAEFRRRAVAVGLPGEVKGQEKVPEVLIGQSTSPGA

SEQ ID NO: 64569 - protein, 343 aa, unidentified
MGEISTIGLDIAKSVFQVHGVDVAGQVVIRRQLKRRYVLAFFQKLPPCLVGIEACASSHHWSRELKALGHTVKLMPPAYVKPYVKRQKNDAADAEAICEAVTRANMRFVATKTPEQQSGLTLHRTRHLFIRQQTAVINVIRAHLAEFGIVAPVGRKGVEELLNVVTDASDNRVPVVARMCLAALGSQLRQLKEQILEFDRMIMAWHRSHEASRRLDAIPGVGPMLATALVASVADPKTFRSGRNFSAWIGLVPKQHSSGGKDRLGSISKQGDRYLRSLFMAGALAVIRYAKIHGTKHRPWLTALLARRPTKVAAIALANKIARMAWVLMARGERYKEPVALAA

SEQ ID NO: 64570 - protein, 474 aa, unidentified
MKRNNKSKKRNESNSGNNQPPESEAKQLGGTGLPRIRPMVAGIDVGSKEHWVCAPTGKGGTEMRVFGANTPELVAMADWFQRLGVESVAMESTGVYWIPLFELLESRGIEVILTDTRHLTRVPGRKTDFEDCQWIQLLHSCGLLQGCFRPGEAICQLRSLVRNKAVLVAERSDWLRRMQKCLDQMNVRVHRAVSDIDGTTGMAILRAIVAGERDAVKLAKHRDPRCRKSEASIARELTGNWRWDHLFNLEQGLKMYELIEERIGDYQREIQKQMQALRCKQADGNPLQAVKNKEKAKAIKRRGQEPMREVLHGLAGADLTTIDTIGVETAEVVLSEYGADLSRFPTEKQFVKHLRLAPRQSITGGKPMRKGKGGKGATRTGNALRMAATVAHHSRTAIGAYYRRLAARKGSDVAVFATARKLASLIYRMLRWGQPYVDEGVAEYEKRYQAARIRHLQAQANQLGFQLAPQTTTA

SEQ ID NO: 64571 - protein, 429 aa, unidentified
MNSTQNKKIDQVKETTMIVGIDVGSEKHYFRAFNWRGIELTRKPVAFSNSMEGFNSFYNTIVELMQKRELEEALVGIEPTGHYWFDLGQFMGEKNIKFVMVNPHHVHKTKELDDNSPSKNDRKDPRVIAGLVRDGRYFYSYMPTGVYAELRNASNRRFVLVEEQTRAKNRLQKWIAVYFPEYKGIYTHIDAKGGLLVLKQAPTPEEIVRLGVEGIIKIWKDAKLRGNGHKKAMLSLNAAMKSIGLKSGLTEARMEIQDLIEDYELQTKRLERVNDLIKELCQQVRYADKLLEIKGIGITTVAGFIAEVGDITRFDSTKELQKLAGLELVSDSSGKHNGKTKISKRGRKRLRYLLFEAAISVVGKNEEFKEIHSYYTTREKNPLKKMQSLIAVACKLIRVFHVILTKGISYDASKMLKDIRHQGEQLKAA

SEQ ID NO: 64572 - protein, 408 aa, unidentified
MKVFVGDDWAEASHDVHLMNNNGDKLAAKRLPEGLEGIAAFHELVADHIDDPSEVIIGIETERGMWVQALIAAGYTVFAINPLSVSRYRDRHNVAGAKSDPGDAKLLADLVRTDRHNHRPIAGDTDDVDGLKVLARAHQNLIWDRTRHTNRLRNDLREYFPTALEAFEELSHRDAIAVLAKTPHPDQAKVLSIPQIRSALKRGGRQRNLDTRAAEIQTALRTPQLAASPAVTTAFAATTKALVAVIEGLNDAISELETELASSFEKHPDADIYLSLPGLGVTLGARVLAEFGDDPERYDDAKSRRNYAGTSPLTIASGTKRAVLARHIRNKRLYDAIDQWAFCAITTSPGCRQFYDQRRAAGDLHHQALRALANRLVGYLHGCLRTHTHYNEHTAWAHRQTHDLNIAA

SEQ ID NO: 64573 - protein, 337 aa, unidentified
MKVTLIGIDLAKSIFQVCGVNQAGKRHFNRQLRRAKLMAFLLQHPDATIAMEACSGSNYWGRTLQQHGFKVMLIPPQHVKPFVKGNKNDRNDAFAITEAARRPNLKCVEPRTLAQTDMIQVHRVLDRMTRQRTALINQIRGFLNEYGIVVAQGKERLLTAMPDLLEDAENGLTPSSRALFQRMLEQWRQANEAIKQIEKGLKGQAKTDDDAQRLMKMRGVAVKISTATIAHAGNGHGYSSGRHFSANLGLVPREHSSGGQQRLGGITKRGNQYLRRLLIQGAWSVIRNVDKNDDRLSRWARQLVERRGKHKAVVAVANKMARIMWSMLYHQTEYRAN

SEQ ID NO: 64574 - protein, 400 aa, unidentified
MISVGIDVSKGKSTVCILKSYGEIVSSPFEVQHVEKDLEALDNLLDKLDGEIRIVMEATGIYHLPILTFLHDKGYFISVINPFAMKKYAKNNSIRGAKTDKLDSIMIANYGIEKWFKLQKYEGDEETYAELKLLGRRYRYYMELHVKALQELNHILDYVMPGIKKMFNSWNEANGKDKLSDFAERFWHFDLITSMSLEEFTEEYLVWAKEKKYHRSRFKAESVYELASSGIPTLSSSTPSTKMLVQEAVSVLRTVDSSLSLILTRMQVLAKSLPEYSTVREMGGVGDVLAVKLIAEIGDVRRLHSAKALIAWAGIDPPPYESGQFIGSKRKITKRGSSTLRKVGYEVMRVLKSHPAPKDDAVYNYILKKESEGKSKKHAKIAGLNKFLRIYYARVIEVYQ

SEQ ID NO: 64575 - protein, 414 aa, unidentified
MLKIVYPICCGIDVHKTFVVACIASTNEVGITTYQVKRFSTFTKGLKELSAWLMQNSCKDVCMESTGKYYIPVYNILEVTCNQPIVAHPKYVKAIRGKKTDKKDAKWIADLFKHDLVAASFIPPLAIRQLRDLMRYRFKLINFQTSEKNRFQNCLTVSNIQLASVVSDTFGKSSMNIIEHILDNPFDKDVDIASLVHRSMIDKIPELELAIDGVITEEQAEKIKIIKQHYDSLDLCKANLESIILSLSKPYLKELDLLLTVPSINNPFTAITIISEIGVDMNVFPTAKHLCSWAGLTPQNNESAGKKKSVRISRAGCYLKPLLVQCATAVVNSKKHPEIRNRYLNLKKRRGHKRAIIAICRMLLTAIYNILKKSEPYNPVLYKKYEVLSTTREISVEQAIFIVQRQGYLIKSDT

SEQ ID NO: 64576 - protein, 343 aa, unidentified
MHIASIGIDLGKTNFHLVALGEHSKVVVRKKFSRKQLLAYTANLQASLIGLEACSGAHFIGTALRNQGHEVRLIPAQFVKPFLKSNKNDFLDAEAIAEAVARQNMRFVPIKTDDQLDLQAMHRVRDRLVHRRTAVINQIRGFLLERGLSFAKGPANLRNRMPAILEDAEQNITPRMRMLLDQIWQEWKRLENDIAIISEEIERISNEDEACQRLRQIPGIGPLVSTATVAAIGNGAAFNKGREFAAWLGLVPRQHSTGGHAKLYGISKRGNIYLRRMFIHGARAVLLRVKNKTGSFGPWVHQLELRAPRNKVIVAIANKLARIAWAVLSKQMDYRPTPAVATA

SEQ ID NO: 64577 - protein, 355 aa, unidentified
MIGEKYIGLDVHQATISVAVMDSKGKVVMESILETQAATILEFFVGLRGTLWVTFEEGTWAAWLYDLLKPHVAKLVVCNPRKNALLKHGNKSDKIDARKLADLLRLNDLEPVYHGETGVRMLRELARSYLTIVKDLSRVMNRRKALYRSWAIPCAGRDVYYTRHRSEWLGKIPEAGTRRRAEQLYQQLDMLQHLRQQARRELLAESRKHTITAKLRQIPSLGPIRCALAVALIQTPHRFRTKRQLWTYSGLGLETRDSGEYHYVQGQLRRRKKQVSIRGLNKDHNHDLKGLFKAAATRASVQPGPFQDFYQRSLAKGIKPTMARLTLARKIAAITLTLWKKGENFDVAKLKSQAA

SEQ ID NO: 64578 - protein, 395 aa, unidentified
MSAEGEAIRSNDYRKDTTVKAPSTRPAAVLGLDVGKSSHWACLIDRDGEVLASAPVRNREAELDALFASVPAGTLVVVDQFRNIGSLAVRRARAAGLGVAHLPGLAASRAAGLFAGEAKTDERDAAVIARTALGVPDSLSGVPGRGEALEAARALSSQRDHVVACATRDKNRLRAVLLESCPALEAAVDLSDRRWLELLAGFGGAWGIARSGAEGPQAEAAGEAAAASTAPPPALIEAENRQVRFLAARISEALDEAGALEAETAALLEGDETYACLLTVPGIGPRTAAQLAVSVDIGRFPDHDHLASYCGIAPRVRSSGTSVRSVRASRRGDARLKSLLIFSCNSLVRSSGRYGEYYRACRARGMGHGRALKAVARKRLRAIYAVMRDRVPYRE

SEQ ID NO: 64579 - protein, 358 aa, unidentified
MAKSKQTIPVVGGVDTHKDLHVAAVVDDYDQVLGTHSFATTRQGYKLMLTWMRSFGDLQRIGVECTGSYGAGLLRYMQVAGVDVLEVTAPDKLDRRRRGKNDDFDAQSAAHAAFAERRTVTPRSRDGMVESLRVLKVCRKTAVQARRVALQIIQTTIVCAPDRLRDLLRNMTRMQLIRTLAAWRPDLTGYRDVEEAYRIALKSLARRYLELHDEVADLDDMIEAIVTDLAPDLIACRGVGFNSAAQLLLTAGDNPERLKSEASFAALCGVSPVPASSGKTTRHRLNRGGDRAANSALHIIAIGRLRLDPKTKEYVARRTAQGHSKLEAIRCLKRYIAREVFNIIARRHKQINQAQIAA

SEQ ID NO: 64580 - protein, 440 aa, unidentified
MKTKLRIINPNAGGIDIGSEKIFVCANDSGYKSFDTFTEDLKLAATYLKDCTVNSVAMEATGVYWLPVKDILEAEGIEVTLVRAGDANQLPGREKTDGEDCQWIRTLHQHGLLRPCFIPEEIIRELRTIIRLRQDHIEMAAAHVQHMQKAFTLMNLRLHQVISQIQGVSGRKIIESILKGERDAKTLTMLCDKQIVRNKKKEVMKSLNGNYREEYLFMLGQAYKAWNFYNELIGECDKKIEAWFIRSTKNKSEVDHITPAKAIRHHKPDIENFHEKTLKLTEGKDASLLPGLTDYSVMRIIAEVGIDLKEWKNVKNFISWLGLAPKRYSSGKMRRRYKGKQHTAAGQIFKEAAQSILHSKHIGLGSFARKVKSRKGPQIAIKATARKLAVLYYHAITKGMEYVEKGIKEYDAKAKQTEIQRLTKQASKLGFALTQALVHQ

SEQ ID NO: 64581 - protein, 435 aa, unidentified
MAKLPVLDPLAAFVDVGSEHMHVSIGGDEPKVFGTVTSQLHALRDWLLEQSVHSVAMEATGVYWLPLYGVLEMAKLEVRMVNGRQTRNLPGRKTDMADCQWGATLHMHGLLKAGFVQPADIRRLQDYLRLRADHVAAAGSCVQLMQKALERMNIKLHDVIASLAGVSGLAVVRAIVAGERSPHALLALCDAQIRRRKEQAVVEALRGTWADEHLFALDQALQSWDHYQKLIANCDARIAAVLPPHDDTQPPLPKTSKRGGVNAPDIAHLRDILAQMCDGQDLTQLPALTQYSVLQLIGEVGTDLKTWPTEKHFTAWLGLAPGSKNSGKRKGQVKRNCNLAGRLFCMVAQSLVRSKDIALGGFYRRLAARRGGLIATKALARRLAAWYWRMMVKGGDYVEKGLARYEEQVRKTKEYTLKRLAKELGRQLVPVQATT

SEQ ID NO: 64582 - protein, 346 aa, unidentified
MMIIGCDFHPSWQQVSWLDTETGETGEQKLVHASGDAKSFYARLPRPVLIGMEATGNSQWFIEVVQDLGHEIWIGDAAQIRASYVRKQKTDKRDAAHILKLVVEGRFPKLWTPDREQRDLRQLVLHRHKLVEIRSRVKNELQHLSLNRGMQRKAKLWSQAGQKLLRELPLQPWAACRREDLLGLLEMLNQQIGKLDQAVQQAAEEHPQAKLLMTQPGVGPNTALAFVLTIGDVSRFPRGKQVASYLGLIPREESSGGRQKLGAITKQGNQLVRSLLVEAAQIAVRFDPGLRKQYRHRCHQKPKGVAKVATARKLAVRLYWMLRTQKPYPEIVRIESSPRVPLVGAS

SEQ ID NO: 64583 - protein, 356 aa, unidentified
MRETDPAEIIIGIDTHKEAHAAVAINGLGARLGAMNLPASSRGYHEMETWARSFGPVRAFGIEGTGSYGAGLARFLQGRGHSVIEVNRPNRQIRHQQGKTDPLDAENAARAVLSGQARGTPKSGTSSVEMIRHLKVTRDTAVKSRTQAMVTLKTIIVNAPTALRESLEGLTGKMALIRHLAALRPGAMTSPTASAKAALRALARRWLMLDAEIKSHDADLDALTTVCAPTLKEAHGMSTGTAAEMLILVGDNPERIRSEAAFAKLCGACPIPASSGKTTRHRLNRGGHRQANAALYRVVIIRMRSHLPTLDYVRRRTAEGKGKMEIIRCLKRFVAREIFGYLCRASRAPTTVPSTS

SEQ ID NO: 64584 - protein, 388 aa, unidentified
MSQPFDASRSLTVLDQDSTLIVVIEVSQSSWLVSALVPGVERQPLKKLEPDEDALLKLLHRWRGEAARAGRQINRVVVAYEAGRDGFWLARWLRERDIEAYVIHPSSVAVSREHRRAKTDRLDTEMLMRAFLGWLRGEKRHCTMSAIPAVEIEDSRRPSREREKLICDRTRIVNQMKSTLTRFGIRNFKPTLRKAEEKLDNLQTAEGTPLPENTRAELRRDMARLRVVREQIREIELERLRKLEAAPSAKEGPHAMILLIARVIGLGVETADMLVNEVLARNLRDHKAVARYAGLTGSPDESGKRRREKGLARAGNARVRCGMIQLAWRFLKFQKESALATWYRARTIDGRGDTRKRMIVALARKLLIALWRMVTTGEIPEGVSLRAA

SEQ ID NO: 64585 - protein, 365 aa, unidentified
MSDERTTVGLDVHARSVVAEAVDWQTGQVFSRRLVPDNQELLAWVVTLPGPVAVTYEAGPTGFGLARAFAAAGVRCLVVAPSKLERPPGDRVQTDRRDARRLARLLHIGEVTGIRVPTVAEEDARDLVRAREAARADLMRARHRLSKLLLRHGIVYYGGNAWTREHDRWLRRQQLDLPVELRGTRTAFQESYDAVLAVTARRDRLDEQIAHTAASPLWQPIVSRLGAIRGIADLTGLGLAVEIGDWDRFTGASIGAYIGLVPSEASSGATRSQGSITKTGNSHARRLLVEAAWHHSRPLRSPGKVVAARRNRLSPAVRARGEAADRRLRHRWVTMSARNKRQPIVAVAVARELAGWCWSLATMDG

SEQ ID NO: 64586 - protein, 456 aa, unidentified
MSKKRSSGTRKKNKRVLEQINHNAAGVDMGAEEVWIAVGEHATSEPVQKFGTTTSELRRSSEFMRSCGVDTVAIEATGVYWVAAFEIYEEYGLNPVLVSSRSIRRFNGMKKSDYIDCQWIQLLHTFDILQSSVRAEAKMIELRTYMRQRRMLTEKASEHIQHMQKALVLMNVRLDQAVTDITGVTGMKIIRAILEGKRDPKELATLRDPACAKSEQQIAEALTGHYRDEQIFALDQAVKLWDFHRQLITACDTKIEAVLQTLPVKAERNTIPKARGKRGKPRKNEIQFDARTLLYERLGIDLTQIVGLHVLTILTVLSECGVDLSRFPTGKHFCSWLGLSPGTNITGGKVVSAKSRRTTNRAATALRLAAQALADSNTELGAFYRRKKGQIGPEKAINATAAKLARRIYDSLRTGRVYADRGSTFYDEMNHERTVAALQKRARRLNMKLVPITEAA

SEQ ID NO: 64587 - protein, 360 aa, unidentified
MLYLSIDQHRKQLTVNLRNESGDVLLKRQVSTEWQRVRAFLEEIRQRSQAEGGFIAILEICGFNDWLLKLLKEYGCRETILIQPEKRSKKKTDRRDANALGEILWVNRQRLLAGKKVQGIRRIRLPSEQDAADRQITALRKRLGQSRTRTINRIKHILRKHNLEQECPTKGIDTIRGKNWLAQLSLGTTDRLEMDQLLTQWKLWDEQIAKVAVQIEMRQAKSKTAAILATIPGCGAYGSLALASRIDPIERFPRPGSLPNYWGLTPGCRNSGEVTDRLGSITKQGSSIARFILGQLVVHVLRRDAWMKAWYGRIKRRRGAKIARVAVMRRLSGVMEQMVKHNEPYVIGGPSQRKRPARSA

SEQ ID NO: 64588 - protein, 343 aa, unidentified
MEHYVGLDVSLKRTSICVMNHTGSVVREGVVDSDPEAIASFVRSNAPGAVRIGLETGATATWLWNELKRLGLPVICIDARHAKAVLKMQINKSDRNDAAGIARIMQTGWFKEVRVKDLDSHAVRALLASRALLVKIKRDLENQVRGLLKNLGLVIGRATFNLFSARAGELIEHRPDLVAAIGPLLEARKAIEQQVRDLDRKVLTLARHDVQVRRFMTAPGVGPITALCFKATIDDPTRFRRSRSVGAYVGLTTRRHASGEVDWSGRISKCGDAMLRMYLFEAANVLLTRVPKWSALKAWGMRLAKRNGLRKAKVAVARKLAVLLHRMWIDGTEFNWSTKNATA

SEQ ID NO: 64589 - protein, 340 aa, unidentified
MHTTIIGLDIAKSVFQLHAEDASGKVLWKKRLRREELEPFLRKLPPGLIGMEACGSAHHWGRVISADGHEVRLMHAKYVKAYVKRGKSDVRDAEAICEAVQRPNMRFVPIKSVEQQIDRSLERARDLLVKQRTQLMNATRGLLAEFGVIARVGLRGFKTLSDKVDAGDAAIPKPLLTAVKPLLEQWRGLHASIDELEERLVKRARSDERMCRLMKIPGVGPFTAHALVTAIGDPRRFSTGRDFAAWAGLTPLTDSSAEKTRIGHISRQGDHSLRRLLVLGAANMARHAKAKPSEARAWLLGIIGRRPVKVAMVAQAAKTARIAWALLRSGENYRASTAVA

SEQ ID NO: 64590 - protein, 412 aa, unidentified
MEAAVITAVGIDVSKSKSTVAVRRPGGEIVLRPFEVHHTNSDLKKLTSTLKKLGGDIRIVMEHTSTYWRPIALTLKEAGFFVSVVNAMLIHDFSDNTIRKLKTDRADALKIANYALTFWDTLPPFNSEEETRLLLKMQSRANERITATATALRNGLIALADQTFPGVNIAFDPNTKNANGHEKWVDFFLRYWHKDCVCQYSMETFTESYRGWCKRKNYKFRTDTAHKIYLLAQEGVATLPRCESTKMLITQACKSLNAVCEAKQSTQLEMQRLAAMLPEYEIVMQMEGAGPITGPALMAEIGDVRRFKNKKALVAFAGIDAPPFQSGAFESKSRHVSKRGSPHLRRTIFIISNIILTRSNPENAVYCFMDKKRSEGKHYYVYTVAGSAKFLRVYYARVTEFLRSQPSSDACC

SEQ ID NO: 64591 - protein, 631 aa, unidentified
MFCGIDWASERHAVCVLDDAGTTISTFQITHSADGLEQLVSRLGRLGDPAGLPVAIERPDGRLVDRLLEAGHPVVPVQSNAIKAWRDAEVLSGAKSDPGDAAVIAEYLRLRQHRLRVLQPFSPETRALRAVVRTRGDLVDQRVAATNQLSATLEAFWPGAKAVFADVESPIALDFLARYPTPESAEQLGEARLRAFCTKHGYSGRRPAAQLLARLRAAPAGLAGTPEVEARRDAVLAMVGVLRALNQAIKQLDRSVIAHLGEHPDAEIFTSLPRSGRISAAQVLAEWGDCRPAYDGPDAVAALAGIVPVTKTSGKHRTVSFRWACNKRFRQAICTLADNSRHASPWAAKVYADAIARGCDHPHAIRVLARAWVRAGSRLGPGHLALLGRPSPLRPGQARRRPQADRNGRFCGVRLTQRVSRLLLGVGDAHVAEVGVPVQRPAGAVDDLTAPGARVGDGQRLADGVQQHPRAALVGDFGSGIWRWRGWGDGRVARVGGEVLGELLGLLVSGDQPGALLVGAQASLAVGDREGEVGAVGVEELHHPVGLQAGVHRRARDAQVHAHLAVGQFGGEFLGRADQALTHINSFRGCCWSSGVGAVGRGGGVLPPRSRGLQAAPGRTPGVRRAAGRGR

SEQ ID NO: 64592 - protein, 318 aa, unidentified
MIRYADEIQTALGLDVSQDSVTLFDSVTGQTLTIANETQALTAALDPLRNRDLAVCEATGGHEDKLLAVLCGLAIPVHRGDAAKIKAYIRSFGKRAKTDPIDARWLSRYAIDRSPGLMRWQPPEPCQAQISLLVSRRLDLVAMKRQETNRLKAPRGHLVADDIRDHIADLEHRIRTIEVQIEELINQHRDLSSRARALRSIPGVAAVLAPLLIATMPELGSLNRRQAASLAGCAPHPRDSGKLQARRHSSGGRRQIRPALFIAALAAARGKNPLADFYNALVRAGKPKRLALAALMRKIICIANARIRDAANLHPQLT

SEQ ID NO: 64593 - protein, 345 aa, unidentified
MEHYAGIDVSLESASLCVVDATGRIVREAKVASEPDVLIGWFRGLEFAVTRIGLEAGPLSQWLYAGMREAGLSVELLETRHVRDAFKAMPVKTDRKDARGIAQLMRLGWFRSVHCKSLPAQEVRALLTARKLLQTKNHDVEMSLRGVLRGFGLKVGRTTPRTFVGRIRELVAGHATLSTVAEALLAARGTLFEQWQELEKRLRSLAREDRRVRLLMTAPGVGTIVALTYASAIDDPGRFRSSKAVGAHFGLTPKKYQSGETDVTGRISKIGDGGVRTALYEAANVILTRPVKGSTLKSWGMRLAARTGMRKAKVALARKLAVVLHRMLADGTSFLANKAAAAVAR

SEQ ID NO: 64594 - protein, 415 aa, unidentified
MADQRQWYAGVDWASESHHVFVTDGDGRKIGERVFKHSGEGLAEMAAWLMAASGAADPSQILVAIEVPHGPVVETLLERGFKVHAINPKQMDRFRDRFTMAGAKDDSRDAEVMSSALRTDARCFRLLAVADPMVCELREWSRIAEELGVERNRLTNRMREQLWRYFPAFLEFDSDLRAGWLLDLWQAVPTPDKAAGVRETTIAKLLKRHRIRRFDAAHVLSVLRKPPVQVAAGTIEAASAHITTLIARIRLVNRQIEQAHQRLDSLIARLSPPEEAAPGQNKQHDAEILASLPGVGRIVLATLLAEAHDALQRRDYAALRSLTGAAPVTKRSGKSCTVIRRHACHARLAGAMYHWARVATQHDPTSRAKYAALRSRGHSHGRALRSVADRLLNVACAMLRAGTTFNPGLAVQKTS

SEQ ID NO: 64595 - protein, 339 aa, unidentified
MPKYTLFIGIDISKLSFDACIAWPGQEGPCPHGTFAQDDAGYRKMVQWVKGVVGQDTEPSSWFVYAEHTGLYGLRLARFLGQHRIPYLLDSPLRISRSLGLKRQKDDPADAQDIARCAVRRDFGQKVRPIPAMTLMKVHTLLSLRHRLVRYGAGLQVAAKELAFAVGASISRPIGDSTEVVRQTIAGQVKECERQIAGLLNGDDDLGRLYGLVRSVVGIGPIITAYLLVYTNGFTAFDNARQFNCFIGTAPFKYRSGTSIKKKDRVNSMANHKLKALFSMAAVTAVNHDPQIRAFFNRSRERGKEEPWIYNAIKAKLVKRVFAVVHRGSPYVVLDKHLK

SEQ ID NO: 64596 - protein, 381 aa, unidentified
MSIVALDIASKTATFCVLGTHGIRSQGSLTFDHDGFSSFFSSEQVSDASLFVMESTGGYHLPLYHFLLNHGRKVRIINPLLIKRFHDGQTLRRTKTDALDAVTIARYAQSHMSALEEERMQLDSESKMLARRRARNAEDLAKAKTILKSDLSVAFPELLRFNVFIKTLLEFLSVYGCAKDVLAATEEQLQQALDVQKGRKSDVVTVQKIQELARISIGVSYHAAMVRDSAKAVLACQQRDEELTKALVELEQTLHQRQMEILTSIPGIGEVTASHFLSEIPDITQFATYQKLIAFAGTDPGIYESGNTSKQLRISKHGNPVLRKYLYLMADSCMRHNVVFNAYYHKKREEGFPHRKAMVATMNKLVRTLHALLTKDETYSL

SEQ ID NO: 64597 - protein, 341 aa, unidentified
MSSIKALGIDLAKLVFSIHGVDEHSKPKLRKTIKRNKLISEVAKLPPCIIGMEACSGAHYWAREFTKLGHDVRIMASKFVIPYRQSEKNDANDAEAICEAVTRPKTRFVSIKSEEQQAVLCLHRIRQGAIKDRTARINRLRGLLSEFGIIMPKGRYPAQNAIAGILEDAENDLPFLARELLNDLWQSIRGLNEEILKYDRKLYALANQMKAAKRLMSIPGIGEITATAVVATVNDAKHFESSRSFAAWIGLVPRQYSTGGVVRLGRISKRGEKHIRTSLIHGARAVIANCKNKTDRTSLWVKDLVERRGFKRATVALAAKNARLIWALLHSEKEYQVDYVK

SEQ ID NO: 64598 - protein, 327 aa, unidentified
MSSYLGIDVSKDWLDVVLLREGLPVEKGHFDNNNQGFRQLQHFLKKRKVKELHICLEATGYYGAEAALFLHQAGYRVSVVNPARIKAYAESQLSRTKTDAGDAALIADFCRTQQPEAWIPPPPEQQELQVLVRHLENLKDMRQQEFNRRQAGIPSETILKTLDEHIAFLDQQIADLLRLIHDHIERHPHLRHQLDLLTSIPGIGDLTAFKLLAEIVDVQSFDSARQLAAFAGLTPRERRSGSSVRGHTRLSKRGSPRLRSALYFPAIVAQRHNPILQAFAQRLLAAGKSKMQVVAAVMRKLLHLVFGILKSGQPFDPHFLEKRAVIT

SEQ ID NO: 64599 - protein, 347 aa, unidentified
MKFYNKQHKYYCGIDLHARKMYVCILDKKGKTHVHKNIKTDPELLFEMIFPYIDDIVIGVECVFCWYWVADLCAEHKITFILGHALYMKAIHGGKTKNDKIDSYKIALLLKGGNFPTAYPYPAEWRATRDLLRRRMYLSRRCSELVAHILNTNTQYNLPGFNKKLSRKYNHQGVAERFEDPQVRKSVEVDLEMINSLNQVLKKLEWHIEKTARQHDYHTLYLLRSIPGVGQILALVILYEIHDIKRFPRVQDFSSYARLIRPVKESNGKWAGHSNKKIGNHHLKWAIKEAAILMLRDSAQAKSYLAKYERKYNKGKALGIFTHKLGRAIYFMLKNKEAFDMKRFFAQ

SEQ ID NO: 64600 - protein, 468 aa, unidentified
MKGLQVFNDRAAGVDVGSESLHTSIAGEAPKVFGTMTADLYALRDHFVAHGVQTVAMEATGIYWLCVFEVLEAAGLEVVMVNGRHVQNVPGRKTDMADCQWLSTLHAHGLLRAGFVPAEDIRCLQDYMRLRTDHISMAAAHVQHMQKALDRMNIKIHEVISSLTGVSGLAMVRAIVGGERNAGVLLGLCDAQIRKTKAERMRAALQGSWREEHLFALSQALAGWEFYQAQIVQCDARIEQALRARSAHTDDADNSTGASGSDASPTALDNSANKKAAPGLKLGVKKKAVKPASQNAPRIEGLHPLVVALNGGRDASVLPGLTDYSILQLASEVGTDLSRWPTAKHFTAWLGLAPGAHQSGKRRGRQARQRNRAGRVFCTVARSLANSADKALGGFYRRIRARRGGLLANQALARKIATLYWNVMVKGLQFIEKGLANYEHKFAQTEQRLLRKLATKHNLMLIPNPHPA

SEQ ID NO: 64601 - protein, 392 aa, unidentified
MRFAGIDIASEKHVVAVVDERSEVVVKPKAFSEDADGYQKVLDLLGPPGELLVAMEATGHYWKNLFAALVAGGYTVSLVNPLRTHRFAGEDLERTKTDAIDALGIARFAAQKRPMATKLPDSATEELRELVRLRDRLVQDFGDRVRQLHRLVDLGFPELTRYVRRLDSELATSILKDYPTAEAFVGVRPRALSNLKYDGVHFVGLELATQLIEAAKTSVGRHHGYAYRIQVKFYCEDLDVLRRRLKDLDRDIEAKLGEHEVGTLLTTIDGIGTQTAAKLVAVLGNPADFRNERALAAYIGAVPGLKLSGKATSMRASLTPIGNAALRTALYMPTLSAVKCSPWLRAFYLRLISAGKPPKVALLASMRKLITAIYSVAKHRKPFVPRAAEVAA

SEQ ID NO: 64602 - protein, 423 aa, unidentified
MSYRIAGIDVHKKMLAVVVSDVEIDGEYQFERVRYSSSPEHLRFLAEWLITQQVEEVVMESTAQYWKPVWEALERYWKPICQGREGAGPMTGTLHLAQAQSNRGRRGRKKDFPDAERLVKRLVADELVLSFVPDTEQRLWRTVTRRKYQLTRNHVRLQNQLEGLLEECHIKLSSLVSDLLGASARRMLKALADGETNPVALAAMADKNLRATQAQLCDALGACTELKPIYRRLLKMFLEELHFIDQQISKLDQELASLLSRHHDAVVHLAEVPGLGVDSAQQIIAEVGAGAATFPSAKQLSSWVGACPGEEESAEVSKSHRSPKGNRHMRRILNQAANAAAKSKGTIFEIVYRRLVSRLGHNQTIGAIAHRLCRLIWIILHRGVRYEERGPSVSAKTRRHRTNRMIRELRSLGYRIEPLVATA

SEQ ID NO: 64603 - protein, 320 aa, unidentified
MTSKGAEKMQNDTIGVDVSKDHLDAHRLADGASRRFANDKCGHKAFVKWFAQTPVERVVFEPTGPYHRAFERALGAAGVPFVKVNPRQARRFAEAIGRLAKTDRLDAATLARMGAMLELQMRPARSEALLKLKELRLAREALVKDRTAAKNRAKVLTAPLLKRHNAQRLEQIKRHIAAIEVEILKQVQADPDLAQRFAILTSIPGLSVITAFALLIEMPELGALEPGQAASLAGLAPMARQSGRWTGRAFIRGGRAEIRQALYMPALVAARFNPDLKAKYKKLTSAGKPGKVALTAVMRKLIVLANALLKANRSWSPKYA

SEQ ID NO: 64604 - protein, 379 aa, unidentified
MDVFIERCAGLDVHSETIVACVLTGKQDEDLIRVTETFPTLTKDLFRLLKWLEDHGVTHIAMESTGVYWKPVFNILEDFFDITLANAQRIKNVPGRKTDVSDAEWIAKLLRHGLIEKSFVPPSDIRELRDLTRLRKKWIGHLTSEKNRIQKVLECSNVKLSSVISDVFGVSGRKLLERLVEQGYVDGDDVESRIHGKMSSKKQLITDSLFGTINDHQRFLIKQSWLHIQQLEGHIVEVEKRIDQLLEEFKEELHLLLTIPGIKKDTAAIIIAEIGVDMNQFPTSQHLASWAGVSPGNHESAGKRKSTRTTKGNPHIKSAMCEAAWAVSRSRNRWLATKYWSTAARRGKKKALVATSHRMLRIIYSMLINKEPFKERQVI

SEQ ID NO: 64605 - protein, 428 aa, unidentified
MSNQEIIRRGKFCQIVKEIRGSNEYLVVGIDVAKDKHHAFMGMATGKSLLRRLIFENNIEGFARLLTTADAIKSQNGLSKIVYGLEPTGNYHKPLARHLIRCDCDVVLVTGQAVKKNRYLLDGRWDKNDIKDAANIADLVSRGRCLYYDCPSPSIIEIRSLLSLRRRLKREEHGLRMRIRNNLLAQYFPEFDMFYSACESESLSIIKYFLDPDTISAMEFGEFFHLVTRTRRGTAQTLRLRKIHGLAIESVGCPMGPAGEYEADLLVEKLNQVRQQIKKTADLIKDFCLEFYEYSYLLTIPGFGPYISARVLASIGDPFRFENRKQLIKMAGYDLCANRSGRTSDKAIPVISKKGNGELRYALYQAAMVASARVDLFRTYFTKLLRGRERERGIKTKMCVKLAAKMLVIAWTLMKKREPFDPSYLNIE

SEQ ID NO: 64606 - protein, 338 aa, unidentified
MSIYAGLDVGDKSTHVCLVDAAGAVLRRDALASDPEVLARWFDKHCPDLERVVLETGGLSTFLYHGLVERNVPAECICARHAKGVLSARVNKSDVHDAEGLAQLARTGWFKRVHMKASATHIDRAALRIRMQLVATRIAMVNQLRGLLKLFGLRMGKVTTAGKRAERLAALFGQRPDLEALFMPLIKSIEALETQLRASSQLLERRAENDPICVRLMTVPGVGPITALTFAASIEDPHRFARSEDVGAYAGLVPRRSQSGERDKLGSISKAGDGLLRRALYEAANIVLSRVQRPFALQEWGKRIAEAKGNKRARTAVARKLAILLHSLWLNETEFRWA

SEQ ID NO: 64607 - protein, 423 aa, unidentified
MKFKAQTKQNQLLERISTQHLVVGIDIAQQTHVARAVNFRGILLGTPLHFSNDDTGFGLLLQWMRGLQETHQLNDTIIGMEPTGHYWLSLAAWLKDRKLEVVLVNPHLVKKNKENRDNTPSKSDIKDAFVIADMVKNGYYTFIKETSEVFMELRVLMANRETIVHRLVSVKNQIHRWVDIVFPELRLVYKHLIGPGSLATLRLFPTSADLQKLTVRQVIDGWKTVMKRHSGERRAGELLALAARSVGAKHAERAYKLHLQQLLAEYDLATEQLQVIEDEVAAALIRIPLAEPLLAIKGMSILSVAGILGEAGDLSGYAHGNALLRHAGLNLAEASSGKWKGQMSISKRGRPRLRHALFMATMALIMNDVSFKRQHEVNVKMKSMKPMRSVMKLCGKLARLLVAMAHSGEAYEPDRAHPMKQTA

SEQ ID NO: 64608 - protein, 600 aa, unidentified
MKILDLATRIRRKRKYSSYQGEIGKKAENLIQRQFEASRPMEKCYTDVTEFAIPASSQKLYLSPVLDGFNSEIIAYHLSTSPNLEQVKSMLEQAFTEKHYENIILHSDQGWQYQHDSYHRFLESKGIQPSMSRKGNSPDNGMMESFFGILKSEMFYGYEKSFQSLNQLEQAIVDYIDYYNNKRIKVKLKARNHSRQRGNIMRVVFGIDVSKASSEVAILVNGEKVHGYTIPNDAIGFNRLLGDLKTVHQPEIVFEATGVYSRRLQAFFEDNSYTYTRLNPLESKKQLDSLRVRKTDKIDAEKLAMSQFILNRKPSYVQEALYQELRDLSRFYQNLTEDIVCAKNRLHKVLQITFPELENILSAPTGEQYWNLVITFPCNSFVLESDDATLTAIIRQSTAKRISEKRVTYLVDKLTKLANQSYCAVKKTSPVIEEVKYYAGELLRLSEHRQGVLEEMVTLAQSLPEYEILLSIPGIAETTATSIIGELGDIRRFHSANQINAFIGIDLRHYESGNFLAKEHITKRGNPYARKILFKCIHNIASASHTNPCHIADFYEKRKRQSQVTSTKPHTIASIHRLIRTMYYLITHNKLYDYTSIQNR

SEQ ID NO: 64609 - protein, 401 aa, unidentified
MNDEYGVYLGLDVGKGDHHAVGLAPDGKRLHDAALPNTEARLRQLFDKLARHGRLLVVVDQPASIGALPVAVARACGHQVAYLPGLAMRRIADLHPGSAKTDARDAYVIADAARTLPHTLRRVDTGDETLAEMEVLVGFDDDLAGEATRVSNRIRGLLTQIHPALERVLGPKLHHKAVLELLSRCGGPVGLRKAGRRKLLSIAAVHAPRMGQRLVEQIMTALDEQTVTVPGTTAAETILPRLADSLRDVLRQRDQVATQVERMLDAHPLAGVLTSMPGIGVRTAARILLEVGDGSSFATPGHLAAYAGLAPVTRRSGSSIRGEHPPRGGNKNLKRAFFLAAFAALADPVSRAYYERKRAEGKRHNAALICLARRRCDVLFAMLRDKIPYQPRPRDQAPVPA

SEQ ID NO: 64610 - protein, 401 aa, unidentified
MSKKNTRNALDTSLSYAVIGLDLAKADCAVAAVPCSDDELGLIDRMDYESLFEQAEKLGPTLFAMEPCCGYSQISLRLQNMGHEVKVISGHAVKNWIATHKSNQKTDLNDATALAKLALYDHDLQPIRVKNVEECRIASVQAIRIQLRTQATKSLVCFKSLCQCWGIVIRRGSLNTKKMAEAVAAVKKLLGVEVASSLMILRDAYKFTMKQINALDKLLDALVEANEQARTMKTVLGIGTQTAARLAVTTGDIKRFPMPRSYVAYFGLAPRNIITGHSGTPSPSKRGALKPVSSRGQGKVSRRGDRVARSFIIQGAATIYMLYCKDMLPECQLRRWLHEQIKRGKPYGKIIVSLAAKLLRIVWALLTYGEKFDSHKAGVPRSVLAAMEKPLKHDAAAESAA

SEQ ID NO: 64611 - protein, 350 aa, unidentified
MTIVADRYRYVAGVDTHARTHTLAIVDASTGHELDTRAFPSTAAAHERVAGWLQRRCSNPANVLIAMEGANSYGAILRTSLMNRGYRVVEAPSPARSLRRSQGKSDSLDAARAARSVMQLDAERLTEAKTGPTSQALRILLVARQSMTRERTACINALTALLRTIELGVDARRPLSARSIRAVAAWRSRREGVTVRTGRMEAVRLAKRIIDLRAQLNQNLCELEALVRDAAPDLLHMPGVGAVSAAVILSSWSHPGRVRSEAALASLAGTCPLPASSGNTTRHRLNRSGDRQLNRAMHTITLVRMNHDPQTKAYVQRRTLEGRTKKEIMRSLKRYVTRQVYRTLSAASRG

SEQ ID NO: 64612 - protein, 377 aa, unidentified
MKRIKFVGLDVHAETIAVAVAEQEGEVRSLGVIPNREESIRKLVKKLGPVEELRFCYEAGPTGYVVYWQVTALGAKCEVIAPTLVPVKSGERVKTDRRDALKLARNYRAGELTAVWVPDAAHEALRDLVRAREAAKKDQLRAKHRLSKFLLRHGRRPASGVKPWTLNYMAWVKKEVHFEQAAQEATLLDYLHEVEHAETRITRLDQAIDEAVKSTTPKMRAVIEGLQALRGLAQVAAVTIVAELGEISRFSEPRQLMGYGGIVASEHSSGESTRRGGITKTGNAHLRRVVVEAAWAYRHRPNVGAALRKRQELVSEEVREIAWKAQHRLHARYRKLTARGKEKGKVVTAIGRELLGFIWAIGVKVEAAQKETERQAA

SEQ ID NO: 64613 - protein, 372 aa, unidentified
MKEDSVFFIGLDTSKSKISVAVADGARNGEVRFFGDISSEPASVTSMVNRLSKRGGKLHFCYEAGPTGYGLYRQIIELGHDCVVVAPSLVPRRAGDRVKTNRRDAVSLARLHRAGELTSVWVPDEGHEAIRDLVRAREAANDALKQARQQLQSFLLRHGRIYTGRKPWTRAHVRWLACQGFDHPAHQILLAEYCQAIEDAGVRLDRLTKLVAETAASWSMAPVVAAYQAMRGVAFMTAVTFVVEIGDVRRFDNPRQLMAYLGLVPSESSTGERVKRGGITKAGNTRARRVLIEGAWTYRFPARVSPTIQARLEGLPRTVREIAWKGQIRLCARYRKLIAAGKPKVVAVTAIAREMAAFLWAIGQEVAPATKV

SEQ ID NO: 64614 - protein, 379 aa, unidentified
MKKDTRHVGFDVDSEKIAVAVAEVGGEVRSVGVIPHREESVRRLVKKLGPPSRLRVCYEAGPHGYGLYWLLSGMGVHCDVVAPTLVPVKSGDRVKTNRRDALKLARCYRSGDLTPVWVPDAETEALRDLVRAREAAKKDQLRAKHRLGKFLLRRGVRAAAGIRNWTRKHLLWVKTLRFERAAQEAAYLDYVHEVEHAAERVARLERAIDQVIEALPETMKALVAGLQALRGIKKVSAVTIVAEVGPLSRFRRPKQLMGYGGMVSSEDSTGDSVRRGAITKTGNAHLRRIAGEAAWAYQYRPAMSPEMKKRQEGLSEEVKEITWKAQHRLCTRYRRLMAKGKLRQKVTTAIGRELLGFIWAVGMQVEKEQSDRRLIRRAA

SEQ ID NO: 64615 - protein, 465 aa, unidentified
MADREERERSESTSSRRRQLQGLPVVRRNVAGIDLGSEQHWVCGPTVDGSAREVASFGGTTAELIRLAEWLKARQVESVGMESTGVYWIAPHEVLEGQGLQVLLVDTRQLARVPGRDKKSDPTDCEWIQRLHSCGLLRGSYRPEEAVCMLRTLVRDKASLVAERSDWVRRMQKSLDQMNVRVHRAVSDIDGATGMAIVRAIANGERDAQKLAQLRDPRCNKTESEIAEQLTGHWREDHVFSLQQALKMYEAVAERIAAYEKEILRKLGEMEGNELRAATAPPLKNPNKAKTIKHRGQEAKRQALYRMSGVDVTQIDAIGVETVEVVLSEYGPDLSLFPTEKQFVSHATLAPRVPRSGGKPLKKKKRNSASTRVAAALRMAALSLRHSQTALGAFYRRIARRRGADIAVFATARKLATLIYRLLRWGQPYVDEGAAAYENRYRQHRISRLAATAKDLGYQLTPVSA

SEQ ID NO: 64616 - protein, 407 aa, unidentified
MKITCGIDWAEVHHDVAVLDAGGQVLGRRRIDTGVTGFGELMSLLAEHTDDPRSVPVAIETDKNLIVVALQAAGLTVFPINPRAVARYRERHGQSGKKSDAGDAALLADVLRTDGHQHRPLPTISDAGLAVKALARQHQEAIWALHQTNNRLRSVLLEFYPQALQAFPNLKHKAALTVLAAAPTPELGAKLTARKLVALLHGCGRRNDTALVDQILADLKTPGLRQSAPVEAALGHTVVGLLGVITAMQAAVGQLEQALATEFDKHPMAPVLRSAPGLGPILAARVLAEVGDDPTRFASAGGLRAFAGTAPVTRASGKSRRVLARRVRNKRLGDACHWWAFATLTKSAGARAHYDRRRAGGDRHNAALRNLANKLIGRLWWCLHNDRAWDEETAWNTTAAAPTSRAA

SEQ ID NO: 64617 - protein, 463 aa, unidentified
MQDRKDDGINSNQSRGIEGLPVIRRNVAGIDLGSTRHWVCAPALKGLGREVADFGGTTPELTRMAKWLRERNVESVALESTGVYWIAPHEVLEAEGFEIVLVNTRQLARVPGHNKKSDPTDCEWIQRLHSCGLLGGSFRPKEAICMLRTLVRDKANLVAESGDWLRRMQKSLDQMNVRVHRAVADLNGVTGMAIVRAIVAGERDERKLAQLRDWRCSKSEDEIAEQLSGHWREDHLFSLQQSLKIYDAIQDRIAAYDREIHRKLAEMESDTSRGGPVPPVRNPNKARAIKKRGEEPLRQALYRMSGVDLTQIDAIGVETVQVVLSEYGPDLSCFPTEKQFVSHVTLAPHVFKSGGKPVKRKKRNSASTRVAAALRMAALSLRNSPTALGAYYRSIARRLKGDVAVFATARKLAILIYRLLRWGQPYLDEGAAAFEKRYQQQRIKSLLAKAKALGYQLTPTVAQ

SEQ ID NO: 64618 - protein, 412 aa, unidentified
MWPAKPETPAEPPNGSSGEWAQTQRLLELDSQEWKLELMHVAVGQPTQEAYATPMNSVGLDVHKTRCVACIKTHEGRILEEFAFQNTPHGHEELITHLKAYPEVQVAIESTGNLWIPIYNRLEDEQIHTILTNPMKTRLIAEAKIKTDKLDARILADLLRANLLSASYVPPPEIREQRSIIRERARLTRLRTIIKNRTHTLLDKHSIKTPYTDISGKHSIEWLSKLELPPGDRILLDINLEQLNSLNKSIDKLTETIALSAITNPEVKLLMGFTGIDYYSAMLLINEIGPIARFASPKKLVSYAGLAPSTHQSGNHTTHGHITKEGNSHIRWILVEAAQHASRHDARLNQFYLRVMKRRGHNRAIVAVARKMLVTIYHVLNHHREYRGLRPELYTNKIRRLERITTSSLQTA

SEQ ID NO: 64619 - protein, 490 aa, unidentified
MARLLEHSPRPESTYRPTWAVVFGKAEKMQDSDQRKVSADSSKQIAGLPVVRHKVAGIDLGSERHWVCAATVEGSGREVADFGATTCELIRMAKWLKARKVESVAMESTGVYWIAPHEVLEAEGLEVMLVDTRQLARVPGRDKKSDPFDCEWIQRLHSCGLLMGSFRPKEAVCMLRTLVRDKGNLVAEAGDWLRRMQKSLDQMNVRVHRAVSDIDGVTGMAILRAIVDGERDARQLAKLRNPRCHKSEEEIAEQLSGHWREDHLFSLRQGLKMYDAIQERITDYEKEILQKLAKMEREECRGQEVPKSKKPQKGRAIQSRGAEPMRQALYRMSGVDLTGIDAIGVETVQVVLSEYGPDLSRFPTEKQFVSHVTLAPHKPTSAGKPVKKKKRNSASTRVAAALRMAASSLRHSETALGAYYRHIARRIGGDVAVFATARKLATIIYRLLRWGQPYVDEGAQTYEQRYRENRIKSLTARAKELGYQLTPTTA

SEQ ID NO: 64620 - protein, 317 aa, unidentified
MSKRSIVCAGIDTGKHRLDVALHGRPERLQVPNTAEGHEQLLVWLRQHRVKRVGIEATGGYEQTVVWRMRQGGFVVVVFQPAQVRAYGRFHLRLAKNDKIDAALIAACTADIRTIYAAPDRRLAELAELATQIDQITRAMARFKNHRESCRDAGLRQLWDDEIRRFRGLFRQRLKQLVAAIRRYPDLAERLDLILSIDGIALRTASAIVVRMPEIGQLSRGQAGALAGLVPYDEDSGEHAGERHIAGGRERLRNNLYVAAWIASLRWNPQLTALYKRMRAAGKEHKVAVVACARKLLIFANAVVARGTPWQAHHTVH

SEQ ID NO: 64621 - protein, 342 aa, unidentified
MAEYVGLDVSKAETSFCVMDISGTVLSSGKTLSDPDALFRMLRQHTVCPERIVLETGTLSNWLARGLRDHHMPVDVIDARQAHAVMKLQHNKTDANDARLLAGIARTGFCLPVAVSSEAAQKHRILVKARRHLVNQRRDTQNAIRGFLASLGLRFVKGSGQFVARVREALMARPDLNPMIEPLLASAEAQAEQIKHLEGEVKAQAWEMASCRLLMTIPGVAHNTALAYVATIGEATRFASSRAVGAYLGLTSRRHQSGEMDYSGRISKHGDGLLRSLLYEAANSLLTVVRKSHPIKDWARRIKKRSSHKKACVALARKLAVIMHRMLISGETFRWPEEAAAA

SEQ ID NO: 64622 - protein, 345 aa, unidentified
MTNHNPKLQISLLAIDLSKHSFQLHGVNAHGKCVLRKKLPRAKLLPFIANLPPCVIAIEACGGANHWLRKFSALGHVVQMIAPQFVKPFVKSNKSDAADAEAICEAAQRPNMRFVPAKSIQQQDIQSVHRIRSQAVARRTALANQIRGLLTEYGVIIPKGISYIRKQIPMILEDAENDLTVLFRELLSELYDEMVHLDQRVEMLEQKLAIIAAQNPDCQRLLTIPGIGLLTATALVAAIGDISVFKNGRELAAWLGLVPRQHSTGGVPTLLGISKRGDTYLRTLLIHGGRTVVRVAHKYEDSRNQWITELDQRRGKNISAVAVANKNARIAWAVLSKKESYQVAA

SEQ ID NO: 64623 - protein, 312 aa, unidentified
MKTICGVDVSKAKLDACVMPGAMARSFDNDAAGIAELATFCRAHATELVVMEATGGFERRAFVLLWEDGLPCAIANARNVRLYAEAMGVLEKTDKIDAGMIARFAQAKGLRPTPLPSRPQQRLKALVARLRQVTDDLVVQKLRRSALSDDAEMTASLDEVIALLKRQSRTLEGEIGSLIDDDPLWAHLAATFRTIKGVADRTVAWLIADLPEIGTYDNKAIAKLAGLAPIADDSGNRKGKRPVRGGRAGVRSILFLVAAIAARYDKSLADFRNRLSKAGKEKMVIRIALARKLLVRLNAKARDARTQFAYAT

SEQ ID NO: 64624 - protein, 422 aa, unidentified
MACINPTDEVMGMEAILERCAGLDVHQETVVACVLYGELERKPKQEIRTFSTTTKGLLALNDWLNEWECTHIAMESTGVYWKPVWNILEGAFTLILANARRIKNVPGRKTDVADAFWIAQLLRSGLISPSFVPPVDIRNLRDLTRYRRKLLGHATAEKNQVHKILQDANVKLTTYISDIFGVSGRALLESIINGEVLDADEVREKVKTSLKRKVPELLEALDGRMNKHHRMMLGMHIDHLSYIERQLEKVESEIDQLLKPYLSSMELLITIPGIQKDAAAVILAEIGNDMTCFGGDPQLAAWAGLSPGNNESAGKKKSSRIAKGNKSLKAVLCQAAWAASKSKGTRLASFFYRIQKRRGQRKATIATAHLILRIIYRMLKDRVAYREIGWDYLTSSTPSVEYWIKKIEAQGFNVKVESAEAS

SEQ ID NO: 64625 - protein, 359 aa, unidentified
MRGQRNEISFRGQKIYIGIDVHLKSWSVTVLSETFVLKKFSQHPSPEALHGFLARSYPGAEYHSVYEAGFCGFWIHERLTALGIDNIVVNPGDVPTKSSEKLRKSDAVDSSKLARSLRANELKGIYTPDSASLEMRSLIRLKNSITKDTTRQKNRIKSQLRYLGIGIPQEFLEPFSTWSKRFIAWLKEVETLTPSGRQAFDIQIRHLEELRRQKLEMTRALRTLAKTDRFREPLRLIMTVPGFGQATGMAFLSEICDIARFRNAEQLAAYIGMIPMCHSSGEKDGTGDITVRRNAVMRCNLIEAAWVAVRQDPAMNLFFTEQCKRMPKSKAIVKVARKLVNRLYFVLKHQTDYVNSVMS

SEQ ID NO: 64626 - protein, 446 aa, unidentified
MDVVFLRCAGLDVHKKSITACRMVPDPAGQEAEGIAELRTFGTMTRDLLSLADWLTEASITHVAMESTGEYWKPVYNLLEDTFTVFLVNATHVKNVPGRKTDKADARWLAKLMRFGLLQASFIPPKGQRDLRDLTRYRTKLVQERVREVNRVQGVLERANIKLASVIADIMGVSGRAMLEALIAGRADPATMAELAKRRMRSKIPILEQALTGIVHDHHRQLLAMQLAHIDFLDEQIEALNGTIETSLKTLSTIEPIEQAQPPLLTGGSAASVTVSPLLTFTRAVELLDTMPGIDQRGAEVIVAEIGIDMSRFETAPRLAAWAGVAPGNDESAGKRRSGKTRKGNRPLRAILTQLAHAAVRTKDTYLSALYHRLAVRRGKQRAIIAVAHSMMVSAFHMLSRQEPYRELGANYFDERRRQFTIDRLTRRIEHLGYRVHLEPVAASVA

SEQ ID NO: 64627 - protein, 344 aa, unidentified
MSKVIIIGLDIAKHVFHVHGVDERGRAIFSKRISRGKLLDFFAAHPSCTVALEACGGAHHWARQLAQLGHEVRLIPPAYVKPFVKRQKNDAIDAEAICEAAQRPSMRFVAVKSEHQQAASLVFRTRDLLVRQRTQLINAIRGHLTEYGWIAPKGPSHVAMLADLLEEEEMASSLPEAARAMFRLMLDLLAGLDRKIADLDKEIARRAREDEVSRRLMTVPGIGPISATAIAALAPPAETFAKGRDFAAWLGLTPLQRSTGGKRKLGATSKMGERTLRRLLIIGSSAVVLQASKRGAPKGSWLEQMLARKPRMLVTVALANKMARIIRALLVKQENYRAPVAAKA

SEQ ID NO: 64628 - protein, 457 aa, unidentified
MQQYYLGSDVSKGYSDFVILDSQKRRVEENFQLDDTIVGHSFLYDRLLIFFEEHPDAELCAAVESTGGYENNWYNTLRKFQSSLNIKTARLNPAGVCKNTEAGLKRVITDKISAQGVAEYLIAHSEKVMYQQQDYWASLRKQWSFIKMLTKQSTQLLNQLESLLYSANPEILKYCQDGVPAWVFKLLKKYPTAAKLGKARATSVARIPYISISRAEELVANAKTSVASATDTITGQLISAIVGQILQLKKIIKTQTKIMAAECTLQEVELLKTFTGIGDYSAIGLMLEIQAVARFSTAKKLAAFFGLHPVYKISGDGASGFRMSKKGRKEPRRILFMVAMSAINSNSLIRDLYQKHVENGMEKMTAIGLCMHKILRIVYGMLKNNTPFNPEIDLKNRERTSEQPQKERKDKSRRYQDFDATAPISGRQRKKRAERKLSQNAVSVECGICAPAPQLSS

SEQ ID NO: 64629 - protein, 338 aa, unidentified
MFYGAIDLHSDTNTIGIINDRGERIYKRIMPNDLAGIKKLFDPFRAELKGIVVESTYNWYWLVDGLQEAGYRVHLANTTSSQQYSGLKHTDDDSDAWWLADLLRLGLLKEGHIYPVQQRAVRDLLRKRGRLVEQRTRNIISIENLTSRNWGVRLKGDQVKELTVAEVEQSYGDENLALAVTSTLRIIEALDAQIKLIEKRVKQQIKLSEPYQLLKTVSGIGEILSMTIMLEAGEMSRFPTVGDFSSYCRCVDSLRLSNGKKKGSGNTKNGNRYLSWAFIEAANFAIRFDPIIRRFYQRKIARSKVVVARKAVAHKLARACYYVLRDQVPFEVEKCFGH

SEQ ID NO: 64630 - protein, 355 aa, unidentified
MALTHYIAMDTHSYSTEICVKTRANKPGRHWSVATTIPALRQVIDSIRRPRHMVFEEGPLASWLYRNLKEDADTVTVCDPRKNALIAKEGDKDDPIDANKLADLFIGGYTRSVHHTEEVSRDVFKQLVGAYHERVEHRVSEANKVIGALRRWGVVVRESAFADKIDRAPLLAKLPEGAELEPARFNLRLMWEGYDQAVKQETKLRQQLRSLAKKQEVIVRLTELPGVAWVRAATFFAYLDTPWRFHSKQALWKYMGIGLVRETSGKGPVFVRVELAANRRLKSMIIGAAESAVIQGDNPFAEQHRRWKEAGLSPRNARRNVARSLAAVMWGMWKNGGVYEPKQVIVKAPERQVEQ

SEQ ID NO: 64631 - protein, 429 aa, unidentified
MHYTQNQKLEQVTEKTLVIGVDIGSENHYARAFNYRGIEYSQKAFKFANNTKGFEVFQGWMQGYVRTNGAKKVIVGFEPTGHYWYNLADYLKAQGIMFVMVAPQHVKHSKELDDNTQRKDDHKDPKVIAKLVTEGRYIIPYVPEGIYAELRTAYVRYCELTETKVRLENRITRWFDIYFPEYREVYRNPGAKTGMMVLRIAPLPADVIKLGAKGINQLWRSAKVKAAGMKRAETLVAAAKKSTGRAGGDAVRRDLWQMLEEYELVTRHLAEIQVMLEELVAQINGAERLLRIKGIGFTTVAGFFAEVGDLSRFTDPKQIQKLAGLSVVTPDSSGKHNGQSEISRRGRKRLRMILFRAAMSLVKSNKEMKMLHEYYTTREQNPLKKMQSLMAIAGKIIRVFYGIMKNGTEYDPVRLMTDIKRPGSGKNAA

SEQ ID NO: 64632 - protein, 419 aa, unidentified
MTDKVYRRCCGMDVHKDTIVVCVLPPDGQAGTRARKTYGTFRNDLTRMRGWLKLLKVTEIAMESTGVYWRPVWNVLEEQGFRLLLVNPAQVKALQGRKSDRRDAKRIAEYLQDGRLDPSFVPPAEIRELRQILRHRVSLLEQRGEVHNQIRDLFETANIKLASVASNLLGVTGRRIIEAMIAGQDSPDLLSWKVRGKLRKKEKLVKESLKGYFHEFHRLMLQAHYQHYEFLCQQIATFEAELERRLQPYAPQMTALTTIPGVDRIVAWHLIAEMGADMSVFPDADHCASWAGVSPGTCESAGKQLSGRTKKGNKYLRRVLTQAAWAASRCKEGYLRAFFHRVKARRGWGKAVFAVAHKILVIAYNILKTGTPYQELGGDYFDKLHPERTTQRLVKRLERLGLTVTLTPSQTLSPGFSEG

SEQ ID NO: 64633 - protein, 338 aa, unidentified
MTIETLGVDIAKTVFQLHGVNRSGRIVMRRRVMRDQLLAVIAQIDPCTIAIEACTGAFYWQRKFEQLGHQVRIISPQYVKPFVRRQKNDGNDAEAICTAARQPHMRFVPKKSIEQQDIQALHRARQRMVNHRTAVVSQIRGLLLDRGFAFGKSITRARRIIPEILADLENELTDLAREAIGELHDLLQDLDRRIASFDKKIERVFRQSEVCPRIAKVTGGGPKTATAVVAAIGDGTELKNGRHLAAWLGLVPRQHSSGDKRVLLGISKRGSQHLRTLLVHGGRAVVRTAGNKSDPINRWVNQLRERRGYNRAAVAVANKNARIIWAVLRTGEAYGSAR

SEQ ID NO: 64634 - protein, 435 aa, unidentified
MAMKVKYEDRLKQKVIAITTDTLVVGVDIAKNYQWARFVDFRGIEHDRALKFKNSKGGFETILARIREICKKENFAKAVVGMEPTGHYWKAFANWLEKQEGITVVLVNPYATKQAKELDDNSQTKSDKKDALTIAKLVKDGRYFELYLPHDVYAELRGLSTARTGLNKRKSALKNTITAVMDEFFPEYAEVFKCPLSGKASRHILKNCPFPKFTLALGEGGVTDEIRKAVRKTVGRKKAVQLVKAAKDSIGVDYGEEPARLKLRLMLEELELLEKQTEELEGQMSAALQETDYAEFLLSIKGIGIVTLATCLGELGDPARFDDPRQMSRMAGYNLVEDSSGKNKSGTKISKRGRKNLRSVLYQMALTMVATNDEMKQLYHYLKTREKAPLRKMQALIVVSKKILTLIHTLAKKKESYDPEKVFGHVRREQLKAAA

SEQ ID NO: 64635 - protein, 458 aa, unidentified
MYRELEPLRQALSVELKANLPPAGPGIEPEHLLQTYLDRLTLNVGCDVADQSFTLYAEDASGEDLGHLMDVPNHPQGFERAWNWLENLREHHHLRIILLAMETSGIYYWAWWDFLAGRANLARVLFNPRTTEHMTEVLSKRVRNELVDAYALAEQVRLGATPEAVLIEDPDLLSARLCSRAARDLAGQINDKKNQLRSLLRAYNPALSHVFPRAKFHHPAVYALVQHYVLPEEFVAVGPQAIAAILRAHCRSAFGQDEAQQLVALCRQTLTHPIGPEVIRYRVQQLTTDILTTQQHKQHFLKTGYRLIEDRLETQLLRTATGAGVSNTLALVSEVGDVHRFPDGEHLASFLGLTTSKHISGTTLFRSKHITKQGSPNARYAAVNIALHLSWRVPKYQAMYQRIKGRKPPRQGHYIALVAVARDFVTNVLYDMWRSQRPFFLEVEDYRAYRRSHPRTHH

SEQ ID NO: 64636 - protein, 344 aa, unidentified
MQIAILGIDLGKNSCSVVGLDNSGHVVVRRRMHRTSVIKFAGGLVPCVVAMEACCGAHHLGRLLRTQGHEVRLMSPEYVRPYVKAQKNDERDAEAIAEAATRPTMRFVELKAEEQLDMQTLHRVRDRLVGERTALLNQLRAVLLERGIAIPQGRRKLEQHLDAMLGGPESADVAPRMRRLLRDMRTEWQALDRRIEAFDEEFAVKVRTDPVACRLATIPGIGVLNATALVAAIGNGENFARGRDLAAWLGLVPRQATTGGKPRLLGISKRGNKYLRKLLIHGARAAMPFLARSATALGAWLRGLLARAHPNTVVVALANKLARIVWAVLRHGREFERADVVAST

SEQ ID NO: 64637 - protein, 401 aa, unidentified
MKVSGLDVHKDTIFCAIYNGKTYGEVVEYLTFSEDIRTMGVHLQREGVKRIALESTGIYWIPVWNILEEMGFELMLVNPFLIKQMPGRKSDVKDAQWIAKLLQKGLLRGSLVPDKTIRQLRTYSRKYVKMQGMITRVTQEMERILETCNIRITSLVSKNNSKSVLGVIEKIIAGEDSVEELACCIHGRILNSKGELVRLSLEGFIQEHHRFSLQLAWEQFRLFTAQLQMLESQMEEICDRHYPRQLELLMSIDGIGKQAAMQIIAETGADMKAFENSGKLTGWTGLRLRNDESAGKYKSTAVTHGNKYLRRIMVQCAWAAARTKGSFYKSKFEQLCVRKSRKKALLAIARKLLTVVWHVISENEPFNPGLLPVYNPRKIQMKMNYHRRKIEKLEKLGYGIV

SEQ ID NO: 64638 - protein, 422 aa, unidentified
MKQALNEEQFAAFIGIDWADTKHDLCLQAVGCDKHETSILEHTPEAIEAWANTLRRRFGGKSVAICLELSKGPLVYALGKYDFMVLFPVNPLMVARFREAFATSGAKDDPSDAQLQLEILLKHRDRLKPLKPSSPAIRALEQMVEHRRRLVADKVRLNNRMSSILKNYFPQVLEWFKVRDTTLFCDFLTRWPTLKAVQRARSSTLERFFHTHHVRSSVLINKRIKGIRAAIALTTDEAVIAPNELLTQALVAQLRVVLTAIGEFDEEIALRAQRHADFALFDSLPGAGAVLAPRLLVAFGDQRERYACAADLQKYAGIAPVTVRSGKQCSVHWRWRCPKYLRQTFVEWSGKSIHHSFWAQAYYQQKRTQGKSHQAAVRALAFKWIRILFRCWQDRCPYDESVYLRALQRRGSPLFKYLAQST

SEQ ID NO: 64639 - protein, 343 aa, unidentified
MKRSYTVGIDLHKNSFTYVMLDPRGQISRREKVAVHAKSVERFLQQLPQKSETTLEATSSWGWLADALQDRGHRVHLAHPLKVKVIAECRAKTDKVDAEALARLTAVGWLPEAYLAPADVRQYRRLLRHRAALVSQRTQLKNRVRALLAQYPFVEVDLSRAFSQKSRRALRQIKLPQGDQRCLDSLLDTMAALDERIKEAEGWIEEQMRGNAQVDRIRQIPGIGLILAHTILSEIGDIQRFKSAKALCSFAGLVPTVRASAEHVFYGRLTKQGSRWLRWALIEAAVHAAGKVPQWKNSVESLRARKGAKAARVEIARKIAKAIYHMLKEKRDFYTQQPGSACR

SEQ ID NO: 64640 - protein, 403 aa, unidentified
MNNVAGIDVSKGKSMVSVLRPFGEVVAKPFSIGHTGSELKELADYLKSLDGETRVVMEHTGRYYEPVARFLHEEGVFVSAVNPKLIKDYGNNTLRKVKTDKADARKIARYGLDNWAELRQHTPMDTIRMQLKTLNRQQSLYAKTKTMMKNNLIALLDQTYPGVNALFDSPVREDGSQKWVDFATAFWHVDCVRNMSLTAFAERYRKWCKRHGYNFSQSKAVEVHTGAQDLIAMLPKDALTKTMVRQAIDALNAVSASLERLKAEMQALAAQLPEYPVVMAMHGVGDSLGPQLMAELGDVARFTHRNAITAFAGVDPGADQSGTHEAKSTRVSKSGPPELRRALFLVMDCLLKTQPQDDPVYRFMDKKRAEGKPYLVYMTAGANKFLRIYYGRVKEYLASLEGN

SEQ ID NO: 64641 - protein, 288 aa, unidentified
MQITIGIDISKETVIAYRLPDNQSIQVANDRAGQKTLVRWIGKQNGSLVVFEATGAYHRCLEAALAANGTPFAKVNPRQARRFAEATGRLAKTDRVDAIMLAKMGAILGLKADRPKSEVLYLLRELLTARRALMKDKVAAKARLQTTKQTLLKNQIKARLKQIEIQIRQVDAAIAEKVELDEALSNKLAILISIPGIAETTAFSMLIEMPELGTLEGKQAASLAGLAPMSRQSGKWQGKERIQGEQAFLRRAIYMPALVATRRNPGLKANRISSFAQENPGKSPLQRP

SEQ ID NO: 64642 - protein, 329 aa, unidentified
MEGIVVGLDLHLKKTEGSVMSMSGEELKHERFDSTREGLQRFLASVPQGTEVAIESLGFCWPWIDFIEELGYKPLLANPIKVKARAEDVKTDKVDGELLAHLTRVDWLPTVYIPSTELRMLRSFLRHRAFRRRISTALKNRSWSEFHKRWIDTNTEFRSKASRRWARTFDVYEIGQNMDILDLVEEQIKEIDRELERRYADIKPVQILRQIPGIGILTALTIYAEVCDIKRFSTPDKLAHYAGLVPTVRQSGEKTKLGRMTRGKNKWLKNVMIEAAWSHIRWCPDGRLAGIYKSACLRKKDETKAIKIVARKLVNVVWAVWTHETDFVK

SEQ ID NO: 64643 - protein, 316 aa, unidentified
MTELFVGIDVSKDKLDVAVRGRVTRVWTVPYDDAGVDALVTELAALAPTLLVLEATGGQEAHIVAALATAGIPLVAVNPRQVRDFARAIGQLAKTDAIDAQILALFAERVRPEVRELRDDDTRDLDALMTRRRQLVDIRTGERNRLYLAAPVVRGSIAGHIAWLDARIAEADAELQDRIQKSDLWREKDRVLRSAPGVGPTTSLSLLAGVPELGKLNRQKASKLVGIAPLNCDSGRFRGQRRIWGGRSDVRSVLYMATLSAIRYNPVIREFYDRLLGRGKLKKVAIVACMRKLLTILNRMLQDNAVWNPAFATHCG

SEQ ID NO: 64644 - protein, 425 aa, unidentified
MDFKQNQKINQVTEKTLVVGIDIAKQTHYACFVDDRGRVLQKSFSVLQSNDGFQYFYHRILTAMKEHGKTEVIVGIEPTGHYWLNLAYFLEEHGIPIVMTNPIHVKRSKELDDNLPTKHDRKDALVIARLIKDGRFSYPRILKDMEAELRVGSTFRNKLTEELGVVKNRMIRWLDRYFPEFTQVFPSFGKMALAVLECTPFPSDLHQKLPDEILTLYRKVEGLKSPQRPKAMRLIEVAANSIGVTEGREMARIEIATLVRRYHQLEQDIESITQHLVEIVQTSVEYEWLSTVPGLGDTTIVDLLAEIGSFSHYEDPRQLMKLAGLTLRENSSGQHKGQKRISKRGRRKLRALLFRVMMPMVRHNEAFRQLHEYYTNRKVNPLRKKQSIVVLCGKLLKVLHGISTKHKAFDAQRMMKDIPSLAEAM

SEQ ID NO: 64645 - protein, 347 aa, unidentified
MREIAYLSIDVHARNCVLGDMDGNGKFRGNRSFITSENNIINALKAVKAKKKYLVMEAGPMSNWAAQVANDHTTKVFICDPRENALIYKGSHKHDKVDTKKLCRLLRLNEFKEVYRPENDQRALFKAAVQHYQDLRDQLKALKNKTKAMYRQWGIINVFTDSVYSVSGRDKFLQQVKHRPIYLQIKRLYTLLDATAAMKQEAEKSMTSLGRNYPEIKEFKKIPGMGIIGPHTFDAYVQTPHRFAKRNRLWKYCRLAVTDRSSDGKPLGFKRLDKSGVGELKAVSYRAFLSAMKGDNEVKRFYLNSLQRTYNRKHARLNTQRKILSVMLSIWKKGQAYRPELFLDPSI

SEQ ID NO: 64646 - protein, 401 aa, unidentified
MKKLSGGIDIGSGEHHVIIINDKEKILYDRAVAHKFSEFYEAIEEFREIETREKVTITFAMEGKNGYGSPFDRILIENGFTLYNVDNLKLKRFKDVFGAEWRNDRRDARMLAKMLKIRDHVDKGKEKAFIEVEKFSVVNDKLKILSRHQQSLINEKIRIQNRLKKRLLEICPDILEFGDTNSKKLLRLLIKYPDFSKYKKLTMAALLKIKMIGQKQASLMLEGLQKIQSFEELTETYKTIILSSARRVLELKEEIEMLDGQLEETGQKSAEVKRLKSMSGIGTKLSSRLVGEIGNINRFESEKQLAVYCGVACIDDDSGKSKKTKVVYKANKICKATMIEIAGCTIRYIPESKAYYDKKRVEGKKHNHAVRCLARQLIKVIFKMLKENRDYIIKEEVKKAA

SEQ ID NO: 64647 - protein, 342 aa, unidentified
MQWTVAIGIDTHKHTHVAVALDRLGAQLDAFEAPASSAGYLALYRWAHELGEPVFALEGSGSYGAGLARFLQAAGCSVYECERPKRGERRRGKNDLIDALLAARRLLAGEPLGSPRGLSGPREDLRLLLLERRSAIRARTATLNQLQAIVVTAPARLRARLGDRTSEQLARAVARLRPGKSEQAVVRGVLRRLGRRVLSLDAELAELERELEAIVSALVPELIAECGVGPVCAAQLVVSSGDPSRMASEASFAALAGPSPVDASSGQQQRHRLNRGGDRQLNRALHVIALSRVRYHGETAAYHQRLVASGKTTREARRCVKRMLARYFHRKLCSLPALALTT

SEQ ID NO: 64648 - protein, 331 aa, unidentified
MSTFIGIDIAARSFDLVCRRDGKNAKALSLPQTAHGHERATRKLLALQPTCIVMEATGIYYLDLALALHEAGLPVCVINPRSFRHFVEIRLRGSKTDPIDAALLAEYAERFSPRRWSPPPASYRALRDIGRHINRLLHARTQMKNQLHALKARRGAPPVLIADAEQGITQLDQRLQRLQQAAQQLIEQAPELTRHQAHLCAATGISTATSLALLAELCTLPEDLKANQVSRHSGLDVRLHESGSSVHRPGRLSKAGNAYLRAALYMPAMVAIVRDPYAKAFYEALIARGKKKIQALCAVMRKYLTGIWACMQRDQPFDSSKLFSAQHLKSN

SEQ ID NO: 64649 - protein, 436 aa, unidentified
MQVNTRTGRVSIGIDAAVVAPHQIAIRGEVREDFKVSPTLAGLAKLTGRLETYAGSLVVAEPTAGMWLPLAHAVTDAGCEIGFVANRDSARLRKAMVGASKTDVIDADMLARCQEVLGVVSAPVPPPGQIALRRAMRRRHVATIDAHRVECRLWALSAWAFPDLWRATGGHKLAQPLLGRWPHLDRLAHARMSSITEMVAAHSRDTNPQRRAERIRDAATGWARFWEGRLDLDALAWEVTAMLGDIETADRRHADATSQAFGLWEQHWPDDVLTSIPGLGPVCASAIRGWWGNATQFVSAKAAVAHAGLNPSVWSSGLTEAPSRKITKQGPSELRLALYQAANVARRRDPQLAEHYRRLMVERGHNHISATTAIAHKMACRAWAIATSGRPYEPRDLNGNPITIDQAAALAVELTVPDQTRFRRRGHTRRGRLNTS

SEQ ID NO: 64650 - protein, 352 aa, unidentified
MPCLPAEVILGVDTHRDTHAVVLIDLLGRLVAAETFPTTRPGIRALIAWAQQRGTVRRAGVEGTGSYGAGLTRALRLEGVDVIEVTRTARVGGRHRGKNDTRDAEAAARNVLSGQATAIPKSRDGIVESIRVLRNTRASAVKARTQAILHLKNLVLTAPDELREALRDLSTKQLLARCARMHRSDRLDALHATRHALRTLARRHRALDDEIHELDVLLADLTAKAAPRLLRQPGIGPEIAARLLLVAGDNPTRLRNDAALAALCGASPIEASSGKTTRHRLNRGGDRQGNSALWLIANNRMIHHPKTRDYVTRRTTEGKNTKEIRRCLMRHIARGIYPLLIADLHDAQANSS

SEQ ID NO: 64651 - protein, 367 aa, unidentified
MSNYVTAIGLDVHARSIKACALNPMTGEVERASFGYDPASVAEWALGFESPKAAYESGVTGFHLCRALRALGLDCAVGAVSKMQRPAADRGRKTDRRDAEFLARLLATRNVVEVWVPDERTEAARDLSRALADARGDLQRAKQRMSKFLLRHGHVFDEPTPTGGRRGNWTRAYWRWADAIEFVEPDDAAYEHYRDCVRRCEEARDALARRVAESAGRPEWKPAVDALRCVKGVDVATAFLLACEMGDPARFPSAPSFASWCGLAPSEHSSGETSSRGGITRAGNAHVRRALVESARHVPMSSRDPKPLAPGQEVAPAVRRHATKCNRRLIERREAMAAAGKRPCVANCATAREMACWVWAIARMATS

SEQ ID NO: 64652 - protein, 344 aa, unidentified
MIYVGLDISSKSLVLHGMNEKKKTVFTGEIPPNKRALRKAMLGLGAETRLVVFEASNQLKWIAQCLRKIKGVHIHVVHPNELKWITQSNGKTDKADARKLAELARGNLLPRKVHIAEGVIRELRELISARNTAMRKRVSLTNCLRSYALQEGCSINASFLLNPKWPELLPSLKITENLKVIFTTIMPAVDALRDAEEEFLLRIKDIEDDRLDLVQTIPGIGPLVSATIVSALDNVERFENKKCVAKYGALAPTIYQSGNVTRLGHINFDGRREIRRVLLQSAHIIIRMKSPAAKPLRDFYDRIKAKRGKKIATIALCRKVLTIAYGILKTGNPYDPFVLTPNAV

SEQ ID NO: 64653 - protein, 412 aa, unidentified
MKQQVIEDVNIMPQLDKACGLDMHKDKIVGFISGKDGSNQEFREFGTYTCELKEIRDWLQENDIHHCLMESTGIYWMSLYAILTEANIEVIVANPVHIKQMPKRKTDRKDAKWLCTLLLHGLVRPSFMPDNTQRIIRDYCRNRLFYTWQLNRIRNRLLKILESNNIKLRSVISSIHTLSAMDMIRLLAKGVTDQEQLLNCARGKVIKKKDQLVKALDGTLQAYHQTQLQMLLEDYDHVQKQVDFLDKSITEIISEHYAQAFECLDSISGIGIKSAEIIISEAGKDMSRFPTADHFTAWCGIAPGNNESAGKRKNTAIKKGNTYLRVAIVGAAWAAVRMKDSYWHALFDKLRKRMKAQKAIVAVARRLLKVVYKRLETLTAYQEKGIAHFVDLQAKSALYHAAKLSCPQTDNI

SEQ ID NO: 64654 - protein, 433 aa, unidentified
MPPNHPYDLVIGLDRSDRTADLHLIDTHTGKVQKQTVATSPEALHDWLAQLRQQQSQASVALCLEQPAANLIVFLETYSWIRLYPINPISLQKFRETFVTSRAKDDAKDAQYLAELILSHHEKLKPWQPDDSQTRQLQQLVLHRRAVVDQRTGLTNRLKALLKAYFPQTLDLCGEDLWRPLATEFLLKWPTLQSLKKARKPSLKQFYYLQGSRSQSLIDQRLERIDKAVPLTDEIALLQSYTLRVQLICKELQLVLKTLEQFDQQIANLFQQHPDRPIFEAFPGAGPVLAPRLLAGMGSERERFPEPGNLQCLSGVAPVTKQSGGKCHIHRRYLCPKFLKQSFHEYAKVSILHSRWAAAYYGQQRNKGCAHHTAVRALAYKWQRIIWKCWQSRTVYKEAIYEAALKKSKSPLVSLLDQIELGKSPVKNRGKKS

SEQ ID NO: 64655 - protein, 412 aa, unidentified
MKADLEVVYERACGIDVHKKEIVVCLITGQRKAETRKYGTLTKDLHEMVAWLKEEGCQIVAMESTGSYWKPLYNIFELEGMEAMVVNAQHMKAIPGRKTDVNDAQWIAKLLRHGLLRASFIPDKEQREYRELTRYRNSRIEERAREINRLQKMFEGANIKLSSMVSDITGQTASKLIKLVVQHEELTLEQVSAVRNRQCKSSAQEMLDALTGIISPLQRELFNEVSRIIEEQTQQIERVEALIEKYTTEAYDAAVKSIDEIPGIGRVSAEQLIAEIGIDMSRFPTANHLCSWAGICPGNNESGGKRKSGKTRKGNKTLKKTLVQCATSAIKNKESFFSAQYQRLVVRMGGKKAIVAVAHSMLIAIYHVLSGNTYRDLGAEYYTQFNKEKKIQSHLRQLEKLGWEPPCPTVAG

SEQ ID NO: 64656 - protein, 425 aa, unidentified
MTKTNIKTNTETVYAVYIGIDWADKRHAIALQVAAEGKIEESWLESDPESVHTWARSLGERFEGAKIAVGVELSKGALIEELRHYDFIDIYPLNPATTCRYRGAFTPSGAKDDMPDAKLHLELVTRHRDKLRLMRPKNGADRRVEILTSSRRKLVDMRTDLCNTLRSTLKNYYPLALEVGGELGTLLNCKFLIKWSSVNELKRARRNSIRAFYHANGSRRADTIEGRLDKIAAAEPVSDDPDLIEPMAAFACALARQIQTLATEIGKLDKLLQAAYAAHPDHKTWDSFPGAGATLAPRLAAAWGSDREAYEAGDMQLYSGIAPVTERSGNSIWVHRRYSRPHFIHQTFWEYAKQSYQHCEWAKHYVDAQIAKGKKHSTAVRSLAFKWIRIMFACWKQGTQYDDAKYLKALQQKNSPLAAKFPAAA

SEQ ID NO: 64657 - protein, 344 aa, unidentified
MEDFDVAGIEVSSESFLVRVVRHGRLGSPQTFPNTAEGRLAILRLLTRSGARVRVCLESTGLYGLDLALALHEKAVIEVMVANPRSVRHFGEAMMQRSKTDPLDAALLCEYAARMPFQRWQPPTLTARQLCAITRQIHALTVMSTMDKNRLHAANLSETTPKIVRDELERNLAAQKASIGRLTRAALKLIDTDPELKRRFALLVNGPQKAPGIAQTSALQILGELVLVGPDFNVHQWVAYAGLDPREYQSGKSVHKKVRISKVGNAHLRRALYMPALVAVRCNAYFRAFYQHLLAKGKLKMVALVAAMRKLLHALYAMMKYNQPFDGSKLFPNACPPLSEATRA

SEQ ID NO: 64658 - protein, 385 aa, unidentified
MRSAKKRGPGPSHLLVTSDHAGNVVGVDPHKRTLTASVADARGGILGSAHFRVSGEGHRELEAWARQFGQIARWGVEGAASWGRHTAMFLTGHGHDVRDVCANRTPRSDRARQRGKSDTLDSERIARETLAHPLLPKAFKRSGQEQGPDEQHQLLALWNNRRRSILTSRQHLVGEAEYLLCELPLELREELPDTKAVKPRLAALAHRNRRLRYDAPTTLRLLLLDGYRAQIQALDREERQVVIKLAELVRQSGSTLHELCGLSTRSVAELLVEVGDPRRFTEGGFARFNGSAPLPASTAEGPGEPVRHRYNPGGNRRINAILYRMAVTQLRCEPRAQRIYANARAGGHTKKEARRILKRHLSDVIYRRMIRDLQPQPTNQPLLAA

SEQ ID NO: 64659 - protein, 314 aa, unidentified
MNTTESDVIGIDVSKAQLDCCVGRDSRLFRISNTAQAIKAKLLKLQEELPKLFLVVESTGKYHAVLFRVATELSIPIAIVNPKRIRDFAKGVGQLAKTDSIDARIIARYALTVEVAPTPAPSKELEALRSLVARRNDIVRMITQEQNRLGDIQDKMLIRSLKRHIKWLTQERQALEAEIKQLSQSSQFGSKLSLLRGFKGVGELSAAALIAFLPELGTLSKSHIAALVGVAPFADDSGTSCRGKRRIWGGRCAVRSALYMCALTAIRCNPNIKSYYQSLRLRGKAAKVALVAAMRKTIIILNAMLRDNAQFQSI

SEQ ID NO: 64660 - protein, 336 aa, unidentified
MFQLGIDVSKKTLDLFLLREGVKGSVKTRKLQNDINAVNAVIAWLSKQHCKPEDVHIIMEATGVYHESLAYGLHKAGGRISLANPHRAREFARGMGMLTKNDRVDAYMLACYGALKAPEPWLPPPEEVRHLSALLRRRDALVADSTREKNRLEKYLATDTPSVIAESVEAMIGQLNAEIKRLDRLIRSHLNQHPELKKDFDLLTSIKSVGYQLGLNMLVILRSHDFATAEQAAAFLDVVPVEKYSGTSVRGCPKLSKIGPPEIRAKLYLASLCGLRFNPLMKAMYERLCLRGKGKMCAIGALMRKLVHWCYGVLKTQKPFDVGYLSSYARSACKAA

SEQ ID NO: 64661 - protein, 339 aa, unidentified
MQVTTVGLDLAKNIFQVHGIHNDGEVIFNRALRRAQVLAFFERLEPCLVCIEACGTSHHWARELIKLGHNVKLIPPAYVKPYVKRGKSDAVDAAAICEAVTRPTMRFVEVKTPEQQAILSVHRTRDLIVRQRTQTINMLRAQLAEFGVVLPQGVYHALKFAKNSLDGEPLNLPQDAQEVVFDLCEQLLFLHAKILRHSRHMTQIAKSEKRVALLRTIPGVGPITASAIVATVGSGKQFNNGREFAAWLGLTPLNRSSGGKERLGHISKMGDQYIRRLLVLGMTSRIRSIRLEPEKFDPWFADILSRKPSRVAAVAMANKTARMIWDVLTQNEPYKVRTI

SEQ ID NO: 64662 - protein, 338 aa, unidentified
MSKITTIGLDLAKNVFHVVCCDEHGKVVKKKMLKRFQVLNYFANLPTCLVGMEACASAHHWARELGALGHQVKLIPPQYVKPYVRGNKNDYNDALAIAEAVIRPEMHFVAVKTPEQQDIQALHRLREKRLQERTALCNQLRGLLAEYGLILPKGVNILRRRLPELLEDGENGLSDLFRRLLAQSYQQLQELDGYIDFYTQEMKRQSQQDEACQRLQTIPGYGPIVASVFHSVVGNDEAYRRGRDVSASLGLVPRQHSSGGKEVLLGISKRGDRYLRSLLVHGARSVVIQATKKDDRLSRWINKVKAERGFNKAVVALANKMARIGWAVLVNKNVYQIA

SEQ ID NO: 64663 - protein, 318 aa, unidentified
MSTNNTTIIHVGVDVAKLTLQLDPTHLGLAQVDNTTAGLKPLLKALGKLQRKSKATVHLVCEATGGHERLLVEALHQAGIPISVLNAARARAFAKALGKEAKTDAIDALVLTSFGQQMKPAPTIPPTPQQRYLTSLVSRRTQLVDMLVMEKNRLPTHTEPEVLKLAKLTLKHLEAQIAKLEALIAEHTKSTQELQQRVERLCLMQGVGNVTATGLMATLPELGKLNRAQIAALAGVAPRNRDSGNYQGKRTIKGGRAPVRRYLYMAALTASRMNPKLKALYQRLIEKGKPTKVALTAVMRQLLCVLNSLLKNPNFSLA

SEQ ID NO: 64664 - protein, 342 aa, unidentified
MQAITIGLDIAKSVFQVHGVDADGQVIIRRQLKRRYVLAFFDKLAPCLIGMEACASSHHWSRQLQALGHDVRLMPPAYVRPYVKRQKNDATDAEAICEAVGRANMRFVPTKTSEQQSGLVLHRTRHLFIRQQTSVINAIRAHCAEFGIVAPVGRRGVEELLNVIANANEKQVPEIARGCLLALGAQLRRIKEQILEFDRRIRAWHRSCETSRRLDAIPGVGPALATALVASIANPRAFRSGRDFSAWIGLVPKQSSSGGKPKLGSISKQGDRYLRGLFTAGALAVIRYARLHGTGHRAWLTALLARRPTKVAAIALANKIARMAWAMMVRGESYREPIALAA

SEQ ID NO: 64665 - protein, 355 aa, unidentified
MLADQVDHVIGVDTHRDAHSAAVVNPAGAVEADIALPSDAFGYRRLLRFAHERAPGRRVWAIEGTGSFGSGLTTFLLEQGEWVVEIDRPKRPARRDGAKSDELDAARAAREALSREHLAQPRQRGWREALRVLLVTREGAIASRTRAIGLLKGLIVSAPGPLREQLRRHSTDEQLARCARLRTGAAQSVEHRATVIAIRAAARRALALEAEASDLESQLELLVHDVAPQLVAQRGVGPITAAQVLNAYSHKGRFRSEAAFASLGGAAPIPASSGQTIRYRLNRGGDRQLNRALHTIVLSRLTHDPDTRAYATRRAAEGKTPREIKRCLKRYLARRLYRLLEADSRLAPIPATTVT

SEQ ID NO: 64666 - protein, 354 aa, unidentified
MKGEVQEKKVLVRGKEVFIGVDVHKESWHVTARTEGEEIFHGRITSQYHVLQKLLDHFRDCKIKVAYEAGPCGFWLYDRLTEDAIETIVVPPSLIPIESGNKVKTDKRDSRKLAKLLESNMLKRVYVLSEEDRADRELLRTRRQVLEHRSDVARQIKSKLLFHGISSPLATERWTKGYIRWLRELTWGSKVLKVSFESLIELYEYLTEHLIKINQEVIELSRSRKYLPKVKLLKSVPGIGTLVGMELLVELSEMGRFRSAEALASYIGLTPSEYSTGQYVRQGRITRCGNKRVRTSLVESSWILIQKDPLMRSKYNQLKQFKGAKRAIIAIARKLIIRIRRILLSNEPYVIGVC

SEQ ID NO: 64667 - protein, 413 aa, unidentified
MIVGIDVGSEKHYFRAFNWRGIELTRKPVAFSNSMEGFNSFYNTIVELMQKSELEEALVGIEPTGHYWFDLGQFMGEKDIKFVMVNPHHVHKTKELDDNSPSKNDRKDPRVIAGLVRDGRYFYSYMPTGAYAELRNASNRRFVLVEEQTRAKNRLQKWIAVYFPEYKGIYTHIDAKGGMLVLKKAPTPEEIVRLGVEGIIKIWKDAKLRGNGHKKAMLILAAAMRSIGLKAGLTEARMEIQDLIEDYELQTKRLERVNDLIKGLCQQVRYADKLLEIKGIGITTVAGFIAEVGDITRFDSTKELQKLAGLELVADSSGKHNGKTKISKRGRKRLRYLLFEAAISVVGKNEEFKEIHRYYTTREKNPLKKMQSLIVVACKLIRVFHAILTKGIRYDASKMLKDIRHPGEQLKAA

SEQ ID NO: 64668 - protein, 468 aa, unidentified
MKRKNRGAKCQKGSPFDGELKLIEADAAAIDVGSRSHWVAVNPQRDREAVREFGAFTTDLMRLADWLAQCEVKSVVMEATGVYWVGLYDLLESRGFKVYVVDAHTVRHLPGRSKSDVKDCQWLRRLHSYGLLRGSFRPPAQIRQLRNYLRSCTKIVEAAAQQQLRMQKALTLMNIQLHHVISDISGLTGLSIVRAIVGGERDPKQLAKLRDPRIRASKETVEKSLQGHWQEELLFDLKMALESYDHFQGQIAAYEEQMRRELQEVPSKVDVLEEPLPAARPKVSHKRPGMSREDQLDLRVELYRISGVDLTRIDGIGLQTAQTVFFEIGTDVSAWPNEEAFSSWLGLSPNHRISGGKVLKRGSRKVVNPLSIALRLAARTLRNSQSALGANFRRLIAKIGMPKAITAMARKLAVLIYRMLKYGTQYVDKGREHYEAKYRETKLQYLRSQAAKLGMSLVANDSALTAAC

SEQ ID NO: 64669 - protein, 380 aa, unidentified
MNKTYYIGLDVHKETTAIAYTFSYSRAKPTYYKECGGSNRAIELNLKRLAKELGVAFTDLKVCYEAGPTGFVLARRLIQLGVDCVVCSPSKTERNPNDKIKTDKKDAAKVAKEFRNGDITVVRIPPSLDEAIRDVCRARTDAVDDLSRSKQRLKSFLLRNGYRYQGKANWGPVHMGYLRDLSMPNEALKIVIEEYILAIDAAKQRVDRIKSHLKELLKTWEWKPVVKALMACKGFQEVAAMTVISELGDLRRFKHPSQLMAFVGLVPSEHSSGSSRRQGAITRCGNSHARWMIVEAAQHARRTPKVSGDLTLRQEGVSHKVKELSWRMQNRLNKRYVKLRMRGKEENKCIIAVAREICGFLWELQNKCDLELPTATYTSS

SEQ ID NO: 64670 - protein, 370 aa, unidentified
MLDTTTFIGLDVHARSIKAVSLDVMTGEVRAATFGYDAGAVAGWVRSVDPRARCVYESGVTGFDLQKRLSGLGVDCVVGAVSKMIKPSADRRRKNDRNDAEFLARMLSVGNVVEVWVPDDECEAARDLTRALEDARDDLSRSKQRLSKFLLRHGLVFDERTPTGRRKGNWTRAHWSWIESIRFAEGADNDVLAYYVDAVRRAAEEKARLEGLVGAEARKPRWRKRVDSLRCLKGVDTASAADLVFEAGEFSRFGNARSFAAWVGLTPSEHSSGESDRRGAITKAGNKHLRKTLVEAAWHYLTCSGRPKDLAKGQAPDRGARRHAAKGVRRLVERREALLARGVHGNKANVATARELACWVWAVGLMAEEA

SEQ ID NO: 64671 - protein, 377 aa, unidentified
MNDYTTYVGMDVHARSIMCKGMCKETGELYARLFVDGPSSAEVHEWMASLPQPVYSAYESGCTGFWLARELRELGDDCDVIAISTLPRSAKDKQGKCDKLDAKVILREIMNPLSDCSTVWLPDVETEAARDLARARQDAVKAVKSAKQKVSSLLLRYHFVWNEKTPTGKLKKAWRGDYRKWLDKIALPDPSAQAALENYKRAVKRAEEELAEMDGLVRARAEEPRWKPYVDALVHLKGVDVCSAFLACAEFGDFSRFASGRKVSCWVGTVPTNSSSGPRESHGGITKAGSTHLRMGLVEGCCGIDRWRAADKAVKGHPASAEVLAIAGKANERLRKRYRHLRDDLGKTPNKARVAVVSELARWIWVIGLQVQAEQAV

SEQ ID NO: 64672 - protein, 390 aa, unidentified
MIYAGIDVAKDKHDCLIVDSDGVILFPTFTIPNNRQGFDELFTNLKTCGSDLAKIKVGLEATGHYSDNLLEFLIANDLPTTVINPLHTNLYRKGLSLRKTKTDKVDAHSIVTMLRTESLKPYSHSSYHLRELKSLTRYRFSLVQDCSRLKTSYARLCTILFPELEKLVPSLHMASVYALLSELPNAEAISGCHLTRLANLLFTASKGRYGKEKAIEIRNMARDSIGSYSEVKSLELQQTIQMIRIMENQIKQVEAKINPIVDELHSPILTIPGISYRMAAIIIAETENFSNFNSAEKVLAFAGLEPSVYQSGQLTSSHAKMVKRGSKYLRYALFNAAKYVCHWDGGFGQYLAKKRAEGKAYNVAVSHAAKKLTRVIFHLVKTNQSFISQA

SEQ ID NO: 64673 - protein, 360 aa, unidentified
MYFAGLDAHLKYVTVAVLDRAGAIVLETTVPTRTPERLLAVLAPFRPLEVVVETCPFWPWLYDLLVPAGIGFHLAHAKRLRAIATAPQKTDAVDARLLGRMLLSGLIPEAYPRPGDQRELLRLLRHRTTLVRYRTRLAGRIHSQLHQQRLTLPREQLLRQATRAWLRETAWPRLTAEQQAIVTTHLELIDRLTPLIQALERRIATAAAGHPTAALLATIPGIGPYRSLLLAAELLPLTRFPRVEHLASYAGLAPVTRSSGGHTRHGSIPQGANRWVRGALVSAIPSHVRTAPHSSVTRAYEQLTARLGWRVARVAAARKLLRIIYVMLRRSEAWRSEPPQVTTSGTRSRPNMSLDDLKRA

SEQ ID NO: 64674 - protein, 345 aa, unidentified
MEITTLGLDLAKNVFQVHAVSSTGEVVVRRALRRAQVMPFFSKLAPCLVGMEACGTSHHWARELTRLGHEVRLMPPAYVKPYVKRGKTDAGDAEAICEAVRRPTMRFVPIKSVEQQAALALHRTRDLLVRQRTQLVNMIRGVLAEFGIEIPKGITYALAFVRRVVAGETQDIPQLAARVIGALAEQALEGQARIRQLERELLAWHRSSELSRRIATVPGVGLLGATALAATVTDPTQFRSGRQFAAWLGLTPLQNCSGGKERLGRISKMGDQYLRRLLINGMTSLVAHNVRRPDMADPRINALLARKPLRVATVAMANHTARAIWAIMVRGETYRAPAPLDAAAA

SEQ ID NO: 64675 - protein, 316 aa, unidentified
MGGQGIYVGVDVSKARLDVAVRPSGEGFAEANAKPAVSRLVKRLKALDCTRVVVEATGGYETIIVAALYAAGVPVVVVNPRWVRNFAKGMGWLEKTDRIDAKLLALYAERAELKVQQLPDEATRQLAELCARRIDVLEMMETERNRLEHASSAVRRAINSHIDYLRKQLKRIEHDIDGAVRGSELWRHKDELMDSVPGVGPTLRACMLAWLPELGQLNRGEAGKLVGVAPLPDDSGTVRGVRRIFGGRAPLRKVLYMATMGAMRHNPHLRAYYDGLRARGKLHKVALVATMRKLLLILNAIIKTDTPWSESCLQSA

SEQ ID NO: 64676 - protein, 346 aa, unidentified
MLAGIDTHKDTLAVAVIDLAGRPVLVTELANTEAGFDALEELVKEHSVTRVGIEGSGNYGRGAAIRLVLMGGLEVVEVPPNLTARERSGRPGAGKTDPGDAVAIARLTARESGLPPVRLAVGQAADLRALADYRAQLVAERTALASRTHAELHGLLPGYQDRVPRLTAPTFITAATDLLADDTSVRATLTRRRLVRLAELTAEIQEVHGLISDAVQQVKTGLTDLYGLGPVSAATILGEVADIRRYRSRHAFAAANGTAPIPASSGRTSRHRLNRSGNRQLNRVLYTMAITQIRADTEGRAYYLRKRAEGKTGREALRCLKRRLSDVVYRTLHEDLATTAQPVMTG

SEQ ID NO: 64677 - protein, 342 aa, unidentified
MTAIGIDTHKATLAACAVDELGRPVGEETFANNPAGHLAFIAWARAIAPEVTIGVEGSSSYGAPLARSAQSAGLAVREVPPHLSRVERLRTRRPGKSDPGDALAIARVTAREKNLPPIRLPDRTTELRLLLEAREDLVAESNRARNRLHAHLLTLAPGYGGTVTNLVAARHRATVGRLLRGVGGVQAELARGLLLRLARLDQEVKALTSRIGALVGGHPLLGLPGAGPITAARLIAEVGDVRRFRSADALAALAGVAPIPASSGQVQRMRLNRGGNRQLNRAFYFIAVIQSRFHPPAKAYVTRRMEVDGKSWREAIRALKRLLVRPVFRLLVDGAAAQLEAA

SEQ ID NO: 64678 - protein, 338 aa, unidentified
MKHNVIGMDIAKNVFQIHAVDGETGEIERIKLRRSEVLPFFANRTPALIAMEACGGAHWWARQLSQLGHEVCLLPAKAVRPFVLRNKTDAADARAIWTAVQQPEMKNVAIKTEHQQSILALHRMRAQLLKFRHMQTNAIRGLLLEFGQTVPEGYPALRKTLPALLALLEGQLPAMLIDSLREQWRRVQSLDDEMALLEGRLKQAMAESPACRAIAEIPGVGLLTATAAVATMGNAGNFRNGREFAAWLGLVPRQTGTGGRIRQLGISKRGDAYLRTLLMHGARSIIARRKYSDWVAGLLARRPYSVAIAAIANKLARTIWSVLAHGKRYEAGTLAAAM

SEQ ID NO: 64679 - protein, 350 aa, unidentified
MLIIGCDYHPSFQQIAFVDTETGEFQEQRLAHREEAEKFYRELAMRGVQVRVGMEASGQARWFERLQAELNVELWIGDAAEIRAKRVRKKKTDREDARHILRLLREDRCPRIWVPSWDNRDVRQLLWHRHRMVQMRTRIMNQLQAVALNEGLRCKKRLWRERGRQQLESFQLAPWASRRRRDLLQLLDRLNPTIAELSQAIEQEVEKYPAAQRLMTHPGVGALTALAFVLLIGEAERFGCGKQIAAYRGLVPEEDSSGESRRLGHISKQGSGILRFLLVEAAQVTVRSDPEWRNQCFHLAMRRGRKIAKVAMARRLAVRLYWMWRKQWDYEQWKKFGPHAGQPGTGVGAK

SEQ ID NO: 64680 - protein, 424 aa, unidentified
MKNTAAMKRKQVPEGYLVIGVDPHKKRHAAVAITQDFTTQAKFKFDNTGEGLEMMLDRAKAEMVKSCCRGVIFAIETGGHYWRNIAYYLDERGIPFRFINQYTLKRRREGKDLNRRKNDYRDSEVAAQLLCTGEFVESVIPQGVYAELRTSHNTYQRLVKERTRITNLLKGLLDALFPEFTQVFKDPCGLTALSVLSTCPIPRVIAGMTEDEFIAMIEAHHNGRRLMRKKLRALHYSAQISIGIDAGARSVSAEIAFLVDKLELIKRQIRVMEMTLITLVDETEEGKYLLSIRGLNYIAVAGLLAELGCFKLYRSANQMIKMAGSNPTESESAGKRRSKTPMSKQGRPLLRYCAWTAVIPMLRFNEDFRAWAKQRRERPAHANPLNGREVVGAALNRLLRLAFALVRNQTYYRAAKPALIPVAV

SEQ ID NO: 64681 - protein, 370 aa, unidentified
MPDSNHATPMTATHSLVELPTTMGLDVSDRVSHFHVQSGDGRILAEGRVTNVRKDLSSLFERWKGCRLVTEAGSHSPWISRLGVDCGMNVLVANPRRVELISKSDRKTDRADARTLAELGRTSARLLAAITHRSKETQAHLAVQRARDEAVRARTALINHVRGVLKSNGYQPPIGSPEGFGGRAAAVIPAELTPALTPLARLIDQVNVQIRAFDRQIQRLGEERYPITQMLQQIPGIGPIVSLAFVLTLEDPKRFGSARDVGAYLGLVPRKKSSGLSDPQMHITKAGDPRMRRLLVLSANYILGRFGPDCDLRRFGMRIAGEGGDRTAKKRARVAVARKLAVLMHRLWRTGEVYDSFYLAKKRGEVIPAV

SEQ ID NO: 64682 - protein, 307 aa, unidentified
MFIGIDVAKDRLDVHLRPAGEALTVARDSEGIEALAARLLDLKPVLIVLEATGGFETVVAAGLAAAGLPLAVVNPRQIRDFARATGRLAKTDPLDGAVIAHFAEAVRPPVRPLASADAQVLGELVARRRQLMGMMTAERNRRRQLTAKRLIKGIDRILAALQAELSELERDIGDAVRGTPAWREKEDLLISVPAIGHKIARTLLAELPELGTLGRREVAALVGVAPFNRDSGKWRGRRTIAGGRAVVRSALYMSVLVSIRRKLPLFATYQRLRAAGKPAKVAIVACMRKLATILNAVLRDRTPWQTA

SEQ ID NO: 64683 - protein, 347 aa, unidentified
MTKKLMAGIDLHSNNLVIGIVNQDGERIKHQKLECDLQLVDKFLSPYKQRLQSVAVESTYNWYWLVDGLRARSYPVVLANPAKIDQYSGIKHADDTKDAYFLAELQRLNILPTGYIYDPTLRPVRDLLRRRMSLVHQRTALMLSFKSLYTRTTGQDFSLSRLKSLEVAEAKTLYEPPANCLIAALQKEHIEKLDQSIAKIEKVVLQCARTLPCYEKLCLLPGIGRILAMMMTMEIGEISRFQTAGKFASYSRTVDSQRLSNGKKKGDNNQKCGNKYLAWAFVEAANFAKRYDERCRQWYDRKAAKTSSVIATKALACKLAKAAWYVISQNTDYDPERIFPGATMKHS

SEQ ID NO: 64684 - protein, 343 aa, unidentified
MQIRSVGIDLGKTTFHLVALGDNGKVLLKKKFTQKQLITFTANLQTSLIGLEACSGAHFLGRALRAQGHDVKLIPAQFVKPFVKSNKNDFLDAEAIAEAVDRHNMRFVPIKTDDQLDLQALHRVRDRLMIRRTSVINQIRAFLLERGMVFAKSPIRLKEAIPGVLENANENLTPRMRNLVVMLWNEWKDLELQIVELNHEVERIASSDAACIRLRQIPGIGPLVATAIVASIGNGAAFHKGREFAAWMGLVPKQHSTGGKAKLYGISKRGNCYLRKILVHGARAVVLRSKRDRIAMGAWLTALEMRAPRNVLIIAMANKLARIAWAVLATGQDYRSVPNTLAA

SEQ ID NO: 64685 - protein, 453 aa, unidentified
MENQHLFVGCDVSKGHADFIFLDEKRIPLDKVYNFPDSPVGHEKLLKRLQILLETYREAEIHVGVESTGGYENHWCNLLRNYSDRLSVYRINPRAVKAFSRGQMTRNGTDAISAGSIANYMISHPEKLSEFKLSKERDELFYNGKKYLHFIALLTKQETQMRNAFEKLLFEHYPVLLALYKRKVPMHLYRLLSELPNIDEAISSSISDICDVKGVTEKRAIKIKKALSSQPVKGNPDFDLIQISAQSILQHHTLIAQQKKQLAKKYKQLPGVSLLTSIPGVGVDSAIAFILEIGDIHRFKSAKKLVAFFGMNPTMRESGDGRTRARLDKNGSSFVRSRLYMCVFSMISKKGAFKKRYKTLRGNGRKYKDACAILMHKLLRIVYGILKSGKPFDMEIDQNYQKKAEKARKKEEEKKADPKQIEAQKLQNESYFDAPISSHKARKLKEQTDVPIE

SEQ ID NO: 64686 - protein, 349 aa, unidentified
MGEVITIGVDIAKSVFQIHGVDADGTVVIRKRVGRARVLEFFADLPPCRVGMEACATAHQWARELTKLGHDTRLMPPTYVKAYVKRGKNDAADAAAICEAVTRPSMRFVPIKSVEQQSMLMLHRARDLLVRQRTQLTNALRAHLAELGLVAAKGREGLHQLATVVTECGVERLPSNARFACQAIVTQLHAVQIEISGLDKRITQTHRASADSKRLETIPGFGVILSTAVVATMTDPKAFRTGREFAAWIGLVPRQNSTGGKERLGSITKQGDRYLRRLLVVGATSVINSARARPYKYPWVIELLGRRPTKVVAVALANKMARIAWAVLANGETYRTPTRPWNAAVPVAA

SEQ ID NO: 64687 - protein, 351 aa, unidentified
MKYYTTTTEYNCGIDLHARQMYACLMDRQGRKLVHTNIQGNDFDYFLQKVQPYRHDLTVVSECTFNWYWLADACEAAGITFVLAHALYAAHIHGGKNKNDRIDSEKLAHLLRSNLIPPAYIYPSERRPIRALLRQRMSYVWHRAELMTHLSMNQTAQNCIPAQKGGHNRDVWQERILAQTPNPYHQLAVRCDMDAVRAYDALIAKLDGTITLYARQHQSREYTLLQTVPGIGDVLAMTILCEVDTIARFPTVKDFTSYCRLVKGSVASAGKLKGLTGGKMGNAYLRWAFGEAAVICKRAHRLLSPYADRLVAKHGTFKGNAILANQLARAVYFMLHSGQAFDPERVIKASI

SEQ ID NO: 64688 - protein, 427 aa, unidentified
MSGGDYNRQALKRQKIDERTLVIGVDIGKAFNAVGFMNKSGRVLGSCAKLYNNREGFEQFVGIIEGLKSKHRLRKVLIGMEPTGHYWRKLAYFAQENGYEVRFVRTTALKHHRELDESSSAKSDHRDALTIANITREGKYIDTIIADGPIRQLRTLAKARERLLRYSVSAKNSLHAAIDDYFPELHDLFWSMGSRSLWVVLERCPFPGDVEKIKVSTLQAWIARSSRKQAGSAQKAKALHGAAQNSIGIKQIGSADRYRLHVCLQEVKRTVLTLKEMDLHLKSLLKGIPSASYLLSIPGVGPLSAAVFLGELGNPGHFHNARQIVKYAGYDPQESDSGSWVGRKHISKKGRWLLRKCLFFMSMRVIVLSKFFQQYYLRKLETKNRVGQQPRRKEILCAVAIKLIRVIHSLLRDKRRFEDSAPEAVAA

SEQ ID NO: 64689 - protein, 342 aa, unidentified
MRIIGCDLHTSQQSIAILDDETGETTEATLKHEGDTVRNFYAALPRPVMVGIQATRSMGWFLKLMEDLGIPCYVGHPATIRAAEPRRQKHDRRDAVLLRDLLAEHRFPSIWQPSTELRDLRALLLHRHEWVRMRTRVRNALQSIALAHGIRRRAGLWSRNGQATLRALPLAPHAADRRAALQMLHVELMRHIQKLDQRVSTHAQSWPQACRLMTHPGVGPVTALATEVFVGDPSRFRDSKALASYVGMIPSEYSSGPRQRLGRLTKQGNRFLRFLWCEAGQQAARYETGLRRFYRRKLQQKGVGKARVAVGRKLGIRLWILLRDQIDYPEFCRRASSRATAS

SEQ ID NO: 64690 - protein, 343 aa, unidentified
MQIRSVGIDLGKTTFHLVALSAAGKVLLRKKFTQKQLITFTANLQTCLIGMEACSGAHFLGRVLREQGHNVKLIPAQFVKPFVKSNKNDFLDAEAIAEAVDRQNMRFVPIKTDDQLDLQAMHRVRDRLVARRTSVINQLRAFLLERGMVFAKTPCKLKQAMPEILENADANLTPRMRNLVSLLWSEWKDLEQQIVAMNEEVEQIASSDPACQRLRQIPGIGPLVATAIVAAIGNGAAFHKGREFSSWLGLVPRQHSTGGRARLFGISKRGNCYLRKLLVHGARSAVLRVKRERSPFGPWLDALERRSPVKVVITAAANKLARVAWAVLSSGEEYRPPTALMPS

SEQ ID NO: 64691 - protein, 392 aa, unidentified
MTYFIGIDLAKYKHDCFIMDENGEVIRDSFSFNNDKEGFNTLLNVLNSLDSNQEKRIGFESTGHYGSNLKIFLERNGYSFMEFNPLLVHRHFKSETLRRTKNDKVDARKISSYLYTREYKPNPNSSYHLNCLKSLTRTREALIKDRTRHIIHMINVLDKMFPEFKPQFNNQGLNASSAMYLLENYGSPSKMANMTRASYDKMKSELRRTISYAKFLRIKELARNTIGNEDEILVFELNTYLELFKELDKKILKVEDKITKEFSIMKCHIASIKGIGIITAAGILAEIESIDRFDNPGQLCAFAGIEPSENQSGTHDGGGKMVKHGSPHLRNYLMQSAGYMLIHNPVLYEYYLKKRNEGKCHTVALSHVAKRLTRIIFYLEKNDTDFNIDKMR

SEQ ID NO: 64692 - protein, 389 aa, unidentified
MTKVFCGIDVAKYEHVASIYNPVTGEIILDSLHFDNNDKGFKSLLSNLSKLKKEYEVLVGFESTGHYHQTLFNCLTSNKYKCYLINPYMTSKFRSISLRDAKNDNIDSRAIARFLSLEYINLKDAEFLSNELKELSIQRDFLMTDSSKMKIKLKSYLDRTFPELETIVDINRAAIRAILKEYPSAEAISSVRIDKLKNIAKEASGNKYSLSKIETVKEKAKESIGIRSTGIELNIIQCIETLELKEKQIDKIEKEIKKHPLVFNSPLHQLTGINDVEIAYIMSAIISIARFDSPKKLVAFAGLDPKVKQSGTWQASTTRMSKRGNKLLRYALIWTAFNMSKKDGPIKDYYDLKKSQGKSHYNALGHCAAKLCRYIFWILNNPTKEFKYQ

SEQ ID NO: 64693 - protein, 429 aa, unidentified
MNNNRKRRINQVDKDTLIVGIDIAKNKHAARAQDFRGIEYGRVRYFANREYDFERIKRWILNLAKKASKKDIIIGLEPTGHYWLPLFKYFTASGFKVVTVNPYHVKKSKELDDNNPTKCDKKDALVIAQLVKDGRYSNPNLPEGKYAELRVAINHRERLMKNLNGVQNRIIRWLDIYFPEFNNAFKDWKGKAALSTLKHLPLPEEINQKKVKEIVNIWREDGIKRGVGKKRVKKLKRCAQSSIGLKTGKEMAKLEIKNLLKQYEQLSKQLENLEEKIEKILKEIPGAEEMISIPGVGTMTVAGFLSECGNLDDYNHPKQIIKLAGLNLMEHSSGKHKGETRITKRGRPQLRSLLYRVSMPLVRHNDEFSQIHEYYKNRLQNPLEKKQSLIVICCKLIKILYTLKTREIEYDGKKMLNDIKRPKEYKKAV

SEQ ID NO: 64694 - protein, 420 aa, unidentified
MFMNNRSQVLYKATVGIDWADQKHDVFVRFANGDCYRRKIASRPEAIQKWLLELRSACAEEKIAIALEQRRGPLFYQLCSHLNWIDLYPVNPLSLASFRQTFFSSRAKDDPVDSQLLEELVRTYGYRLRPYRPQPIAERKLDQYCRHRRSLVDLATQTELKLISTLKQFFPLVIQLFDGVGLKSDIALSFLSRWPTLPKLQKTKPNIVRAFFYAHNSRSQSLIEERLQHIREAQNVTDDPALSEPFVLTTKCLVGQLRYFKKVLKEFDHHIEQLFKSHPDHFLFASFPGAGEQLGPRLLALFGSDRSRWAASMDIQKFSGIAPVIERSGKSVWVHRRLSRPIFICQTFHEFAQQSVQYSSWAEPFYRRQRQKGKSHHSAVRALAFKWIRILYACWKANKPYDESHYLQALKRRAFSVSPT

SEQ ID NO: 64695 - protein, 349 aa, unidentified
MTAQPMFSNLTIGLDLSDTHAHYCVVNAHGQVLQTGRARTTPAALERALTAWPGRRVVLEVGTHSPWVSRLLSRLGYEVLVANARQLRLIYASHRKSDRVDAEALARLGRLDPALLHPIQHRSAQAQVDLAQLRARDCLVRTRTQLINHIRGAVKAVGGRLPASSAPAFVAKARAQLPPELTAALAPLLTLLEDVTRQIRAMEHALDEVARHRYPATQRLRQVAGVGLLTALCYVLTLEDPRRFRTSRAVGAYLGLCPRQDDSGGRQPQLRITKRGDAMLRRLLVSGAQYMLGPFGPDCDLRRWGLALAERGGGNAKKRAVVAVARKLAAVLHRLWVSGAPYQPLRTAA

SEQ ID NO: 64696 - protein, 342 aa, unidentified
MNITIVGIDLAKNVFQVHGVDERGKAVVQKRLRRKQVLIFFAQLPPCLVGMEACGGAHYWSRKLQAQGHTVKLMAPQFVKPYVKANKTDVADAEAICEAVSRPTMRFVPIKNAEQQAILSLHRARQGFVRARTAQANQLRGLLTEYGITLPQGISHVAHRLPQIIEDADNELPGLFRGLLQRLVAHLRELNHQVRALEEQIEVWHQANEASQRLAKIPGIGPLTASALSASIGDAKSFKNGRELAAWLGLVPRQHSSGGKPMLLGISKRGDAYLRTLLIHGARSAVRVAKRKSTPADRWSTGMLDRRHMNVAAVARANKNARIVWALLAHGRDYNADYKMTA

SEQ ID NO: 64697 - protein, 404 aa, unidentified
MKRTKARGPVQRDAKEVLAEVLGKLTGKLDAPAESTSAKKNRRGNTVGPNRDRLTVGVDLGDRWSQYCILGLEGETLTEGQLRTTQEDVREFFQALTVARVVIEVGTHSAWVQEVITEWGHEVLVANPRLMEGSKRRKRKSDRIDANKLARLGRVDPQSLYPIRHRSREVRQDLVVLRARDALVSVRTELINTARGLVKSMGTRLPRCSSPSFADKVKDAIPDEVREALLPLVQLVETVKDCIARYDQKIEELGREKYGHTTLLRQVKGVGPITSLAYVLTLEDAQRFSSSREVGPYLGLVPKQEDSGDSQPQLGISKAGDRMLRRLLVGSSQYMLGALGPDTDLRRYGLRLCERGGKNAKKRAVVAVARKLAVLLHHLWVTGDVHEPLHHTGAEPRTAQATAA

SEQ ID NO: 64698 - protein, 331 aa, unidentified
MYVGLDYHKRYTVATQMDQQGVILGQVRLKNDPDSLRTFASSLPPGSKIALEATEGWYYFYEMLESYCPEFYLAHPLKTRAIAEARIKTDKIDSTILAHLLRANLLPTSYIPPREIRDVREILRYRASLVSLRTAIKNKVHAILSKNGVVMTYSDVFGKKALRSLELLPLRKCYQQELQGYLQCIDTLKRLITEVIETIKRLAEESPQARLLITIPGISYYSSVLILSEIGDIGRFPSAKKLCSYAGLAPRVHSSGGKTRYGSITKQGSKWLRWILVELSHHFIKGSPRLKFLYARIARSHGRNAARVAVAREMLKIMYVMLRDNRAFVIR

SEQ ID NO: 64699 - protein, 315 aa, unidentified
MSESKVEVFVGIDVCKSTLDVRIEPPGEAFQVDNDDAGIRALCTHLSELVPTLIVMEATGGLETRAAGELAARGLCVTVVNARQVRDFAKATGQLAKTDRIDAGVVCSFARAIRPAARPMKEALTAELDDLVTRRRQLVEMRVQETLRLQGASKVQAKSLKAHIVWLNKRIKSIETDLGTRLRSSDAWRVKDDLLLSIPGVGEITSRSMLSRCPEIGQLNRREIAKLVGIAPLNSDSGKYRGQRHIWGGRADVRSVLYMAAVSAKRCNPLIKALAERLKRAGKAPKVVIVACMRKLLTIMNAMIRSNTPWNPKIA

SEQ ID NO: 64700 - protein, 345 aa, unidentified
MTEAYDGRQVVGMDLHRRRSVLVRMTMDGRKLETVRIENSPAALRRVLTQCGKNPLMVLEATYGWYWAADVLAEAGAEVHLAHPLGVKAFSYRRVKNDERDCIDLADLLRMGKLPEAWIAPPQVRGLREVTRYRHKLVGQRTSCKDQVHAVLAKSGIPVTRTDIFGPGGGIWLDGLPLPQPYAGKVVSLRALIAVLDGEIGRLEEQAAAMLAGDRGYAAIRQLPGIGPVLGAVIAAEIGDITRFGKPGQLCSWAGLTPRHYESDTRVIRGHVSKQGSRMLRWALVEAIQRQPAGTRPREARDAIIVRRGDQARGIAKTAAARILLTQVFYGMRDGHIRRASSRPA

SEQ ID NO: 64701 - protein, 370 aa, unidentified
MQTRSFIGLDVHKDTISVSVAEDGRDGAVRFVGVIPNSPDEVTKMAKRLSRHGDLDFCYEAGGCGYGIYRQLTGLGHKCTVAATSMIPRKPGARIKTDRRDSQKLAILHRSGDLTAVWVPDPTHEALRDLVRARVDASMQLMRARQQLLAFLFRHGRIYGAAGKYWTQRHRSWLAGQTFELPAHQIVFQDYVEAVWTAQERRDTLIEKITEMTAEWSLGPLVEALRGLRGIDLLSAATFVATTGDLSRFESPRLLMGYLGLVPSEHSSGVKIRRGGITKNGNREARRMLIEAAWSYRYPARVAKEKAEILVRLPKSVRDIAWKAQTRLCTRYRAMIAKGKKPTVVVAALARELAGFVWAIGQEMRPGMAA

SEQ ID NO: 64702 - protein, 422 aa, unidentified
MHINTDSKHRQVPDGYLVAGIDPHKKTHTMVIMTRNEKVLTRLKFNNSKSGFELAVKQVDDQISRSSSKGVIFAMEAGGHYWRNLAYFLHKRGMPFCLVNPFTAKRIREGKDINRAKNDMRDARVMAEIVFSNGLTQTNLPQGIYAELRAVYNAYQRLIKERSRIKNRVKSLLDQLFPEFCLVFNNVCSKTAMQVLSCCLVPSVIAKMQEDQFIARIREGFTGRALKIQSLQELYRLAKSSIGAEAGARGIALELSLMTQQLLLLSEQIEQTKHILQNLLLSIPESRCILSIQGVGHVAAAGILAETGPLQAYRNAGQLIKLAGTNPTVWESAGKRHSITHMSKKGRPRLRSCLWIAAISLLRSNPDFKEWARARRERELHMHPLKPRETVGAAANRLLRIVYALVKNGSMYCLPQANEVLV

SEQ ID NO: 64703 - protein, 342 aa, unidentified
MDKVSIIGLDLAKRSFQAHGALADGGIGFRKKLSREKVLGFFAEQPRCVVAMEACGSAHHWGRAIRDLGHEVRLIPPAYVKPFVKRHKNDATDAEAIAEAASRPTMRFVAVKSEGQQARAMLFRTRDLLVRQRTQLINALRGHLSEHGIVAAQGPANVKVLEEAIEDQTTSLPLLVVELARVFLDQIEGLSKTIAKLEKVTAQEAIGGETTRRLQTMPGVGPITALAIETFAPPMDVFKRGRDFAAWLGLVPRQQSTGGKQVLGKISKMGQRDIRRLLIIGAMTLVRAALRKGAPEGSWLQRMLARKPTMLVAIALANKMARSVWAMLAKGEDFRVPRVAAI

SEQ ID NO: 64704 - protein, 317 aa, unidentified
MNFVGIDVSKSQLDIATRPDGTRWSVANSETEIVKVVETLKALSPQVIVIEATGGMEVLLVAALGQASLPVVVVNPRQVRDFAKAVGRLAKTDRIDAGILAHFGEAVKPELRSLKDEETQTLTALVTRRRQVIEMLTAEKNRLGISPKVVLKGIKQHIDWLQARLEDIDRQLTSAVRQSPVWREQDDLLRSVPGVGKILSVSLITGLPELGTLSRRQIAALVGVAPLNRDSGLFRGKRTVWGGRAHIRSVLYMAALSASRTNPAISRFYRRLIEAGKKPKVALTACMRKLLSILNAIAKNRTPWRADFSTRSAPDAP

SEQ ID NO: 64705 - protein, 350 aa, unidentified
MEHLAIDLGGKESQVCIRDEAGSIIVEHRMKTASLKKYLRARPQSRVVMETCTEAFAIADAALALGHEVRVVPAQLVRSLGVGARGVKNDRSDARALSQVSCRIDLPSVFIPSQEARDRKTMCGMREGLVESRTKLINTVRAWLRSEARRPRSGDSKTLPQRVKEVAKERPAFVERLLETIDHLTEQIELADKELVTLAKAELVCRRLMTVPGVGPVAAMRFLATVDDVSRFGNAHQLESYLGLVPGERSSGDRKRITSITKAGSPKMRWALIQSCWVARRWAREDPMVQWALTIERRRGKKVAMVALARKMAGILFAIWRDGTSYDPMRGALVHATPPSRLVRAASTAQ

SEQ ID NO: 64706 - protein, 356 aa, unidentified
MKYFGMDVHGKATVYCVLDAKGEVVERGSIATTAPELTKLVRRLRCADELLCGQEVGTMSHFVHDVVTAAGATILSFNAHHLRMIAASRKKTDKRDAFWIAKCLQTGMMPHPVHIPTTDIRRLRSLLAQRVAIAEERKRWMLRARSHLRAIGTPLARGAGKITKKLSDILSCSDGLDAHRAEALELCARQEQQLRTELRRIEKILFTEARRIDDVRRLRTIPAVGPWVALAIYAAVGDIRRFRSARLLTAYAGLVPSVHQSGDSTRTGGITKEGSSSLRRVLVQGGHVLLFRCASDDALPLRQLAQRVHTVRVRRKIAVVAAARFLLRTAFYILRDGTKYQPERLRGAVKEEANVA

SEQ ID NO: 64707 - protein, 400 aa, unidentified
MALKIVYKICCGIDVHKTFVVACIASTDSKGVTTYERHRFSTYTKGLKDLLQWLLKHNCKDVCMESTGKYWIPVYNVLENDCTIVLAHPKYVKAIRGKKTDKKDAKWIADLFKHDLVAGSFMPPADIRQLRDLMRYRFKLTCFQSSEKNRLQNCLTVSNIQLGNVVSDTFGKSAQAILDKLLENPADTSFDLEPLVYKSLKKKLPELRDAIDGYITPEQAGKLKVIKAHYENLESRKAELEELILALAAPYQQELATLQTAPGIRSDFTAIGIISEIGTNMEAFPSAKHLCSWAGLTPTNNESAGKKKSVRVSKAGCYIKPLLVQCANAAVTSKKHPEIRNRYLRIKKRRGHKKAIIAIARMLLTALYHMLKNGENYNAELYRKSDLPPVDLFMSEVNSS

SEQ ID NO: 64708 - protein, 395 aa, unidentified
MFIVGIDVAKRSHEVCMITSDGQTVQRPFSIRNNCTGYNLMLEKIRKHTNIKSQIVFAMESTAHYWLALFTRLRKDGYHVILLNPIQTSAMRDMFIRKIKTDAKDSFIIAELIRFGRYAESNVAQDRLLALKELCRNRFYLVDMAGDLKRKLIALIDRVFPEYEAQFDTIFCKSSVAVLKKYPTPQKLSNAHLDKLTELLWNSSNGHFGEWKARELRELARNSFGVEDCDGAYSTLILLMLDQIQSLSGKADALEKEISRLFQSFDTTVTTIPGVGPIIGAVILSEVGDISRFSSADKLAAYIGVDPSVNQSGEFQAAHAHMSKRGSPYLRRCIWMASQVAVQRDPMFRAYYEKKTAEGLKYMTIIGHVTRKMTAVVFAILRDHKVYEPVLPTAA

SEQ ID NO: 64709 - protein, 376 aa, unidentified
MQEISKIHVGLDVHKDSIAVAVAEPGRAAAKVIGTIRHDVPKLLKLLVKLGDTEAVHVVYEAGPTGWGLQRALTAKGYSCEVIAPSKMPRRPGDRIKTDRRDCAQLAECSRAGQLRAVWVPRPEDEAIRDLARAREDALNDRRQLRQQLKALLLRHDVRFPGKTSWTQAHHAWLGKLNFSEVATQAAFMDYWMAVQASDERLKRLSSALLEYVKNWRFAPQVSALQALRGIDVTCAIALVAEIGDFSRFDHPRKLMGYLGLVPSERSSGERTARGSITKTGNAHARRMLSEAAWSYRFKPRLGERARRRQEGLSQQLCAIGWTAQVRLTQRFAKLDARGVHRNKVCVAVARELTGFVWAVAQAADTPSQATQGGTT

SEQ ID NO: 64710 - protein, 322 aa, unidentified
MAMLSFGGIDVSKDRLDVMVLPEEQSSSVSNDAAGWAELVEQLRSSSIAAIGIEASGGYERGVMRALLAADLPVRQVNPFKLRQFARASGVLAKSDPLDARMIASFVAIMPTRPAPRQAPAAERLTEMLAVRRQLSAEKVAAENASRLLEDAMLRRLSRRRIGRLGTDIDLLDKHLVGIVGTDAALAHRYQLLTSMPGVGVVLACTLLALLPELGRMSRKQVAALVGVAPYAFESGTLKGRRCIWGGRAHVRQVLYMAAMSACNWNPPFKTFHDRLKAAGKLPKVAIVAVMRKMITTLNAMVRDDVSWADRLTGRHSVPTAR

SEQ ID NO: 64711 - protein, 343 aa, unidentified
MQAVTTIGLDIAKSVFQVHGVDAEGKVLIRRQLKRRYVLAFFEKLQPCLVGIEACATSHHWSRELKALGHNVRLMPPAYVKPYVKRQKNDAADAEAICEAVTRANMRFVETKTPEQQSCLMLHRTRQLFIRQQTSVINAIRAHMAELGIVTPVGRKGVEQLLAIATDASDRRLTEVARACLAALGAQLRMLKAQILEFDRRIMAWHRSNETSRRLDAIPGVGPALATALVASVANPKAFRSGRNFSAWIGLVPKQHSSGGKDKLGSISKQGDRYLRSLFTAGALAVIRYAKIHGTKHRPWLTALLARRPTKVAAIALANKLARMAWAMMASGERYKEPVALAT

SEQ ID NO: 64712 - protein, 466 aa, unidentified
MSVRPDQSPRRCPEPLRVTHPHAAGIDIHAAIHWVAVPPGDAPPPAPDHPPHLPAHVRSFGTCTADLMALADWLTRCGVTTVAMESTGIYWIPLFELLEARGFEVFLVDPRQSRHAPGRPKTDVRDCQWLQRLHSYGLLTASFRPAEQIVVLRSYLRQRQMLLRYAGQHIQHMQKALEEMNVKLPEVVSNITGVTGLAIIRAILAGQRDPLELAKLRNDKCRRTQAQIARALYGNWRAEHLFALQQALALYEFYHRQLRACDVQLQAHFKTLPDQSRGQARPRRQRRPCPNVNDPAFDVGQALYQMAGVDLTVLEGINASTALVLLSEIGPDVSRFPTVKQFTSWLGLSPQHQESAGKIRRRRVRRGFNRAGRALRLAVQGCCHAKHVLGAFYRRVKARAGAPKAIVATARKLAERVYRLLKYGTAYVCQEIDVYEAKYRERLVKGLTRKAAELGYRLEPVSPVGT

SEQ ID NO: 64713 - protein, 374 aa, unidentified
MGDYSEAFVGLDTSKLRNAVAIADASRGGEVRFLGEIENTPAATAKLVRKLSARYKRLTFCYEAGPTGYGLHRQIKDLGFECVVVAPSLIPKRPGDKVKTNRRDALSLAKLLRADELTAVWVPDGRHEAMRDLTRARETAMLDLRTKRQHVSAFLLRLGRPYPESRKTWTKAHVSWIASQKLEHPQQRLVLEEMMLAIRQAQERFARLEQAIAAAVPEWSLAPVVTALMAMRGIDLISATTLLAEIGDLSRFRTPTELMAYLGLVPSENSTGDTVKRGPITKAGNRRARRMLVECSWSYQHPPRVGQAKQPRVDAAPPAVREIAWKAQCRLYRRYRTLIRKGKLKTVAIVAVARELAGFIWAVARAVTTAPVAA

SEQ ID NO: 64714 - protein, 401 aa, unidentified
MYYLGIDVSKASHQCVILDSSGEALGKSFTVLSSKDEFGKLIRKIDKSNISKDDLLIGLEATGNLWENLYSFLTENKFKVILLNPFQTSKYHQAVLKKAKTDAIDAYVIAGLLRSGHAQGSHIPEDDIQSLRDLVRLKDGYSGSMKAYKRKAYSLLNLVFPELLQLVKDPFNIVTSDILMHYQTALDFKILKPKHLLKIARSHKGNNYDEEWALKVIHQAKDSIYSGRASKARSITLKSLMSQIRSFKEQIELLESEILSILKPDDSTPNTSADNLLTIPGVGPHTVSCVLAEVGDIQRFSSCKDFIGFIGLYPEIKQSGSSLNKAKLSTKGSRLLKHALYISSVACLKHNSYLRNLYHKKLSQGKAPKQALIIVARKLASIMYSMLKSDSAYDVSRLAIA

SEQ ID NO: 64715 - protein, 374 aa, unidentified
MKDTTASTTFVGLDVHKDTIAVAVARLGQEPESLGVVPNTPESVAKLARRLGSPKTLRVCYEAGPCGYAILRQLQKLGIDCVVVAPSLVPQRAGDRVKTDRRDALKLARLHRSGELIPVWVPDEAQEALRDLVRAREDVIEDRLRKRHQLSKFLLRLELRPPEKTRAWSTKFTAWLQGLKLSQPAQQIVLREYIHALHEVETRLQRLEAELAEMAQNCPHTAVIAALQSLRGVGQLTAVTLVAELGDLTRFDTAQQLMAYTGLVPSEHSSGGSQRRGGITKCGNAHVRRVAIEAAWHYRNAPRVGAALRARQDGVSPTINSLTWKAQHRLNLKFRRLVGRGKPKQVAVVAVARELLGFVWAVARQVSRSSSQVA

SEQ ID NO: 64716 - protein, 406 aa, unidentified
MPVYLGIDWSQAKHDAAFLNEAGTLVAQLTLSHRPEGFLQLDATRQQLGVEAPECLVGLETAHNLLVDFLWDRDYTQIYVLPPKMVQRSRERYRQSGARSDPSDAFVIADILRTDRNRLQPWSRDTLLTRRIRAKVSLIHHLTESSVRLSNRLQAVLARYYPLALHVFSEPTGQIGLYFLETYPTPQEAAELTLETFQDFGRRHRYTRRDALARSFGRLQAPYPEASPEISQIYRQEAVLLAGLLLELTQAKKAAMRGLRDLFRQHPDAAVFGSLPGAGDLLAPSLLAKFGDDRRRFASPASVQALAGTCPVTRSSGKRRTVNFRYACDQELRQVAVQWARCSLRESAWANAYFESVRPHCRTQSHAFRCLANRWLAIAWKLWQTGERYDDGYHLRQRALRSLPRT

SEQ ID NO: 64717 - protein, 459 aa, unidentified
MAPRKQKHAHSKPTLPPQLAAANLHAAGIDIGAEAHYVAVPPSDDPQPVRCFAAYTADLEALATWLAQCQVTTVAMESTGVYWIPLFELLEARGFEVLLVDPQQVQKIKGRPKSDVHDCQWIQRLHTFGLLASAFRPTDQICVLRSYLRQRAMLLTYAGQHIQHMQKALTQMNLKLQHVVSDITGVTGLAIIRAMLAGERDAAKLAQLRDYRCKHDEATIARALQGNWRDEHLFSLAQAVALYDVYHQKVMECDRQIEAYLQTFDDRSDGQPLPPPPRARKRGRNQPAFAVREPLHRISGVDLSQIEGLDETTSLVILSEIGLDMTRWPTVKHFTSWLGLCPHQRVSGGKVLSRRTKSCANRAATALRLAAAGLHHSQSALGAFFRRMKARLGAPKAITATAHKLARLIYTMLKHGTAYVRQGMEEYEQHYRDRVVKNMVRRAKALGYTLVKAPEGAPI

SEQ ID NO: 64718 - protein, 355 aa, unidentified
MNDEKYIGLDVHQATIVVAVMDATGKLVMESILETKAATILQFFAGLRGTLSVTFEEGTWSAWLYDLLHSRVDQLVVCNPRKNALLKDGNKSDRIDARKLAELLRGNQLKPVYHGETGVRMLRELSRSYLTIVKDLSRVMNRLKAVYRSWAIPCAGRDVYYRRHRAQWLAKIREAGVRRRAERLYEQLDMLQHLRQQARRERLAESRKHAITAKLRQIPYLGPIRVALAVALIQTPHRFRTKRQLWAYSGLALETRASAEYRFVEGQVRRSKKLLSIRGLNKDHNHDLKGLFKGAATMASVRPGPFQDFYTAALAKGIKPTMARLTLARKIAAITLTLWKKGENFDAEKLKSQAA

SEQ ID NO: 64719 - protein, 341 aa, unidentified
MQDVTLVGIDLGKHSFHLHGQDQHGKAVFRKKMGRKQLIEFFATFHACTVVMEACAGAHHMARKLASFGHLVKLISPQFVRPFVKSNKNDFVDAEAICEAASRPAMRFVTPKTESQQTLSALHRVRDSLVRDRVKAVNQIHGFLLEFGISLPIGKAVITRLPAVLAEHPLPPHLIAILERLHAHFKYLSEQIGEIDKEMTRQLAVDELGQRLLTIPGVGAITASVLAAEMGDGKQYGCSRDFAASIGLVPRQYSTGGKANLLGISKRGDKNIRRLLVQCARAYMQQLERQTGPLADWVRAMLTRRHSNVVACALANKLARTAWALVTRNTTFDAGSAAIPV

SEQ ID NO: 64720 - protein, 343 aa, unidentified
MYFIGLDVHKKTISYCVKDAAGRVFQEGKIGSTRRELDEWIRTMPQPRTIAMEATIFTGWIYDHLLPHAEKVKVAHPLMLRAIAAAKKKNDRIDAGKIADCLRCDFLPECHMASTEIRDRRRTLRYRSLVIKQMVQMKNRVSGLLMETGVSYNKQRLHKVGYFAELMTGNEDVHESIRPLLKLSRDMISRAQKLDYALVSSLQRDPLLKERLRRLRTVPGVGPITALTWALEIGDFTRFSSIKQAISYCGLCGDEKSSADKVMRMPISKQRNKHIQRVLIEAAKLAPRESPELAVIRARELERGNPNRATLAVARKMVSYMLAVERRKQDFVPAEEFSRTAAA

SEQ ID NO: 64721 - protein, 350 aa, unidentified
MMIGVDYHPSFQQIAFLIEETGEYDEQRLNHEGGEAERFYRDLKRRGIRVRVGMEATGYARWFERLLAELDFELWIGDPAEIAAQRVKKRKTDREDARLLLRLMREDRFPRIWVPSPENRDLRQLLWHRHRLVQMRTRIMNQLQALAMNEGKRWKSKLFSQKGRAEFEKLALGPWASRRRSELLELLDRLNPSIEELTTAVQQEVNKRPEALRLMTHPGVGPITALAYVLIIGTPERFTRGKQIGTYVGMIPIEESSGGKQRLGQISKQGSSLLRYLLVEAAQAAARYNPHWRRRYIRLAIRRHRSIAKVAMGRRMAIRLYWMWRNGCDYSPSFEFGSYAGQLEKRHGGN

SEQ ID NO: 64722 - protein, 424 aa, unidentified
MNFKMQNKQNQLIERITDQHLVVGVDIAQHVHVARAVNYRGIVIGKPLSFENNEEGFTRLLNWIKELKHMKNLDTTIVGMEPTGHYWMNLSKWLVKQNMDVVTVNPHHVKRNKENRDNTQSKSDKKDALVIADMVKNGYYAFVRSTSESFEKLRVLMANRDVIVKRLVSSINQINRWVDVVFPELRQVFKDVSCKGAIATLRLFPTPAELCSLQPQDIVTGWKSCMKRHSGHKKARSLLTLAKRSIGTKQALDAYKLHLEQLLEEYDLASSQLERVTQEVTNVLEQIPFVKQILAIKGISEISLAGILGEAGDLSGFAHGNALLRHAGLHLAEASSGKWKGQIVLSKRGRSRLRRYLFLATMSLVMNNPEFKALHSNNVKVKKIKKMKSIMKLCRKLARVIVGIARNGSAYKPEMVFPLEQLAA

SEQ ID NO: 64723 - protein, 368 aa, unidentified
MTEIEVFVGLDVAKAKHAVAIADDGRAGEVRYFGEIGADAASVRRMVAKLEKPGRRLHFCYEAGPTGYGLHRQLTAMGHLCDVIAPSLIPRRPGDRVKTNRRDAIQLAKLLRSGELTPIWVPDEVHEAMRELIRSRDSAVDDLRRKRQSISSMMLRYGRIYPGKKTWGPRHEQWLHTQKFEHPAQQLVLQDLIWAARHAAERLDRVDSSIMEFLPKWSLAPVVDALQALRGIRAVTAATIMVEVGDLRRFETPRKLMGYLGLVPDERSTGESVKRLGITKAGNGRVRRALVETAWSYRHLPRTSKLKHYIHERVPPEVRDIALKAQARLCARYRALSGRGKKLTVTITAIARELVGFIWAIGRMIPST

SEQ ID NO: 64724 - protein, 291 aa, unidentified
MRKHSMVCAGIDTSKSKLDVALNERSPELQVDNTPDGHGTLSAWLRRHGVKRVGIEASGGYEKAVVARLRRDGFVVVVFQPAQVRAYAQFVLQRAKNDKIDARLIAACTAATKKIHAPPDPRLAPWAEHLTLIEQIEEDLARYRTRIESCREAGNAAFWRAEFARLTKLLKSELKTLVSAIRQHQDLAARLDLIESVDGVGLRTAVAILVRMPEIGRLTREQAAALAGFAPYDDDSGDHTGARHIAGGRKRLRRSLYAAALPAAHRWNPQLIALNRRLRAKGKVHKVALVA

SEQ ID NO: 64725 - protein, 409 aa, unidentified
MLIAHRSISRPYRAALFRGATQAKDDMSRQLAAPAAKLSASMKNNNLSVSGIGESQASIEQKNNRLLKLGLDMHYRQVTAGMQEEAGRIKAVGKMGHEAFRSWVEKKLKAGWEIYSCYEAGASGYWLHRELVAMGVKNLVVAPTAMGQDKQQKTDRRDGAELTDALDRYLRGNCTALNPVAVPTLEQEEKRALIRYHRQIMADRSRYEARGKGLLCAQGIEVQGKWWQAQGWKELNSHSRLKGWMKEQLKGWRSKLLGAEQQQQKLRRRIEALAPAILPKGVGAYSAVVLEYEMKGLGRFKNARAVSSYTGLCPGIHSSDGRGKEGSINRCGNAVVRWNLVEMVWRLVKWQPHYEPVRQLAAGLVRSKRAKKRLVVKAARQLAIDLWRLRTGQTTPQKLGLVMQYNPIK

SEQ ID NO: 64726 - protein, 388 aa, unidentified
MIYVGIDIAKLNHFASAISSVGEILMEPFQFSNDADGFHMLVSRLDSLESDNIIIGLESTAHYGDNLVRYLVASSFNVCVLNPIKTSSMRKNNIRKTKTDKVDTYIIAKTLMMQDSYRFVTFYDLDLMDLKQLGRFRQKAIKQRTRLKIQLTSYVDQAFPELQYFFKSGLHHKAVYALLKEAPSPQDIASMHMTHLSHLLTTASHGHFKKEQAYELRVLARKSVGANDSALSIQITQTIAQIELLDSQLKKVESEMTEIMKFHDSVIMTIPGIGYINGGIILGEIGDIHRFSTPSKLLAFAGLDPSVYQSGNFQARRTRMSKRGSRVLRYALINAAHNVVKNNATFKAYYDKKMAEGRTHYNALGHCAGKLVRVIWKMLTDEVEFNLD

SEQ ID NO: 64727 - protein, 315 aa, unidentified
MEAAVWVGIDVSKARLDVALGAEGELFEVANDQRGIAALLARLSHPALARVVVEATGGLETALVAELGAAGLPVVVVNPRQVRDFARATGQLAKTDALDARLLARFAERVQPPLRALPTPAERELKAVVARRRDLVEMLTAERNRLGSAPKVLHREITAHIRWLEARLKERDRDLDRKLRGSPLWQEKEDLLRGVPGVGPVLCATLLAELPELGRLDRREVAKLAGVAPLNHDSGRLRGQRTVWGGRAPVRAALYMATLSAVRFNPALKAFYRRLRSAGKPPKLALTAAMRKLLVILNAMLKHRTPWSPPCPVAL

SEQ ID NO: 64728 - protein, 325 aa, unidentified
MESKKLCCGIDVSHTKLDVCYQNNLGELFHLQVGNNNKGFEKIMEHTGSEYHFVMEATGVYYIRLAFYLHQQGCQLSVVNALSIKRYIQMHLERNKSDKKDAGWICRYAIEQTPSYWEMPDSAYFESKQLYNTIREYTEQIKRFNNQLHSLRLLPVPSKDTIKSLEKVNKQIQKEIKILESKLQTILEQWQPAQLKSVGSIKGIGKRATAMLIVFTQGFKYTHSHRQLISFAGLSPTEYSSGSSIHGRPRIYKRGGKNLRDVLYMCSMNAIKTNTACKTLYERLRANGKTGKQALIAVCNKLLKQVFAVVKNNSLYQPNYCSAKP

SEQ ID NO: 64729 - protein, 345 aa, unidentified
MEHVGIDLGSRRSHIVVMSGEKVAERRTIDTRELPAWLRSRDASRVVMEACTQSPAIARAALAATHEVIVVPGQLVRALGVGARGIKTDDRDALVLARASVRNEQLPSVHLRSEISRSRRELISARATLVDSRKNIALSIKSWLRGRLIVVQSRGNSLAFCEAVRRAALETDEGLPRSIETLLETFEHLTAQINGLDEEISKLAESDPVCARLTTVPGVGPIVSLAFVTQIDDIERFSSADELASYLALVPGEATTGGKLVRTGTIKAGPQRLKALLVQAAWVMWRARPNDPVVLWARAIAEKRGTRIAIVALARKIATVMYAMWKHNTPYDPSRAARARAASSS

SEQ ID NO: 64730 - protein, 329 aa, unidentified
MEFKNIIGIDMAKENFEMVLLEEGNLKIKQQVNNNSKDIRALFVKSKINLTHTLICMEHTGIYNNHLLSFLHEQGAQVWLENPVHIKRSMGLIRGKNDKVDAARIASFAYHHQSQAKLWAPKRGVIEKLKLLTGQRTRLLKTKRVLEMPVNEAKKFCLKEEIKMMTNSCKGTLKAIAEDIRNVNKQITEIIKTDEQLKVLFSYVTSVPNIGTVVGTAIIVSSNEFKTIRDARKFACHCGVAPFEHASGTSIRGKTRVSHMADKELKKLLHIAALGSTSRPGELRDYFERKVAEGKNKMLVLNAIRNKLIHRVFACVRDKKNYQQNLVIV

SEQ ID NO: 64731 - protein, 315 aa, unidentified
MERLAASPSFVGIDVSKDRLDVNVRPSGQAFAVVRDGKGLDQLVIELRSLAPALIVLEATGGFEITVAAALASAGLPLAVVNPRQIRDFARATGRLAKTDVLDAQVIALFAERIRPEPRPLADADSQSLTELIARRRQVVEMIGMETNRLYQARNSRVLRMLRTTLKTLKVQLAELDRDIDDTIKRSPIWRAADDLLTSVPGVGDVTAYTLIADLPELGQLDRRRVAALVGVAPVNRDSGQRRGKRTIAGGRTDVRNALYMATLSAIRWNPVISKHYKCLVDRGRPKKVALVACMRRLLGILNAIMRTRTPWQCA

SEQ ID NO: 64732 - protein, 349 aa, unidentified
MHARSVAAAAIDTVTGELFRSRLTPSFEHVQSWLRALPGPVAVAYEAGPTGFGLFRQLTAAGIRCVVVAPSKLHRPAGDRVKTDAKDAVLLARLLRLGELVAVAVPTLEQEAARDLVRAREDCRGDLMRARHRLSKLLLRHGIVYFDGQAWTGAHDAWLRRLRFTSPAVRMAFESDYETVLTVKARRDRLDKAITAMAADSEFTGLVRRLGCLRGISTLTGFALAVELGDWHRFTGRTIGAFVGLVPSESSSGTSRVQGSITKTGNTHARRLLVEAAWHHRARYRPGKTLRDRWELAPPAARARGDAGNCRLHDRWVGFNLRRKRPVIANVAVARELAGWCWSLAVMDD

SEQ ID NO: 64733 - protein, 464 aa, unidentified
MKPTPRRRGTPRVSPSMLERINLNAAGVDCGSAEHFVAVPADRDPTPVRSFKTFTDDLHRLADWLTGCGVTSVAMEATGVYWIPLYEILEARQFAVVLVNAKHVKNVPGRKSDVFDCEWIRELHSVGLLRGSFRPADGIVALRAYLRHRDTLVQSAGTYIQRMQKALVQMNVQLPLVVSDITGVTGLRILRDIVAGHRDPQALAKHRDGRCRATVAEIAAALTGNYRPEHLFVLQQNLELFDTCQTYIAACDAMIEAHIQALTATVEVPVSPLPHARVTAKARQHEPRFEIRTPLHQLTGTDLTQIDGIGSYTALKLVAEIGTDMRRWPSEKHFTSWLTLAPNNKISGGRLLSSQTPPSANRAAAIFRMAAMSLGRTETALGAFYRRLAFRVGKAKAITATARKLAVLVYRTLKGEMVYCDAGATAYDAQQQQRVIRRLRQRAATLGFDLLNRETGEVLEAAVS

SEQ ID NO: 64734 - protein, 357 aa, unidentified
MASRSMAQTDHGVTVGVDTHGDGHVAAAFTSDLGRPLGHLAIPTTPAGYQRLLEWTHGLGSDPRFGVEGTGSYGAGLARFLVGAGCTVIEVRRPNRQTRYARGKSDPVDAEAAARAVLSGEATGLAKVDTDHVGMIRALRVARRSAMKMRTQSFQQMKALIVTAPAELREQLRSLSRGRLVDTAACLRPGPVTSVAAAVKLTLKCLAQRHQMLTTEMALLDRDLDRLVAAAAPTLCALKGVGTDVAGAVLVAAGDNPERLRSEGAFANLCGVAPLPASSGKTTGRHRLNHGGDRHANCALWRVVIVRLATHQPTKNYMARRTQEGMSKAEIIRCLKRYVAREIYRELTPRAELAAAA

SEQ ID NO: 64735 - protein, 339 aa, unidentified
MTVKTVGLDLAKDVFQVHGISENGRIIFNKAIKRAKLLSFFEILPPCTVGMEACGSSHHWGRQLRKLGHDVRLMPANYVKPYVKRGKTDAVDAEAICEAVRRPTMRFVEIKTEDQQAILSIHRTRDLAVRQRTQSANMIRSLLREFGHILPIGIEAVTAFAKRHLDGDHPDMPEIANGMLGIQCYQFIGLNERIEGYSKMIEQHALLNADARRLMRMPGIGPVTASAIVATIGDAKQFRTGRDLAAWLGLTPLNKSSGGKERLGKITKQGDRYIRKLLVVGMTSRAVMAKRSPEKVDLWTAKIIADKPFRLATVAMANKAARSIWAMLTKKQEYRQPAF

SEQ ID NO: 64736 - protein, 343 aa, unidentified
MEYGAIDLHLRRSQIRIVDEDEGVVLDRRIDTTREALTQVFGARERMRILLESSTESEWVAQHLETLGHEVVVADPNYAPMYGSRSRKIKTDKRDAAALGIACRRGIYRAAHRASRAARTRRQQLRVRRHLVQVRTGLISLLRSTLRQEGLRLPSGSAERAVARLDRLGVPATVAAVVAPLRTTLADLTATLTAIDAAVEAQATGDATAQRLMTAPGVGPILSLTFTAVLDDPARFGGDAGRASAFLGLVPSEDSSAERHHKGHITKTGPGDLRALLVQASWVIWRGRSTAAHALRTWAQTVGARRGRRIAIVALARRLTRILYAMWRDQTPFAPPGRVAVAA

SEQ ID NO: 64737 - protein, 391 aa, unidentified
MIYVGIDVAKDKHDCFITNSNGEVLFKAFTISNNQDGFNVLYQRIESVMEDVTKVKVGLEATGHYNYNLLGYLIDKGLTTYVINPLHTNLYRKSLSLRLTKTDKVDARTIAYMLMSDVNLKSYSDTSYHNEELKSLTRYRFDKVKERAKLKTSVSRLVCILFPELEKLVPTLHMASVYALLSEFPGAKHVAGAHLTRLTNLLSDASKGRYGKYTAITFREAARASIGSNMPAKSLELKHTIKLILELGSEIDEIENEIKTIMDEINSPILSIPGINYRMGAMIIAEIGDFSRFDSPDKILAYAGFSPSTYQSGQLDSAYSHMEKRGSKYLRYALYNAAKYVCHWDTIFAGYLAKKRAEGKHYNVALSHAVKKLVRVIYHLVKSNQQYIKVA

SEQ ID NO: 64738 - protein, 433 aa, unidentified
MLKLNYMSTLFVGIDVSSKTNAVYAMDFEENKYISSSFGNNQPGADQLVNMIAECMQKHKNLDTVLIVLESTSVYSVHISNFLSTSEVLMPYRPYVFCVNPKAASNYRKSYIGMEKTDPTDAYLIADFGRVGRTKKLEPWRGGQFISLKRLTRHRMHLSECITREKTYMVSNLYLKFSELQLLEGDDKPFGSLYGATSSAVLTEFLSPQEIIDMPEEELLTFLAGKSRNRISDLSKTSELLRKAARDSYRLDKCMYEPLSISLASSFNCIHAYQKEIKLIEQAIEKCINGMNPNALLILQSIPGIGPIWASGILSEIGDITVFHSSDALAKYAGLYWPKGDSGDFTSEDNKMSKAGNPYLRCYLGEAANSVRKHIPEYADFYARKYAEVTKHQHKRALALTSRKLVRLVFGLLVKNQLYTGEKLDTEYNIESN

SEQ ID NO: 64739 - protein, 412 aa, unidentified
MEAVVERCAGIDIGKATLKATVRVQGGARRKTRREVRTFQTTTPDLLALREWLIEEQVRLVGMESTGVFWKPIYYLLEEVVECWLLNAQHLKKVPGRKTDVSDSEWIAELVAHGLVRPSFVPPPPIRRLRDLTRYRSVLTQERTREIQRLHGLLEDAGIKLSVFVSDIMGTSARRMLAALIEGERDPRVLARFAAGRMRPKIADLERALVGNFTGHHARLATKMLAHIDGLTETIGELTSEIDAEIAPVAKARQRLTTIPGVSHRVAEVIIAETGANMTRFATPQQLASWAGVCPGNNESAGRHLGGSTRKGNRWLRAALGEAAAAAAKSKNTYLAARYRRLAARRGSKRAQLAIGHDILIASWHILNRHVDYKDLGSDYFELHTGDRQRKANRLAQQLQTLGYRVTLEPVA

SEQ ID NO: 64740 - protein, 322 aa, unidentified
MAQDDLVVVGIDVAKDKVDACIRAFALRQVFPSAAQGHRKLIAWLRKHKVTKAVMEASGGYERDWAKVLRQAGIEVRIVDPKRVRSFALSAGRLAKNDAIDAEMIAWFAETFSEAPSQRHDAAHEELLALVKARKGLLDLKTRLQSQNEHAAPGPVQKAHARVVKSLATEIAKLEAAISAKIKATPDFAERTEIIESVPGFAETTSANLIAGMPELGQVSNKIAAALLGAAPYDDDSGHRRGERHIKGGRRWVRNAIYMPCLGAATQNNPVLKAFYHRLIARGKPPKVALVACMRKLIIILNSLIARRQKWDPSRYPHSERA

SEQ ID NO: 64741 - protein, 364 aa, unidentified
MMSVQYVGMDVDKQKIVLARLGAGRETRAVEQVIANTPSAVKKYFTSLLGEAEVHATYEAGCFGFGLYRQLSAMGVTVVLAAPGLIPRKPADRIKTDRRDACSLALALRAGQLTGIYIPTEQDESVRDYLRMYESLRGDLRVCKQRVLQFLLRRGLSYDGGGPWTVKHRHWLSALEFPQARDRQTLDMYLSQMQELEAKCEEAAAEVESIAAQDCYRQATKKLTAFKGIKTLIALSFVTDIGDFRRFSSARQFMAYLGLVPSEHSSGNKRRQGGITKAGNSHLRRLLVEAAWHYRSYHPSSRDLIERRRGVDPTVLSYANRAGRRLNRKYLHLLLRGKRSQVAVTAISRELAGFLWGAMTDQVA

SEQ ID NO: 64742 - protein, 354 aa, unidentified
MDRYIGVDAHLQTCTLAVMGPSGRRLKAQVVETNGQALKSFLLSFAGDKHICLEEGEFSEWLYELFVPLAKQVVVVQPHRRSGAKSDAQDAWDLADTLRTGRRATVVYKAPGTYRALREAVTAHRVLTQAMVRTKTQIRALVRARGIRGFGQQLYDPQRRGPWFDKLDAARRQRAEVQAKHLDGQVALVDEAEAWLEKEARACAAAKIVATAPGIGIIRAAQMVTTVLSPHRFRTKRQFWKYCGLAVVEVASAEWEKNPTGQGFRRKRRAQTRGLNRNRNPVLKQVFKGAAITVIQRMPDNPLAKNYRRQVQEEGVDPAMARLTLARQIAALVLAMWKNQEVYDPTRYNGPKTA

SEQ ID NO: 64743 - protein, 286 aa, unidentified
MNDSKLLTADVQAFFGIDVSSQSLDLADFPASLAETFSNDPDGIARLVERLRDRPVSRIVVEATGGYEVPLVVALHEASLPVVLVNPRQVRDYARALGILAKTDRIDAGVLARFAHDIQPPVREFLDENGRKLDALVSRRRQLLELRTAERNRRHQANLPEIQRSIDSVTEILDRQLAEIDEQLARAIQASETWHVKDQILQSVKGVGPATSRVLLAELPELGRLNRRQIASLVGVAPFNCDSGRLHKPRSIRGGRASVRSTLYMAAFNAIRCNHQLRSSTPSSVT

SEQ ID NO: 64744 - protein, 340 aa, unidentified
MKEVSIIGLDLAKNVFQAHGAAADGSVVFRHKLSRGQLVRFFSTQPSCLVAMEACASAHYWARTIGALGHTVKLIPPAYVKPFVKRQKNDAADAEAIAEAAARPTMRFVEPKSEAQQAAAMAYRTRDLLVRQRTQTINALRAHLAEYGVVAPIGVAHVGRLAAVVEGEDSGLPEAVTALGRMLVGQIAALSGQIEKLDKELRRSAGGDATTRRLMTIPGVGAITATALTTFAPPSETFSKGRDFAAWVGLTPRQHSSGGKERLGKTSKMGQRDIRRLLIIGAVAVVKWAARNGAEEGSWLARMMTRKPRMLVAVALANRMARIAWALMRSEEVYRDPAAA

SEQ ID NO: 64745 - protein, 463 aa, unidentified
MDVLYSHVAGIDVHKKQVTVTARTPDPRRAGRREKTRTFRTFYADLLAMGSWLVEQQVTRVAMESTGPYWWPVYAALREAGGPGLVIDVVNAAHVKAVPGRKTDVKDSQWLARLLEVGLLRGSFLPPDEIREIRDLTRYQTKLTEERSREKQRLLKVLEAAGIKLDVVASDTFGVSGRSMLDALVGGERDPHVLAGLARGVLRNKTEDLRLALSGRFTVHHGQMIGFHLARLDHLDQMIGQVKEKIGHCGTPGTSRRVPTGPAGLVAAFAEQIQLLTSIPGISDRVATVIVSEIGVDMSRFPSAKHLAAWAGLAPGNNESAGRRRRARHRKGNTHVQSILIEAALAASRTRTRLGARFHRLHRRFGGKANKTAGKKAAFAVAHTLIKVIWVVLSTGQSYADLGHDYYTRRVNPESHTRRLIAQLEAVSGKKIILVDHDDGPPAPHDSSHSDVPEAHHSGGAAA

SEQ ID NO: 64746 - protein, 358 aa, unidentified
MYLGIDVHKRYAQVAVMDEAGEIVEEVRVENANLDDLAQRYAGAQAAIEATSNYYHIHDTLSEHLDVTVAHPKELNQIADTDKKTDRVDAKELARMVRLNSVPESYVPTDEIREARALVRGQQSLVEDRTEYANKIHGLLSDHGITEDVKPLTDKGREFLRELSLPKPWDSVLTSYLEVIKTLTEEIQRLEVAIEERAGSLKETQLLMTIPGVSYYTALTIYAELGEIDRFDGDKEVVSYVGLNPEIRESGDSRIEGSISKRGSSRVRWLFVQVAHTAVHTCKDEYLSRFYDRLASRKNSQKAIVATARKMLVSIYYMLDREEVYDPPGVSAQTSELRTAERAVLSGWPRPSVSDIYR

SEQ ID NO: 64747 - protein, 387 aa, unidentified
MSEMFNPHAPATAYDHSTTIVAVLELSGKNWLLGAVAPGLSRRTKRSFEARDVEAVVRAIEQVKAESAKAGFEIARIVVGFESGRDGFWIARALQQRGLEVYVMHAASIAVERRGKRAKTDRLDVDLLLTTLMGWLRGEPGRCTMAPIPSEEEEDLREPGRRRETLIRSRLMVENQISSLLIRHGIAGFKPRLKNAEKKLGEQRTFDGRPLPANTMKSLGLLLAQHRLLSTQLHEIEAARQQVVKVAKPNRLQCMILALARVVGVGVETAIVLVCEVFSRYFKDRRALAAFVGLTGTPYDSGGSKTEQGISKNGNPRVRRMLSQLAWRWLMYQPESALARWYRTRLGGAKGRMKKVLIVALMRKLLIALWRLAETGEIPAGVRLAAS

SEQ ID NO: 64748 - protein, 315 aa, unidentified
MADNERFIGIDVASTHVDVCVRPSGEAKRFATDDGLEDLVAFIREHSPTLVVMEATGGYETPVAAAIATAGVAVAIVNPRQVRDFAKAAGRLAKTDTLDAAIIAQFADAMRPAARAMPDEETRELNELVVRRRQLIEMRVAEQNRLRVNASKKTKKDLEEHIKWLQKRIKDHDKDISQRVRASSIWREKDDLLQSVPGIGNVFSATLITSLPELGTLDRRAIAALVGVAPYNCDSGKMRGKRAIWGGRADVRAVLFMATSSAARYNPRLSALYKRLVAAGKAKKVALIACMRKLLTIANAVLRDGSPWEPERNLT

SEQ ID NO: 64749 - protein, 391 aa, unidentified
MGVLRRVVIGMDPHKRSVTVEVMEADERIVGHCRFGTDVAGFAELVAFAGQWADRVWAIEGCEGIGRHVAQRLLAAGEQVVDVPAKLSARMRMFATGQGRKTDDTDAHSIALVGVRISGLQPVVSDDQLEMLRLLVDRRRRIGQEHVTKICQLHQLLLEIVPGGAKKDLSAAQARKILAGVRPGDEVGKLRKRIALELVVDLERIYARKKQANKELVTLLKTTGTGLVDLHGIGPTGAARLLVEVGNITRFPNRGHFASWTGTAPIDVSSGDRQHHRLSRGGNRQINMVLHMMAVVQLRNRTEGRAYYDRKVAAGKSPNEAMRCLKRRLSDIVYRALLDDYVTAKATGPGGHRGTTHQSSVAGSHPHTSTSDKPLPGPVTRKPTTTLPKAS

SEQ ID NO: 64750 - protein, 583 aa, unidentified
MDAAVSPLPADIEALKALVRRSTQRADAAEQRATSAEAELANARARESATEALISHYKLQIAKLRREQYGPSAGRTRRLLAQMEFELEDLEADAAEDDLAAETAATKATNVTAFERKRSVRKPFPDQLPRDRGVVPAPCSCPACGGMRLSKLGEDVTETLEVIPRTWKVIQTVREKFSCRDCEKITQPPAPFHVVPRGWAGPSFLAMLLFEKYGQHQPLNRQAERFTREGVPLPDRRDVALEKEEHMTDVHILAIDLAKRSFQVCATAAGGAVLFNRMVSRAKLETVLREQTPCIVAMEACATSHFWGRLAQGLGHEVRLIPPIYVRPFVKRQKNDAADAAAIAEAALRPNLHYVAVKSAEHQARAVAFRTHQLFVGQRTQLINALRGHLGEFGLVVAQGPTGLEAVAGMIDADETELPDAVCDIVRLYLDQIAVLTQKIDDLHFKLRAATKVDDAMRRLCTVPGVGPVTAGAIMAFAPDLRAFASGRNFAAWLGLVPRQRSTGGKTRLGGVSKMGQADIRKLPIVGAMSRIRWIIRRGVLPDNWLGRVLGRKPRMVAAVALANKMARMIWAMMTHEQNYRMA
